United States Patent Application Publication US 2021/0199660 A1 - sequence listing, part 68

SEQ ID NO: 981169 - DNA, 120 bp, Artificial Sequence
  ENSG00000240591_7 (sequence is synthesized)
taatccctggtatctgggaataattagaagatgtgaataaagattttactatacaaatatggtaaagaatatgaacttaagtagctgaataacaagaaaattgtctctggagttcatcca

SEQ ID NO: 981170 - DNA, 120 bp, Artificial Sequence
  ENSG00000240591_8 (sequence is synthesized)
tttatactgtcacccacaatacatataaattaaccacaagcctgctttttccagtaacaaatagcatatcaataattaaggaacacacaaaagcatcaaggaccaaatgactactaaaga

SEQ ID NO: 981171 - DNA, 120 bp, Artificial Sequence
  ENSG00000240591_9 (sequence is synthesized)
atttccaacttactcagaatacctttttaaaaatccttttattgtggtgggaaaaagaagaaaaaaaaaggagaaaagggtggggggtttgtgtcagatacttacgctgactttgggctg

SEQ ID NO: 981172 - DNA, 120 bp, Artificial Sequence
  ENSG00000240591_10 (sequence is synthesized)
agaaggcaaagtcccacttgccttcattgtgctcactagcttgttgaacgcagtcatgtctccgtctttcttcagttgtcgattgttggttacggcactcaaggtctcttctaggtgttc

SEQ ID NO: 981173 - DNA, 120 bp, Artificial Sequence
  ENSG00000240591_11 (sequence is synthesized)
tgccatgaagggagttgaattcttcacttgctggtcaaccttcaagcccttcagacctgcttctacctcctccactgaaagcacaacccctgaatgtgctgagaagttgagaacgtccag

SEQ ID NO: 981174 - DNA, 120 bp, Artificial Sequence
  ENSG00000240591_12 (sequence is synthesized)
gttaaatcaagcaaagagatatctgtcccgcaggtccttatcgctaagacggtgatccttctcaaaggtccgggcagagattatcctcccactgccaatcctacgtccaccaagcagacg

SEQ ID NO: 981175 - DNA, 120 bp, Artificial Sequence
  ENSG00000240591_13 (sequence is synthesized)
aagcccatcactatctttctctaatggacttcctgagcgccgggagctaacagcggctgtcacgtggcagccccctccaaagctccgtctctgagggctgagaacaacatctaagtcatc

SEQ ID NO: 981176 - DNA, 120 bp, Artificial Sequence
  ENSG00000240591_14 (sequence is synthesized)
ttctttcacacgctctcgtggatctggaaggacgtgggaaagacaaagttaaacaaaccaacaagggtgttttcttcttttttagatagtatgtccatgactgatgggaggaaggggatg

SEQ ID NO: 981177 - DNA, 120 bp, Artificial Sequence
  ENSG00000240591_15 (sequence is synthesized)
gttggaagagagtcaccactaaaattgggcttatcagcagattcagggtaacatgtacattatgtatttaaataaggctgagacattggccttcctctttgcagcaatagaagtacgtca

SEQ ID NO: 981178 - DNA, 120 bp, Artificial Sequence
  ENSG00000240591_16 (sequence is synthesized)
cgataaataattttccatgattagtctttgcagtgcctttattttgaccaaatccttatctaagaattattagcaaatgttttgtcaactaataaactacagcaggcgtatttgaaaaaa

SEQ ID NO: 981179 - DNA, 120 bp, Artificial Sequence
  ENSG00000240591_17 (sequence is synthesized)
gtgctgggatcacaggcgtgagccaccgtactcatcctgaaactaagtttgagagaaggcaaatcacaaacaactgacctgggaaggcctaataccatgatgaagaagtcccgcaggtcc

SEQ ID NO: 981180 - DNA, 120 bp, Artificial Sequence
  ENSG00000253859_0 (sequence is synthesized)
ctcactctcaccagagccctccaacagcactgagtgtatttccaggaagcctgtgaccagggctgagaagttgccccagaccacgagccgccccattgagaaagcaagcagactcacagt

SEQ ID NO: 981181 - DNA, 84 bp, Artificial Sequence
  ENSG00000253859_1 (sequence is synthesized)
gaggatgcagccagaacatgccatttatggaccaggaaaccagtcgtcactagaaattgaatctgccacaccttgatcttggac

SEQ ID NO: 981182 - DNA, 120 bp, Artificial Sequence
  ENSG00000253859_2 (sequence is synthesized)
aaaaactaaatagatcatggcagatggtgacaaactaccatcaacttaaccagatgaactcgccaatctaagctgatgtgccagatgtgatacctttactagagtgccaagcacattcgg

SEQ ID NO: 981183 - DNA, 120 bp, Artificial Sequence
  ENSG00000253859_3 (sequence is synthesized)
agagccagggtgtgcttgtcgaagagatattctgccgagccagattcgggcgctcccatcttgcgcaagttggtcacgtggtcactcaattctttgatggctttcacctgctcattcagg

SEQ ID NO: 981184 - DNA, 120 bp, Artificial Sequence
  ENSG00000253858_0 (sequence is synthesized)
tttgaaatttctgccagttgggtggtgtctgcggctgctgctgggaaaatggggagtagaggcttgcaggtagatcagctggaatacatggcacaggtgacactggaatccctgacctgc

SEQ ID NO: 981185 - DNA, 120 bp, Artificial Sequence
  ENSG00000253858_1 (sequence is synthesized)
taatgaatgaaaacagggcctgatgtccactgagttgagcaacagggcctttgttactgcaaggacgttgtccccacctccggctgtgttaggatcacagaacacctgtcaccagggaac

SEQ ID NO: 981186 - DNA, 120 bp, Artificial Sequence
  ENSG00000253858_2 (sequence is synthesized)
aaaatgaaagaaaaatgaagcaaaaagaagaagaagaagaaggaggaggaggaagaggagaaagcaaagtgatgaggtggagaatggacactctctctcccttctggccacaactcaatt

SEQ ID NO: 981187 - DNA, 120 bp, Artificial Sequence
  ENSG00000253858_3 (sequence is synthesized)
cccccaggctgtctaagtgcatcctacttctcctttgtcacattcatcagtcatcacgtcacactcattgtgaagtattctcattatcattgcgtcttgcatgccagtagactgaaagct

SEQ ID NO: 981188 - DNA, 120 bp, Artificial Sequence
  ENSG00000253857_0 (sequence is synthesized)
agccccagaccagccctacaggagtttgctccaagcgccactggcctggcccagcacacagatctcccagaaaggaaaataaaagcaccttgaggacagagctggaagtagtctacctgg

SEQ ID NO: 981189 - DNA, 120 bp, Artificial Sequence
  ENSG00000253857_1 (sequence is synthesized)
caagctcaatgtcctgagcttgctggtactcagaaaatgtttaggaacttctttttacattgagggtagtgcttatgggcaaaatgaatgcccatgggcctagccctgagatggctggac

SEQ ID NO: 981190 - DNA, 120 bp, Artificial Sequence
  ENSG00000253857_2 (sequence is synthesized)
agcaagaaaggagaaaggacagcatgggcaattttccacacatgttttaagtttacagggggaaagagaccaagagaataagatcaagtcaaatcaaacccatgtataataataccatta

SEQ ID NO: 981191 - DNA, 120 bp, Artificial Sequence
  ENSG00000253857_3 (sequence is synthesized)
gtcctttatagccaccatctgaaaaaacagaaaagggcaggatgagcagcgctcaaaacctcccactactgctgctgtctgtccggtcctagacaagttgtctgcatttgttagatgtgg

SEQ ID NO: 981192 - DNA, 120 bp, Artificial Sequence
  ENSG00000253857_4 (sequence is synthesized)
acgaatagtagtaccaacttctaatgttgcagtggggattggaccacagccccagaccagccctacaggagtttgctccaagcgccactggcctggcccagcacacaggttgcctcgtcc

SEQ ID NO: 981193 - DNA, 120 bp, Artificial Sequence
  ENSG00000253857_5 (sequence is synthesized)
acctttcctgaattctgtcggcattgagacccatctcctctttctctgtctctctttgcctgaccctcgtccattctcctagtgggcaggatgctgtcagctattgctatttggagggtg

SEQ ID NO: 981194 - DNA, 120 bp, Artificial Sequence
  ENSG00000253857_6 (sequence is synthesized)
agatgacccctgagtagaaataactcctataagttcagaggttcagcctttaacaaactcacattcctgtttgactgacagatctcccagaaaggaaaataaaagcaccttgaggacaga

SEQ ID NO: 981195 - DNA, 120 bp, Artificial Sequence
  ENSG00000286624_0 (sequence is synthesized)
aggggcccctttaaagggtgatatcaatagagatggatcagacaacatctctatggcaacacctccacggaaaaatgatggcggccacagcaagacgagcgatgactattttttttaaat

SEQ ID NO: 981196 - DNA, 120 bp, Artificial Sequence
  ENSG00000286624_1 (sequence is synthesized)
atacacaaatacagcactacgcaccccaaagcgccctttggctcccaggacacagggctgtgtttaagacaacagcataggagctcatgacaagactaattaggagcacaaggggagtat

SEQ ID NO: 981197 - DNA, 120 bp, Artificial Sequence
  ENSG00000286624_2 (sequence is synthesized)
gcaggctcaggaccgagagtttgacaatgaattaagacctggggctttgggatactgaaatttgtcaacaaaattaacattccctttcctggaaactctcaagctgaaggagtttacgag

SEQ ID NO: 981198 - DNA, 120 bp, Artificial Sequence
  ENSG00000286624_3 (sequence is synthesized)
gaccttattttaagtgtccaacttggagggaattatcagagagagagagcgagagacggtaaaaacaaacagtagccgccatcagccccttcaacagcactgtaaacctagccaaggatg

SEQ ID NO: 981199 - DNA, 120 bp, Artificial Sequence
  ENSG00000286624_4 (sequence is synthesized)
ggttcccgcccactgcttctcacagccgttctcctctgatgccttcgcagatcggaatttggggaaggagtggcctccatgacctcaacatcagaagcctagagggtctttgtggcttaa

SEQ ID NO: 981200 - DNA, 120 bp, Artificial Sequence
  ENSG00000286624_5 (sequence is synthesized)
agggctgtgacacgtgaagtactggctgccgattgtagaggagagattcctgggcaagtgcagagttatatagagtgccctttctacctgacacacgaaagaaatgagctgtaacagacg

SEQ ID NO: 981201 - DNA, 120 bp, Artificial Sequence
  ENSG00000286624_6 (sequence is synthesized)
tcattggaaaattgaccgcagctgatggcttctgtcatttgtgctgttgtttggagggcagggctctgcgtcgctttgtcaggccgcacagggaatgcgccacctccggcccgcactgtc

SEQ ID NO: 981202 - DNA, 120 bp, Artificial Sequence
  ENSG00000286624_7 (sequence is synthesized)
tgcctacccagacccacaaggctcctcaaagcctcctcaccaagggctgactcttttgccttgttctttctttttctttctgtttattctttcaaaacatgtactccttttaggcagttg

SEQ ID NO: 981203 - DNA, 120 bp, Artificial Sequence
  ENSG00000286624_8 (sequence is synthesized)
cgagaacttctacaataatctgtgttctaaattttaggagccacaataaaaacctctctttttttcctgcattgagacattcttaaagttaaacacatacaaattagatgattaaaataa

SEQ ID NO: 981204 - DNA, 120 bp, Artificial Sequence
  ENSG00000286624_9 (sequence is synthesized)
taatttatattggtttctctatctcactaatatatattagttaaaatgtctgaaagggctacgaaaaagcatgaataaagactcaaaacatttcattcaatttaagaaaacaacattaca

SEQ ID NO: 981205 - DNA, 120 bp, Artificial Sequence
  ENSG00000286624_10 (sequence is synthesized)
ttcagaagcaattaattcaattttgcttactccatacattttcattttattttaatcaattatctctccaacattattgcaatataatgctgtaataaactatatttgttttaaatagaa

SEQ ID NO: 981206 - DNA, 120 bp, Artificial Sequence
  ENSG00000253855_0 (sequence is synthesized)
gttttgacagtagttttgtttacctttctctttttaaaaatgttgcctgtttttgttctttttttcttttggctcttcagaatatttattcatttttcacatagcatatgaaagggaaag

SEQ ID NO: 981207 - DNA, 120 bp, Artificial Sequence
  ENSG00000253855_1 (sequence is synthesized)
tgactactgaatttaaaaatgaaatttttttaggaatgctgaagtctttcaaaagttactgaacatctattatatgctaacttctgaaaaactgaagttaaatcagagccacttcactgt

SEQ ID NO: 981208 - DNA, 120 bp, Artificial Sequence
  ENSG00000253855_2 (sequence is synthesized)
ctgctggagcatagcaatgcccagatttgtgtttacatgtgaattcaacctgatcagtgccacgggagtctgaagagggagggtttcatcagaaccatccaaggaaatcctccgtgaacc

SEQ ID NO: 981209 - DNA, 120 bp, Artificial Sequence
  ENSG00000253855_3 (sequence is synthesized)
aatggtgcattatttatttttcagctctgaaaatgaatacaatgtctacaattcatcaagtcttcttcataatgttgaaatatttcttaatgtctgtcaggaataaacactcaaaaacgt

SEQ ID NO: 981210 - DNA, 120 bp, Artificial Sequence
  ENSG00000253854_0 (sequence is synthesized)
agctagtaaatagcagaatcaggattctgactgactgtgtaatgtaatcactaagctatgaaataaatgtaggttatgtaagcttgctttatgctgatggttttagttaaatgcaaataa

SEQ ID NO: 981211 - DNA, 120 bp, Artificial Sequence
  ENSG00000253854_1 (sequence is synthesized)
ttctgattggccaactaacattagagcaagtaaatatcaaagactggtcctcaatgagcaattctgtaaatatccaaccctcttaccttccaaacggaaaaaatgaaggtacgaaagtat

SEQ ID NO: 981212 - DNA, 120 bp, Artificial Sequence
  ENSG00000253854_2 (sequence is synthesized)
ttatgctgaagtaactgttcaagacatactttccccatctcatctctaatatagaagtgaaaaaagccatgtaatcccacatataacaagagttctgtattaataaaatatggaagtgtc

SEQ ID NO: 981213 - DNA, 120 bp, Artificial Sequence
  ENSG00000253854_3 (sequence is synthesized)
tagcctggcaacagagtgagactccatccaaaaaaaaaaacttgattatcaagctttcatctgtcatttataaaataataaaatagcaaacgtttatataattactttgagtcagctact

SEQ ID NO: 981214 - DNA, 120 bp, Artificial Sequence
  ENSG00000253854_4 (sequence is synthesized)
aacgtttatataattactttgagtcagctactgatctttgcattttaactatatcattttaatcctctcaataactttgataaaagtacttatttctgatttctgtggatgagaaaactg

SEQ ID NO: 981215 - DNA, 120 bp, Artificial Sequence
  ENSG00000253854_5 (sequence is synthesized)
aagcacagtgaggttaagaaacttcccagagatctcatagctagtaagtagcagagctggaagtctgatccggaagtctgactacaaggcccattatgctttaatcctctctacattaga

SEQ ID NO: 981216 - DNA, 90 bp, Artificial Sequence
  ENSG00000253853_0 (sequence is synthesized)
ccattcctgcctggcaccacagggatccaacgggagaggaacagagggtaaaactacacggacaattcgaacagcgtgagaagtctcctg

SEQ ID NO: 981217 - DNA, 120 bp, Artificial Sequence
  ENSG00000253853_1 (sequence is synthesized)
acagcgtgagaagtctcctggccagaactcgggggaggacacaaatctcctgcacagttaatatccagagtcacacgtggagaggaagcatcacaatgagaccatacaaccatataatct

SEQ ID NO: 981218 - DNA, 120 bp, Artificial Sequence
  ENSG00000253853_2 (sequence is synthesized)
tagaaggtgttggcagagctgcaggactgacctaggtcaatggctgtgggtgtctgctaacagatttaactgcctgccacctgagcactggagccaccacagtactcaatcaagacagga

SEQ ID NO: 981219 - DNA, 120 bp, Artificial Sequence
  ENSG00000253853_3 (sequence is synthesized)
tttggggtttctacagccagcatcactgatggtgacagagacacactgcttcacacacagctggctttcctttttttctgaggtaccaagtgtttgccaccaacagtgtatctaagacac

SEQ ID NO: 981220 - DNA, 86 bp, Artificial Sequence
  ENSG00000253853_4 (sequence is synthesized)
aggtaccaagtgtttgccaccaacagtgtatctaagacacaatgtctggctagtcttttgctattagaaaggtgcagcaaaggcag

SEQ ID NO: 981221 - DNA, 120 bp, Artificial Sequence
  ENSG00000253853_5 (sequence is synthesized)
agaggaaggagagatcatggcggacgggaggcaagactagcctgcagctctggacagagcagcgagtgggagctcgcattgtaaactttagctccagatggacggcaaaaacaaaccagc

SEQ ID NO: 981222 - DNA, 120 bp, Artificial Sequence
  ENSG00000253853_6 (sequence is synthesized)
aatccccagaggacccacagaccctctgaaggaagtgggctgctcctgcaggacccgggagacccccaaaactgtgagtgtccagctgccgaagtgggaaagggaaaccctcctctccgg

SEQ ID NO: 981223 - DNA, 120 bp, Artificial Sequence
  ENSG00000253853_7 (sequence is synthesized)
aacagacaccccctgagaagtctatttgtgggagaagtttccgactttacctggagctgagtcagtctggagagctgactgaaatacagggatagaggaggcagcagcaaggccctggga

SEQ ID NO: 981224 - DNA, 120 bp, Artificial Sequence
  ENSG00000253853_8 (sequence is synthesized)
ccctgtcttcctcaatcgtggaagctagggattttaatcagctttgggatagattgccctttgctatagtcacatgtcctctgcagtgctgtgaacacctcctatgtgaggcaatgcatg

SEQ ID NO: 981225 - DNA, 120 bp, Artificial Sequence
  ENSG00000253853_9 (sequence is synthesized)
accagcaaggttgggaatccagtgataagcctcagagtaaatgcttcctatcaaatgtgataaagtgatcttgtaaactgaacaattcctatagaaaaatgtatgtcactcaagacttat

SEQ ID NO: 981226 - DNA, 120 bp, Artificial Sequence
  ENSG00000253853_10 (sequence is synthesized)
ggggtttcttcaaggagataatctcgtttaagtttgaactcaggctattatgtgccagtctgtaatagttttgggaaaactgtatttatttttgtttgaatattggatcccactggagat

SEQ ID NO: 981227 - DNA, 120 bp, Artificial Sequence
  ENSG00000253853_11 (sequence is synthesized)
tagaaacagagatgacaaacactgtaagagatacataggtatatagatagatcgatctgatctcctctactcaggtcatagaaaaaactgtatttatttttgttggagtatttgatccca

SEQ ID NO: 981228 - DNA, 120 bp, Artificial Sequence
  ENSG00000253853_12 (sequence is synthesized)
ctggagattagaaacagaggtgacaaacactgtaagatagatagatatctgatgtctttcccccaggtcatagaaaaaaaaacccaaaagatcttaaagtagtttaatgcaggccaccct

SEQ ID NO: 981229 - DNA, 120 bp, Artificial Sequence
  ENSG00000253853_13 (sequence is synthesized)
agactactcttgcagtagaatcacatggaactaaatcactcaaccccaggaagtgctccattgtttaggactgaggtctgatgtctttgggaggtcaaagggtgtatattggtgtcacca

SEQ ID NO: 981230 - DNA, 120 bp, Artificial Sequence
  ENSG00000253853_14 (sequence is synthesized)
tgtgtggggtagcttgggggtggccctgaaggaaattgtttgtattgtcactttctgagggaggccaatcctgaggcaagaaaaaaaaggaattgagagtgggagttatatagagatatg

SEQ ID NO: 981231 - DNA, 120 bp, Artificial Sequence
  ENSG00000253853_15 (sequence is synthesized)
cctcaacctatggctaataatgggcatctgcttggccttagccagggtactaggcttggagccaggctcgcatgtggctgaaaaaagactcagaggatgccttgagcattagccctgagt

SEQ ID NO: 981232 - DNA, 120 bp, Artificial Sequence
  ENSG00000253853_16 (sequence is synthesized)
tcagccttttacagtttccagtctaaggttcaagtctctaatatgttttggttgattttttatgtgatgtgaggtaagggtccaatttcattcttctgcatgtggctatccagtttcccc

SEQ ID NO: 981233 - DNA, 120 bp, Artificial Sequence
  ENSG00000253853_17 (sequence is synthesized)
agcagcatttactggagagactattctttccacattgtgttttattaatgcccttgtttaaaattagttgataatagatgcatgggtttatttctgggctattttgtttcattggactgt

SEQ ID NO: 981234 - DNA, 120 bp, Artificial Sequence
  ENSG00000253853_18 (sequence is synthesized)
gtatctgttttatgcccatatcatgctgttttgattactacagctttgcaatgtaatttgaaaccagggaatgtaattctttcagctttgttcgtcttgtgcaagattgctttaggtatt

SEQ ID NO: 981235 - DNA, 120 bp, Artificial Sequence
  ENSG00000253853_19 (sequence is synthesized)
cgggatattctgtgagtccatatgaatttaaggatttttttttctatttctgtaaaaaatgccattggagttttgaaatggattgcactgaatctgtagatcacattcggtagtatgaat

SEQ ID NO: 981236 - DNA, 120 bp, Artificial Sequence
  ENSG00000253853_20 (sequence is synthesized)
attttgacaatatttattcttctggttttttaacattgttctggttttcattttttgtctattttaattctttacatcagtattttatagatttcaatgtacagatctttcacatctgtg

SEQ ID NO: 981237 - DNA, 120 bp, Artificial Sequence
  ENSG00000253853_21 (sequence is synthesized)
gataaatttattcctaagtaaatttttactaccataaatgaattttttcttaatttctacattaagaaaaaagaaagatctcaaataatccaatttgacaactcttggaactagaaaatg

SEQ ID NO: 981238 - DNA, 120 bp, Artificial Sequence
  ENSG00000253853_22 (sequence is synthesized)
aagaacaaagtaagcccaaagttggtagaaggaaagaaataataaagattggagcaaaaacagattgagaagaaaggcaatagaaaagatcaatgaagctgagagtgttttttgttaaaa

SEQ ID NO: 981239 - DNA, 120 bp, Artificial Sequence
  ENSG00000253853_23 (sequence is synthesized)
gataaacaaaactgacaaatctttagctagactagctaagacagagaaaagactcaaataaaattacaaattaatgtggagtcattccaactgacaccacagaaatacaagggttcattc

SEQ ID NO: 981240 - DNA, 120 bp, Artificial Sequence
  ENSG00000253853_24 (sequence is synthesized)
aagactgctatgagcaattatacaccaatgattggaaaacctagaagaaactgataaattcctagaaacatacaatcttcgagaccaaattatcaagaaataaaaaaaacctgaacaacc

SEQ ID NO: 981241 - DNA, 120 bp, Artificial Sequence
  ENSG00000253853_25 (sequence is synthesized)
aataacgagaatattgaattagtaataatttttaaaccctttcaacaaagaaaagtttacgatgagattgtttcatggtgaattctaccaattaatgccgattatcctcaaactcttcca

SEQ ID NO: 981242 - DNA, 120 bp, Artificial Sequence
  ENSG00000253853_26 (sequence is synthesized)
aaaactgacgaaaaggaagtacattcaaactcattttcgaggccacattaccctgatgtaaaagccagacaaggacactgacactatcagaaaagaaaactacagaccaatattcttgat

SEQ ID NO: 981243 - DNA, 120 bp, Artificial Sequence
  ENSG00000253853_27 (sequence is synthesized)
gaacatagatggaaaactcttccacaaaatactagcaaatgattttcaacagcatattaaaagtatcattgaccatgatcaagtattacgttgatgaaattatttttgcaccaacctaac

SEQ ID NO: 981244 - DNA, 120 bp, Artificial Sequence
  ENSG00000253853_28 (sequence is synthesized)
agaatttattccagggatgcaaaaattattactttattattgatataattccacacactgtttttatgtttgtacaaagaggaatcttgatagcaagaaaatagtatgtgtgttagaact

SEQ ID NO: 981245 - DNA, 120 bp, Artificial Sequence
  ENSG00000253853_29 (sequence is synthesized)
atagacaggagtggtcctggatccagaactccagaactgagaccaccatcagctcccctgcctctgggctgatcattcttaccctgactccctcccactgtggtgagcaggtggctgttg

SEQ ID NO: 981246 - DNA, 120 bp, Artificial Sequence
  ENSG00000253853_30 (sequence is synthesized)
agtctcctagagatatccctcgagctgcctgtggagagaaaagagaatattttgttttcaaactttacagaaaaggtctagaattccccctgtattcattttggtcaccaatccatccct

SEQ ID NO: 981247 - DNA, 120 bp, Artificial Sequence
  ENSG00000253853_31 (sequence is synthesized)
gaagcaatgcctacggccaagaagaagggaccacaatgcgaatgcaggcctgactgagatgctcaggcatttttctaggaaggatgaggatttttctaaggaagggacaaggagtgaatt

SEQ ID NO: 981248 - DNA, 120 bp, Artificial Sequence
  ENSG00000253853_32 (sequence is synthesized)
ttcttggtatgtccttcacatcagcaaatctctaatcagatcttcatatagaatttatcattccacaggtgacctgtgaccaagatgcaaccaggagattcctggatgatgaggtcgagt

SEQ ID NO: 981249 - DNA, 120 bp, Artificial Sequence
  ENSG00000253853_33 (sequence is synthesized)
tgggtcagtcaaattctttttctcatcggtgcaagattctaaatcaaagcgttgcatatggcaagacatttcaactttttaaatagcaaaccaagcaatcaaaaactcatatccacattt

SEQ ID NO: 981250 - DNA, 120 bp, Artificial Sequence
  ENSG00000253853_34 (sequence is synthesized)
tcaaaacagcttatagcataaaatctatgtcattagtggatttgtgagagttttttttttttacctatgataaaagaaaaacttcaaccaaattaaatttaaaggagtataattgagcaa

SEQ ID NO: 981251 - DNA, 120 bp, Artificial Sequence
  ENSG00000253853_35 (sequence is synthesized)
agaacgattcgcgaataaggcagctcccagaatcacagcagattcagagagactccagcacagccacgtggtggaaggagattttagacaaaaaaaagagaaatgatgtacataaattag

SEQ ID NO: 981252 - DNA, 120 bp, Artificial Sequence
  ENSG00000253853_36 (sequence is synthesized)
aagtgaggtacagaacagctagattggttacagtttggcatttgccttatttgaacacggtttgaacactcagaagtgtatgagtggttgaattatggctgctgggactggccaagtctt

SEQ ID NO: 981253 - DNA, 120 bp, Artificial Sequence
  ENSG00000253853_37 (sequence is synthesized)
agcgattgttacagggacatgctcctaagttagattttcttttctttttttttttttaaatttcattcagttttatttttatgatttttgctatattaattcttaccaattttaaaccaa

SEQ ID NO: 981254 - DNA, 120 bp, Artificial Sequence
  ENSG00000253853_38 (sequence is synthesized)
ccaacatttttaacctaaatcaattcattttacattattttcaacttaaactgcttatacttacattttccaatacattaaaatataaaattattacaaatgttcacccatgtaagatct

SEQ ID NO: 981255 - DNA, 120 bp, Artificial Sequence
  ENSG00000253853_39 (sequence is synthesized)
ttatctcaagttccaggagtggtagtgggcttacactttgaaaaacatgactagatgcaaaatttgagtattcgtcttgacggcttaaaaacatattaaacatacgctgggcacagtggc

SEQ ID NO: 981256 - DNA, 120 bp, Artificial Sequence
  ENSG00000253853_40 (sequence is synthesized)
aggctggggcaggagaatcacttgaactggagttaagattttcagtcttgtctacctattaagctaggttgcaggtcgtccacaaggactcaaatatagaagcacagagtccttcccaag

SEQ ID NO: 981257 - DNA, 120 bp, Artificial Sequence
  ENSG00000253853_41 (sequence is synthesized)
cacaaggactcaaatatagaagcacagagtccttcccaagccatatttagttcctttaacacttacatagaatggactaaagggtttgtgttgtgtggtgtgtgtgtgtgtgtgtgtgtg

SEQ ID NO: 981258 - DNA, 120 bp, Artificial Sequence
  ENSG00000253853_42 (sequence is synthesized)
gtagcaaatattggcttttaaaaaattactttaaagactttcactcttttctgacaaagcgatctgtgttgaagctcttcctggagggtttaacgcatctggtgccaccacacaccaaga

SEQ ID NO: 981259 - DNA, 120 bp, Artificial Sequence
  ENSG00000253853_43 (sequence is synthesized)
tagagggagattattttccacagttatttgtgtaaagaagatcttagggtggtaggtggtttatacaagatttgaatatggacaggttttctttggttatttaaaaaagaaaacatacac

SEQ ID NO: 981260 - DNA, 120 bp, Artificial Sequence
  ENSG00000253853_44 (sequence is synthesized)
aaagaatctgtgtaattgaggagttatcaggtaagtcattttacgttggggctatgagtctttgtgaggatctaagtgaatattaaccaagtggaaccttacagagtcaggtgtttcaga

SEQ ID NO: 981261 - DNA, 120 bp, Artificial Sequence
  ENSG00000253853_45 (sequence is synthesized)
gaaaaaacttttgatcctgcacaatgttaaaatatcaatgctgtttttattacaatctattaacaagagcagccaaaaaatgacgccagatctctcccatacaggagataatatcttttt

SEQ ID NO: 981262 - DNA, 120 bp, Artificial Sequence
  ENSG00000253853_46 (sequence is synthesized)
ttttctttttcagaaatagtcaatggcattttaaagaaagatgaagggatcaaggctgaggtacattcaaacccagttataacatgatctccaggaactgcacaggaggaagctgtctcc

SEQ ID NO: 981263 - DNA, 120 bp, Artificial Sequence
  ENSG00000253853_47 (sequence is synthesized)
accaggagctggatcagatgctgctcgctgtctacctattgttgacgtcctccttcccacgtggatgcaacgtgagcagtcagaaagtcaaacttcacggaacgacagaggtgccaaaac

SEQ ID NO: 981264 - DNA, 120 bp, Artificial Sequence
  ENSG00000253853_48 (sequence is synthesized)
ggcaactccaccacctgtccgaagatctaagagaacaccagctgtctgacagtggcttgaacattatacattcagcttttcacttacaaatatagctgtgaattcacagggagtaatcct

SEQ ID NO: 981265 - DNA, 120 bp, Artificial Sequence
  ENSG00000253853_49 (sequence is synthesized)
acgtgctggatctcattctcaagtgggaaaattctatagaaaaactgatgtcaaattagccatttgtggtggttgctgaagaagacacaccaagtcagatgctcctgactaagcaaggcg

SEQ ID NO: 981266 - DNA, 120 bp, Artificial Sequence
  ENSG00000253853_50 (sequence is synthesized)
ataccctccaactgagcatggaagccctactgcaataggagggccttcatcatccacactggttagcacttgccacttcttgctgccattgcctctcatacaagaaagtcaagccagtgt

SEQ ID NO: 981267 - DNA, 120 bp, Artificial Sequence
  ENSG00000253853_51 (sequence is synthesized)
agccaaggctgggtcatactacgggaacagcggactgaaggcatccactgccagaccatgaattatcaactgaagccaacggttaatatccagagtcacacgtggagaggaagcatcaca

SEQ ID NO: 981268 - DNA, 67 bp, Artificial Sequence
  ENSG00000253853_52 (sequence is synthesized)
ggtgaaaccccatctctactaaaaaactacaaaccttagcctggcatggtgacgcaaggaggcagag

SEQ ID NO: 981269 - DNA, 120 bp, Artificial Sequence
  ENSG00000253853_53 (sequence is synthesized)
tgacagtctggttttcttgacatcttttcctgtgaccttactcagcctggcttgaatccattgttgaagctcgagaccgtgtctccaggtggagagagaggagacagagagaaggaagtt

SEQ ID NO: 981270 - DNA, 120 bp, Artificial Sequence
  ENSG00000253853_54 (sequence is synthesized)
gctatgggggtttgagccagctgtgacagtgatggatatgcacacagaacacaactctcctcccaaaaccccacagagaagaggcaaacaataggtccacctaagtatcatggcacaaat

SEQ ID NO: 981271 - DNA, 120 bp, Artificial Sequence
  ENSG00000253853_55 (sequence is synthesized)
ctcttccaaatggacattagcctcctggaaacaacagtgactctattagctcctctctgagctattgatcttataactaggaagtggtaaggaaattgctttcccctaaacagagaagag

SEQ ID NO: 981272 - DNA, 120 bp, Artificial Sequence
  ENSG00000253853_56 (sequence is synthesized)
agcggcctgtcattctggatgtgtttggattccacttatctagaacatggcacccagttcaaatggtatagaacttacttgaacagaacagggaaaggcgaggaggcgggaaaacagctg

SEQ ID NO: 981273 - DNA, 120 bp, Artificial Sequence
  ENSG00000253853_57 (sequence is synthesized)
agatgacagagtaagtgcagaaaattcttagaatctttgtgcatgtaattagtctacagcctactatctgcttttgtctaacttcggatttcgaaataaagaaaatcaaacaaaaaagaa

SEQ ID NO: 981274 - DNA, 120 bp, Artificial Sequence
  ENSG00000253853_58 (sequence is synthesized)
agtcctagaaggtgttggcagagctgcaggactgacctaggtcaatggctgtgggggaagaaaagacaccagatgtttccgatcaagagacaagagaaacattcagcgtgaccctagaaa

SEQ ID NO: 981275 - DNA, 120 bp, Artificial Sequence
  ENSG00000253853_59 (sequence is synthesized)
atctttctaaagagatttcacaacactcagctcatgtttcgggtccatgaaaccatctttagatgaatgatgccttgttacctgtgagaggaagtgagcagcgaggagtcctgtcagttc

SEQ ID NO: 981276 - DNA, 120 bp, Artificial Sequence
  ENSG00000253853_60 (sequence is synthesized)
aggaagtgagcagcgaggagtcctgtcagttccggaaggagtatttgggttactgttcttcattgtctgcagttctacaaggtcttgctcagtcgcccaggctgaagtgcagtggtgtga

SEQ ID NO: 981277 - DNA, 120 bp, Artificial Sequence
  ENSG00000253853_61 (sequence is synthesized)
tcaagcaagcctcccacatcagcctcctgagtagattggagacctgttgtgtgttacctttggaaggttttccacagttgagatccagttgctccagcatcatttgttgagtggtctctc

SEQ ID NO: 981278 - DNA, 120 bp, Artificial Sequence
  ENSG00000253853_62 (sequence is synthesized)
agcatggcgttaagaagaactgtgagtgggcattcttgccttatttctactttcagaggaagatattttgttgttccctgttgatatttgcattcagatgttttgtgagtccttcttagt

SEQ ID NO: 981279 - DNA, 120 bp, Artificial Sequence
  ENSG00000253853_63 (sequence is synthesized)
atatgaagggtattatattccattcattatttcattcagttcaaaaaattttctacatttgaccatatatttgtgataaaaagaatgtttagcagtgtatttcaaaaacatatttcaaaa

SEQ ID NO: 981280 - DNA, 120 bp, Artificial Sequence
  ENSG00000253853_64 (sequence is synthesized)
catatgggaattttccaaatttttctggctattcattttctaacttaattgctgataattaagaaagtaaattattatcttgtctgagttaagcattgtatgaatgccagtaaaaagaga

SEQ ID NO: 981281 - DNA, 120 bp, Artificial Sequence
  ENSG00000253853_65 (sequence is synthesized)
agtagagaaaatcatgcaagataaattgggtatataggttcctaaaatgtgatacctgagctagagtggaagaagctgcagctttagaaccagtttagattcttggtttgttttcatctt

SEQ ID NO: 981282 - DNA, 120 bp, Artificial Sequence
  ENSG00000253853_66 (sequence is synthesized)
tccttgactctgggccacttctgtatcaccaacgtttacaatgattgaatgtcactctaggttcatttacttcttattctaaagccaaatatttaggtccattagaggccaacattatta

SEQ ID NO: 981283 - DNA, 120 bp, Artificial Sequence
  ENSG00000253853_67 (sequence is synthesized)
ttaagagctctttagcacccaatgacatttttctttcaaaaagtcaatattttatagaatctaaattaagtgggaaaagagatttaagattcgctatgaatacattctaattatttttac

SEQ ID NO: 981284 - DNA, 120 bp, Artificial Sequence
  ENSG00000253853_68 (sequence is synthesized)
aacattttataacaagattaaacttttggtgagttctgctaaactatgataactacaaatctggaaacctttttctcccccccaaaataattttatcttttaggttctttcttctttttt

SEQ ID NO: 981285 - DNA, 120 bp, Artificial Sequence
  ENSG00000253853_69 (sequence is synthesized)
gttcctctgtttttgctgatacattgagagtagattttagcaattttaaagtaagagggctattctcgtcagtacaagttctcccaggaaaaattttttaaaaatcagacatacttacca

SEQ ID NO: 981286 - DNA, 120 bp, Artificial Sequence
  ENSG00000253853_70 (sequence is synthesized)
atctgcgaataaacttaatagtgatataaaggtaaagtcatgggaggattaaaatctggattaaaatcaagatacggaattctatgaaaataaatatgatttctgatatctttttaaagg

SEQ ID NO: 981287 - DNA, 120 bp, Artificial Sequence
  ENSG00000253852_0 (sequence is synthesized)
cggtggccacggtttccaggaaagaagagagaggcggaaaagttaactttccgccacccacacaaatatttttggccggcgttgtcttcacgctgccaagccaggagggaggagttggca

SEQ ID NO: 981288 - DNA, 120 bp, Artificial Sequence
  ENSG00000253852_1 (sequence is synthesized)
ggagcactccaattcaaggttccctcccaaggaggaaggaggactcccaacccagtcggggagcttgggcaggccctatgcaagcctgagccccacagcacccacctctgtgcaggagct

SEQ ID NO: 981289 - DNA, 120 bp, Artificial Sequence
  ENSG00000253852_2 (sequence is synthesized)
aaacaataatagcagctgccactaactgagcacctgctaggtgctgaacccagccctttacctgacactcctgctgtgtcagtgcagtctatacaggaggaaactgaggcacggagagat

SEQ ID NO: 981290 - DNA, 120 bp, Artificial Sequence
  ENSG00000253852_3 (sequence is synthesized)
tcatgaccctcatctggacacaagctctaaaatacttgagccttggcagaaatggctgatagagtccacagaacacgctgtcctcatctcagagaggagaactctgaacccagaggggaa

SEQ ID NO: 981291 - DNA, 120 bp, Artificial Sequence
  ENSG00000253852_4 (sequence is synthesized)
ggatttacctgcagttgtatggcaagccagagcctaaccagcctaaagaaaccatgggaggagaggctcttaccctctcctttgcagatgtgggcccggctgcctcacactccagagcag

SEQ ID NO: 981292 - DNA, 120 bp, Artificial Sequence
  ENSG00000253851_0 (sequence is synthesized)
cacaactttagtcctatctttcccaatcccaggcatgttaacaatccttgaaaaatcatgctacattactttggaggaaaatacttccagatgaacatgtttcaagacatactagaaaat

SEQ ID NO: 981293 - DNA, 120 bp, Artificial Sequence
  ENSG00000253851_1 (sequence is synthesized)
tattcctatcaaaacatcctttttctgtgtcagctacctcatttctaatgcagtgcacatcaatctaatgtcagtatgaatacacatcaaccaggtgctggctttctaaagtgattcctt

SEQ ID NO: 981294 - DNA, 120 bp, Artificial Sequence
  ENSG00000253851_2 (sequence is synthesized)
ccaagctaaggaaacaaggataacaaggagttttcctgtaccttgattttttcaatatgtgggtttagagttggatgaaagccagcttttaagtgaacctggtaagatttgtaatgacaa

SEQ ID NO: 981295 - DNA, 120 bp, Artificial Sequence
  ENSG00000253851_3 (sequence is synthesized)
tatttaaaatgaaagaaggaaagaataagcttgcctgaaacagaatacactatcatgggcaggagagttatagcactaaggtgtgactctttcacccagaaaatgcattcctacttttct

SEQ ID NO: 981296 - DNA, 120 bp, Artificial Sequence
  ENSG00000259815_0 (sequence is synthesized)
gtcaccagagctcataaaagatgtgtgtgctgtcgcatctatgtgaagtatttccatgacccgagcattgaccacaggactgtgctggaggaaactggatcaaggtaccaagacagatac

SEQ ID NO: 981297 - DNA, 120 bp, Artificial Sequence
  ENSG00000259815_1 (sequence is synthesized)
aaacatacactggaaactaggccgaggattatccaaagggtggttgaaatcaagggttaaagtttggctcaagataaggaagaatcttctaataattaaaactgaccatccaaaaggtaa

SEQ ID NO: 981298 - DNA, 120 bp, Artificial Sequence
  ENSG00000259814_0 (sequence is synthesized)
agtccggggctagggactgggggagtttagacaagaaagcacagaagaagccccaggaagtgatgggagtaggagacagacaaagagggtgtttgagaaatgtttctataggcaaagtat

SEQ ID NO: 981299 - DNA, 120 bp, Artificial Sequence
  ENSG00000259814_1 (sequence is synthesized)
ctcctgcatgggactaaagagacataaaggacgggagcaatttttgaaaatacaagtggatgctagactgcgtttctttgaacatcacatcagcctgagaccagcccacatgaatcatgg

SEQ ID NO: 981300 - DNA, 120 bp, Artificial Sequence
  ENSG00000259814_2 (sequence is synthesized)
cttcaaaggggtgacaggttaatctggcagcagaacttatggaggatgatcagaaagagtagaagaaatatagaggtgaagggatcattggaatagacttggacttggggactgaatcac

SEQ ID NO: 981301 - DNA, 120 bp, Artificial Sequence
  ENSG00000259814_3 (sequence is synthesized)
tgcagagggataaagaaggaggaagagtcccaggtttcagtgcagaatagtcacataggggatgggagatgagactcagcttggatgccttcacctctttgtagaggttgtccagagcac

SEQ ID NO: 981302 - DNA, 120 bp, Artificial Sequence
  ENSG00000259814_4 (sequence is synthesized)
cgtgttgaaaaacattacgaggtcaatctgggaaaatgttatggccaaatggagatctttgccatgagctgcggagctagctctgcctttattgaccctgaacttagggaataacagcat

SEQ ID NO: 981303 - DNA, 120 bp, Artificial Sequence
  ENSG00000259814_5 (sequence is synthesized)
tgttgacggcattgatggcttaaggacatcagcatggaagctgggtttctggaagagagaatgaacttggctgaaactgaagcaatgcacaccgcttttgctatttgtttttgttttgtt

SEQ ID NO: 981304 - DNA, 120 bp, Artificial Sequence
  ENSG00000259814_6 (sequence is synthesized)
ctcatctgtttacagaaaaccttgggtgccttctgaagaggaggttgtagactgactctcagaaatggcatatgaccaaatggacagctgacatctaagtatttatcctggacagctgtt

SEQ ID NO: 981305 - DNA, 120 bp, Artificial Sequence
  ENSG00000259814_7 (sequence is synthesized)
ctccctgtgctctgcactgaaatttaccctgaagtttttctaggtgtagacaaagattggatggtacgttttacgaagtgttactcaattgtgagtatgaagagcaatcatttaattctc

SEQ ID NO: 981306 - DNA, 120 bp, Artificial Sequence
  ENSG00000259814_8 (sequence is synthesized)
aaagttgctcaaacaacaaaggcatctccactctgaactgtgagctccaacagggctaggacctctgctatatccccaggccccagtagagtctgtagtacactaggcaacacctgattg

SEQ ID NO: 981307 - DNA, 120 bp, Artificial Sequence
  ENSG00000259814_9 (sequence is synthesized)
ctaactgcaggaatgaatcagtgtctttttttgtttcctctttcttctgctcaaggagccccaaagttgtgcttaacagtatttaagtacattgttctcaatagaagtctacctgggctg

SEQ ID NO: 981308 - DNA, 120 bp, Artificial Sequence
  ENSG00000259814_10 (sequence is synthesized)
tgggccagaacaaattttattactattgtggcaaatacattttctaactcaaattagcaaatatttttgagcacctactgtgttcatatccttattgaactattccacctctagaaatgt

SEQ ID NO: 981309 - DNA, 120 bp, Artificial Sequence
  ENSG00000259814_11 (sequence is synthesized)
atcctacagatgtacctgctcatatgcacttgtgtaaagggtatgacttggtccattttgtgctgcaatgactgaatatcacagattgggtaatatataataaacagattattattatta

SEQ ID NO: 981310 - DNA, 120 bp, Artificial Sequence
  ENSG00000259817_0 (sequence is synthesized)
actccctattgcctcatccctaccaggtcacagactgatactagctgcctgcccctctgatggaattgaaggtttaaccctacccagtaggtcctccgatactcaagaactccttcccgg

SEQ ID NO: 981311 - DNA, 120 bp, Artificial Sequence
  ENSG00000259817_1 (sequence is synthesized)
gcaattctcctgcctcagcctctcgatgaaaccaacttcataaaggctgtggcatttcttccaagacactacgatgaagatgacatcatcaggagacttagggaaagctacgacttttca

SEQ ID NO: 981312 - DNA, 120 bp, Artificial Sequence
  ENSG00000259817_2 (sequence is synthesized)
atcatcaggagacttagggaaagctacgacttttcaagtaactaaagtgggtgaccctcactactttgtgggctcaatagctgtgtcttcatttataaaaataaaatggtagagactgta

SEQ ID NO: 981313 - DNA, 120 bp, Artificial Sequence
  ENSG00000259810_0 (sequence is synthesized)
aagtccagtataagttcaatgtttctgttaattttctgtcttggtgatctgtctagtgctctgagtaaggtgttaaaatccctaatattattgtattgctgtcaaattctttctttaggt

SEQ ID NO: 981314 - DNA, 120 bp, Artificial Sequence
  ENSG00000259810_1 (sequence is synthesized)
ctagtagtatttgttttgggtgctccaaagttgggtgcatatatatttagaattgttatattctcttgctgacaactgttaatcttctggctctcaaatggtccctttatcattatataa

SEQ ID NO: 981315 - DNA, 120 bp, Artificial Sequence
  ENSG00000259810_2 (sequence is synthesized)
tgaccttctttgtcttttactaccttttttgatttaaagtctattttatctgatataaatatatctatgtctgcttgtttttggtttttgtttgcatggaatatctttttccatctcttt

SEQ ID NO: 981316 - DNA, 120 bp, Artificial Sequence
  ENSG00000259810_3 (sequence is synthesized)
gcaatcaatgtatgtgtctttacaggtgagtttcttataggcagcatatagttggataatgtttttaatcaattctgcccaatctgcattttttaagtgggggatttagtccatttacat

SEQ ID NO: 981317 - DNA, 120 bp, Artificial Sequence
  ENSG00000259810_4 (sequence is synthesized)
tcaaggttaatattgatacatgagtctttattcctgtcatattattgattgttttcaagctgttttataaattctttgtttctttatttttctttttctgtcattgtggtttgatgaaat

SEQ ID NO: 981318 - DNA, 120 bp, Artificial Sequence
  ENSG00000259810_5 (sequence is synthesized)
tctgttgcattgacatttgattcctttctcttcctgctttgtgtgattgctttgtataaacacacgaagtgagttttatatttacctgtgtttttgtgatggtgaatattgagatttcat

SEQ ID NO: 981319 - DNA, 120 bp, Artificial Sequence
  ENSG00000259810_6 (sequence is synthesized)
ttccatgtttaagaccactttgagcatttcctgttgtgctgatttagtgttgacaaattcactcagcatttgcttgtctgggaagaactttcctcttcatttatgaagcttattctggca

SEQ ID NO: 981320 - DNA, 120 bp, Artificial Sequence
  ENSG00000259810_7 (sequence is synthesized)
ggatacaaaatttttggctgacaaataacattttaagcatatagaaaatatatcaagtaatgtaataaacctgtcacccagcctccacaggtactaatcatgtgccatttttgtttcatc

SEQ ID NO: 981321 - DNA, 120 bp, Artificial Sequence
  ENSG00000259810_8 (sequence is synthesized)
tatatttcaacccactcctcacgcccccaactgtattattatttgggggtttttttgtgaaacaatgtatatacattaaaaagtagaatcttaactgtatccttttgagaaaacaatgta

SEQ ID NO: 981322 - DNA, 120 bp, Artificial Sequence
  ENSG00000259810_9 (sequence is synthesized)
aactgtatccttttgagaaaacaatgtacccacataaacttcctccttctaagaataaaattcccagccgggtatgatggcttacgcctgtaaccccagcactttgagaggccgaggcag

SEQ ID NO: 981323 - DNA, 84 bp, Artificial Sequence
  ENSG00000259810_10 (sequence is synthesized)
aatgccactaaaaatacaaaagttagcctggtgtggtggtgcctgcctgtagctcacctacctgggaggctgaggcaggagaat

SEQ ID NO: 981324 - DNA, 120 bp, Artificial Sequence
  ENSG00000259810_11 (sequence is synthesized)
tgacagagtgagactctgtctcaaaaacagaaaaaaaaaaagaataaaattccccacttcacaaccattaatgtgcatatgaatcacatgggaatatgatgtgtcagaggttgaagaggt

SEQ ID NO: 981325 - DNA, 120 bp, Artificial Sequence
  ENSG00000259810_12 (sequence is synthesized)
tgatgtgtcagaggttgaagaggtggccaggaaaagcattttgatggcaggctggagaacatcgtgagaggaaacttcgggcctgttgactgtcatcttggcaataagtgttggatccta

SEQ ID NO: 981326 - DNA, 120 bp, Artificial Sequence
  ENSG00000259810_13 (sequence is synthesized)
gccaaagtgcttggatgcaacatggagccaatcaataaatccatcccccatgcttttcctggccatgaggtaattggcagcctagttcatgtcttgatgggaagctctgccatgtggaag

SEQ ID NO: 981327 - DNA, 120 bp, Artificial Sequence
  ENSG00000259810_14 (sequence is synthesized)
gatcacatctcaggtttcttgacaactggatgacttttgagaacagatctaggacagatctattcttggattgtggacaggcatcagcctactaacatcatatggaacaggtgacatcca

SEQ ID NO: 981328 - DNA, 120 bp, Artificial Sequence
  ENSG00000259810_15 (sequence is synthesized)
aatatgttaagaacctctgacaatgaagagtaaaacacaaactcaattttaaaaggcacgggacctatgaaaacattttatggtaaaagaaatacaaatggtcatttcccatataaagag

SEQ ID NO: 981329 - DNA, 120 bp, Artificial Sequence
  ENSG00000259810_16 (sequence is synthesized)
gcatccaacctcagtggtggtcacaggaaaataaattacaaaaaaagaagttttgtgtgaccatcagttaggaaaatagaatgctagccaggcatagtgtctcatgcctgtaatctcagc

SEQ ID NO: 981330 - DNA, 120 bp, Artificial Sequence
  ENSG00000259810_17 (sequence is synthesized)
actttgggatgctgaggcatgaggatctcttaagctcaggagtttgaggctacaatgagctatgatcatgccctctagcatggttaacagagagtgagacccatttctaactaaataaat

SEQ ID NO: 981331 - DNA, 120 bp, Artificial Sequence
  ENSG00000259810_18 (sequence is synthesized)
aaatgagtgaatgaacatacgtacatacatatatacacactgttttttacaagtgtatagggactgtaaatggccttttaaggcacaattaacaaatatatattgagttgaaagaaacat

SEQ ID NO: 981332 - DNA, 120 bp, Artificial Sequence
  ENSG00000259810_19 (sequence is synthesized)
gttcttgcacgcaggattctacctcctggaatgcatctgatgacactacttgaaaatgtgcatagaaatgcccatgctagcatgttggtggtggacatataaataatagaaaaacaaaac

SEQ ID NO: 981333 - DNA, 120 bp, Artificial Sequence
  ENSG00000259810_20 (sequence is synthesized)
aaaacaaaaagaaaggtacatatatgtgaggaatctttttgattaccctgggtttttaagataatgttcatagaagcaaagcaagtcaaatgaagaacaactgagcaggaaatgaggggg

SEQ ID NO: 981334 - DNA, 120 bp, Artificial Sequence
  ENSG00000259810_21 (sequence is synthesized)
gaaaataccctcagagtaataagattatctcattacacttaagttttgctgatgcttcaggtttcctggctaagttatgcagaagcatctctctctgaaaaccttcttgctgcagaacaa

SEQ ID NO: 981335 - DNA, 120 bp, Artificial Sequence
  ENSG00000259810_22 (sequence is synthesized)
accatgtttagtgtctgtatgtgtctcaacttcccgtctgcacctgggggatgggaaaaagggcatggtccttgcttgtgttttggagtgaaagaaacattaaaggtcttgtaaacttta

SEQ ID NO: 981336 - DNA, 120 bp, Artificial Sequence
  ENSG00000248275_0 (sequence is synthesized)
cgggggccgcgcgggccgggagttgggtgggctgggggacaggcgcgcccgcgccgcccgctccagctgggctagtgctgcacattccggccagcccctcctcaagaccccattcccaag

SEQ ID NO: 981337 - DNA, 120 bp, Artificial Sequence
  ENSG00000248275_1 (sequence is synthesized)
ttccggccagcccctcctcaagaccccattcccaagccccttctcagctccctcgggccggcagagcggctctgatcagagtcttgctcagtcgccaggctgtagtgcagtggcacgatc

SEQ ID NO: 981338 - DNA, 120 bp, Artificial Sequence
  ENSG00000248275_2 (sequence is synthesized)
caaggatcctggctgagctcctgtggaagctgcttcttacactgatgtggtccctcggctggcaggcccttctgcggccaaccaggtgacacctgccagttatgagggacaggtaggaga

SEQ ID NO: 981339 - DNA, 120 bp, Artificial Sequence
  ENSG00000248275_3 (sequence is synthesized)
ggatgggctttccatcagaaaaaaaaaaaaaaaggttttccaaactgcttttctttcaaattttaatcttaagactaacctacattaatttcttatttttatctcataaagtccagaatt

SEQ ID NO: 981340 - DNA, 120 bp, Artificial Sequence
  ENSG00000248275_4 (sequence is synthesized)
tctgataatttcagttcttttccagagtgcaaagaagcattggctcttcaggtattatgtttaacattttgcaggaattgctttactctatagacaaataaactacacatttaagactta

SEQ ID NO: 981341 - DNA, 120 bp, Artificial Sequence
  ENSG00000248275_5 (sequence is synthesized)
gctgttgaaggcccacgggcatgactgcacccctcactaattggtcattggtttggggaggacaccactgtcccagtggaaccttgagcacaccttggagccctcctcttcctctccgga

SEQ ID NO: 981342 - DNA, 120 bp, Artificial Sequence
  ENSG00000248275_6 (sequence is synthesized)
ctttaaggaaattcttggccaggtgtggtgcctcactcatgtaatcccagtgctttaagaggccaagatgggaggattgtttgagccagctgtttgagaccagcctgggcaacgtcatga

SEQ ID NO: 981343 - DNA, 120 bp, Artificial Sequence
  ENSG00000248275_7 (sequence is synthesized)
catttcagccaagtcctgctgatgtttctcctccgatctagctcctcctttccagccttacttctgccactccagatttcacccccatcagcttcagactggataaaaggaaaccatttc

SEQ ID NO: 981344 - DNA, 120 bp, Artificial Sequence
  ENSG00000248275_8 (sequence is synthesized)
tggcacagagcaaggactgtatgtgttctcttctttgttgcatactcagttccttgaccacagtgccaagcacacagcgagcactccctgtgtatctgctgagtaaataaacgaatgaac

SEQ ID NO: 981345 - DNA, 120 bp, Artificial Sequence
  ENSG00000248279_0 (sequence is synthesized)
gcgagactccatctgaataaacaaaaaaaaaccccaaaaaacaaaaaaacaatgtcatggtattagttaaggcaagtgatattcgctaccataacaaaaatctctaaaaatcttatggct

SEQ ID NO: 981346 - DNA, 120 bp, Artificial Sequence
  ENSG00000248279_1 (sequence is synthesized)
taatataattagaatgtactatttgccccggagaattcagacagatgtttgtttctgctctagtcactttccatatagtcattccaagtccagtcttcttccatcctgtggctccgactt

SEQ ID NO: 981347 - DNA, 120 bp, Artificial Sequence
  ENSG00000248279_2 (sequence is synthesized)
cttccaagaccttaaaatcctttctccttccagcagatgcagaaggagagaatgtgtggaggattatgtagaaggatttcacgagcctggcctggagaggacacatcacttccaactcca

SEQ ID NO: 981348 - DNA, 120 bp, Artificial Sequence
  ENSG00000248279_3 (sequence is synthesized)
ttccattaccagagcttagtctatttccagaagattataagcttcatgggggtagatgctttacttcattcatcactgcatctccaacgcctagcacagagtcctgaattacaggctcaa

SEQ ID NO: 981349 - DNA, 120 bp, Artificial Sequence
  ENSG00000248279_4 (sequence is synthesized)
taactatttactgaatgtgaaaacagagctgcttgaagatatatgaggctaattgagcttgtgcatttgttggctattgctgctacagtggatgctgttgttcagtattcagatatcaag

SEQ ID NO: 981350 - DNA, 120 bp, Artificial Sequence
  ENSG00000248279_5 (sequence is synthesized)
aaacaactagccaaagtaaggaggaacgaggggcccatgaagctcagtagagcttgtgataatatttgcaagagaagactacctgccaaactaacttcagaaaaggtgtttctggttgaa

SEQ ID NO: 981351 - DNA, 120 bp, Artificial Sequence
  ENSG00000248279_6 (sequence is synthesized)
atcgtcgtgcccaacattccaccaggttcctcacatgttgaatacatcaaagcctactccacccatctggaatggacaagcagaaatgactcactgtgttttccaattgcactcaagacc

SEQ ID NO: 981352 - DNA, 120 bp, Artificial Sequence
  ENSG00000248279_7 (sequence is synthesized)
tgtctccatatgccctcctcctctgcttgagcagaaggtgaaagaggttgtgttgactgtggaatttggccattgaatcttgaagacaaatgctctttgacttcactacaacatcagagg

SEQ ID NO: 981353 - DNA, 120 bp, Artificial Sequence
  ENSG00000248279_8 (sequence is synthesized)
gcatggagaataatggacaatagagttcaagtggagcaagaactgtccagaatttggggaagaagtcacatatcagtcctggccatgataactggggcacatgtactatatccaagttga

SEQ ID NO: 981354 - DNA, 120 bp, Artificial Sequence
  ENSG00000248279_9 (sequence is synthesized)
tatccttaatttggggaaagttttcttgcctttcccacagcctcccaagccattgacaattcccacattcaaaacattctcattcacatttctgattcactttgggctacaggaacaaca

SEQ ID NO: 981355 - DNA, 120 bp, Artificial Sequence
  ENSG00000248279_10 (sequence is synthesized)
gatgttgagtacttctagggagcaaatccattatagatggaggtaggtcttgcaaacagagaggtagagagctttctcgagacctttggaccaagcagataacatcacaaggtgtacctt

SEQ ID NO: 981356 - DNA, 120 bp, Artificial Sequence
  ENSG00000248279_11 (sequence is synthesized)
atgctaagtgcctgatctctaagaccctccaccagcgtcagagagacagcatgctcacaacatgacagctggtcatacaggtgaagaagaacatgaagaccagcccacccctgaaaatga

SEQ ID NO: 981357 - DNA, 120 bp, Artificial Sequence
  ENSG00000248279_12 (sequence is synthesized)
cagatcaaactcagcttcacaatgtctcttattccatcgctaatggtgtttaaaaacacactttgtcttaaggaacaaggggaactgaccacgtgttcatgacggttcatttcttaccct

SEQ ID NO: 981358 - DNA, 120 bp, Artificial Sequence
  ENSG00000248279_13 (sequence is synthesized)
ctgctttggcttgaccaaactttagtcaggtatctctcctccacaaagattcctagactttggctgtcccccaagtttaagcaagcactgaaacactaaggagcagaacatctgttaaca

SEQ ID NO: 981359 - DNA, 120 bp, Artificial Sequence
  ENSG00000248279_14 (sequence is synthesized)
gctcatcctgaaaatcaactgaccataggaaaaaacactccctattgagatatcctggttttgccacctgctcgcccacactctatgcccttctcctccacaaaggtctggctggttctt

SEQ ID NO: 981360 - DNA, 120 bp, Artificial Sequence
  ENSG00000248279_15 (sequence is synthesized)
ctccctccatacaaaggaaaagcttatttctgtttgattttgagacatttgcagatatctgaggttggcatgttcttcctattgcaatagtctttttgagtaaagtctctctttatctaa

SEQ ID NO: 981361 - DNA, 120 bp, Artificial Sequence
  ENSG00000248279_16 (sequence is synthesized)
tcatcactgcatctccaacgcctagcacagagtcctgaattacaggctcaataactatttactgaatgtgaaaacagagctgcttgaagatatatgaggctaattgagtggatgctgttg

SEQ ID NO: 981362 - DNA, 120 bp, Artificial Sequence
  ENSG00000259819_0 (sequence is synthesized)
cagagtatgatgatgaaaatttatgataagagatatgcttcagtcagaaagatcaaggaagtcttcacacaaggaaacatatcctaaaccaagagctaaagagggagcagaaagaagtca

SEQ ID NO: 981363 - DNA, 120 bp, Artificial Sequence
  ENSG00000259819_1 (sequence is synthesized)
aagtaaaacaacatgaacatagatatccagtgctccaaagttctgattaaacgagaagacccacacctaagtgtattcgacaaatgaatctatttattttcatttctattccatacgacg

SEQ ID NO: 981364 - DNA, 120 bp, Artificial Sequence
  ENSG00000259819_2 (sequence is synthesized)
cataccagtctgcaactatctttacaatcatatcctgtgaagaatacctgaaggtgcctttctgattgacttcttcaatctatatgcagatttgtgctaagccagtaaataatttgtaac

SEQ ID NO: 981365 - DNA, 120 bp, Artificial Sequence
  ENSG00000259818_0 (sequence is synthesized)
agtagggcggggccggggccgggccgcggggcagggacttctgcgcgccgctgctcgcctggcccactgggcttttcgcatctggggatctggggccagtggaggtcagccaggtccgcg

SEQ ID NO: 981366 - DNA, 120 bp, Artificial Sequence
  ENSG00000259818_1 (sequence is synthesized)
agcaacctgtgctcaggccagcggaagcctgactccaggattcggtggtgccacagacagttactgaacgccaattttgtgcctgctttaagcgaacaggacagttcctgaccctcagtt

SEQ ID NO: 981367 - DNA, 120 bp, Artificial Sequence
  ENSG00000259818_2 (sequence is synthesized)
ctttccaggctcttcactactctgcctgccctggaacttctcagatcacgtcagctccctctgcccaggggaaaagctacaaaaggaagagttccaagactgccaaataaagataaacca

SEQ ID NO: 981368 - DNA, 120 bp, Artificial Sequence
  ENSG00000259818_3 (sequence is synthesized)
atacgctttaaaaagtagaatgtattggtttatcagatttggggatgatgcctttcttcaaactgccctttcctgtttcacccaagagacctggtttctaggcccttctccagagtttgc

SEQ ID NO: 981369 - DNA, 120 bp, Artificial Sequence
  ENSG00000259818_4 (sequence is synthesized)
cctgtgtccacatccttctcactgtggtccttgcgactggacattccccttcagctggctcttttttgggagcccacctggcttatccttctctcataacgtttattgaactttatttta

SEQ ID NO: 981370 - DNA, 120 bp, Artificial Sequence
  ENSG00000259818_5 (sequence is synthesized)
cctggcctcctgtccaggctacatctgagaccatgcaggagctgtggagattaacggtaaaaggaacagcacattcaagactcttctaggaggtggggcaagatagccaaatagaaccct

SEQ ID NO: 981371 - DNA, 120 bp, Artificial Sequence
  ENSG00000259818_6 (sequence is synthesized)
ccagtgatcctcctcctcctcttccctggcaggaacaccaaactgaacaactatccacacaagaaagcaccttcatgagaaccaaaactcaggtagcaatcacagtagctggttgtaacg

SEQ ID NO: 981372 - DNA, 60 bp, Artificial Sequence
  ENSG00000259818_7 (sequence is synthesized)
accaaaactcaggtagcaatcacagtagctggttgtaacgtcacatcaagatataaggca

SEQ ID NO: 981373 - DNA, 67 bp, Artificial Sequence
  ENSG00000259818_8 (sequence is synthesized)
gaccacctgaggtcaggagtttgagacctagtatggcagtgcacacctgtagtcccagctactccgg

SEQ ID NO: 981374 - DNA, 120 bp, Artificial Sequence
  ENSG00000259818_9 (sequence is synthesized)
cctgggtgacagagtgagactctatctcataaaagaagaaaaaaaaaggaacaaggcaatgaagagggtaggaaagacagtcttgaattgctaccaccacccctccctcatcctctggca

SEQ ID NO: 981375 - DNA, 120 bp, Artificial Sequence
  ENSG00000259818_10 (sequence is synthesized)
gaattgctaccaccacccctccctcatcctctggcagcacctggctgcctggcatagagagagaatctgtgtgcttatgggactttgcattggaactgagttttgccctgtcacagtgga

SEQ ID NO: 981376 - DNA, 120 bp, Artificial Sequence
  ENSG00000259818_11 (sequence is synthesized)
aagcaactcagggcagaattcagctagtgcccacagaggaagcacttagagaaaccctagccagaggggaatcatccatcccagtggtcaggttctggcgagccccaccaccactggcta

SEQ ID NO: 981377 - DNA, 120 bp, Artificial Sequence
  ENSG00000259818_12 (sequence is synthesized)
aagtgcttcagggtcctaaataaattcgaaaggcagtctaggccacaaagactgcaattcctgggcaagtcctggtgctgtgctgagctcagagcccgtggacttggggtgcacacagcc

SEQ ID NO: 981378 - DNA, 120 bp, Artificial Sequence
  ENSG00000259818_13 (sequence is synthesized)
tagtgagataccagttggggagccaaaggagtgtttatgtcaccagtcccccaaccccaggcagcacagctcacggctccaggagagactcctttcccttagaggaaaggagaggggaaa

SEQ ID NO: 981379 - DNA, 84 bp, Artificial Sequence
  ENSG00000259818_14 (sequence is synthesized)
cgaagcccccttgccaggctctatctcccagatatttctagagctaccatgggccagaagggaacccgctgctttgaaggaaag

SEQ ID NO: 981380 - DNA, 120 bp, Artificial Sequence
  ENSG00000259818_15 (sequence is synthesized)
agtactgggtgaggcccagtactgtgctgccttcaggtgtgacccagtgccttcccagtaatggttgccacagggagagactccttctgcttaaggaaaagagaggaaagagttaaaaag

SEQ ID NO: 981381 - DNA, 120 bp, Artificial Sequence
  ENSG00000259818_16 (sequence is synthesized)
gagttggtcttgcaacttgggtaccagctcagccacagtaaaataaagcaccaagtaggtttctaaagcccggactccatgccctagctcctggacagcatttctaaacccaccctgggc

SEQ ID NO: 981382 - DNA, 120 bp, Artificial Sequence
  ENSG00000259818_17 (sequence is synthesized)
cagaagggaacctgccaccccaaagggtaagacacaagcctggctggattcaccacctgctgactaaagagcctttgggctttgaataaacatcagcaataaccaggcaatagtcaccat

SEQ ID NO: 981383 - DNA, 120 bp, Artificial Sequence
  ENSG00000259818_18 (sequence is synthesized)
gggccttgggcaagacccactactgtgctggcttcaggtttgacacagcacagttccagcagtggtggccacaggggtgcttgtgtcactcctctcccaactccaggcagctcagcatgg

SEQ ID NO: 981384 - DNA, 120 bp, Artificial Sequence
  ENSG00000259818_19 (sequence is synthesized)
agagagagactccatttatttgggagaaagtaagggaagataacaagagactctgcctggtaatccagggaattctctcggatcttacccaagaccatcaaggcagtacctctgagtcta

SEQ ID NO: 981385 - DNA, 120 bp, Artificial Sequence
  ENSG00000259818_20 (sequence is synthesized)
caagagtcacagcatcgctgggtttggggtgccccctaatgcagttacagctgcagtgaccaaatatttacatcacaacactcatttccctttgagtacttggaaaagccttctgaagaa

SEQ ID NO: 981386 - DNA, 120 bp, Artificial Sequence
  ENSG00000259818_21 (sequence is synthesized)
ggatgagtacaaataagcccaaactgtgaaaattatgataaatacctaattattcaatgctctgcattgaccaacagtcacaaacatcaataccatccaagaaaacatgacctaatcaaa

SEQ ID NO: 981387 - DNA, 120 bp, Artificial Sequence
  ENSG00000259818_22 (sequence is synthesized)
tgaactaaataaggcaccagtgaccaatcccagagtgacagagatatgtgacctttcagagaattcactgtcactgagaaagctcagtgaaattcaagatagcacagagaaggaactcag

SEQ ID NO: 981388 - DNA, 120 bp, Artificial Sequence
  ENSG00000259818_23 (sequence is synthesized)
aatcctgccagataaacttaacaaagagatggaaaaaggaactcagaatcctgccagataaatttgacaaagagatggaaataattttaaaaattaaatagaaattctggagctgataaa

SEQ ID NO: 981389 - DNA, 82 bp, Artificial Sequence
  ENSG00000259818_24 (sequence is synthesized)
ataattttaaaaattaaatagaaattctggagctgataaattcaactgatacaccaaagaatgcaccagggtctctaaacat

SEQ ID NO: 981390 - DNA, 120 bp, Artificial Sequence
  ENSG00000259818_25 (sequence is synthesized)
aaaataacaaaaaaggatgaagtatgcctacaatatctagacaatggccacaaatgggcaaatctaagagttattggccttaaagagaaggtagagagaaattaggatagaaagtttatt

SEQ ID NO: 981391 - DNA, 120 bp, Artificial Sequence
  ENSG00000259818_26 (sequence is synthesized)
agagagaaattaggatagaaagtttattcaaaggaagaataacggaactttccaaacctagagaaatatataaatattcaagtacaagaaagttatagaataccaagcagatttaaccca

SEQ ID NO: 981392 - DNA, 120 bp, Artificial Sequence
  ENSG00000259818_27 (sequence is synthesized)
tcagactcccaaagatcaaagataaagaaaggatcctaaaagcagcaagaaaaaagaaacaaataacacacaaagaagctccaatgggtctggcagcaggcttctctgtggaaagcttac

SEQ ID NO: 981393 - DNA, 120 bp, Artificial Sequence
  ENSG00000259818_28 (sequence is synthesized)
aggccaggagagtggcatgacatttaaagtactgaagaaaaaaaacatttatcctagaatagtatatccagcaaaaatgtcctttaaacatgaaggaaaaataaagatttcctagacaaa

SEQ ID NO: 981394 - DNA, 120 bp, Artificial Sequence
  ENSG00000176236_0 (sequence is synthesized)
ctcccggcctcgcctcgcagacgcgacgggccggggaggaagcgctcggagcagtgcaggtttcgttatcctgtgttaggtcactccggagaggggaaagcggcccacagcgtcgcgcga

SEQ ID NO: 981395 - DNA, 120 bp, Artificial Sequence
  ENSG00000176236_1 (sequence is synthesized)
cccggaaacgacacaacgaggcccaatcttttagactcgagtttaggccccggggtggagtctccggaccgggtccccccacccccgctacaggggcagtgcgcaggcgcgagggacgca

SEQ ID NO: 981396 - DNA, 120 bp, Artificial Sequence
  ENSG00000176236_2 (sequence is synthesized)
caaccccagcccctgtcccagtgagcccgtcgccatggaatccctgcagactccccagcaccgcgaaaatcaagataaaagggagaaggagtatggggtaaaacacatgcctatgggcaa

SEQ ID NO: 981397 - DNA, 120 bp, Artificial Sequence
  ENSG00000176236_3 (sequence is synthesized)
taatgcagggaatcttgagcccgaaaagagaaaggcagtaagagttgccttgagttcagcaacagctgcacagaatatcccgtccagtgtccactgtggctgctccaagcaatggagact

SEQ ID NO: 981398 - DNA, 120 bp, Artificial Sequence
  ENSG00000176236_4 (sequence is synthesized)
caggctaccatcggagtcgctgcaaagtcggggacaagtgatgaagcggccgaataacattttaaagctcaggaatctggatctgttgatctacccttggccagaacttagaagacggca

SEQ ID NO: 981399 - DNA, 120 bp, Artificial Sequence
  ENSG00000176236_5 (sequence is synthesized)
ggttgcttctgacctaatgagcctcctccttctccccgctttttccggccttacttgggcccccttccttttcctctttacgtatctgcctccttttctcaatctcctcactgttggttt

SEQ ID NO: 981400 - DNA, 120 bp, Artificial Sequence
  ENSG00000176236_6 (sequence is synthesized)
cctccttttctcaatctcctcactgttggttttgtatcctattttctggtatagtttctgtgatttctttcttttatttattattattattgttgttgagacagagttttgcccttgttg

SEQ ID NO: 981401 - DNA, 86 bp, Artificial Sequence
  ENSG00000176236_7 (sequence is synthesized)
ctatgatttcaattttcatgtttaagtacctatgtagaacctaactgtccataagtaaacacaacaaaaaaaagatttggcttttg

SEQ ID NO: 981402 - DNA, 120 bp, Artificial Sequence
  ENSG00000176236_8 (sequence is synthesized)
gtccataagtaaacacaacaaaaaaaagatttggcttttggtcaaagatcattggaggttacacagggtaaagtgcagtatgatttttatcacaattagaaagattaaaaagagatgaca

SEQ ID NO: 981403 - DNA, 120 bp, Artificial Sequence
  ENSG00000176236_9 (sequence is synthesized)
gtgagtttgtgagaacaggtttgtgtttcataaaatgaattgtgtgagttagctatgatgaactgcaagcagcttgcatttccaaagacaaatagagacacaggaatctaattaaaatgc

SEQ ID NO: 981404 - DNA, 120 bp, Artificial Sequence
  ENSG00000176236_10 (sequence is synthesized)
taaagtaatgggaaggagacatccatacgtttttgtccccctaaggttccagatttatagtttgagcatcatctcggcttacattttctctgtggaaaacatcagccattacattacttg

SEQ ID NO: 981405 - DNA, 120 bp, Artificial Sequence
  ENSG00000176236_11 (sequence is synthesized)
gctctgggttgaaatcctaacttcatcaactgaagatcttatgacctaggcaagtttattaacctcctctatgacgtgataaaaatagtatctcttgtgcggattagaagacatgttcct

SEQ ID NO: 981406 - DNA, 120 bp, Artificial Sequence
  ENSG00000176236_12 (sequence is synthesized)
ctatgctaagatgattattatgtgcggaacacatagttaagtgcttgataaattgaactatggcaaatccagtctcaaccgtggcaaaactaagttaataaaaatgaaacataaccttta

SEQ ID NO: 981407 - DNA, 120 bp, Artificial Sequence
  ENSG00000278925_0 (sequence is synthesized)
agctgtcctttactgggcacccaggagatgcacctgtacaatttcattcattctcacgaccacctcgttaggtaggcactatctctgtggctccatttggccaatgaaaaggatgaagat

SEQ ID NO: 981408 - DNA, 120 bp, Artificial Sequence
  ENSG00000278925_1 (sequence is synthesized)
ctgagaagtcaagttacactgctaggaagaggttgacttggagtggaaacccaggactgcctgtctgactgctgaatgggtgctttgcgttccttacctgccctcccagggctccagacc

SEQ ID NO: 981409 - DNA, 120 bp, Artificial Sequence
  ENSG00000278925_2 (sequence is synthesized)
cctctcccaggccgtgcctgcatgtccccagccccctccaacagctccatctcccgagagctccttgaatctcctcactcactcctcactcttgcttcctctttggaatccagccacagg

SEQ ID NO: 981410 - DNA, 120 bp, Artificial Sequence
  ENSG00000278925_3 (sequence is synthesized)
cttttttcttccatctgagggagagaaaatggtctcgttccccacccccaggtctttccatcctctcatccatccaaacctaagcatctctcactcctcccctccccctctcttattttt

SEQ ID NO: 981411 - DNA, 120 bp, Artificial Sequence
  ENSG00000278925_4 (sequence is synthesized)
tttttctttctgtttatccatcactagaatctaccccccttccctcttgcctgtaggttctgtggctataaacaaatcataacttttattaaatttaagattactttttaatggaatcaa

SEQ ID NO: 981412 - DNA, 120 bp, Artificial Sequence
  ENSG00000132204_0 (sequence is synthesized)
cgtgagccaccgcgcccggcctaataaaggacaatttttaatagccactggactatttaagtgatctcttctgtcagtttcttttaccatcagaggacacagcagcaaggtgccatccta

SEQ ID NO: 981413 - DNA, 120 bp, Artificial Sequence
  ENSG00000132204_1 (sequence is synthesized)
agcagcaaggtgccatcctagaagcagagagcagacccttaccagacaaccaaccagctggtgccatgatcttggacttctcggcctccagaactgcacttaaacacgcagcatgaggaa

SEQ ID NO: 981414 - DNA, 120 bp, Artificial Sequence
  ENSG00000132204_2 (sequence is synthesized)
aatggaacaacaatcttgaggtgccttctgaatcatcagattaaattatgcttcggtcttgcactgctgcctaggctagagtgcagtggtgcaatcagggctcactgcagcctcactcaa

SEQ ID NO: 981415 - DNA, 120 bp, Artificial Sequence
  ENSG00000132204_3 (sequence is synthesized)
cttcccagtctcaagccatcctcctacctcagcctctgttccactaatctacttgtcaatttttccagcaacaccacaccctcctgatcaccatagctttatgactggctttatcccaca

SEQ ID NO: 981416 - DNA, 120 bp, Artificial Sequence
  ENSG00000132204_4 (sequence is synthesized)
cctaaccactaatgacgcaagagacaattctaaggactttcaaaacagcaaagtaggagcagctgctacctctagggatgagggatgcaattgtccaattattggtgaaattgtcatttc

SEQ ID NO: 981417 - DNA, 120 bp, Artificial Sequence
  ENSG00000132204_5 (sequence is synthesized)
atgctattggctatttgaaattcctcctctaatttcagaataaatcactgaaattgacatcggccagtctgaatttcaagaaattacctgctgaagacaagagggatctcttcttcagat

SEQ ID NO: 981418 - DNA, 120 bp, Artificial Sequence
  ENSG00000132204_6 (sequence is synthesized)
ttgcagtctggggaagacacagcctctactgtactttagaacctgagatatggtggtggagggagccctgggtcgagtggtaagattcacccttaggttagtattgacgtaaggtgacga

SEQ ID NO: 981419 - DNA, 120 bp, Artificial Sequence
  ENSG00000132204_7 (sequence is synthesized)
ggagctgtagacaaaagattgtaaccataagaacttcatagtttttgtattttcaccgagcttatatttggtgtgttttttgtcttttctttatgattatcaataaaatgcttgaaagga

SEQ ID NO: 981420 - DNA, 120 bp, Artificial Sequence
  ENSG00000132204_8 (sequence is synthesized)
gtcgagtggtcagagctccggactccagccccatgcaacttcaaaatatgacaaatgtcttgaaggggagattggcatgcagatgaggaaggccctctcgccaacacatttgtatttcct

SEQ ID NO: 981421 - DNA, 120 bp, Artificial Sequence
  ENSG00000132204_9 (sequence is synthesized)
ctgtactgtgagactgtgggagatttactgcgacatttagaagctttcttccaaactcctgggcctccgacactggttctaaactcagcaaatgttctttgggaaaaacagacagtgcat

SEQ ID NO: 981422 - DNA, 120 bp, Artificial Sequence
  ENSG00000132204_10 (sequence is synthesized)
gtgaggcccctcgagtttggaatttatgtctccagcttcacatggtctctcaagtgcttatgcttttcttctctctgccacccacattcccacatcccgcccaccccccaactttcctcc

SEQ ID NO: 981423 - DNA, 120 bp, Artificial Sequence
  ENSG00000132204_11 (sequence is synthesized)
cttcaccttcccatggagactttttgcctgggctaaatctgatcctcagcccactctcagaatcgataaatgcccctaggtgattgtaagctcacctaagatatactttttctcctctag

SEQ ID NO: 981424 - DNA, 120 bp, Artificial Sequence
  ENSG00000132204_12 (sequence is synthesized)
aattttagtttattagatttttctagttgtctttgcaaaagcgttaacaggctctgacttctgacattcaactagatgtggaatatccaacccctagcatttcatggaatgtactgacca

SEQ ID NO: 981425 - DNA, 120 bp, Artificial Sequence
  ENSG00000132204_13 (sequence is synthesized)
agataaaatgtgttcttattaaacaatgccatttcttgaccacttctgtttttaggaattgtggtatctgagtcatggtgattagaagtactaatgaaataaatgggaaaattaaacttc

SEQ ID NO: 981426 - DNA, 120 bp, Artificial Sequence
  ENSG00000132204_14 (sequence is synthesized)
tactaacatttcatatagtagggagatgtctgtgaagaattataactggtacagattttgtgtttataaacaaggagacagaaaatgcagaaaataaaaaatattttatttagttttaaa

SEQ ID NO: 981427 - DNA, 120 bp, Artificial Sequence
  ENSG00000132204_15 (sequence is synthesized)
gttgttattttgtctctaaatgtggaggcagtttgctatacagtgatttctaactgacacaatgtattcacaatatagtgtctttcaatccatgaacgtttaccatcagaggacacagca

SEQ ID NO: 981428 - DNA, 120 bp, Artificial Sequence
  ENSG00000132204_16 (sequence is synthesized)
gaggacacagcagcaaggtgccatcctagaagcagagagcagacccttaccagacaaccaaccagctggtgccatgatcttggacttctcggcctccagaactgtgagaaataaatttct

SEQ ID NO: 981429 - DNA, 120 bp, Artificial Sequence
  ENSG00000132204_17 (sequence is synthesized)
ttctgtagtgtcttgtaatagtagcacaaatagactaagactgtaagaaaatggatttgggtcaaacaagcatttgagtggcgcattaaagaattctcaaataaacccgatattttttgc

SEQ ID NO: 981430 - DNA, 120 bp, Artificial Sequence
  ENSG00000132204_18 (sequence is synthesized)
ccataaatagtagtactttacatcttaagatgcattttaaaaaacgaaaatttagataaaacaacaaatagcgtcagttttctacatggctaatatctggcagaaatctaggaatggcta

SEQ ID NO: 981431 - DNA, 120 bp, Artificial Sequence
  ENSG00000132204_19 (sequence is synthesized)
acatttgaaatgattatttcttaagatgcgatctgtgttctctaactccaattcttggtatgagagagagaggagccatccattgttctttccacattttgatttccaactgagatcaaa

SEQ ID NO: 981432 - DNA, 120 bp, Artificial Sequence
  ENSG00000132204_20 (sequence is synthesized)
aatagtggagcactaggcataaatgccttaaagaaaggactgatctcccctgaagaagagagaattctgcctctagattgcttacaatttgaactggaacatcagctgttctctaggtct

SEQ ID NO: 981433 - DNA, 120 bp, Artificial Sequence
  ENSG00000132204_21 (sequence is synthesized)
taagtctgctgctctaacctacaaattttggacatgccaatctccacagtcacatgggccaattccttagtttctctggagaatcctgactaatgtatgcaatgtctttatttcatcctc

SEQ ID NO: 981434 - DNA, 120 bp, Artificial Sequence
  ENSG00000132204_22 (sequence is synthesized)
aaagacacttttgtgatggaaatccttaaaaagacacaatccattacctcattgggttcaaaaggcaattgtgaactactgtggagtttggaaagaagcaatgaggtaatcaaggatact

SEQ ID NO: 981435 - DNA, 120 bp, Artificial Sequence
  ENSG00000132204_23 (sequence is synthesized)
gttgacaatctagcttatcctatggatggaaggaaattgaaactaatggaggcgaggctggtaaaacaatagggtttgagacaattctgtggcattagaaatgaaagaggaaggtgaatc

SEQ ID NO: 981436 - DNA, 120 bp, Artificial Sequence
  ENSG00000132204_24 (sequence is synthesized)
atctgtgaaatttttccttaggaacttattggcaatttaaaaatgaatttgttaagccatgctggttctgacccaaaagccattccccagccttcctcactcccctctttcactactggc

SEQ ID NO: 981437 - DNA, 120 bp, Artificial Sequence
  ENSG00000132204_25 (sequence is synthesized)
tacaaaaaccattgcatgaaaagtgactggatttgtacatagcgtcaggagatgtgcgtagtgtcaaagtatctcatcacacattacttgataattacaaatgagaaaaatgaaccttca

SEQ ID NO: 981438 - DNA, 120 bp, Artificial Sequence
  ENSG00000132204_26 (sequence is synthesized)
gaaggagaaggatgtgacttaggggtagtttcttctagaaagataaaggaggagaacatctagtgttgacttggaagtgggaatattcaaggagagagagagagagaaagagagaattcc

SEQ ID NO: 981439 - DNA, 120 bp, Artificial Sequence
  ENSG00000132204_27 (sequence is synthesized)
attttctctctcttctctttctgaaagttcaaatagatgattgttagatcccactctgtccttcctatgccttaatctctattttgttttctattagttccctcttcagctatatgtctt

SEQ ID NO: 981440 - DNA, 120 bp, Artificial Sequence
  ENSG00000132204_28 (sequence is synthesized)
cagcaacaccacaccctcctgatcaccatagctttatgatctgagctttcatctggtatcatttcctttccgtctgaagaacttgctttccttgcaacaacaagaaacaaatttattagc

SEQ ID NO: 981441 - DNA, 120 bp, Artificial Sequence
  ENSG00000132204_29 (sequence is synthesized)
tttttttttttgcttttggtggactgtggtttcactagatgtgtgcatgggtagatctcttttttattttgctatttgagatttactgggcttgaatttgtgaattagtgtctttcaaca

SEQ ID NO: 981442 - DNA, 120 bp, Artificial Sequence
  ENSG00000132204_30 (sequence is synthesized)
ttccacttaaaaataagtaatatcccttcagggtttggtacatttcaagatgtctaactttctaattatttagacaaaaaaacaatggtttagctcactaattttcactgcttcttatat

SEQ ID NO: 981443 - DNA, 120 bp, Artificial Sequence
  ENSG00000132204_31 (sequence is synthesized)
cccaaatcttttttttttttttctgagtgggagagaattttcctttgttctgaagtacatcctttcaaacatcatttagtggtggtctcatgtgatcggcttcttggttttgtctgccta

SEQ ID NO: 981444 - DNA, 120 bp, Artificial Sequence
  ENSG00000132204_32 (sequence is synthesized)
aatatgtctattattttataaatgtgtttataaattaaatgtttaattttctgtgtcaacttggctaggtcatgacacccagatatttggccaaacacatctggatattgctgagaagtg

SEQ ID NO: 981445 - DNA, 120 bp, Artificial Sequence
  ENSG00000132204_33 (sequence is synthesized)
atttttttagatgagattaacatttaaatcagtggactttgagtaaagcagattactctccataatatgggtggccttatccagtcagtcgaaggccttaacccgtttatgccagaggtt

SEQ ID NO: 981446 - DNA, 120 bp, Artificial Sequence
  ENSG00000132204_34 (sequence is synthesized)
ggttgatggttattttcctagtgcattgaaggtattattttacaggtttagacttccattgtttctgttaagaaacagcagtttaattgtttttttgttttttctttgaaggtagtctgt

SEQ ID NO: 981447 - DNA, 120 bp, Artificial Sequence
  ENSG00000132204_35 (sequence is synthesized)
gcaagtttggaggtaagaagttgctctggctttttgagttgccaaaatttttgcattagttctttctcatctttgtgggctgtttctttagtctttgatgttggtgtcctttggatgggg

SEQ ID NO: 981448 - DNA, 120 bp, Artificial Sequence
  ENSG00000132204_36 (sequence is synthesized)
atttttactattatactctttgaggcccttgagggtttgattgcagtataagttgggttcagtcaacaggctttatttctggatgatttcagaagatctgggctcaactcagcactcctg

SEQ ID NO: 981449 - DNA, 120 bp, Artificial Sequence
  ENSG00000132204_37 (sequence is synthesized)
gcctgcatgctctaactctgaggagctggaaccaggcttacagctttgttctctggcccctctaggttaagcacttgctgcactggaggagccaaggtatttccagtgtgcctgcaacaa

SEQ ID NO: 981450 - DNA, 120 bp, Artificial Sequence
  ENSG00000132204_38 (sequence is synthesized)
caccctgatgggggtgccagcaaaagcacttcattgggttggtgaggtccacgtgtgcacacatgccatcaaagtggtgggaaaaggctatgggcaagtgtgtgccatcgaaggagtggg

SEQ ID NO: 981451 - DNA, 120 bp, Artificial Sequence
  ENSG00000132204_39 (sequence is synthesized)
ggagactgtgaatgtgtgtacattggtgagggcccatctgctgaagctccttgatggttagacagggtctgccagcagaagaggtatggtagtggccaccgggaagcacccgcattgggc

SEQ ID NO: 981452 - DNA, 120 bp, Artificial Sequence
  ENSG00000132204_40 (sequence is synthesized)
aagtcataacatgggtgtctgggagagcttttatcccacaaaaacaacacttcactcaaaaaacaaaccaaacaaagaaaaattctccttcctgccattggatgtgaggctcagacctct

SEQ ID NO: 981453 - DNA, 120 bp, Artificial Sequence
  ENSG00000132204_41 (sequence is synthesized)
agtaaccattttgtgaccacaaagcaacaagcctgaggaaaagtcctacacgctgagcaacaggcagaaatattgccatcgctgagttgcagaaacaaatctagagatgttttgcttctg

SEQ ID NO: 981454 - DNA, 120 bp, Artificial Sequence
  ENSG00000132204_42 (sequence is synthesized)
taattattttttatgggagattacaagtgggtttactgttcacttttcaaatcttatttctctatgatgtttagcttgggtaaattttaccttaaatccacttttttatgtaaggtaaca

SEQ ID NO: 981455 - DNA, 120 bp, Artificial Sequence
  ENSG00000132204_43 (sequence is synthesized)
tatttgtcggtttcaaggattaagatgtgggcatacttggaggccattattttgcccaccacaggtgaaaaaggaagtgttattcttaaatcatttggaaggatctctgtgtaaatgcaa

SEQ ID NO: 981456 - DNA, 120 bp, Artificial Sequence
  ENSG00000132204_44 (sequence is synthesized)
gagcgagacaagaaaatgctgtcattcttttgatatggactcgaatttccacttcatggttgtctgcttcctttttagagtattatttatcctcctaataaaaagaaagtgaaatttccc

SEQ ID NO: 981457 - DNA, 120 bp, Artificial Sequence
  ENSG00000132204_45 (sequence is synthesized)
tttgattaattggatcctccaccttgcatatatacatcttgcatatatatacacgggctcaattattagatttgtcaggataatcaaataaaaataccaggcacttaaacacgcagcatg

SEQ ID NO: 981458 - DNA, 120 bp, Artificial Sequence
  ENSG00000132204_46 (sequence is synthesized)
aatgtatgcaatgtctttatttcatcctcattcttaaaggatattttcatcagcaacaccacaccctcctgatcaccatagctttatggtaagacacccctactctgtccagacccaact

SEQ ID NO: 981459 - DNA, 120 bp, Artificial Sequence
  ENSG00000132204_47 (sequence is synthesized)
atcagggacaagtcagaaaccacataaataattttaacaagaagaatttaatataaaaattattaactagtaaaagatagctggggaaggcttatagacaccccccacaaaaatattcat

SEQ ID NO: 981460 - DNA, 120 bp, Artificial Sequence
  ENSG00000132204_48 (sequence is synthesized)
atctggaacctgttaatgtgttactctctatgacaataaggatgttgcagagatgattaagttaaagatcttgagaaaattatcttgattatctagatgggctcagtataatcacaagag

SEQ ID NO: 981461 - DNA, 120 bp, Artificial Sequence
  ENSG00000132204_49 (sequence is synthesized)
tcattataaggagaagatggaggcaggagagtcagtgtcagagaaggagatgcaataaaaaaatcagggtcatagtcagacatttgaagatgctatggttctggctttgaagatggaaga

SEQ ID NO: 981462 - DNA, 120 bp, Artificial Sequence
  ENSG00000132204_50 (sequence is synthesized)
tgaggtcatgagccatggagtgcaggcaacctttaaaagctggaaaaggcaaaggaatgctctcctcttgattctccaaatggaatgtaggcctgctaacacattgattttagcccagtg

SEQ ID NO: 981463 - DNA, 120 bp, Artificial Sequence
  ENSG00000132204_51 (sequence is synthesized)
aaatgcattttggatttctgtcctacagaactataaagtagtagatttgtgttacttttaagccactaaatttgtggtagtttcttacagcaacaacaagaaacaaatttattagctaac

SEQ ID NO: 981464 - DNA, 120 bp, Artificial Sequence
  ENSG00000132204_52 (sequence is synthesized)
caatcttgaggtgccttctgaatcatcagattaaattatgcttccaacaccacaccctcctgatcaccatagctttatgcaacaacaagaaacaaatttattagctaacctaaccactaa

SEQ ID NO: 981465 - DNA, 120 bp, Artificial Sequence
  ENSG00000132204_53 (sequence is synthesized)
cacaagtgtttaagaacagaatataatgatgaaggaatatcaataagtatattttttgcattggttatattagtcaaacatggcattacaaaaggagtgtctaatcttccccagatgtca

SEQ ID NO: 981466 - DNA, 120 bp, Artificial Sequence
  ENSG00000132204_54 (sequence is synthesized)
ttataagacatttacctccaccttggaagaatacaaaggactccacttaaaaggcaaatcaagccaaaccttataaagacaagccacagacttcaggttacatgttttgagttctgcaca

SEQ ID NO: 981467 - DNA, 120 bp, Artificial Sequence
  ENSG00000132204_55 (sequence is synthesized)
aaatatttgaatgggtgcttcataaaagatgatatatgaggacttggggcagaacaagatggcagaatagaaggctccgccaattgtccctgcttcaaggacaccaatttaacaactaac

SEQ ID NO: 981468 - DNA, 120 bp, Artificial Sequence
  ENSG00000132204_56 (sequence is synthesized)
aggtgaaaatcaccgagtcttagaaatacagctgagaatgagtaaggagagagagttgctctgcctaagcacattctccctcactgaaggcactttgaagtgacctcaggaagatcacag

SEQ ID NO: 981469 - DNA, 120 bp, Artificial Sequence
  ENSG00000132204_57 (sequence is synthesized)
caccagaacctggagaagtggagacacccactgggcacacaattgagcgaagttgccagcagtaagagaagccgccatttgagactgcaccacacctccctcaagccgtcagaactacac

SEQ ID NO: 981470 - DNA, 120 bp, Artificial Sequence
  ENSG00000132204_58 (sequence is synthesized)
tcccagagaatctcctagacccaagatttctgaggtggaaggagggaattggaggtagacatttgatctctccaccagtcagggaatcttcctgggaagcccactctggtcccgtcccat

SEQ ID NO: 981471 - DNA, 120 bp, Artificial Sequence
  ENSG00000132204_59 (sequence is synthesized)
gggaatcattggaagcaccagaagtgctgaagcacctggggtaaattgggggattaaaagcaggggtggtgattgcagtaactggcatggataccttggcagctgctctacagtctgatc

SEQ ID NO: 981472 - DNA, 120 bp, Artificial Sequence
  ENSG00000132204_60 (sequence is synthesized)
agcagagataccatgctgaggagactggctggtgccacagggttgcagagggcacaataaacaggaaggccagacccctggctggattttcacaaaacccagctgcttgagtgcagcctt

SEQ ID NO: 981473 - DNA, 120 bp, Artificial Sequence
  ENSG00000132204_61 (sequence is synthesized)
cccctgactgggaaacaactgaaaggtcagtaattaagttccactgtttgtttaagtcttccccagacagggcaattagttcctgtgcagtgttttagtcctggtgctcaccataagccc

SEQ ID NO: 981474 - DNA, 120 bp, Artificial Sequence
  ENSG00000132204_62 (sequence is synthesized)
tccccagaaaaggaagccacagcagaccaataattaagttctgattttaagtagtagatatctaaaaccaccaaagaacacctgcaaaagctggaaggggtggctgtctccttaaatgca

SEQ ID NO: 981475 - DNA, 120 bp, Artificial Sequence
  ENSG00000132204_63 (sequence is synthesized)
caggtatcaatgtaaagacacaaaaattatgaaaactcagggaaatatgacactgcctaaagaaaccaacaaagctccaataatggacttggaattaaagatctgtgatatgtccaacaa

SEQ ID NO: 981476 - DNA, 120 bp, Artificial Sequence
  ENSG00000132204_64 (sequence is synthesized)
gctttatggtcagctgtgctaacttgatctctgaaaataggctgtggatggtccttgcccttccggactaacttgtgctgccatgttgtttatagtcattagaaatactgtaaaagcatg

SEQ ID NO: 981477 - DNA, 120 bp, Artificial Sequence
  ENSG00000132204_65 (sequence is synthesized)
cactggtattctaaattctatcttctagcatttgagaattttgtccaagacaatatcctgccaaaatgcttcaacaacagaacaagagaagggaaatggaatcctggaaccagtaaggat

SEQ ID NO: 981478 - DNA, 120 bp, Artificial Sequence
  ENSG00000132204_66 (sequence is synthesized)
ttctgctgagttacagcatctgtacatagctcaatattaaaatattaaaattaaaatactgtaacttagcaagctaatagataaaaagagaaaatgcgtataattatctctttatagcta

SEQ ID NO: 981479 - DNA, 120 bp, Artificial Sequence
  ENSG00000132204_67 (sequence is synthesized)
cgtataattatctctttatagctagaagaaatttgatgaaattcattctctattcttgttaagaactcttaatgcactgcaatgtatttacataaaatatcctgaaaataaaaatataat

SEQ ID NO: 981480 - DNA, 120 bp, Artificial Sequence
  ENSG00000132204_68 (sequence is synthesized)
ctctactgaaggctactcttcttatcaagtaacgtcttctccatgctcttgacccttgccccttcagacctatggatggtaataacctgcccacacctagtttaccatcagaggacacag

SEQ ID NO: 981481 - DNA, 120 bp, Artificial Sequence
  ENSG00000132204_69 (sequence is synthesized)
gcaattgtccaattattggtgaaattgtcatttcatgctattggctatttgaaattcctcctctaataaaatgggaataaatcacggaaaagtttatgatttattgagttattttatgaa

SEQ ID NO: 981482 - DNA, 120 bp, Artificial Sequence; identical to SEQ ID NO: 807493
  ENSG00000278927_0 (sequence is synthesized)

SEQ ID NO: 981483 - DNA, 120 bp, Artificial Sequence; identical to SEQ ID NO: 807494
  ENSG00000278927_1 (sequence is synthesized)

SEQ ID NO: 981484 - DNA, 120 bp, Artificial Sequence; identical to SEQ ID NO: 807495
  ENSG00000278927_2 (sequence is synthesized)

SEQ ID NO: 981485 - DNA, 120 bp, Artificial Sequence; identical to SEQ ID NO: 807496
  ENSG00000278927_3 (sequence is synthesized)

SEQ ID NO: 981486 - DNA, 120 bp, Artificial Sequence; identical to SEQ ID NO: 807497
  ENSG00000278927_4 (sequence is synthesized)

SEQ ID NO: 981487 - DNA, 120 bp, Artificial Sequence; identical to SEQ ID NO: 807498
  ENSG00000278927_5 (sequence is synthesized)

SEQ ID NO: 981488 - DNA, 120 bp, Artificial Sequence; identical to SEQ ID NO: 807499
  ENSG00000278927_6 (sequence is synthesized)

SEQ ID NO: 981489 - DNA, 120 bp, Artificial Sequence; identical to SEQ ID NO: 807500
  ENSG00000278927_7 (sequence is synthesized)

SEQ ID NO: 981490 - DNA, 120 bp, Artificial Sequence
  ENSG00000278920_0 (sequence is synthesized)
ggctgaggcaggagaattgcttggacccagaggtggagattgtaatgagctgagaccatgccactggcacaagtctgggtgacaagagcgaaaacacggcctcaaaaaaaaaaagaaaaa

SEQ ID NO: 981491 - DNA, 68 bp, Artificial Sequence
  ENSG00000278920_1 (sequence is synthesized)
gacaagagcgaaaacacggcctcaaaaaaaaaaagaaaaatgtttttaaattagccaggcatgagggt

SEQ ID NO: 981492 - DNA, 64 bp, Artificial Sequence
  ENSG00000278920_2 (sequence is synthesized)
aggtgcatgcctatagtcccagctacgcaggaggctgacaggaggatcacttgagccccagagt

SEQ ID NO: 981493 - DNA, 120 bp, Artificial Sequence
  ENSG00000278920_3 (sequence is synthesized)
acgcaggaggctgacaggaggatcacttgagccccagagttccaggctgcagtgaaccatgatcatgctactgcactccaggctgggcaacagaccaagaccctgtctctttaaaaaaaa

SEQ ID NO: 981494 - DNA, 120 bp, Artificial Sequence
  ENSG00000278920_4 (sequence is synthesized)
gaaagaaagggaaggaaggaaggaagggagggagggaaagaaagagaaagaaagaggaaagaaagaagaaagaaagagaaggagaggaagaaagaaaaaaagagaaagaaaaaagaaaga

SEQ ID NO: 981495 - DNA, 120 bp, Artificial Sequence
  ENSG00000278920_5 (sequence is synthesized)
aaaagaagaaagaaaatgaaaaatatgattaatacaggcatatctctggtttatgctgttgtcagaatgttggcccacactgcagtcattcaaaggcttgactgggtctggagccacttt

SEQ ID NO: 981496 - DNA, 120 bp, Artificial Sequence
  ENSG00000278920_6 (sequence is synthesized)
taaggttgctcactcacatgcctggcaagctggggctagctgttgatgggaggacttaggttctccccatgcaggcctctccatagggctactgggtgtcctcacaacatggcagcaggc

SEQ ID NO: 981497 - DNA, 120 bp, Artificial Sequence
  ENSG00000278920_7 (sequence is synthesized)
ttccgctagaatgagtaatttaagagagcaaggcagaagcaacaatggtttttatgagctgccctcagaaatcactctttgaaatgaatcactaagtccagcctactttcaaggggaagg

SEQ ID NO: 981498 - DNA, 120 bp, Artificial Sequence
  ENSG00000278920_8 (sequence is synthesized)
tccagcctactttcaaggggaagggatgagtctccaccttctgaaaggagagatgtcaaggaacttgcaggcatatcttaaaaccatcagatctgctgggcccagtggctcatgcctgta

SEQ ID NO: 981499 - DNA, 73 bp, Artificial Sequence
  ENSG00000278920_9 (sequence is synthesized)
ttttttaaaaaattagccaggtgtggtgacatgcacctgttgtctcagctactggggaggctgagatgggagg

SEQ ID NO: 981500 - DNA, 89 bp, Artificial Sequence
  ENSG00000278920_10 (sequence is synthesized)
tagccaggtgtggtgacatgcacctgttgtcttcagccacaagttcaaggctgccatgagctatgatcacgtcactgcactccagcctg

SEQ ID NO: 981501 - DNA, 120 bp, Artificial Sequence
  ENSG00000278920_11 (sequence is synthesized)
taataataataaccatcagatcatttctcactacaagggagtcagggaaaacaacagagaacaggattgtcatgactagcctagaccaatcacagttcgccaactgggacacactgccac

SEQ ID NO: 981502 - DNA, 120 bp, Artificial Sequence
  ENSG00000278920_12 (sequence is synthesized)
cacagacagaaatcagggctcagttatcaaggaagtagaaggaaggttaatggggaggcagtcaagagtatctgccacagccaggatgatgcaggaggaagaaaatagggttgctcgata

SEQ ID NO: 981503 - DNA, 120 bp, Artificial Sequence
  ENSG00000278920_13 (sequence is synthesized)
aatgtatatcctgatattccgtgggacataaactaaaacgttgtttatctgaactcaaattcaactgggtgtcctacatttatattggctcaatttagtatccctaagtgagaaacaagc

SEQ ID NO: 981504 - DNA, 120 bp, Artificial Sequence
  ENSG00000278920_14 (sequence is synthesized)
ttcagtggccatcgcaggaagtcagcaaggactgggacttctttggaaagagaaacaaaagaagacctggggtgatctgcgggggagaggcaagtcgttgggacagaaaaagaggaggtg

SEQ ID NO: 981505 - DNA, 65 bp, Artificial Sequence
  ENSG00000278920_15 (sequence is synthesized)
gggggagaggcaagtcgttgggacagaaaaagaggaggtggccaggcacagtttccaggagttcg

SEQ ID NO: 981506 - DNA, 73 bp, Artificial Sequence
  ENSG00000278920_16 (sequence is synthesized)
agaccagcctgggcaatgtggcaaaaccctgtctgaactaaaaccacaaaaactagctgagtgtgcatcacct

SEQ ID NO: 981507 - DNA, 120 bp, Artificial Sequence
  ENSG00000278920_17 (sequence is synthesized)
gcactccagcctgagcaacagagcaataccctgtctcaaaaaaagaaagacaggagattggggaggctgaggtctcttgttttattattcactgctgccaccccaacaccacatgtggaa

SEQ ID NO: 981508 - DNA, 120 bp, Artificial Sequence
  ENSG00000278920_18 (sequence is synthesized)
ttattcactgctgccaccccaacaccacatgtggaagccaccaccaccaccaccacaaaaaaaggtatccacagtttttttcttttgagactgtcttgctctgtcacccaggctggagtg

SEQ ID NO: 981509 - DNA, 62 bp, Artificial Sequence
  ENSG00000278920_19 (sequence is synthesized)
tcgtgtgagccactgtgcttggccccaccgccccacatttttttttttttttttttttggag

SEQ ID NO: 981510 - DNA, 120 bp, Artificial Sequence
  ENSG00000278920_20 (sequence is synthesized)
tcactctgtctcccaggctggagtgcaataaccaatcacagctcactgcagcgtcaacctcgcaaactcaggtgatcttcctacctcagcctcctgagtagccgggaccatgggcacgca

SEQ ID NO: 981511 - DNA, 120 bp, Artificial Sequence
  ENSG00000278920_21 (sequence is synthesized)
cctgagtagccgggaccatgggcacgcactaccatgcccagctaatgtttacaaaatttttgtagagacggggtctccctatgttgcccaagctggtatgttcactcttcatctcaaaac

SEQ ID NO: 981512 - DNA, 120 bp, Artificial Sequence
  ENSG00000278920_22 (sequence is synthesized)
atagccaggaagctctagccaggagcacttctctttccaacaccctgaaaaacagctcataaagctgaaatgggggctgaggggcgtgccacaagatacatcccaggggtatgggaactg

SEQ ID NO: 981513 - DNA, 120 bp, Artificial Sequence
  ENSG00000278920_23 (sequence is synthesized)
ggagcctcactgcgtgacctcaggcaaggccctcccctctctgggcctccttttccttggctgtataatgagggattgatctaaattgtctcccagggcccttttacttggaccatgtgt

SEQ ID NO: 981514 - DNA, 120 bp, Artificial Sequence
  ENSG00000278920_24 (sequence is synthesized)
ctccctcccaaaaggaaaaactagagggaaccaaaagatgtgggtggtttcccttgttccatctccaagccccaaatttggatgaaaatgtccagtgtgacatagatttaatataaacac

SEQ ID NO: 981515 - DNA, 120 bp, Artificial Sequence
  ENSG00000278920_25 (sequence is synthesized)
tcgtgcattaacactcacaaataccccaaaaggagtcccagatgggctatttttatcccttaaaacacacacacacagaaacacacaacactccaatccccatcacccgcacttggtcag

SEQ ID NO: 981516 - DNA, 120 bp, Artificial Sequence
  ENSG00000278920_26 (sequence is synthesized)
tatctccagttggtttttacgagaagagagagttccagttaaagggagctaattaaacagctttgacttggggcgggaaagaggctgtcgaaagcctcctcgctgggcatgatgtcacca

SEQ ID NO: 981517 - DNA, 120 bp, Artificial Sequence
  ENSG00000278920_27 (sequence is synthesized)
caattgtgcgtttctcatgacccaagaatgtgaatgtgtttgcactgcacgtcggagccagagccggtgatgcaagcacagcctggtaaacaggccccagacaggcaggccctgtgagga

SEQ ID NO: 981518 - DNA, 120 bp, Artificial Sequence
  ENSG00000278920_28 (sequence is synthesized)
gccgtggtgcagaggcctggcaggggcccagctagtgtttaactccttcctggcagaactggctgctgggccgctaaggtttggtcaaggagccttctccacccgtccctgcttctctct

SEQ ID NO: 981519 - DNA, 120 bp, Artificial Sequence
  ENSG00000278920_29 (sequence is synthesized)
gaggcacagtccctgttagtggcaagccgtcaatctggagccacagtagacctgcattcccacccacctgcaggttttgctcgctcaggagccttgggtaggtgactctctggtcccgag

SEQ ID NO: 981520 - DNA, 120 bp, Artificial Sequence
  ENSG00000278920_30 (sequence is synthesized)
tctcagttttcttatctgtacaatgggaagaggaatcaggccctcaatctcatacctacagctccaagttcagaaaattcagacagccagaggcttttctgcacacttagtgaaaactca

SEQ ID NO: 981521 - DNA, 120 bp, Artificial Sequence
  ENSG00000278920_31 (sequence is synthesized)
ttcaggagcaatatctgacctggattgactgagggtgtgcaatctgttcatttcacttagagtcaatactcacacttctagctacagaaatattcgtatgtttcattggagatggatgga

SEQ ID NO: 981522 - DNA, 90 bp, Artificial Sequence
  ENSG00000278920_32 (sequence is synthesized)
gctacagaaatattcgtatgtttcattggagatggatggatccagaccccactggattaccttttaaaatctaaaaaaatcctgaattct

SEQ ID NO: 981523 - DNA, 120 bp, Artificial Sequence
  ENSG00000278920_33 (sequence is synthesized)
atgactgtgccactgcactccagcctgaataacagaccgagaccctggctgaaaaaaacaaaaatgaattctgaaacctatccagccacaagtgtgttgatcaggtcttatgggcctgag

SEQ ID NO: 981524 - DNA, 120 bp, Artificial Sequence
  ENSG00000278920_34 (sequence is synthesized)
tgtgttgatcaggtcttatgggcctgaggcacctgcctctagcctgttgggaaacttactgagcgactgccttctgctagaatgtcagcccccaaggacagggcttaactctgtccccga

SEQ ID NO: 981525 - DNA, 120 bp, Artificial Sequence
  ENSG00000278920_35 (sequence is synthesized)
tgtgtctgcagcagccagtgcagtacctggcatgtagcaagcacccaaacaatagttcttgaatctttagctgaagttattcatcccccatacatgccatggtggtgaatatgggaaact

SEQ ID NO: 981526 - DNA, 120 bp, Artificial Sequence
  ENSG00000278920_36 (sequence is synthesized)
gaggcccaagcctctgagctggtctgccctagatcttttcccacagatgatgttctgactttccccccaaaaaggtagctgttcacctttctctgccagcagctcacaaacagcttgatg

SEQ ID NO: 981527 - DNA, 120 bp, Artificial Sequence
  ENSG00000278920_37 (sequence is synthesized)
acccccctccaacattccagggcagctggctggttttgcgggcaccaaagagttttctttggctaaaggttcagccgattaaaaaagggggcccccatgcattaaagctgggggtgggga

SEQ ID NO: 981528 - DNA, 120 bp, Artificial Sequence
  ENSG00000278920_38 (sequence is synthesized)
acgggcagtcacagagtagagtaggggctgaaggtgtcattaaagctcgggtcgggggagtggaaatggaatctgctagctggcctgagactaaaagccagatccctggatccttccaga

SEQ ID NO: 981529 - DNA, 120 bp, Artificial Sequence
  ENSG00000278920_39 (sequence is synthesized)
ggactatgaatgtgctagtcaggctctgccttaatcctaaagctggagaattatccagacccatgaagagctgccaggaagaaaaaattcctccccagtgtggtctgccctacccccacc

SEQ ID NO: 981530 - DNA, 120 bp, Artificial Sequence
  ENSG00000278920_40 (sequence is synthesized)
ttccatggtgccctgagaaactcccttttcctctcttggcttcaacataatggagttggagaatccaagacagtggatcagagctcctgagatcatggacttagactcaggttcaggccc

SEQ ID NO: 981531 - DNA, 120 bp, Artificial Sequence
  ENSG00000278920_41 (sequence is synthesized)
agactcttcctcttgctgggcaaggagctagggcaagtcaatttcaagccttagttatcacatctgtaaaatggcactaagttagagggatattgtccagatgactgtgtctggtacata

SEQ ID NO: 981532 - DNA, 82 bp, Artificial Sequence
  ENSG00000278920_42 (sequence is synthesized)
gttagagggatattgtccagatgactgtgtctggtacatagtagcaataaaaaagacattagatttgggaggccaaggaggg

SEQ ID NO: 981533 - DNA, 87 bp, Artificial Sequence
  ENSG00000278920_43 (sequence is synthesized)
gagaaacattagctaatattaccctcagcatggatactcctaccagtctgatgttctgttttaggtacttcgtaccatcataacctc

SEQ ID NO: 981534 - DNA, 120 bp, Artificial Sequence
  ENSG00000278920_44 (sequence is synthesized)
ctgatgttctgttttaggtacttcgtaccatcataacctcattgttggagcactcactatgttccaggtactacgctaagtgcttcacaagcattctttcatttcatcctcccaacatct

SEQ ID NO: 981535 - DNA, 120 bp, Artificial Sequence
  ENSG00000278920_45 (sequence is synthesized)
ctcaaataggtactagcactgtcctcactattcaggggagaagtctgcggttcagaggggtgaagtgattcctctaagactgcataacttgtaagtggcagagctaggacctgtcagact

SEQ ID NO: 981536 - DNA, 120 bp, Artificial Sequence
  ENSG00000278920_46 (sequence is synthesized)
ctaagcgcttcataccacacctacaggaaatatctagcagccagttccatgctcagtttcttgaagcatgagattccaggcccctaatatggcatgtgactgtgggcagtacagaggcct

SEQ ID NO: 981537 - DNA, 120 bp, Artificial Sequence
  ENSG00000278920_47 (sequence is synthesized)
caattctcccatctgaaccatggggaaggtccccccgccctgaatcccctacagggctgagaggagggctctggaaaccttgaaaaggactttgtagactctgagctgggcaccctcaaa

SEQ ID NO: 981538 - DNA, 120 bp, Artificial Sequence
  ENSG00000278920_48 (sequence is synthesized)
ggcttggttaggagggagacaagagaaagaattaatccacttcccaccaaggaagccaagagctgaaggagaaatggtccgtgtcctcctccagggcctgcccctcagcatggttcctcc

SEQ ID NO: 981539 - DNA, 120 bp, Artificial Sequence
  ENSG00000278920_49 (sequence is synthesized)
ctttgttaggagggttaagaacttggccaagtctcagctccactcatctctggctgtatgttctttgtacttcccctctctgagtgtcgggcttctcaactgtgaaatgggggtgataat

SEQ ID NO: 981540 - DNA, 120 bp, Artificial Sequence
  ENSG00000278920_50 (sequence is synthesized)
gataacagccttaccaggactgtagtaaggacaagccttggcccattggttcattgtcttagtctgctcctgttgttataacaaaatacctcagactcagtaatatataaacaacagaaa

SEQ ID NO: 981541 - DNA, 120 bp, Artificial Sequence
  ENSG00000278920_51 (sequence is synthesized)
tatgttgctcatagttctagaggctgagaaatccaagaacaaggtgtcagtagattgggtgtcaatgagggcctgttcctcatagatgacgtcttctatgtctttacatggtagaagggg

SEQ ID NO: 981542 - DNA, 120 bp, Artificial Sequence
  ENSG00000278920_52 (sequence is synthesized)
tgaacaaactccctcaggcttcttttataagggcactaatcccatttataaggatggagcttcatgaagtgatcgcccccaaaagtcccacctcttaatactaccacattgcagattacg

SEQ ID NO: 981543 - DNA, 120 bp, Artificial Sequence
  ENSG00000278920_53 (sequence is synthesized)
gtcccacctcttaatactaccacattgcagattacgtttcaatatataaattggaggagacacattgagacacatggatattggttgaataattatctttcttttttctttttttttttt

SEQ ID NO: 981544 - DNA, 62 bp, Artificial Sequence
  ENSG00000278920_54 (sequence is synthesized)
cctctacctcctggattcaagtgattcctctgtgcattactagtagaggcagggtttcacca

SEQ ID NO: 981545 - DNA, 120 bp, Artificial Sequence
  ENSG00000278920_55 (sequence is synthesized)
cctgccctgaataattatcttttgacacctggtctgcaattctcatggagtttccggtctggaagaagagtctgtatgtaatgtgtttggcacaggtaggtgcccaatgggtgggtagat

SEQ ID NO: 981546 - DNA, 120 bp, Artificial Sequence
  ENSG00000278920_56 (sequence is synthesized)
ggatggatggatggatgggtggatggatgagatgagtgacttactgcaggtctcacagttataaagtaactcttcctgatagctcacactggccaccaaagacacattaagcactgatta

SEQ ID NO: 981547 - DNA, 120 bp, Artificial Sequence
  ENSG00000278920_57 (sequence is synthesized)
gagaggtactccatggaccaaattacttgagcaaagtcttagaattaggaattattgcagcatggataagaggcattcattttatgttctcttttagtatttttcccaacaagatcctga

SEQ ID NO: 981548 - DNA, 120 bp, Artificial Sequence
  ENSG00000278920_58 (sequence is synthesized)
gaaggaggatctggatggaggttctgccagagccccctggagcagagccaggaagttgagtagggagtagcgccccacagcccatatgagcaggcaggagcaggccaagcctgagggtcg

SEQ ID NO: 981549 - DNA, 120 bp, Artificial Sequence
  ENSG00000278920_59 (sequence is synthesized)
ggcctcagaggcctggcctggccgtatttagttttcaaggcactggaaggcttctcacctcctctgctgtccaggcacagaagcaaggccacccacagttgctgagtcagggaggcccct

SEQ ID NO: 981550 - DNA, 120 bp, Artificial Sequence
  ENSG00000278920_60 (sequence is synthesized)
ccacagtggggtaacttgaacacagtggttcagagcctggtctctgtcaagaagatatggtgctgggaacagtggtgtgtccctgtggttcgcgctcctcggaaggctgaggcaggagga

SEQ ID NO: 981551 - DNA, 120 bp, Artificial Sequence
  ENSG00000278920_61 (sequence is synthesized)
taagcctagggattcttgagcccaagagttctaggctgtagtgtactatattgatcgagtgtctgtgctaagttcagcttcaatatggtgacctcctgtaagcaggggtgtctaaggagg

SEQ ID NO: 981552 - DNA, 120 bp, Artificial Sequence
  ENSG00000278920_62 (sequence is synthesized)
ggtgaacaggcccaagatgaaaatggagcaggtcaaaactgtgctgatcagtggtgggattgtgactgtgaatagccactgcattccaccctagacaacatagtgagactctgtctctaa

SEQ ID NO: 981553 - DNA, 67 bp, Artificial Sequence
  ENSG00000278920_63 (sequence is synthesized)
gcattccaccctagacaacatagtgagactctgtctctaaaagtaaataaataggctgtgcgcagtg

SEQ ID NO: 981554 - DNA, 76 bp, Artificial Sequence
  ENSG00000278920_64 (sequence is synthesized)
gagttcaagaccagcctggccgatatggcgaaaccctgtctttactaagaatataaaaattagctggtcatgatgt

SEQ ID NO: 981555 - DNA, 120 bp, Artificial Sequence
  ENSG00000278920_65 (sequence is synthesized)
gagctgagatcacatcactgcactgcagcctgggcaatgagtgagaccctatctcaaaaaaaaaattaattaaattaaatttaaaaatgtaaataaataagtaaataaataaataaaagc

SEQ ID NO: 981556 - DNA, 120 bp, Artificial Sequence
  ENSG00000278920_66 (sequence is synthesized)
tgtgggttcaaatcctgctcaacaaccaatagctgtgtgcctggcctacatatcacctatcagagcctttgttttctttatttgtaaaaacaacaacaaaaatggcggtaaaaacaagca

SEQ ID NO: 981557 - DNA, 120 bp, Artificial Sequence
  ENSG00000278920_67 (sequence is synthesized)
ccattactgagttggttatgtacaagcctctgctaagcaccttacctgcattatcttatttaattgtcatcacaataaacaagtattattattgtcctcctgaaacaaaatacatgagaa

SEQ ID NO: 981558 - DNA, 120 bp, Artificial Sequence
  ENSG00000278920_68 (sequence is synthesized)
acaaaatacatgagaacggtgtctctcatccatgctgccgtaatttctaacccaagccgctgctcatgcagtcccatctacctggagtgtatctcttttttttttgagacggagtcttgc

SEQ ID NO: 981559 - DNA, 63 bp, Artificial Sequence
  ENSG00000278920_69 (sequence is synthesized)
ttggccaggctggtctcaaactcctgtcttcagatgagccaccaaccaactcttatgcaacct

SEQ ID NO: 981560 - DNA, 120 bp, Artificial Sequence
  ENSG00000278920_70 (sequence is synthesized)
cacccagcctgtaaccaactcttatgcaaccttcagtgttcagtgtaaggtatccaaaaagttacttcctgactgtgagacctggatttccaaatgaggaagctgagtcacacagggtga

SEQ ID NO: 981561 - DNA, 69 bp, Artificial Sequence
  ENSG00000278920_71 (sequence is synthesized)
cctggatttccaaatgaggaagctgagtcacacagggtgagatcacattcaagtaagagacagagctag

SEQ ID NO: 981562 - DNA, 72 bp, Artificial Sequence
  ENSG00000278920_72 (sequence is synthesized)
aaggtggaggttgccgtgagccgagatcacgccactgcactttaccctgggcaacaagagtgaaactccgtc

SEQ ID NO: 981563 - DNA, 120 bp, Artificial Sequence
  ENSG00000278920_73 (sequence is synthesized)
cgtctcaaaaaaaaaaaaaaaaaagacagagctaggaagtgcttacaacttcctcacgcttacctacatttcaatttctgttattgaatcttttccccctcagatataccctatcagctt

SEQ ID NO: 981564 - DNA, 120 bp, Artificial Sequence
  ENSG00000278920_74 (sequence is synthesized)
attacaggcatgaaccaccacacccggcccctagcagcttctataaaacaacactgggcacctgtcccatcccctgctgcctccttcagctccaaattgccaccaaagccttattcaacc

SEQ ID NO: 981565 - DNA, 120 bp, Artificial Sequence
  ENSG00000278920_75 (sequence is synthesized)
ctccttcagctccaaattgccaccaaagccttattcaaccctttgcaacagccctgtgcaaaaggtaggctagatatcatccccatgtcacagacggggaaactgaggctcagagaaatg

SEQ ID NO: 981566 - DNA, 120 bp, Artificial Sequence
  ENSG00000278920_76 (sequence is synthesized)
aagcaagttgcttgaggccttgcaaccagcaagaggagaaaccataggtggacaacagtgctgtctgactcccaccccagtgctgtttccccaccacagcgagctgaccctcgacccctc

SEQ ID NO: 981567 - DNA, 120 bp, Artificial Sequence
  ENSG00000278920_77 (sequence is synthesized)
aaccttcccagatgggagacttcacctcaactctcacacctacacaggtgattaggattaaagagaaaatcaacatgagatcaatttgaaaggaagggccctgcaggactaatagggtat

SEQ ID NO: 981568 - DNA, 120 bp, Artificial Sequence
  ENSG00000278920_78 (sequence is synthesized)
tttgcaaataagtaaaaaaataaaaataaaaagtaagcctccttgaaaaatcgtaaaagaactgggggaatgaataagctgtaactgttctaaatcagatcgtattcctacaagacacag

SEQ ID NO: 981569 - DNA, 120 bp, Artificial Sequence
  ENSG00000278920_79 (sequence is synthesized)
gagaccagaacagctccctacagccattagctcatctcactcatttacaaggctctctgctgagagccaagagggggccccacccagaggaatcattacctggccagcacttcactggga

SEQ ID NO: 981570 - DNA, 120 bp, Artificial Sequence
  ENSG00000278920_80 (sequence is synthesized)
tttcatgtcccagtaaagttttttcctaaattggggtacacaattgccaacatcttgttatttgtcaaagaatattaaaaggaaaaataaattgctactttctgctgttaccatcatctc

SEQ ID NO: 981571 - DNA, 120 bp, Artificial Sequence
  ENSG00000278920_81 (sequence is synthesized)
ataaaattcaataacaaggactaatcccagaatttggcaattttaaaaattacctatgtaagtgactcactatgttgtcctagttttctcactagccttgggccagtgagaactgtatct

SEQ ID NO: 981572 - DNA, 120 bp, Artificial Sequence
  ENSG00000278920_82 (sequence is synthesized)
aagatgggcatttggcaaccctcagatgagtaggagagagaaaacatgtatgcaaataactcagagtagctcattgcaacttgggatgagaaccacataaaactcttctaattacttaat

SEQ ID NO: 981573 - DNA, 120 bp, Artificial Sequence
  ENSG00000278920_83 (sequence is synthesized)
ttaaaaaaaaagatttattggaagagggttttaccagaagattttttggattctgagggttatgtagtgactagggatcaaccaaacaaccactcttggcaaggacagaaaacttcaaga

SEQ ID NO: 981574 - DNA, 120 bp, Artificial Sequence
  ENSG00000278920_84 (sequence is synthesized)
acaggtggaatcagcccatttgcatgcactctctctctctcttctctctctctctcctcattctgtgtctctgcttctctctctgccttagctgtcttctcactctagttacagacaggg

SEQ ID NO: 981575 - DNA, 120 bp, Artificial Sequence
  ENSG00000278920_85 (sequence is synthesized)
tagctgtcttctcactctagttacagacagggttcctccatgtggcagagaacatggtggctaatgttaccagaaaaactctgaactaggtacggtggcacgagcctgtagtcccagcta

SEQ ID NO: 981576 - DNA, 120 bp, Artificial Sequence
  ENSG00000278920_86 (sequence is synthesized)
cccaggagtttgagtccagtctgggcaacatagcgagtccctacctctaattggcggtggaggggggggcactttaggcaaattaaatttaacaaagtgtaactgcagaaagagcaattc

SEQ ID NO: 981577 - DNA, 120 bp, Artificial Sequence
  ENSG00000278920_87 (sequence is synthesized)
acaaatccagagccttgcagaaccaggataggttcacagcaactcagagactgccacaagggtcagattacatttatggacagaaaaaggaaagttacatacagaaaacagaagtggggt

SEQ ID NO: 981578 - DNA, 120 bp, Artificial Sequence
  ENSG00000278920_88 (sequence is synthesized)
acagaaacagctagattggttacggttggcattattggtacactgtttgaactgtggtcggcctgcaattggctgaaactcagcagctgtgactggatgagacctagccacttgttacaa

SEQ ID NO: 981579 - DNA, 120 bp, Artificial Sequence
  ENSG00000278920_89 (sequence is synthesized)
gagtaccttacggtctgtttacatacctaattagattacagttcacaatgtatggagaaacctttagacccaaattaatatacaacaggtaaggaagaagctttaggttaaacttaactc

SEQ ID NO: 981580 - DNA, 120 bp, Artificial Sequence
  ENSG00000278920_90 (sequence is synthesized)
agtttcagtgagaaagaaaaaagaaagcaactgccacaaaaacagggaaggtgtctgattggcccagctgggtcagatgtctatctctggaccaatcagctgtggggtctgtaacaacat

SEQ ID NO: 981581 - DNA, 120 bp, Artificial Sequence
  ENSG00000278920_91 (sequence is synthesized)
ggcagctcccatgagaacggcatggttggagtcagaagaggaagaagcagaactgggcaggtgagctgggaagagaataccatagatgtccactatggagatgataaatgccctaataga

SEQ ID NO: 981582 - DNA, 120 bp, Artificial Sequence
  ENSG00000278920_92 (sequence is synthesized)
tgcgcacaaaaaatgtcatgggcatttaggggatgaagacacaatttctagctgtgcaactgtggtgatcagtcagagcttcttggaagaggtggcattcgagctgggtcttgaagccga

SEQ ID NO: 981583 - DNA, 120 bp, Artificial Sequence
  ENSG00000278920_93 (sequence is synthesized)
gaatcatctggaacgtacagagattctaaatgccacctcacattagaaaagaaagatgatccctggtaatggagaagatagcatccgaaagaattaaatatgaatgtctcactttgtcaa

SEQ ID NO: 981584 - DNA, 120 bp, Artificial Sequence
  ENSG00000278920_94 (sequence is synthesized)
aatatgaatgtctcactttgtcaagatttcataggttttttatttttacagatggtgtgtctcgctctccctcccagactggagtgcagtgcgatcatagctcattgcagccttgaactc

SEQ ID NO: 981585 - DNA, 120 bp, Artificial Sequence
  ENSG00000278920_95 (sequence is synthesized)
gactacaggtgcacaccaccacacctagctatagttttcaaaatttagatataattcatatataaattatattttatagttattttggtgtttaattttgaaataattttagacttacag

SEQ ID NO: 981586 - DNA, 120 bp, Artificial Sequence
  ENSG00000278920_96 (sequence is synthesized)
aaataattttagacttacagaaacgttgcaaaaatagttcagagttatcctaaactcttcatttcctacaccttcacctagctttccctgataggaacatcttacctcaccttagtacaa

SEQ ID NO: 981587 - DNA, 120 bp, Artificial Sequence
  ENSG00000278920_97 (sequence is synthesized)
ttatcagaaccaggaaattaacactggtacagtaacctacataccttatttgaattttagctgttttccttttgatctaatccaaggtccaacattgcatttagttgtaatgtcttctta

SEQ ID NO: 981588 - DNA, 120 bp, Artificial Sequence
  ENSG00000278920_98 (sequence is synthesized)
gtcttctctaatctatgacagctcctcagcctctcgctttttttctcaaatgaccctgacacgtactgttcagtcattttatagaatatccctcaatttgaatgtctgattttttttttg

SEQ ID NO: 981589 - DNA, 120 bp, Artificial Sequence
  ENSG00000278920_99 (sequence is synthesized)
gtgattagattgagcttatgcacttttggcaagaatatcacagaagtaacgttatgcccttcttagtgcatcagatcaggggctactttctgttgatatgacttattactgggcatgtta

SEQ ID NO: 981590 - DNA, 120 bp, Artificial Sequence
  ENSG00000278920_100 (sequence is synthesized)
acactgatcatgtggttaaagaggttatctgctgggtttctcttttataattttataataagtgtccttttgtaattagtaattatcttgtggggagataataagaccatgcaaaaatgt

SEQ ID NO: 981591 - DNA, 120 bp, Artificial Sequence
  ENSG00000278920_101 (sequence is synthesized)
aattatcttgtggggagataataagaccatgcaaaaatgtaaatttcttgacatttacggtatgtttgtttgtttttttgaaatgaaatctccttctgtcacccagggtggagtgcagtg

SEQ ID NO: 981592 - DNA, 76 bp, Artificial Sequence
  ENSG00000278920_102 (sequence is synthesized)
catttttttttttaagtgctgtcaaatgcatgccgtctacttttcttcagtaaatgtcaactctttacccattatg

SEQ ID NO: 981593 - DNA, 120 bp, Artificial Sequence
  ENSG00000278920_103 (sequence is synthesized)
ctacttttcttcagtaaatgtcaactctttacccattatgtgccagtccctgtggggtgtgccaagcagaaaaagcactgatctaagatgtgtggctcagttatgtgtagatccatgacc

SEQ ID NO: 981594 - DNA, 120 bp, Artificial Sequence
  ENSG00000278920_104 (sequence is synthesized)
ttgctgggctttaggatccttatctataaaatggatatcattatatcttaccagtaagaactgctgaggataaaggcagaccgtacttgtgaacgtgttctgtaatacaaactagggttg

SEQ ID NO: 981595 - DNA, 120 bp, Artificial Sequence
  ENSG00000278920_105 (sequence is synthesized)
ttcattctccttctgcagtgctcagctctggcctctcctctcctgtttgcatttcccttttccttcctgcctgtgttcaggcctgcagacttctgtctgtcctccctggtctaactccct

SEQ ID NO: 981596 - DNA, 120 bp, Artificial Sequence
  ENSG00000278920_106 (sequence is synthesized)
tatcctacttgccaagccttactgtgatgtcatttaataaattttggagacacaaggagcgcctcatagagatggacaatttccttcagtagtctcctgctgtttttagagttgcctcca

SEQ ID NO: 981597 - DNA, 120 bp, Artificial Sequence
  ENSG00000278920_107 (sequence is synthesized)
ggtgcctgggcctgtgggtgttgggcaggagaaccttcctcctatggcagaaataagtgggagaagtagggattgccttcctccaataataatgctttggccctaaaaaggaaactcttg

SEQ ID NO: 981598 - DNA, 61 bp, Artificial Sequence
  ENSG00000278920_108 (sequence is synthesized)
tgcacgatcttggctcacgcaacctctacctcccagattcaagcaattcttgtgcctcagc

SEQ ID NO: 981599 - DNA, 65 bp, Artificial Sequence
  ENSG00000278920_109 (sequence is synthesized)
actacagtggtgttaccatgctggtgtcgaactcctggcttcaagtgatccgccctccttggcct

SEQ ID NO: 981600 - DNA, 78 bp, Artificial Sequence
  ENSG00000278920_110 (sequence is synthesized)
ccccatagaatattgaagaagcccaaatggatacttgtgtcttactgagtggacacactttaaagttacttcaaaaca

SEQ ID NO: 981601 - DNA, 120 bp, Artificial Sequence
  ENSG00000278920_111 (sequence is synthesized)
ttgtgtcttactgagtggacacactttaaagttacttcaaaacatgaaaggatgacttactccatatcaaacctcctaattaatccaacagtaattttttttattttgttttattttatt

SEQ ID NO: 981602 - DNA, 82 bp, Artificial Sequence
  ENSG00000278920_112 (sequence is synthesized)
ttaggctcaagtgatcctcccaactcagtttcctgagtagctgggactgcaggtgtacgccaccatgcctggctaacttttg

SEQ ID NO: 981603 - DNA, 120 bp, Artificial Sequence
  ENSG00000278920_113 (sequence is synthesized)
ccatgcctggctaacttttgtatttttttgtaaagacagagttttgccatgttgccgaggccgctctcgaactcctaagctcaagcaatccacccacctcgtcctgccaaagagctggga

SEQ ID NO: 981604 - DNA, 74 bp, Artificial Sequence
  ENSG00000278920_114 (sequence is synthesized)
cccacctcgtcctgattttaatctaaggcaggatttacttatttatttagagacagagtctgtctctgttgccc

SEQ ID NO: 981605 - DNA, 77 bp, Artificial Sequence
  ENSG00000278920_115 (sequence is synthesized)
gtgcagtggtgtgatcatgactcactgcaagcttaaactcctgggctaaaacaatcttcctactaccagaaaggttt

SEQ ID NO: 981606 - DNA, 66 bp, Artificial Sequence
  ENSG00000278920_116 (sequence is synthesized)
ctgggattacagtcatgagccaccgcgcctggcccacacctgcttcttaaaggaccaagtcctggc

SEQ ID NO: 981607 - DNA, 89 bp, Artificial Sequence
  ENSG00000278920_117 (sequence is synthesized)
tccaagagttcaagaccagcctgggcatagcgaaatctcatctctacaaaccattaaaaaatgttttggctgggcacagtggctcacat

SEQ ID NO: 981608 - DNA, 120 bp, Artificial Sequence
  ENSG00000278921_0 (sequence is synthesized)
tcagatccgccgagtatgaagcgctcggcttttcttttgtgtgaggagcacccacgacgccccgaccatgggcgcaggggcagaggcgaaggtcgtcgctccgtccgctaccccgtcccc

SEQ ID NO: 981609 - DNA, 120 bp, Artificial Sequence
  ENSG00000278921_1 (sequence is synthesized)
cagccgcaagcgccgaggagccggaagagaggcggaaagggcagcaggctccttacccagaccagcgaggggaggtcagctcgtcgcggggtgtggctcccgtccggggactcccgagct

SEQ ID NO: 981610 - DNA, 120 bp, Artificial Sequence
  ENSG00000278921_2 (sequence is synthesized)
cattacgggtggccgtgtgtagccaagttcaagctctccctccgggaatgcctgccgcggcggcggaatacggcttcttcaggacattcagcaaagcggggaggcggggacctgcgggcg

SEQ ID NO: 981611 - DNA, 80 bp, Artificial Sequence
  ENSG00000278921_3 (sequence is synthesized)
gaggagcgacgccccagctgggaacgcggcggacgggcgagcggggggtgcgccctgggcgcgccaggccgcagaggctc

SEQ ID NO: 981612 - DNA, 120 bp, Artificial Sequence
  ENSG00000278921_4 (sequence is synthesized)
ggcgggagcagcccaggtgcatgtgggcccggtccaggcgtctgcaaaaagccctggaacgaagcggaccccccagtccagcgctggccgcggcaggggagccccttctgggcggggtat

SEQ ID NO: 981613 - DNA, 120 bp, Artificial Sequence
  ENSG00000278921_5 (sequence is synthesized)
acactgcgcccaagccgcggggcagtccagcgctcgctgcgtccttcccccgagagacctggaggctgggtggggagaagaggacgcggtgctgctcggaccccacggttcggcggtccc

SEQ ID NO: 981614 - DNA, 120 bp, Artificial Sequence
  ENSG00000278921_6 (sequence is synthesized)
aatcccacgccctccgcgcggtcggccgcgtccaggactgaggggcacaatagctctgaagctgcagtgacccctggtgggtcccgatgtccgtgcacaggcagccgaggttgagctgcg

SEQ ID NO: 981615 - DNA, 120 bp, Artificial Sequence
  ENSG00000278921_7 (sequence is synthesized)
gacgacactgagccccgctgggcttcggagcaggtgcaatctgtgctctccagctgggaaccagcagcgagttaatgcgagtcgcagttaggggagacacgaggggaggtgtcacagaaa

SEQ ID NO: 981616 - DNA, 120 bp, Artificial Sequence
  ENSG00000278921_8 (sequence is synthesized)
aaaaactctatattgagttttagagttagagctttggcatcagacgtagttttgagttgactattctactgcttgttagctgggtagccaaagctcaaaaaaaattgcttaaaacctagg

SEQ ID NO: 981617 - DNA, 120 bp, Artificial Sequence
  ENSG00000278921_9 (sequence is synthesized)
acgttagcccttaaaacaaaaccaggcttccgtagcacagtagaaatgaaatgaacaattggcgacttttgatggagtttcctctcatagtgatttgccacaaaggaccttctgtaggaa

SEQ ID NO: 981618 - DNA, 120 bp, Artificial Sequence
  ENSG00000278921_10 (sequence is synthesized)
gcctcggccttccctgctattgtgaccccatccaaacacaggatcagcataaccgccaaagtgcaatataaatttctgaactttacctaggctatgaataaaactattttatcttctgaa

SEQ ID NO: 981619 - DNA, 120 bp, Artificial Sequence
  ENSG00000278923_0 (sequence is synthesized)
cagacacgtatctcattatcttctgcaaagatctatttgtttagccatgtgcaaatattgccctaaaatgttcacaggttccaggataaccagatgactgaggaatgttgaagattgcag

SEQ ID NO: 981620 - DNA, 120 bp, Artificial Sequence
  ENSG00000278923_1 (sequence is synthesized)
tgatggaagtgcctcagtcagcctggaagactgtatggatggaggttgcctggccacactgtcatgtccctctctccctgaaaaagagacacatttgcctttgggcaaggcaatacatac

SEQ ID NO: 981621 - DNA, 120 bp, Artificial Sequence
  ENSG00000278923_2 (sequence is synthesized)
ctatgtatacactttggtctatgcattctgttatttaacattctaataatgttgatgaccttaaaatatgcttgacaatgatccgtgtaaatcattattattctgccttctgcaagataa

SEQ ID NO: 981622 - DNA, 88 bp, Artificial Sequence
  ENSG00000278923_3 (sequence is synthesized)
atccgtgtaaatcattattattctgccttctgcaagataagaattatgggccaggtatggcacttaacgcctataatacaaacatctc

SEQ ID NO: 981623 - DNA, 120 bp, Artificial Sequence
  ENSG00000272449_0 (sequence is synthesized)
ggaccggaggccgcggggacagcgcgccgggcgagtctgctggagctgcctctgcggcccctgtcctcacccctgaggaggccaggcccgggcaggtgcctgggctggggctgctcctgg

SEQ ID NO: 981624 - DNA, 120 bp, Artificial Sequence
  ENSG00000272449_1 (sequence is synthesized)
ccaggctggaagactgtcagatggaggacaggtcaggtggtcggaaagctggggacagggagggagcaggtttgacggagggacgtatgggcaggctcctcctcccggtcaggtcccacg

SEQ ID NO: 981625 - DNA, 120 bp, Artificial Sequence
  ENSG00000272449_2 (sequence is synthesized)
aggctcctcctcccggtcaggtcccacgtgaccccccagccacgcctacccacatcgccctgctggaggccgggggcggggggagcggggagtggggggtgtggggggtgaggggggtgg

SEQ ID NO: 981626 - DNA, 120 bp, Artificial Sequence
  ENSG00000272449_3 (sequence is synthesized)
ggggcggggccgtgcttcttctggccctggcctccaattggctgccgggcgtgggaaagcgtgcaccactgcctggcgcccataaagacgcctccaccacctgcgccgccgccgcctccc

SEQ ID NO: 981627 - DNA, 120 bp, Artificial Sequence
  ENSG00000272449_4 (sequence is synthesized)
gccctccgccccgcgcgctcgttgaggccggtgctccagagtgaagagcgtggcggtgcggcggtagcgcagggccctcctgcggggccaggcaggggcgggtgggcgctccttgccacc

SEQ ID NO: 981628 - DNA, 120 bp, Artificial Sequence
  ENSG00000272449_5 (sequence is synthesized)
cacctttctgctctccctgctgtccgagaagttcgtgcggtgccagcccagctcccagctggggacagaacaggaaacgtccccggcgagcctggcgggggtggcggcaggggtgtctgt

SEQ ID NO: 981629 - DNA, 120 bp, Artificial Sequence
  ENSG00000272449_6 (sequence is synthesized)
cgccgcggatggacctcagggaaggcctggcgcgccgcctccgggaagccttccggccttctccctccaccgagtactggggagtctcaggccacggtgaatgaagagcaacgggccgga

SEQ ID NO: 981630 - DNA, 120 bp, Artificial Sequence
  ENSG00000272449_7 (sequence is synthesized)
gagacctcggcctctgcccaggagcagcgcccagcaaccccgcccacaggggacccggtggacgccctggtggccactttgccaggctccccatctcccagcgaaccagagaggatttcc

SEQ ID NO: 981631 - DNA, 120 bp, Artificial Sequence
  ENSG00000272449_8 (sequence is synthesized)
gttcccctcctgcttggtgcctagcgccagggcggggcgtgggctgagcagcccctcccatggagggagcggccagtctacatattggaggtggggctctggggaaagggtgttgttagg

SEQ ID NO: 981632 - DNA, 120 bp, Artificial Sequence
  ENSG00000272449_9 (sequence is synthesized)
ttgttaggaaggcggtttgaggcagcgggaggtggggatgcgcccggcggggaggggcaggtgtgtggggagggcctggggagcgcctccccagccgggcagcgcttccccagccaggcc

SEQ ID NO: 981633 - DNA, 120 bp, Artificial Sequence
  ENSG00000272449_10 (sequence is synthesized)
ggaccccggctccgtccagcctgggaaaggactccacggtttatgctgaagtggtggtggggtgggtgaacgctgcgcaatggaagggcatggccctgtgctaattgccccggggtgtgg

SEQ ID NO: 981634 - DNA, 120 bp, Artificial Sequence
  ENSG00000272449_11 (sequence is synthesized)
ggctgtggaggcactgcgggggggatgtgctgtgtcagttgggcaatggcggccaactgtggcgtgcaggccttggagctgcccctccatggagctttaataaaggcactagccctgcaa

SEQ ID NO: 981635 - DNA, 120 bp, Artificial Sequence
  ENSG00000272440_0 (sequence is synthesized)
gggttttgtaaattaataaattaggtaattgtgtttgtatattatttgtatgtatagaattccccctcataatctattgtactgtaataaatctgctaaaaggttaccttagaaacatta

SEQ ID NO: 981636 - DNA, 87 bp, Artificial Sequence
  ENSG00000272444_0 (sequence is synthesized)
tggcccaccacagttttaattctgaagatgcagtattaagagaggaggctaaagaagcacacacttgcttaatttttccttcgttat

SEQ ID NO: 981637 - DNA, 120 bp, Artificial Sequence
  ENSG00000272444_1 (sequence is synthesized)
gatggcagcagcagcttgtggctgagtttcggtgttctgcctgacgggtgacagctgagcaggcactaggtccttgcaaaacgcaggatgctggggagggtcttcaccttgcatggtgtc

SEQ ID NO: 981638 - DNA, 120 bp, Artificial Sequence
  ENSG00000272444_2 (sequence is synthesized)
ctgtcccacactgctcctcaggttgggagtggtggggagttactgtttaatgtgtacagaatttctctttgggatgacaaaaatgtctggaaatggatggtggtgatggtcgtagagctt

SEQ ID NO: 981639 - DNA, 120 bp, Artificial Sequence
  ENSG00000272444_3 (sequence is synthesized)
tacagatttacttaatgccactgaattatacacttcaaatgattaaaatggtaaattttatttatcttttgccacaattttttttaaaacctcagtaaataaaatgcaacttaaggcttc

SEQ ID NO: 981640 - DNA, 80 bp, Artificial Sequence
  ENSG00000272447_0 (sequence is synthesized)
caaggaccaggagcgggagccgagcctcgcggcccggggcacggcgccgcctgcccctccccggcagtgcctcccgaccc

SEQ ID NO: 981641 - DNA, 80 bp, Artificial Sequence
  ENSG00000272447_1 (sequence is synthesized)
gccccggcgagaacaggcccggcgggcaaggcggcggcggaccgagggaggcctggcccggcagcggggagaagggtgcg

SEQ ID NO: 981642 - DNA, 120 bp, Artificial Sequence
  ENSG00000272447_2 (sequence is synthesized)
agggaggcctggcccggcagcggggagaagggtgcggcgcagcccgagtttcccaccttttatcctggcccagacgcggctggggcggacgggacctctcgcgctctgcctcctcctctt

SEQ ID NO: 981643 - DNA, 120 bp, Artificial Sequence
  ENSG00000272447_3 (sequence is synthesized)
gcttcatggagccatgcgcctgggtgggggctcccgagagaagctggcctgcgggcgggccggacgcgctgcgcggacgggacggggcgaaggaggccggcaggcggaggaggaagcggc

SEQ ID NO: 981644 - DNA, 120 bp, Artificial Sequence
  ENSG00000272447_4 (sequence is synthesized)
ggggcggcggcggcggcggcggccgggaagaactagaggtattccccgggcggctggaggactgagtcgagccgggacccgagtcctccggtatcccagcagccaccggaggcagtgagg

SEQ ID NO: 981645 - DNA, 120 bp, Artificial Sequence
  ENSG00000272447_5 (sequence is synthesized)
taatggaggaagaatgtagggagtcctccggtggaccacactccttctagcgagccgcggaaaccatagagatcagggctcagccggagggccggcccactgctgtcacgtggcctccat

SEQ ID NO: 981646 - DNA, 120 bp, Artificial Sequence
  ENSG00000272447_6 (sequence is synthesized)
ccgtgcgctttattggctggtgctggctttacggggttgaattttggacgctgcctgccattcgtgggaccgagtttcaggcagctggaataaagagagatatcgggggaaagccgcgag

SEQ ID NO: 981647 - DNA, 120 bp, Artificial Sequence
  ENSG00000272447_7 (sequence is synthesized)
gagcagagctagccgagtagggcgcccggctgtcaaactggccggcgcagtgcacgctgggccgccccggagcgatcgcagagcccgtcgggagtcgtagtcccggacgggcccgcggca

SEQ ID NO: 981648 - DNA, 120 bp, Artificial Sequence
  ENSG00000272447_8 (sequence is synthesized)
tcgtccgcgacgcagctcgggatccgggtcggggtgtcggccgggttgctgccgggcaccgtcgagcgttagccacccagcattgagctgccagcggctgttctccctaagcaccctcgc

SEQ ID NO: 981649 - DNA, 120 bp, Artificial Sequence
  ENSG00000272447_9 (sequence is synthesized)
tcacgtcgcctcgcctcgcctgaccggccgcagccttggataccagccttaaatcgagccgactacggcccagccccgcccgcggcgaggtgcgcggggttcggtgcgagcccctcgccc

SEQ ID NO: 981650 - DNA, 120 bp, Artificial Sequence
  ENSG00000272447_10 (sequence is synthesized)
ctggccgggccagcctcttgatgcaccggggacgggcgcgcccatccgactcttcgaggggcggcagggccccatctgtgtctttcgctctcgagcccccagctagagttggcttcagcg

SEQ ID NO: 981651 - DNA, 120 bp, Artificial Sequence
  ENSG00000272447_11 (sequence is synthesized)
gaatacctactgtgcgggattattcaacaagccgattgatcacattcttcagctctagcagtgcaaaggcttcactgaaaaagaacattacaacttttttgaaagaaatttgggggtaaa

SEQ ID NO: 981652 - DNA, 120 bp, Artificial Sequence
  ENSG00000272447_12 (sequence is synthesized)
tttaattttaaatactgatttttgataacatttgatcttatgacagcatttgtatttttaattacagataggattacactaaaagtcatttctgacctgctcccttacccttatggctaa

SEQ ID NO: 981653 - DNA, 120 bp, Artificial Sequence
  ENSG00000272447_13 (sequence is synthesized)
aataaactgctaggccctgaagcaaaggcgagccatgttctagagcaatgtctttcttgtattaaaatacagccccatgctcacaaaaaaaaaaaaaaaaaattttggagtgtaaacata

SEQ ID NO: 981654 - DNA, 120 bp, Artificial Sequence
  ENSG00000241317_0 (sequence is synthesized)
ctacttcaataatctccacttgtggtccctgggacttcagccacctcctccaccagggtctcttctagtacatctgccacctcctccacttgcctggcctctgctatctgaaccaactcc

SEQ ID NO: 981655 - DNA, 120 bp, Artificial Sequence
  ENSG00000241317_1 (sequence is synthesized)
agagtctcctgggccatgatatcttggaaaagtctccaccatatttgatgctccatgccccgtgctccctcctctctctctcatttccagtgtttccctttagaaacatttgcagtccta

SEQ ID NO: 981656 - DNA, 120 bp, Artificial Sequence
  ENSG00000241313_0 (sequence is synthesized)
ctgggtaagaggagacgggtgccccccacccactcctcccggccgcgcggacctctcccgctcagacctgcatctgcattcctttgagtttaccacggacttggggcgggatcaaaggga

SEQ ID NO: 981657 - DNA, 120 bp, Artificial Sequence
  ENSG00000241313_1 (sequence is synthesized)
aagtggcctgagcctgtttcatcaaggggttgtggaccgaaaccaaggccgggggtggcggagggcacgcggatgaggggctcaggcctaggaagggccggtcctggacaccgcgccctc

SEQ ID NO: 981658 - DNA, 120 bp, Artificial Sequence
  ENSG00000241313_2 (sequence is synthesized)
ccctgcagccaggcgccgaggcctgcagcacccggagcgccgcactgacccgcgattctgcccgaaggccggcccgggtgcgccccggcgcggggagacaccaacaaggccagcttttcc

SEQ ID NO: 981659 - DNA, 120 bp, Artificial Sequence
  ENSG00000241313_3 (sequence is synthesized)
acgagaggctgcttagctcttgtgaccatatttggtctggcgaggaggcatcttggctgcctggctctcaattgtctgctagagcacagacggtgcccagaaagtgcctctgtcactgga

SEQ ID NO: 981660 - DNA, 73 bp, Artificial Sequence
  ENSG00000241313_4 (sequence is synthesized)
agagcacagacggtgcccagaaagtgcctctgtcactggagatgcggcttcgccaacgggcttgagtgcaata

SEQ ID NO: 981661 - DNA, 120 bp, Artificial Sequence
  ENSG00000241313_5 (sequence is synthesized)
aggcatgagccaccgcgcccagcctgccttaatatttttacagggtaaaataaagtcgaagttaaaatctggagctgccttggaggagaaaagtttaaggaaaagacaaggccactcata

SEQ ID NO: 981662 - DNA, 120 bp, Artificial Sequence
  ENSG00000241313_6 (sequence is synthesized)
tcggaaaaggtagaattttggggccactccctgaatggctgcatccatatccaaaacagaaccaccaaagtgagccacttcccctgttatctgtacttggaggtggctccaattccagac

SEQ ID NO: 981663 - DNA, 120 bp, Artificial Sequence
  ENSG00000241313_7 (sequence is synthesized)
atctgtacttggaggtggctccaattccagactcctcatagactggaagaaattagggccatcttagactaaggcaggcatacacgtatcatccttttttttttttttttgagatggagt

SEQ ID NO: 981664 - DNA, 80 bp, Artificial Sequence
  ENSG00000241313_8 (sequence is synthesized)
tgtgcagcaagtcctctgcccataggactggcaaaaggaaaggggaaactagcacaggtcactccttggaaagtagaatc

SEQ ID NO: 981665 - DNA, 120 bp, Artificial Sequence
  ENSG00000241313_9 (sequence is synthesized)
aggggaaactagcacaggtcactccttggaaagtagaatctttgcaagctactctcagaagccatcacagttgcaacaacaggggaaataagctatcgaacaagaggaagtgactggaac

SEQ ID NO: 981666 - DNA, 120 bp, Artificial Sequence
  ENSG00000241313_10 (sequence is synthesized)
ctaatgatactaattcagaagtcacaaggctgacttgatgattaaaagatgaaaacttgaggccagccctactctaggaaagtcctcactcccgaagaaaggagacctgagccactaagt

SEQ ID NO: 981667 - DNA, 120 bp, Artificial Sequence
  ENSG00000241313_11 (sequence is synthesized)
aagaagtccagttaccctgttggataaaccacatggagaaggaaaggccctgagatacttggagagagggaaaagtccagctgcccagcacctgagctgagcccagcctcagccaacccc

SEQ ID NO: 981668 - DNA, 120 bp, Artificial Sequence
  ENSG00000241313_12 (sequence is synthesized)
accggctgactgcaaacacatcagtgaccaccagtaagaccagcagagctgcacagccaagcccagcccagattgcagaattgtgagcaaataaaatggatattgctttaagccacaaaa

SEQ ID NO: 981669 - DNA, 120 bp, Artificial Sequence
  ENSG00000241313_13 (sequence is synthesized)
gacatgctgggcacccccagccagtcgaggccccgggtggccgcccgacgagtcggtgctggactggcgcgagtgcgagcccgaatcaggctccttaaagaaagactccggcaggatctt

SEQ ID NO: 981670 - DNA, 120 bp, Artificial Sequence
  ENSG00000241313_14 (sequence is synthesized)
cggagggggcgccgaggccggattcatcttctgcaaaaagaaggatggcaaaggaaaggtcgcacgattccaggacaggcagccccccgaaagaagttcagcccgagccaactccaccac

SEQ ID NO: 981671 - DNA, 120 bp, Artificial Sequence
  ENSG00000241313_15 (sequence is synthesized)
gtctcgactccggaagcccgaggagcctggagccctggagtggtgccggatgagcgcgcgagctccagcgggcactacctgggcgggcagcgaagctgagcctgagcgcgcggcggccgc

SEQ ID NO: 981672 - DNA, 120 bp, Artificial Sequence
  ENSG00000241313_16 (sequence is synthesized)
cctgggtcgctcgggtgagtcccgagattgcggagctggagccgaggcttggctgacaaatcccgacccgactctgtgcctggcagtctaagggcttcggctctcacatcccccgagctg

SEQ ID NO: 981673 - DNA, 120 bp, Artificial Sequence
  ENSG00000241313_17 (sequence is synthesized)
gcctaaggcgctagtgctgggcgaaaaggaggcgcaggagaagcagacagcgcggccgcagcagctcccggactgtcccataaacaaagtttggagcaaactcccacccccaggaaagag

SEQ ID NO: 981674 - DNA, 120 bp, Artificial Sequence
  ENSG00000241313_18 (sequence is synthesized)
gcgggcccgaaagttgagctgttgaattatgtatgacctcctagtccctagccggccagcccccgctcgcccctcctcttcctcctcctcctcctcccacctcggctccagaaaaccctg

SEQ ID NO: 981675 - DNA, 120 bp, Artificial Sequence
  ENSG00000241313_19 (sequence is synthesized)
ggcgtgatgggtactttactgggtaagaggagacgggtgccccccacccactcctcccggccgcgcggacctctcccgctcagacctgcatctgcattcctttgagtttaccacggactt

SEQ ID NO: 981676 - DNA, 120 bp, Artificial Sequence
  ENSG00000265458_0 (sequence is synthesized)
gagatgacatgaccctcgtgaaggggcctgaagcttcattgtgtttgtgtatgtttctctcttcaaaaatattcatgacttctcctgtagcttgataaatatgtatatttacacactgca

SEQ ID NO: 981677 - DNA, 120 bp, Artificial Sequence
  ENSG00000265458_1 (sequence is synthesized)
tgtcacgtaggctcggcggagtagcagcgcgcatgcgcggcctgcctgtcagtaaccacgtgatggacccggaagcccgagggcagatgctaaatgatggccatttgacatttgcgtgtg

SEQ ID NO: 981678 - DNA, 120 bp, Artificial Sequence
  ENSG00000265458_2 (sequence is synthesized)
ttcactatggatagttttaccaagtacattgatttgggcccttacagcttacaaagtaaagataacacttactcctccaagaaattgatttcagctaagcaaaacattgatacagggcta

SEQ ID NO: 981679 - DNA, 120 bp, Artificial Sequence
  ENSG00000265458_3 (sequence is synthesized)
taatggaagtgttggactcataaacgttttatgaaatcagtgtgtgtgtattacagaaatcagaaatgagaagtaagaacatgtctgggagagtgtgacataagaaaaataacttgtagg

SEQ ID NO: 981680 - DNA, 120 bp, Artificial Sequence
  ENSG00000265458_4 (sequence is synthesized)
atccaaagacccccaactgactacacgaaccccctactggctaaggagatcccagggttgccttgaaggcagttctcagccatgacagatgggagtttcggcccaattgaccagtattcc

SEQ ID NO: 981681 - DNA, 76 bp, Artificial Sequence
  ENSG00000265458_5 (sequence is synthesized)
gctggactgtactgccgtgatctcggcttgctgcaacctccctgcctcgggctcccatgcgccaccacgcctgact

SEQ ID NO: 981682 - DNA, 62 bp, Artificial Sequence
  ENSG00000265458_6 (sequence is synthesized)
aggcatgcgccaccacgcctgactggtttttgtttgagtgatctgcccgcctcggcctcccg

SEQ ID NO: 981683 - DNA, 120 bp, Artificial Sequence
  ENSG00000265458_7 (sequence is synthesized)
tcactccacgtacggcgccggggggaccgggtccttgcgccggtttccgcttctcgtgggtcctgcggcggcggcggcggccaagcggcgttcaccagggagtcgtttcggcccaattga

SEQ ID NO: 981684 - DNA, 120 bp, Artificial Sequence
  ENSG00000265451_0 (sequence is synthesized)
acgcagtccgagagtccagacgcatgccgactggaggaccaaagagattagcacgaagaaggatgatcttccacaaaaagagctatgtacagctataatggaaaatactcggtgaggaga

SEQ ID NO: 981685 - DNA, 120 bp, Artificial Sequence
  ENSG00000265451_1 (sequence is synthesized)
aacgaaataaaaggcaatacagcgtagccaaacccgggttagctgcgggtggagttcaagagcgcgccgcggtcccgcccccgccagccccgccccggcgagaaaagcgtatgcaaattt

SEQ ID NO: 981686 - DNA, 120 bp, Artificial Sequence
  ENSG00000265451_2 (sequence is synthesized)
tggggtgtcgtcgaaagctgtggaggctggagagtacagtatgaagtggaggagtaactatcctgcggagaaaactgacagacgcaacctcagccagatggtggaggtcaacatcaagta

SEQ ID NO: 981687 - DNA, 120 bp, Artificial Sequence
  ENSG00000265451_3 (sequence is synthesized)
cacgtcatatgatgtcatgaaaacggcattttgcctgtgacagtccttcccaagacccttaagctcagtctaaacatgaggaaaacatcagagaaattccaatagaggggcatcctacaa

SEQ ID NO: 981688 - DNA, 120 bp, Artificial Sequence
  ENSG00000265451_4 (sequence is synthesized)
aacacctgaccagtacccctcaaaactgtccaggtcatcaaaaacaagaactctgagaaactgtcacagcaacaggagccaagggaaacataacaactaaaggtaatgaggtatcctgga

SEQ ID NO: 981689 - DNA, 120 bp, Artificial Sequence
  ENSG00000274139_0 (sequence is synthesized)
aatctggggcagcaatgtgctcagggagcgttccccaggagaagagcaaagactgatcgaaagcaacctgagccgccctgctcaccttgtctacgattacctggcagcagagggtgggcc

SEQ ID NO: 981690 - DNA, 120 bp, Artificial Sequence
  ENSG00000274139_1 (sequence is synthesized)
tgtgacccagatctggtaggtggggcctgagaggaagtggactggagggttaggtgcttcctccccagggagatgaagacattcaagagatggaaagtcgctcctgcgcttcttccctgg

SEQ ID NO: 981691 - DNA, 120 bp, Artificial Sequence
  ENSG00000274139_2 (sequence is synthesized)
gcagtcatataagaataggagaaaggcaggtaaagtatagaaaagctaccttgagtcccagcatcactgagctgctgaattaacaaccctgggtccactaataccagtttcttgtttgca

SEQ ID NO: 981692 - DNA, 120 bp, Artificial Sequence
  ENSG00000274139_3 (sequence is synthesized)
aaataatgaattgtccttattgtctgcactcatttcagttgggcactctcatattttgtaaccaaaggcatcttacctattgcaacaaagaagaaataaagaactacaatttttctatca

SEQ ID NO: 981693 - DNA, 120 bp, Artificial Sequence
  ENSG00000269172_0 (sequence is synthesized)
ggtgctgcctgcccagggggcagcaagaacaaaggccccggggaaaaaagaataaaaatgttccaaggtcaaccaaaaagtctgacggtaccaaatgttggtgaggaggtggagcaacta

SEQ ID NO: 981694 - DNA, 120 bp, Artificial Sequence
  ENSG00000269172_1 (sequence is synthesized)
ctcagtcaccaccgctaggaggatacacagatttgaccaccttgggaggctgtgtggcagcgcccactaaatctgaagctaccccaccctctgccctgggctacgcactcctgggtatat

SEQ ID NO: 981695 - DNA, 120 bp, Artificial Sequence
  ENSG00000269172_2 (sequence is synthesized)
tccctgaagaaacgcaggcaccggcaccccaggagatgctacaaagagatggctcgcatcagcgcagcaggagatggaggaacagaatattatatggggctgggcacagtggctcacgcc

SEQ ID NO: 981696 - DNA, 120 bp, Artificial Sequence
  ENSG00000269177_0 (sequence is synthesized)
ctcagagagttggcgctctcatcctcctccttcacacggaactggccaagcttggtcactgtcaccttctaaggtcccgcaagatgtgagcgacccttatctaaattctcccatggagtc

SEQ ID NO: 981697 - DNA, 120 bp, Artificial Sequence
  ENSG00000269177_1 (sequence is synthesized)
ttccatatctggcaatacagcgggctacatgtcctaaggaactttcccggcagagaatattcagtaaactggcacaatattcaaacaccttttggaaatgcacaggtgagtcagcggaaa

SEQ ID NO: 981698 - DNA, 120 bp, Artificial Sequence
  ENSG00000269177_2 (sequence is synthesized)
gtttctcagctcaaacctaccctctacaactcatctctgtgatctgggcccgcacttggcaaaccacctttctgcttccctagctgatcgtgaccaggctctgccaatagggggggcaag

SEQ ID NO: 981699 - DNA, 120 bp, Artificial Sequence
  ENSG00000269177_3 (sequence is synthesized)
agagagagtttgcaaggctgcaggagggaggaaggaccagcttctcgtgcattgcagatcctgtgagcatcacccccagttaagcttctgctgctgcagtggttcctgcctgcagcagca

SEQ ID NO: 981700 - DNA, 120 bp, Artificial Sequence
  ENSG00000269176_0 (sequence is synthesized)
gccaagctgtcaccgaagaaggcgtagagctcccggtagatgtcggccagggtcaccgaaagagaagggtcctccggccccgcgccccctggcggcagcgggaggccggacccaaagctg

SEQ ID NO: 981701 - DNA, 120 bp, Artificial Sequence
  ENSG00000269176_1 (sequence is synthesized)
ggttctgcaccgcccccggaggacgactcttgaaagagaaggctgtcccatggcaggtcgtccaggcgccggcaccccctgccacctgggccacccctgttgggctctgctgcctgggcc

SEQ ID NO: 981702 - DNA, 120 bp, Artificial Sequence
  ENSG00000269176_2 (sequence is synthesized)
ttcatcttcagcagtcgctctaccgccacctgtaagagccaaggactaagataggcaaaaaattcgaggaacctgggcccatcaaatattccaaagtaagcctgcttggctgctaagctc

SEQ ID NO: 981703 - DNA, 120 bp, Artificial Sequence
  ENSG00000269176_3 (sequence is synthesized)
ggctccatagactttgtgtccatctgctttgacctgggcattagatactgaataatcatccagcacagcctgcaagtttgtccagtaggtggacaggtgtgggtacaggactcgttctac

SEQ ID NO: 981704 - DNA, 120 bp, Artificial Sequence
  ENSG00000269176_4 (sequence is synthesized)
tgcctggaaggaagagaaggaatacagttagcatgtctttgatacttattccctctcaaggaccctttcccatgaaagacctacctttatctctgatcctagacagggctcaatcctcct

SEQ ID NO: 981705 - DNA, 120 bp, Artificial Sequence
  ENSG00000269176_5 (sequence is synthesized)
aaattccctgattggcatattcaaccatatatttatttggaacctactgtatacctaagctaggcattgggaataaagataaggtacaaagggagacaataaaaaatatacccaatatca

SEQ ID NO: 981706 - DNA, 120 bp, Artificial Sequence
  ENSG00000180861_0 (sequence is synthesized)
aaatttgttggctgcttgagctgggatattcatctttctcctgatcttggacatcagaactcctgattctcaagcctttgggtttggactggaggcaccagctttcctgggcctccagct

SEQ ID NO: 981707 - DNA, 120 bp, Artificial Sequence
  ENSG00000180861_1 (sequence is synthesized)
tgcagatggcatatcatggaacttctcagcctccaaattcataactctaatacaccagtacaatggaaagattcctaaattcaaaagccagaaggctgggttcctgttcccaccctgcct

SEQ ID NO: 981708 - DNA, 120 bp, Artificial Sequence
  ENSG00000180861_2 (sequence is synthesized)
acctgcttggagggactcagaggctgtggagactgtggccctccttggcctctgtggaatctggccatttgaatcctgtcagccctgttctccatcaccaaaggactccggaggaactgt

SEQ ID NO: 981709 - DNA, 120 bp, Artificial Sequence
  ENSG00000180861_3 (sequence is synthesized)
gccaagcaggctgtcagccacgggcaagctttctgaaaaagacgtgccaactgcagccacagaaagtccattcccttgaataactttgctaatatttgaaaattagttcccttgctcctg

SEQ ID NO: 981710 - DNA, 120 bp, Artificial Sequence
  ENSG00000180861_4 (sequence is synthesized)
agagaaacagcttagggagaaagaggcagaggacaaaggaactcgccagttgcttctgcaaaaaacgaaaaaacagaaaaaaatctaaatgagttctcctgcagttgacaggctttgatg

SEQ ID NO: 981711 - DNA, 120 bp, Artificial Sequence
  ENSG00000180861_5 (sequence is synthesized)
tgtggaccatcagcaggattgcaaagtgttaacagatggagaggaaggacaggagtggacagagcttccctcccagatggagtgattgattgatatttaccacacggagtgatagagcag

SEQ ID NO: 981712 - DNA, 120 bp, Artificial Sequence
  ENSG00000180861_6 (sequence is synthesized)
tgttctctgacctgcttggagggactcagaggctgtggagcaacagatttgggaatgaggaatcgttccctggaagagtcagagcgctcgtagacacattctgctggattgcacgagctc

SEQ ID NO: 981713 - DNA, 120 bp, Artificial Sequence
  ENSG00000180861_7 (sequence is synthesized)
ctcccctgggaaatccactaagactagaggaaagaattgcttggaggattcagaggctgaagagtggacagacggctttaattgagaaaaagaagcagaaaattgaggaagatgtgaggc

SEQ ID NO: 981714 - DNA, 120 bp, Artificial Sequence
  ENSG00000180861_8 (sequence is synthesized)
atcaatgccagcagacgacatgtgacaggtgctagccacatggatcacactaaatttctgtcatttatatagataaaaaagaatttccaaagagctcctccataattcagcattaaccag

SEQ ID NO: 981715 - DNA, 120 bp, Artificial Sequence
  ENSG00000180861_9 (sequence is synthesized)
ctttaaatcatcacctttctttaccttttcaaagcacttttatctagctagctttcactttcagagtggccaattcaggtgaggattctcaatcctgttctgcagctgaggaactcatgc

SEQ ID NO: 981716 - DNA, 120 bp, Artificial Sequence
  ENSG00000180861_10 (sequence is synthesized)
tcaaaagggctaagagtttattctcttacatccaaacaccttgcttttccaaatcttgtgctcactttacctacacattttgatttttccaggctgatgacaagttagacatgcagactc

SEQ ID NO: 981717 - DNA, 120 bp, Artificial Sequence
  ENSG00000180861_11 (sequence is synthesized)
ctcaggctcattcataatctgtatagacattacaggtcatgcaaatttaagaaaaggctaaaaggtgcccgtttgcacccaacatgttggataatgccccggtaaagtggaaaatcagtt

SEQ ID NO: 981718 - DNA, 120 bp, Artificial Sequence
  ENSG00000180861_12 (sequence is synthesized)
tccacagcctcgctctgtaggtttccttggaattgtaaaagcataggactctgcctcatatttatttctatacggcaatgaggatataaaggagcagaccgaaaagagaaaggaatttta

SEQ ID NO: 981719 - DNA, 120 bp, Artificial Sequence
  ENSG00000180861_13 (sequence is synthesized)
aaagccatggaaagctgccctaaatgtggttggatatagagaggagagtgctgaaggcaaacagctgtgccctctttgcctttttgctgaggaaggggatttaagccaaaagaacacacg

SEQ ID NO: 981720 - DNA, 120 bp, Artificial Sequence
  ENSG00000180861_14 (sequence is synthesized)
ccccattttccctgatgtgattattacacatagcattcctgtatcaaaatatcccatgtaacccataaatatatatacctaccagtatatttctgtggctaatctgaaagccacctgcac

SEQ ID NO: 981721 - DNA, 120 bp, Artificial Sequence
  ENSG00000180861_15 (sequence is synthesized)
ccttgtgaagacacccacagagacttctgcctcccctcctaccctctggcctcaagagctccctgggctctcctgttgcaggagggagagggagagcttctttaggttcctggtaaggat

SEQ ID NO: 981722 - DNA, 120 bp, Artificial Sequence
  ENSG00000180861_16 (sequence is synthesized)
ctctgaagacaattccttaggcttggataattcccagacatttgctaaaaagcagcatcctccaaagctttaatttggatcacaggaaaatgatgctcccgcctcagattcaaacacagt

SEQ ID NO: 981723 - DNA, 120 bp, Artificial Sequence
  ENSG00000180861_17 (sequence is synthesized)
tttatctcacactgcaagctccctggcatgggcaaagtcctcgatgcctttcctggtggtttccaacatcaaggacatacttgttcctcctcctagctctctccctcagccaagtccttc

SEQ ID NO: 981724 - DNA, 120 bp, Artificial Sequence
  ENSG00000180861_18 (sequence is synthesized)
cttacaatgaattgtcctgcagaactccctcttaagcttggcttctgggacagaaaacctactttctgaaagggtatggggactgtcagagcatgaactggactcaagctcccaattaca

SEQ ID NO: 981725 - DNA, 120 bp, Artificial Sequence
  ENSG00000180861_19 (sequence is synthesized)
gagcagacacaaggctctgcctgcaccaggccatccctggatttctgcagctccaggactctcttccagcatctagatgcagctactctcattccagctttgtgtcctgtttgatgcaaa

SEQ ID NO: 981726 - DNA, 120 bp, Artificial Sequence
  ENSG00000180861_20 (sequence is synthesized)
atctttattccttcctgtttcaatccctgttgcatattctgtgtgacaaagcaagaagctggaaatcgagttctgagctttatacccagctctgccacaaatgtgccatgaccttgaata

SEQ ID NO: 981727 - DNA, 120 bp, Artificial Sequence
  ENSG00000180861_21 (sequence is synthesized)
agtcacatgacttatctggacctggattctctcatctgtaaaagaggaagctgagctatactacttttaaaatgtctccagctttaattttattagaatatcagctgcttcctcctctgg

SEQ ID NO: 981728 - DNA, 120 bp, Artificial Sequence
  ENSG00000180861_22 (sequence is synthesized)
tttctcatggcaggttgtgcattcttctctggagacaccaaatttcattggagtatctctccttacaaatgtatttccccactagattggcccctcaagaacaaggattgtattttagtt

SEQ ID NO: 981729 - DNA, 120 bp, Artificial Sequence
  ENSG00000180861_23 (sequence is synthesized)
acctctgttatctctgtacctggggaggagtgagaaaaggagagcaggaaaggcaatggtatagtaccaacatttgttgagcttctattatgaggaattgtctatgctacacattgtaca

SEQ ID NO: 981730 - DNA, 120 bp, Artificial Sequence
  ENSG00000180861_24 (sequence is synthesized)
tatgaggaattgtctatgctacacattgtacataaagtatgtatgattcacagtataaacattataatctggaatcaacctaaatgttcattagcagatgaatggataaagaaaatgtgg

SEQ ID NO: 981731 - DNA, 120 bp, Artificial Sequence
  ENSG00000180861_25 (sequence is synthesized)
agagaaacagcttagggagaaagaggcagaggacaaaggaactcgccagttgcttctgcaaaaaacgaaaaaacagaaaaaaatctaaatgagttctcctgcagaactctaatacaccag

SEQ ID NO: 981732 - DNA, 120 bp, Artificial Sequence
  ENSG00000180861_26 (sequence is synthesized)
gaaacgaagggctgacccagatcagttgttctctgacctgcttggagggactcagaggctgtggaggtgagtgggaaacaggccaggttccaggcccacacttcaaagagacaaggtctg

SEQ ID NO: 981733 - DNA, 120 bp, Artificial Sequence
  ENSG00000180861_27 (sequence is synthesized)
ctttggactgttttacacacagggcttctgagttttagatttcattagaagtgtttcttctgccaaatgaaatttgaaaaccactgagctgggtgattattaggacccattccagctgtc

SEQ ID NO: 981734 - DNA, 120 bp, Artificial Sequence
  ENSG00000180861_28 (sequence is synthesized)
ggagctgtggaaagaggtggtatgagtttgggcttgagttagtggacatggtagccaaatcagagatccctctctcattcaagtcatctgttgctacctgtttgctctggaggtctgaac

SEQ ID NO: 981735 - DNA, 120 bp, Artificial Sequence
  ENSG00000180861_29 (sequence is synthesized)
ttctgggagataaatgtttaaactgacagacttcagttcaaataatgactccacattcgtatcctgatattgggtaaataaataaatctcttaaattcccagagctgcaggttcttagcc

SEQ ID NO: 981736 - DNA, 120 bp, Artificial Sequence
  ENSG00000180861_30 (sequence is synthesized)
tataaaatgatgacatcacctactttgcccagttattgtatatactagttaacatggtctaaactgtgccaattggaagacccaaaatgcaatgccttgagaagagtaaaaggttttttc

SEQ ID NO: 981737 - DNA, 120 bp, Artificial Sequence
  ENSG00000180861_31 (sequence is synthesized)
tctttcatgtaaatagtctagaacaggccaggtggtgggccttctactccaagcatccttcaaggaacccaggagatgctagttctattattttcagcacgttgctcacaaggttactgc

SEQ ID NO: 981738 - DNA, 120 bp, Artificial Sequence
  ENSG00000180869_0 (sequence is synthesized)
aaaatgacctctgagtcttacacattctgcctgctaagagtgattttgcatgcctgaggcctcgggccatgctgtaccggtgtgactagaaacagctcttctggcatgatggtgacctgc

SEQ ID NO: 981739 - DNA, 120 bp, Artificial Sequence
  ENSG00000180869_1 (sequence is synthesized)
catggaaaatgctgggtcccaatgcccaagtgactgtagttgtggctcagccaggacccgaccatttagatcacctgttgttagacacgcaacactgtcaacatagttcctgtgggtcag

SEQ ID NO: 981740 - DNA, 120 bp, Artificial Sequence
  ENSG00000180869_2 (sequence is synthesized)
cagcctgtacacagcttacctgggtcccctgcttggggggatctcacaaggcttcaatcaagatgtcagcccaggctgtggtctccactgaggctccgtgggaaagaccctgcttccaag

SEQ ID NO: 981741 - DNA, 120 bp, Artificial Sequence
  ENSG00000180869_3 (sequence is synthesized)
ctcacctaggttgtttgcaaaattcggttctttgcagctgtagaatggagggcttcagtttatttctagctatgctgtggggcggggtgggggagctgccctcagatcctagaggtcacc

SEQ ID NO: 981742 - DNA, 120 bp, Artificial Sequence
  ENSG00000180869_4 (sequence is synthesized)
tgcaattccttgccacttgactatgtccacagaggtggtccatgcatttctgcttcctttgccaaagccagcaacaagagactccaacaagacacatcctaccatctcatgtatgcaatc

SEQ ID NO: 981743 - DNA, 120 bp, Artificial Sequence
  ENSG00000180869_5 (sequence is synthesized)
ccgtgcaggcaatcatggacatgtccatcacatacataaccacgtccattccatcacctttgctgtattctattggcccactcaaagggtgtggactaattagggagcgagaatcagccc

SEQ ID NO: 981744 - DNA, 120 bp, Artificial Sequence
  ENSG00000180869_6 (sequence is synthesized)
tcttaagtcagccctctctatttcatgtgccaactctctagaatattgatccttttggtattttaagtcatatctattgtcactggaaatcctttttgaagtagaaaggacagagctcac

SEQ ID NO: 981745 - DNA, 120 bp, Artificial Sequence
  ENSG00000180869_7 (sequence is synthesized)
aaaatacaaaccgcgccactattcctgcctgtcatttagagttttgccaggggagcaggttgatttcagtcttttcatggagtttactgtttgatatgatgatatctttacccccataat

SEQ ID NO: 981746 - DNA, 120 bp, Artificial Sequence
  ENSG00000180869_8 (sequence is synthesized)
agtttactgtttgatatgatgatatctttacccccataattaattttatttttagttttgagacatggtctcattctgtcactcaagctgtagtgcagtggtgccatcttggctcactgc

SEQ ID NO: 981747 - DNA, 120 bp, Artificial Sequence
  ENSG00000180869_9 (sequence is synthesized)
gcttcctgggaccaccccagtgggatcactggcgcaaaccactatgcccaactaatttttaaaaattctttgtagagagggggtttcactatgttgctcaagctggtctcaagctcctgg

SEQ ID NO: 981748 - DNA, 79 bp, Artificial Sequence
  ENSG00000180869_10 (sequence is synthesized)
gggtttcactatgttgctcaagctggtctcaagctcctgggctcaagcaatctgcttgccttgggctcctttgggatcc

SEQ ID NO: 981749 - DNA, 120 bp, Artificial Sequence
  ENSG00000180869_11 (sequence is synthesized)
attatcttgggctagatttcgggggaggggcctaatttagctggcatgtgccccattgggtgaatcgaataaaagcatagctgccctggcatggatctgtgaacaaaagttctctgaaaa

SEQ ID NO: 981750 - DNA, 120 bp, Artificial Sequence
  ENSG00000180869_12 (sequence is synthesized)
tttggaagaaagacttcattcaggaacagttcacaaactttctgtgtaaaccagttactttccagagaacaaagggaggatcctggttttatagtaaaagttcatgctcaggttgccaat

SEQ ID NO: 981751 - DNA, 120 bp, Artificial Sequence
  ENSG00000180869_13 (sequence is synthesized)
caggtccattttatgaaaatgaaggctttaaatttgcttagttctgtttggttgatgcagctgcattctgattagtggttagaactgagccctaattggttctttcagatgagctctgat

SEQ ID NO: 981752 - DNA, 120 bp, Artificial Sequence
  ENSG00000180869_14 (sequence is synthesized)
tggctgctttaggtgagctctgaaagccccactgttaaactgaggttgggggtttccagggaaactccgagtatatgagttctagtcagcaaatggcctggccacttggctctctttaaa

SEQ ID NO: 981753 - DNA, 120 bp, Artificial Sequence
  ENSG00000180869_15 (sequence is synthesized)
attttggcccagttaggtacttgggatccatcttgaaggattggctcttgaaggatttgttctgagaacacttgtgaacttgagaggcccagtaaggcagagtgaaaaccagaacgcttg

SEQ ID NO: 981754 - DNA, 120 bp, Artificial Sequence
  ENSG00000180869_16 (sequence is synthesized)
gcacctatcagttagcacaggatccttccctggaacatcagcatcccttataagtgtgtctaacggccaactcgtagacagagctattgttaatacactgttctgagtatccctctgtga

SEQ ID NO: 981755 - DNA, 120 bp, Artificial Sequence
  ENSG00000180869_17 (sequence is synthesized)
acaccttcatctggttgatacaggaaaattaaggaagacaaagttttgggaaagtgattgaaatcgtggaataatcaaagcaaatcaatggcagcttgtgtttaaaattaaaaaccaact

SEQ ID NO: 981756 - DNA, 120 bp, Artificial Sequence
  ENSG00000180869_18 (sequence is synthesized)
gtcaagcatggcatttacctaaagtaatttccaaaagtaatcaacagagtgaacaacacccagtgggccaggaccatgtcaacgttggctcattttcagaaacaacatggtgtcagggct

SEQ ID NO: 981757 - DNA, 120 bp, Artificial Sequence
  ENSG00000180869_19 (sequence is synthesized)
ccatgttcatggacaccatgaggggagtctcctagcaatgaccctcttctctcctgcaggaagtccaaggtcctttgcatggcagtcttatccccaaatggcatttgctttcgacccatg

SEQ ID NO: 981758 - DNA, 120 bp, Artificial Sequence
  ENSG00000180869_20 (sequence is synthesized)
gacccatggtatttccatattccatgaagaaaactttaaaaatataggcaaatcaccctgcaagtatccagagagtttccagggggtttctcacacacacacacacgcacacacacacac

SEQ ID NO: 981759 - DNA, 120 bp, Artificial Sequence
  ENSG00000180869_21 (sequence is synthesized)
ttagtggggatcttttaggtcaatacatatagatctacatcattattagttgttgcttggtgggccactgcatgaatggttaataattgtttaatttttcctagttagacaataaagatt

SEQ ID NO: 981760 - DNA, 120 bp, Artificial Sequence
  ENSG00000180869_22 (sequence is synthesized)
tttaaagaatatatctttgcatacttgcttatttatttgattaggataaattcctgaaattggaattgttaaaccaagaaatacgcatatttttaaggcttttgttatgttttgtcaaat

SEQ ID NO: 981761 - DNA, 120 bp, Artificial Sequence
  ENSG00000180869_23 (sequence is synthesized)
gatcctcagaaagaatgtttattaattcacatttccactagcactacacgatagaactattgggtattttttatgctgttacctttgctggttttataaataaaatattctcttgttctt

SEQ ID NO: 981762 - DNA, 120 bp, Artificial Sequence
  ENSG00000223635_0 (sequence is synthesized)
aatggctcccgcgggttgtggtcggagcgctggcgggggcgggatcgtgacgttaagggcggtgcccagtcagcgaggtaggtcgggaaggcagccggcggccccagatctagaaccgct

SEQ ID NO: 981763 - DNA, 120 bp, Artificial Sequence
  ENSG00000223635_1 (sequence is synthesized)
gcagtgccgagcttccagggacgtgaagccggaaagccaggcgcccttcttgactgcgcctaggtggaactggccctccagcagcttgaacgtagcctcttttcacactggtagttcctg

SEQ ID NO: 981764 - DNA, 120 bp, Artificial Sequence
  ENSG00000223635_2 (sequence is synthesized)
aacctcttgtgaaatgaaagatgttcctcattccaagctgaggacggagaaaagccgtaaagctgacactggagctagaatgacttgtcagccacctttgagcaagaacttgcctggagt

SEQ ID NO: 981765 - DNA, 120 bp, Artificial Sequence
  ENSG00000223635_3 (sequence is synthesized)
aatgtatggctattgaaggatagtaagcagacagcactaaaagtcatccattcgttatggatttagtcttaagaccctcatttgagagatgccttccctgtacctggaggaaagaaacat

SEQ ID NO: 981766 - DNA, 120 bp, Artificial Sequence
  ENSG00000223635_4 (sequence is synthesized)
ctttatctctgaagacacagggccacagagaagagtctgaacaaacaggctttaccaatttcccccagttgttaccgttagatcagacctttgtccagtcatatccttccacaagttgtc

SEQ ID NO: 981767 - DNA, 120 bp, Artificial Sequence
  ENSG00000223635_5 (sequence is synthesized)
cactcatcaaccctaagcataaaaatgcacaagtttccttgtttgtttgggtcttcatttccaagggctcctatgtcatgttaaacttttaaataaatttgcatgcttttctcttgtgaa

SEQ ID NO: 981768 - DNA, 60 bp, Artificial Sequence
  ENSG00000232719_0 (sequence is synthesized)
cggtggtgcgatcttggctcactgcaaccccctctcccaaagcccagctaatttttgtat

SEQ ID NO: 981769 - DNA, 120 bp, Artificial Sequence
  ENSG00000232719_1 (sequence is synthesized)
gagattacaggcataagccactgcacccggtcgcttagctcccacttgcaagtgagaacataatgacatttggttttctattcctgtgttacttcacttagaataatggtctccaaatgc

SEQ ID NO: 981770 - DNA, 83 bp, Artificial Sequence
  ENSG00000232719_2 (sequence is synthesized)
tttggttttctattcctgtgttacttcacttagaataatggtctccaaatgcaaactttttttttttcttttttctgagacgg

SEQ ID NO: 981771 - DNA, 120 bp, Artificial Sequence
  ENSG00000232719_3 (sequence is synthesized)
agaggtcacgtatgggttaatctgaccatgagctctgtaagtccagcagtgcatcttgggtgctttgttcacctggataggctcaatgatcagagaatctatatccaaaaccttaaattc

SEQ ID NO: 981772 - DNA, 120 bp, Artificial Sequence
  ENSG00000232719_4 (sequence is synthesized)
agcattactctgcatttttaagcatgtgcagcaaaaattcagtactctttttgggccagcaaccctgtatctagccccactgtctggcctgggcacacctaccaactccaccattgtagc

SEQ ID NO: 981773 - DNA, 120 bp, Artificial Sequence
  ENSG00000232719_5 (sequence is synthesized)
gtggtttctacacagtacttttataaagtgacatctttcagaatacttggtggcttctcgtgtatgcctacccttgatggcccagataatttcacccgtattcttaaagaaaacaaagat

SEQ ID NO: 981774 - DNA, 120 bp, Artificial Sequence
  ENSG00000232719_6 (sequence is synthesized)
ttgaaccttttgatttgcatgattttgtgaagttttctaggacaaatgaatagtgaaccattttcacagatcacctcaggctgcttagaggaagcgagctcattaagcttctttgatcaa

SEQ ID NO: 981775 - DNA, 89 bp, Artificial Sequence
  ENSG00000232719_7 (sequence is synthesized)
ctgcttagaggaagcgagctcattaagcttctttgatcaaagggtttgtttttatctaatttggaatttttcagccattatttctttaa

SEQ ID NO: 981776 - DNA, 120 bp, Artificial Sequence
  ENSG00000235563_0 (sequence is synthesized)
ctagcctggtggggcagacgatgcagcatgagcccagcgggcagcccagagctcaacccaccagggtgatcatggactccgtgatcacccccatctccacaccccgtcctggcctctggg

SEQ ID NO: 981777 - DNA, 120 bp, Artificial Sequence
  ENSG00000235563_1 (sequence is synthesized)
ggacctggcagggcaggctcgggcctggcgttcccaagcggggtgtgggtggcaatagttaccggatgaggtccaacagggcatcggctgagctcatgatgggcttcccactctgctccg

SEQ ID NO: 981778 - DNA, 120 bp, Artificial Sequence
  ENSG00000235563_2 (sequence is synthesized)
tggtctccttctgggccgcgctgcctgggtggatgatggagaccatgaagatgcccacgatgacagccatgaaggtggtccacaggtagtacgccacggtgaggacgcccaggcggctag

SEQ ID NO: 981779 - DNA, 120 bp, Artificial Sequence
  ENSG00000235563_3 (sequence is synthesized)
aggtcttggcatccagggaggcaagtccggacatcaagctgggagggcgagggggtcaggggctgtggtggggaggccagggcctggctggcactcagcgctcactcagcccctcctggc

SEQ ID NO: 981780 - DNA, 120 bp, Artificial Sequence
  ENSG00000235563_4 (sequence is synthesized)
catgtccagctgcctcacagtgctccagggaaccccattcttccaacaatccagtcctgtgctccttccagcctctctttctgctctgccctctcccccacgccccggggcgcaggccac

SEQ ID NO: 981781 - DNA, 120 bp, Artificial Sequence
  ENSG00000235563_5 (sequence is synthesized)
acacatctgtgccttgagacctctgcactgctaggcagagagcccaggccagggtggctgtgggatggtggggacactgttgggggagtgagagattaattaaggaaatgcgtgtgcttt

SEQ ID NO: 981782 - DNA, 120 bp, Artificial Sequence
  ENSG00000235563_6 (sequence is synthesized)
actttgttgcctcaagtttcccatgcttggtgtcctctcagaagcttccttcactctcctgacccctgcccagccaggcaggaccaagcttggtctacctctgagatctacctgcctctc

SEQ ID NO: 981783 - DNA, 120 bp, Artificial Sequence
  ENSG00000235563_7 (sequence is synthesized)
ttgtgagaggagggatgagtctgacttccctgtgggtcccgagaggacggcaccgcaggcggttcctgcgggctcctggacgagctaatgaggagtgagtgagagcgctgggctgggggc

SEQ ID NO: 981784 - DNA, 120 bp, Artificial Sequence
  ENSG00000235563_8 (sequence is synthesized)
tggtgacccaggtcctagtcccagctctgccaactggctgtgtggcctcaggcaagcaagtcacttccccatctttgggcctcaggatctccatctgtaaaatggggacatcttgggttt

SEQ ID NO: 981785 - DNA, 120 bp, Artificial Sequence
  ENSG00000235563_9 (sequence is synthesized)
gtgcctgggcccaggctccttgtcacagggggctgtgttgagagggctgtgggtctctctcctctcggctcctccccacccctagccaccctggcctgggctttctgcctaccagtgcag

SEQ ID NO: 981786 - DNA, 120 bp, Artificial Sequence
  ENSG00000235563_10 (sequence is synthesized)
gtcagccccagagtactggcgtcctggagccctggagccctggagccctagagcaacgcttcttgcagccattgtggggggtgtgggacggtggggggtgtggggtgaagtgagattaat

SEQ ID NO: 981787 - DNA, 120 bp, Artificial Sequence
  ENSG00000235563_11 (sequence is synthesized)
taaggaaatgcttgtgctttgctttgttgacaaaaggatttttccccaaagccctttcattctttcagataaagaagtatttgtctggttttaatcatgtaaacaagagcagataatccc

SEQ ID NO: 981788 - DNA, 120 bp, Artificial Sequence
  ENSG00000235563_12 (sequence is synthesized)
cagccacgctcctcttatcattagattccatgcagcagcatccagccccaggctgagcgtgaacaccggccccctcccccagcgggagccaccgcctgtgagggccctgccctgcctgct

SEQ ID NO: 981789 - DNA, 120 bp, Artificial Sequence
  ENSG00000235563_13 (sequence is synthesized)
cgctggcgcaatggcttactcttctgattgagcccgtcttcttgtgtgatggagatgacacctcctggaggacccagcagcctcagaagccatcatctctctgggactttactgttcccc

SEQ ID NO: 981790 - DNA, 120 bp, Artificial Sequence
  ENSG00000235563_14 (sequence is synthesized)
agacacctgaacacccagcccagtggatccttaaccttctgagtgaagcactgtggagttccactgcgagccacatttgtaatttagaattttctagtggtcacattaaaaagtaaaaag

SEQ ID NO: 981791 - DNA, 120 bp, Artificial Sequence
  ENSG00000174403_0 (sequence is synthesized)
agaagtgccgagtcccggccgggggcagcctcgccgccgctcagctcgggaatccctgccccccaccagcacctcagtgggggatactgcaagttcaaggtggtttaaggcgtgaatgaa

SEQ ID NO: 981792 - DNA, 120 bp, Artificial Sequence
  ENSG00000174403_1 (sequence is synthesized)
tgaaggagcaagcagtaagccccgacagcaaggccaccacagccctcgccccacagggacgcctgagcaaggacccaagcaggggacaagcaggctcaccccgcccttgcggggctgacc

SEQ ID NO: 981793 - DNA, 120 bp, Artificial Sequence
  ENSG00000174403_2 (sequence is synthesized)
acgaggccccgtccggtggaacacgccatgacgatctgaacctgccccagccccaggactctgagtgcagcaagaggggagccgggctggagagtggggagcacggagactgtggcctgg

SEQ ID NO: 981794 - DNA, 120 bp, Artificial Sequence
  ENSG00000174403_3 (sequence is synthesized)
atggtgccagagcaaacaggagagaggctgcccaacgcagaggctgcagcacagaccagagggtcccggggctgactgggtgggggcagctcccagcgagaggcccctgggatttgggta

SEQ ID NO: 981795 - DNA, 120 bp, Artificial Sequence
  ENSG00000174403_4 (sequence is synthesized)
agtagaggcacatgcagactctggccacagggcacctcgcgcacgaggggagttcaccacacaagctgagcggagggcggacgcaggagagcagcggtttctcggaagccaagggcggtc

SEQ ID NO: 981796 - DNA, 120 bp, Artificial Sequence
  ENSG00000174403_5 (sequence is synthesized)
atggagccccacgccacagcgcttcccacggggccacaccatccggtctgcggagggggctgcattgccgggaaggaccatctgattctggattccagcctcaccctgggccaccgctga

SEQ ID NO: 981797 - DNA, 120 bp, Artificial Sequence
  ENSG00000174403_6 (sequence is synthesized)
gtgtcccaagtggccccttagcccccagggccaggcggcatcccaatcccctagggatgtctgtgctcagaatgtggcacacacgccccggcagggccatcctcctcctcctgcacccgc

SEQ ID NO: 981798 - DNA, 120 bp, Artificial Sequence
  ENSG00000174403_7 (sequence is synthesized)
cacagccgtggattcggggtctctatcgtgggcagaaattcacacagtcaaggtgagggtcccaggagcagctgtgaccaggccccggctgccagggagagggggtcttcagccgacggg

SEQ ID NO: 981799 - DNA, 120 bp, Artificial Sequence
  ENSG00000174403_8 (sequence is synthesized)
gcagacaccctgagatggacccttgtccaggggagggccctgccacccacaattccttggcattcctgcaccagcaggacgggctgagggaggcgcctcaccagtgccagcgcccagcat

SEQ ID NO: 981800 - DNA, 120 bp, Artificial Sequence
  ENSG00000174403_9 (sequence is synthesized)
cactgtgccccggtggagggggaggcccttccgagcctgggcctgggtgtggatgagggcaggtctctcacctctctgacctcagcttcctcaactgggaaggggggccacagcaccccc

SEQ ID NO: 981801 - DNA, 120 bp, Artificial Sequence
  ENSG00000174403_10 (sequence is synthesized)
tcggcctttggacactggagctcagaggaccaagtgaatgaatgaatgactcgatcaatcaactgatccatgaatccatggacccctgaacagctggacagctgggctgtgggcaggaca

SEQ ID NO: 981802 - DNA, 120 bp, Artificial Sequence
  ENSG00000174403_11 (sequence is synthesized)
ggggactctggctgaagccgcgttcatatgtgttcagctttgtgagtggggcgaggttgagggcttattcagtgggggaggtgcacggcagggccagtacccttggagggtcaggccaca

SEQ ID NO: 981803 - DNA, 120 bp, Artificial Sequence
  ENSG00000174403_12 (sequence is synthesized)
ggggcggggacacctgccaggatgcccaaccccagaggcagtgggagctgttggggagccgtggtcccagtcagcggtggcttgatgagggctgctcccacttcatccgcaggattccag

SEQ ID NO: 981804 - DNA, 120 bp, Artificial Sequence
  ENSG00000174403_13 (sequence is synthesized)
ccgcagctaccccacacccgagctgtccctagtcgcccaccgcggccggacaaagccccagcagccaaggtgctccgtggggagggtttcttgggtttcttgaagccagtatttcccata

SEQ ID NO: 981805 - DNA, 120 bp, Artificial Sequence
  ENSG00000174403_14 (sequence is synthesized)
gtatcttacgtcccagcagaggcctccactgtgcccggaccagcggcccactcagtgagtcgagtgtgcacctggcacccctctttctggaaatccacgaacaatgggctcccagcagag

SEQ ID NO: 981806 - DNA, 120 bp, Artificial Sequence
  ENSG00000174403_15 (sequence is synthesized)
gactgaggctgagcaggccacttccctggagctgaccccacagctgtgtaggtacagggtggccgtgaacacttagggctctctcgggctgtgcgcttcttgttcactgcaaggagcagg

SEQ ID NO: 981807 - DNA, 120 bp, Artificial Sequence
  ENSG00000174403_16 (sequence is synthesized)
gtgttggctcctgaccaagccctgtcactgctgcccagccacacgtggggccccttcacccacccctgaccacctcatgcaggtgaagccactgtggaaacagcctggcagtcccttgaa

SEQ ID NO: 981808 - DNA, 120 bp, Artificial Sequence
  ENSG00000174403_17 (sequence is synthesized)
aaatgaagtcataaaccccagcaattgcactcctgggcctctgacagagcttgcacgtcccctccaaagctcgtgttaagctgtgagccccagtgccggaggtggggcctggtgtgtttg

SEQ ID NO: 981809 - DNA, 120 bp, Artificial Sequence
  ENSG00000174403_18 (sequence is synthesized)
ggttctgggggtggatccctcatggctgggtgccatgaacccactcaccacagtgagttctcacgagatctggttgttgagaagtgtgtcatacctcccccacaactctctgtcttttgt

SEQ ID NO: 981810 - DNA, 120 bp, Artificial Sequence
  ENSG00000174403_19 (sequence is synthesized)
tccggctctggcaatgtaacaagcctgctcctccttcgccttctgccatgactgtaagctttctgagggctgaccagaagcccagcagatgccagcaccatgcttcctatacagcctgca

SEQ ID NO: 981811 - DNA, 120 bp, Artificial Sequence
  ENSG00000174403_20 (sequence is synthesized)
gaaccgtgagccagctaaacctctcctcataaatcaccgagccccaggtttatctttacagcaatgcaagacctgactaatacagcaccagctccccaaaataaaaagaaatattcaaac

SEQ ID NO: 981812 - DNA, 120 bp, Artificial Sequence
  ENSG00000174403_21 (sequence is synthesized)
gaggctcatgtagctggcgccgtatgggacagcgggggagagagaaaatgcacagcccagggaatgtggagacaggcccagcgccaggcatgggggccggaaggagcagccggggagcag

SEQ ID NO: 981813 - DNA, 120 bp, Artificial Sequence
  ENSG00000174403_22 (sequence is synthesized)
cccggccgggggcagcctcgccgccgctcagctcgggaatccctgccccccaccagcacctcagtgggggatactgcaagttcaagaattggggccaggatcaggtggtgacagagccac

SEQ ID NO: 981814 - DNA, 120 bp, Artificial Sequence
  ENSG00000174403_23 (sequence is synthesized)
ctgggtttccggagactctcaagccaaccccaagtcatgacaaatgccagtcgccttggacagaggcaagggcctggacgcagagaccagaggcctgaactggcagactgtcctcacagg

SEQ ID NO: 981815 - DNA, 120 bp, Artificial Sequence
  ENSG00000174403_24 (sequence is synthesized)
ctgtgtgacgctggctggtcgtcccatctctctggggccccacaggactggggaccaggtcgtggaatgacagtggaccacagtggtccggggaccccgctcgttggtggcaggcacagg

SEQ ID NO: 981816 - DNA, 120 bp, Artificial Sequence
  ENSG00000174403_25 (sequence is synthesized)
gcagaagtgccgagtcccggccgggggcagcctcgccgccgctcagctcgggaatccctgccccccaccagcacctcagtgggggatactgcaagttcaagcaccagcctcacagtaaca

SEQ ID NO: 981817 - DNA, 120 bp, Artificial Sequence
  ENSG00000174403_26 (sequence is synthesized)
gccggcacacagcacttaggctgcctggtgttccagaagcttctgcaggggctctatgctgcactcaaggcatccctaagaggagagcattttgctgtccccactttacggagaaggaac

SEQ ID NO: 981818 - DNA, 120 bp, Artificial Sequence
  ENSG00000235560_0 (sequence is synthesized)
agagcttccgcccgggtttgcgggaacaaagcagcgccctgcggaaggcagccctcgtgaactcagaagttagttttcgtctctggacctttttataatcggacttcagcccatcactgt

SEQ ID NO: 981819 - DNA, 120 bp, Artificial Sequence
  ENSG00000235560_1 (sequence is synthesized)
ctcgttttgtcctcagaaacggcgacagcagcctcttcccaatgttgagagcaaaaagtgtgaacccagaaattccgagacagatctcaattacttgccaaggttgaggacgcgcgcgtg

SEQ ID NO: 981820 - DNA, 120 bp, Artificial Sequence
  ENSG00000235560_2 (sequence is synthesized)
acagcctcaggaagtcctcacgacatgtgcccaaggtggtctgggcatagcttagttttatacattttatggagacatgagacatcaataaatgtatgtaagaagtacattggttctgtt

SEQ ID NO: 981821 - DNA, 120 bp, Artificial Sequence
  ENSG00000235560_3 (sequence is synthesized)
tggaaaggcggggcaacttgaagcaaaggcaggaagacgtgaagcaggaagggggcttccaagaaacagaagagacaagtgaacatttatttttatgtctttcttcctatgtgtatttca

SEQ ID NO: 981822 - DNA, 120 bp, Artificial Sequence
  ENSG00000235560_4 (sequence is synthesized)
agtcttaaggagccttgtgcaaatgctagagtgactcatttaccaacattaaaccctaggatagatgcaacagagaagtactacttcctccatggaatgtgctgatttcaggcgacgtgg

SEQ ID NO: 981823 - DNA, 120 bp, Artificial Sequence
  ENSG00000235560_5 (sequence is synthesized)
cacccaatgtagaaaacgctggaatttttccttggaactggactgtgatgagaggtgcttgccatgaacataagctactgtcttttttttctttttttgagacggactttcacttttttt

SEQ ID NO: 981824 - DNA, 120 bp, Artificial Sequence
  ENSG00000235560_6 (sequence is synthesized)
cgtgaggcatcgtgcccagcaagctactgtcttttctttgaccctttccagtttttgaagataaagcaggaaataatcttctctgaaagtacttgataaaaattcccaaaacaacaaaaa

SEQ ID NO: 981825 - DNA, 120 bp, Artificial Sequence
  ENSG00000235560_7 (sequence is synthesized)
aggacgcctcccgaccgcctgtctccctctagctgcagccaggctcttggcttccctgacgtcctgcccctgcgcggatggcccaaggctcctaggctcaaacccagctcatccctttct

SEQ ID NO: 981826 - DNA, 120 bp, Artificial Sequence
  ENSG00000235560_8 (sequence is synthesized)
taccccaacctgcttcccctggggtctttatctcagtaaaagtcgccagctctcccctgagacctccttctcacacttcctgatggcctactctgtgctccacgtgacttcatacatgtc

SEQ ID NO: 981827 - DNA, 120 bp, Artificial Sequence
  ENSG00000235560_9 (sequence is synthesized)
ctgtgtactggagtcagagtcacctccaacgcgccttttagctcttagtgggttctttagttgaatctaggcccagattgagaatcgcctgtaatcctggcgcctgggaggtcggggcaa

SEQ ID NO: 981828 - DNA, 120 bp, Artificial Sequence
  ENSG00000235560_10 (sequence is synthesized)
aggagggacgtcagtagagcccccgaaggcccactagaggggatggaaactaagggccgatggctgcgagtccatggtcagaactggacgatgtcttcaaataaaacggcggcagcgcga

SEQ ID NO: 981829 - DNA, 120 bp, Artificial Sequence
  ENSG00000235560_11 (sequence is synthesized)
cctctcgacctttgcccctgcgcaattgtacccacgacgacgcccccctccccgcgcccccgctccaggcccagttctctccttgccctaatccaaaatggccgttgcggctacaggcgc

SEQ ID NO: 981830 - DNA, 120 bp, Artificial Sequence
  ENSG00000174407_0 (sequence is synthesized)
tcgcctgcatcttcggagagaggtgctgagcccttcctcatggatacggggtcccgggaggcagccttcaccagggacctgcccaggaaaccagcagatgcccaggtcagccctgaaatg

SEQ ID NO: 981831 - DNA, 120 bp, Artificial Sequence
  ENSG00000174407_1 (sequence is synthesized)
gcattctctcagccccagccccacagtgctccagtgtgtgaagggcaacagctgacggggaagttcagcacatctgtgctgaccagggctggaggcgatgccagtccgtgcagctgggaa

SEQ ID NO: 981832 - DNA, 120 bp, Artificial Sequence
  ENSG00000174407_2 (sequence is synthesized)
cgcctcctctgctatggctggagccactgctgaagggactccacctggcacctatgccaccaatggcccctgaacgggtatctaggcccacccttaataaagatgagctgctcattccca

SEQ ID NO: 981833 - DNA, 90 bp, Artificial Sequence
  ENSG00000174407_3 (sequence is synthesized)
tcaggcccttgtgtctccgcgagccggctgtgtgcctgcgagagcgtgcacacccgcgggaccttcccttttgttccaccctgacctcta

SEQ ID NO: 981834 - DNA, 120 bp, Artificial Sequence
  ENSG00000174407_4 (sequence is synthesized)
cacccgcgggaccttcccttttgttccaccctgacctctaccttctctaccttgtgctgaccccgctggggtgcaggggttcccttcggaggaggccggggctcaaggtgtgcagctcgg

SEQ ID NO: 981835 - DNA, 86 bp, Artificial Sequence
  ENSG00000174407_5 (sequence is synthesized)
gatctccctcctgctaagtctgcgctgctgcaggagggctgggggaagggcaggggtgtggagagggggtgcctggtgtcttcttt

SEQ ID NO: 981836 - DNA, 120 bp, Artificial Sequence
  ENSG00000174407_6 (sequence is synthesized)
agggcaggggtgtggagagggggtgcctggtgtcttctttctctctctgcccccaccaagtgcggacgcatcgagcttcggcccccacccctgcattcgcgattggctcccggaggaggt

SEQ ID NO: 981837 - DNA, 120 bp, Artificial Sequence
  ENSG00000174407_7 (sequence is synthesized)
ggctggtgctgccgccgctgcagcatctcctagggagccgcgaccctgcgcccgccgccgctgccgctgtcaccagcccggccccaggggtgccctgggctccgcggctgaggcacctag

SEQ ID NO: 981838 - DNA, 120 bp, Artificial Sequence
  ENSG00000174407_8 (sequence is synthesized)
cggcctctcaggagatcctgaccaccctctgggaacctggactcctccaagcatcgtctttctcgcctgcatcttcggagagaggtgctgagcccttcctcatggatacggggtcccggg

SEQ ID NO: 981839 - DNA, 120 bp, Artificial Sequence
  ENSG00000174407_9 (sequence is synthesized)
aggcagccttcaccagggacctgcccaggaaaccagcagatgcccagctgtagctgtgcattgatggcgccgtgcggcccggccgcaggtcccgcagccgtggagaggacccagcaggtg

SEQ ID NO: 981840 - DNA, 120 bp, Artificial Sequence
  ENSG00000174407_10 (sequence is synthesized)
gcgcggggagagcccggctcggcacgtggtcagctccaagtcagccctgaaatgtccattactcacaaagaaaaggaaaatgctcatttgaaagaaattcttctctttgtcaatgctgag

SEQ ID NO: 981841 - DNA, 120 bp, Artificial Sequence
  ENSG00000235564_0 (sequence is synthesized)
atgtttgatctgaatacctgggggccagatgatgaatgttttgtctcttatatgaggaatcttgttctgggctaagtgcacctaagtgcttttgcctctctggctgctgtcctcaccccg

SEQ ID NO: 981842 - DNA, 120 bp, Artificial Sequence
  ENSG00000235564_1 (sequence is synthesized)
tatgtggggtgtcgcatatatgaagtgactactactatggtagccctcgaggaggcagaaggccatcaacaggaccagggaattgtgccataaagaagaggaagatgctccatctacaga

SEQ ID NO: 981843 - DNA, 120 bp, Artificial Sequence
  ENSG00000235564_2 (sequence is synthesized)
agtggcggcgcccctcttgtggcaacatttggcagtatgcagttgtgccatcaacaaatccagagtccaagggcctggattgtctgccaaattcttaggagttatttgatcagcacgttg

SEQ ID NO: 981844 - DNA, 120 bp, Artificial Sequence
  ENSG00000235564_3 (sequence is synthesized)
attaatccagcctggagctttcctgaaaggtactgcaagtgacataacctaagggacaaaatgaccaagcataaaatggacacattcacaaaatgaagcctgtggactgaagagtaacag

SEQ ID NO: 981845 - DNA, 120 bp, Artificial Sequence
  ENSG00000235564_4 (sequence is synthesized)
aaagcagtcagtggagggggaccatcaacctcatgaaaattgcaactggaacatgtcactgagaaaacccagggaaaactcacaaaggcattctagagcactgcttcctaaatgttactg

SEQ ID NO: 981846 - DNA, 120 bp, Artificial Sequence
  ENSG00000235564_5 (sequence is synthesized)
tggcaaactccaaggtgatggctgatgtgtctggttcaacaactacacttcgtatcaaaggtttaaagaaaaagacttggcttcaagtgcctgccataccaagaggagactgacagcaga

SEQ ID NO: 981847 - DNA, 120 bp, Artificial Sequence
  ENSG00000235564_6 (sequence is synthesized)
ttctaccagcattacctttataaagtctgtgctcccctttctgctgttgtctctctcccagtgctagatctctagagagtgagaaatccaagttgataaaggttagaaaaaagtagggaa

SEQ ID NO: 981848 - DNA, 120 bp, Artificial Sequence
  ENSG00000235564_7 (sequence is synthesized)
aataaccaccgaaagactgaatatacaaagggacaatggccagaccacttatggtaatataacgctgatgactcacattagatgcccaggaaaccaaaaaacaacttctgtagcaatcaa

SEQ ID NO: 981849 - DNA, 120 bp, Artificial Sequence
  ENSG00000235564_8 (sequence is synthesized)
tccagaaagtcaaatgacagcctttgtaataaccagctcagatggtcaggactaagtcaatgctgccaacttccctgtatttgttctcactttcaatcaggatgaacaaaaagaaagcca

SEQ ID NO: 981850 - DNA, 120 bp, Artificial Sequence
  ENSG00000235564_9 (sequence is synthesized)
aatataaaatcaattccataagatgacatgtgtccaggtaacctgtcccagtccttcccatgacaacaacctgccatcaaggtctctacatagcctctttttctttttgcattactaaaa

SEQ ID NO: 981851 - DNA, 120 bp, Artificial Sequence
  ENSG00000235564_10 (sequence is synthesized)
agcttttccactgtctgtcagtctttgagtctccgccaaacatggataatattaatagataatggtagcccactcccttgttacagtaacctctaaataaatagcttcacttgtttgttc

SEQ ID NO: 981852 - DNA, 120 bp, Artificial Sequence
  ENSG00000226679_0 (sequence is synthesized)
gcagagcagggactggaacttaggtgtgtagttctgccgacgtcaaagtccatactacagattttttgttagtttgtttctcttttgcaaaggaataaatcaaggactggaccgggtgcg

SEQ ID NO: 981853 - DNA, 120 bp, Artificial Sequence
  ENSG00000226679_1 (sequence is synthesized)
tgcctgctctgctgcggtttaggatggggcttgaggttctccttccaggatcagctgatgggagagcacaaggcacagaaagttctctgtctcacccacagccatggggatccagctgta

SEQ ID NO: 981854 - DNA, 120 bp, Artificial Sequence
  ENSG00000226679_2 (sequence is synthesized)
taccacgaccagactggagcctcttccctgtggcttggcatcgctggatcctggcatcaggacagggtttctaggctgcccgcaggacggatctggtttctttgaggcatttgaggtctt

SEQ ID NO: 981855 - DNA, 83 bp, Artificial Sequence
  ENSG00000226679_3 (sequence is synthesized)
cgcaggacggatctggtttctttgaggcatttgaggtcttattctgaatttgaatttgtttatccagaaggagtgctgtttcc

SEQ ID NO: 981856 - DNA, 120 bp, Artificial Sequence
  ENSG00000226679_4 (sequence is synthesized)
ttcctgagtagctaggactacaagcatgtgccaccatggccagctaagtgttttttgtagatatgggggtcccataaatatgtacatttacaatgtgtccattaaaaaaataaacaaaaa

SEQ ID NO: 981857 - DNA, 120 bp, Artificial Sequence
  ENSG00000226673_0 (sequence is synthesized)
ggagttgtatatttccctaaagggtcaaaaatagaacatttattaaacgacgagttattcaaaaaccggcacaggccccagttgtctttcaaaagctctgatttactgcatatttctccc

SEQ ID NO: 981858 - DNA, 120 bp, Artificial Sequence
  ENSG00000226673_1 (sequence is synthesized)
ttgagaaaggccttttttaaatgttcatttccattttaagagactgtgggctttgatctgttgggagcattctttttctttccctgactggggcctgtcggctactcaggcctgtgtttt

SEQ ID NO: 981859 - DNA, 120 bp, Artificial Sequence
  ENSG00000226673_2 (sequence is synthesized)
tccatggccttccccagcattcacacggcatctcctgcatctgcgttcaccctggctaatttggaggtcagaactggtgagtccctgtagcaggtgacaccaagaaccaatgagccatat

SEQ ID NO: 981860 - DNA, 120 bp, Artificial Sequence
  ENSG00000226673_3 (sequence is synthesized)
ttcaaatccagcaacctgaagattcgcctccaatggcacagggctggaccgcactcagaggtggctgccacccaatcgtcactcagcgttttatcgctgggctattctgttcgagtgcta

SEQ ID NO: 981861 - DNA, 120 bp, Artificial Sequence
  ENSG00000226673_4 (sequence is synthesized)
agcaattgttcacagaaataagataatggaaagagcagagacagaatgagcaatggagagagtcgggcctaccatcgcgcttactgctgttcgtcacagatctgcaagaactctgaactc

SEQ ID NO: 981862 - DNA, 120 bp, Artificial Sequence
  ENSG00000226673_5 (sequence is synthesized)
atagattatgtccaaactgagaagcactggacagtcattttgcttatctgcggtttctcatttctgagaagaatctccatatggacattatcacttttgttataatctcgaggatggtta

SEQ ID NO: 981863 - DNA, 120 bp, Artificial Sequence
  ENSG00000226673_6 (sequence is synthesized)
tgatcgccactttcatatctcctgtgataatcagcaccaatggaatgtgcagaaatccatccctattcctaaggactcctgatgtcatctcaccaggtgggacggtttgtcctgctcgag

SEQ ID NO: 981864 - DNA, 120 bp, Artificial Sequence
  ENSG00000226673_7 (sequence is synthesized)
tctgcacgcccagctccaacagcttcgcccaagtttggggacaggcttcacccaacacccagaatctgtgcagttatttggcccctcattgaaaagcctctcacggttacagacaaaatt

SEQ ID NO: 981865 - DNA, 120 bp, Artificial Sequence
  ENSG00000226673_8 (sequence is synthesized)
aacttggtcatccctgcagcgccggagggatacttctggactctctgtttggggagtgtacgctcaaaccgtttcaagaagagatttaaacctcttcttggagaagactgaggctggcac

SEQ ID NO: 981866 - DNA, 120 bp, Artificial Sequence
  ENSG00000226673_9 (sequence is synthesized)
aaggctaacaaatcaaataactgcaccgaggcaaagctgccgtctctcccgggctgtaccctgcctgcttctcccatccctgccttctggccgatttgtctttaaggttttagcattatc

SEQ ID NO: 981867 - DNA, 120 bp, Artificial Sequence
  ENSG00000226673_10 (sequence is synthesized)
cctctgttgacaaatgaatgcttttctggaagatgaggtatttccagaagcaggcagacactggctggagcgccgtaagagctctgcctccctcgattcgttatgtgaacgggagaggcc

SEQ ID NO: 981868 - DNA, 120 bp, Artificial Sequence
  ENSG00000226673_11 (sequence is synthesized)
tggaggttttgcgcgagcattacgttcaaggtgatgataaatggagtctggccggggtggtaataagggaatttctagccagatcctgtctagaccacggtttgttatggagggaaagcc

SEQ ID NO: 981869 - DNA, 120 bp, Artificial Sequence
  ENSG00000226673_12 (sequence is synthesized)
acaaaagggggctatagtaccccgttcctcagagaaattgtcctcagggagagccaagcacatttccagtccgaaccttcgtccggcccctcactggggccgctgtaaataacattagcc

SEQ ID NO: 981870 - DNA, 120 bp, Artificial Sequence
  ENSG00000226673_13 (sequence is synthesized)
tgtctttcagcaagctctgggaagcttataaaccgaacacggtttttgttgtctgtagttgtgcattaagctcagtactgtcaagtctaattattctcattaaggcctgaaagttttagg

SEQ ID NO: 981871 - DNA, 120 bp, Artificial Sequence
  ENSG00000226673_14 (sequence is synthesized)
gattaattaagcagagagccaaagcttatgcagaacagcaatattttccccctgaaggattagcccgtcattctgatggggttttccttgagcgttgcccattactttataagatagcaa

SEQ ID NO: 981872 - DNA, 120 bp, Artificial Sequence
  ENSG00000226673_15 (sequence is synthesized)
agtgtggagctcatataatatggattagaaatcgcctacatttcacatgtgctattcagccatgaaaataagtcctggcccttgtgcctgtaacccggaaggctcactaatgagaaccag

SEQ ID NO: 981873 - DNA, 120 bp, Artificial Sequence
  ENSG00000226673_16 (sequence is synthesized)
gcagtggggctaatgagaaattcaatacgtgccgtctctccttcccgtttcctttcaatttactttctacaggagccaatatgtgtaggaaaagtctgagtggatgctggtattctcctc

SEQ ID NO: 981874 - DNA, 120 bp, Artificial Sequence
  ENSG00000226673_17 (sequence is synthesized)
ttctagtccttcttgctatagaagtgaaaactgggattcagcaacctgcttaaagggacccagttaatggcaaagctacttgaagagaaggtgacaggaaacttcaggaggtgtagacaa

SEQ ID NO: 981875 - DNA, 120 bp, Artificial Sequence
  ENSG00000226673_18 (sequence is synthesized)
tcattaggtacattaggatggtgagggtacttagtcttaggttttggtgtgatggaaaatgccgcagaaatgagaaggtcccacaatgaaaggaggatgctggtgaggacctaatttgca

SEQ ID NO: 981876 - DNA, 120 bp, Artificial Sequence
  ENSG00000226673_19 (sequence is synthesized)
gacgagccccaggaactctggtgccctgcttggcaaaggatttcaaggcttcctggagaaatgggggtagggggagggatcgttaagccctggcaccccagatataaaaaggaaagtcag

SEQ ID NO: 981877 - DNA, 120 bp, Artificial Sequence
  ENSG00000226673_20 (sequence is synthesized)
acgtgggtaatcaccctgtcttcacccagcagctccagttttcagcaaggcagaggggacacttctgccttcagtctcccctacttcacatcaaggcgccgttgcatttgatggctcggg

SEQ ID NO: 981878 - DNA, 120 bp, Artificial Sequence
  ENSG00000226673_21 (sequence is synthesized)
acgcggccttcctgcctcccacactcccaaatccatgccttgtttatctttttagaatggatctctgatgcctgcccaccacgcggctggagtggcgccagcatccccagggcacgtctg

SEQ ID NO: 981879 - DNA, 120 bp, Artificial Sequence
  ENSG00000226673_22 (sequence is synthesized)
tgatgaccgatgaggtccaccacctctaccccagaccctcccatacccaaaggctccctctgcccagtgaagtccccttcgccccagcattcctgcaccaggcacatcccaagggtggcc

SEQ ID NO: 981880 - DNA, 120 bp, Artificial Sequence
  ENSG00000226673_23 (sequence is synthesized)
ccgtgtcctgcaggtggcaggagagtgcaccctcctcagacaccagtctgatatgtcaccaggagagagcgggcggtcctcagtgtatgctcttttcttgtctctggggagcttgttttg

SEQ ID NO: 981881 - DNA, 120 bp, Artificial Sequence
  ENSG00000226673_24 (sequence is synthesized)
gctcctcaagaagaccttggaaaaagcacaggttgtagaggcggcattcgccgggcagaaccatgtcccaagacaactggttagtgaggccaggcgtgacaatcataatcggagcagcaa

SEQ ID NO: 981882 - DNA, 120 bp, Artificial Sequence
  ENSG00000226673_25 (sequence is synthesized)
ctgtgcaatggcataggcaaagggggccgaaggcgcagcagccaccaccattatagtcagactgggcaccgtttcctaaatgtcacacatccttccagccccttgatctttgcttatgaa

SEQ ID NO: 981883 - DNA, 120 bp, Artificial Sequence
  ENSG00000226673_26 (sequence is synthesized)
aagggtcattccctctacaatcctctagaactctttgtaggtttttgtttgttttccaaacactgtacttgcttctttatctgtctctctatgaaccgtgagtcccagaggacctcgtgg

SEQ ID NO: 981884 - DNA, 120 bp, Artificial Sequence
  ENSG00000226673_27 (sequence is synthesized)
tcctcaattatccttgcttctctgtggcctgtgccatggggctgaatgtttgtagcccccagaatccatatgtggaagccctaatccccactgtgctggtattaggaggtggggcctttg

SEQ ID NO: 981885 - DNA, 120 bp, Artificial Sequence
  ENSG00000226673_28 (sequence is synthesized)
ggatgtgattagggttagatgagggcatgagggtggggccctcataatgagattagtgaccttatcaagaggatgagacactagatcccttgctccctctctgcctgcaatcaccagtga

SEQ ID NO: 981886 - DNA, 120 bp, Artificial Sequence
  ENSG00000226673_29 (sequence is synthesized)
ctgcctgcaatcaccagtgaaaggccaagtgaggacataatagaagccatcccttcccagaacccagccatgctggcaccctgatctctagcttctcagcctccagaactgtgagaaata

SEQ ID NO: 981887 - DNA, 120 bp, Artificial Sequence
  ENSG00000261364_0 (sequence is synthesized)
gtggctcctgctactgctcaccccacaagccctgactgctaatatctgcccagggccctgtttccttccctagtattcctgtgggctggttagcttgttactcaagagccaccgtgtgga

SEQ ID NO: 981888 - DNA, 120 bp, Artificial Sequence
  ENSG00000261364_1 (sequence is synthesized)
gtccatgctcctatagtagcctaaaatgaggaaactgcccttcattaacccaactctagcttgttccaaaacatggagcacagaacattgctgcctgtaacccctggaatggcacaagat

SEQ ID NO: 981889 - DNA, 120 bp, Artificial Sequence
  ENSG00000261364_2 (sequence is synthesized)
tatctatttatttatcctttaatcacagctggaggcctcagatatgaatattcaggattggtgaaagaactcaacaatttgactgagtgtcataattgtggcacagggaggaaggaagga

SEQ ID NO: 981890 - DNA, 120 bp, Artificial Sequence
  ENSG00000261364_3 (sequence is synthesized)
tctttggccggtaagctaagaatggtttttacatctttaaattgttgtgaaaacaaaacaaaaaacaaagaaaatgccagagacctatgtgacatgcaagcctagaatacttactgtcag

SEQ ID NO: 981891 - DNA, 120 bp, Artificial Sequence
  ENSG00000261364_4 (sequence is synthesized)
ccatcatatcccctgtgacctgcaggtaaacatccagatggccggtttctgccttaactgatgacattccgccacaaaagaagtgaaaatggcctattcctgccttaactgatgacatta

SEQ ID NO: 981892 - DNA, 120 bp, Artificial Sequence
  ENSG00000261366_0 (sequence is synthesized)
gggtcttccggagcctccggtcgcgggtctaagaggactagggcgggagcggcgcggaagaaagagaggactgcgttttggggcgttctgtcagaggggaaggacgtgtggattggagtc

SEQ ID NO: 981893 - DNA, 120 bp, Artificial Sequence
  ENSG00000261366_1 (sequence is synthesized)
agactgcactcccgccctatttctgcaagtagaactcactgcctttagaaacggtcttctgaggctctgttgggaggctctaactgtattacagaggacacatttttgtttgtttttatg

SEQ ID NO: 981894 - DNA, 120 bp, Artificial Sequence
  ENSG00000261366_2 (sequence is synthesized)
tgaaacattcagaagttgcttgcatcaagtgctttacaagtacactggttttcaaacttttaaagttgaggaactgttttgatttttgtaaaaatagaactttacttggaagcccaaggt

SEQ ID NO: 981895 - DNA, 120 bp, Artificial Sequence
  ENSG00000261366_3 (sequence is synthesized)
aggcagatggagatggcgtttttaatttgcgaatgtattctataaaatcacatctgtactgaagtactagaaataattgaggataagtcagatgtgaagagcaagaacttttgaaatagg

SEQ ID NO: 981896 - DNA, 120 bp, Artificial Sequence
  ENSG00000261366_4 (sequence is synthesized)
attacaactgaaggtttccatcttacattagcttcagaaaacaagaaaatgctatcttttgtttggttacatagtaacaggaagtccttattcaagctagaacttgctgatgtgaacagt

SEQ ID NO: 981897 - DNA, 120 bp, Artificial Sequence
  ENSG00000261366_5 (sequence is synthesized)
ttcataagggctctccttaaaaagattttgtacaccaattttaattgggaaatatacatatgagtatatctcatgtgcatatcttaaagaagaatgaaaaatgcccaggtacccactaca

SEQ ID NO: 981898 - DNA, 120 bp, Artificial Sequence
  ENSG00000261366_6 (sequence is synthesized)
gagcttaagaaaaaaaaaatgccagtatttttggagtcttctagaaagaagactctctaaaaacatctccttccttccgttcaccattatgctgaattttatattactcattccgttgta

SEQ ID NO: 981899 - DNA, 120 bp, Artificial Sequence
  ENSG00000261366_7 (sequence is synthesized)
tttctgaaaatagttacatatgtacgattccctaaaaatactattttcctagttttatatttcatatgtgaatcattcttcatttttccccttttttcactaatttaggttttgagaggt

SEQ ID NO: 981900 - DNA, 120 bp, Artificial Sequence
  ENSG00000261366_8 (sequence is synthesized)
tttgagattcgtctgtatacaagtccatttcccataaactagactggcacatcgttacccttatgctattgttagactttttaagtttttgctgataagagcatctgattgctcttttaa

SEQ ID NO: 981901 - DNA, 120 bp, Artificial Sequence
  ENSG00000261366_9 (sequence is synthesized)
aattctctcttgtaagttacatgtgttgcaaatgtcttctcttagtttatggactgtctttccagtttttatgatgtttcttgattgccaaaagctttatgcttcagtatacagcttttt

SEQ ID NO: 981902 - DNA, 120 bp, Artificial Sequence
  ENSG00000261366_10 (sequence is synthesized)
gaatttaataatattttacattttaattttgtgctttttgctttcttgcttacaagattcttcccaacataacatcagaaactattctttcttctacaagtttaaaagtttaattgtagc

SEQ ID NO: 981903 - DNA, 120 bp, Artificial Sequence
  ENSG00000261366_11 (sequence is synthesized)
aactttaaacacagaaaggacaaataataatataatgaacacccatgcactcaactctatgtattaaaacattttgcaaacccctcctcctaatgattcttgtctaaaattgccttaact

SEQ ID NO: 981904 - DNA, 120 bp, Artificial Sequence
  ENSG00000261366_12 (sequence is synthesized)
atacttggctctttactctttcattgaaattttaggatgagccagccaagatccatttaaaaaattggatttcaattgggcattttattcaacttgagaattgcatttagagatttagtg

SEQ ID NO: 981905 - DNA, 120 bp, Artificial Sequence
  ENSG00000261366_13 (sequence is synthesized)
aaatgtcttcttatctatgaacatggtatatttattttattcaggtactttatgtgctactatgctttgtaatttattgagtatctttcattatattgcctcctagttttattactaaaa

SEQ ID NO: 981906 - DNA, 120 bp, Artificial Sequence
  ENSG00000261366_14 (sequence is synthesized)
ttagagatctctctctttaaactctattttctaattgtttagtaacattgtattaaaagagcatcaatttcaatatattggtactatctccagaagcttcgctgaatttttttgattgct

SEQ ID NO: 981907 - DNA, 120 bp, Artificial Sequence
  ENSG00000261366_15 (sequence is synthesized)
tgctttatttccctgttacatctttggatgacctatataggtaatcatatcatttgtaaataagaataatggtttccttctttctctcttttcaaaccacttattattcagttttttctt

SEQ ID NO: 981908 - DNA, 120 bp, Artificial Sequence
  ENSG00000261366_16 (sequence is synthesized)
ttatttattaacagagcatccagtgcaatgtttaatggaagtaataatggcattcttgtcccattcctcactttactgcaatactgctaacattttataatgataacaatgtttgctgtg

SEQ ID NO: 981909 - DNA, 120 bp, Artificial Sequence
  ENSG00000261366_17 (sequence is synthesized)
ggtttttggtaaatactttatcaagattattaagtgttctgtttccagttcataatgtattgttgtttgcttttttttaaccatgagtgacagtttaattgattaaatgctttttctgca

SEQ ID NO: 981910 - DNA, 120 bp, Artificial Sequence
  ENSG00000261367_0 (sequence is synthesized)
cacacacacacacacacacacagaagaagaaaattgtgtgtgttcgtgtgtgtgtgtgtgtgtatccagagagttaaatataccattttcccattttagggacgaagaaactgaggtgag

SEQ ID NO: 981911 - DNA, 120 bp, Artificial Sequence
  ENSG00000261367_1 (sequence is synthesized)
gaggtgaggtcacctgcccgagtgatgcagctagttggcagcagagtgggaccggaaccctgctgccagcaaggtattgtgggggctgagtgggacttccttctggacaacagaggggag

SEQ ID NO: 981912 - DNA, 120 bp, Artificial Sequence
  ENSG00000261360_0 (sequence is synthesized)
gagggggaaccgcgcgctgcggctgctgcgcttgctccgtccccggacgccgctggcttgcttcccttgtcagctgtgtggggactggcagagggtgtgagagcgggaaacgaccggacg

SEQ ID NO: 981913 - DNA, 120 bp, Artificial Sequence
  ENSG00000261360_1 (sequence is synthesized)
agcggcggggagcgtcctggcatccaaaggcgaaatgcttcatctctgggatggagtagaggagtagcctctgcggttgagttgcagtcgtgggtgcaagaagcagcgctgaagcagagt

SEQ ID NO: 981914 - DNA, 120 bp, Artificial Sequence
  ENSG00000261360_2 (sequence is synthesized)
ccgcgaggagtccagggcggaacagagggaagaaggccatttggagatagaagcagggattggagtgatgcaactggaagccaagaaacgccgcagaatgccaggagccagcagaagcta

SEQ ID NO: 981915 - DNA, 120 bp, Artificial Sequence
  ENSG00000261360_3 (sequence is synthesized)
agaaaaggcaaagaaggattattccaaagtgccttccgaagaaggttggccctgccaaaaacctgatttcagacttctagcccccaaaactgcaagagaataaattttgttgtttcaaga

SEQ ID NO: 981916 - DNA, 120 bp, Artificial Sequence
  ENSG00000261360_4 (sequence is synthesized)
acggttccaacgcccgagcccagcgggcttgggcctccgctgtcgggccaggctagttgctccggggctgggagttacggcaccggggttggggcggagaagacgaactagttcaactcg

SEQ ID NO: 981917 - DNA, 120 bp, Artificial Sequence
  ENSG00000261360_5 (sequence is synthesized)
acccggttaagcaagcgcagcagtgtgtgttcttggatcatagtatttcatgtaaacattttgatttaagagaaacaaaagggaaaatattaaccgttttcaagcatccaaaggcgaaat

SEQ ID NO: 981918 - DNA, 120 bp, Artificial Sequence
  ENSG00000261360_6 (sequence is synthesized)
gaacaggtagggagcaggggattgtattgaaagatgaaactgaaagaggggtagtggagaccagatcatgaaaagccatattaggctaactgtggcgcttatgcttaatcctcattgaca

SEQ ID NO: 981919 - DNA, 120 bp, Artificial Sequence
  ENSG00000261360_7 (sequence is synthesized)
gatcttgagatcattttgaaaaatcactttgtcttcagtttggtaaaagtttggagaagggcaggacttggaagaccagcttagggagactaaatagtagtgacctccaagggagaaact

SEQ ID NO: 981920 - DNA, 120 bp, Artificial Sequence
  ENSG00000261360_8 (sequence is synthesized)
ggacagaaagaatatttatatttagtgccacagaactccgggggtattgttttctcctttaattttacttgaaaaagtaataaatgcacatactaaaaaattcagagtgtacaaaagaat

SEQ ID NO: 981921 - DNA, 120 bp, Artificial Sequence
  ENSG00000261360_9 (sequence is synthesized)
atacaaagactattaaggtgtgggattgaggagggttgaacaggatcccccaaaattcacgtccacctagaccctcacgatattaacttacttggaaatagggtttttgcagatgtaatt

SEQ ID NO: 981922 - DNA, 120 bp, Artificial Sequence
  ENSG00000261360_10 (sequence is synthesized)
tgatatggacccaccagagattctggattcaatgttttatctcagaggcttagaaaaagctctaatgctatgtttaatcgctgagtatgtcttttccaattatgcatgtcaaactaggaa

SEQ ID NO: 981923 - DNA, 120 bp, Artificial Sequence
  ENSG00000261360_11 (sequence is synthesized)
aataaccacaggatgggtttggggacccactgagcccaccgtgagaaggatctgagtgaaaactccattgatagtttaacctccatccacccagaagggcctatgctaaatgaagttgaa

SEQ ID NO: 981924 - DNA, 120 bp, Artificial Sequence
  ENSG00000261360_12 (sequence is synthesized)
gcgacagaactgcctaggtatctgtagagaaaggtatccacaggcttggggagattggaatattagagtggatttatcatttaagacctgcttacccaccccaggagggtccagaagaca

SEQ ID NO: 981925 - DNA, 120 bp, Artificial Sequence
  ENSG00000261360_13 (sequence is synthesized)
tacctttcaccatgactaagaagtaaatttgtgaggagaatcctagcatccttgaagatatctgcggctgctcttctctttagtcacatatatcttacagtggaaactgctaccatcaaa

SEQ ID NO: 981926 - DNA, 120 bp, Artificial Sequence
  ENSG00000261360_14 (sequence is synthesized)
ctaggattcctaagtgtccccccagggtggcacttaattgccaaaaagtaggtgggcatgattactataattaccagcagagctaaaacaatattgtcttacttacagagacgtgtgctg

SEQ ID NO: 981927 - DNA, 120 bp, Artificial Sequence
  ENSG00000261360_15 (sequence is synthesized)
ttggctagttaatcgttgtgtctctaggaaacagatatcctaacttgcatcaccaaaatagtcacaacctctcaatcaattcccagacttgggccggtttacactctcagaactctgaat

SEQ ID NO: 981928 - DNA, 120 bp, Artificial Sequence
  ENSG00000261360_16 (sequence is synthesized)
gaaggagaggctggatcctcttgaggaaggagtctgctacattgccaaaaatgtatattgttatttcccccgaagagaccaatagccatctaccagggtaactgtgcattgggggaagag

SEQ ID NO: 981929 - DNA, 120 bp, Artificial Sequence
  ENSG00000261360_17 (sequence is synthesized)
aaataatcagatttgtcagggattactacacagtggctctgacctgatactaatctggggaaaccaaaagctttactcggcctaccagtcagagtagaggcttaatggaggtcgagtgat

SEQ ID NO: 981930 - DNA, 120 bp, Artificial Sequence
  ENSG00000261360_18 (sequence is synthesized)
caatggagtttcagctcaggttcatctctcattagacccgttgagtccctggacccatcctgtgctatttccccagttccagaatgcataattaaaagagatatacttggccgggcacgg

SEQ ID NO: 981931 - DNA, 84 bp, Artificial Sequence
  ENSG00000261360_19 (sequence is synthesized)
agaatgcataattaaaagagatatacttggccgggcacggtggctcatacctgtattaagtcagtagttcaagaccagcctggc

SEQ ID NO: 981932 - DNA, 120 bp, Artificial Sequence
  ENSG00000261363_0 (sequence is synthesized)
ctgcagccagccggcatctccacgcaggccttagcgtgtgaaggtgaggggaccttcacctctaccaaggcatccaactcctgggctttttatgcagctctgaaagttgggactgttcct

SEQ ID NO: 981933 - DNA, 120 bp, Artificial Sequence
  ENSG00000261363_1 (sequence is synthesized)
ctttacatttgtccaaacccatagaatattcaacaccaagagtcaaccctgatgcagactgtggactttagttaataataatgtatccattttggcttatgggttgtaacaaacataaca

SEQ ID NO: 981934 - DNA, 120 bp, Artificial Sequence
  ENSG00000261363_2 (sequence is synthesized)
cgccaatgcaagacgagaataataggggcatggggaggattagaggggaactctatttctgctcagtttttctgtaaatgtgaaactactctaaaaaataaagtctagtaatttaaaaaa

SEQ ID NO: 981935 - DNA, 120 bp, Artificial Sequence
  ENSG00000261368_0 (sequence is synthesized)
aattggctggggtccacttccccactgtgagaggttttttcttttgctctctgcgatgaatcttactgctgcttactgtatgggtctgcacccgcctttatgagctgtgagactcaccac

SEQ ID NO: 981936 - DNA, 120 bp, Artificial Sequence
  ENSG00000261368_1 (sequence is synthesized)
ctgtgagactcaccactaaggtctgcagcttcactcctgaagccaaggagaccactaacccaccgggaggaacgaacaactctggacgggccgcctttatgagctgtaacactcaccgcg

SEQ ID NO: 981937 - DNA, 120 bp, Artificial Sequence
  ENSG00000261368_2 (sequence is synthesized)
taatcatttattcaacaaataataactgaatgcttacaaagtattagcctggaattgtcaaaagaggatgataacatcccctttccccagaggagtgtttgaaaatgtatggggacattt

SEQ ID NO: 981938 - DNA, 120 bp, Artificial Sequence
  ENSG00000261368_3 (sequence is synthesized)
gtcattgttattgttacaattactgtctttgttggaatttagcgagttgggggacaaacatactaaatattctataaactcttccactattagtggaatttgaagtttgtttcgagtcat

SEQ ID NO: 981939 - DNA, 120 bp, Artificial Sequence
  ENSG00000261368_4 (sequence is synthesized)
tatgaacattccatacttgtctgctggtaagattcctttcttagggcatatatacaagagtttcaatggcttaaaaactcttaatcgtggccaaaagtaatacattttgtgtcacaacgc

SEQ ID NO: 981940 - DNA, 120 bp, Artificial Sequence
  ENSG00000261368_5 (sequence is synthesized)
tgaaacacatatgtgtgtggataactgaaacaaataattcacgagaatatatcccttagtatgtttttatgcacaccaatttattaaaaaataatgctgcttgctataatactaaattga

SEQ ID NO: 981941 - DNA, 120 bp, Artificial Sequence
  ENSG00000261369_0 (sequence is synthesized)
ggtggtgttgggtagaggagaaagcagggtggggctgagatgggcaggtctatacctggtcctcctaatggccagtacaagtgccagccctgatgggggttggaggacagttctcaggcc

SEQ ID NO: 981942 - DNA, 120 bp, Artificial Sequence
  ENSG00000261369_1 (sequence is synthesized)
actggagcaatagttcagggagaagtggagcaactctttctgttccaactaaccagcatggggaaagtggggtggctcgggttccatagcctagcaggtggtagtgagacctgccttgct

SEQ ID NO: 981943 - DNA, 120 bp, Artificial Sequence
  ENSG00000261369_2 (sequence is synthesized)
ctcatgctctcaacctagcgggataccatcctacggcctgccactggcatcgagctgaggcagccagccaaatcacaagcagtttgtctttggactgcaatataaccccaggccataaaa

SEQ ID NO: 981944 - DNA, 120 bp, Artificial Sequence
  ENSG00000261369_3 (sequence is synthesized)
ccaattccaggatggggaggttcccgaatcccataaccttggctggagccaatgccacacttgcttatcagttctggcctcgttcctgggactgtgcatagtctgctaaaagcagatgag

SEQ ID NO: 981945 - DNA, 120 bp, Artificial Sequence
  ENSG00000261369_4 (sequence is synthesized)
aatttcacaaaatgccacgttatcacaaatttctgaagaggctgacaggttattaatcaggataaaccacattgaataaagtattcctgttaagtggttctgcagcctctgaatcggctg

SEQ ID NO: 981946 - DNA, 120 bp, Artificial Sequence
  ENSG00000261369_5 (sequence is synthesized)
ggaagttgttggacatgagaattcttaggctcctgcccagatctaacaaatcacaacctcaggaggtggggcccagcaccttgtatgttcgtaagttctccggctgactggatgctgaca

SEQ ID NO: 981947 - DNA, 120 bp, Artificial Sequence
  ENSG00000261369_6 (sequence is synthesized)
cttgctctcaggaatctacactggtcccccattgatgccagggggtgcaatgggcatcctacttctaatgtcttgatcatgtttcttcatttagaataaacttcttttcttgctaatcaa

SEQ ID NO: 981948 - DNA, 120 bp, Artificial Sequence
  ENSG00000234384_0 (sequence is synthesized)
aatacaatggcttctggtcaattcagtcataagatgtattcctggctggaaaattctgctatttggaatctacagttagacaagactgcatgttagactctgaagttaggcagggtcacc

SEQ ID NO: 981949 - DNA, 120 bp, Artificial Sequence
  ENSG00000234384_1 (sequence is synthesized)
accctggacaggtatggaatgtattcggtgttgaggagtttggacagtacagcagcagctgctctagagcataagcagatggtgaatgttcaacttgattacattgaccaaacggaattg

SEQ ID NO: 981950 - DNA, 120 bp, Artificial Sequence
  ENSG00000234384_2 (sequence is synthesized)
gataacaaactcgaaatagtttgagaaaaaagcacacgtataatgcttagagatgtaaaagccattttgcaagaatgagaatgagtgctacatgctaaggaaagtggaatggaaagttaa

SEQ ID NO: 981951 - DNA, 120 bp, Artificial Sequence
  ENSG00000234384_3 (sequence is synthesized)
gactagaaaagggaaaattgtctttgttgaagagcgcttgtctcctgacagttactcagtgatgcaaagctaaaaagagcactgtgctcatggtggaaaataattcccaggacttgacag

SEQ ID NO: 981952 - DNA, 120 bp, Artificial Sequence
  ENSG00000234384_4 (sequence is synthesized)
ggaagaatgtactcattccacgccccgggcagaagtctgctgagacaaacagaagaaagatagttagtgagcaaattcatcaagaccaatatcatgtatttctccccctggcctgatggc

SEQ ID NO: 981953 - DNA, 120 bp, Artificial Sequence
  ENSG00000234384_5 (sequence is synthesized)
tgatttgcactcctcctgtaagcaacaaaactgcaaaaccagtgctacaaaacagaagcacctgtaagtccgtgggagcacatctttgctcaacaagagatcctgacaactaacaactaa

SEQ ID NO: 981954 - DNA, 120 bp, Artificial Sequence
  ENSG00000234387_0 (sequence is synthesized)
ctgggagtagtttcttaaccgctttcggctgttggtcgcagggctaccggcctacagtcccagcaagcgccgggctgcggggtggtgagcagtcccggagggaggcgcaagccgtgtgga

SEQ ID NO: 981955 - DNA, 120 bp, Artificial Sequence
  ENSG00000234387_1 (sequence is synthesized)
cctctctgcttccaaacctatgctggccactgattctgtgccatccctggctaaggggagtgagtccagagagggacttaaggggcaagtcggggctgggcagtgagaagagtgtgacgc

SEQ ID NO: 981956 - DNA, 120 bp, Artificial Sequence
  ENSG00000234387_2 (sequence is synthesized)
tttccctccagagcatcacgcctcctccagcacaggagccgcctgctttcctaggctgctgtggaactggcctgaggtcccagacgctgtccattgtgctgccgccctccgcgctctcca

SEQ ID NO: 981957 - DNA, 120 bp, Artificial Sequence
  ENSG00000234387_3 (sequence is synthesized)
gccagagcgccagttcaccggcttttgggagaactccgccgcctcacctgcccgcggacaagggctgcaccccatggacctgggttcctggagtctttgacggctttgtgtggtcgactt

SEQ ID NO: 981958 - DNA, 120 bp, Artificial Sequence
  ENSG00000234387_4 (sequence is synthesized)
gttttgatactgaggacacccctgctggctgttaatttcagggcaagggatatgaggccattattttaagtgaaataactcaagaatggaaaataaaatactattatttttcacttataa

SEQ ID NO: 981959 - DNA, 120 bp, Artificial Sequence
  ENSG00000234380_0 (sequence is synthesized)
tcctccttttccccttccccctcctcccagcatgtaagacgtgcctacttcctcttcaccttccagcacaactgtaagttttctgaggtctccctagccatgcttcctgtgtagcctgca

SEQ ID NO: 981960 - DNA, 120 bp, Artificial Sequence
  ENSG00000234380_1 (sequence is synthesized)
aaacctcttttctttataaattacccaggcttaggtagttctttacagcaatgtgagaatgaactaatacaccatatctaatccaacagcacatcctgttggatctactttcagaataga

SEQ ID NO: 981961 - DNA, 120 bp, Artificial Sequence
  ENSG00000234380_2 (sequence is synthesized)
ctactttcagaatagattcagaatccaacaacttcttacctctgccactgcaataatctcttacatggaggtcccagtgggtgaatgggaactgaaacccaaccctgctccactggctga

SEQ ID NO: 981962 - DNA, 120 bp, Artificial Sequence
  ENSG00000234380_3 (sequence is synthesized)
gctgtgtacctttctccaaggctgcacccacctggaagaaggggcacccttttctatatataccaagatgccctctacaggcatctagcaacttcccagtagttcgtgttacctctctgc

SEQ ID NO: 981963 - DNA, 120 bp, Artificial Sequence
  ENSG00000234380_4 (sequence is synthesized)
tcaaaaccctctcactcagaagaaacgccaaaatctcacaatggcagcactatggaacttggcccaggtacctctgtgatgccatgtccttcagccacactggcctccggcgagctccgc

SEQ ID NO: 981964 - DNA, 120 bp, Artificial Sequence
  ENSG00000234380_5 (sequence is synthesized)
ctttacactcactattccttttacctaaattggctaactttcccacatccttccagtttcttcacagggggcccttccctggattgtagcaccccaaccctggtgtgtccatctctttgg

SEQ ID NO: 981965 - DNA, 120 bp, Artificial Sequence
  ENSG00000234380_6 (sequence is synthesized)
ccctccatagccacatcctcatctactgtgcctaaaattgtgtcccctaaaagttatattcaagacttaacgcctaagacctgtggatgtgaccttgtttggaaataaggtgtttccaga

SEQ ID NO: 981966 - DNA, 120 bp, Artificial Sequence
  ENSG00000234380_7 (sequence is synthesized)
tagaatcaagatgaggtcatacaatcaagatgaatcaagatggattcaggtgggcctaatccaaggactggcatcctggtaagaacagagaaatttggacatagagacccccaggggaga

SEQ ID NO: 981967 - DNA, 120 bp, Artificial Sequence
  ENSG00000234380_8 (sequence is synthesized)
aggtcttgaggaaggaggcggcaatgggagtgatgcatcgaggcaagcatcctagtccatttgtgttgataaaatacctgagaatgggcaatttataaacaatagaaatgtattttctca

SEQ ID NO: 981968 - DNA, 120 bp, Artificial Sequence
  ENSG00000234380_9 (sequence is synthesized)
cagatctggaggctgggatgtccaaggcacttgtgggtttggtgtctaacaggagctcggtctttgtttccaagatgatgcctcgttgctaccagagaggatggatgctgtgtcttacgt

SEQ ID NO: 981969 - DNA, 120 bp, Artificial Sequence
  ENSG00000234380_10 (sequence is synthesized)
ggcctggctggttccctccagccctttgtaagacactaatcccattcatgagggctccaacctcatgacggaaccacctcctaaaggccccacttctgtgactactgccaggttggtgat

SEQ ID NO: 981970 - DNA, 120 bp, Artificial Sequence
  ENSG00000234380_11 (sequence is synthesized)
tacgtttcaacataggaattttgggggacacatttaaactgtagcagcaaggagcacaaaggattgcagaatccaccagaaatggagaaggagaaagacctggaacaaattctccctcag

SEQ ID NO: 981971 - DNA, 120 bp, Artificial Sequence
  ENSG00000234380_12 (sequence is synthesized)
atccttcagaaggaatccaccctgctgacaccttgatcttagacttctggccaccgtaactgtgagacaatacatttctgttgttttaagccaccaagtttgtggttctttgttatatta

SEQ ID NO: 981972 - DNA, 120 bp, Artificial Sequence
  ENSG00000234380_13 (sequence is synthesized)
gccctagaggaaacaattaccccgtccaccatacaatatgttacttattaatttgcttagggtctgcctccccattaggagggagaggattctgtctgtgtttattgccacgtctcctgt

SEQ ID NO: 981973 - DNA, 120 bp, Artificial Sequence
  ENSG00000234380_14 (sequence is synthesized)
ggctggcatggggcctggcacagagtagatgccacaaatacttcctggaaaaatgaataaaagttcactcagctgaacctggtatgtgggtctcccagcacctcctgtggccatttctga

SEQ ID NO: 981974 - DNA, 120 bp, Artificial Sequence
  ENSG00000234380_15 (sequence is synthesized)
tgcatcctccgccactcccacctgcagcgggtgactgactcttcagtgacagaggagctgcacacaggtggcgaaacgcatctcatgtggacgtctgaacctagtgcctgcccaggctgc

SEQ ID NO: 981975 - DNA, 120 bp, Artificial Sequence
  ENSG00000234380_16 (sequence is synthesized)
tgcccaggctgctagatacctgagactgtgatatggtttggctgtaatcccacccaactgtcatctcgaattgtagctcccataattcctacatgttgtgggaggaacctggtgggagat

SEQ ID NO: 981976 - DNA, 120 bp, Artificial Sequence
  ENSG00000234380_17 (sequence is synthesized)
tggtagtgaataagtctcacaagatctgacggttttataaggggttccccctttcacttggctctcattttctctcttgcagccgccatgtaggaagtgcctttagccttctgccatgat

SEQ ID NO: 981977 - DNA, 120 bp, Artificial Sequence
  ENSG00000234380_18 (sequence is synthesized)
tgattgtgaggcctccccagccatgtgcaactactgggaaagtgaggtgcagaggtattttgcaacgtgcccacagaaccccagcgagcccgtgttggagttacaactgtgcctcaggga

SEQ ID NO: 981978 - DNA, 120 bp, Artificial Sequence
  ENSG00000234380_19 (sequence is synthesized)
ggagttacaactgtgcctcagggagcattctcaggcagcattctcttatgcttcaccgtctcacagatgataaggtttcattcaaggacttacaacagcaacccggagggagcattctca

SEQ ID NO: 981979 - DNA, 120 bp, Artificial Sequence
  ENSG00000234380_20 (sequence is synthesized)
gtggctggtagatgccatttgtactgagcaggacaattaagcccaattctggaaaaattctgctttctctattcaatgcattttataaatgtcttcactcagcacatttaccctactaat

SEQ ID NO: 981980 - DNA, 120 bp, Artificial Sequence
  ENSG00000234380_21 (sequence is synthesized)
attattggatgacaggctgcctcctagggggcttctctgggcttgccatgaaagcacttccggaggaaaagcagagctccatcagtctcttttggagagctgtgaacgtgaccagaccta

SEQ ID NO: 981981 - DNA, 120 bp, Artificial Sequence
  ENSG00000234380_22 (sequence is synthesized)
ttaattacttaactgaggtgctgaactttgaaaatgaaagttccggtggggagttctgtcctttccagcctggggagctctgtcagggctctcctgagcgtctctttcagcttatcaagc

SEQ ID NO: 981982 - DNA, 120 bp, Artificial Sequence
  ENSG00000234380_23 (sequence is synthesized)
ccaaacaggattaaagcctgctgtctcaccaggtggataatccactttgaacacttgagaggggagtgttgagatcacaccccttcccatgggacatttttctgggaaataaaatcggtg

SEQ ID NO: 981983 - DNA, 120 bp, Artificial Sequence
  ENSG00000234380_24 (sequence is synthesized)
acaaacaccacgcttgaacactcacattgactctagggtgcaggctgagctcatctggtgcaggggagtaatgcagaggcgaggcctgagtcagcgccaggcacaggaaggggatgcagg

SEQ ID NO: 981984 - DNA, 120 bp, Artificial Sequence
  ENSG00000234380_25 (sequence is synthesized)
atgcaccacagcccatgcctcttaggagaaaatctgggccttctccatggctgtgtctctattaatttgctaaggctgcccaaataaagcaccacacatgggcagcttacataacaggaa

SEQ ID NO: 981985 - DNA, 120 bp, Artificial Sequence
  ENSG00000234380_26 (sequence is synthesized)
tttattctcagttctggaggccggcagtctgagatcaaggtgtcagcacagctggttccttctgaggactgtgcaggagaatctgttccaggcctctccctgaacttctgggggtcactg

SEQ ID NO: 981986 - DNA, 120 bp, Artificial Sequence
  ENSG00000234380_27 (sequence is synthesized)
aaggataccagtcatgttggaggtctaccctactccttgatgaccttatcttaactagttatatctgcaacaaacctatttccaaattaggtcacattctgaggtcctgggggttaggac

SEQ ID NO: 981987 - DNA, 120 bp, Artificial Sequence
  ENSG00000234380_28 (sequence is synthesized)
tttaacatatgaattttaagaggacacagtccaacccataatagtaactttgtccctctctctcttttgacacaataatgaccctatgcagggatatttctaggtggctactgtctgtgt

SEQ ID NO: 981988 - DNA, 120 bp, Artificial Sequence
  ENSG00000234380_29 (sequence is synthesized)
gtgtgtggtagggggacttctagtactgttttggattactgttgacagacagcagcctgaggctaggaagcactttggggccatgacttagagcaaagctagtaagttttctcaggaatt

SEQ ID NO: 981989 - DNA, 120 bp, Artificial Sequence
  ENSG00000234380_30 (sequence is synthesized)
tgaacccagaatttcatccccatggcactttaatccagtacatttaatggctcagatgaccctggccttatcagcctggtgctctaagcagctgacctaacagtgtgtgcatgcgtgtat

SEQ ID NO: 981990 - DNA, 120 bp, Artificial Sequence
  ENSG00000234380_31 (sequence is synthesized)
gcacatgtgtatgttatgtgcatatataagtgcatacacataatgttggacacagaaatatctctgagaactgtccctttatcacccttcagataaaattattctcagcttgcttagttg

SEQ ID NO: 981991 - DNA, 120 bp, Artificial Sequence
  ENSG00000234380_32 (sequence is synthesized)
cagtgtttcttactttgcatctcctaacactttcatacatttctcccgaagtgcataggcaaggagcttcaacggaattcaatgtcaacctggtcatcttaccatgatttctaggaaaaa

SEQ ID NO: 981992 - DNA, 120 bp, Artificial Sequence
  ENSG00000234380_33 (sequence is synthesized)
atgtgtgtaattggttcatgccctccttctgtacagattacaattctccttttttggcatgaaaacctccatctgtcttttgaaagcacatgtcacttatttattaaagtcctccccaac

SEQ ID NO: 981993 - DNA, 120 bp, Artificial Sequence
  ENSG00000234380_34 (sequence is synthesized)
ttgttcaggttgagtttcactagtacctttctggagtattttatacctatgttatagccccatatgttatactttggatgtctgtttacctgtctgtaagactgtctgcataattcatgg

SEQ ID NO: 981994 - DNA, 120 bp, Artificial Sequence
  ENSG00000234380_35 (sequence is synthesized)
cctgtctgtaagactgtctgcataattcatgggccttgtacaaaataagaattcagggactcttgttacaagaaactattaagaatttcaagatgggtcaggcgcggtggctcacgcctg

SEQ ID NO: 981995 - DNA, 120 bp, Artificial Sequence
  ENSG00000234380_36 (sequence is synthesized)
gttcaagtgattctcctgccacagccccttgagtagttgacgttacaggcacccaccaccgcacccagatacttttcgtatttttagtggagacgctgtttcaccatgttggccagttgg

SEQ ID NO: 981996 - DNA, 120 bp, Artificial Sequence
  ENSG00000234380_37 (sequence is synthesized)
gccttggcctccctatgtgctgggttataggcgtaagccactgtgccctgcttcatgtcatttttaaagagcccacacaactcctgtagctgcattacgacaacctcaacggcaagacct

SEQ ID NO: 981997 - DNA, 120 bp, Artificial Sequence
  ENSG00000234380_38 (sequence is synthesized)
cgacgtgatattactccacgtgaaagtctaaaaggcgctgagcacagtgctctgccaatggtgtgtcttccagcctcgcttgctgagagaacagatgtgccggggaagaaatggacaaag

SEQ ID NO: 981998 - DNA, 120 bp, Artificial Sequence
  ENSG00000234380_39 (sequence is synthesized)
ctgggaaaggagtctaacttcttcaaagcggttgggcaccggtgaggctcttttggttacaaaccacagaaatggattctggtttatcagtttaatctcggtgtaactaaaagtgggaag

SEQ ID NO: 981999 - DNA, 120 bp, Artificial Sequence
  ENSG00000234389_0 (sequence is synthesized)
attctcatatttattcatttccacacaaatatttactgaacatgtaatatgtgtcaggcttggagctaaggctacaagaatgacccgctccaagtgagagctgatggatgaggacacacc

SEQ ID NO: 982000 - DNA, 120 bp, Artificial Sequence
  ENSG00000234389_1 (sequence is synthesized)
agctcagtaagggtggggagcttccattccagactgaggaagcagcagagctgatgtccaggagatgaagaagagcatctgggagtaggactgacatcacactcttctaatacgtgttaa

SEQ ID NO: 982001 - DNA, 120 bp, Artificial Sequence
  ENSG00000234389_2 (sequence is synthesized)
aattatctaattacctaattatctaatacgtgttaaaatttatgaaggaacaatggggaggcattgaggattttaagtgggagaatgtcgtgactgaatttgtattcaagatagatcacc

SEQ ID NO: 982002 - DNA, 120 bp, Artificial Sequence
  ENSG00000234389_3 (sequence is synthesized)
ttgtttgctgggtcggaagtgggtttgtaagagcaggaatggaggcagggagaagagttaggaagttctgtggtcaagcaggcatagctggacttgtaggtcaacagagcatgataatgg

SEQ ID NO: 982003 - DNA, 120 bp, Artificial Sequence
  ENSG00000234389_4 (sequence is synthesized)
tttttacataaaaggtaggagaaagagaagaatcaaggatgttttttgttttctgccctggataagttagtgaatggtggtaccatttaaggagactgaaaaagctgaagggaaagagca

SEQ ID NO: 982004 - DNA, 120 bp, Artificial Sequence
  ENSG00000234389_5 (sequence is synthesized)
aggagattaagtattaggcttaaaaggacttttagtcatccaagtcatgacgacaagtaggtatttggacaagccagtctggagaagttagggctggagatgtgaatgtgaagatgatcg

SEQ ID NO: 982005 - DNA, 120 bp, Artificial Sequence
  ENSG00000234389_6 (sequence is synthesized)
atttttacataatatctgaagccaaagagctgaatgagatcacctaggaagtgggcatagagacagaaggggctagagccaaacccggaaatgcttgaagaggtggagaagaggaagaca

SEQ ID NO: 982006 - DNA, 120 bp, Artificial Sequence
  ENSG00000234389_7 (sequence is synthesized)
atcctcaaagaggatgggaacatacatcagcaagtgaatatcagtggaagggtggtgagaagagaaacaaacgaagtgaaattgatgatgtaggaaagacataacctcaggcaccaagac

SEQ ID NO: 982007 - DNA, 120 bp, Artificial Sequence
  ENSG00000234389_8 (sequence is synthesized)
ctttcatagggaagaggcctagagagtaaacttactacccaggggtatcaggaggagtgaaagaacactaggagaggactaatagttaaaagagacacagaggaagggacaggcacagag

SEQ ID NO: 982008 - DNA, 120 bp, Artificial Sequence
  ENSG00000234389_9 (sequence is synthesized)
aagtgaatatagcggttgaaagtaagcagtagagtacgggaacatggaaccaaaagaagagagggtttcaaagagagcatggccaacagtgtccaatgctgctaagaggtaaagtagacg

SEQ ID NO: 982009 - DNA, 120 bp, Artificial Sequence
  ENSG00000234389_10 (sequence is synthesized)
aaaaatgtgattatgcccaatggatttaggtgcataggtggcactggtgaatttggttaagcagttttagtggacagatggcggcggaaatcaggttccataggaggtgaaaggatggag

SEQ ID NO: 982010 - DNA, 66 bp, Artificial Sequence
  ENSG00000117242_0 (sequence is synthesized)
actttgaattgctaaaagtggcatttttcctatgtgcagtcactcctctcatttctaaaataggga

SEQ ID NO: 982011 - DNA, 63 bp, Artificial Sequence
  ENSG00000117242_1 (sequence is synthesized)
aggcaggagaaaggcatgaatccaatgttaagactctgtctcaaatataaataaataaataaa

SEQ ID NO: 982012 - DNA, 120 bp, Artificial Sequence
  ENSG00000117242_2 (sequence is synthesized)
taaataaataaataaataaaaataaagcgagatgttgccctcaaacttcacctggccccggtcctggtttgctaatggctgtgggtgggggttgctgtgggtgatgactgactggataca

SEQ ID NO: 982013 - DNA, 120 bp, Artificial Sequence
  ENSG00000117242_3 (sequence is synthesized)
tgactggatacaaaatcctaagtggcttcatgaaattttgcctaggactggactgtctttcttttaactgtgaaatgatggttctccctaacgtctcctcaaaggatacaagaaagttgt

SEQ ID NO: 982014 - DNA, 120 bp, Artificial Sequence
  ENSG00000117242_4 (sequence is synthesized)
tgttgctagtagaccgaggggtgggaatcactgaaatggaaaatctagatgacagtgctggggaagagaaaactagaacagctcagttgaagacaacctttactgcatgttgacgctgat

SEQ ID NO: 982015 - DNA, 120 bp, Artificial Sequence
  ENSG00000117242_5 (sequence is synthesized)
ttaggcaatagcttcctaaaaatcatgtataaagttagttagttagacatgaaatctcttccccaatgttgatacctgcccacaaaatattctcaccttcagagtataagaatcattctt

SEQ ID NO: 982016 - DNA, 120 bp, Artificial Sequence
  ENSG00000117242_6 (sequence is synthesized)
aaagccaaatattcagttcaaggcacatacgtcatctgcagttgtaaatttgcatttaatatttcacaattcctgtaagagaggctagtcaggagggaaaccctcaagtttaaatcccca

SEQ ID NO: 982017 - DNA, 120 bp, Artificial Sequence
  ENSG00000117242_7 (sequence is synthesized)
cacttacttacttactgctcatccgtcactttcgctaagtgagattaataattcagtagctggtccagaacgcacagcttgggaacgcagaggcccaggcctcatgtaatttcccactcc

SEQ ID NO: 982018 - DNA, 120 bp, Artificial Sequence
  ENSG00000117242_8 (sequence is synthesized)
cgtaactgaacgtgctgacccatgttgatgtctgccttcatccaggtggcaaatcagacatgctacgctgcccccttcaaacgagttcctcgtgttaggggcaaaggtcacagccaaact

SEQ ID NO: 982019 - DNA, 120 bp, Artificial Sequence
  ENSG00000117242_9 (sequence is synthesized)
ctgccactgacagccagtgccttggcctggatcctctctgtggatgcaggcctacccctcctcagtccagcctcatctactagaccagcttggccattcacttttcagatgtctgtgagc

SEQ ID NO: 982020 - DNA, 120 bp, Artificial Sequence
  ENSG00000117242_10 (sequence is synthesized)
agaggactgcagactgaactctcactcaagttcttccatttgccaagcccgaggccttttccggctaaccagccctctctgcgctgtcttgtctcctgactcccaccctcaccattcaca

SEQ ID NO: 982021 - DNA, 120 bp, Artificial Sequence
  ENSG00000117242_11 (sequence is synthesized)
gaccatcacgacacagaggatgccatgttcttttagtaattcaccagctccatgcagggacatcacagggctgccctccatgagcagaggaggagggctgcctggcagagcgtttcacac

SEQ ID NO: 982022 - DNA, 120 bp, Artificial Sequence
  ENSG00000117242_12 (sequence is synthesized)
tccaggttagccagaaagagcatcttcatttttgtttccacacaacacttctctgtgagcctgttggccaacaaagtggcggccgattgttggaggagccagccaaccatcttgtctaac

SEQ ID NO: 982023 - DNA, 120 bp, Artificial Sequence
  ENSG00000117242_13 (sequence is synthesized)
ttcagattcttcagggctagaatatgttcaccccagaggcttagatgaagcacatttgcggctactcgggcagatggtctctgcaacaggaagggaagctgtagctagaacatctgttaa

SEQ ID NO: 982024 - DNA, 120 bp, Artificial Sequence
  ENSG00000117242_14 (sequence is synthesized)
cacagtctcaacccaaagcctgctttgttagtgagggtcttcccttctctggtcccaacccaattcttcctctaccctatctcctactgatgcccttcactcaggtgacaaatactgcct

SEQ ID NO: 982025 - DNA, 120 bp, Artificial Sequence
  ENSG00000117242_15 (sequence is synthesized)
gtcccctgcccgtgctccaagcttttccatgtgtacacctctgcatggggcagcatgcattgttgaaatagcctttccccctgggtggaaagcctagtgcctcttgtgcacagctatctg

SEQ ID NO: 982026 - DNA, 120 bp, Artificial Sequence
  ENSG00000117242_16 (sequence is synthesized)
gtcccttgaaccaggtaagtagtctcctctatcatttcataactggttgcagctgttgttctaaccttcactgcgcaccaagatagcaggccacgtacagagagcagttaacggagtggc

SEQ ID NO: 982027 - DNA, 120 bp, Artificial Sequence
  ENSG00000117242_17 (sequence is synthesized)
acagtgctggggtgcaggtatggctcagctctttgcactaagcctgcccctgagccagctgccactccaattatggcttcggataggtctgcctttgcattcctttatattaatttcaca

SEQ ID NO: 982028 - DNA, 120 bp, Artificial Sequence
  ENSG00000117242_18 (sequence is synthesized)
atgtccagatctgctctcaggagatgttttccatctctctctgatcagttctcagctgcttccatgagctacatctccattaaacatttctcaaaaatgcctccttttctctctctgaat

SEQ ID NO: 982029 - DNA, 86 bp, Artificial Sequence
  ENSG00000117242_19 (sequence is synthesized)
catttctcaaaaatgcctccttttctctctctgaataacttgcactgtcacctaggccagagtgcagtggcgcgatcttggctcac

SEQ ID NO: 982030 - DNA, 64 bp, Artificial Sequence
  ENSG00000117242_20 (sequence is synthesized)
attctcctgcttcagcctcccgagtacctggaattacaggcgtgtgccacgacactactggaac

SEQ ID NO: 982031 - DNA, 120 bp, Artificial Sequence
  ENSG00000117242_21 (sequence is synthesized)
cctcagcctcccaaagtgctgtgattataggtgtaagccaccgtgtctggcctctgaacaactttttcagcaactaaaaaagccacaggagttgaactgctaggattctgactatgctgt

SEQ ID NO: 982032 - DNA, 120 bp, Artificial Sequence
  ENSG00000117242_22 (sequence is synthesized)
attctgactatgctgtggtggctagtgctcctactcctacctacattaaaatctgttttttgttctcttgtaactagcctttaccttcctaacacagaggatctgtcactgtggctctgg

SEQ ID NO: 982033 - DNA, 120 bp, Artificial Sequence
  ENSG00000117242_23 (sequence is synthesized)
cccaaacctgaccttcactctggaacgagaacagaggtttctacccacaccgtcccctcgaagccggggacagcctcaccttgctggcctctcgctggagcagtgccctcaccaactgtc

SEQ ID NO: 982034 - DNA, 120 bp, Artificial Sequence
  ENSG00000117242_24 (sequence is synthesized)
tcacgtctggaggcactgactcgggcagtgcaggtagctgagcctcttggtagctgcggctttcaaggtgggccttgccctggccgtagaagggattgacaagcccgaagatttcatagg

SEQ ID NO: 982035 - DNA, 120 bp, Artificial Sequence
  ENSG00000117242_25 (sequence is synthesized)
cgatggctcccactgcccaggcatcagccttgctgtagtcaatcactgccctggggccaggacgggccgtggacacctgctcagaagcagtgggtgagacatcacgctgcccgcccatct

SEQ ID NO: 982036 - DNA, 120 bp, Artificial Sequence
  ENSG00000117242_26 (sequence is synthesized)
aaccttttcatgtcctgcacatcacctgatccatgggctaatctgaactctgtcccaaggaacccagagcttgagtgagctgtggctcagacccagaaggggtctgcttagaccacctgg

SEQ ID NO: 982037 - DNA, 120 bp, Artificial Sequence
  ENSG00000117242_27 (sequence is synthesized)
tttatgtgacaggacttgcattctcctggaacatgagggaacgccggaggaaagcaaagtggcagggaaggaacttgtgccaaattatgggtcagaaaagatggaggtgttgggttatca

SEQ ID NO: 982038 - DNA, 120 bp, Artificial Sequence
  ENSG00000117242_28 (sequence is synthesized)
caaggcatcgagtctcctgcattcagtggacatgtgggggaagggctgccgatggcgcatgacacactcgggactcacctctggggccatcagacagccgtttccgccccgatccacgta

SEQ ID NO: 982039 - DNA, 120 bp, Artificial Sequence
  ENSG00000117242_29 (sequence is synthesized)
ccagctgctgaagggcaactgcaggccgatgctctcatcagccaggcagcagccaaaatctgcgatcaccagccaggggcagccgtctgggaaggagcaagcaaagtgaccatttctcct

SEQ ID NO: 982040 - DNA, 120 bp, Artificial Sequence
  ENSG00000117242_30 (sequence is synthesized)
cccctccttccctctgagaggccctcctatgtccctactaaagccaccagcaagacatagctgacaggggctaatggctcagtgttggcccaggaggtcagcaaggcctgagagctgatc

SEQ ID NO: 982041 - DNA, 120 bp, Artificial Sequence
  ENSG00000117242_31 (sequence is synthesized)
agaagggcctgctgtgcgaacacggaaatgcctccagtctctgtgcgcgatgccctgttgaaccagatggtccacgccttccagcagctgcagcagcatcatggcggcgaggcgggggct

SEQ ID NO: 982042 - DNA, 120 bp, Artificial Sequence
  ENSG00000117242_32 (sequence is synthesized)
gggtgtgttcacacaaagtctgcagtggagaggaagccacgatacttcactggggccatgaggagccagaggtgagcaggccaaagggaagcaggaacaggagatgcgaggaaagaacag

SEQ ID NO: 982043 - DNA, 120 bp, Artificial Sequence
  ENSG00000117242_33 (sequence is synthesized)
gagatgcgaggaaagaacagcatgtggacagtggaaccacgttcctacaagttcaagaatcagtaactgatggaaattcccgtggctcactcctgtaatcccagcaatttgggaggctga

SEQ ID NO: 982044 - DNA, 89 bp, Artificial Sequence
  ENSG00000117242_34 (sequence is synthesized)
ccagcaatttgggaggctgaggcaggcaattgcttgagcccaggagttcgaggccagcccgggcaacatggagaaactctgtctctaca

SEQ ID NO: 982045 - DNA, 120 bp, Artificial Sequence
  ENSG00000224000_0 (sequence is synthesized)
cttagatcttaagccactgctgatcttcttagaaccacacaccgcaggtgcttccctgtggaaactgcaaatgtttactctgtcttccacctttgaatgacttagaacatgttgtggcta

SEQ ID NO: 982046 - DNA, 120 bp, Artificial Sequence
  ENSG00000224000_1 (sequence is synthesized)
aggttcattcgttatcaacattcagaaactgccatttccttttctacctgcaaagcctaataataactttttaaactattgcttcctttgcatattcaccatacatcctgctttcagatg

SEQ ID NO: 982047 - DNA, 120 bp, Artificial Sequence
  ENSG00000224000_2 (sequence is synthesized)
tggaaaactctgaaggaagttggccgcaccatttaatggaagcatgaggaactagtctctttcctttagatatgtatgaaaatggctccactgtgactcagcagatggctccactgtgac

SEQ ID NO: 982048 - DNA, 120 bp, Artificial Sequence
  ENSG00000224000_3 (sequence is synthesized)
tcagcagatctccaggattttcctgtgtagtttctgttttggctttcatctggtgggaactgactgctacaggaccgaggcttttaaatcaaacccaaataacaaaatgtatttagagct

SEQ ID NO: 982049 - DNA, 120 bp, Artificial Sequence
  ENSG00000224000_4 (sequence is synthesized)
gaaaaaggtggtgccatcaggctggggtggggatgaggaagtgattcattaccccagttggaatgtaaattcaatgagtttaattactagtggtgtcaaaaaaggattttcactgatagc

SEQ ID NO: 982050 - DNA, 76 bp, Artificial Sequence
  ENSG00000235385_0 (sequence is synthesized)
cctctcttgcctgccaccatgtaagaagtccctttggtcttcctttgtcttctgccgtgattgtgaggcctcccca

SEQ ID NO: 982051 - DNA, 120 bp, Artificial Sequence
  ENSG00000235385_1 (sequence is synthesized)
gccatgtggaacttataaaataataagatggctgatcctgcaaagaggcgcggtgacatcaacagtgactcagtctctatgatggtattagtaactggcagctgactctcctatttatca

SEQ ID NO: 982052 - DNA, 120 bp, Artificial Sequence
  ENSG00000235385_2 (sequence is synthesized)
tcaagttatgttccaaataagactttcaagtctgagaaaaatgacaaatcccttccaggcatggttcaagttaaagctgaaactgtgtcttcgtttcagctcaagagaggttttgattgt

SEQ ID NO: 982053 - DNA, 120 bp, Artificial Sequence
  ENSG00000235385_3 (sequence is synthesized)
gtggaagacattggttgcccaagaaaatatgtcaacatctgtccatcactgcaactccggcctgattatcattttttctgcttctgtaagcaccaatgagacaatgccactgaaccacat

SEQ ID NO: 982054 - DNA, 120 bp, Artificial Sequence
  ENSG00000235385_4 (sequence is synthesized)
tctttgttgcctgcagtatttcccaccactgcgccacctctgatatgctaatgaggaagcccagggttttgtgtggctgaaaagcctttcaggcacaatcagtgggtcaacaatctcaac

SEQ ID NO: 982055 - DNA, 120 bp, Artificial Sequence
  ENSG00000235385_5 (sequence is synthesized)
tctgtacagcggctcagcctgctctgtgagaggctcctctttcggaggggtccttcctcacaccttttctgtgagtgcgtctgtgcttaaggaagggcaattaaccatctggctgcttgt

SEQ ID NO: 982056 - DNA, 120 bp, Artificial Sequence
  ENSG00000235385_6 (sequence is synthesized)
cccctggagaaattgacagaacatcaaacagaataaactcataccttgaaaactgccaagtggcacatgactgtccggttcactgtggggagaagccactaaccaatggtctgaatctaa

SEQ ID NO: 982057 - DNA, 84 bp, Artificial Sequence
  ENSG00000235385_7 (sequence is synthesized)
ctcaaactgtggcccaagtgctggtagcattagcatcaactggaagcttgttagaaatgtagaatctcagatctcaccccagaa

SEQ ID NO: 982058 - DNA, 120 bp, Artificial Sequence
  ENSG00000235385_8 (sequence is synthesized)
caccggtttgtagtaaaactttgaagatagaactccatgcaaattctgactccatagtgctggttcttgatgtaaatctcccaatgtaactgtcaaggtttaaaaatatcttacgtaggt

SEQ ID NO: 982059 - DNA, 120 bp, Artificial Sequence
  ENSG00000235385_9 (sequence is synthesized)
gttcagaatcataaggtcatagaattataaaatgttaaccggcagaagtattttcatctttgtcatacgaaaaagagtaatttgctcataataagccttcaatatttatgtattggattg

SEQ ID NO: 982060 - DNA, 120 bp, Artificial Sequence
  ENSG00000235385_10 (sequence is synthesized)
caattaacaggaatcaaaggaatcttataaggatcatttatctagaataatctctattttctagaattacttaatgatcattgtctttattcagcctaagtaacattgaaatttttcttc

SEQ ID NO: 982061 - DNA, 120 bp, Artificial Sequence
  ENSG00000235385_11 (sequence is synthesized)
attcaaataaattcatactcatgaagcctttccccacttttcatttcatattctgtttctactagtattgttaaccattgcaaagaaatactgttgccctccattaaaacctgaactgcc

SEQ ID NO: 982062 - DNA, 120 bp, Artificial Sequence
  ENSG00000237556_0 (sequence is synthesized)
ccattccagaaacagaaaaggaaaagtcctgttgtcaagacctccaaggacaagaaccagtgaagcctggtaacaaacacattatgctttgaagatctgccagttaacagctgtgtggtc

SEQ ID NO: 982063 - DNA, 120 bp, Artificial Sequence
  ENSG00000237556_1 (sequence is synthesized)
tctctccgattaacatctctcagcccttttttcacctttatgagatggggattataataccacatcccttgtagggccattgtgaggattgaatgagctaatgcatgcccacgtgcccac

SEQ ID NO: 982064 - DNA, 120 bp, Artificial Sequence
  ENSG00000237556_2 (sequence is synthesized)
atccacagaagagctccataaccccacccaagggcacggaatggcctttccttaaaggtgaagcacaacatcattctcaagtgcctttgcaaataacgaagaccagaactggtcatttac

SEQ ID NO: 982065 - DNA, 120 bp, Artificial Sequence
  ENSG00000237556_3 (sequence is synthesized)
ccaggccgagccagacctatatgatacatcaaaagcagaacagaaagaaagggaatgagagaatccaaatgagtttatttgtccattaaataaatatgcaaaattatgcagatgtggaaa

SEQ ID NO: 982066 - DNA, 120 bp, Artificial Sequence
  ENSG00000237556_4 (sequence is synthesized)
aaagatgagtgtgtgaggaccctattgagggggcacaatgatagtaccctgcctaatctcggccaagggatcgagagtcagagggacattttgtccatgtgaatgtctctttgctgagtg

SEQ ID NO: 982067 - DNA, 120 bp, Artificial Sequence
  ENSG00000224008_0 (sequence is synthesized)
agctgagacagattccctaagaggtatatggaagactcttgaaaataaaggacagaaaagccttaggaaatacagatgcattcaggaatcagtacgaccaatacatatcatctttaaggt

SEQ ID NO: 982068 - DNA, 120 bp, Artificial Sequence
  ENSG00000224008_1 (sequence is synthesized)
tttaaaaagaaagccagaacatgtatttctcttgcttatcccaggcaggatctaaatatgcaaatatgccacttttctacaagataactcactgtgagtcaattgcaggacagacacaat

SEQ ID NO: 982069 - DNA, 120 bp, Artificial Sequence
  ENSG00000224008_2 (sequence is synthesized)
acaatggagcccgaatttctcaggcaaagaaatgtggatatggacatctaagagcttttagaatataatttcaaaggcaggactgattctgtgaaaagccatcaaatgtactgtctgaca

SEQ ID NO: 982070 - DNA, 120 bp, Artificial Sequence
  ENSG00000224008_3 (sequence is synthesized)
gctgttcctgcccagcaaatgaacaggatacctacgacacggtgactaccatgtcatcagggccatgagatgtacagagttgaccaggaagcaacagaaatgtaactcaaaacctcaaaa

SEQ ID NO: 982071 - DNA, 120 bp, Artificial Sequence
  ENSG00000224008_4 (sequence is synthesized)
cagaaaaccacgtagcctatgacagtggtcgctggagtatatattttactcttgcggattagaaaaaaatctcaagccgtcaaagatagaaaagaaaaactggggaaaacaaagaattga

SEQ ID NO: 982072 - DNA, 120 bp, Artificial Sequence
  ENSG00000224008_5 (sequence is synthesized)
aatcaacatataagagacaagactacaattgctacatttatagtattagaaggaaaaaaaaaacacttcaaggtgagggaaaaaaaactggatcagagttcagaaatccctccagggcat

SEQ ID NO: 982073 - DNA, 120 bp, Artificial Sequence
  ENSG00000224008_6 (sequence is synthesized)
gagcaaaatgaagtgagagactcctaggtaggaagataataccatgcctgaagttagcaaagttctagacgtgatataacagagatatcatgcagttgaaaaacaattcctggggtcacg

SEQ ID NO: 982074 - DNA, 120 bp, Artificial Sequence
  ENSG00000224008_7 (sequence is synthesized)
tcatacagatggttgccccacaccgctccaggaattcaaaccaagacggcattctgggggaggctggacaaggaacaaatggctctgttgtaaaagttaaatgagattccatgcctgcca

SEQ ID NO: 982075 - DNA, 120 bp, Artificial Sequence
  ENSG00000224008_8 (sequence is synthesized)
ggctctgttgtaaaagttaaatgagattccatgcctgccactccaatggctcagggcacacctctaactatttttttttttttatttgaggtggagtctcagtctgtcacccaggctgga

SEQ ID NO: 982076 - DNA, 85 bp, Artificial Sequence
  ENSG00000224008_9 (sequence is synthesized)
ccccaatttgtttatttttaattggtcctcagcagcatcaccataggaataggaaaaactaaagtggacctgcgtcaggacacca

SEQ ID NO: 982077 - DNA, 120 bp, Artificial Sequence
  ENSG00000224008_10 (sequence is synthesized)
ggaataggaaaaactaaagtggacctgcgtcaggacaccatcatccacaaaaacccagccttgttccctcaggctgcaacgggcagtaggttgggggactactttaacaagggaaaacga

SEQ ID NO: 982078 - DNA, 120 bp, Artificial Sequence
  ENSG00000224008_11 (sequence is synthesized)
tggcaacaacggacaggcaaaatctcccatgctttctgaggaaatagacgtaaaaaaaacatggaagaaaatattcattaaatttttgtgtcttagcaattgcagatataaattaaggtg

SEQ ID NO: 982079 - DNA, 120 bp, Artificial Sequence
  ENSG00000224008_12 (sequence is synthesized)
catttaaaatgccaccttaagatgtctgatgtgtcctgggtgggatgagtgtatgcatgtatcgcaccttgtattatgtaatgactaggctgcttggttctactggaatattctgccaca

SEQ ID NO: 982080 - DNA, 120 bp, Artificial Sequence
  ENSG00000224008_13 (sequence is synthesized)
cccgtattcaacatccaacagatctgtactgaacacctgctgtatacatggaatgattctaagtcctggggatagaacagtgaatacagcagacaaaatttctgccttcatggaacttat

SEQ ID NO: 982081 - DNA, 120 bp, Artificial Sequence
  ENSG00000224008_14 (sequence is synthesized)
attcttattagcaagatagaaaaaaatgtacaatatacatcctatataagcactatagagaaaataaagaatatagcagggtaaattaaaccacttgtgataggagcaatatttgagata

SEQ ID NO: 982082 - DNA, 120 bp, Artificial Sequence
  ENSG00000224008_15 (sequence is synthesized)
ggtcacttagacaaaccctctccgagaggaattgagccatgatacatataccaccgtatataaatactatctaggacagagggaatagccagggcaaaagcccctgtgcttattatattc

SEQ ID NO: 982083 - DNA, 120 bp, Artificial Sequence
  ENSG00000224008_16 (sequence is synthesized)
aagaaccactgtgaggccaaagaaatgacagacacttggaccagcatgctgtccatggagttgtgagaagtgtttagtaataagtgaaatacattttgaaggtaaagttggcatagcatg

SEQ ID NO: 982084 - DNA, 120 bp, Artificial Sequence
  ENSG00000224008_17 (sequence is synthesized)
acttctttctttctaacccagaaaccccacacaccagatttcctttctcatatggacatttgtgacaggctctctaaattgaatccccttaggctattaactgaaaggagcatggtgctt

SEQ ID NO: 982085 - DNA, 120 bp, Artificial Sequence
  ENSG00000269289_0 (sequence is synthesized)
attggaggagctgctcccttccccgttcagctgtaattgtctgaatatttatttctcggcattcactgcagaacaagctgcaagtggtgactcggacgtgatcaagtggtgactcggaca

SEQ ID NO: 982086 - DNA, 120 bp, Artificial Sequence
  ENSG00000269289_1 (sequence is synthesized)
tgatcaagtggtgactccgacgtgattgccttgaagttatgcatggagtaggatgactcaccaatcttcggggaataccggactagagtggatccccataaaatgagtgaagccataata

SEQ ID NO: 982087 - DNA, 120 bp, Artificial Sequence
  ENSG00000269289_2 (sequence is synthesized)
tgagttagagactactgaaaaagcccctcctgatgatgaaggacctgtcattggagaatcgaccaaaactgacagtgataacttggaaggcacctgacattacctggggacagctaaaga

SEQ ID NO: 982088 - DNA, 120 bp, Artificial Sequence
  ENSG00000269289_3 (sequence is synthesized)
aactggaccaacagggaactatctggcttgcatctatgggagcccctgaaactgcagagaaccagtttcttatgtatctgatggtaattgggggagcttctgagaaggctttccagaaac

SEQ ID NO: 982089 - DNA, 120 bp, Artificial Sequence
  ENSG00000269289_4 (sequence is synthesized)
ggtttcctttggaatgcagctttccaaatcactttaaagactggctttcttcttgacgttggacctctcatccaggtcatctgttgtattcactctcacctacctgggggttcatccacc

SEQ ID NO: 982090 - DNA, 120 bp, Artificial Sequence
  ENSG00000269289_5 (sequence is synthesized)
atctcatctcgcttcatattccagggctctttttctttctccagacagatgatgaggtctggcttagagacagcaatacctgttttattaaaaataattaacatgaatcttgctcatatt

SEQ ID NO: 982091 - DNA, 120 bp, Artificial Sequence
  ENSG00000269289_6 (sequence is synthesized)
agaatattctaataaatttatcccatatactaatttataacagaaatttttaaatatttacagaatattttaattttgtaggttcttaatttcactgcctggtactactgaagcaaaaat

SEQ ID NO: 982092 - DNA, 120 bp, Artificial Sequence
  ENSG00000269289_7 (sequence is synthesized)
ggtactactgaagcaaaaattggtaatggcacttggattttaaggtgtgaataacaatattttatgccactaaggttctgaaattaccactaatctaaagcgaaagacacagatcagctc

SEQ ID NO: 982093 - DNA, 120 bp, Artificial Sequence
  ENSG00000269289_8 (sequence is synthesized)
aggaatgtggaaatttcaggtcaggatgaaacatcttgaagaaattttttctaaacagacaaatccccaggattttcttgaaaacagaaataggaaagcataaattaccagaaaacatac

SEQ ID NO: 982094 - DNA, 120 bp, Artificial Sequence
  ENSG00000269289_9 (sequence is synthesized)
tacaaaagaaaaataaaagctttagtttatattaaaaattttgtattaaagttatcctcacccaggaaggccaggtttctgtagttctctaacatcacattcctatataaattcttctgt

SEQ ID NO: 982095 - DNA, 120 bp, Artificial Sequence
  ENSG00000269289_10 (sequence is synthesized)
tctatggccacatccctaaatgtcaacagtccctggaaaatacacacaaacacacatatttacaaagtggctatgggcagaatttttcatttgactcaaggtaaaatcagaaagtgaata

SEQ ID NO: 982096 - DNA, 120 bp, Artificial Sequence
  ENSG00000269289_11 (sequence is synthesized)
tttcatttgactcaaggtaaaatcagaaagtgaatagaattgattctaacttataagagggactgaaattatccaataaaataattgtcaaaacacaaacattttctaatgtattctcta

SEQ ID NO: 982097 - DNA, 120 bp, Artificial Sequence
  ENSG00000269289_12 (sequence is synthesized)
actctgagaaaagagactggcataatatccagaacatcagtgtatatatgatacttttctgaatgataaagtgtaaaaatgtactaacatgtacatttttgagtacagtatttacataat

SEQ ID NO: 982098 - DNA, 120 bp, Artificial Sequence
  ENSG00000269289_13 (sequence is synthesized)
atgatagaagcttactttgcattggataatccgcatgttctaagaattaaagaagggggaaatgtgaggggtgtatgacaatacattcaagcttatgtacaaggcatttgaggttgaggc

SEQ ID NO: 982099 - DNA, 120 bp, Artificial Sequence
  ENSG00000269289_14 (sequence is synthesized)
atggaaaaatactgaggcactgtgtgtatgttgtttgtgcatgaaactgtaattccttgaccctgaaaataggacaaggaatagaatttgtaataaggagtgctgaacacagcctcctaa

SEQ ID NO: 982100 - DNA, 120 bp, Artificial Sequence
  ENSG00000269289_15 (sequence is synthesized)
gaatgtggtttgagtgcttttagatgttataaacaaggccatatgtgcctcatgacccgaccccaaatagccaccttgtagatgtttcttgtttgtctaaattgtagttcaactagcctt

SEQ ID NO: 982101 - DNA, 120 bp, Artificial Sequence
  ENSG00000269289_16 (sequence is synthesized)
ctcaataaatacttggcagatgaatcttaaagcagcactgtcttggaggagctgctcccctccctttcagctgtaattgtctgaatacttatttcttggtgttcactgcagagcaagctg

SEQ ID NO: 982102 - DNA, 72 bp, Artificial Sequence
  ENSG00000269289_17 (sequence is synthesized)
ctgaatacttatttcttggtgttcactgcagagcaagctgcagcacagctgccggcatttattcatgcaaga

SEQ ID NO: 982103 - DNA, 120 bp, Artificial Sequence
  ENSG00000269288_0 (sequence is synthesized)
caggtgctggggggagggagagatgaacagacagagcacagattttttagggcagtgtaattattctgtaagatactattatggaggatatatgtctattatatatttgcccaaacccaa

SEQ ID NO: 982104 - DNA, 120 bp, Artificial Sequence
  ENSG00000269288_1 (sequence is synthesized)
ttctctttcaagaatgttctgtcaccaaggaaacctcttccatgggagagtccaccaaaagttgtccatcgcctattggtgggttatcacagcagaaagagaggaaatttcagactctag

SEQ ID NO: 982105 - DNA, 120 bp, Artificial Sequence
  ENSG00000264464_0 (sequence is synthesized)
gtctgggaagcacatcgcagtgtgcaccgcagcagggcttgatccaccacatcacattccgcgctcgctgctgcctgaactcatcaaagtggacccagtgaaagctgtgttgaggaggac

SEQ ID NO: 982106 - DNA, 120 bp, Artificial Sequence
  ENSG00000264464_1 (sequence is synthesized)
tattctggtgctgaggctgggtacattcatgaggccaggaacacgggattgaattccaagcagagcaccaggatacctgtagcagaaatccaggcaagagccaagaagatgggaacggaa

SEQ ID NO: 982107 - DNA, 72 bp, Artificial Sequence
  ENSG00000264464_2 (sequence is synthesized)
agcagaaatccaggcaagagccaagaagatgggaacggaatagcaagcgctgaattaattaattaattaatt

SEQ ID NO: 982108 - DNA, 120 bp, Artificial Sequence
  ENSG00000264464_3 (sequence is synthesized)
ctggaactcctgacctcaagtgattggccggccttgggcaagtgctgaatttaaacacggctctcctgaggacttctattgggttctgcctagtggtaaccgccgaggcttcgcttactc

SEQ ID NO: 982109 - DNA, 120 bp, Artificial Sequence
  ENSG00000264464_4 (sequence is synthesized)
tgtagatctcccgggagcagcaggaaacaagaaacccttagccttttcaaagtaatagccattctcctcactgacctgacaaagacggatgtcaagtgggccctgcaggagtttgacagt

SEQ ID NO: 982110 - DNA, 120 bp, Artificial Sequence
  ENSG00000264464_5 (sequence is synthesized)
ttgtccaaacaactgtttttagttgaggctataaattcttaggaaagggtttgtcagtgtggcacattaaatcagttggccagtatgcattactctgaccatcttcttagaaagcaacgt

SEQ ID NO: 982111 - DNA, 120 bp, Artificial Sequence
  ENSG00000264464_6 (sequence is synthesized)
ctttggggattttcagatgagtgaatattcaatgctctgtcttttagcattatcatccacttcccctgcccctcatagaattctctttagaggattggctcctgggcctccaggagagcg

SEQ ID NO: 982112 - DNA, 120 bp, Artificial Sequence
  ENSG00000264464_7 (sequence is synthesized)
ggcagtagggtagggtggtgggaggagaggaaagtcttaatcccttgccagggatttactttgttcttctcagtcggagcctcccgtacaatgctgttttgagcttcacttagaaattgg

SEQ ID NO: 982113 - DNA, 120 bp, Artificial Sequence
  ENSG00000264464_8 (sequence is synthesized)
cacaacaatcggaaaatgtaatcccttagtcaggcggctggagtcctttaattcacctctccggaccttgggctgctggctgctcctctctgccgcctggctgtctctcccttacctccc

SEQ ID NO: 982114 - DNA, 120 bp, Artificial Sequence
  ENSG00000264464_9 (sequence is synthesized)
agagttagggtaatagctgacatttttcttcactaggctttcctaagggatttcattccatttgtgagacactttaattcctgaagctgcaaagtttgctttttattactatagctctac

SEQ ID NO: 982115 - DNA, 70 bp, Artificial Sequence
  ENSG00000264464_10 (sequence is synthesized)
ctgggttcaagcaattctccttcctcagtctcctgagcagctgggactacaggcacgtgctattggccag

SEQ ID NO: 982116 - DNA, 120 bp, Artificial Sequence
  ENSG00000264464_11 (sequence is synthesized)
tttaagatcaaatttaaaagtacattttctttcttatcttgtcattaactgatgttgggtatgtgtgtgtgcttgtgatttccctggctggaccagtgtataacttcaaagagggctggt

SEQ ID NO: 982117 - DNA, 120 bp, Artificial Sequence
  ENSG00000264464_12 (sequence is synthesized)
gccttgcctttagtctgctggatagcactcctccagaccctccctttgctgagcagctccgtggacctgtgcaaatctctacccagctttgttggacaacaaaataccctggagaatatc

SEQ ID NO: 982118 - DNA, 120 bp, Artificial Sequence
  ENSG00000264464_13 (sequence is synthesized)
aagccctttaacatacccagtttgtgctcccagacgtaagatctctttggccatgtatgtgggattcccatgaaggagaagcttcatttccagcaagaatctggcttccacctagacttg

SEQ ID NO: 982119 - DNA, 120 bp, Artificial Sequence
  ENSG00000264464_14 (sequence is synthesized)
ggaaacagatactgaaaagcatattgctgatcaactagacaacctacttccactcttgattgcccctgtaatccatctagaacagccagagcaatttatttattaaaaaatttaaaattg

SEQ ID NO: 982120 - DNA, 120 bp, Artificial Sequence
  ENSG00000263859_0 (sequence is synthesized)
attaatttacaagtaattaacatgctaaaacattttataattcgcttcaataacgtgtatagataacacaaaaattaactctggcctaccttaggctacatgatcacagacaagctgatg

SEQ ID NO: 982121 - DNA, 120 bp, Artificial Sequence
  ENSG00000263859_1 (sequence is synthesized)
taattaaaatgagaagatttatttcttggtactttcatggctttatttttacattaaagtcttttatgatgtattatttattgctatcttccaccaaatgcttggccagtcaatcccagg

SEQ ID NO: 982122 - DNA, 120 bp, Artificial Sequence
  ENSG00000263859_2 (sequence is synthesized)
cagggtgatcttaataataacaactaatacatgtaaaccataaacatttatgaaaattatatatcctcatataaatttcataacatatgtaagttacaaaagaaagaaaaagtcaacgag

SEQ ID NO: 982123 - DNA, 120 bp, Artificial Sequence
  ENSG00000263859_3 (sequence is synthesized)
tcacataatttgcaggaggtggaaagaaagaaaagaactcatctaggcaacttttgaaaccagtacttagatgctacaggtcaaacacaaaaacaacagtacacgattaaggaagtaagg

SEQ ID NO: 982124 - DNA, 120 bp, Artificial Sequence
  ENSG00000263859_4 (sequence is synthesized)
tgcctccatagtgactgcgcctccctggggcacaggttgaacagttcacctacagcactgacatggcctaagcgaatgtcctgtcaatctgagagccaggtttctccctgtcacaggaag

SEQ ID NO: 982125 - DNA, 120 bp, Artificial Sequence
  ENSG00000263859_5 (sequence is synthesized)
aaactacacataaggaaaggggcagaagcaacaagcacagccagtgcccaggtcttggttgctaaatcccagtctccagtgagggagggctccctggagaagcagctgggtgcagagctg

SEQ ID NO: 982126 - DNA, 120 bp, Artificial Sequence
  ENSG00000181097_0 (sequence is synthesized)
gccgtgagtcgggtgggtgggctgtgagtcgggtgggtggccgtgagttgcgtggtgggccgtgagttgcgtgggtgggccgtgagtcgggtgggtgggccgtgagtcgggtgggggtgc

SEQ ID NO: 982127 - DNA, 120 bp, Artificial Sequence
  ENSG00000181097_1 (sequence is synthesized)
ggaattggctgctagcggtgatggtgacacagggttacggaggaatcctcactcagatgcatttggacgtctttgtggggaaatgacgtggcgcctgggatgtactttacgattctaata

SEQ ID NO: 982128 - DNA, 120 bp, Artificial Sequence
  ENSG00000181097_2 (sequence is synthesized)
aagaggagaaagacacaacagtattggctgaatgttgacagctgttgaagccgggaggttggtgtgcttaaaagttccccaaatcttttatttgcagcatgagtatgagtttcttcgtgc

SEQ ID NO: 982129 - DNA, 120 bp, Artificial Sequence
  ENSG00000181097_3 (sequence is synthesized)
tcacggaagattgtagagagcagctgtcggtcatggagtcacagggctgccttaccaggacaccaccggcagccccacagacaacacaggtttattctctccagctctgcaggctggaag

SEQ ID NO: 982130 - DNA, 120 bp, Artificial Sequence
  ENSG00000181097_4 (sequence is synthesized)
tccgaggtagaggtgccaacagggtccgtttccggcgagcgcctcctggttcagaggcatcctcatgtcaggaggggctttggtgtcaccttttccttgtgagggcccggatcccatgac

SEQ ID NO: 982131 - DNA, 120 bp, Artificial Sequence
  ENSG00000181097_5 (sequence is synthesized)
ccctatcaccccatcgaagccaaatcacctcccagagacctcctcataccatcacgtcgggcctagggcttccacatgggaatttcagagtgaccattcagcccgtagcagaagctcctc

SEQ ID NO: 982132 - DNA, 120 bp, Artificial Sequence
  ENSG00000181097_6 (sequence is synthesized)
tgggtctgtcctggcccacagaccctgtgtaggaaaagcacttgcccctgcggggcaggccctggcagagcccggtgaggcagtgagggccctgcaggataagtggaaatctccccaggg

SEQ ID NO: 982133 - DNA, 120 bp, Artificial Sequence
  ENSG00000181097_7 (sequence is synthesized)
gggatatgggggtgcctttctcttacagagtccaggctggtaaaagcgcatgtgtgtttcgtgtctggtttgtcccctgcccagcgggcgccgttggaagggccttcaggtgcttgagca

SEQ ID NO: 982134 - DNA, 120 bp, Artificial Sequence
  ENSG00000181097_8 (sequence is synthesized)
ggatcataaggacttgggttttgagcgccctgcaggaagccactggccgcgtccagggtcacctgtgcctggtcgttagtccctcacaatgctgtcactttgtgacgctcttgtgcagga

SEQ ID NO: 982135 - DNA, 120 bp, Artificial Sequence
  ENSG00000181097_9 (sequence is synthesized)
ttaaatgtgaacagcagagacgtgggtgatgcgctgcctcgtcagatgatggtcagttgtccaagcgggctgccttgctcttggtggcctcatcatccagggctcacacactggatggtt

SEQ ID NO: 982136 - DNA, 120 bp, Artificial Sequence
  ENSG00000181097_10 (sequence is synthesized)
gggccacagtcgcggtaccccccgggctgcaggctttccaccctgcttagcagggctccagggctccgggtagagcagggggtccctcccttggcacttccccagggaggagcacgaccg

SEQ ID NO: 982137 - DNA, 120 bp, Artificial Sequence
  ENSG00000181097_11 (sequence is synthesized)
tgctcagctgcggtcaggctgctgctcttagttgtctttccttctaacactcaggcttcccttcctgcctcctgggtcgctgaagaaggtcaggtccacagaaaaggcctggggagagaa

SEQ ID NO: 982138 - DNA, 120 bp, Artificial Sequence
  ENSG00000181097_12 (sequence is synthesized)
tggtggggacacttgcctggcctttgtgttagcgctcagcacacatgtgtccagtgtaaagtccaccaagattagcagggcatggtagctgccgcctgtaatcccagcttctcaggagtc

SEQ ID NO: 982139 - DNA, 120 bp, Artificial Sequence
  ENSG00000181097_13 (sequence is synthesized)
agagagcaggtggcggatgcagctgagagctccaggaatgggagggccacgtggtagccactggcagccttgactgaaagatgaaggagtccatggtgctaggaggaggagttgcatccc

SEQ ID NO: 982140 - DNA, 120 bp, Artificial Sequence
  ENSG00000181097_14 (sequence is synthesized)
agcaggctcagctcctggagctgcctctctgcactctgaagggaggcccagtggctgcaatattcttctttgggaagtacaatgccaagtaaataaagatatttggggtcattctagtta

SEQ ID NO: 982141 - DNA, 120 bp, Artificial Sequence
  ENSG00000229175_0 (sequence is synthesized)
atgtacattatggctctctccttgcctggaactggatatgagaaatgcttgaattaagatctgtgaattatcttattttcttgctcaaaggcaaggaagactgaggaagctaagttactg

SEQ ID NO: 982142 - DNA, 120 bp, Artificial Sequence
  ENSG00000229175_1 (sequence is synthesized)
gccatatgtttaataaatataagcttaatggcagtgaatgtattaatgtcagcgaagacaagtctatgaagttaaacaggcacagagaggctaagagtcttgccaaaggccacagaggaa

SEQ ID NO: 982143 - DNA, 120 bp, Artificial Sequence
  ENSG00000229175_2 (sequence is synthesized)
ggaagagactaaatctggaacaaactttctattctccatttccagaagaaaccactaaaccatgcttcctcttgtcatggaagcttaaaatatttgatcaaactacgtttaaataagaat

SEQ ID NO: 982144 - DNA, 120 bp, Artificial Sequence
  ENSG00000229175_3 (sequence is synthesized)
gctctaaagaagtgactggaagttgtgaatgtcattgttatgaagcttcaaatttgctctcctctttaggacacagacatggcattagagaagggcagaaaactgcacttggctgtgcat

SEQ ID NO: 982145 - DNA, 120 bp, Artificial Sequence
  ENSG00000229175_4 (sequence is synthesized)
agagaacactagagacctcttgtgcaagagaggggactaggttgcgtagtgtaatgagagaagcatgggttttgagaccgctacaatgtctgtgtcttcttggccaacatttcagtaaga

SEQ ID NO: 982146 - DNA, 120 bp, Artificial Sequence
  ENSG00000229175_5 (sequence is synthesized)
gtagtaagcatatctccacaatagggttaagagaaccagtgtcttctgaaaaacacatgaaatcatcgtaaccctgctaagtctgtgctttgcaaaaattaaaactaaaactaattttca

SEQ ID NO: 982147 - DNA, 120 bp, Artificial Sequence
  ENSG00000229175_6 (sequence is synthesized)
ggatggttggcctcttggttacaagcatgtacattatggctctctccttgcctggaactggatatgagaaatgcttgaattaagatctgtgaattatcttattttcttgtcagaaggatg

SEQ ID NO: 982148 - DNA, 120 bp, Artificial Sequence
  ENSG00000229175_7 (sequence is synthesized)
cagattgcccatacttcatagcagagcaacaggagggacttagggacaaaaagaggaaaacgaaggcattacaaaacaagcatattaagtatacgattcacatcccaacagctcaaaggc

SEQ ID NO: 982149 - DNA, 120 bp, Artificial Sequence
  ENSG00000229175_8 (sequence is synthesized)
atgtacattatggctctctccttgcctggaactggatatgagaaatgcttgaattaagatctgtgaattatcttattttcttggaggcaaagctaatgaaaactcacatcatcatggtgc

SEQ ID NO: 982150 - DNA, 120 bp, Artificial Sequence
  ENSG00000229175_9 (sequence is synthesized)
acaggcagaactagcccacagaagccctgcttgttggtcaaagctggtccaagactccttttgccaagatactgctgctgctactaatcccctcctagctccttggagtacagcccagaa

SEQ ID NO: 982151 - DNA, 120 bp, Artificial Sequence
  ENSG00000229175_10 (sequence is synthesized)
aggacagaatcttacagacaaagttgaagtgagagagaaagcgaagaatgggcacataaaagggaatttgcccagatctagtcctgaaagacctacaagatcctgcatttttttcaggtt

SEQ ID NO: 982152 - DNA, 120 bp, Artificial Sequence
  ENSG00000229175_11 (sequence is synthesized)
tttcactaattttaaagactctgagaagtcttaatctagatccaggctcagtcagaaggatgcagattgcccatacttcatagcagagcaacaggagggacttagggacaaaaagctcaa

SEQ ID NO: 982153 - DNA, 120 bp, Artificial Sequence
  ENSG00000229175_12 (sequence is synthesized)
atgtacattatggctctctccttgcctggaactggatatgagaaatgcttgaattaagatctgtgaattatcttattttcttgagatcttcaacagcagaaatcaagagagagattcgtc

SEQ ID NO: 982154 - DNA, 120 bp, Artificial Sequence
  ENSG00000229177_0 (sequence is synthesized)
gtgtctgagccagtcagagccttggccttgctctgacccacagccacaatccaacatgaagatggttcaagagaccttagaccagggaagtgccttccaaagccaaatacaggagcatga

SEQ ID NO: 982155 - DNA, 120 bp, Artificial Sequence
  ENSG00000229177_1 (sequence is synthesized)
cttgtaaatccatcagaaagatatctgaagcatacctcggggtatatattaaatctaagaacctgatgtccttttactgctgcccctgaataaaaattatgcatctgtttccgcacttga

SEQ ID NO: 982156 - DNA, 120 bp, Artificial Sequence
  ENSG00000229178_0 (sequence is synthesized)
cggacggtggcgctgggtggccacggaggtcccgcgctccccgaccgagatagggcgggccctatttcggggagatgttgggcaccaacattttttaaagccccgtgggtggttctccgg

SEQ ID NO: 982157 - DNA, 120 bp, Artificial Sequence
  ENSG00000229178_1 (sequence is synthesized)
gatctcccagaccgagagggcctgaacgtccagacctcagggaatggggtcgaaggggcggcgctcgtccgcggaggtgggcgggagcggcccggggcctccggcctctagagagcggga

SEQ ID NO: 982158 - DNA, 120 bp, Artificial Sequence
  ENSG00000229178_2 (sequence is synthesized)
gtgaccctcggtttctggcctccgaggggcgggagcgatcctcagccatgtccctagtgtctggcttccggctgatttttaaatttttggtagaggcgggatcttgctctgttgcccagg

SEQ ID NO: 982159 - DNA, 120 bp, Artificial Sequence
  ENSG00000229178_3 (sequence is synthesized)
ctggtctcgaacttgtggcctcaagcgatcctacctcctcggcctccccaagtgcggagattacagacagagccactgcgcacggccgtggtcagctttgaaagctgggtagatcccttt

SEQ ID NO: 982160 - DNA, 120 bp, Artificial Sequence
  ENSG00000229178_4 (sequence is synthesized)
ggctcatacgcctttctgctagcttaccctgattctgcttctggttcagatagtattttaatatttctagtgtgtctttttctaagatatctgaaatctttttgtggaatgaagtggcat

SEQ ID NO: 982161 - DNA, 120 bp, Artificial Sequence
  ENSG00000229178_5 (sequence is synthesized)
gaaaaataaaccaataatcattaccaggtactgagcccttcaattgaggtctaaaccctccaccctctccctccgggattgccaagcctgtggtttcagttccatgctcccaggcgacac

SEQ ID NO: 982162 - DNA, 120 bp, Artificial Sequence
  ENSG00000229178_6 (sequence is synthesized)
cctctgtctctgagttgtgggagccttcctccttcagtctgcatgtactgaagccagtgtttgccgtaccagcccctcagccgcagcagcccacagtgaggtgcaggtgctcacgccatc

SEQ ID NO: 982163 - DNA, 120 bp, Artificial Sequence
  ENSG00000229178_7 (sequence is synthesized)
cagagagctcctccattcgcccctccacccgtagcccctcgaaaccactgccctgctccccgacacggtacactgtcttctccaagatgtcatgtgttggcatcctttggcctgtgccca

SEQ ID NO: 982164 - DNA, 120 bp, Artificial Sequence
  ENSG00000229178_8 (sequence is synthesized)
ccgaaactagcttccttcaacgggcatgtagcctgggagacctggggcatttgggtgcatctttccactgctggttggtgccccctgtgtggaagcatccgcgttagttcacgccttctc

SEQ ID NO: 982165 - DNA, 120 bp, Artificial Sequence
  ENSG00000229178_9 (sequence is synthesized)
ctgctcctgccgacggacattttgttttcttccagttattggcaatgaggaatgaggcctaaacacttgtgtgcaggtttgtgtgtgcacgtttaagttttcccttgggggacatttcag

SEQ ID NO: 982166 - DNA, 120 bp, Artificial Sequence
  ENSG00000229178_10 (sequence is synthesized)
cagtggggttgctggatgacatggtaaggatgtgcttaacttcgtaagaaactccaggaccactttccagcatggcgggacccctcccattcccactgcagcttatgagggtcccagttc

SEQ ID NO: 982167 - DNA, 120 bp, Artificial Sequence
  ENSG00000229178_11 (sequence is synthesized)
ctctgcatcatcactagaacctgggttggcccatgggttttgtctgtttttagccattttaatggatttgcagaggtactgctgactggcatttctccagcatctctatgatgttgagcc

SEQ ID NO: 982168 - DNA, 120 bp, Artificial Sequence
  ENSG00000229178_12 (sequence is synthesized)
tctttctcgggcaatatgccctccttataccttctttgatgaggcctccgttccaatattggccctctctttaatactggggtttttactttcttatggttaagttttgatggttcttca

SEQ ID NO: 982169 - DNA, 120 bp, Artificial Sequence
  ENSG00000229178_13 (sequence is synthesized)
tatatcctgcgtgccagtaggttgtgagacgtgtgattcacaaatgtttatttctagaccatagttcatgtttcattctctttggatttttatattgctttatagaattataattttaaa

SEQ ID NO: 982170 - DNA, 120 bp, Artificial Sequence
  ENSG00000269826_0 (sequence is synthesized)
gtgaggcctccccagccatgtggaactcaaaggcttgactgaagtcacgggtctcatcattcctttcctaagctttcttcaaacagcatggtgcgtggatgaggacacacgtgctctgta

SEQ ID NO: 982171 - DNA, 120 bp, Artificial Sequence
  ENSG00000269826_1 (sequence is synthesized)
agcatggtgcgtggatgaggacacacgtgctctgtagaaggtggggccacaaagccctgccgaccgacctttcctgccttctgcctctaaggtgcaaccccgaaagcacctgctggaacc

SEQ ID NO: 982172 - DNA, 120 bp, Artificial Sequence
  ENSG00000269826_2 (sequence is synthesized)
tttggggctcagggagcacagcctggaagcagggggatactccccagggctgcagtccacctcggaagctgctcaccacaggtgtctgcttacacttcaattcagatcacataagataca

SEQ ID NO: 982173 - DNA, 120 bp, Artificial Sequence
  ENSG00000269826_3 (sequence is synthesized)
gctgactggaaccctggatggcccaatctggaacttttcatcaccccagagcatcctgtgcagtgcttctcccggggagccctgcaggcagtgacctccagctccgagcctgatcccaca

SEQ ID NO: 982174 - DNA, 120 bp, Artificial Sequence
  ENSG00000269826_4 (sequence is synthesized)
tgagcaggaagaagacagcccagggaggctgcccacagccacaagctcatttctcatggcaaaccacaaatgggagatgctaagaaattagaatagaggatgctccagagcagacgctcc

SEQ ID NO: 982175 - DNA, 120 bp, Artificial Sequence
  ENSG00000269826_5 (sequence is synthesized)
tgtttacagagctgaaactcagtactcattaaacaactccctcctgcagccacgctgggagctgacactctccacacatgcttcatgcacccaggcgctcatccagggatcatcctgtac

SEQ ID NO: 982176 - DNA, 120 bp, Artificial Sequence
  ENSG00000269826_6 (sequence is synthesized)
ctcaaatacccccaagaactgtcctgccccaggacctttgcacatgctggacccactacctgtgatgccctcttctggctcaccacgtggctggctccatctcattcattggtctcagcc

SEQ ID NO: 982177 - DNA, 71 bp, Artificial Sequence
  ENSG00000269825_0 (sequence is synthesized)
aagtcatcccttgtgggccatcgtagacttcataccggagaaaaaccttacaactgtcatgagtgtggcaa

SEQ ID NO: 982178 - DNA, 120 bp, Artificial Sequence
  ENSG00000269825_1 (sequence is synthesized)
tgtgggccatcgtagacttcataccggagaaaaaccttacaactgtcatgagtgtggcaagacctttgctcgaaattcatcccttctaattcataaggcaattcatactggagagaaacc

SEQ ID NO: 982179 - DNA, 90 bp, Artificial Sequence
  ENSG00000269825_2 (sequence is synthesized)
gagagttcatactggagagaaaccttacagtatgtcatcctttgtataccattatagacttcatagtggagagaaaccttacaagtgcaa

SEQ ID NO: 982180 - DNA, 120 bp, Artificial Sequence
  ENSG00000269825_3 (sequence is synthesized)
aagtgcaatgagtgtggcaagaccttcagtcatatgtcatcctttgtatgccatcatagacttcatactggagaaaatccttataagtgcaatgagtgtggcaaagcctttagtgggcag

SEQ ID NO: 982181 - DNA, 120 bp, Artificial Sequence
  ENSG00000269825_4 (sequence is synthesized)
gcaatgagtgtggcaaagcctttagtgggcagtcatcacttattcatcatcaagcaatccatggtatagggaaactttacaaatgtaatgattctcacaaagtcctcagtaatgctacaa

SEQ ID NO: 982182 - DNA, 120 bp, Artificial Sequence
  ENSG00000269825_5 (sequence is synthesized)
gcattgcaaatcattagagaatccataatgaagagagatcttacaagtgtagtaaatgtggcagatatttcagacattgttcatagcttgcagttcatcagtgaactcatactggaaaga

SEQ ID NO: 982183 - DNA, 120 bp, Artificial Sequence
  ENSG00000269825_6 (sequence is synthesized)
aacgttacaaatgtcatgattgcagcaaggtcttcagtcaagcttcatcttatgcaaaacacaggagaattcatatgggagagaacctcacaactgtgataattgtggcagtcatttttt

SEQ ID NO: 982184 - DNA, 85 bp, Artificial Sequence
  ENSG00000269825_7 (sequence is synthesized)
gagaacctcacaactgtgataattgtggcagtcatttttttttcttttttcagatgaagtcttactcttttgtggcaacctccac

SEQ ID NO: 982185 - DNA, 65 bp, Artificial Sequence
  ENSG00000269825_8 (sequence is synthesized)
agctgggactacaagcatgctccaccaattgctctcaactcttgatcttgtgatccgcctgcctc

SEQ ID NO: 982186 - DNA, 120 bp, Artificial Sequence
  ENSG00000269825_9 (sequence is synthesized)
ggtattacaggcatgagccaccacgcccagtgtggcaatgtctttactttacattcacaccgcattagacatcagggaatctatactggacagaaatcttacaaatggaataggtgtggc

SEQ ID NO: 982187 - DNA, 120 bp, Artificial Sequence
  ENSG00000269825_10 (sequence is synthesized)
atggaataggtgtggcaatgtctttagtctgaggtcactccttgcagaacagtagaaaattcatttttgagataattgtcccaaatacaatgactatagaaaatgacaaactttaattga

SEQ ID NO: 982188 - DNA, 63 bp, Artificial Sequence
  ENSG00000269825_11 (sequence is synthesized)
tgggccaacagacctgaaccagtttgcccagcctgttttttctttccttctttctttcttttc

SEQ ID NO: 982189 - DNA, 65 bp, Artificial Sequence
  ENSG00000269825_12 (sequence is synthesized)
agcagtttgagaccagctgggccaacagacctgaaccagtttgcccagcctgttttttctttcct

SEQ ID NO: 982190 - DNA, 120 bp, Artificial Sequence
  ENSG00000269825_13 (sequence is synthesized)
tggttcactgcaacctccacctcctgcattcaagcaattctcttttctaagcctcccaagtagctgggatttcagatgtgtgccaccacaccacatagtccctctccacagagatggttg

SEQ ID NO: 982191 - DNA, 120 bp, Artificial Sequence
  ENSG00000269825_14 (sequence is synthesized)
gttgagaaggctgatggaaaagccagatacttgttctacagctttccctgacactagtatatcatccacatactggagcatagatatacactttgggatgctcatcttttctaacacctc

SEQ ID NO: 982192 - DNA, 120 bp, Artificial Sequence
  ENSG00000269825_15 (sequence is synthesized)
ctcaagaatttggccaaacaagttaggagaatctgtaaatccttggggtaagactgtccagcagtattgttgttttcacccagagtgagaatcttcccattcaaaagtgaatatatcctg

SEQ ID NO: 982193 - DNA, 120 bp, Artificial Sequence
  ENSG00000269825_16 (sequence is synthesized)
actatcttcagctaaaggacatgcccagaaggcatctttcaggtctatttctgtaaaccactgatggtcatatggaattttgctgagaatagtatatggattgggaacaacaggatgagt

SEQ ID NO: 982194 - DNA, 120 bp, Artificial Sequence
  ENSG00000269825_17 (sequence is synthesized)
ggtttgaacagtttgattaatggcttgaagatcttctacaagtcagtatcaccaatctgactactttacaagtaatattggagtagtatagggagacatgcacagttcaagtagcccatc

SEQ ID NO: 982195 - DNA, 120 bp, Artificial Sequence
  ENSG00000269825_18 (sequence is synthesized)
tcagataaggctctcaattagaggttttaaacctaatctaccttctaagggaattggatattggtttcttttcactgtttccctgggagtttttaactttatgtgaattggaggaacttg

SEQ ID NO: 982196 - DNA, 120 bp, Artificial Sequence
  ENSG00000269825_19 (sequence is synthesized)
tagcttccttcaatttccctcccttgaccactcattagcattgatgtagctttcttctgctgtagtaaacaggtttaatgaagtgaagaatccttctgggcttacacgcaagcctatacc

SEQ ID NO: 982197 - DNA, 120 bp, Artificial Sequence
  ENSG00000269825_20 (sequence is synthesized)
taactttgccattaggccacttcctaacaagtttgtcccagccttaggaagtagcaaaaatttaacattggttgatcgggtttcaaatctgacttctgttttttctgagactttggcttt

SEQ ID NO: 982198 - DNA, 120 bp, Artificial Sequence
  ENSG00000269825_21 (sequence is synthesized)
aaatccttcccctttgactcctaaaacttgaagttcttctaataaacaatttatattagagggcacaaaacaaacagaggagtgggaagctcctgagtctattagaaaagtaataagttc

SEQ ID NO: 982199 - DNA, 120 bp, Artificial Sequence
  ENSG00000269821_0 (sequence is synthesized)
agaacggtcgccgcgtcgcctcagcacggacctccagggagctcctcagcaagatcctgccagggcgcccctcagcgcgattctgccggggtgcctctcagcgtggtcctccccggggct

SEQ ID NO: 982200 - DNA, 120 bp, Artificial Sequence
  ENSG00000269821_1 (sequence is synthesized)
cctcagcacgattctcccggtgcgcccctcagcgcggtcctcctcggtgcgtcagtcatcgtggttctccccggcgcgcccctcggcgcggttctcctcggggctcctcagcgcggcgct

SEQ ID NO: 982201 - DNA, 120 bp, Artificial Sequence
  ENSG00000269821_2 (sequence is synthesized)
cttctgggggctcctcggcgcagttctccccggggactcctcggcgccgttctcctcggggcacccggggcttttcggcgcggttctccccgggggttcttcggcgcggttgtccccggg

SEQ ID NO: 982202 - DNA, 120 bp, Artificial Sequence
  ENSG00000269821_3 (sequence is synthesized)
ggttcttcggcgcggttctctccgggggcctctcgccgcggttctgttctccccgggggctcctcagcatggttctcctccgcgcggtcctccctgggcctcctcagcgcggcactctcc

SEQ ID NO: 982203 - DNA, 120 bp, Artificial Sequence
  ENSG00000269821_4 (sequence is synthesized)
tgggggctcctcagcgcggcactctccccgggggctcctcagcgcggcactctcccggcggctcctcagtgcggttctcccagactctcctcagcgcggccctccccatctctctgggag

SEQ ID NO: 982204 - DNA, 120 bp, Artificial Sequence
  ENSG00000269821_5 (sequence is synthesized)
ggtttgaacacggtcagcacggacctgggcggacggcgcgggacgggtgatcactggcgttgctgaggtgagctgtgtgccccgcggccgtcccagatcacaggcgtcagcagtgcagcc

SEQ ID NO: 982205 - DNA, 120 bp, Artificial Sequence
  ENSG00000269821_6 (sequence is synthesized)
tggcctgggcagtgcgctcccatctgcaccttatggacagcgtggccagggtcgaggtccgagttcctggccgcgtcccaaggatcggattccgggtctatagttctcatggtggttcag

SEQ ID NO: 982206 - DNA, 120 bp, Artificial Sequence
  ENSG00000269821_7 (sequence is synthesized)
agtgggctgaattgggattggagtctggaatccgcatcgtggttctgagtccgcgctattgggatggaagttgggaatccatgttgtggttttgagtcaaagcccgaattgggaccggag

SEQ ID NO: 982207 - DNA, 120 bp, Artificial Sequence
  ENSG00000269821_8 (sequence is synthesized)
tcggaaatccacttagtggttctgagtcagggcccgaattaggatcggaggtgggaatccccgttgtggttctgagttaggtatcctagttgggatcagaattcgggtctagggtccaca

SEQ ID NO: 982208 - DNA, 120 bp, Artificial Sequence
  ENSG00000269821_9 (sequence is synthesized)
tcctggctgggagtttgcctgagttgggatctgagtagttggggtcccagtcagtccgggtctggagtccgcatggtggttttaggtagggcctcattagggacagaggatcgggagtct

SEQ ID NO: 982209 - DNA, 120 bp, Artificial Sequence
  ENSG00000269821_10 (sequence is synthesized)
gagttggggacctgaatcccggtctggagtctgcatcatggctctgagttgagatccaagggaggtccgagttggcgactggagtcagggtctggagtctgtctttgggtagaggttctg

SEQ ID NO: 982210 - DNA, 120 bp, Artificial Sequence
  ENSG00000269821_11 (sequence is synthesized)
aatggggggctctgagttaagagattgggattggggttagaggtctcagtggggtatgggagtcaggaattgaagtcgaagttctgcctctaggtggggattctgagtcaggaattaggg

SEQ ID NO: 982211 - DNA, 120 bp, Artificial Sequence
  ENSG00000269821_12 (sequence is synthesized)
ggcgaagtaaaggttgcagtctgagttgggggtggtgatcacctgccaggtgagaggtagtggtagaagtctcttggtcatattggagatgagagttgatcagatgcaggtctcagtctg

SEQ ID NO: 982212 - DNA, 120 bp, Artificial Sequence
  ENSG00000269821_13 (sequence is synthesized)
ggtagtaggcttgaagggccaccactatgttcagatcccagtaccccactgtggtccctgagcaggtcaaatagccttttatataaaattgagagtaagagtgccttcccacagcactgt

SEQ ID NO: 982213 - DNA, 120 bp, Artificial Sequence
  ENSG00000269821_14 (sequence is synthesized)
tctggttatgaaagagaataattcatccaggtagaatagttctgtcttagattatcacaaagtataaaaactttcctgataatatccacatttgatgtgcatttaccagttctttcttta

SEQ ID NO: 982214 - DNA, 120 bp, Artificial Sequence
  ENSG00000269821_15 (sequence is synthesized)
ctgtggtgccccttttgctagaccaaaagctcccaacgaggaactctgttttgttttctgctgcctgctctgtacccagccaagagcctgatacacagccttactcagtcagtacttgaa

SEQ ID NO: 982215 - DNA, 120 bp, Artificial Sequence
  ENSG00000269821_16 (sequence is synthesized)
ggaaagcaggcaggcaggattaaccagatttctatggtgtctcaaatgatccatttctgcacctgttttccagatactcagtaggagaaaaatttaaggattgagttgcttgattatggg

SEQ ID NO: 982216 - DNA, 120 bp, Artificial Sequence
  ENSG00000269821_17 (sequence is synthesized)
tgtattttaatgtgtttcctaacatgctgaggagaaaagtgggtctgtttcaggatttatgctccagctagagggattttttaaaattgcgaatcagagcatgtccaaattcagatagaa

SEQ ID NO: 982217 - DNA, 120 bp, Artificial Sequence
  ENSG00000269821_18 (sequence is synthesized)
agcacaagaaaactataaagaatttcccttatgaatgtagatgcagaagttccttgtacaatgctagctaactgaatccaataatatgtattaaacaacaattcttaaacaagtgggatt

SEQ ID NO: 982218 - DNA, 120 bp, Artificial Sequence
  ENSG00000269821_19 (sequence is synthesized)
gctcttaggaatgcaaagatgatccaatatcagaaactttatccatgtaattcacattaagaggctacaggagaaaaaccatatggttccctcaatagaggcagaaaaaaatgatgtgat

SEQ ID NO: 982219 - DNA, 120 bp, Artificial Sequence
  ENSG00000269821_20 (sequence is synthesized)
aaagtttaacgcctatgtgtgattttggggtagtggagtacaccacttagcaagccaggactagagaggaacttcttcaacttgatacaagttataaaccaaaacttaacttttcagtaa

SEQ ID NO: 982220 - DNA, 120 bp, Artificial Sequence
  ENSG00000269821_21 (sequence is synthesized)
acttgatagagaaattaaaagtgtatcattctctttaagataaggagtaggccaaggatgtcatcctggccataccctaatacaagaaaaagaaatggggatgtgaggatcaggtaggaa

SEQ ID NO: 982221 - DNA, 120 bp, Artificial Sequence
  ENSG00000269821_22 (sequence is synthesized)
gtgataaaacttagtgtagctcatagggttgatggtctccataaagattctcaaacattttggtgttacgacttgttgtattcttaaaagttattgaaacccccaaagggcttttcttga

SEQ ID NO: 982222 - DNA, 120 bp, Artificial Sequence
  ENSG00000269821_23 (sequence is synthesized)
tagagattctatctgttgatagttaccatcttagaagttaaaactaagaaatgtttaaagcagaactatacaagcacatattccactggggtcatggtgtgctgcctctggaaaactctt

SEQ ID NO: 982223 - DNA, 120 bp, Artificial Sequence
  ENSG00000269821_24 (sequence is synthesized)
tatctttgtgagaatgaaagaaaaggcaaataatgtcgagtattattatgaaaatgtttttgacctttcctgaaagggtctggggggctctctggaatccccagactacactttgaaaat

SEQ ID NO: 982224 - DNA, 120 bp, Artificial Sequence
  ENSG00000269821_25 (sequence is synthesized)
tactgggctacatggaaaaaaaaaattaaggaacttaacaactaaagagagatttcagatttcagagaggttttggatataagatcagtgtactcaaaacaaaaaacaaaaacaaaccac

SEQ ID NO: 982225 - DNA, 120 bp, Artificial Sequence
  ENSG00000269821_26 (sequence is synthesized)
atttctttatgccaatagcaactgactaaaaaaaagcataatagagattaggacagcaatcagaatagcagcaaaatttataccagtctaggaattaacaaagacgacgacttttatgga

SEQ ID NO: 982226 - DNA, 120 bp, Artificial Sequence
  ENSG00000269821_27 (sequence is synthesized)
aaaaattttaaaactctattggaggatatagagggagatctttccatatgcagagacattttattttcttgaacagggcaacttggcattagaatgacgtcaggattttccaaatctgtt

SEQ ID NO: 982227 - DNA, 120 bp, Artificial Sequence
  ENSG00000269821_28 (sequence is synthesized)
aagttcaacaggactccactcaaacttccagttggagggcttgagtaatttaacaaacatattctaaaatgtatgtggaagaaaaatatttgtaaatgccaactgaacttttgaaaagga

SEQ ID NO: 982228 - DNA, 120 bp, Artificial Sequence
  ENSG00000269821_29 (sequence is synthesized)
gagcagaggacttctgctggcagataccagggcacacgccaacttcagcaatcagagcggtgtggtgacagaggcccagaagagagctcagaggtaactccaagtctagaggaaggggac

SEQ ID NO: 982229 - DNA, 120 bp, Artificial Sequence
  ENSG00000269821_30 (sequence is synthesized)
atgtgataaaggtggcaccacatatcagtggggactgttcagaagatgatgttggaaagccagccctaaaatggaggaataggaatatggattcctaactgagcccctaggaaaagtaga

SEQ ID NO: 982230 - DNA, 120 bp, Artificial Sequence
  ENSG00000269821_31 (sequence is synthesized)
ctccaaatggactaaatatttgaaagcaaaaggtagttgccatttgtttaataggagaaaaaatgaataatctccagggccagggtggccgtggggttcttaaacaggatccagaaagca

SEQ ID NO: 982231 - DNA, 120 bp, Artificial Sequence
  ENSG00000269821_32 (sequence is synthesized)
caaacctcaagactaaaatgtatgaacttgaatgcattaatgattatggattaaggatttctgttaaataaatccatcatggcaagggtcaagactgttttcataataatactaaggaaa

SEQ ID NO: 982232 - DNA, 120 bp, Artificial Sequence
  ENSG00000269821_33 (sequence is synthesized)
caatttgcgtttttcacttttacactcatgaatgtaactttgccatgactcattacaagatatttgaaacaattaaagctgaggagggaacaacagctaaaatataccagaaagcaccac

SEQ ID NO: 982233 - DNA, 120 bp, Artificial Sequence
  ENSG00000269821_34 (sequence is synthesized)
aaatcattaagaaaaaggtaggaagattgccagtttgcaggagggttaacaaacagatgaaaatttgcccaagctaatcagttatcagagaaatgtaaatgaaagcaacagctattcttc

SEQ ID NO: 982234 - DNA, 120 bp, Artificial Sequence
  ENSG00000269821_35 (sequence is synthesized)
ataggagaagcattagaaagtaggataaggccaagtgttggcagaaggcaaggaacaagcctccctgtgtgctgcaggtggggacggagacaggcacagacgttctgaagagctggccaa

SEQ ID NO: 982235 - DNA, 120 bp, Artificial Sequence
  ENSG00000269821_36 (sequence is synthesized)
cacttcttcctcaaataaaatattttatacctgtggcccagcagtttccctcctaagtaaacatgctggagcagttctcacccagaacaacgagaggctgtgtgtgtgcatgctcagggc

SEQ ID NO: 982236 - DNA, 120 bp, Artificial Sequence
  ENSG00000269821_37 (sequence is synthesized)
agcatggcccataggggtgggcagttggagctggtcactgtggttaggagcaggggactagatgtacacttcacaagatagagacgcgtggaaacacagtgctgagtgacacaaatgcca

SEQ ID NO: 982237 - DNA, 120 bp, Artificial Sequence
  ENSG00000269821_38 (sequence is synthesized)
aacagaaagagggcctcagtacatgactgtgtatttaaattaaaattacacaccacccagacacgcagtactagggagtgctcgtgagtgcacacacacacacacaatgatataaataaa

SEQ ID NO: 982238 - DNA, 120 bp, Artificial Sequence
  ENSG00000269821_39 (sequence is synthesized)
ttaccctggagaagctgtttgtgtagggaggagagcaaggatagaggctagagatgaagtggaaaagcatggagaggaagagagcggtgactttatgcagacccttacagggtgacagtg

SEQ ID NO: 982239 - DNA, 120 bp, Artificial Sequence
  ENSG00000269821_40 (sequence is synthesized)
tttcataggctgagggctgtgatcaactctgtgcagagtcccaaaagccaagaaccaacgaatgaatgtgcctccatgactctcctgccagataccctctagtggcttctatttctagga

SEQ ID NO: 982240 - DNA, 120 bp, Artificial Sequence
  ENSG00000269821_41 (sequence is synthesized)
aataaaattcaaattccatcaggtttttacaagatctgccctgcttacctctctgaccactgtcctccctcactgagctttggctctgccagccttcttcttctttgttaaatctgccaa

SEQ ID NO: 982241 - DNA, 120 bp, Artificial Sequence
  ENSG00000269821_42 (sequence is synthesized)
gtatccctcctgccccaaggccttcaccacctctgcctggcttgtcttttctggtgatcttcccttgacaattccttcttcttatttaaatctcacaggaaattttgctctgacctgcca

SEQ ID NO: 982242 - DNA, 120 bp, Artificial Sequence
  ENSG00000269821_43 (sequence is synthesized)
tatctgtcatccccttcagtcactcactagctgacgactacctttcgagtctctgcaaagcacaggctacgcttttctagttccttagacatctacttatttgttggctgcctatctctt

SEQ ID NO: 982243 - DNA, 120 bp, Artificial Sequence
  ENSG00000269821_44 (sequence is synthesized)
ccaccggaagagaggccccaagagagcatatctgtcttccgtatagggtccgcacatggtgggtgtgtcacagatttctgttgaatggtttcattcatttattgaacgaaggaagaggcc

SEQ ID NO: 982244 - DNA, 120 bp, Artificial Sequence
  ENSG00000269821_45 (sequence is synthesized)
aggccaggaaagtgtgcctccattttcacaactcagtgagaaagcaaatagcatgtcaaaatctgaccccttgcaaccagggtttcttagccagccacactggtaatgcttgggacagga

SEQ ID NO: 982245 - DNA, 120 bp, Artificial Sequence
  ENSG00000269821_46 (sequence is synthesized)
tgtatctttgttgtgaggggctgtcatttatattgtaagatgtttagcaccctgcctggtctctacctagttgatattagtaattctcccatagtcatgatagccaaaaatatctccaga

SEQ ID NO: 982246 - DNA, 120 bp, Artificial Sequence
  ENSG00000269821_47 (sequence is synthesized)
cattgccatatgtcccctggggggcaccgcagatgacaaccacttccttagaacagctcttgggactgggatggtgtctctgctgtggctctttaaaggcagcaggccctggcttgcatc

SEQ ID NO: 982247 - DNA, 120 bp, Artificial Sequence
  ENSG00000269821_48 (sequence is synthesized)
ctgccacatctaacacctatagcctcaccacctcggtgagaaagaccctggcccaggcctggccaatcagagtaccctcttccctggtcagcagtataatttgtttggcaagcacttcca

SEQ ID NO: 982248 - DNA, 120 bp, Artificial Sequence
  ENSG00000269821_49 (sequence is synthesized)
gtcccacaacctatgggctgccacccagaggtttagttggaactacgtgtcagctgccgtccctcagccatctatggcatgggcacctgtggcttgaccaagttggaggtggcctagaga

SEQ ID NO: 982249 - DNA, 120 bp, Artificial Sequence
  ENSG00000269821_50 (sequence is synthesized)
ggccgggctgggcctgctcaccttctccagttagtgcagactgatgaatgagtggttctcagcggataccggatccaggtttgcagtacactccaggaggaggacgagtagggtttccct

SEQ ID NO: 982250 - DNA, 120 bp, Artificial Sequence
  ENSG00000269821_51 (sequence is synthesized)
cagagcaggcctggatgggagggcaaggggtggcctctaatactgcctttccttccggtgcctttatcagcctgtgccatgctcctctgaactggccggccccagcatgtccaggttact

SEQ ID NO: 982251 - DNA, 120 bp, Artificial Sequence
  ENSG00000269821_52 (sequence is synthesized)
ggcaggagcctgtataacccagggttccagtcacaccagccaggaaggcccatgaggctggagcgcacccagtctctggctgctctgtctgcggaactaaaagcctttctcccagagcct

SEQ ID NO: 982252 - DNA, 120 bp, Artificial Sequence
  ENSG00000269821_53 (sequence is synthesized)
ttcctacggctgggcgaagctcttgtttgcaatttaaatgtggcctcatttatggaagaatccctgctcctccgaaaagccttgggctcaacctccctagcagcccgggcctcagccagg

SEQ ID NO: 982253 - DNA, 120 bp, Artificial Sequence
  ENSG00000269821_54 (sequence is synthesized)
agaagaaatggatctaaaaggcctttctcctgctaattgtagcaattagcattagagaatggggactcgatggggggccagcgcctggcaaaacaagcttattcccagcttaggcccagg

SEQ ID NO: 982254 - DNA, 120 bp, Artificial Sequence
  ENSG00000269821_55 (sequence is synthesized)
cccagctccacacactgctgcttggccagactcggcccccacccagggtctggttggcttcagggcagggagagagggcccaggcctgtgggtgctaagagcagttgtggagggtgtgca

SEQ ID NO: 982255 - DNA, 120 bp, Artificial Sequence
  ENSG00000269821_56 (sequence is synthesized)
tctgagttgttaagcctggtagctgtacaggtagccctgggctatgacttgtggtcctctcagaaaagggtctgactggaacgcagagccagaccagatattcatgagtggatcacagag

SEQ ID NO: 982256 - DNA, 120 bp, Artificial Sequence
  ENSG00000269821_57 (sequence is synthesized)
tgtagactgagggctatctggtgattgacagaaagtagtcttggggcaaatgactcttaaagagtaaggagccattcccctctatggctaactggatgcctttctctccccctgctccag

SEQ ID NO: 982257 - DNA, 120 bp, Artificial Sequence
  ENSG00000269821_58 (sequence is synthesized)
aaaggacttcctgttccttcactgagcgtgcttgcttatgaggcttctggaaaccaggagagttcagtgggcctcattattgagcgtatgggcaggacaacctgcttgggacataggcca

SEQ ID NO: 982258 - DNA, 120 bp, Artificial Sequence
  ENSG00000269821_59 (sequence is synthesized)
tgctacagttgattttagccagcttgctgcatctacacagcacagtgccttcccaggcagtgaattatgtctaacaggcaggggaatgatcattgcctcatgttagggatgcagtcattc

SEQ ID NO: 982259 - DNA, 120 bp, Artificial Sequence
  ENSG00000269821_60 (sequence is synthesized)
aagaaatatttgtcaaacactcagcaggtactagaccctggcccagagggagggatttgataggagcagggacctgcctaccctcccagggttagtggacaaaggggagaaagactaact

SEQ ID NO: 982260 - DNA, 120 bp, Artificial Sequence
  ENSG00000269821_61 (sequence is synthesized)
aatgttgaaggaccgtttgcaccctgaggggagtgctgaggcctgggagcacagcaggtgtatagcaggaacccactggaactagcctggggtctgaaaaactcccttggggaaagtggc

SEQ ID NO: 982261 - DNA, 120 bp, Artificial Sequence
  ENSG00000269821_62 (sequence is synthesized)
aggggcaggccaagggccctctggtggtagggagcctgtgagcacctgggatggaaagaagccaagcatctgaactaccagaaaggcagctgcaggattaagcaagacccacaggtctct

SEQ ID NO: 982262 - DNA, 120 bp, Artificial Sequence
  ENSG00000269821_63 (sequence is synthesized)
aaactttgaaaggatgtctgtccactgagtagataattgattggaatggggcaggggatgtgagaatgccagttaggagatgcctgcagtacagagaaatggtggcctatcaggacagtg

SEQ ID NO: 982263 - DNA, 120 bp, Artificial Sequence
  ENSG00000269821_64 (sequence is synthesized)
gcaatagggatggagggaagcagggaacctctagaactatggatgggtgaagtaagcctggcttggtgatgggcttgaggtgatgggcaggtggtgaggaagcgggtgtatcggaaatga

SEQ ID NO: 982264 - DNA, 120 bp, Artificial Sequence
  ENSG00000269821_65 (sequence is synthesized)
ccccagaacttctgacttgtgccactgaaaggatgggtgacactgaaaggacaggggccttcagtagagtgggctataaaatgatggaggctgtggagaggaggtgggggcaggtgactg

SEQ ID NO: 982265 - DNA, 120 bp, Artificial Sequence
  ENSG00000269821_66 (sequence is synthesized)
gaatgtgggtctggctgggttggagagacatttggggggtcagggcctcacaggtggtctggaagcccttggtgctgagggaacagcttagggaaatggtttgcatagagaaaggcactg

SEQ ID NO: 982266 - DNA, 120 bp, Artificial Sequence
  ENSG00000269821_67 (sequence is synthesized)
gcatttagtggccatgccagaagggaaaacctgccaaggagactgaggatagagccagaaagatggcaagaaagccaggagaactggagggatggaaaagaggacctaggggtcatggtc

SEQ ID NO: 982267 - DNA, 120 bp, Artificial Sequence
  ENSG00000269821_68 (sequence is synthesized)
ctggcagaggtcacattggatccagtgcttgtgattctctgattgctggcagtggatggccactggcctgcaaatggccctagtggaatgtcccctgcctgtgtggctccctgtgggctg

SEQ ID NO: 982268 - DNA, 120 bp, Artificial Sequence
  ENSG00000269821_69 (sequence is synthesized)
cctctcccctggacagatggggagagaccccttccccacctggttctctgtttcacccttggaactgtggcggtaaagaggacctccccacagtacgtgcagggaacaagctaggttgac

SEQ ID NO: 982269 - DNA, 120 bp, Artificial Sequence
  ENSG00000269821_70 (sequence is synthesized)
tccctcagggaggcctcgtccttgctgaggtatttcataacctcaggatagagaaatccccccaactttaatgcaaagccaagcaagctgaaaaatggccttgaataggctgagatgaaa

SEQ ID NO: 982270 - DNA, 120 bp, Artificial Sequence
  ENSG00000269821_71 (sequence is synthesized)
aaacaaagaggctgtcaacatcagagactcagtgggggcagggagcttcagtggactccccacagacagcagttcctgggcttctatgcccagacccagaggcctgagcccaagatgtca

SEQ ID NO: 982271 - DNA, 120 bp, Artificial Sequence
  ENSG00000269821_72 (sequence is synthesized)
ggatgggtggtcactgtaagtgcagtggattgtagctcaggggtgagacatcgcctttttcttgtcagctctccttcctgattagtggctcaaacagccttccgagactcaaggggttaa

SEQ ID NO: 982272 - DNA, 120 bp, Artificial Sequence
  ENSG00000269821_73 (sequence is synthesized)
ctgcagatcctctaactcctccacttgctaatttttaaacacagctgagctctgagcacccctcccaaggctgtgagaggccagaggccagcacagactctgcaccaggtctgcacagcc

SEQ ID NO: 982273 - DNA, 120 bp, Artificial Sequence
  ENSG00000269821_74 (sequence is synthesized)
tccacccctactgttgtcaggaatctgcaggcatctagaacaaaggtgcctccattatttccctcacccagcatatcctgatacctgagccaagagttcacccagagcttttgcccactt

SEQ ID NO: 982274 - DNA, 120 bp, Artificial Sequence
  ENSG00000269821_75 (sequence is synthesized)
cattgatggtctggtgggcttttgttgacacatacccgtgactcccaaatgaacctttcaggttggcttaaagccgctgggacctacacatgacaaaacccagacggaaacagtggctta

SEQ ID NO: 982275 - DNA, 120 bp, Artificial Sequence
  ENSG00000269821_76 (sequence is synthesized)
cactcctgtgtccctaaaggtacctgttcctaacagtgggagtgccagagcctggaagctggaagccaaggagacagggacctccctcctgctgaccccctgccaggccacatccaccta

SEQ ID NO: 982276 - DNA, 120 bp, Artificial Sequence
  ENSG00000269821_77 (sequence is synthesized)
agggatttgggatcatactccatcttcaaccactgggatcaaatggaaagccctcaggaattctgagagacagcccctatacctatgtgcactgacacacatacactgacaaatacgcat

SEQ ID NO: 982277 - DNA, 120 bp, Artificial Sequence
  ENSG00000269821_78 (sequence is synthesized)
tctgacacatatatgaacatgcacatatgtgtgccccactccctgccaggaggtgggttctgtcccatctttgacatgttacttcttgtccttccctaggcccagtggcactttctttgt

SEQ ID NO: 982278 - DNA, 120 bp, Artificial Sequence
  ENSG00000269821_79 (sequence is synthesized)
gataggtgctgagacccccccgactgggcccagtggctgttcccaggacccagtctctgctcttatcttaacccagctctagctcccaggaccccagcctttcgcagggagagagatagc

SEQ ID NO: 982279 - DNA, 120 bp, Artificial Sequence
  ENSG00000269821_80 (sequence is synthesized)
tcttttggtctggcacatgttccatgccaagtagtggaaacagcagctgcagggcagcctcagacttgacatcatttaatccttgtgacaatcctacagggaggaagacactacacatat

SEQ ID NO: 982280 - DNA, 120 bp, Artificial Sequence
  ENSG00000269821_81 (sequence is synthesized)
gtgcagatgcagcaaggagcagctcagccacatggaatgacttgcttgaggtcaccaggcacttgacacagcagagtttagcccagtctctggagagaccagccttccacatcctgtcat

SEQ ID NO: 982281 - DNA, 120 bp, Artificial Sequence
  ENSG00000269821_82 (sequence is synthesized)
gctggggagggctgcccgctttttgtccctgctcccccagttctaaccccggaagagcgattgtccctgctgtgccttcagcccagacagaagcaggctaggagaggggaggagaggcag

SEQ ID NO: 982282 - DNA, 120 bp, Artificial Sequence
  ENSG00000269821_83 (sequence is synthesized)
ggctggccctcggaaggctcaccttcctcaacagttctctgcttgggcaaaggtcttccaagcagccaggctctgaggctagtcactgtcatcgttgggtgaggcagcctgggagtacca

SEQ ID NO: 982283 - DNA, 120 bp, Artificial Sequence
  ENSG00000269821_84 (sequence is synthesized)
gaagttggagcaggtgggaaccttccccagggatggggctggataggcaggggtgggtgctaagtggcaggccacaaccaggcacctgggagggccaagcaccacactgagaacgcagtg

SEQ ID NO: 982284 - DNA, 120 bp, Artificial Sequence
  ENSG00000269821_85 (sequence is synthesized)
cttcccctcccctcctaggctgctcaggaacccatcagtctcctgtaaacaaatgagactaagtctctggcactctaggcccaggtgcaaaggacagctgcccctgcagctactcactct

SEQ ID NO: 982285 - DNA, 120 bp, Artificial Sequence
  ENSG00000269821_86 (sequence is synthesized)
gccctggccctctcaggaggcttgtgacctctgcacctgctggcttgttttgttcctaaaatacccggatccttgagaatctagaagacaccactgctaacagatttccacatcattcat

SEQ ID NO: 982286 - DNA, 120 bp, Artificial Sequence
  ENSG00000269821_87 (sequence is synthesized)
tctgttcttcctgtgcaagcttcatgctgggacagggaccataaaacaaggtgacccaaaaccttcagcagaatgcaggtaggcagagcagaggtctctgggagtgtcattccaaggcag

SEQ ID NO: 982287 - DNA, 120 bp, Artificial Sequence
  ENSG00000269821_88 (sequence is synthesized)
tgtcttcctcctcccctatgctccccatttcccaagagtgggcttcttccaccccactcaagcacctcttcccaaggctgacctaaaggcctcaagctctgcggataggggcagtcctga

SEQ ID NO: 982288 - DNA, 120 bp, Artificial Sequence
  ENSG00000269821_89 (sequence is synthesized)
ggtggcattgagtcttagggttggagtgggagatatctgtgcaaaggctgataggaacgtcctccaagggctgacttcaaagcttggcctaaaccactgcatcaaagtcagcaagctgag

SEQ ID NO: 982289 - DNA, 120 bp, Artificial Sequence
  ENSG00000269821_90 (sequence is synthesized)
ctgtttgcacagaaaaggaggaggagcaggcccttgagccacctgtagctctccttagggtctcaggctttcacaccagggcaggccttgggccagactacccaacttccaggccggatg

SEQ ID NO: 982290 - DNA, 120 bp, Artificial Sequence
  ENSG00000269821_91 (sequence is synthesized)
tgccaccggggaggaggaggtaactgcccctcaaaaccctgcagcccagggctccaggattccaacccagggacctgcaggctcccctgctctccagatcagacccctactctcagagcc

SEQ ID NO: 982291 - DNA, 120 bp, Artificial Sequence
  ENSG00000269821_92 (sequence is synthesized)
ctaggcccagtgggtgacagcctgtgagacaggcctgtgtggggtggccctagccccacctcagcttccaacctgaccttgctgcatgacctctggcccagccctctccacctggagtgc

SEQ ID NO: 982292 - DNA, 120 bp, Artificial Sequence
  ENSG00000269821_93 (sequence is synthesized)
catctctctttgtgggatgggccaggtgggctgtgtgtgggggagggcaagtatataggtgtggtataggtggaaactgccacagtaaccagcagcagctcagagccgggccacccaatt

SEQ ID NO: 982293 - DNA, 120 bp, Artificial Sequence
  ENSG00000269821_94 (sequence is synthesized)
tgtatgccagccccagctgggcctaggcacgtggtgtgtggaaatgaacgaagcaggcagccctatgtttaggaggcaggtccagagctcacccaggcacagcacaagatgagtgcctgg

SEQ ID NO: 982294 - DNA, 120 bp, Artificial Sequence
  ENSG00000269821_95 (sequence is synthesized)
cctcagtgagcgagcactggctgctatgaggctgtggtgtggaaccttgacactagggccactggcctggctgtgtgacctctacctcatcacccagagcagggcaaccagaggcagagc

SEQ ID NO: 982295 - DNA, 120 bp, Artificial Sequence
  ENSG00000269821_96 (sequence is synthesized)
ctcagtgtggtgttctcctgtgaaatagtgatggcacaggcaggggctggggcccagtgcctacacagaggatcagcaaaggatggcagttattgaaacctctacggggaagttccccag

SEQ ID NO: 982296 - DNA, 120 bp, Artificial Sequence
  ENSG00000269821_97 (sequence is synthesized)
acacgagaggaagacccccatggaagctgtgtgtgtgacgtgcttagattttccagagtcttcattttccttgtctaaacagaggtcatggcgcctccctctcagatcaaacagccctgt

SEQ ID NO: 982297 - DNA, 120 bp, Artificial Sequence
  ENSG00000269821_98 (sequence is synthesized)
atgagtggctacaacctttggtgggctcagtgcagcccctcctgcccccttgcttgggagctgtctgcagaggcctagggagctgcgtggggtctctccacctcagcctgtatccccacc

SEQ ID NO: 982298 - DNA, 120 bp, Artificial Sequence
  ENSG00000269821_99 (sequence is synthesized)
cccaccaggtcccctgcctgactccagcatacccaggccctagaagcaccaactccatggctgcagctgagtggagtgtgtgcctgcccaagcctagaggggtgctgacccctccctcgc

SEQ ID NO: 982299 - DNA, 120 bp, Artificial Sequence
  ENSG00000269821_100 (sequence is synthesized)
acgaggagacatcaaagggaagcaggaagcagcggcctggctgacccacagcgggtgggagaagtgcagcctcacaactgctggggattttccatcccaccaggatttccgcgggacacc

SEQ ID NO: 982300 - DNA, 120 bp, Artificial Sequence
  ENSG00000269821_101 (sequence is synthesized)
ccaagtccagcctttgaggctcctcaggaaccagagtttggcctggagccagttggggcagaggaggggggccaggctgggtggcttaggggtgtggttaggcctgctaaggggctcctc

SEQ ID NO: 982301 - DNA, 120 bp, Artificial Sequence
  ENSG00000269821_102 (sequence is synthesized)
ttctcagtctccccatgatttgctggttactggcttgaaatctgggcccagacccattccaacactgaaccctgagctccctgagacctggctggcaaggacaggtcccaatttttacag

SEQ ID NO: 982302 - DNA, 120 bp, Artificial Sequence
  ENSG00000269821_103 (sequence is synthesized)
gggcctgagaggaatggagaagggatctctgccccttcctttctcagtcacacctccttgacagggggtcatcagagtgggctgtggtaggtgcaccagggaagggaccatacagaggag

SEQ ID NO: 982303 - DNA, 120 bp, Artificial Sequence
  ENSG00000269821_104 (sequence is synthesized)
gctggtctcaagtcctagggtgcctgggatggccctattgaaatgctgcagcagctcttgtgcaggcagggatctgtatggacagctgggtggacacaggtgcctactgacctcccagat

SEQ ID NO: 982304 - DNA, 120 bp, Artificial Sequence
  ENSG00000269821_105 (sequence is synthesized)
ccttcagcagagctcagccctgagtgacagcccaaggcagacctggctacctcagcctctggctcacagccctcagccagagccctgagaggcctgggatctcaaagctgcaaggtggga

SEQ ID NO: 982305 - DNA, 120 bp, Artificial Sequence
  ENSG00000269821_106 (sequence is synthesized)
ggccagaggagagaagcccggagctggtagtgatgctggctgagtgaaaattgcacatttcccaacagtgtgatgctccctatccagcctgggcttttggcagacttctgtgctttgtgg

SEQ ID NO: 982306 - DNA, 120 bp, Artificial Sequence
  ENSG00000269821_107 (sequence is synthesized)
aggaagctggctcagattcctcccctccctgtgcagtttgtgtgtcaaggtgtacttgtcacacccaactcaggatatcttgcatcactttgtgggtccttgtcccccagagctgggact

SEQ ID NO: 982307 - DNA, 120 bp, Artificial Sequence
  ENSG00000269821_108 (sequence is synthesized)
gctgagttttagccctaagctcttgctcccatcttagcaagtcagggcccagtgttgtccttgcctctgcatcaggatggtaagctgggcatgctccgcatcacggagacctgcatggac

SEQ ID NO: 982308 - DNA, 120 bp, Artificial Sequence
  ENSG00000269821_109 (sequence is synthesized)
ctggattgggttgcctctatcttcaggctggtcactgggcagacacaaaccagggcctctggccagaggggacagtggctctgagttacttgtgctgctctttaggggtgagcaggggct

SEQ ID NO: 982309 - DNA, 120 bp, Artificial Sequence
  ENSG00000269821_110 (sequence is synthesized)
gcttgtgcatcatagtgtatcacaggggatgcacatttacaattgaaagctactggtcctgggtagaagtggggccgagtaggacttcccagccttgaacatgggtttgtcatccaactg

SEQ ID NO: 982310 - DNA, 120 bp, Artificial Sequence
  ENSG00000269821_111 (sequence is synthesized)
ggacccacacttgatccagcggccatgctctgtgcagcctgggcctgagggcagccacgctcatgtgaaaagtgctagtagccaagctgccattctagtcaccacagctgtccttgcagg

SEQ ID NO: 982311 - DNA, 120 bp, Artificial Sequence
  ENSG00000269821_112 (sequence is synthesized)
agcacattgcccagggctgggagctgtcatttccgtgacgggagtgagactcaacactgggtgagggtgggggtatctgttgggaattatttcaaaacaattgtggaaacttggcagtgg

SEQ ID NO: 982312 - DNA, 120 bp, Artificial Sequence
  ENSG00000269821_113 (sequence is synthesized)
aggggctctgggcataggtatccacaatatcctagtcaggggttggggtaccctggctctgctgataagcccaagtgagcatactcctcccccagcttggaacaggtgggacgggccagg

SEQ ID NO: 982313 - DNA, 120 bp, Artificial Sequence
  ENSG00000269821_114 (sequence is synthesized)
tgacactagtgtggtctgtggtctggcctcccaagccagtggcagtactggggtggcagacatttgctgtgtgctatcccaaggcctaaaggtcacacagctaggttggagcagggtttt

SEQ ID NO: 982314 - DNA, 120 bp, Artificial Sequence
  ENSG00000269821_115 (sequence is synthesized)
gggcaggatgagtaggcattgctgtgctctcagaaaggcgaagcaaaccccagaagcaagggggcgagacagggcaaaggcctacactttgccatcaactcaggcctactcaatgctggc

SEQ ID NO: 982315 - DNA, 120 bp, Artificial Sequence
  ENSG00000269821_116 (sequence is synthesized)
cctgtccttcccctgcccctgccccatcagatggtgcgagctggcggggcttagagtgagcccccctgactcttcttggtgtggagtctgaggcccagagtgtacaggcctcatccgtgt

SEQ ID NO: 982316 - DNA, 120 bp, Artificial Sequence
  ENSG00000269821_117 (sequence is synthesized)
gacccagcaggaggatgggagagtgggcccagaacttggtcaggctcatccgtggagaacaagttcttccctagtctagttgtggtctgagtcctgggtgaagcaggaggcagcctggga

SEQ ID NO: 982317 - DNA, 120 bp, Artificial Sequence
  ENSG00000269821_118 (sequence is synthesized)
aacagcctcgttctagtaggaatcgcattctcaggaacgctgactgtgcagggccctttctcactgccacctgggaggatgcctgcctgctggccatttcggcggactgtcagagcaccc

SEQ ID NO: 982318 - DNA, 120 bp, Artificial Sequence
  ENSG00000269821_119 (sequence is synthesized)
tccctggggtcccagaccgaaggcctgaagtccacatgggacccctgaacttctggtacctgtgtgggcttgtcccctcaaccctgagtggaatggcaacagccagctgcaaccctccta

SEQ ID NO: 982319 - DNA, 120 bp, Artificial Sequence
  ENSG00000269821_120 (sequence is synthesized)
gcttcctgtcatgtgctgtatggaagggccaagagctgtagtcatctgcagatcctcccactgcacctgtaggactagcgtctcctgtctggatgtgagcaacttgctggtggcctgtga

SEQ ID NO: 982320 - DNA, 120 bp, Artificial Sequence
  ENSG00000269821_121 (sequence is synthesized)
gatgggagttgcactgggcttctggataagggcttctcgttcaggtgacaattctatgtgaaggagacccatggaaacacatctatcccctgcccatgtaccaggcagagatggtacctg

SEQ ID NO: 982321 - DNA, 120 bp, Artificial Sequence
  ENSG00000269821_122 (sequence is synthesized)
cccatgtaccctccatgacatggctgggtccctgaaacatcagacagatcgatactctgtgtgcatgtttgtgggcaagacacagtggcacgtgtgccctggagtttggtaatgggagga

SEQ ID NO: 982322 - DNA, 120 bp, Artificial Sequence
  ENSG00000269821_123 (sequence is synthesized)
ctgaagtagtgcctccgtgtgtgagctgtgccagccatccccacgaagggggcattccatgcagatggggatcctctccaggcagcttcttccacacctgattagctctgaccatcagac

SEQ ID NO: 982323 - DNA, 120 bp, Artificial Sequence
  ENSG00000269821_124 (sequence is synthesized)
cccccgtgccaaaagggccccttccctggaatctgtaattctcacaggctgtcccatacattttaaatccaggaaatgtgctcacccatgagacagggatggcaagaagatatgaatgaa

SEQ ID NO: 982324 - DNA, 120 bp, Artificial Sequence
  ENSG00000269821_125 (sequence is synthesized)
aagcaaccagtccgtaaaattggaagccatttcactccttaccaggtacaaagataacatgctgcatggatcagggacacaaacttacctaccttatgatgtagtgaaagaatctaaaac

SEQ ID NO: 982325 - DNA, 120 bp, Artificial Sequence
  ENSG00000269821_126 (sequence is synthesized)
ttttgtctcagcagactccctggaggaagccaataacaggaggccttgactaggagacctcaagccttggaatgtgcccagaccagtggggagggaaggctgggaggcagtcctccctta

SEQ ID NO: 982326 - DNA, 120 bp, Artificial Sequence
  ENSG00000269821_127 (sequence is synthesized)
ccccttttctcccaggcagacctaccctgggttctctccaggcccctccgcctgagcaagtgctcagttggccactagctccctgcacatccaacaagcctttctttcctgttccttctt

SEQ ID NO: 982327 - DNA, 120 bp, Artificial Sequence
  ENSG00000269821_128 (sequence is synthesized)
caaggaaggcttagcctcaaatccagggccacagacaaaggacagtcactctcctctgccagaaagtcatttatgggacatggagaaagcatcaaatatattgcttttccaacacctaac

SEQ ID NO: 982328 - DNA, 120 bp, Artificial Sequence
  ENSG00000269821_129 (sequence is synthesized)
agtggaataggaggaatagaaggagaactcagccagaaagttctggagcatagtctttttgccaaaagaacacgttttcaaatgaaagaggtggtgctggggcactgaggaatcaggggg

SEQ ID NO: 982329 - DNA, 120 bp, Artificial Sequence
  ENSG00000269821_130 (sequence is synthesized)
atggaccccactggagcttgtctcatgctggcagcaagtcccaggcctcaaacacatacctgggccacctcaggagagagactgcagggaagaaatgagttgcaatgctccagcctaacc

SEQ ID NO: 982330 - DNA, 120 bp, Artificial Sequence
  ENSG00000269821_131 (sequence is synthesized)
aactccccttttgttaatccaatcccagaaggtactgggtagggtcagttaacagacagctgcctgtctcctggcagagtctgaccaagccccagtgggcgcttctcttcctaagtcctc

SEQ ID NO: 982331 - DNA, 120 bp, Artificial Sequence
  ENSG00000269821_132 (sequence is synthesized)
tggtgtaccccattcttcaagggaaacggtccccttaagaatctatgtgaaagggttctgaaattgctgtaccagttaatgaattatttactctaaacaatgtcttgataaagggggagg

SEQ ID NO: 982332 - DNA, 120 bp, Artificial Sequence
  ENSG00000269821_133 (sequence is synthesized)
atgaagttagctgatgttgactaaggagagacggagttgccaaggaaattcttctaaatgaaaaaaaaaaaaaagtaaaagcagtcagctggttttgtctgactatgaaacgtgtcacag

SEQ ID NO: 982333 - DNA, 120 bp, Artificial Sequence
  ENSG00000269821_134 (sequence is synthesized)
agcatgcacctttggccatcttttgcatttatgatttggaagagagatgtagcagtgagtgtggggccagggaggggaatccaacaaagccattctgcaagctagtggctgggattttgg

SEQ ID NO: 982334 - DNA, 120 bp, Artificial Sequence
  ENSG00000269821_135 (sequence is synthesized)
ggtatagagtaagagcagccagccttagaggcccatgtcatctgggctgcctcagagctaaagctaggtaaccagagggagtaaggaaaggcctgagtcccaggctaggcttttcacagt

SEQ ID NO: 982335 - DNA, 120 bp, Artificial Sequence
  ENSG00000269821_136 (sequence is synthesized)
tgtattgagatgggaaagtaagggatgttccttgcagcagatgcagggcccagttgtctagagcagtatttgaaatgagttggcatttcagggcagtgtttgtgatgccagtcagtaggt

SEQ ID NO: 982336 - DNA, 120 bp, Artificial Sequence
  ENSG00000269821_137 (sequence is synthesized)
aggggcttctacctcttttttagaaatgtttactctgaactaagctctatgctttaacaagttatgttttaataggaaaactgtcattgatggaatcatatgtaattcctacatttttcc

SEQ ID NO: 982337 - DNA, 120 bp, Artificial Sequence
  ENSG00000269821_138 (sequence is synthesized)
agttacccattcctggggaaagcttagccattggacaaaccacccagagccccaggaacctgcatttgcagacagcagtggcaggcacagtggcctagtgttgagcgggggaaacctggc

SEQ ID NO: 982338 - DNA, 120 bp, Artificial Sequence
  ENSG00000269821_139 (sequence is synthesized)
ctctatgtgtctggttttgcaaactaaaacgccattgcccatactcaggctgacaggttctggaggtgccatggactcctgctctgtatctcacctctagttccatcacaatgcatgagc

SEQ ID NO: 982339 - DNA, 120 bp, Artificial Sequence
  ENSG00000269821_140 (sequence is synthesized)
tgtcagtgggagccttttaatgcagatgctaatacccattcctaatgctagcccatccccacaccctcctgagttggtgcgatatatcctgggaacaagaaaatctgaaggctcctggtc

SEQ ID NO: 982340 - DNA, 120 bp, Artificial Sequence
  ENSG00000269821_141 (sequence is synthesized)
ctcaggctagcaagagccttgcctgtaagaagtgggagaaggtcacctctctcaggaggcagaactaaggctgcacagcacaagggagatgtctgaatgcacagtctgggtggcagaagg

SEQ ID NO: 982341 - DNA, 120 bp, Artificial Sequence
  ENSG00000269821_142 (sequence is synthesized)
actcctgtcctttcttccacacagacctgagcacctctccaggtgccaccattttctgtctgggaacatctgctatccccaagcctcagtttcctggtctacaaaactgagatggtctct

SEQ ID NO: 982342 - DNA, 120 bp, Artificial Sequence
  ENSG00000269821_143 (sequence is synthesized)
tctatacaaggccccaggaggatcactgcaagtcactgcatttcatggtgcccagatttccctgcatttctagaatgtcaacagagatgagtgggctcaaggggaagagattctttatga

SEQ ID NO: 982343 - DNA, 120 bp, Artificial Sequence
  ENSG00000269821_144 (sequence is synthesized)
ctagagatattctggtcaactttggaccccagcttctatggacaatagcatgtggacatgagccctggggaagcagggatgactgagcctgaagaagagctctcaagccttacactctcc

SEQ ID NO: 982344 - DNA, 120 bp, Artificial Sequence
  ENSG00000269821_145 (sequence is synthesized)
agaccagccttgggttgcctgaaccccagcatagccttatggaacccctgccagggtcctagcacctggtttgacctgggcacaagtactcactcactcactcactcactcactcactcg

SEQ ID NO: 982345 - DNA, 120 bp, Artificial Sequence
  ENSG00000269821_146 (sequence is synthesized)
tcaaacattcactgagggtccgtgacaggctccatatggattaagcactgaagataaaacactgaatagaaacagccagcctataccctcatgctccttgaatgtgatagaaggagccag

SEQ ID NO: 982346 - DNA, 120 bp, Artificial Sequence
  ENSG00000269821_147 (sequence is synthesized)
ccagtaaaccctttaccacaaataaacacacagttacacattaagaatgggaggggaggtatgtgattttttacagcccagtcttaagctttagaaattggctcctctgaggaagggaca

SEQ ID NO: 982347 - DNA, 120 bp, Artificial Sequence
  ENSG00000269821_148 (sequence is synthesized)
tttcagctaagaaccacaggataagacagtcctggcctggggaaggggagagaaggtcaggagagagcttgatatgtttaatactgaaagaatatttgatgagctgggacatctcctgca

SEQ ID NO: 982348 - DNA, 120 bp, Artificial Sequence
  ENSG00000269821_149 (sequence is synthesized)
gatccacggctccctagctttgtgaccctgggccctagactcaatccctcaacccttaggagattatctataaaacaggagtgataatattcttgtgttaaaagctgctgtgaggattag

SEQ ID NO: 982349 - DNA, 120 bp, Artificial Sequence
  ENSG00000269821_150 (sequence is synthesized)
tgaaatgatgtctatatttgcctggcaaacaggaagtgtaagtagtagtatcatttgaagattattcttcagcctaaacgtgtgttcattatggccggtgtgttttctccccacctagat

SEQ ID NO: 982350 - DNA, 120 bp, Artificial Sequence
  ENSG00000269821_151 (sequence is synthesized)
ggtagtgctgggcctcctttggagtaccttgatgtttggggagcatggatgatatgaccataacctgagaaggcagggactgtacccattctggtcctcccaggtcccagggcccccaca

SEQ ID NO: 982351 - DNA, 120 bp, Artificial Sequence
  ENSG00000269821_152 (sequence is synthesized)
gtgccctggtgtgtgatcagtgcccacaatactgaatagaggaacagacacatgggaagcaacggcagcctggtctttaagggtgagggagcaccttctcctgagagagggagagatagg

SEQ ID NO: 982352 - DNA, 120 bp, Artificial Sequence
  ENSG00000269821_153 (sequence is synthesized)
ttgggggaggttgggtgggggtggggagagcgagtgagcaagcaagctagaaacttcctgaaaagggaagttactctagaaaagggtaagttccttccaggcatcatgggctggcttaac

SEQ ID NO: 982353 - DNA, 120 bp, Artificial Sequence
  ENSG00000269821_154 (sequence is synthesized)
ctggaccagtttgactttactaagtcccatttctcatctagggagcctgaggccattaaggttatctggtcccaaaatcccctagagctgtcacagggatccccattctttgcctttagt

SEQ ID NO: 982354 - DNA, 120 bp, Artificial Sequence
  ENSG00000269821_155 (sequence is synthesized)
caccccagccccaagagccatcctccacatggagtgagcagggagctacaaggaaaagacggtcacagttggagagagacagagaaccaggtgggctggtaggacaggaaggtataggga

SEQ ID NO: 982355 - DNA, 120 bp, Artificial Sequence
  ENSG00000269821_156 (sequence is synthesized)
gaaagtgaagctctctcctggggaggcaggaatactctcctgcttccttctacccactcttcatagaacacaaacactgcaaaaatgactttttccaaaccctcttagcattcagaagta

SEQ ID NO: 982356 - DNA, 120 bp, Artificial Sequence
  ENSG00000269821_157 (sequence is synthesized)
gaattgctatgtaagaattttttcataggtgcttttttggggggcatctatttaaaaaataaccacatcattagtgaaatcttccaaagtctctttttggagcccacatttcactaatgt

SEQ ID NO: 982357 - DNA, 120 bp, Artificial Sequence
  ENSG00000269821_158 (sequence is synthesized)
ccacatctgaggaggctttcataataaaagaacacatacctatttcacctatgatggtcagtgcaatcttgaaaacactagtaaatagtgtccatcagctttaaaaatacaaacccaaat

SEQ ID NO: 982358 - DNA, 120 bp, Artificial Sequence
  ENSG00000269821_159 (sequence is synthesized)
tgggtcataccaaaatgcaaggatacacacaataacctgggtgaatcttcagggaattgtgctgagtgaaaagagccgatcccaaaaaggtgatttgctatgtggttccatttatataat

SEQ ID NO: 982359 - DNA, 120 bp, Artificial Sequence
  ENSG00000269821_160 (sequence is synthesized)
tttcttggaatgataaagaaatgaagaataggttagtagttgtcaggggctaaggacagggtagggtgggagggaattgggggtagctataaaagggggacatgagggattcttgaagag

SEQ ID NO: 982360 - DNA, 120 bp, Artificial Sequence
  ENSG00000269821_161 (sequence is synthesized)
ttagaaatgtcctgtagtgagactatcaatgcaatatcctggtcagaatattgtactacagttttgcaagatgttactatcgggggagactaggtaaaggagtatgtaagatttctctgt

SEQ ID NO: 982361 - DNA, 120 bp, Artificial Sequence
  ENSG00000269821_162 (sequence is synthesized)
gttgtttcttagaactgcatgagaaatgtacaattatctcaaaataaaaatttattttaaaaaatgcccaaattaaaaaaaaatcagtagtcctcctaaaaatacccagaaatgaatttt

SEQ ID NO: 982362 - DNA, 120 bp, Artificial Sequence
  ENSG00000269821_163 (sequence is synthesized)
agaatgtccaaaatccatacaaagatctaaaaaaatatggaaggatgttgcaatggatttgaacatgtgggtaaactgcttctatttgtggctggaaagactttttttttgaggtgggga

SEQ ID NO: 982363 - DNA, 120 bp, Artificial Sequence
  ENSG00000269821_164 (sequence is synthesized)
aggcaattcttcatcagttaatctaaattgaatgaagtttcaataacaaatgccaatgggatatgaatatacacacagatagacaactttttttttttttttttttttaattaggcaagc

SEQ ID NO: 982364 - DNA, 66 bp, Artificial Sequence
  ENSG00000269821_165 (sequence is synthesized)
agacaactttttttttttttttttttttaattaggcaagctgaggccaggtgcattggctcacgcc

SEQ ID NO: 982365 - DNA, 120 bp, Artificial Sequence
  ENSG00000269821_166 (sequence is synthesized)
gccactgcattcccgcctaggtgacaaagtgagactctgcctcaaaaaaaataaaaataaaaaaaaaattaggcgtgctagttctaagtttatatgaaaaaaatgcatgtcctataaaat

SEQ ID NO: 982366 - DNA, 120 bp, Artificial Sequence
  ENSG00000269821_167 (sequence is synthesized)
tcagaagtagcagcagtctggccccttgtgctcctctagccctcaactggcctaacaggccctagtgtgcagcagggactattttcccatcatcactgtccacagcatctggacaagaat

SEQ ID NO: 982367 - DNA, 120 bp, Artificial Sequence
  ENSG00000269821_168 (sequence is synthesized)
acagagaacggctgatttaaaaaaaatctaatctgggatcctatgcatcctaaataatcttatgaggatgcacttgtattttttctgatgctgatactattcattccaactcgcctcccc

SEQ ID NO: 982368 - DNA, 120 bp, Artificial Sequence
  ENSG00000269821_169 (sequence is synthesized)
atcagctttgtcaggcactgtgaattgcatggtacacatgattacaatggatggaatggccatcatgaggtatagcaatacatttaagtaacactgtgtcactactataggacaggcact

SEQ ID NO: 982369 - DNA, 120 bp, Artificial Sequence
  ENSG00000269821_170 (sequence is synthesized)
tttctgcatactttatattattaatttgtgtaatcctcctaacaaccctctgaggaaggtactcttatgattcccattttacaaataaagaaactgagactaagtgactcactcaaggtg

SEQ ID NO: 982370 - DNA, 120 bp, Artificial Sequence
  ENSG00000269821_171 (sequence is synthesized)
tagcaggtagaaagtagtggaattaggatatgagttcagactccagaccctgttattagcccctgtctttggctatggattagtaaaggagagcacagccaagggtgggacaggcagctg

SEQ ID NO: 982371 - DNA, 120 bp, Artificial Sequence
  ENSG00000269821_172 (sequence is synthesized)
tagtcctctggaccagcttcacatggatggggctgcattgttacaggtggcctaactcagacatggaaactgagtcgctgctgcccaactcatgccatgaaaccattttggcctgcacag

SEQ ID NO: 982372 - DNA, 120 bp, Artificial Sequence
  ENSG00000269821_173 (sequence is synthesized)
cttataacagcactctagctctagctatgacactttatggtgttagtgggtttttttggtggttggtatggaggaggggctgggctacaagttttagattatgtttcttattgcgggttt

SEQ ID NO: 982373 - DNA, 120 bp, Artificial Sequence
  ENSG00000269821_174 (sequence is synthesized)
ttaaaaattcttgaattaggcctatttgctcttttgttctctattgagttagcaaattcagtttttccaagatgccctgaaagtatgatcatacatgtatacgaaatggtccttgggtcc

SEQ ID NO: 982374 - DNA, 120 bp, Artificial Sequence
  ENSG00000269821_175 (sequence is synthesized)
agctggcaactcctgtgcacccccgacctggattctgccttccttgaagtgagccttggaagaaacaagtgctcatgctccctgacattattagctgccacgatgaagcctcagtcccaa

SEQ ID NO: 982375 - DNA, 120 bp, Artificial Sequence
  ENSG00000269821_176 (sequence is synthesized)
acaccccagcttcctgtctaactcaagagctaatcctgtgtttaaatcttaagagtgtttagatcttaggccatgccatgaattcccctggttgactgcatttgtgaaaatgagcttccc

SEQ ID NO: 982376 - DNA, 120 bp, Artificial Sequence
  ENSG00000269821_177 (sequence is synthesized)
attattggctcttaagtaatggagatgagggggagtcctgctacacagataagtgcatcataaagttacataattaaaataactgagctctggcctatcaacaggcccatcagcagtcca

SEQ ID NO: 982377 - DNA, 120 bp, Artificial Sequence
  ENSG00000269821_178 (sequence is synthesized)
gaatagagtctagaaatggacacaaattaaatgagagtttgaaatatgataaaggtagcagttgaaattagtagagagatgatgatgtactcaaataaatagtgttggacaactggacaa

SEQ ID NO: 982378 - DNA, 120 bp, Artificial Sequence
  ENSG00000269821_179 (sequence is synthesized)
atatatgggaaaccaaattggatttaattactctgtcaaaatcccgataaagcaaggatttaaatgtaaaaaatgaaataaaaaatgatagaagaaaacatggaagaatttattaaaaca

SEQ ID NO: 982379 - DNA, 120 bp, Artificial Sequence
  ENSG00000269821_180 (sequence is synthesized)
atttcaggatgagaggttatttcagaatttaagataaggacctcaaaccataaaagactgacacagctgactatgtgaaattaaaaaaattctgccaccagaaaaatattatagaaaaag

SEQ ID NO: 982380 - DNA, 120 bp, Artificial Sequence
  ENSG00000269821_181 (sequence is synthesized)
ccaaaacacctaaggaaaatgaggataaaatattttcaatgaatatgacaaagcaagtttctacaaatcagtaagacaaggtattttacaaagtccaaagggtatgaagaaatagttcac

SEQ ID NO: 982381 - DNA, 120 bp, Artificial Sequence
  ENSG00000269821_182 (sequence is synthesized)
aagaaagaaaaacaaatgattttaagcatttggaaagataaaaacctcatttccaacaaaagaaatgtaaattaaagctccagtgtaccatttctcatctatgaaatgaatgaagataaa

SEQ ID NO: 982382 - DNA, 120 bp, Artificial Sequence
  ENSG00000269821_183 (sequence is synthesized)
aacctgagtatacacttggtaagggtgggggaagaaagtgcatttgtgcagtcaaagtgatgtaaatggtacagcccttatttggcagtatctatcacaacataaatgaacattttaatc

SEQ ID NO: 982383 - DNA, 120 bp, Artificial Sequence
  ENSG00000269821_184 (sequence is synthesized)
ctgctggaaatggggggaaagggaggatctcttaaagtaaatccactgaaaacggagaccaaaattttacaatagagatatttgattgggaagttaatttgaaaaataacagtagttaaa

SEQ ID NO: 982384 - DNA, 120 bp, Artificial Sequence
  ENSG00000269821_185 (sequence is synthesized)
atattattttatctcatatgcaataacagttgttagagttacaattatgtacacgttttagaaaaaaacaaatccagaggggattttggtttgtcttttgtaaagcattatatggtaaca

SEQ ID NO: 982385 - DNA, 120 bp, Artificial Sequence
  ENSG00000269821_186 (sequence is synthesized)
tctgagggcatcttttatacttggcagaggatgttggcagcacttccacagagaggatcattttttgtagaagtatggcatggtttcactgcttgaccaagaggccacctgcatcaatta

SEQ ID NO: 982386 - DNA, 120 bp, Artificial Sequence
  ENSG00000269821_187 (sequence is synthesized)
tcatctcccctgctgtcctctgaaatgcttatctaggcatcgatcttggtttcctcttcaactgattaactaactggtctactctgcccagtctctatttgagaaatcatttgacatcat

SEQ ID NO: 982387 - DNA, 120 bp, Artificial Sequence
  ENSG00000269821_188 (sequence is synthesized)
tttctttaacttgatgaaatctcctattttgacaagatttacagttcctctttataagttcctctttactttgtgtgtgctttatattgtctttggttgacaagagacagccaaagaggt

SEQ ID NO: 982388 - DNA, 120 bp, Artificial Sequence
  ENSG00000269821_189 (sequence is synthesized)
cagtcagcagagatacaagtagggataagatggatagggagaaacaacagtgttcaatagggagggatgtttcagggaaactaatttcataagtggtcatttcagtagtgaatatatttg

SEQ ID NO: 982389 - DNA, 120 bp, Artificial Sequence
  ENSG00000269821_190 (sequence is synthesized)
aatggttaatggctgctgttttttagctgccctacatatccatcaacagaggatctgttccataaatcatggcacaatgaaactctgcagctgttaatgaaaaggagatttgctagatgt

SEQ ID NO: 982390 - DNA, 120 bp, Artificial Sequence
  ENSG00000269821_191 (sequence is synthesized)
cttaatacagatccatctccagaacataccagtgtcttccttttaagtggtgcacactggggctgaacacttactaagaaatgaaagggctccccagtcaaagctgacaggtgtcattac

SEQ ID NO: 982391 - DNA, 120 bp, Artificial Sequence
  ENSG00000269821_192 (sequence is synthesized)
aacatgacccctgtggtagatcccagcacaatacactggccatcactccattctcttcaaatgtcctagggttgcttcatacagcagaccatcgtacccaaagccactatgcatatgact

SEQ ID NO: 982392 - DNA, 120 bp, Artificial Sequence
  ENSG00000269821_193 (sequence is synthesized)
tggttatctcctgccaggctgtagtccagttagtgctcccttggaaatactcaagaccttaatgaactatctatctgtgaatctgtgaagctacccatttcttagaggcctctttggaga

SEQ ID NO: 982393 - DNA, 120 bp, Artificial Sequence
  ENSG00000269821_194 (sequence is synthesized)
gctggctgttgaatacccagtatgatggtccttagccttcttagacctttcctgtaccactacctctatgccttttgccaagtccaagtgttcaccagaaatggaactgatgccagaaag

SEQ ID NO: 982394 - DNA, 120 bp, Artificial Sequence
  ENSG00000269821_195 (sequence is synthesized)
actacagctaacaatctgagcagaacagtgagcatgtcctatctgggaaaagcccagcccattgggctaaatctctagctgaacacagagactatgctccttccaattatactggaagcc

SEQ ID NO: 982395 - DNA, 120 bp, Artificial Sequence
  ENSG00000269821_196 (sequence is synthesized)
caaccatgagaaaacagcacttcaactacactgttcagagccatcacctgttcacacgtgtgtctgtatacatgtaaacacacattttgcaataaaaatgcttctcagatgtactgcacc

SEQ ID NO: 982396 - DNA, 120 bp, Artificial Sequence
  ENSG00000269821_197 (sequence is synthesized)
ataataaatcagcattgtatgtacagctcaaaaagaagtatggcatacctatggaagaagtcaaaggcaaagtgtagaaaaatacatacagtatgctaccatttgtataaaaaggagccg

SEQ ID NO: 982397 - DNA, 120 bp, Artificial Sequence
  ENSG00000269821_198 (sequence is synthesized)
tatctactaagtacatgcacacacagacacacgtatatttgtttatataaaatacgtctggaaagatgcaataggaaagtgttgagtggtaacctttagggaaggaaacttgggaattag

SEQ ID NO: 982398 - DNA, 120 bp, Artificial Sequence
  ENSG00000269821_199 (sequence is synthesized)
ggttgggtggggagagtgttatttttcaccccttttgtactctgaattggttttaccatgtgtgtaaagactgttgtatgatttttgtagcacaacccttgaatacataaagcacgattg

SEQ ID NO: 982399 - DNA, 120 bp, Artificial Sequence
  ENSG00000269821_200 (sequence is synthesized)
gctccccagaaggcaggtgttggccaggcagtggatgcacggtagggcagtgtgcagccctgcatgcacgtggctggtatgccctgcgggcagcagctccccgcacacagtgctgtgagt

SEQ ID NO: 982400 - DNA, 120 bp, Artificial Sequence
  ENSG00000269821_201 (sequence is synthesized)
ctctggttcatgtcactctgtggagcaggggctgctccagcacaaagaggtttttgacagggaaaggcagagccagagtcagggcaggccctgggcgggctcctagagagcccaaccacc

SEQ ID NO: 982401 - DNA, 120 bp, Artificial Sequence
  ENSG00000269821_202 (sequence is synthesized)
ctctaataaggggtgctctccaccctatctgaggagcaattgggatctcctaggaagtgaaactgttacgtatgtcttattacagaatttccagtggagtgattctggaagaaatgtgta

SEQ ID NO: 982402 - DNA, 120 bp, Artificial Sequence
  ENSG00000269821_203 (sequence is synthesized)
tggcatgttgtgactgctatgtctcatgaaatatttacgtttttatgtaacttttttccattttcagatcatcttttattttaacgcaaaatgacaatatatttttcaattaatttgccc

SEQ ID NO: 982403 - DNA, 120 bp, Artificial Sequence
  ENSG00000269821_204 (sequence is synthesized)
aatatctgtgtttaaatgttttctaatgcacacacgtgttttaaactcattaaaaaaatatgacttagatcccatcccactttcatgttttatattgccaaaactctgcttttgggagag

SEQ ID NO: 982404 - DNA, 120 bp, Artificial Sequence
  ENSG00000269821_205 (sequence is synthesized)
gtgagttatcttcacttctgaaacagtactgcttgggagctggtttggccctggctattctggggaaatgacacaatattgacctagaggggccctaatctttccccgctagagcactac

SEQ ID NO: 982405 - DNA, 120 bp, Artificial Sequence
  ENSG00000269821_206 (sequence is synthesized)
ctctaatagggtgaaggatgggagaaagaggctagtgaacccaccttcaggtctgtccactcaggacatgcccacactagcctctccaggggctctgcccttggcatccccgtcccccac

SEQ ID NO: 982406 - DNA, 120 bp, Artificial Sequence
  ENSG00000269821_207 (sequence is synthesized)
ctgggctctggcagagaagtcaggcgggaagaagccggctgagtgcccgccactgtaagaggaaacgaagagaaacagctccagtcagccccagaagcgaggcctggaaaaactctgcag

SEQ ID NO: 982407 - DNA, 88 bp, Artificial Sequence
  ENSG00000269821_208 (sequence is synthesized)
ccagtcagccccagaagcgaggcctggaaaaactctgcagctggagctaacacaaaggacttttcagaccctgcagccaaggtgccca

SEQ ID NO: 982408 - DNA, 120 bp, Artificial Sequence
  ENSG00000269821_209 (sequence is synthesized)
cagcagttggcgagagtttccaggaagctggtctggcactgggctgggattggagcaactttaacgagttaagttcagaaggaaggagtcatcaggaaaggtttaaggttcaacaaactt

SEQ ID NO: 982409 - DNA, 120 bp, Artificial Sequence
  ENSG00000269821_210 (sequence is synthesized)
ttcaaattattttgcaaaaagttctggctttccaattcaaaggcatgtttcgctgtgactgttttaagccagagcctatttaaaaggcaacacaactagcatgcttcagattcactcact

SEQ ID NO: 982410 - DNA, 120 bp, Artificial Sequence
  ENSG00000269821_211 (sequence is synthesized)
cgaggtatttgtctaaatcctccgaatgggctttgcaagtgccatctagtgcctagtaacactggggccatcttacacatctcgacaggcagccctcctccccacgtgcctccccccagc

SEQ ID NO: 982411 - DNA, 120 bp, Artificial Sequence
  ENSG00000269821_212 (sequence is synthesized)
ctctgtggtcgtgtgcgcgcgggcgcgcacacacacacgcacgcatgcaccttccctaagcaggaagctgctctttgccaagagcgaatggaattcagatttccagagggtgtccttggc

SEQ ID NO: 982412 - DNA, 120 bp, Artificial Sequence
  ENSG00000269821_213 (sequence is synthesized)
ctccagctctacggctgcatgatgaagaaaggtcctagtgtgtgtgccgggggctgggagagaggggcctccagctctgctcacatctatctgggccccaagaaaaacccacaactggct

SEQ ID NO: 982413 - DNA, 120 bp, Artificial Sequence
  ENSG00000269821_214 (sequence is synthesized)
gtgctctccccagccacacccagccttggtcacattccttcccttcctgagcccacactgggtggccccggcaaaccagcttccacacctccctccccaccggcagggagacctagccca

SEQ ID NO: 982414 - DNA, 120 bp, Artificial Sequence
  ENSG00000269821_215 (sequence is synthesized)
agcccccatggggcagccagcaagtacaaatgaggggctgcaccccaggcccaaagagccagaaagcacggagggccctccccccaccccacccccaatgctgggcatccccttgtggct

SEQ ID NO: 982415 - DNA, 120 bp, Artificial Sequence
  ENSG00000269821_216 (sequence is synthesized)
gctgtcactcatggggaaagagacacactcccttgtctagcacccggtgagctgagctcccatcccttcctgtgcctgctttcaggaagtccctcttcatatccaaccttgactctcctg

SEQ ID NO: 982416 - DNA, 120 bp, Artificial Sequence
  ENSG00000269821_217 (sequence is synthesized)
gctgtggtgcttgtgggcctgggattgaagggccatcactgccctttgcaccagagcttcccaacataccagcaagaagggactgtaccccttcccctgtccagtctgggccttccaagc

SEQ ID NO: 982417 - DNA, 120 bp, Artificial Sequence
  ENSG00000269821_218 (sequence is synthesized)
cctgagattcagcaacctcaggaattaaacatttataggaaaacacctatgcagacaagggacatgagtcagggtggtcatcagcagtagcaaggtgggtaggctggtcacgtttagctt

SEQ ID NO: 982418 - DNA, 120 bp, Artificial Sequence
  ENSG00000269821_219 (sequence is synthesized)
ctctttagcccaagtaatagggtcttccacctgcatggccagggaggggataggctgagagcaatctttctacaggctgtcagcatcaacaagtggttgtgatgagcaggagtctgtatg

SEQ ID NO: 982419 - DNA, 120 bp, Artificial Sequence
  ENSG00000269821_220 (sequence is synthesized)
gcttttcaggtgttccggctcaaggaggcccaacaccaagttggaacctccaggcctggtgcctaggcagaaggtgggctaaacaaaggccaaggggagctctgctctgtcacttccctt

SEQ ID NO: 982420 - DNA, 120 bp, Artificial Sequence
  ENSG00000269821_221 (sequence is synthesized)
tgtttgctaatgagactgtttccaaaagctggcctggtagcctgtgggattgtttctctcaagatttcttctaggggagaaggtggctgaggctttgcagtctgcatcacccagtcccca

SEQ ID NO: 982421 - DNA, 120 bp, Artificial Sequence
  ENSG00000269821_222 (sequence is synthesized)
gaatctacaggggactcagcttgcctagtcacagttcggcttttggccttggctccagggcccattctgatcctcgtgcttgggtcagggatggtcagcacccctgccctgatgctgcct

SEQ ID NO: 982422 - DNA, 120 bp, Artificial Sequence
  ENSG00000269821_223 (sequence is synthesized)
gctggggtctcctgctgagtaccgtgaaggcctactgtggcctgagaagccaacttcactgtcccttttggccagccctagaccctatatttgttcaagtaacacattgattcactggct

SEQ ID NO: 982423 - DNA, 120 bp, Artificial Sequence
  ENSG00000269821_224 (sequence is synthesized)
tctcctttaggcaaggcctgcaggggactcagctggggttcatgattccttgccacctgtggtgggcctgcatggccagcccaaggcctcaagtgccacatactgctcccctgacagtca

SEQ ID NO: 982424 - DNA, 120 bp, Artificial Sequence
  ENSG00000269821_225 (sequence is synthesized)
ggtggctagggtatgacactcaagaaaatgcccaggcagaacccagagttggggtcacttggtccagcccttctgaaggggactggttggatctgttgcggggaggagacaggccatgct

SEQ ID NO: 982425 - DNA, 120 bp, Artificial Sequence
  ENSG00000269821_226 (sequence is synthesized)
ggaccagcaaaaaagcatagaacttggagtctggaacctgacatctggccttggctctgccatcagctggctgtgtccactgggcaaggtcctatcatatctggtctcagtgcttccatt

SEQ ID NO: 982426 - DNA, 120 bp, Artificial Sequence
  ENSG00000269821_227 (sequence is synthesized)
tacccagagtccttccatcacctgacacctacagggatgctttcccaatcaaaattcaggccatgtggtttgataaggccaccttccaatgtggaagacaggctggtaatggagaggcct

SEQ ID NO: 982427 - DNA, 120 bp, Artificial Sequence
  ENSG00000269821_228 (sequence is synthesized)
gggagcacagagctcctaggcactgccatggaatgtggggaccttagggaaggatatctcaattgaagctcttcagagcccctggggtggactgttctgtactctcatcccctaacccat

SEQ ID NO: 982428 - DNA, 120 bp, Artificial Sequence
  ENSG00000269821_229 (sequence is synthesized)
accagcctgagctcaatcatatcagcctgtgaaggctgccccaccacactgcttctgcacccaccacaccaggcccccttgagctcccacctggagcccacacacccagctggtggggtt

SEQ ID NO: 982429 - DNA, 120 bp, Artificial Sequence
  ENSG00000269821_230 (sequence is synthesized)
cgtggggcagttcaaaaagaaaagcagaaaaaagcatttgagtattttggactggaaggaattcaatttaacttaacaaatcaggacatgaacctaaagaaaacactgaaaaacaagccc

SEQ ID NO: 982430 - DNA, 120 bp, Artificial Sequence
  ENSG00000269821_231 (sequence is synthesized)
aactttgaaaggcccaaagagggaggattaggtgggagaagaaaggtcccctgtgggcagaagacagctgctcagtccagaccagggaccaggggaggatactgggcttgagtgcagacc

SEQ ID NO: 982431 - DNA, 120 bp, Artificial Sequence
  ENSG00000269821_232 (sequence is synthesized)
gggccagggtagggagacaagcccaacatacactcgaggacttgaagtcaggggtgctagctgactttttagcccactctttctaccccagatacagagactagctgcctgaggaagcat

SEQ ID NO: 982432 - DNA, 120 bp, Artificial Sequence
  ENSG00000269821_233 (sequence is synthesized)
agcggggcccacaggctggctgcctggtgctgcccacctcctctccagggcttggctccctggggcagaaggctcagacctataaccacagtggggttgcagggatttatttgggggaag

SEQ ID NO: 982433 - DNA, 120 bp, Artificial Sequence
  ENSG00000269821_234 (sequence is synthesized)
aaccctgactgggtcagaatgattatgtgcatgcatgtatgtgtatgtagctccttgttctctgaaaagccttgcctaccaccctacttcccaagtaccctctattgccttgcaaagtca

SEQ ID NO: 982434 - DNA, 120 bp, Artificial Sequence
  ENSG00000269821_235 (sequence is synthesized)
cccctgctctctgcctcagtttccccagcagggcaccacaggacactgctgtggcaaggtttatacttagggtgcagtgcagtctgatcttgtataaatgctcagtgccaaagacttagg

SEQ ID NO: 982435 - DNA, 120 bp, Artificial Sequence
  ENSG00000269821_236 (sequence is synthesized)
agataagtcaggcagagtcaaaattaacctttgaaaaatcccttgaattggccctaaaaataatccctttctcagatctttgtgtatatcccctgctgggttgctcttctgcctgctaaa

SEQ ID NO: 982436 - DNA, 120 bp, Artificial Sequence
  ENSG00000269821_237 (sequence is synthesized)
gtgggagaatctctgggtgcacatccagagtaccctgggagaggcatgccaggtgttcctgtacctttttcaggatattcccagtgtcatcttcagagggagcctctgaggctgcagcca

SEQ ID NO: 982437 - DNA, 120 bp, Artificial Sequence
  ENSG00000269821_238 (sequence is synthesized)
cacatgggaaaagattacttatggagaagatcagaggctaaggggctggggatggtggggacatcggattttgaggtcagacctggactcctgtctacctctgtctctctaccttttatt

SEQ ID NO: 982438 - DNA, 120 bp, Artificial Sequence
  ENSG00000269821_239 (sequence is synthesized)
tttctttccttttctcctaacaaggccctatttctaagatggcacctcaggcctcccatgggaccaaccaggcctgacagactaactgctcagactaactgccagacttcctcctgctag

SEQ ID NO: 982439 - DNA, 120 bp, Artificial Sequence
  ENSG00000269821_240 (sequence is synthesized)
ccagtcactaccaaggatgtgtgcctcagatacagcccctgcccaggacacctacgttgtccctaacagggcccacatatctaaagcatgaatgcctagccaggggctctggggcaccat

SEQ ID NO: 982440 - DNA, 120 bp, Artificial Sequence
  ENSG00000269821_241 (sequence is synthesized)
aagaaggcatgaagctgggcctgccaatttgcatcctgggagggcaggtcagccttgtccaggcaatccaggaggcttcccagtggcccactggccagtgaggacctttgacctccttgg

SEQ ID NO: 982441 - DNA, 120 bp, Artificial Sequence
  ENSG00000269821_242 (sequence is synthesized)
ctggtggcaccaggtttatgatgcacatagaggctgaacttgaagaattcttattgcagagggcagccacaagagccactggccagtgcccagataatatctgcagactgttccctcctg

SEQ ID NO: 982442 - DNA, 120 bp, Artificial Sequence
  ENSG00000269821_243 (sequence is synthesized)
ctccatgggccacagaatccctttgtcttgttactgctacactgccttcctaccaatcttcagggttcatcctggcctctgccatgcatatccaggctcccccagagattgtgtgtctgg

SEQ ID NO: 982443 - DNA, 120 bp, Artificial Sequence
  ENSG00000269821_244 (sequence is synthesized)
gaatgagccctggcttctgctcctatctcccagtgatactggcaagtccctatccttcttgaggcttcaatttccccttctgtgagctgggaggacaggcccactagatgctctctgagg

SEQ ID NO: 982444 - DNA, 120 bp, Artificial Sequence
  ENSG00000269821_245 (sequence is synthesized)
gacctaccaaggatgtgggctgtgtgtctcagccaacagcagtatctcctaaccccaacacaagaaatacacatagtaggtgtctggttaatgctcttggaatttcagcctatactaacc

SEQ ID NO: 982445 - DNA, 120 bp, Artificial Sequence
  ENSG00000269821_246 (sequence is synthesized)
atctgaaagccactgagtctgaactctgctaccatatttgagattatctctccattgggcacctatgggttgcctagagacaagctaccatggtcctcttccctcgcccgtcatgtgcag

SEQ ID NO: 982446 - DNA, 120 bp, Artificial Sequence
  ENSG00000269821_247 (sequence is synthesized)
ggtcaaaggcaggtgagctacacagctcgccctgctcttcactctgctttaatgtgggtgcttgccttggcagatgggcccgacagtgataagaacaaatgacagatgcatactggggca

SEQ ID NO: 982447 - DNA, 120 bp, Artificial Sequence
  ENSG00000269821_248 (sequence is synthesized)
cctgtgactgccatgagacacagtccactgattctgcctccaaccccctccccagagcagaatagtgagtgctaggtttccgcctgtacctccacgggaccccaacagctcctgaacccc

SEQ ID NO: 982448 - DNA, 120 bp, Artificial Sequence
  ENSG00000269821_249 (sequence is synthesized)
attccgagatttgaggttgtgacttggggacctctagacttcccttccctccacctgactccagactgtcctggagcttgggactctcaggcctctaggcacatcttattaaggacagca

SEQ ID NO: 982449 - DNA, 120 bp, Artificial Sequence
  ENSG00000269821_250 (sequence is synthesized)
gctgacagccatatgttgtgaccccatttgtatcccatggtaactcatgacctggcagtctcaaaagctctcaggccaaataaggaatgtccccacaggatctcccatcacaaagagaca

SEQ ID NO: 982450 - DNA, 120 bp, Artificial Sequence
  ENSG00000269821_251 (sequence is synthesized)
ttctatgctggctaatattttcaggcatttccccgagtcaggtatgtggctggatgcctaacaccatctcctcaaggccttacactaatactgtgagatatactcccaatgtatacaaga

SEQ ID NO: 982451 - DNA, 120 bp, Artificial Sequence
  ENSG00000269821_252 (sequence is synthesized)
ggaaactgaggctgatagagattaggtgactgccccagtgtcctgtgggcaggatgaaatgacccaagctggccagggctccctgacagaccttgtccctggattcagcgaacatacatc

SEQ ID NO: 982452 - DNA, 120 bp, Artificial Sequence
  ENSG00000269821_253 (sequence is synthesized)
aaaccattagctgacaaggaatgaatctgacaagctgttcatgaccaccacactgaaaactacagggcaaggtaaaagatatgaaagtcaacctaaataaacaagggacacatgatgcca

SEQ ID NO: 982453 - DNA, 120 bp, Artificial Sequence
  ENSG00000269821_254 (sequence is synthesized)
tgtttcaggagccccaaaactataaggatacccattctcccatgcccatctagaggctgctgcgcctagaggaggctttccatggcaactggcatatgtatggtgaggagaaaccctgca

SEQ ID NO: 982454 - DNA, 120 bp, Artificial Sequence
  ENSG00000269821_255 (sequence is synthesized)
aagacagcaaagccagtgatggggaaggagaagcagccagagccagcaggaccagctgtcaaaacctgttagcaaactacagtgagaaggaagcaaggtcctggccacaaagaacaactt

SEQ ID NO: 982455 - DNA, 120 bp, Artificial Sequence
  ENSG00000269821_256 (sequence is synthesized)
gaatctgaccagtggcacccaatagggtccagaaacagagccacacgtagccagtgagctgattgtaaagacactgatacggcagggtagttgggagaggacgggccttcccatgccggg

SEQ ID NO: 982456 - DNA, 120 bp, Artificial Sequence
  ENSG00000269821_257 (sequence is synthesized)
tgctgagctagactggatatccaagtaggggaagagtggaccttgacctcggcctcacattggacacaaaaatcaatcccagatggagtgcagatctacatgggaaaggtgagctaataa

SEQ ID NO: 982457 - DNA, 120 bp, Artificial Sequence
  ENSG00000269821_258 (sequence is synthesized)
agctttagaataaaccagaatatctttatgaccttggagtagtcaaagtttcttaaataggacacaaacagccctatccagagaggaaatgtttgattaactggaccacatgaaaattaa

SEQ ID NO: 982458 - DNA, 120 bp, Artificial Sequence
  ENSG00000269821_259 (sequence is synthesized)
gaccttctgttcatcaaaagacaccatcaagagaggaagaaggcagcctgcagagggggaggcgatatttgcaatgtgtgtgtctgtgagagagtgtgagtgtgtgtatctctctctctg

SEQ ID NO: 982459 - DNA, 120 bp, Artificial Sequence
  ENSG00000269821_260 (sequence is synthesized)
acaaatgactccagaatatctaaagatatataggaccataaataaacataaaacaggcagaagatgtaggcaatttatacagaatgatgtatctgactaaatgataacatggaaagggac

SEQ ID NO: 982460 - DNA, 120 bp, Artificial Sequence
  ENSG00000269821_261 (sequence is synthesized)
tcaacttcattagtcaacaggttactgcaaattaaaatcaccatttgatgctgctagacattcaccatcatggctgaaaaggaaacgacggaaaatgccaagtgttaggatgtggagcag

SEQ ID NO: 982461 - DNA, 120 bp, Artificial Sequence
  ENSG00000269821_262 (sequence is synthesized)
ccagaatgctgcctgtgggaatgaaaattggaatgactcctttggtagactgctgggtagtattcactaagagtaaacatatgcccacccaggaccctgcagctccacacataggcatat

SEQ ID NO: 982462 - DNA, 120 bp, Artificial Sequence
  ENSG00000269821_263 (sequence is synthesized)
attccccagaaacgcaacctgatgctcaccaaaagcatgtacagaatattcttaaacagcaacctacaccagaaactgcctgctggccacaggtggtagaatggatgaatgatgtaggcc

SEQ ID NO: 982463 - DNA, 120 bp, Artificial Sequence
  ENSG00000269821_264 (sequence is synthesized)
atgcacacaatggagcaccagtcagcaaggagcatgagggagcactctcccttcagccccatagagaggctgccagacatcaaattgagtgagggacattggacacaaaggtgtatgagt

SEQ ID NO: 982464 - DNA, 120 bp, Artificial Sequence
  ENSG00000269821_265 (sequence is synthesized)
tgcatcattcccaccgcataaagttcaaatgtgggcaaagctggtccttgctgctagcagttaggcctgtggttaatctcaaggtcagtgacaggaaatgggagcctgagaggctttctg

SEQ ID NO: 982465 - DNA, 120 bp, Artificial Sequence
  ENSG00000269821_266 (sequence is synthesized)
ggggttctgttgcttcctccgggtgctgcacacatgggtcccagggactgaagatgcctcaagctgcgcacttgagacctgtgtactaatctgtgtgcatgcacattaccctttaactaa

SEQ ID NO: 982466 - DNA, 120 bp, Artificial Sequence
  ENSG00000269821_267 (sequence is synthesized)
aagtttaacaccaccaccctataccagggtagcccaggtgagcctaattaggtggatagccctggccttcagggccgctaggcccagccccatcccactccctcacttaaggggacacgg

SEQ ID NO: 982467 - DNA, 120 bp, Artificial Sequence
  ENSG00000269821_268 (sequence is synthesized)
cttccagacttcctgactaggtcacctccgtgcttcagcctccagaggctctgcagttcaatctcccctttcaggtatcagcagagcacacaagagatctatatgggatgtgccccccgc

SEQ ID NO: 982468 - DNA, 120 bp, Artificial Sequence
  ENSG00000269821_269 (sequence is synthesized)
ccaaccccgccccgaccccctgccccaactgccagaagtgtctccatgacaatatcagtgcagttgtgaagtcctttgccctccagccacctctgtggcgtgaatgttctctctgtcaca

SEQ ID NO: 982469 - DNA, 120 bp, Artificial Sequence
  ENSG00000269821_270 (sequence is synthesized)
tcctccaacaccatctgcttggctgaggacctgagcagcatcatggctgggagttcacaagtggagagggctgagcctggccagagtgcactggggcagggtgatttggatggcctttcc

SEQ ID NO: 982470 - DNA, 120 bp, Artificial Sequence
  ENSG00000269821_271 (sequence is synthesized)
cttgcagaggaaatgagaagcctcactgctttcttctgggccatccacctagacagtgcggccctctccccatagcagcagccctaggccagccgcttcttcctcacgtgctcagacgga

SEQ ID NO: 982471 - DNA, 120 bp, Artificial Sequence
  ENSG00000269821_272 (sequence is synthesized)
ggaagtgaagtttggaaaggttagggggccacggggggccgccacagctgggctgatggcaggctggaagccagattgagggcatctgattcccaatcccatctctttcccactgagcca

SEQ ID NO: 982472 - DNA, 120 bp, Artificial Sequence
  ENSG00000269821_273 (sequence is synthesized)
ttacgcctcggttttaatttaattagaagaacatttaatccccccgtgcatttcagagacgggtttgagcctggctggggctatgtggggctctgacggggatcctatgactcatgcagc

SEQ ID NO: 982473 - DNA, 120 bp, Artificial Sequence
  ENSG00000269821_274 (sequence is synthesized)
cctgtacagccctcccgggcgggcccccagagggcttccttggcatctcgtgcagacagaggtggtctggagctttgcagaagacaggacactggtctagaaagacaaaatggtctcatc

SEQ ID NO: 982474 - DNA, 120 bp, Artificial Sequence
  ENSG00000269821_275 (sequence is synthesized)
tgttcttgacaagcccctcactcatccttctggacactggttcccagaatgtcctttctgtcctttcccaccaaagtttacagggagagaaatatggtgaggagcttagacactcacaga

SEQ ID NO: 982475 - DNA, 120 bp, Artificial Sequence
  ENSG00000269821_276 (sequence is synthesized)
gctgcagtgcctggtaccctggggtctgtgggagtaggtcacagtggacctggatgtctccaaaatgtcccaggccaagctggtcccatcaaaagagctagccccttggtccatgaagcc

SEQ ID NO: 982476 - DNA, 120 bp, Artificial Sequence
  ENSG00000269821_277 (sequence is synthesized)
aaatttggggccacccttgtgacgtttgcccttatttccagacagcacagactggccctgtccttgctgacaaatgcagaattcaggagacattagtagtgatgtggatgaaagccaggc

SEQ ID NO: 982477 - DNA, 120 bp, Artificial Sequence
  ENSG00000269821_278 (sequence is synthesized)
cacagcggccttgctggaaaagagcaactcgaatgtcttggcgtgagattctgcagggtccaggagaaagttgaagacatggaaattctaattaacgcacacggggctgtttttgctcaa

SEQ ID NO: 982478 - DNA, 120 bp, Artificial Sequence
  ENSG00000269821_279 (sequence is synthesized)
ggatttgcgaagctgtcatgtcacaagaggccaggcaagcacatgcttgccagggaggtgctcacagtcacctggtgggggtctctgcagctttccctctgccttctttccaccccctct

SEQ ID NO: 982479 - DNA, 120 bp, Artificial Sequence
  ENSG00000269821_280 (sequence is synthesized)
gcccagcctcgggggtcctggtcctcccccatgcccatctcaatgggccgggtgctccctgagtgtccctctggagagtgggactgagggcggtatctgttaacctcgagctggggcttg

SEQ ID NO: 982480 - DNA, 120 bp, Artificial Sequence
  ENSG00000269821_281 (sequence is synthesized)
cccatctaagatgccaaaacagaagagacaggggcccttcagagaaaccacatgactgggctgggcagagccataggctgcagggcttatgggcctgtcctcttgggccgtctatctcag

SEQ ID NO: 982481 - DNA, 120 bp, Artificial Sequence
  ENSG00000269821_282 (sequence is synthesized)
gtatccatgtgcaaccaatggggcagacgtgtgaattccaggccagtcctggctggcttggcagttggggatgcagtgtgagggaggatttcacaaaaatgatttcagcctcccagggtt

SEQ ID NO: 982482 - DNA, 120 bp, Artificial Sequence
  ENSG00000269821_283 (sequence is synthesized)
gcttggagaagctcacccaggccacacctgcacacagcccccaagttcagagccgcagatcctcaggcccctagccctgtgcctcagcactggcacaatgtgtctgcagtccttgcttca

SEQ ID NO: 982483 - DNA, 120 bp, Artificial Sequence
  ENSG00000269821_284 (sequence is synthesized)
tcttaggcagggttgagtgagcagcaatcctagggcttctccatgcctggggctttgggggttctggggaggaagagaccaagagggctatacatgcccttctccctcctggcaccattc

SEQ ID NO: 982484 - DNA, 120 bp, Artificial Sequence
  ENSG00000269821_285 (sequence is synthesized)
gaaaggcttagggaactggtactgagggctttgagagccaaaggaggacacagccgtacagcctaagtgtgtcctggggggtttactgagcagacgttggaaagatgaatggaaatctgg

SEQ ID NO: 982485 - DNA, 120 bp, Artificial Sequence
  ENSG00000269821_286 (sequence is synthesized)
tggctgcagatgggtgacaagggcattctagatggcaggttaccacacgcaaggcacagggatgcacacaggcatggcaccgtccccacccactgtcgtgccagtgacccttggtgagca

SEQ ID NO: 982486 - DNA, 120 bp, Artificial Sequence
  ENSG00000269821_287 (sequence is synthesized)
gaggatagtgagtgggtcagaatcccaggaactcatcctggctcttggggtacagggctcctcttgtcatgggggtgctccccaactgcccatgcaggcctacagtctctacttcccacc

SEQ ID NO: 982487 - DNA, 120 bp, Artificial Sequence
  ENSG00000269821_288 (sequence is synthesized)
tttctctcagaagccctgtcatatggttctgggtgggagacacaggctcagggagtttgaggctggcagggactctcttgtgccccattcaacctaggaagacagcttctgcctgaaagg

SEQ ID NO: 982488 - DNA, 120 bp, Artificial Sequence
  ENSG00000269821_289 (sequence is synthesized)
tgtgttcgaggctgagtcctggccgcccagagctggttgagggtcctgaggctgagcagtagggcccacctataggctggggtgcagcgacgccactctttatctcctgggtaccccgtg

SEQ ID NO: 982489 - DNA, 120 bp, Artificial Sequence
  ENSG00000269821_290 (sequence is synthesized)
cctcagcttgtcatgactccctagcttgcatcaggcctgctcaccccccaccccacctctggctaacaggccccggaaagaggagcttcgcccagccccagggaccttcccgtaatcaag

SEQ ID NO: 982490 - DNA, 120 bp, Artificial Sequence
  ENSG00000269821_291 (sequence is synthesized)
gctatagtgacctcacctctctggggccctgcgggcggggagagctcgagatggaaacaaaatgtgtctttatttatgtttttaatttgaattctggaactggcccagcatggtaataca

SEQ ID NO: 982491 - DNA, 120 bp, Artificial Sequence
  ENSG00000269821_292 (sequence is synthesized)
tttaacatcagtagaatgctgaagaaaaatggaaatgttttttggtaactgcctcccacccactctgccccctgtgagaccccagcacacatccctgtccctcacacacaccagggcgtg

SEQ ID NO: 982492 - DNA, 120 bp, Artificial Sequence
  ENSG00000269821_293 (sequence is synthesized)
tgcctctcttcccagttcagggtccatggggccaggctgcccacaggagcttcgctgcatccctgagcagctggagccgaatttaattatgggcatcactgggcgggctgtgcaggaggt

SEQ ID NO: 982493 - DNA, 120 bp, Artificial Sequence
  ENSG00000269821_294 (sequence is synthesized)
ggaggaatgcagccccaatgcgggcagaagacctgcacggcccccacacccctgccgccaggcggtttgggccctgaggaaacagggtgcccactgctgccagccttctcccccagatgg

SEQ ID NO: 982494 - DNA, 120 bp, Artificial Sequence
  ENSG00000269821_295 (sequence is synthesized)
agtggggcctctacccagcctgtatcccagaggagcctgggttcctaggccctgacactgtacgtgcccactctccccttcaggcctctctggagggaccgtaccctgacttctgaggat

SEQ ID NO: 982495 - DNA, 120 bp, Artificial Sequence
  ENSG00000269821_296 (sequence is synthesized)
gcaggaacccagctcccctgaagcctcagccctgagtcttccctgaccagaacacaatgcctcaaggtggcccctttgcagcaacctccttgtttttccctctcccagtcccctcttcag

SEQ ID NO: 982496 - DNA, 120 bp, Artificial Sequence
  ENSG00000269821_297 (sequence is synthesized)
atccctcaccccaagccccatgcctgggctccttcctgccttcccaggctggctcatatctagcagccacttttggaacagcctgctctgagagaggccttggtaagttacagggcaggg

SEQ ID NO: 982497 - DNA, 120 bp, Artificial Sequence
  ENSG00000269821_298 (sequence is synthesized)
acctggttgggtaatgactggagtctctgacctgcctgggcccacttatcactggaggccatgggagtgccaacctgaaaaggctgcaggatcttgcagaatggtaatgtgccagaccca

SEQ ID NO: 982498 - DNA, 120 bp, Artificial Sequence
  ENSG00000269821_299 (sequence is synthesized)
aagtgggcagagagcttggggatggatgttcaggtctctcaggccctgtcatcctggagtggaacaagaaacagcccagtgtcctagatgacacagccacactggcttggggtcaccctt

SEQ ID NO: 982499 - DNA, 120 bp, Artificial Sequence
  ENSG00000269821_300 (sequence is synthesized)
gggcaggtgggtaacctctggctccagggagcttggcatgtgctgataccagcactggcagccctcacccccatagtggtgatttactgggcagctgcaagtttggctgtgatccacata

SEQ ID NO: 982500 - DNA, 120 bp, Artificial Sequence
  ENSG00000269821_301 (sequence is synthesized)
agtgcctggtctctcaccaccttcacctgcaggggccttgcaagacccaagagttggtaaggcctggctgcccagctagatggactgtgggtgatggccctctcctcccagtaggacttt

SEQ ID NO: 982501 - DNA, 120 bp, Artificial Sequence
  ENSG00000269821_302 (sequence is synthesized)
ttgcatgtctggatgctggtccgtgaccaagagaaccaaggtgagcgagagctccaacaggagaagcaagcagccagaaggatgagaagggacagtcccctctctgaggggacagccaag

SEQ ID NO: 982502 - DNA, 120 bp, Artificial Sequence
  ENSG00000269821_303 (sequence is synthesized)
aggcaatacaggcactgccacctgtattgcacacaacatgagccactaaactaacactgatcactttggaggtccatcatatccaggacttggtacaggccttggccacagtgtaagcca

SEQ ID NO: 982503 - DNA, 120 bp, Artificial Sequence
  ENSG00000269821_304 (sequence is synthesized)
tcattctgccttctggtgctgacctgtacctgggcagcccatctggctaccagcctgctcacacctctgctcctgcctttttacccagccaggaggggcccagaagctcagagccctatt

SEQ ID NO: 982504 - DNA, 120 bp, Artificial Sequence
  ENSG00000269821_305 (sequence is synthesized)
ctcagggtgtccatgactagtcacccctgctttccagtgatctgctggctcccttggagcctcttcacaccctacccaccatgaggtactgccaacctctctgtgaactgggggggcctg

SEQ ID NO: 982505 - DNA, 120 bp, Artificial Sequence
  ENSG00000269821_306 (sequence is synthesized)
gaaagacagtgggcaggtcctgtctgatcataattaccccttaagatagccactccttccctggaggtggcctcattctggctacccaaccctgccagttctctggttacacctgcagcc

SEQ ID NO: 982506 - DNA, 120 bp, Artificial Sequence
  ENSG00000269821_307 (sequence is synthesized)
cccagcaccatgggtcccgatttcctcagtgatttgcaaggccaggccttgcacctggctggctgcaaaggcaggaggcccagggcctcactacgacaaagacacacatggctcaggaca

SEQ ID NO: 982507 - DNA, 120 bp, Artificial Sequence
  ENSG00000269821_308 (sequence is synthesized)
acctcctgacccccagagagtccaaagaacaaaacaccctttagaaaaatgttggtagagagaaggagagtttccacaagtgaccctcagaagggccgcgagtgtcactcacagatcttg

SEQ ID NO: 982508 - DNA, 120 bp, Artificial Sequence
  ENSG00000269821_309 (sequence is synthesized)
acacaaagacatttatcaaggggaatccccaacgggttagcagccagaatgggactgtggccagaatggacttgggtgccccactgaccccgctgcacggctgtcaccgctgggcacccc

SEQ ID NO: 982509 - DNA, 120 bp, Artificial Sequence
  ENSG00000269821_310 (sequence is synthesized)
agcggggagtcacatgtcgcaggggaatcacaccgtggccgggcaccggggattggcctggccatgccgtgacggcgggggaggacgggcatgcatcccaggccagctgtgcctcagggg

SEQ ID NO: 982510 - DNA, 120 bp, Artificial Sequence
  ENSG00000269821_311 (sequence is synthesized)
aaggccaactggaaggcgtggaaaatcagccatttcctccacctgaaggagcccctgaggacagcagcagcaactggcagactgcacccggcatctgccccatggctttggccagggttc

SEQ ID NO: 982511 - DNA, 120 bp, Artificial Sequence
  ENSG00000269821_312 (sequence is synthesized)
catggggaaatgctaaaaaacaaagtcgtctcttttttggggggcaggggagggggctgggggagagaaaaacaatctcagactctcaaagcatgaaaacaagtggaaaatgatcagtct

SEQ ID NO: 982512 - DNA, 120 bp, Artificial Sequence
  ENSG00000269821_313 (sequence is synthesized)
ggttttccataagtcaaaacaagaggatcatgttcccaggctcagtgggaagtgcccttgctctcctctcttgcctggtgcctccgtgttggggccaggcagacggcaagtggtgggcac

SEQ ID NO: 982513 - DNA, 120 bp, Artificial Sequence
  ENSG00000269821_314 (sequence is synthesized)
taggcgagtagatagcactctggccagagagcaaggcttccccagcaccaagtctgactccttgagctccagtcccctccagcccagcccttcacgcacatgtaggcactcactgtgaga

SEQ ID NO: 982514 - DNA, 120 bp, Artificial Sequence
  ENSG00000269821_315 (sequence is synthesized)
tgtgggtgatgggtgtcagcagagtctccccttccaggtccaggtcctcggcgaagctgttggttctcatgaaatggggcatgctcacttccagcagtgttgggctcttccttactgagg

SEQ ID NO: 982515 - DNA, 120 bp, Artificial Sequence
  ENSG00000269821_316 (sequence is synthesized)
agaaagtgtggggacagcacgttaggcctcccacccaacctgccagtgctgtggagccaggcctgtgagctcccagggccaggtgaggagtggagcttgtgcctggaagctccagccctg

SEQ ID NO: 982516 - DNA, 120 bp, Artificial Sequence
  ENSG00000269821_317 (sequence is synthesized)
acaatcagttttatagttgggtgttggggtgggtgggtgtttaagatggccccaaagtgcctgacacctcagtgtctgaggagaataaaggccagtgaatcatcttcggagtggtaactg

SEQ ID NO: 982517 - DNA, 120 bp, Artificial Sequence
  ENSG00000269821_318 (sequence is synthesized)
tgcctggggctgtgctcaggtgtccaagactctccccacctcaggttctgggcctcttcccatgttcacaactgacacttgggtcaagaataaaacagaggtgacaggcacaggcctggt

SEQ ID NO: 982518 - DNA, 120 bp, Artificial Sequence
  ENSG00000269821_319 (sequence is synthesized)
aagggacaacagctcccaccaccatacattgtcacactcatacattgacagagtagtgggtcaggaaagatggggtgataggacctctgacccatgaggaatggcaagcctgggaggtgg

SEQ ID NO: 982519 - DNA, 120 bp, Artificial Sequence
  ENSG00000269821_320 (sequence is synthesized)
gggcagccacagaactccttcctcaaaacacgatgctacatcaaccagttgtacccccaatgaggcacaggagtccctccaacagctggcttcacattatgattcctgggcccacctctg

SEQ ID NO: 982520 - DNA, 120 bp, Artificial Sequence
  ENSG00000269821_321 (sequence is synthesized)
caactttgacacaggagctcaggatactgatccttatcactccccactctctgttgacactatcagtatttgctcttggcttatatttgtcttcatttaaatattttattgcaaaaggat

SEQ ID NO: 982521 - DNA, 120 bp, Artificial Sequence
  ENSG00000269821_322 (sequence is synthesized)
taagtactcatctgtgagaagtggaataattcaaagattcacaatggctttcctcccccaaggtcatcagtgttaactgccaactagatccctagcccaccctctctgctcatccgagca

SEQ ID NO: 982522 - DNA, 120 bp, Artificial Sequence
  ENSG00000269821_323 (sequence is synthesized)
gcagatgccaggtgggagttgcttttatgcacatgggatgtcactgtgactctgttcctgtcactctgtaacataagctcatttcatttttctctaggtatataggcatggatttaatta

SEQ ID NO: 982523 - DNA, 120 bp, Artificial Sequence
  ENSG00000269821_324 (sequence is synthesized)
ttttagtcattacataatagtccacagtttagattggccacagctaaccattctgtatatcatggacattcaggctcttatagttttaagctgcttaattattcagactatgatgccata

SEQ ID NO: 982524 - DNA, 120 bp, Artificial Sequence
  ENSG00000269821_325 (sequence is synthesized)
ttcatctttattcttaaaagctgacatactggagcagggtgagagggtgtgtccttagtaattttaataaatgttgctagattgctttcccaagaagttgtagcaattcaggctccccca

SEQ ID NO: 982525 - DNA, 120 bp, Artificial Sequence
  ENSG00000269821_326 (sequence is synthesized)
gctttcccacatccatgcctgaatgaagtgttgaatgaagcccgaatgaaggttgtcagcaccttttgcagggactatcaagcatggatgaaaactgaggcattgctgttatttccatct

SEQ ID NO: 982526 - DNA, 120 bp, Artificial Sequence
  ENSG00000269821_327 (sequence is synthesized)
gtgttgaataccttttatgggcttggcatctgtttgggtttcctcttgcagaattgcctgttcatgtcctttgctcacttttgcttatcactttgtaggaattttctatacattacagac

SEQ ID NO: 982527 - DNA, 120 bp, Artificial Sequence
  ENSG00000269821_328 (sequence is synthesized)
attaactccttgttatatgaggcatagatagcttccccagtctgttttttcacctgaattatgttgcttttatcctagaaaatgttttatgtttttaaagtgatacatcttttgctttat

SEQ ID NO: 982528 - DNA, 120 bp, Artificial Sequence
  ENSG00000269821_329 (sequence is synthesized)
aaaaaaggaaggttttcccacatcagcgtaatacaattctctcttaaatttattcctaatttcactatttgaatgtgttgtatgtatacatatgtatgtgtgtaaaagttttaatgcatt

SEQ ID NO: 982529 - DNA, 120 bp, Artificial Sequence
  ENSG00000269821_330 (sequence is synthesized)
tagtatctatgcctgataggacagatgatcaacaattagaaaatgaaaatttaaagggtactacatacaaacttactgaaaaaaaatctaaaataaaacataaaaccataaaatatcttg

SEQ ID NO: 982530 - DNA, 120 bp, Artificial Sequence
  ENSG00000269821_331 (sequence is synthesized)
aagaaaacataagagaaaatctccaggaccttggatttggcagtgaattctgaaatacgaaaccaaaagtttaactcgtaagagaaaaagaatcaacaaattggactttatcaaaattaa

SEQ ID NO: 982531 - DNA, 120 bp, Artificial Sequence
  ENSG00000269821_332 (sequence is synthesized)
aagcttttgctgtgcaacagacactgctaatggaatgaaaagacaaagcacagacttggaaagaatatttgcatatcacctatcaggtcaaggacttgcactcagaatatataaagaatg

SEQ ID NO: 982532 - DNA, 120 bp, Artificial Sequence
  ENSG00000269821_333 (sequence is synthesized)
cttacaacttgacaataaagtgaacaatccaattttaaaaatggattataaataagcacatgaaaagatacataattaacataaatatggaaatgcaaattagaatcacaatgaaattcc

SEQ ID NO: 982533 - DNA, 120 bp, Artificial Sequence
  ENSG00000269821_334 (sequence is synthesized)
ataaattaaaaaaaaaattcaaaacctgacaataccaaccactcttgaggatgtggaacatgtagaactctcatatgttactggtgggaatgcaaaatggcacagtgactttaggaaata

SEQ ID NO: 982534 - DNA, 120 bp, Artificial Sequence
  ENSG00000269821_335 (sequence is synthesized)
gtttagcaatttcttattaagttaaacatacacataccacatgacctatcggttcctttcccacccaagtgaattgaatttttatgttcgcaaaaacctgtacataaatgtgtatagtaa

SEQ ID NO: 982535 - DNA, 120 bp, Artificial Sequence
  ENSG00000269821_336 (sequence is synthesized)
ctctgctcataattaccaaatactggaaacaatgaagatgtccttcaacaggtgaatgcataaacaaaatgtatatattcatgcaatggaataccacccagcaataaaaagaaattaact

SEQ ID NO: 982536 - DNA, 120 bp, Artificial Sequence
  ENSG00000269821_337 (sequence is synthesized)
aatgatttatgcaacaacatggatgaatctcaaatgcattttgctaagcagtgaaagaagccagatgcaaaagaatacatattataggatcccatttataggacattctagaaaaacaaa

SEQ ID NO: 982537 - DNA, 120 bp, Artificial Sequence
  ENSG00000269821_338 (sequence is synthesized)
actacagggacataaaacagatcaatagctgccagtggttaggggagaagtacttgacttcaaaagactcaccccagggtatttttaggggtatggaacttctgtgaatgatactggatt

SEQ ID NO: 982538 - DNA, 120 bp, Artificial Sequence
  ENSG00000269821_339 (sequence is synthesized)
gtggacacatgactccagacatctgtcaaaacccacagaactgaatctcaaagagtggattttactgtatgcaaatttaaaaaattaacccggatgttggaggaccctacgatgaaaagc

SEQ ID NO: 982539 - DNA, 120 bp, Artificial Sequence
  ENSG00000269821_340 (sequence is synthesized)
agactatgatgagcgtgttacaaacaaatgacatagcagtgaaaggaaaggaggaggaggagctggcatatgttgctttcaaaaacactgttttgactggacactctatggttaaagcaa

SEQ ID NO: 982540 - DNA, 120 bp, Artificial Sequence
  ENSG00000269821_341 (sequence is synthesized)
aagtctgtcctaaacactctaatctagtaggtaaatttgcttcacatagggtactacgtgtacaatagggttacacaaataagtaaatgaactgtaggtaatgggagccaggtttctagc

SEQ ID NO: 982541 - DNA, 120 bp, Artificial Sequence
  ENSG00000269821_342 (sequence is synthesized)
tgtcagagaaaaagctataaataagttgtgggggagggggcaaggatgaactctggtcagaaatgtcagtatgaactcatggttagctttatatagatacagatatgtaaagatgtatgt

SEQ ID NO: 982542 - DNA, 120 bp, Artificial Sequence
  ENSG00000269821_343 (sequence is synthesized)
gtactcaggttacatacatacatatatttcctagctctgtccactgagaggagactgaagcaatgataccctagtagccacgagcataccccgtgcctagatccaggttttctattcatt

SEQ ID NO: 982543 - DNA, 120 bp, Artificial Sequence
  ENSG00000269821_344 (sequence is synthesized)
ctccagggagccagggctctctggatgaatggatgattctagggctagggtagggaaaataaaagatgagcctgaagtattgtcaagtgctagaaaagaaatgcttaaaaataaatgaaa

SEQ ID NO: 982544 - DNA, 120 bp, Artificial Sequence
  ENSG00000269821_345 (sequence is synthesized)
aggatggcggggggcacatcaaaaggacacatgaacccaccagtggccacagcttgaacaatttgagcaacaaaataaataatattggactataactcaaaaaataaatactcccaaatc

SEQ ID NO: 982545 - DNA, 120 bp, Artificial Sequence
  ENSG00000269821_346 (sequence is synthesized)
cacactgataaaattaaataaacaattggaggagagggacaaatcttccttataaaggaattccaaataaaaaatgtagaaggaatgaggaaaatagaagtacatcacggtaatatttgc

SEQ ID NO: 982546 - DNA, 120 bp, Artificial Sequence
  ENSG00000269821_347 (sequence is synthesized)
tgcaggaaaacgatccatgaatgaatgctgaaattagttagtgaaactcagaaacttcacagtttcttccttgaaatgtattttaattgctgtggtagttttaacatatttgcagatttt

SEQ ID NO: 982547 - DNA, 120 bp, Artificial Sequence
  ENSG00000269821_348 (sequence is synthesized)
ttttgatactctcctgcaggaggtagagttgaacccctcccttccccaccttgagtgtgggctatacttagtgactcgcttctaaagactaagctatggaaagggaaaaacagctattca

SEQ ID NO: 982548 - DNA, 120 bp, Artificial Sequence
  ENSG00000269821_349 (sequence is synthesized)
cttacagtggaggagcctggccgacaccactttaaacgagtggctcaaggttaatattaccagtgataaaccatgttgatgtcatgttccacaatgaggaaagcatctcacctcactggc

SEQ ID NO: 982549 - DNA, 120 bp, Artificial Sequence
  ENSG00000269821_350 (sequence is synthesized)
ctccttcccctaaacctataaccctggtctagtcctgagaaaacaccagacaaatccaaactgagggacaatgacacctgactggtattcttcaaaagtgtcaagttaatgaagaacaag

SEQ ID NO: 982550 - DNA, 120 bp, Artificial Sequence
  ENSG00000269821_351 (sequence is synthesized)
actgagaagcccgtcaccgatcagagatgacaataaatgtaatgatcgatcctagatgggatcttggaacagaaaaaggacattagtagttaaactggggaaatccaaataaatttataa

SEQ ID NO: 982551 - DNA, 120 bp, Artificial Sequence
  ENSG00000269821_352 (sequence is synthesized)
ctctagcttaatagtgtaccaatgttaattttttagttttggtcaatgtaccatggttatataagatgctaacattaggggaagctggtgaaagggatgtgggtactcggtactattttt

SEQ ID NO: 982552 - DNA, 120 bp, Artificial Sequence
  ENSG00000269821_353 (sequence is synthesized)
gtttctcttctgtaaataaaaaatgtgaggtaacaagagaaaacagaacctgtatacaatagcacaaaagaatattaattatctaactaagtatatgcaagaactctggagaaaattgta

SEQ ID NO: 982553 - DNA, 120 bp, Artificial Sequence
  ENSG00000269821_354 (sequence is synthesized)
aaactttagtaagagacaatgaagaagatataaatggagaaatatgccttcattccaatgactagaagactcaatactgaaaagattatctcaaaatctgaataaatctctccaaatctt

SEQ ID NO: 982554 - DNA, 120 bp, Artificial Sequence
  ENSG00000269821_355 (sequence is synthesized)
aataaaaatctcaaggcttctgtgtgagaactttggcaagctgattctaactgcgacttggaagtgcaaaaagccaagaattggcaatattcttgaagaagaacaaggtgggagaacttg

SEQ ID NO: 982555 - DNA, 120 bp, Artificial Sequence
  ENSG00000269821_356 (sequence is synthesized)
ctgtaccaaacatcagtacttcttccaaggcagtggtcattagggcaatgtggtattgacacagggagagacaaataggccaatgggacaggattgagcattgggaaacagcccacacaa

SEQ ID NO: 982556 - DNA, 120 bp, Artificial Sequence
  ENSG00000269821_357 (sequence is synthesized)
atatggaagcttgctgtgtatcagaggtggcctgcacatcctgggaagagcatggacttttcaatcaaatgttcaggagcagttggatacccacactggaaaaacattaagttggaccct

SEQ ID NO: 982557 - DNA, 120 bp, Artificial Sequence
  ENSG00000269821_358 (sequence is synthesized)
taattacctcacatcatataccaaaaattcattcttgtcattctaggggattgaagacctaactatgaaaagcataactataaaggtcacatgactgaatatagaagaatatcttaatga

SEQ ID NO: 982558 - DNA, 120 bp, Artificial Sequence
  ENSG00000269821_359 (sequence is synthesized)
catcagcattaggatggttttttttaaaagaagcaataaccatgagagagaagactgagtaatttgacattagagttaagacccaatcatcaaaatacaccttaaagagtgaaaagacag

SEQ ID NO: 982559 - DNA, 120 bp, Artificial Sequence
  ENSG00000269821_360 (sequence is synthesized)
tgcccacaaaatgcaaaggactcctacaaatcaataggaaaaatataaatgacttaatagaaaatgggcaatagacaaagtagcacatcacaaaagaggaatccaaaaggctgatgagca

SEQ ID NO: 982560 - DNA, 120 bp, Artificial Sequence
  ENSG00000269821_361 (sequence is synthesized)
tgtggaaaggtgttgcgcctgactagcaatcagggaaatgtaaataaactcaggagctcatggcccgtgggggcgagtggcagacttccagcaggaaaccacacagacattacttagtca

SEQ ID NO: 982561 - DNA, 120 bp, Artificial Sequence
  ENSG00000269821_362 (sequence is synthesized)
cagccaggagaagggctcagagtgaaagggctctgtgcccatgacatccttagagagaccagggaaggacctgtaaggcttgaagaatgtgcagatttggagacccacaggtctgggacc

SEQ ID NO: 982562 - DNA, 120 bp, Artificial Sequence
  ENSG00000269821_363 (sequence is synthesized)
tggcagaagcatgttactgcccccattttagagatttggggctgagattcaagtaccctaggttatataatgcagttgtcaagtgacagagctaaaacttcatccaggattcaatttttt

SEQ ID NO: 982563 - DNA, 120 bp, Artificial Sequence
  ENSG00000269821_364 (sequence is synthesized)
ttaaaggaaggaagaaagaaaaaacatattttgatgtttgcatcacttgtatgtagaaggaacgatggagcacaggctagaacgtagagttgctttccaaacacccatgatgacaagtgc

SEQ ID NO: 982564 - DNA, 120 bp, Artificial Sequence
  ENSG00000269821_365 (sequence is synthesized)
ccatctccaaagcctgagggccaagggtgagccacctgacccctgaggaaggttctgtcctggtgttttaggaaattaaaatgtgcacatcagttggctgcccagagtgggtgggacctg

SEQ ID NO: 982565 - DNA, 120 bp, Artificial Sequence
  ENSG00000269821_366 (sequence is synthesized)
cacctgccagagaggaatgtgtgctttttggtttaatcctgggaacggcatatggggcccctataacaaggggcagagaaggcctccacagatttgtttttccaattcaagaggagaggt

SEQ ID NO: 982566 - DNA, 120 bp, Artificial Sequence
  ENSG00000269821_367 (sequence is synthesized)
tattgtctgctggcttgtgtgttggagactgtggggcgtgctttctccaccacagggaggcagtgaccagagctgccacctcttccctgttttcacctgtggtcgtagccaggtcaggca

SEQ ID NO: 982567 - DNA, 120 bp, Artificial Sequence
  ENSG00000269821_368 (sequence is synthesized)
tctaggagagcatggaggggagctgggggtgggtgggtggggattcagctctttccagacacactggtgctgcctctttcaggccagggcttgagggcaagtgctgtgccctaacaggtc

SEQ ID NO: 982568 - DNA, 120 bp, Artificial Sequence
  ENSG00000269821_369 (sequence is synthesized)
ttgcttgtcacccccacctctgaagtgggtatttcacagcctgaactcacagctgcagagaaggttgagcccatggtgtacttgaaagggcagttcatctggatatccaggctctgcagg

SEQ ID NO: 982569 - DNA, 120 bp, Artificial Sequence
  ENSG00000269821_370 (sequence is synthesized)
aggtaccggagcaatgccaggtgccctttgctgaactgcctagagtggctggccctggggacaaagagcacagcatcctggtgacaatgaagtcacactttcctaagacagtcctggttt

SEQ ID NO: 982570 - DNA, 120 bp, Artificial Sequence
  ENSG00000269821_371 (sequence is synthesized)
ttgatgctttaattctttggctgcctttgctttgtcaaggccaggatctgggcctaaattttcagggcagaacaaaacaattttgttttctaggaaagtgggaggtctgggatggcaaag

SEQ ID NO: 982571 - DNA, 120 bp, Artificial Sequence
  ENSG00000269821_372 (sequence is synthesized)
gcagcctcgggcgtggcgactaccccagctggggacgctggctgccaagtctcaccctctcaagagaacaggaatcaaactcagcacagcatcctcctttctagtcagtggtcctgctcg

SEQ ID NO: 982572 - DNA, 120 bp, Artificial Sequence
  ENSG00000269821_373 (sequence is synthesized)
atagggggatttgaattttatttttttaaaaatacaggcacagaaaaaagactagaaggaaacagatccaaatgttaactttgtctttgggtgattttcatttccttccttattgtgtct

SEQ ID NO: 982573 - DNA, 120 bp, Artificial Sequence
  ENSG00000269821_374 (sequence is synthesized)
gtgttttctattttgcatgatacttttccaagtcaagaaacaataatttgtggaagtctcctgtatctgtgccttgctctctggcccacgaccttgcacatcttatcctagagttgccag

SEQ ID NO: 982574 - DNA, 120 bp, Artificial Sequence
  ENSG00000269821_375 (sequence is synthesized)
aatatgtccctccacctggcctggagctgcccatgaggctacatagagctctcctatcatgaaagtctttgaggctttctgttcccaagaaattctggtctcacttcctctgccttctca

SEQ ID NO: 982575 - DNA, 120 bp, Artificial Sequence
  ENSG00000269821_376 (sequence is synthesized)
tcgagccccagacccctccctgcccagattaggtcagcattcaagccccaagtccagcctatgacaaagctcaaagctccagcccatctctgctgccctctgccctcaagagactctcgc

SEQ ID NO: 982576 - DNA, 120 bp, Artificial Sequence
  ENSG00000269821_377 (sequence is synthesized)
cagtgtctgggcccttcctagtaacttcacccaaccactcaccccctgcccttcccctcctgattgattaaaatccggcctaatctcccaggtgtaacccaagccctcttccacaagctt

SEQ ID NO: 982577 - DNA, 120 bp, Artificial Sequence
  ENSG00000269821_378 (sequence is synthesized)
tccagggctccggagattgccccctcccctgtacggctgcagggcttatgtgtgcctggcgctcagcacgggaaccttgccttctgcctcacccatgtctccccagggtttggcacaggc

SEQ ID NO: 982578 - DNA, 120 bp, Artificial Sequence
  ENSG00000269821_379 (sequence is synthesized)
gagttccctgagccagcctacttcacaaggatgaacagaagctctccctatcctttgcaagtagaagccccctccctggccccctcaagaaatctccccctctcagtggattcaccaaag

SEQ ID NO: 982579 - DNA, 120 bp, Artificial Sequence
  ENSG00000269821_380 (sequence is synthesized)
agctgcccatgcccggctcatagaccctgagccagagtggccccgccaccacctgtgtctccactcagaggcgagaagtaagggacatggatggaaagtgtaaaagccattcccacaaca

SEQ ID NO: 982580 - DNA, 120 bp, Artificial Sequence
  ENSG00000269821_381 (sequence is synthesized)
gctgccaggaacaaggcgaggaatggagtgaaaatgtatattcacagctggcacccagttccgcttaggaaaataccttgcttgagtggacacctgttgtttttgcctgccagcagccag

SEQ ID NO: 982581 - DNA, 120 bp, Artificial Sequence
  ENSG00000269821_382 (sequence is synthesized)
gcctggcttctgggaacagcttctcaaatcttccttagggggctcttcctttcccactcctagtgtgcagtgtttaggtaccctctggccatccccaaaggggtccctgtggaccttgcc

SEQ ID NO: 982582 - DNA, 120 bp, Artificial Sequence
  ENSG00000269821_383 (sequence is synthesized)
tcagccatcggaggtacagctgcaggtccaaggatggcttgtaccccagctgaggccaataagaacctggccttagattctggcaggaatcctggaagagatgacctcgttctgctgggc

SEQ ID NO: 982583 - DNA, 120 bp, Artificial Sequence
  ENSG00000269821_384 (sequence is synthesized)
ttcctgagctgttgaatgcaagctggtggccattttgccccttttagaaagtagctgcctaaggatacagccatcccatggggccaatggatagagagcaagggaaagggagaacaaaag

SEQ ID NO: 982584 - DNA, 120 bp, Artificial Sequence
  ENSG00000269821_385 (sequence is synthesized)
agggaacgggaagggagaaggggagtgcaagaggggagagtgagagcaagtgagcaagatcatctcagctctggggtccagctgtgtctgaaacagctgggtccagctgtgtgagccaaa

SEQ ID NO: 982585 - DNA, 120 bp, Artificial Sequence
  ENSG00000269821_386 (sequence is synthesized)
aaatgtcccttttgtgcttaagcttgtttgagttggggttccatcatttgttaccaagagagtcttcaggaatgtgcatgacaaagttgggggtgaggtgtgagcctacggacatgggcc

SEQ ID NO: 982586 - DNA, 120 bp, Artificial Sequence
  ENSG00000269821_387 (sequence is synthesized)
tgggggcagtcaaggttacaaaatagctaaactggtctgcactgcccccactagttttcagggcagagggcagggagaaggcttgtgggaaagaagctggcctgaggccaaggccctggc

SEQ ID NO: 982587 - DNA, 120 bp, Artificial Sequence
  ENSG00000269821_388 (sequence is synthesized)
cctagccctgcaacagcacagggaactcttggaaagggatttcctaaggtgggacattggctttctactgctgtgatgcaagtcctcatctccccaaaccttcagtgagcctctctccac

SEQ ID NO: 982588 - DNA, 120 bp, Artificial Sequence
  ENSG00000269821_389 (sequence is synthesized)
accctgctgtatgaggatgtttgatgcaaattatggaacatgttggatctcacattggatcaaaggtgtgcagaatagatttgcctcaagcatgacagtgatgtgacacagtcaaagatg

SEQ ID NO: 982589 - DNA, 120 bp, Artificial Sequence
  ENSG00000269821_390 (sequence is synthesized)
acttccggaatcctgagaagtcccagggaggatgctgggctttccaaaacctaagtttaggatactgaggaccacaccccacaccccaaacacttctccttagaataagtatagcaagcc

SEQ ID NO: 982590 - DNA, 120 bp, Artificial Sequence
  ENSG00000269821_391 (sequence is synthesized)
tcagcatacacaaatctcagagtgaacggaaatgtctctgcaggcccaagggtggggtctgagtagcgggggcgctgaggaagacaggcagtgacagagccaggacagggtcaaccctga

SEQ ID NO: 982591 - DNA, 120 bp, Artificial Sequence
  ENSG00000269821_392 (sequence is synthesized)
gcgtgagtgagcccaggaaacggaaagagagcaacacagccacccacacaactaaaatcgacccacccgggtctccatgctgcaggaagtcactgtctaggtctcccaagacacattttc

SEQ ID NO: 982592 - DNA, 120 bp, Artificial Sequence
  ENSG00000269821_393 (sequence is synthesized)
aggggaaggttccaggcagcaagagcagccctaggaaactttaatatacaatggaatctgggttaagcactatcttctccaagagttgagctcacaggacattccccagaaacctctgga

SEQ ID NO: 982593 - DNA, 120 bp, Artificial Sequence
  ENSG00000269821_394 (sequence is synthesized)
gaggtggggaggaaagtttctggaggtctttggatggagaaaacaaaaaagtggccttgattttcaagacaaaattacacaggaagaaaaaaatgtttttaatctaattaagagcgatct

SEQ ID NO: 982594 - DNA, 120 bp, Artificial Sequence
  ENSG00000269821_395 (sequence is synthesized)
tttcaccttcatcacaacatcgcggaaatgtgccagttcttaacttcacacaataatcaaagcaattagtgagggagaagccttggaaaccggtgcagatgttctcagaatgtttaatgg

SEQ ID NO: 982595 - DNA, 120 bp, Artificial Sequence
  ENSG00000269821_396 (sequence is synthesized)
ggaaatgagttgcaggcctcattctcagcatccggctccaggccctggctaccaaatccagacatctgctggggccccacccccaggccccgagggcgcgggcttgagaaacacaggtcc

SEQ ID NO: 982596 - DNA, 120 bp, Artificial Sequence
  ENSG00000269821_397 (sequence is synthesized)
cttcccaggccacctcccagccaggccagaactggggccgagaggctccccatagcttctcaaattggagcctggacacagtcagagccaccccagaactggggggaggctcaacatcaa

SEQ ID NO: 982597 - DNA, 120 bp, Artificial Sequence
  ENSG00000269821_398 (sequence is synthesized)
aattatgttaacaactgatgtcaaaagtaatcaactcagcttggctcccccactgctgctggctgcaggagggctgtgagtaggaggagagcaagcggccccagagggaccctcggctat

SEQ ID NO: 982598 - DNA, 120 bp, Artificial Sequence
  ENSG00000269821_399 (sequence is synthesized)
gaccccctcagcctgaacactacttcaagaaaagatgtggtggcatctgtctggtatggtcctgtgggctccattccaatgctaatggactcttaaggggcccaggaatcaaaatggtca

SEQ ID NO: 982599 - DNA, 120 bp, Artificial Sequence
  ENSG00000269821_400 (sequence is synthesized)
acacttgaggaatttccagtaatcagagaaaacgtatagaaatgaggatgatgcttacttaggaaatggcctattacaggaaacagagggccacgtggctaatgtcagtgagctgtggga

SEQ ID NO: 982600 - DNA, 120 bp, Artificial Sequence
  ENSG00000269821_401 (sequence is synthesized)
gagacagagaccccaggtggggcaggcagatcagcaaatcttggaggacctgctatgtggcaggcactggagacatggaggtaaagaacacaatatccatgttctcagggacacactcat

SEQ ID NO: 982601 - DNA, 120 bp, Artificial Sequence
  ENSG00000269821_402 (sequence is synthesized)
atgcccttagcattcacgttcttcacactgacagcttcttaatgcaagcccaccagatactttcataagcactacctctgacttcaggcacttgctgagctgcacacagggcaggccaaa

SEQ ID NO: 982602 - DNA, 120 bp, Artificial Sequence
  ENSG00000269821_403 (sequence is synthesized)
aggaatggaaagtgagccaccaccggggcagcactcactagtgaaagataaataccccagctctctcagccgcttgtagaactctgaggagtgttctgtgcagcttcccagctgcccacc

SEQ ID NO: 982603 - DNA, 120 bp, Artificial Sequence
  ENSG00000269821_404 (sequence is synthesized)
atgaagctctttctcaataagtgaccagcacagcttaattcctgaattaagctgtgtgtgctgtgagactgacacaagacagggtgacaggaagctgtcggaacatttgagtagggaagc

SEQ ID NO: 982604 - DNA, 120 bp, Artificial Sequence
  ENSG00000269821_405 (sequence is synthesized)
agcaagatccactgtacatttaaagaactcccttgagctgttatgtgaagaatggagtacaggaagcaagagtggaaatcaagagaccagtaatgaggtatggacaacaatgtaggcaga

SEQ ID NO: 982605 - DNA, 120 bp, Artificial Sequence
  ENSG00000269821_406 (sequence is synthesized)
gaaatggtggtggttttaaccagggagatagctggagagactaggtgtgggcaaatccagagagttgataagacatactgatagattagaaaggggtactaagaaaaaaggataatttaa

SEQ ID NO: 982606 - DNA, 120 bp, Artificial Sequence
  ENSG00000269821_407 (sequence is synthesized)
aaaagactttcagccaggcttggagaaaaatagcatgctgctcctcatcccctctgactataaatcatctcactcatcctcccctaaaagcataaaatcagtaagtgcaaataaaaccac

SEQ ID NO: 982607 - DNA, 120 bp, Artificial Sequence
  ENSG00000269821_408 (sequence is synthesized)
atgacccatgctgttagcagtattaggagaaagaataccttcaaattgcctgtgggtagcaaagtgagccaaattccaatagcattctagtcccctgcccagcactgcaaaactgcatac

SEQ ID NO: 982608 - DNA, 120 bp, Artificial Sequence
  ENSG00000269821_409 (sequence is synthesized)
agaatcagagaagaggcttaaaatgctttgtcaaaaagtttgaaggtagttagcaacatcagcaaaaatagaggagtaagtacctctaaggagccttcttgccttcacagacatcctaag

SEQ ID NO: 982609 - DNA, 120 bp, Artificial Sequence
  ENSG00000269821_410 (sequence is synthesized)
caccaagcagcctaagccactgatgaacttgcagataccactgatgtggattatagtctaattaattgtagagacaccacacttctgcactgaaccagaaccaaagccaaagcaccctac

SEQ ID NO: 982610 - DNA, 120 bp, Artificial Sequence
  ENSG00000269821_411 (sequence is synthesized)
ccaaatgatactacagacgcgtgtacaggaaaagtccttactaaggctactccataaaattggaagtctctgttattccagatatgcagatatcaacttggggacacaaaaaacttgggg

SEQ ID NO: 982611 - DNA, 120 bp, Artificial Sequence
  ENSG00000269821_412 (sequence is synthesized)
ggaaaaaaacaagaaaacatgacttgccaaaagaacacaataattctccaataatagactccaaagtaaaggaaatcttaaggaaacccaatgagatacaagagaacacaaatagacaat

SEQ ID NO: 982612 - DNA, 120 bp, Artificial Sequence
  ENSG00000269821_413 (sequence is synthesized)
acaaacatatcaggaaaacaattcattatctaaatgggaaatccagcagagttagatatgaaaaagaaccaaacaaaaatcctggaggtgataaattaaatgaatgaaataaaaaataca

SEQ ID NO: 982613 - DNA, 120 bp, Artificial Sequence
  ENSG00000269821_414 (sequence is synthesized)
attgaaagcttcaaaagccggctaagtcaagcagaagaaataatttctaaatttgaagacaggtgttttgcaataaaccagacagatttaaaaaataacaataaaaaagaatgaagaatg

SEQ ID NO: 982614 - DNA, 120 bp, Artificial Sequence
  ENSG00000269821_415 (sequence is synthesized)
cctgcgtgacatatgagacactattaagctaacaatatttcacattttgggagttccagaagaagtgttgggataaggaccagaaaatctatttaagaagataatacctgaaaactgcca

SEQ ID NO: 982615 - DNA, 120 bp, Artificial Sequence
  ENSG00000269821_416 (sequence is synthesized)
aagtttgggagagaaagagactaacagataaaggaagctcacaaatccctaaatagattcaaccctaaaagggcctctctgaggcacattttcatcaaactgtcaaaaatcaaagagaga

SEQ ID NO: 982616 - DNA, 120 bp, Artificial Sequence
  ENSG00000269821_417 (sequence is synthesized)
atttaaaaaacaagagagaagcatgaagtcacatataagggaatcaacagcagattaacagatttttcagcagaaaccttctaggccaggaaagaattgaatgccatattaaaagtgctg

SEQ ID NO: 982617 - DNA, 120 bp, Artificial Sequence
  ENSG00000269821_418 (sequence is synthesized)
caaggtggggaaaagctcacaaaattgctagccacaaatactatacccagcaaagctatccttcagaaatgaagcagaatgagggaagaaattttgcctccctcagacaagcaaaaactg

SEQ ID NO: 982618 - DNA, 120 bp, Artificial Sequence
  ENSG00000269821_419 (sequence is synthesized)
agggaattcattactactaaatcagccccacaagaaatgcttaagggagtactacatctggaagtaggaggatgatatctaccatcatgaaactacaaaagcataaaacactagtagagc

SEQ ID NO: 982619 - DNA, 120 bp, Artificial Sequence
  ENSG00000269821_420 (sequence is synthesized)
agatacacaaatgagaaaggaaaaggaataaaagattatcactacagaaaaccaaaaaattgcaaagaaaaacaatgagaggaaacaaaagtatacaaatcagtcagaaaacaataaaat

SEQ ID NO: 982620 - DNA, 120 bp, Artificial Sequence
  ENSG00000269821_421 (sequence is synthesized)
gacaggagtaagtcctcacctattgataacaatcttgaatgtaggtaatttaaatttcccaaatgaaagatagatactggctaaatgaattaaaaaaataaaacccaattacatgctgcc

SEQ ID NO: 982621 - DNA, 120 bp, Artificial Sequence
  ENSG00000269821_422 (sequence is synthesized)
tataagaaactgacttcacctgtaaagacacccatagactgtaagggaatggatagaaaaagatattccacacaaacagacaccaaaagcatgcaggagtagacagacaaaaaatactga

SEQ ID NO: 982622 - DNA, 120 bp, Artificial Sequence
  ENSG00000269821_423 (sequence is synthesized)
aaaaaagaaaaagaaaaaagagacaaaggaggtcattatataattataaatggatcaattcagcaagaagatataacaattatatatgcaaccaacaacactggagtacccaggtatatt

SEQ ID NO: 982623 - DNA, 120 bp, Artificial Sequence
  ENSG00000269821_424 (sequence is synthesized)
ctggagtacccaggtatattaaacaaatattattagtgctaaagagatagaccccaatacaataatagttagggatggcaacatttcatactcagcattggacaattcatttggatggaa

SEQ ID NO: 982624 - DNA, 120 bp, Artificial Sequence
  ENSG00000269821_425 (sequence is synthesized)
aaatatcaacaaggaaatattagatttgaactgctgcttcgttagcacacagcacattctccaggatataccatatgttaggacacaaaacgggtctcaataaatttttaaaagtcaaaa

SEQ ID NO: 982625 - DNA, 120 bp, Artificial Sequence
  ENSG00000269821_426 (sequence is synthesized)
tcttctcagaccacaatggaataaaactggaaatcaataacaagaggaacttctgaaattgaacagatacacggaaatcaaactacatgttcctgaatgaccactgtgtctatgaagaaa

SEQ ID NO: 982626 - DNA, 120 bp, Artificial Sequence
  ENSG00000269821_427 (sequence is synthesized)
tctatgaagaaattgattttaaaaatttaaaaattctttgaaacaaatgaaaatagaaacacagcatacaaaaatgtatagggtacaacaaaagaagtgctatgagggacatttatttca

SEQ ID NO: 982627 - DNA, 120 bp, Artificial Sequence
  ENSG00000269821_428 (sequence is synthesized)
ataaacacccacatcaataaggtagaaagtttttaaacaaataacctaataaacgcatctcaaggaactagaaaagcaagaacaaatcaaacctaaaattagaaggaaataaatagtaaa

SEQ ID NO: 982628 - DNA, 120 bp, Artificial Sequence
  ENSG00000269821_429 (sequence is synthesized)
gatcagagcagatctaaatgaaatagagataaaaggtaaaaaagacaaaagatcaatgaaatgaggcctcccccccaccccccgagacacggtctcactctgtcacccaggctagagcgc

SEQ ID NO: 982629 - DNA, 85 bp, Artificial Sequence
  ENSG00000269821_430 (sequence is synthesized)
gatcttggctcactgtaacctctgctgagtagatgtgcagcaccacacctcgctaatttttttttttttttttggtagagatggg

SEQ ID NO: 982630 - DNA, 120 bp, Artificial Sequence
  ENSG00000269821_431 (sequence is synthesized)
tctcaaactcctggactcaagcgatcggcctgccttggccttccaaagtactgggtttacaggtgtgagccaacaaacccagccaaaaaactgattttttgaaaagagaaaatcaataaa

SEQ ID NO: 982631 - DNA, 120 bp, Artificial Sequence
  ENSG00000269821_432 (sequence is synthesized)
aactgattttttgaaaagagaaaatcaataaaccattagctagactaaccaagaagacccaataaataaaatcagaaatgaaaaaggagacttacaatggacaccacagaaatacaaaag

SEQ ID NO: 982632 - DNA, 120 bp, Artificial Sequence
  ENSG00000269821_433 (sequence is synthesized)
attattagagaccattatgaacaactatatgtcaacaattagaaaacctagaggaaagagataaattcctggacatatataacctcccaagattgaaccaggaagaaaaaaaatctgaac

SEQ ID NO: 982633 - DNA, 120 bp, Artificial Sequence
  ENSG00000269821_434 (sequence is synthesized)
agagcaataacaaggaatgagattgtatcagtaataaagtctcccagtaaagaaaacctcaggattgcacgggttttctactgaattctaccaaacctttaaagaactaacatgaattct

SEQ ID NO: 982634 - DNA, 120 bp, Artificial Sequence
  ENSG00000269821_435 (sequence is synthesized)
tctcagacaattccaaaagactgaagagaaaggaattctccctaactcattctgtgaggcaagcagtatcttgataccaaaaccagataaggacacaataacagcaaaaaagaaaactac

SEQ ID NO: 982635 - DNA, 120 bp, Artificial Sequence
  ENSG00000269821_436 (sequence is synthesized)
aggccaatctccctgatgaacatagatgcagaatcctcagaaacaaaacacacacacagacacacaaactagcaatctgaatccaatcgcacatcaaaaagataatacaccataatcaag

SEQ ID NO: 982636 - DNA, 120 bp, Artificial Sequence
  ENSG00000269821_437 (sequence is synthesized)
tgggatttatcccagggattcaaggatggttcaacatatacaaatcaataaatgtgatacatcacattaacagaaggaaggacaaaaaaatacatgatcatctcaatagatgcagaaaaa

SEQ ID NO: 982637 - DNA, 120 bp, Artificial Sequence
  ENSG00000269821_438 (sequence is synthesized)
gcatctgataaaattcaaaatctcttcatgataaaaaaaaaagctcatcacataatgtctagaaggaacataactcaatgaaggtcatatatgacaaacccacagccacctggggaaaag

SEQ ID NO: 982638 - DNA, 120 bp, Artificial Sequence
  ENSG00000269821_439 (sequence is synthesized)
ctaaacaccttctctcttagaactagaacaagacaaggatgcccactttcactattcttattcagcagagtaagaaaagtcctcaccagaacaattaggcaagtaaaagaaaaagggtat

SEQ ID NO: 982639 - DNA, 120 bp, Artificial Sequence
  ENSG00000269821_440 (sequence is synthesized)
ccaaattggaaaagagaatgtcatattgtcctttgcagatggcataatcttatacatagaaaaacctaaagattccaccaaaatcttttagaactggtaaaggaattcaataaagttgca

SEQ ID NO: 982640 - DNA, 120 bp, Artificial Sequence
  ENSG00000269821_441 (sequence is synthesized)
aataaagttgcaggataaaaaaatcaacaaacaaaaattagtaggtgtggacatgatggctcatgcttgtaatttcagcactttgaaaggatgaggcgggtggattgcttgagcccagga

SEQ ID NO: 982641 - DNA, 120 bp, Artificial Sequence
  ENSG00000269821_442 (sequence is synthesized)
ttgagcccaggagtttgagactgtcctgggcaacatggcaaaacctcatcagtacaaaaatgagctgggcgtggtggcctgcacctgaagttcagctactcaggaggctgagatgggagg

SEQ ID NO: 982642 - DNA, 120 bp, Artificial Sequence
  ENSG00000269821_443 (sequence is synthesized)
cctgggcaacagagtgagaccctgtctgcactcccctgcctcccccaaaaaatcagtagcatttctgtgaaacagcaaattagccaaaagagaaatgaagaaagcaatcccatttgcaat

SEQ ID NO: 982643 - DNA, 120 bp, Artificial Sequence
  ENSG00000269821_444 (sequence is synthesized)
caaaagagaaatgaagaaagcaatcccatttgcaatagctacaaaaaaaagcaaagcttaaccaaggaggtgaaagatttccacaatgaaaactataaaatactgataacagtaattgaa

SEQ ID NO: 982644 - DNA, 120 bp, Artificial Sequence
  ENSG00000269821_445 (sequence is synthesized)
gaggctacaaaattttttgagacatcccatgctcatggattgaaagaaaaatgttaaaatgatcatatttacctatagcaatatacagatgctatgaaatccctatccagatatcagcag

SEQ ID NO: 982645 - DNA, 120 bp, Artificial Sequence
  ENSG00000269821_446 (sequence is synthesized)
gggcttcaagatggctgactagaggcatctggcactcacctcctccacaaaatatagcaagtaggtaaccacagtttatatagatcgcctctgagagaatgctggaattcaactgagaag

SEQ ID NO: 982646 - DNA, 120 bp, Artificial Sequence
  ENSG00000269821_447 (sequence is synthesized)
taataagaaaaacccaatgcaagggataagaggggagtcaggcagtctgcttctatgggactggctgggatcatgaagagactcctcgatgtgcagaaaggtaagtaagtgagcccctag

SEQ ID NO: 982647 - DNA, 120 bp, Artificial Sequence
  ENSG00000269821_448 (sequence is synthesized)
tggtccacattcccacagcagactcctgaaatcctagtcagagaaccccctgacccatagatgccttgagactaacaagaggctacctacagactgtgaaatggcaatgaacagctccca

SEQ ID NO: 982648 - DNA, 120 bp, Artificial Sequence
  ENSG00000269821_449 (sequence is synthesized)
gagagggagatcaccctgaatcctcaggcaattcacacatcccctgaatcctcaggcaacttcaggaaagtcccattttgatagcccaacccccaccagactgcatctgctgtgggcccc

SEQ ID NO: 982649 - DNA, 120 bp, Artificial Sequence
  ENSG00000269821_450 (sequence is synthesized)
acatccctctatctcatccctggagccccatggacatcccttacacaaagctggttgccactcctgactgctccctccaggccaaagcatgagccattggcaatactctgctacctccga

SEQ ID NO: 982650 - DNA, 120 bp, Artificial Sequence
  ENSG00000269821_451 (sequence is synthesized)
agcaaggctgccatgaggaaaggtgaccctgcccatagtcaccacctggggccgaagcatgcattgcccaactgcctgtttatagctgctgccactgaaagcaatcccactcaacttccc

SEQ ID NO: 982651 - DNA, 120 bp, Artificial Sequence
  ENSG00000269821_452 (sequence is synthesized)
caggagtagggctgcaatagagttgctgctgccccaacatgagcattcagcagggtatacagggatcttcctgtgcctgcctaccacagtcagtacattcttgcattactggagggcctc

SEQ ID NO: 982652 - DNA, 120 bp, Artificial Sequence
  ENSG00000269821_453 (sequence is synthesized)
aggacaggcccacctggcctggtcccaccctcttttctcccagtgccagcgcataccatctctgggcctagggatcaccctgccctatccagtattgttggcacctgagcactcctgggg

SEQ ID NO: 982653 - DNA, 120 bp, Artificial Sequence
  ENSG00000269821_454 (sequence is synthesized)
gcttgaggactgccctacccaactgaccattaccaccacaactggcattcacttgaatttgccacctgtgggccttgggacaagctcatccagcttatcccagccatcccaataccagca

SEQ ID NO: 982654 - DNA, 120 bp, Artificial Sequence
  ENSG00000269821_455 (sequence is synthesized)
tggacaccttgggaggcagaagattgttctgccactgctactgccattgcccaagccatatctgctgctcagagctcaaggacctacccaccctgtggcccagctctgtcatcattggca

SEQ ID NO: 982655 - DNA, 120 bp, Artificial Sequence
  ENSG00000269821_456 (sequence is synthesized)
cctgagcaagttgcctggaggcccaaaattggtttccctggacttgctaacactggtaccagcatacactaccattgggcccaaggataagcattcggggccagccactgctgccactgg

SEQ ID NO: 982656 - DNA, 120 bp, Artificial Sequence
  ENSG00000269821_457 (sequence is synthesized)
ggcctgaggactggcccagctggtgtccctatccccagccagactttaccacagcctccaccaacaactgcatcctaaactacagaggaactcccagacactactggtgctgtttacagc

SEQ ID NO: 982657 - DNA, 120 bp, Artificial Sequence
  ENSG00000269821_458 (sequence is synthesized)
tgaaaaaaattccatggagatcacactactgcaggcacccagaatcaaaaccaaagtgccctgcccaaagaacaccatagatatatcttcaggaacaagactctcttaggaaagacagat

SEQ ID NO: 982658 - DNA, 120 bp, Artificial Sequence
  ENSG00000269821_459 (sequence is synthesized)
caaaaaattggaagaaactactgttacaccagatgtgcagataccagtgtaagcacacaagaaacatgaaaaggcaaaacatgacaactcctaaggaatgcaataattctccaacagatt

SEQ ID NO: 982659 - DNA, 120 bp, Artificial Sequence
  ENSG00000269821_460 (sequence is synthesized)
ccagtgaaaaagaaattgatgaaaccttgaaaaattcaatataatattaaagaagatctgatagactatacaaagaaatcagaaaaaacaattcggggtatgaatgagaaatttgcccaa

SEQ ID NO: 982660 - DNA, 120 bp, Artificial Sequence
  ENSG00000269821_461 (sequence is synthesized)
gagatagatataaaaagaaccaaacagatattctggaattgaataatagattgaatgaaataaaaaacatatttgaaagcttcaataacagaccacaacaagcagaagaaagaatttcac

SEQ ID NO: 982661 - DNA, 120 bp, Artificial Sequence
  ENSG00000269821_462 (sequence is synthesized)
accttgaagataagtcttttgaaatgactcagacaaaaatatagaaaaaatagaaaagaatgaacaaaggctatgtgactataggatgccataaggtgacaccttcagtgtcccagaagg

SEQ ID NO: 982662 - DNA, 120 bp, Artificial Sequence
  ENSG00000269821_463 (sequence is synthesized)
tgaagagcaaaccaaaagattataaaacctatttaatgaaataatacctgaacacttcccaatctcccaagagatttagatccaaatataggaatctcagaaccctaaatagatacaatt

SEQ ID NO: 982663 - DNA, 120 bp, Artificial Sequence
  ENSG00000269821_464 (sequence is synthesized)
cagaaaggtcttttccacagcacattatagcaaattgcccatcccaagacaaagagagaatcataaaaccagcgataaaagaggttgtagacacttacaagggaacaacctgcagactaa

SEQ ID NO: 982664 - DNA, 120 bp, Artificial Sequence
  ENSG00000269821_465 (sequence is synthesized)
cagatttttcagcagaaactttacaggccaggaggatgggattatatacgcagagtgctgaaagaaaaaacaaaaccaaaaacctgccagccaggaatactgtacttagcaaagttatat

SEQ ID NO: 982665 - DNA, 120 bp, Artificial Sequence
  ENSG00000269821_466 (sequence is synthesized)
tcgtcagaaatgaaggagaaataaagtatttcccttaaaagtaaaagctcagggaattaattgccactacactggcactacaaaaaatgcttaagggagtcttacaggaagaagtgaaag

SEQ ID NO: 982666 - DNA, 120 bp, Artificial Sequence
  ENSG00000269821_467 (sequence is synthesized)
gacaacttcatgaaagcacacaaaataatcagaaatcaattaatgacaggaataagccctcacatatcaacaataaccttgcatataaatagattaaactttctacttaaaagacagact

SEQ ID NO: 982667 - DNA, 120 bp, Artificial Sequence
  ENSG00000269821_468 (sequence is synthesized)
ggctgaatggacttaaaaacatgacccatctaaatgctatctacaagaaacgcatctcacctgtaaagacacatagttgaaagaaaggaatgggaaaagatattacatgcaaaaggaaac

SEQ ID NO: 982668 - DNA, 120 bp, Artificial Sequence
  ENSG00000269821_469 (sequence is synthesized)
aaaaaccaaacaggagtagctatactttcatcagataaaacaaaggttaagctaaaaacactaaaaagagacgaagtcattatatagtgacagagggatcaattgaccaagaggatataa

SEQ ID NO: 982669 - DNA, 120 bp, Artificial Sequence
  ENSG00000269821_470 (sequence is synthesized)
caattctaaacatatatgcacccaacaccaaagcacccagatatataaggcaaacatcaaatctgaagggaaaggtagacttcaacacaataatcttgggaacttcaattctccatttcc

SEQ ID NO: 982670 - DNA, 120 bp, Artificial Sequence
  ENSG00000269821_471 (sequence is synthesized)
agtattagacagatcatctagacaaaaaattaacaaagaaacattggatttaaactgcactttataccaaatggacctaacagacatttacagaccagttcataaaacagctgcagaata

SEQ ID NO: 982671 - DNA, 120 bp, Artificial Sequence
  ENSG00000269821_472 (sequence is synthesized)
tacactcttctcatcagtacatggaacactctccaggatacattatatgttaggacactaagtatgattttaaatatatatatattttaaattggattcatatcacatatcttctcagac

SEQ ID NO: 982672 - DNA, 120 bp, Artificial Sequence
  ENSG00000269821_473 (sequence is synthesized)
cacaatagcataaaactataaataaataagaggagcattcaaaactgtataaataaatggaaattaacatgttcctgaatgaccaatgggtcaaagaagaaattaaggcagaaataaaaa

SEQ ID NO: 982673 - DNA, 120 bp, Artificial Sequence
  ENSG00000269821_474 (sequence is synthesized)
atttactgaaacaagtgaaaatagaagcacaacattctgaaacttaagggatactgcaaaagcaatgctaagaggaaagtttattgtaataaatgcctccattaaaaaaggtagaaaaga

SEQ ID NO: 982674 - DNA, 120 bp, Artificial Sequence
  ENSG00000269821_475 (sequence is synthesized)
tcttaaataatctaatgatacacctgaaggaaccagaaaagcaagaacaaaccatactaaacataaaattagtagaaggaaagaaataacgaagatcagagcagaactaaacaagaaact

SEQ ID NO: 982675 - DNA, 120 bp, Artificial Sequence
  ENSG00000269821_476 (sequence is synthesized)
aaataaatataaaggatcaatgaaatgcaaaatcggtttttgaaaagaaacaaaataaccagtggctaaactatccaagaagaaaagagagaagacctacatgaataaaatcaaaaatga

SEQ ID NO: 982676 - DNA, 120 bp, Artificial Sequence
  ENSG00000269821_477 (sequence is synthesized)
aaaaggggatattacaactcataccatgaaatacaaaaatcaaaactcttcagtctgatcaataaattgattacagttacaggatttaaaaatcaggcttatttctatataccaataaag

SEQ ID NO: 982677 - DNA, 120 bp, Artificial Sequence
  ENSG00000269821_478 (sequence is synthesized)
aaccagctgagaaagaaatcaagaaggcattatcttttacaaccactacaaaaaatctaggaatgagtttaaccaaagaggtgagaaacctctaacaaggaaaactacaaaagtctgatg

SEQ ID NO: 982678 - DNA, 120 bp, Artificial Sequence
  ENSG00000269821_479 (sequence is synthesized)
cctctaacaaggaaaactacaaaagtctgatgaaagaaattgaaaagaacacacaaaaaacatcccattctcatggattgggagaattaacaaaattaaaatgaccatactacccaaagc

SEQ ID NO: 982679 - DNA, 120 bp, Artificial Sequence
  ENSG00000269821_480 (sequence is synthesized)
taccaatgccatttttcatggaaatagaaaaaatcctaaaattcagatggaaccaaaaaagagctggaatagccacagcaattctgagcaaaaataacaaagttggatgcatcacactgc

SEQ ID NO: 982680 - DNA, 120 bp, Artificial Sequence
  ENSG00000269821_481 (sequence is synthesized)
ctgatttaaaaatataaggctatagcattaaaagcagcatggtattggaataaaaactgatagaccaatggaacagagtagaacctggaagtaaatccatgtatttacagccaactgatt

SEQ ID NO: 982681 - DNA, 120 bp, Artificial Sequence
  ENSG00000269821_482 (sequence is synthesized)
tttgacaaagatgccaagaacatacactgggaaaagagcaccctcttcacttaatggagctgggaaaataagatatccatgtgaaaaatgaaaccgtttctatctcttgctatactaaaa

SEQ ID NO: 982682 - DNA, 120 bp, Artificial Sequence
  ENSG00000269821_483 (sequence is synthesized)
tcaactcaagatgggttaaagacttaaacatgaggcatgaaactataacatcactattaatgaaggagacattggggaaacactttaggacattggtctagggaaagattttatggataa

SEQ ID NO: 982683 - DNA, 120 bp, Artificial Sequence
  ENSG00000269821_484 (sequence is synthesized)
gacctcaaaaacacagacaaaaacaaaaatagacaaatgggactatattaaatgataaagcttgtacacaacaagggaaacaatcaccagagtgaagagacagcctgttgaatgggagaa

SEQ ID NO: 982684 - DNA, 120 bp, Artificial Sequence
  ENSG00000269821_485 (sequence is synthesized)
aatatttgcaaactactcatctgacaaggtactaataccagaatatactaggaactccaataactcaatagtaaacaacaaattaattccaataaaaagtgagcaaaagacatggataga

SEQ ID NO: 982685 - DNA, 120 bp, Artificial Sequence
  ENSG00000269821_486 (sequence is synthesized)
tatttctcaaaagaaaacatacaagtagccaacaggtatatttaaaaaaaaaagcccaacatcagtaattataagggaaatgcaagccaaaaccatagtgagaatggctattttaaaaag

SEQ ID NO: 982686 - DNA, 120 bp, Artificial Sequence
  ENSG00000269821_487 (sequence is synthesized)
acaaaaattaaccaatgctggagaggatgtggagggaactcttatacactgttggtgggaatgtaaattaatactatagaaaacagtttgatttctgaaaaacctaaaaagagaaatatg

SEQ ID NO: 982687 - DNA, 120 bp, Artificial Sequence
  ENSG00000269821_488 (sequence is synthesized)
acataatccagcaatctcactactggatatttatctaaaggaaaagatatcagtatactaaaaatgtacctgcatccccgtgtttattgcagcactattcacaacagcaaagatatggac

SEQ ID NO: 982688 - DNA, 120 bp, Artificial Sequence
  ENSG00000269821_489 (sequence is synthesized)
atatggactcaggaacctaagtgtacatcagtggataaatggaaaaagaaaatgaggtaaatatatacaatggaatactaattgaccaaagaagaatgaaatcatgtcctttgcagcaac

SEQ ID NO: 982689 - DNA, 120 bp, Artificial Sequence
  ENSG00000269821_490 (sequence is synthesized)
agctggaggtcattattttaagccaggcacagaaagataattatcttatgttattatcatatgtgggagctataaaagttgatctcatggaggtagagagtagaaggatagataccaaag

SEQ ID NO: 982690 - DNA, 120 bp, Artificial Sequence
  ENSG00000269821_491 (sequence is synthesized)
gctgtgaaaggtatgtctggagggtgaagagaggttggttagtgggtaaaaatacacagctagttagaataaataatttataatgtttgataagagttggttgactatatttaacaatat

SEQ ID NO: 982691 - DNA, 120 bp, Artificial Sequence
  ENSG00000269821_492 (sequence is synthesized)
aatgtatatttcaaaataaaaaagaggacttgaaatgttcctaactatagagatgataaattgagggtgatggataccctgacttgatcattacacattcgatgcatgtaacaatagcac

SEQ ID NO: 982692 - DNA, 120 bp, Artificial Sequence
  ENSG00000269821_493 (sequence is synthesized)
catgtaacaatagcacatgtaccccataagtattatgtatcggtcaaaaaaaaaaaaaaaaggaaatcccagtgctttggggggccaaggcagaaggatcgcttgagcccaggaattcaa

SEQ ID NO: 982693 - DNA, 80 bp, Artificial Sequence
  ENSG00000269821_494 (sequence is synthesized)
gggtcaaggatggagaatgacttgagcctgggagttaaagattgcagtaagtggggtggttccaagatggccgaatagga

SEQ ID NO: 982694 - DNA, 120 bp, Artificial Sequence
  ENSG00000269821_495 (sequence is synthesized)
gggtcaaggatggagaatgacttgagcctgggagttaaagattgcagtaagtggggtggttccaagatggccgaataggaggagctccagtctatagctcccagcgtgagtgacgcagaa

SEQ ID NO: 982695 - DNA, 120 bp, Artificial Sequence
  ENSG00000269821_496 (sequence is synthesized)
atttccaactgaggtagtgggttcatctcactggggctcgtcaagacagtgggtacaggacagtgggtgcagcccactgagtgtgagacgaagtagggcgaggcatcgcctcacctggga

SEQ ID NO: 982696 - DNA, 62 bp, Artificial Sequence
  ENSG00000269821_497 (sequence is synthesized)
gggtcagggaattccctttcctagccaacggaaggggtgacagacggcacctggaaaactgg

SEQ ID NO: 982697 - DNA, 67 bp, Artificial Sequence
  ENSG00000269821_498 (sequence is synthesized)
cttaaatgtccctgtctcacagctttgaaaagagtagtggttctcccagcacggagtttgagatcta

SEQ ID NO: 982698 - DNA, 63 bp, Artificial Sequence
  ENSG00000269821_499 (sequence is synthesized)
gcagaaaattctaaaactcagagcacctctccccatccaaaggaacgcagccactcgccagca

SEQ ID NO: 982699 - DNA, 69 bp, Artificial Sequence
  ENSG00000269821_500 (sequence is synthesized)
gaaaaaacagcagaaaagcagaaaattctaaaactcagagcacctctccccatccaaaggaacgcagcc

SEQ ID NO: 982700 - DNA, 63 bp, Artificial Sequence
  ENSG00000269821_501 (sequence is synthesized)
tagccgatttgatcaactggaagaaaggatatcggtaaaaacaaacgaacaaagcctccaaga

SEQ ID NO: 982701 - DNA, 63 bp, Artificial Sequence
  ENSG00000269821_502 (sequence is synthesized)
agtccttagagatctacaaagagaaatcaacaagaccggaagttaacaaggatatccaggaat

SEQ ID NO: 982702 - DNA, 62 bp, Artificial Sequence
  ENSG00000269821_503 (sequence is synthesized)
ggaactgaacaatgagaacacttggacgtaggaaggggaacatcacccaccagggcctgtgt

SEQ ID NO: 982703 - DNA, 85 bp, Artificial Sequence
  ENSG00000269821_504 (sequence is synthesized)
gagagagagagaaaagagaaatctaaaaaaaaaaaaataccaaagacaatcttcaccgaaatagcaaaaacacaatccttaaact

SEQ ID NO: 982704 - DNA, 120 bp, Artificial Sequence
  ENSG00000269821_505 (sequence is synthesized)
acaatcttcaccgaaatagcaaaaacacaatccttaaacttgcatggaaccacaaaagaccacaaataggacaaacaatactgagcaggcagaatgaagctggaggcactacactgcctg

SEQ ID NO: 982705 - DNA, 120 bp, Artificial Sequence
  ENSG00000269821_506 (sequence is synthesized)
acatcaaaatacagtcgactcttcaacaacatagatttgaactgtataggttcatttatacgtggattttccccataatctaacaaggatagaatgcaatattcacaaaagtgaaaacta

SEQ ID NO: 982706 - DNA, 120 bp, Artificial Sequence
  ENSG00000269821_507 (sequence is synthesized)
tgtatacagatgactgacattttgtatatgcgcattacacagggctgactctgggacttgaatatacatggcttttggtatatacagggggtctcggaagcaatcccccttgtatacaaa

SEQ ID NO: 982707 - DNA, 83 bp, Artificial Sequence
  ENSG00000269821_508 (sequence is synthesized)
gtaaataaatttatttacagacaactggtttttgacaaaggtgccaagaacacactctggggaaaggacaccatgttgaacac

SEQ ID NO: 982708 - DNA, 120 bp, Artificial Sequence
  ENSG00000269821_509 (sequence is synthesized)
ccaagaacacactctggggaaaggacaccatgttgaacacatcatgttgggaaaacaggatatcatatgcagaagaatgaaactatactatctctcagcatataaaaaaatcaactcaaa

SEQ ID NO: 982709 - DNA, 120 bp, Artificial Sequence
  ENSG00000269821_510 (sequence is synthesized)
attgattagagacttaaacatgagacctgaagcaaacagtactagaagaaaacagaagggaaacccttcaggatatgggtctagcgaagattttatgggtaagactttataagcacaggc

SEQ ID NO: 982710 - DNA, 120 bp, Artificial Sequence
  ENSG00000269821_511 (sequence is synthesized)
aacaaaaacaaaaatagacaaatgggactgtatcaaactaaaaacctacacataaaaggaaataataaactattaagagatatcctgtagaatgggagaaaatattcatctgacaaggga

SEQ ID NO: 982711 - DNA, 120 bp, Artificial Sequence
  ENSG00000269821_512 (sequence is synthesized)
ttaatatccggaatatacaaggaattcaaacaattcaacagcaaaaaacaccagattatctgatttagaaatgtgcaaaatagaacaactggccaacaggtatgtgaaaaaatgctcaac

SEQ ID NO: 982712 - DNA, 120 bp, Artificial Sequence
  ENSG00000269821_513 (sequence is synthesized)
atctctcatcacagaaatgcaagtcaaagccacagtgagacattatttcacctcagttagaatggctgttttcaaaaagacaaaacataacaaatgctggcaaggatgcagagaaaaggg

SEQ ID NO: 982713 - DNA, 120 bp, Artificial Sequence
  ENSG00000269821_514 (sequence is synthesized)
aaataatacactatttgtgggactataaattagtgagtcattatggaaaatactgtggtgttttgtcaaaaaaactaaaagtagactatcatacagtttgacaatccactaccgggtatt

SEQ ID NO: 982714 - DNA, 120 bp, Artificial Sequence
  ENSG00000269821_515 (sequence is synthesized)
gactcaaaggaaaggaaatcagtatataaaaaagatatttgcattctcatgtttattgcagtactgttcacaacagttaagatatggaatcaacttaaatctccatcagcagatgcagag

SEQ ID NO: 982715 - DNA, 120 bp, Artificial Sequence
  ENSG00000269821_516 (sequence is synthesized)
aaagaatgtggtatgtatacacaatggaatattattcagtcataataaagcattaagtcctgtcattcacagcaacatggatgaacttggataatatgttaaatgaaattaggcacagaa

SEQ ID NO: 982716 - DNA, 120 bp, Artificial Sequence
  ENSG00000269821_517 (sequence is synthesized)
agatggaggattttgactgctcacaaaacagagaaatgatatttgagttgatgaatatgctaattaccctgatttgattatgacacattatatacatgtatcacaatatcactgtgtata

SEQ ID NO: 982717 - DNA, 120 bp, Artificial Sequence
  ENSG00000269821_518 (sequence is synthesized)
tcccataaatatctacaattattacatgttgactaaaaataaaaggacaaagaaaaagactcctagaagaaaaacccacaaggagcatcataatggtgaaaagactaagagcttttcctc

SEQ ID NO: 982718 - DNA, 120 bp, Artificial Sequence
  ENSG00000269821_519 (sequence is synthesized)
taagatcaggaataaagcaagatgcgcattttagccattatattaaacatagtagtggctttctagccaaagaatatggaaaagaaataaaggcatcatttagaaaggaagaattaaaat

SEQ ID NO: 982719 - DNA, 120 bp, Artificial Sequence
  ENSG00000269821_520 (sequence is synthesized)
tatgtttgttcatagatatgatcatatttgtagaaatccctgaaaactcaccacaaaaactgaataaattaattcagcaaagtagcaggatagtaagtcagtacacaaaattcagttgca

SEQ ID NO: 982720 - DNA, 120 bp, Artificial Sequence
  ENSG00000269821_521 (sequence is synthesized)
tacaggcgtgagccactgcgcccagctttcagttgcatttctatacattaatcacaaacaatctgaaagggatattattaacacaactctatttacacgacagcatcaggacactcagcc

SEQ ID NO: 982721 - DNA, 120 bp, Artificial Sequence
  ENSG00000269821_522 (sequence is synthesized)
acacaactctatttacacgacagcatcaggacactcagccttggccaccaaggacctttgtaatgtttgccactgctgacctcagctgatggagctgcaagaagagtattccattatatc

SEQ ID NO: 982722 - DNA, 120 bp, Artificial Sequence
  ENSG00000269821_523 (sequence is synthesized)
ctcatctgggctacagctgctgcaccctacctacttaacactccatcaagtgagcagatttcaattcattgtaacaagaaacagaaaaaccaaggaaacatagcacccacctgagaaata

SEQ ID NO: 982723 - DNA, 120 bp, Artificial Sequence
  ENSG00000269821_524 (sequence is synthesized)
caataattttcagggactgactcccaagaaattgggatacattaattgccttacagaaaattaaaaacgactgatttaaggaagttcagtgtgctaccagagaacagagagacaacctaa

SEQ ID NO: 982724 - DNA, 120 bp, Artificial Sequence
  ENSG00000269821_525 (sequence is synthesized)
tgaaatcattaatacacaaaaggagacattcaataaagaaatagaaatcctaaaaaaaaaacaaacattttggaggtgaagaatatagtgcatgaaatgaaaagtgaaatagaaagcatc

SEQ ID NO: 982725 - DNA, 120 bp, Artificial Sequence
  ENSG00000269821_526 (sequence is synthesized)
agcagcagacttgatcaaatagaaggaggaattcatcaactggaggataaattatttgaaaataaccagtagaggagaaaaataaagaatgaaaaggtaacaagggaagtttacaggatt

SEQ ID NO: 982726 - DNA, 120 bp, Artificial Sequence
  ENSG00000269821_527 (sequence is synthesized)
tatgggacaccatcaggagagttaatgttcacacaggatttatagaaggaaagtagagaggtaaagggtagaaagttaattcagagaaataatggctgaaaacttcccatatctggggct

SEQ ID NO: 982727 - DNA, 120 bp, Artificial Sequence
  ENSG00000269821_528 (sequence is synthesized)
cttcccagattgatggacatctaggtacatgaagctcaaagaattacaattagtttccatctaaaagaggtttcacctagatatattgccatcaaaatgtaaaaaatggaagacaagata

SEQ ID NO: 982728 - DNA, 120 bp, Artificial Sequence
  ENSG00000269821_529 (sequence is synthesized)
attttgaaagcggcaagataaataaagttcttacatctgcaggaacctccataaggctatcagtggatttctgagcaaaaactttccaggccaggaaacaataggattatatattcaaag

SEQ ID NO: 982729 - DNA, 120 bp, Artificial Sequence
  ENSG00000269821_530 (sequence is synthesized)
ttctgaaagataaaaaactgccatctaagaatactttacacagcaaagctgtccttcagatatgaaacagatacaagacttcctcaggtaaacaaaagttgaaggagtttatcagcaact

SEQ ID NO: 982730 - DNA, 120 bp, Artificial Sequence
  ENSG00000269821_531 (sequence is synthesized)
actcttgccttacaagatatgccagagggagttattcaggcttaaatggaaggatgataattagtaacatgaaaacatatgaaagtacaaaattcactgataaataaatatacgggcaac

SEQ ID NO: 982731 - DNA, 120 bp, Artificial Sequence
  ENSG00000269821_532 (sequence is synthesized)
cgggcaacttaagaatactctaatagtgtaatggtagtatataaatcacataactctagtataaaggttaaaagaaaaataattaaaaattactattgttttcataatttctcaatggat

SEQ ID NO: 982732 - DNA, 120 bp, Artificial Sequence
  ENSG00000269821_533 (sequence is synthesized)
ttaaaaggtgtaccttggggcatcaaaaataaaatgtagcgggggaagtataagatcaaaatattccccccaaacaaagagggaacaatcccaacttattttacaaggctagcattgccc

SEQ ID NO: 982733 - DNA, 120 bp, Artificial Sequence
  ENSG00000269821_534 (sequence is synthesized)
tcatactaaggccagacaaggacaatataagaaaagaaaataactggctgatatttttttatgactatacatttaaaaattttcaacaaaatatgatcaaactgaatttaacagcacatt

SEQ ID NO: 982734 - DNA, 120 bp, Artificial Sequence
  ENSG00000269821_535 (sequence is synthesized)
aaaaaaatcatatatcacaaacatgggatttatccttagtacataaggacagttaagtgtacatatacaagaaatgggatactttaataaaatcaaagataaaaatcatacaatcatttt

SEQ ID NO: 982735 - DNA, 120 bp, Artificial Sequence
  ENSG00000269821_536 (sequence is synthesized)
gataagtgcaaataatgcagttcacataattcaacatccttccatgataaaaactatgaacaaattaggtatagaaggaatgtactgcaacacaataaaggccatatatgaatagcccac

SEQ ID NO: 982736 - DNA, 120 bp, Artificial Sequence
  ENSG00000269821_537 (sequence is synthesized)
gccatatatgaatagcccacagctaacatcatactcaatgctgaaaagctgaatgcctctcctctaagatgaggaacaagaaaaagatattctcaccacttctattcaacacagtactgg

SEQ ID NO: 982737 - DNA, 120 bp, Artificial Sequence
  ENSG00000269821_538 (sequence is synthesized)
gggcaagaaaaataaataaatacactcaaatcagaaagaaggaagtaaaattgtctctgtttgcagatgacatcatatatgtagaaaatgctacagactccacaaaaaaaacctgttaga

SEQ ID NO: 982738 - DNA, 120 bp, Artificial Sequence
  ENSG00000269821_539 (sequence is synthesized)
agtaataatctaactcagtaaagtggcaggatacaaaatcagcattcagaagtcatttgcgtatctatacactaataataaacaacctgaaaaacaaattaagaaaacaatttcatttaa

SEQ ID NO: 982739 - DNA, 120 bp, Artificial Sequence
  ENSG00000269821_540 (sequence is synthesized)
aatagcatcaaaaagaatagagagctcccaaataaatcctttcatatatgaacgcatgatttctgacaagcatgccatgtccattcaatggcaaatggattctcttttcaacaaatggtg

SEQ ID NO: 982740 - DNA, 120 bp, Artificial Sequence
  ENSG00000269821_541 (sequence is synthesized)
ccaggaaaactggatatcctcacgtgagagaatgaagtcgagacctttacctaactccatatacaaaaattaactcaaagtggaccacagacctaaatgtaagacctaaaactataaaac

SEQ ID NO: 982741 - DNA, 120 bp, Artificial Sequence
  ENSG00000269821_542 (sequence is synthesized)
tcttagaagaaaacatggggcaaaaactgcatgacattggatttggtattgacttcatttggatataatatgaaaggcacagataaaataaaaaatagagaaattggactgcataacatt

SEQ ID NO: 982742 - DNA, 120 bp, Artificial Sequence
  ENSG00000269821_543 (sequence is synthesized)
taggcatacatttaaccaaggagataaaagacctagacactgaaaactatgaaacattgaacaaattctaagatgatacaaataaatggaaagatatctggtgttcatagatcaatagaa

SEQ ID NO: 982743 - DNA, 120 bp, Artificial Sequence
  ENSG00000269821_544 (sequence is synthesized)
taaatattgccgaaatagctatactactcaaagtgatctacagattcaaggcaatgcctatcaaatttccagtgactttttttcacagatatagacaaaaaaaatcctaaaatttgaaag

SEQ ID NO: 982744 - DNA, 120 bp, Artificial Sequence
  ENSG00000269821_545 (sequence is synthesized)
aaactacaaaagaccttaaagatctaaagcatacttgagcaataagaacaaagtgaaagatattacacatgcttattttgaattatatttcaaagttatggtactggtatagaaataaac

SEQ ID NO: 982745 - DNA, 120 bp, Artificial Sequence
  ENSG00000269821_546 (sequence is synthesized)
caatggaacagaatagaaagcatagaaataaacccacacatttatggtcaactaatctttgacaaagacaccaagagtacacaatggggaaagggtactctcttgaataaatggcactgt

SEQ ID NO: 982746 - DNA, 120 bp, Artificial Sequence
  ENSG00000269821_547 (sequence is synthesized)
gaaaccaggatatccacatgcaaaaaaattaaattggaaccttaccctacactgtagagaaaagtgaataagatttaaacatatgacctgaaaccataaaacctataaaacagggaaaag

SEQ ID NO: 982747 - DNA, 120 bp, Artificial Sequence
  ENSG00000269821_548 (sequence is synthesized)
ctccttgccattggtttttgtgacaattttttagatgtgacatcaaaagcacaaggaataaaacgcaaaaataaattagaactacatcaaacaaaaaagtgtctgcacaacaaaggaaac

SEQ ID NO: 982748 - DNA, 120 bp, Artificial Sequence
  ENSG00000269821_549 (sequence is synthesized)
aacaaaatgaaaaggcagcacatgtagcgggagaaaatatttccaaccatatatctgataagctattaatatccaatatatataaggaactcatataactagcaaaaaaacttaataacc

SEQ ID NO: 982749 - DNA, 120 bp, Artificial Sequence
  ENSG00000269821_550 (sequence is synthesized)
caattaataacctgttaagatggacaagggactgaatagacatttattcaaagaagacatacagatggtcaacaggtatataaaaaggtgcttaacatcacttatcatcagggaaatgca

SEQ ID NO: 982750 - DNA, 120 bp, Artificial Sequence
  ENSG00000269821_551 (sequence is synthesized)
aatgaaaaccacactgagatatcacctcataactgttagaatcgctattatcaaaaagtcaaaagatagcaagtgttggtgaggatgtggagaaaaggtgtcccttatacatttttgtta

SEQ ID NO: 982751 - DNA, 120 bp, Artificial Sequence
  ENSG00000269821_552 (sequence is synthesized)
ggaatgtaaattgatacagtcattatggaaaacacgatagattttctttaaaaaattaaaattggaactgctatatgatccagcagtctcagttccgggtatatctaaggaaaacaaagt

SEQ ID NO: 982752 - DNA, 120 bp, Artificial Sequence
  ENSG00000269821_553 (sequence is synthesized)
cagtatcttgaagaggtatctgcactcccatgttcattgtagtgttacagtagtcaagaaatgagcaacatagtattcataggcatggtggcttgtacctgtaatcccagtacttggggg

SEQ ID NO: 982753 - DNA, 120 bp, Artificial Sequence
  ENSG00000269821_554 (sequence is synthesized)
tggccaaggtgaaggatagcttgaacacaggagtttgagaccagcctaggaaacatagtgataccctatctctacataaaattttaaaaattagctgggcatgggggtgcatgactgtgg

SEQ ID NO: 982754 - DNA, 120 bp, Artificial Sequence
  ENSG00000269821_555 (sequence is synthesized)
ggctgaggcaggaggatcacttgagcccatgaggttgaggctacagtgaactgtgattgtgccactgtactcctgcctggatgacagatggagaccctgtctcaaaaagaaaggaagaaa

SEQ ID NO: 982755 - DNA, 120 bp, Artificial Sequence
  ENSG00000269821_556 (sequence is synthesized)
tggagaccctgtctcaaaaagaaaggaagaaaatagtgtgtgtgtgtgtatcaccaaattcccaaataaacacatcacatacatatacatacagacacacacacacacatatatacacac

SEQ ID NO: 982756 - DNA, 120 bp, Artificial Sequence
  ENSG00000269821_557 (sequence is synthesized)
atcctttaaaaagcaggaaatcatgcaatttatgacaacatagatgaacctggaggatattatgctaagtgaaatagccagacacagaaagacaaatactgcactatcccagttacatat

SEQ ID NO: 982757 - DNA, 120 bp, Artificial Sequence
  ENSG00000269821_558 (sequence is synthesized)
ggaattctaaaaagcttgaactcagagaaacggagagtagaagggtggttactaggggtcagggagtaggggaaataggaaatgttgaagggtacaaacatagagttatcagatgaataa

SEQ ID NO: 982758 - DNA, 120 bp, Artificial Sequence
  ENSG00000269821_559 (sequence is synthesized)
gttcttgacataacgtccagattggtgactatagttaatatattctatacttggaatttgctaagagagtatagcttaggtattctgaccacacacacgcacacacatggcaactatgta

SEQ ID NO: 982759 - DNA, 120 bp, Artificial Sequence
  ENSG00000269821_560 (sequence is synthesized)
aggtatatgttaattggcttgattgtagtaatcatttcacagtaggtcaaatatgttcttaaatatatgcacttttaatttgtcaattatacctcaataaaagctgaaaaaagcatcaag

SEQ ID NO: 982760 - DNA, 120 bp, Artificial Sequence
  ENSG00000269821_561 (sequence is synthesized)
aataacaaacttaggaaccaactttaccaaggaggtgaaagtcttgtacaatgaaaattacaaaacaatgctgaaagaaattaaagtagacataaagggaaaacacctcctatgttcatg

SEQ ID NO: 982761 - DNA, 120 bp, Artificial Sequence
  ENSG00000269821_562 (sequence is synthesized)
gattggaaggccaatattgttaaggtgtcagtaccacacaaaacaatctacaaatccaaggtaatcccaataaaaatcctaatgatgttatttgcagaaagaagaaaccccatcctaaaa

SEQ ID NO: 982762 - DNA, 120 bp, Artificial Sequence
  ENSG00000269821_563 (sequence is synthesized)
ttcacatggaatctcaagggaccttgaatagctaaaacattcttgaaaatgatgaacaacattggaggactcacactttctgatttgaaaacttactacaggccaggtacaatggcctac

SEQ ID NO: 982763 - DNA, 90 bp, Artificial Sequence
  ENSG00000269821_564 (sequence is synthesized)
cttgaacacagggagacctcatctctacaaaaaataaaataattggccaggtgtaatggtacacacttctattcccagctactcaagaag

SEQ ID NO: 982764 - DNA, 84 bp, Artificial Sequence
  ENSG00000269821_565 (sequence is synthesized)
gggagacctcatctctacaaaaaataaaataattggccaggtgtaatggtacacacttctattcccagctactcaagaagcctg

SEQ ID NO: 982765 - DNA, 120 bp, Artificial Sequence
  ENSG00000269821_566 (sequence is synthesized)
aacagagtaagaatgtctgaaaaacaaacaaaaaccccaacttattacgaagctacagtaatcaaaactatgtggtattgacataaagatgtagagaccaatggaattgaatagagagcc

SEQ ID NO: 982766 - DNA, 120 bp, Artificial Sequence
  ENSG00000269821_567 (sequence is synthesized)
caaaaataaacccttgtatacatgatcaaatgattcctgagaagagtgccaagaccattcaatagggaaagtgctgtattttcaacaaatggtgccaggataactgaagttgagaccctt

SEQ ID NO: 982767 - DNA, 120 bp, Artificial Sequence
  ENSG00000269821_568 (sequence is synthesized)
acctaataccatacacaaaaattaactcaagagaatgaagttgagatccttacctaaccatgtataaaagagaatgaagttgagacccttacctaacactgtgtacaaaaacttactcaa

SEQ ID NO: 982768 - DNA, 120 bp, Artificial Sequence
  ENSG00000269821_569 (sequence is synthesized)
aatgggtcaaagtcctaaaactatgaagtcttataaggaaacataggggaaaaactttacatcattggcagtgcttcttgtatgcgacaccaaaggcacaggcaataaaagtaaaaatag

SEQ ID NO: 982769 - DNA, 120 bp, Artificial Sequence
  ENSG00000269821_570 (sequence is synthesized)
ataaattgtacttgcacaggcaataaaagtaaaactagataaattttaaaaatttacattgtgtgcattaaaataatatcaactaagcaataagacaacctacagaatgggagaaaaatt

SEQ ID NO: 982770 - DNA, 120 bp, Artificial Sequence
  ENSG00000269821_571 (sequence is synthesized)
tgcaaatcacatacctgataagggattaatgtccagattatacagagaacttctaaaagtcatcaccaaaaaacaatgcacctgaaaaatgggcaaaagggccaggcacggtggctcacg

SEQ ID NO: 982771 - DNA, 120 bp, Artificial Sequence
  ENSG00000269821_572 (sequence is synthesized)
ctccatctcaaaaaaaaaaaaaaaagggcaaaggacttggacagacgtatctccaaagaagatatacaaatggataatagtacgtgaaaagttgtttaacatctctagtcattaggaaat

SEQ ID NO: 982772 - DNA, 120 bp, Artificial Sequence
  ENSG00000269821_573 (sequence is synthesized)
aaatacaagtcaaaaccacaaccttacatacactcagatgactactattaaaaaaataaacacagcctaggcaacatagtgagacccatctctagtatcagctacgtgggaggttaaggt

SEQ ID NO: 982773 - DNA, 120 bp, Artificial Sequence
  ENSG00000269821_574 (sequence is synthesized)
gggaggatagcctaagcccagaggtctaggttgaggctgcagtgtgccatgatcatgccactgcattccagcctaagtgacagagccagatcttgtctcaaaaaaatcccacataaacag

SEQ ID NO: 982774 - DNA, 120 bp, Artificial Sequence
  ENSG00000269821_575 (sequence is synthesized)
aaaataaccactgctggaagggacatggagaaattggaatccttgtgcactgttagtgggaatgcaaaatggtacagcctctgtgttaaacagtttggtgttccttcaaaaattaaaaac

SEQ ID NO: 982775 - DNA, 120 bp, Artificial Sequence
  ENSG00000269821_576 (sequence is synthesized)
agaattatctgatccatcaactccacctctgtgtatacacccagaaggattaaaagcagtctcaaagatatatttgtatacccacgattgtagtggcattatttacaacagttaaaacat

SEQ ID NO: 982776 - DNA, 120 bp, Artificial Sequence
  ENSG00000269821_577 (sequence is synthesized)
caatgcaacccaaatgtccatggaagaatggataagcaaaatgtggtatatacatacaatgtaatattattcagctttaaaaaaaatagaaattttgacacatgccacaacatggatgaa

SEQ ID NO: 982777 - DNA, 120 bp, Artificial Sequence
  ENSG00000269821_578 (sequence is synthesized)
cctcgaggccattatgttaaatgaaatacagcagtcacaagaagagaagtactgtatgtttccacttatatgaggtatgtagaatagtcaaatcagagacatagaaagtacaaggtggtt

SEQ ID NO: 982778 - DNA, 120 bp, Artificial Sequence
  ENSG00000269821_579 (sequence is synthesized)
tccaagagatggcggtggtgggggggttggggaattattgtttaatggatatagagtttcataattacaaatgacaagtgttatggagatggatgatagtgatgattgcacagcattgtg

SEQ ID NO: 982779 - DNA, 120 bp, Artificial Sequence
  ENSG00000269821_580 (sequence is synthesized)
aacgtatctaatacattcactgaattgtacactaaaattggttaggatggtaatttttatgttaagtgtattttgccacaataaaagatttggaaatcaacaacaaatagaaatcccaga

SEQ ID NO: 982780 - DNA, 120 bp, Artificial Sequence
  ENSG00000269821_581 (sequence is synthesized)
agataacataggaagaaatctagatgatctttagtttggtgatggctttttagatatgacaccaaaggcatgattcatgaaagaaataattgataagctagactttgttaaaaataaaag

SEQ ID NO: 982781 - DNA, 120 bp, Artificial Sequence
  ENSG00000269821_582 (sequence is synthesized)
tttctgctctgtaaaacatactgtcaagaggatgaaaggacaggccacagaagggagacaatacttgtaaaagatatacctgataaaggactcatccaaaatatataaagaaccttaaaa

SEQ ID NO: 982782 - DNA, 120 bp, Artificial Sequence
  ENSG00000269821_583 (sequence is synthesized)
acataacaattagaaaacaaacaatctgattacaaaatggactgaagaccttaacagacatctcaccaatgaagatatacagatggcaactaagtatatgaaaagatgccccacatctta

SEQ ID NO: 982783 - DNA, 120 bp, Artificial Sequence
  ENSG00000269821_584 (sequence is synthesized)
cgtcattagggaaatggaaattaaaacaagaaatgtgatatatctacacgcttattagaatggccaaaattcaaaacactgacaataccaaatacttgccaatatgtggggcaacaggaa

SEQ ID NO: 982784 - DNA, 120 bp, Artificial Sequence
  ENSG00000269821_585 (sequence is synthesized)
cactcatccattgctggtgggaatgcaaaatggtacagccactttgacatataccattaatgggaatgtaaagtggtgcagccctggtggagaagagtttggtggttcttcaaagaatta

SEQ ID NO: 982785 - DNA, 120 bp, Artificial Sequence
  ENSG00000269821_586 (sequence is synthesized)
aaaatggaattatcataggatccatcaattccacttctgaatgtgtatacatatcccccgaagaatccagagtatatcgaaatcagtggtttcttataaaattaaacatattcttaccat

SEQ ID NO: 982786 - DNA, 120 bp, Artificial Sequence
  ENSG00000269821_587 (sequence is synthesized)
gcagttcagcaatcacatccttggtatttactcaaaggaggtgaagacttatattcacataaaaatctgcacagagatgtttacagaagctttatttgtgattgttgaaattggaagcaa

SEQ ID NO: 982787 - DNA, 120 bp, Artificial Sequence
  ENSG00000269821_588 (sequence is synthesized)
ccgagatgtccttccataggtgagtagacagataaactgtagtacatccaggcaatgaaatattattcatcactaaatagaaatgagctatcaagccatgaaaagatatggaggtaatta

SEQ ID NO: 982788 - DNA, 120 bp, Artificial Sequence
  ENSG00000269821_589 (sequence is synthesized)
aaaaacatattactatgtgaaataaggcaatctgaagaaactacatactgtatgattccaatcatattgcattttagaaaaggcaatgctatggaggcagtaaaaagttcagtggttgcc

SEQ ID NO: 982789 - DNA, 120 bp, Artificial Sequence
  ENSG00000269821_590 (sequence is synthesized)
aagggttgttggggaagaagggttgaataggcagtgcacagagtacttttagggcagtgaaaatgtacaaatatatgtaaatatacgtatctgtatgatactataatggtagatacatgc

SEQ ID NO: 982790 - DNA, 120 bp, Artificial Sequence
  ENSG00000269821_591 (sequence is synthesized)
ataaagaactacctgagactgggtaatttgtgagaaaagaggtttaattgactcacagttttgtaggctgtacagtaagcatggctggcaggcctcagaaacttaaaatcatggcggaag

SEQ ID NO: 982791 - DNA, 120 bp, Artificial Sequence
  ENSG00000269821_592 (sequence is synthesized)
agaaacttaaaatcatggcggaaggcaaaggagaagcaggcacatctttaccatggcagaacaggagagggaaagaaagtgagatgggaagtgccacacacgtttaaacaaccagatctc

SEQ ID NO: 982792 - DNA, 63 bp, Artificial Sequence
  ENSG00000269821_593 (sequence is synthesized)
cacacttgccccccaccaggcccctcccctgacacatggggattacagttcaagatgagattt

SEQ ID NO: 982793 - DNA, 120 bp, Artificial Sequence
  ENSG00000269821_594 (sequence is synthesized)
tatcaacatgttacacatttgtagaaacccacagaatgtacaccccaacagtgagccctaatgttaactagggactttgataataatgtgtaaatgcagattcataagttgtaacaaacg

SEQ ID NO: 982794 - DNA, 120 bp, Artificial Sequence
  ENSG00000269821_595 (sequence is synthesized)
tgccactctggtgggagagttggtaatgggaaaagctctgtatgtatgggtgcagtgggtatacgggaaatctctgtacttacctctcaattttgctggaaccctaaaactgctctaaaa

SEQ ID NO: 982795 - DNA, 120 bp, Artificial Sequence
  ENSG00000269821_596 (sequence is synthesized)
atataaagtctttaaaatacacatacacacatacagacaatcgaatagagaatcataatggtacactatcagaaaatcatcaaacacaaaaaaaggcagtaagggaggaaatgttgtatt

SEQ ID NO: 982796 - DNA, 120 bp, Artificial Sequence
  ENSG00000269821_597 (sequence is synthesized)
taaaaaatgtaaggcaaaagaaaaggcacaaaatgtcagaacttcttttttataagtaagtactttaaatgtaagtcgattaaattctccaaaaagcagaggttggcagaatggatttaa

SEQ ID NO: 982797 - DNA, 120 bp, Artificial Sequence
  ENSG00000269821_598 (sequence is synthesized)
aagaaaaccatcaacctatgctgtatataacaaactcacttttggtctaaagacacaagtagattgaaagtgaaagaatgaaaaatgatatttcatacaaatagtaacctaaagaaagct

SEQ ID NO: 982798 - DNA, 120 bp, Artificial Sequence
  ENSG00000269821_599 (sequence is synthesized)
ggaggtaattatactaataaaagaaataaacttgaatttaaaaattgttataggagacaaaggaggacattacatactgagaaaatggaaaattactcaagacttcgcaattggaaacgt

SEQ ID NO: 982799 - DNA, 120 bp, Artificial Sequence
  ENSG00000269821_600 (sequence is synthesized)
atacacaccaaaatatagagccccagaatataagaaaatatactgacagaattggagtgagaaagacagttctacaataatacttagggacttcaataacgtactttcagtaatgggtag

SEQ ID NO: 982800 - DNA, 120 bp, Artificial Sequence
  ENSG00000269821_601 (sequence is synthesized)
agtcaaagaagaaatgaaaacagaaacttaaaaatatcttcagacaaatgacagtgggaacacaacataccaaaagcaaaacatgcagcaaaagcagttctaagagggaagtttacagca

SEQ ID NO: 982801 - DNA, 120 bp, Artificial Sequence
  ENSG00000269821_602 (sequence is synthesized)
ataaatgccttgcctacattaaaaaagaagagatatttcaaatagcccaaaattgtacctcaaggaattagaaaaagaagaacaaactaaagccaaagttaacagaaggaaataataaag

SEQ ID NO: 982802 - DNA, 120 bp, Artificial Sequence
  ENSG00000269821_603 (sequence is synthesized)
atcagaacagagacaagttagaaagaaaaaccataggggaaaaaagtcagtaaaactaagacttcaatttttgaaacaaagaattgatttttgaaaaataaaatcaacaaactcttggac

SEQ ID NO: 982803 - DNA, 120 bp, Artificial Sequence
  ENSG00000269821_604 (sequence is synthesized)
taagaaagaggacaaaatcagaaatgaaaatggagaatatattacaacaggtacttcagaaataaaaaggatcataagggacttttatgaacaattatatcccaacaaattggataacct

SEQ ID NO: 982804 - DNA, 120 bp, Artificial Sequence
  ENSG00000269821_605 (sequence is synthesized)
agaggaaatggacaaattcctagaaaaaaaccaacctgctaagattaaatcaggaatagaaagcctgaacagaccaatagcaaagagatcacagtggtaaactaaagagcttctgcatag

SEQ ID NO: 982805 - DNA, 120 bp, Artificial Sequence
  ENSG00000269821_606 (sequence is synthesized)
caaaagaaattatcaacagagtaaacagacaacatatagaatgggagaaaaaatatttgcaaactattcatctggcaaaggtcctatgtccagaatccataaggaacttaaaccaatcaa

SEQ ID NO: 982806 - DNA, 120 bp, Artificial Sequence
  ENSG00000269821_607 (sequence is synthesized)
caagcaaaaaacgaataatccaattgaattggcaaaggacaggaacatacatttcttaaaagaaaatacagaagtagccaaacaaaaaaacattctcatgatcactaataatcagaaatg

SEQ ID NO: 982807 - DNA, 62 bp, Artificial Sequence
  ENSG00000269821_608 (sequence is synthesized)
cagaaatgcaaatacgtggatcatctggggtcaggtattcgagaccatcctggccaacatgg

SEQ ID NO: 982808 - DNA, 90 bp, Artificial Sequence
  ENSG00000269821_609 (sequence is synthesized)
ccagcctgggagacagagcaagactctttctcaaaaaacaaacaaacaaacaaaaaagccaacaacaacaaaaaaacaccaaaccataat

SEQ ID NO: 982809 - DNA, 89 bp, Artificial Sequence
  ENSG00000269821_610 (sequence is synthesized)
ataaaagttgctgggaaggctgcagagaaaagggaacgcttatacactgttggcaggaatacaaattagttcagccactgtgctaagca

SEQ ID NO: 982810 - DNA, 120 bp, Artificial Sequence
  ENSG00000269821_611 (sequence is synthesized)
gcttatacactgttggcaggaatacaaattagttcagccactgtgctaagcagtttggagttttctcaaataactgaaaacagaactaccatctgacccagcaatcccattactggatat

SEQ ID NO: 982811 - DNA, 77 bp, Artificial Sequence
  ENSG00000269821_612 (sequence is synthesized)
cccagcaatcccattactggatatatattcaaaggaaaataaattgttctatcaaaaagacacatgcatttgtcact

SEQ ID NO: 982812 - DNA, 88 bp, Artificial Sequence
  ENSG00000269821_613 (sequence is synthesized)
tatacatgaatgaacttacgtcctttgcagcaacatggatgcagctagaggccactatcttaagcaaattaatgcaggaacagaaaac

SEQ ID NO: 982813 - DNA, 120 bp, Artificial Sequence
  ENSG00000269821_614 (sequence is synthesized)
gggacctaaacactgagtaaacatggacataaagatgatcagtagacactggggactacttgggggaggaatggagaggtgggctgaaaacctacctattgggtactatgctcactacct

SEQ ID NO: 982814 - DNA, 120 bp, Artificial Sequence
  ENSG00000269821_615 (sequence is synthesized)
gggtgataggcttatccacactccaaacctcatcatcatgcagtatactccatataccatgcaacatatagacctgtacatataccctctaaatcaaaaataaaagttaaaaaaacccca

SEQ ID NO: 982815 - DNA, 120 bp, Artificial Sequence
  ENSG00000269821_616 (sequence is synthesized)
aaacctcaaacaaagaaaagcccaggaccagatagcttcatgactgaatactacccaatattcaaagaataccaatacttcttaaactcttccaaaaaaatgcagctatagggaatactt

SEQ ID NO: 982816 - DNA, 120 bp, Artificial Sequence
  ENSG00000269821_617 (sequence is synthesized)
ccaaaaaaaaaaaaatgcagctaaagggaatacttcctaacacattttatgaggccagcatcaccttgatacccaggtgagccaaaggcatcacaagaaaaggaaactacaggccaacat

SEQ ID NO: 982817 - DNA, 120 bp, Artificial Sequence
  ENSG00000269821_618 (sequence is synthesized)
aacccaagaataccgatgcaaaaatccttaataaaatattggcagactaaatttaacaatacatcaaaaagattatatatcatgtctatgtggaattaatttctggcatgcaaatcttat

SEQ ID NO: 982818 - DNA, 120 bp, Artificial Sequence
  ENSG00000269821_619 (sequence is synthesized)
ttaatatacatgtagcaatcaatgtgatactaacagactgaaagatgaaaaccacatgatcatctcaattgacacacaaaaagtatttgatgaagttgaacatcctttgttgataaattc

SEQ ID NO: 982819 - DNA, 120 bp, Artificial Sequence
  ENSG00000269821_620 (sequence is synthesized)
taacagttcaggtatagaaggaacactcctcaatataacgaatgccatttatgaaaagcccacagctaacgttataatcaatgagggaaaacagaagcccttctactatgaaccagtaca

SEQ ID NO: 982820 - DNA, 120 bp, Artificial Sequence
  ENSG00000269821_621 (sequence is synthesized)
aggcaaggatgcccactctagctactactactcaacatagtactggaagtactagtacaaccaaacagacaagaaaaagaaatgaaagacattcaaatcaggaagtaagaagtaatatta

SEQ ID NO: 982821 - DNA, 120 bp, Artificial Sequence
  ENSG00000269821_622 (sequence is synthesized)
tctttatatgaagatgacatgatcctacatatagaaaaccccgaagactctgacaaagcaacctgttagaactaataaatgagttcagtaaagttgtaggatataaaatcaatataaaac

SEQ ID NO: 982822 - DNA, 120 bp, Artificial Sequence
  ENSG00000269821_623 (sequence is synthesized)
agtagttgcatttctatacacaaataatgacctggccaaaaaagaaatcaagaaaacaatcccatttatgatagcatcaaaaaaattgcttaggaataaatttagccaaaaagatgaaag

SEQ ID NO: 982823 - DNA, 120 bp, Artificial Sequence
  ENSG00000269821_624 (sequence is synthesized)
acctgtacactgaaaactatgaatcattgatgaaagaaattaaacaagatacaaataaatggaaagatatcccatgctcatgaatctgaataatattgttaaaatgtcaataatatccaa

SEQ ID NO: 982824 - DNA, 120 bp, Artificial Sequence
  ENSG00000269821_625 (sequence is synthesized)
atcaatatacagattgaataaaatccctatcaaaatcccatggaaaatttttttaaattctaaagttcatttggaatagcaagaaccttaagtagccaacgaaattctgaaaattctgtt

SEQ ID NO: 982825 - DNA, 120 bp, Artificial Sequence
  ENSG00000269821_626 (sequence is synthesized)
ctgaaaaacaaagggagacttcatactttctggtttattttacaaaactattgatcaaacagtatggtcctggcataaaaaacaaacatgtagaccagtggaacagaatagagagcccag

SEQ ID NO: 982826 - DNA, 120 bp, Artificial Sequence
  ENSG00000269821_627 (sequence is synthesized)
aaagaaattcaaagatatatgatcaaccaattttccacaagaacacgaagaaaacaatgcagaaagatagtctctctcataaatgacgttaggaaacccagttctgtggcttgtccaacc

SEQ ID NO: 982827 - DNA, 120 bp, Artificial Sequence
  ENSG00000269821_628 (sequence is synthesized)
catggcccacagaccacatgtaagcccaggatggctttaatgaggcccaacacaaatttgtaaactttgttaaaacattgaatttttttgcatttttttagcccatcagctgttgttatt

SEQ ID NO: 982828 - DNA, 120 bp, Artificial Sequence
  ENSG00000269821_629 (sequence is synthesized)
gttagtgtattttatgtgtggcctaagacaattgttcttacagtgtggccccgggaagccaaaagatttgatatcgctgccttacaccatacatagaaataaactcaaaatggataaaag

SEQ ID NO: 982829 - DNA, 120 bp, Artificial Sequence
  ENSG00000269821_630 (sequence is synthesized)
acctaaacataagaccaaaacccacaaccagaagaaaacataggggaaaagctcgacatggctctggcagtgattttttggagatcacaccaaaagctcaggctacaaaaacaaataatt

SEQ ID NO: 982830 - DNA, 120 bp, Artificial Sequence
  ENSG00000269821_631 (sequence is synthesized)
ggtataccatcaaactaaaaaacttctgcacaggaacggaaacagtcaacaaaaggaaaaggcaacctatggactagaagaaaatatttgccaaccatatatcttataagaggataatat

SEQ ID NO: 982831 - DNA, 120 bp, Artificial Sequence
  ENSG00000269821_632 (sequence is synthesized)
ccaaaatttataaggaatgcatacaactcaataacaagaaaatagataacccaattaaaaaatgggcagtggaactgagtagacatttttgcaaagaagttataaaaatggcaaacacat

SEQ ID NO: 982832 - DNA, 120 bp, Artificial Sequence
  ENSG00000269821_633 (sequence is synthesized)
atatgaaaagacatttaacatcactaatcgtcagggaaatgcaaatcaaaattactatgcgatatcacctcacactcatgagaatagctattaagtgttggctagggttagggaactctt

SEQ ID NO: 982833 - DNA, 120 bp, Artificial Sequence
  ENSG00000269821_634 (sequence is synthesized)
gtacagtgttggtgggactgtagattggtgcagtcataatgaaaaacagaatggtggctcctaaagaaattgaaaatatactatcatctgacccactaatccctcttctaggtatattcc

SEQ ID NO: 982834 - DNA, 120 bp, Artificial Sequence
  ENSG00000269821_635 (sequence is synthesized)
caaagaaaatgaaatctccacctcataaagatatctgcgctcctatattcattgtggcattatatgcatgagtcacgatatgaaaacttacgtgtccattgatggatgactaaactgtgg

SEQ ID NO: 982835 - DNA, 120 bp, Artificial Sequence
  ENSG00000269821_636 (sequence is synthesized)
tgtgtatgtctacaatggaatattattccgcattaaaaaaggagatcctgccacttgccacatggatgaaactggaagacattgtgctaagttaaataagccatatacaaatgaaaagtt

SEQ ID NO: 982836 - DNA, 120 bp, Artificial Sequence
  ENSG00000269821_637 (sequence is synthesized)
ttaaataatctcacctatatgtagaatcttaaaaagaaaaaagtcaaatatacagagatagaataaactagtggttaccatgggcaaggtgtgggggaagaaaatggaaagatgtaggtc

SEQ ID NO: 982837 - DNA, 120 bp, Artificial Sequence
  ENSG00000269821_638 (sequence is synthesized)
aaaggataccaagtagcagatatataggatgaacaagtctagagatctcatgtagaacatgagaatagttagtatattgcatttggaatttttgccaattgagtagatcatagcttttct

SEQ ID NO: 982838 - DNA, 120 bp, Artificial Sequence
  ENSG00000269821_639 (sequence is synthesized)
cactcatacacacaaaagaataactgtgagatgatggacatattaatttgcatcactatgttaacgatttaactgtatgttttatacactaaatatgcatatttttaaaattaaaaaaaa

SEQ ID NO: 982839 - DNA, 120 bp, Artificial Sequence
  ENSG00000269821_640 (sequence is synthesized)
aaaacacaacaagataatgtacagccagacagaagcccaataagaaaagagaggacttgaacaataccataaaccaactagacctacaaacatatatggacactccacccaactacacat

SEQ ID NO: 982840 - DNA, 120 bp, Artificial Sequence
  ENSG00000269821_641 (sequence is synthesized)
tcttctcaagtgcacatggaacattccctaggagggatgatatgttaggccacaaaagagtctcaataaattttaaaatatagaaatcatacaaaatatcttctctaactacaatatagt

SEQ ID NO: 982841 - DNA, 120 bp, Artificial Sequence
  ENSG00000269821_642 (sequence is synthesized)
gaggccagaaatctgtaacagaagaaaaacctaaaaattaacaaattcagggaaataaaactacacactctttaaaaattattgtgtcaaagaagacatcagaagggaaattataaaata

SEQ ID NO: 982842 - DNA, 120 bp, Artificial Sequence
  ENSG00000269821_643 (sequence is synthesized)
ctttcaaaaagtgaaaatgacgacacaacatactcagacttatgggatgtagtgaaagaagtgctcagaggaaaaattatagctgtgaatgcccacactgaaaaagaagaaggatccata

SEQ ID NO: 982843 - DNA, 120 bp, Artificial Sequence
  ENSG00000269821_644 (sequence is synthesized)
acctaatattataccttacgtaaccagagaaagaagaacgaagtaaacctaaagttaaaagagagaatgaaataatatgtatgagtggagataaaactgaattcgagcttaaataaacaa

SEQ ID NO: 982844 - DNA, 120 bp, Artificial Sequence
  ENSG00000269821_645 (sequence is synthesized)
cagagataatttaacaaaaccaaaagttgcttgtttttgaaaagatcaaagttgaaaacctttaactagaatgactaataaaaaattagagaagttgcacatatctaaaatcataaacaa

SEQ ID NO: 982845 - DNA, 120 bp, Artificial Sequence
  ENSG00000269821_646 (sequence is synthesized)
aaaacaaaaataagaaaaaaaaacaaaagtgggaacgatataactgatcttacagaaataaaaagtgtgataaaagaatactatgaataactgtataccaacaaattatataacctagat

SEQ ID NO: 982846 - DNA, 120 bp, Artificial Sequence
  ENSG00000269821_647 (sequence is synthesized)
acaaattatataacctagataagatggacgaattcacaaaatactaatacagaccaaaacagaaattgaaattatgagcagacccataacaagtagaaagtttgaatcagtaaccaaaaa

SEQ ID NO: 982847 - DNA, 120 bp, Artificial Sequence
  ENSG00000269821_648 (sequence is synthesized)
ccttccaatgaagaaaatgctacacagatggcgtcactgttgaattataccaaacacttgaagaattcacaccaatccctctcaaactcttccaaaaaacagaggagaaaaaactttgca

SEQ ID NO: 982848 - DNA, 120 bp, Artificial Sequence
  ENSG00000269821_649 (sequence is synthesized)
atacattctatgaggccagtattacatggattccaaagccagacaaatataccacaagaaaagacaaactagatactaaaatcttttatttaacaaagtactagtaagccaaattcagca

SEQ ID NO: 982849 - DNA, 120 bp, Artificial Sequence
  ENSG00000269821_650 (sequence is synthesized)
gcatattaaaaaggattatatatcatgaccacatggaatttatctcaagaatacaagggtggttcagtacaagagtatcaatcaatgtaatacaccacattaatacaatgaaggataaaa

SEQ ID NO: 982850 - DNA, 120 bp, Artificial Sequence
  ENSG00000269821_651 (sequence is synthesized)
aatccatgcaatcatttcaattcactcagaacaagcatttgacaaaattctacaacctttcaggataaaaacatggaactttcaaaatgtgttaaagaggatttgtgaaaaatccacaac

SEQ ID NO: 982851 - DNA, 120 bp, Artificial Sequence
  ENSG00000269821_652 (sequence is synthesized)
taatatacttaatgagaaaaaaaactgaaaaatttctcccataacaaagagtaagatatggctgtatgctttacccagtgctattgaacaatgtactgaaagttttaaccatgacaatta

SEQ ID NO: 982852 - DNA, 120 bp, Artificial Sequence
  ENSG00000269821_653 (sequence is synthesized)
ggcagataaataaacaaacaggtaaatgaatagcatccaaattggaaaggaagcagtaaaactctttattcaataatgacatcttctatctagaaaatcaaagaatccacaaactagtag

SEQ ID NO: 982853 - DNA, 120 bp, Artificial Sequence
  ENSG00000269821_654 (sequence is synthesized)
agctaataaacaagtccagcaaaattgcagggtacatgttcaacatttattttaagaaaatcatttgtgcctctatataccaggaatgaacagcccaagaaggaagtcaatttttaaaat

SEQ ID NO: 982854 - DNA, 120 bp, Artificial Sequence
  ENSG00000269821_655 (sequence is synthesized)
tccacttacaatagcatcaaaaagagtaaaatagctaggaataaattaaaacaagaaggtgaaagacttctgcactaaagactacaaaacactgttgacaaaaattaaagaagacttaaa

SEQ ID NO: 982855 - DNA, 120 bp, Artificial Sequence
  ENSG00000269821_656 (sequence is synthesized)
taaatagaactatacatcctgtgttcacagattggaagattaaatattgttaagttggcgatattacccagtgatctacagattcaatgcaacccttatcaaaatcccaagggccttttt

SEQ ID NO: 982856 - DNA, 120 bp, Artificial Sequence
  ENSG00000269821_657 (sequence is synthesized)
atttgcagaaatgtaaaaactgattttaaaatgtaaatggaattttcccagggccccaaacaatctaaaatcatattgaaaaagaacaaagttggaagactcaggcctgccattttcaaa

SEQ ID NO: 982857 - DNA, 120 bp, Artificial Sequence
  ENSG00000269821_658 (sequence is synthesized)
acttttacaaagctgcagtaatcaaaacaatgtggtactgacacaatgtggtctctaggacacaaggatggacatatagaccaatggaatataatagagaatgtagaaataaacactcac

SEQ ID NO: 982858 - DNA, 120 bp, Artificial Sequence
  ENSG00000269821_659 (sequence is synthesized)
atatatgatcaattcattttcaacaaatgtatcaagaattcagtgggaagagtagtcttttaacaaatggtgctggggcaactggatcctcatatatcaaagaatgaagttggacccata

SEQ ID NO: 982859 - DNA, 120 bp, Artificial Sequence
  ENSG00000269821_660 (sequence is synthesized)
actcatagcatataaaaattatctcaaaatgtatcagagaccaaaaaataagagttaaaggcataaatttcttagtagaaaacaggagtaaatctttatgacttgagattggaaataaat

SEQ ID NO: 982860 - DNA, 120 bp, Artificial Sequence
  ENSG00000269821_661 (sequence is synthesized)
tcttagaaaagacacaaaaaacacaatattgtaaatgtactaagtgacactgaattgtacattttgaaatggtttctgttacttaaaaaatttaaagggtgcacagaagactaaaaagca

SEQ ID NO: 982861 - DNA, 120 bp, Artificial Sequence
  ENSG00000269821_662 (sequence is synthesized)
gcacagacagaattatcaccagaaaaagaagactctatattaaatgtcaacatggagaacacatgtcagaaataggtagtccagagcagcagctatagtggaggctcttgcaaatgacta

SEQ ID NO: 982862 - DNA, 120 bp, Artificial Sequence
  ENSG00000269821_663 (sequence is synthesized)
agatttgaggtggcaccctcagagaatcacctcttgggggtagattcgatttatggagtagatgtatctcagagacatggtaggaaagccaaagaatggtgagcatagctgccatctaga

SEQ ID NO: 982863 - DNA, 120 bp, Artificial Sequence
  ENSG00000269821_664 (sequence is synthesized)
aaccacctacacatgcaagcataagagattggttgaaaggttatagcacagtcacactaaggaatactatgcaactttagcaatgcaatgagaaagatctctgtgaatggatgttgagtg

SEQ ID NO: 982864 - DNA, 120 bp, Artificial Sequence
  ENSG00000269821_665 (sequence is synthesized)
atttctaggagatgttgttaggtgagaaaagcaaagttcaaaagggcatatacagaatagtacttttttgggaaatgagaaaataatcatgtcttataaagagcaaacacacacaaacta

SEQ ID NO: 982865 - DNA, 120 bp, Artificial Sequence
  ENSG00000269821_666 (sequence is synthesized)
taaactagaaaacactgaaactggttacctataatgggtagggggaattaggatggaagagatatgggtgagaggaagatttctctcagtagctccttttgtttagtattgacttttgga

SEQ ID NO: 982866 - DNA, 120 bp, Artificial Sequence
  ENSG00000269821_667 (sequence is synthesized)
agtatgttaatgttatatgtattcaaaaaataaaattaacaagatagggaccacttctgaggtggtggaatgagcaccttgatataaccactccctgaaaagcaatgataaaactggaca

SEQ ID NO: 982867 - DNA, 120 bp, Artificial Sequence
  ENSG00000269821_668 (sequence is synthesized)
aagaaatataaaattgaaaagtgctaattaaagaaaaaatattaagccttcctaagaatagcagggttatgatttaacgtggggctgccatctccccacccaagctcaggggcacggtag

SEQ ID NO: 982868 - DNA, 120 bp, Artificial Sequence
  ENSG00000269821_669 (sequence is synthesized)
gcttgaggaccagcaacaaagaaggctcatctgattttgaattccatagaaaaccctatgcactatgttaagcaacaaggatttcagtggcaaataattggaggcaacccacatcacagc

SEQ ID NO: 982869 - DNA, 120 bp, Artificial Sequence
  ENSG00000269821_670 (sequence is synthesized)
aacctaatgtttcaatactggttgggcaagcgacagattaagaaaaattttaaaaggaattctggagatatggaagttgtacatgcttgcaggagagatcagagaggtttcctgctatct

SEQ ID NO: 982870 - DNA, 120 bp, Artificial Sequence
  ENSG00000269821_671 (sequence is synthesized)
acttatccttggctgactgtgagaccttttgcaagcagacagtaaaatacaggacagagttataaagtgcctgaactttgaatgtcccaacccacacatagatcccctcagcagagggtg

SEQ ID NO: 982871 - DNA, 120 bp, Artificial Sequence
  ENSG00000269821_672 (sequence is synthesized)
gaagattcactggctcaagatgtttaaacaaatgtctgactaatcatggcttgaccactaggttatgctgatccaggggtgacaccaatgaagccaggcttacaaaacaaacataagaat

SEQ ID NO: 982872 - DNA, 120 bp, Artificial Sequence
  ENSG00000269821_673 (sequence is synthesized)
taaaacaaacaaaactgagcaaagacaccagtggctgcacactgcaggagaacacagactctgcagaatccatgcagagaaggcatacacaagcgagcaaacaaataaatgagtaacaga

SEQ ID NO: 982873 - DNA, 120 bp, Artificial Sequence
  ENSG00000269821_674 (sequence is synthesized)
aatcatccctggttagggagaagaactagaatccagagtttctacgatatattatctaaagtaagtttttaacaaaaaaaatgagatatgcaaagaaacagaaaattgtgacccttgaac

SEQ ID NO: 982874 - DNA, 120 bp, Artificial Sequence
  ENSG00000269821_675 (sequence is synthesized)
aagaataatgagcaataaataggaattatctctgaagggccccaaatgttagggcgcgatttcaaagtaagtattataactatgttcaaagaaccaaaagaaaccacattaaagaatgca

SEQ ID NO: 982875 - DNA, 120 bp, Artificial Sequence
  ENSG00000269821_676 (sequence is synthesized)
agtgtgatgacaaagactcatcaaatagataatatcaatatagagatagaaattagaaaccaaatagaaattctgtagttgtgaaatataataacttaggtgaaaaactcactagtgcgg

SEQ ID NO: 982876 - DNA, 120 bp, Artificial Sequence
  ENSG00000269821_677 (sequence is synthesized)
ctaagcaaatttgacctggcagaagaaagaatcaatgaacttcaacgcagatccataaagatgattcagactgaagaatagaaagaaaaataatgaagaaaaatgaagagatacccattg

SEQ ID NO: 982877 - DNA, 87 bp, Artificial Sequence
  ENSG00000269821_678 (sequence is synthesized)
ccagttgggggaggctttagttagattctcatacggagtgcacaacctagatccctcacatgctcagttcacaataggatttgctct

SEQ ID NO: 982878 - DNA, 120 bp, Artificial Sequence
  ENSG00000269821_679 (sequence is synthesized)
gattctcatacggagtgcacaacctagatccctcacatgctcagttcacaataggatttgctctctgtgagaatctaatgccatcactgatcagacaggaggcagagctcaggcagtaat

SEQ ID NO: 982879 - DNA, 120 bp, Artificial Sequence
  ENSG00000269821_680 (sequence is synthesized)
ctgctgtgtagcccagtttctaataggccacagactggtaccagtccatggccctggggttgggaacccctgtcctaacaggatgtgtaacaatgtatgtgtaattaagttgtaacatat

SEQ ID NO: 982880 - DNA, 120 bp, Artificial Sequence
  ENSG00000269821_681 (sequence is synthesized)
atgtaattaagagtagaaaacatatgtggaattaaggagtaacaacatatgtgttaataagagtactgagaaggagagaatagggcagacaaaaatatttgagtagattattaacctgaa

SEQ ID NO: 982881 - DNA, 120 bp, Artificial Sequence
  ENSG00000269821_682 (sequence is synthesized)
gcagattgtttttgcttaagctgcttattgtaacctccagattacactttaaaaatgggggaaataaactaacaaaggaattagaatggtactctagaacatatctattcaacctgcaga

SEQ ID NO: 982882 - DNA, 120 bp, Artificial Sequence
  ENSG00000269821_683 (sequence is synthesized)
aggcagtaaaggaggaagagaggaacaaaagtgatatgagacatatagaaaataaataacaacatggtagatataaatccttccatatcaataattatattacatataagtgaattaaaa

SEQ ID NO: 982883 - DNA, 120 bp, Artificial Sequence
  ENSG00000269821_684 (sequence is synthesized)
actcaataaagagcagagattgccagactgccttaaaagcaggatccaaatatatatggtctataagagtcacattctagattcaaagacatagttgaaagtaaaatgatggaaaaagat

SEQ ID NO: 982884 - DNA, 90 bp, Artificial Sequence
  ENSG00000269821_685 (sequence is synthesized)
attcaaagacatagttgaaagtaaaatgatggaaaaagatgacatgcaaacagtaataagaaagctagagtgactgtactaaaatcagac

SEQ ID NO: 982885 - DNA, 120 bp, Artificial Sequence
  ENSG00000269821_686 (sequence is synthesized)
caaaatagactttaaaaacaaaccatgttattagagatactgagaagcattttacaatgacaaaagggaaaatttaacaggaagaaatagaaatcataaacagaagtcataaagaaataa

SEQ ID NO: 982886 - DNA, 120 bp, Artificial Sequence
  ENSG00000269821_687 (sequence is synthesized)
aaatttataacagctaaaaacacagccctgaagtatatgaaataaaactgtcagaaatgaagagagaaacagacaactgaacaataatagacaactcaacaataatagtactaactcttg

SEQ ID NO: 982887 - DNA, 120 bp, Artificial Sequence
  ENSG00000269821_688 (sequence is synthesized)
ttgattttctgtcttgttgttctatcaattattcagagtgagttattgaactattacccaactactattcttggatgaaatggtgggaggtgaggctatgtggcactctgcttaataccc

SEQ ID NO: 982888 - DNA, 120 bp, Artificial Sequence
  ENSG00000269821_689 (sequence is synthesized)
tcccctgttctggtgtcagggagacaaatgtggagctgacttttcgtcagaaacagtggtacccagaaagtagtggggtaacagatcccaagtgctcaaagtaaaaaaaaaaaaaaaaaa

SEQ ID NO: 982889 - DNA, 120 bp, Artificial Sequence
  ENSG00000269821_690 (sequence is synthesized)
aaaaaaaaaaagccaaccaagaatactgtgtccagaaaagtttctttcaaaaagaaggcaaaataaaagcattcccagataaacaaaaacagaattccttgttagcagaccagttttgta

SEQ ID NO: 982890 - DNA, 120 bp, Artificial Sequence
  ENSG00000269821_691 (sequence is synthesized)
agaactactagaggaagttcttcaggcaaaaaggaagtgctcccaggaagttcacatatatccaaaagcaaagagcaaggaggtaaataggagcaaagctgttctagagtaaggaaatac

SEQ ID NO: 982891 - DNA, 120 bp, Artificial Sequence
  ENSG00000269821_692 (sequence is synthesized)
caccagttggtaactcaaatccataaaaaccaaaaaagtggatcaaatatatgatataaggaggttaataaaacagaaactagaaatatatacttgctctcctttcagcttctttaaaga

SEQ ID NO: 982892 - DNA, 120 bp, Artificial Sequence
  ENSG00000269821_693 (sequence is synthesized)
tatatcattatatagtatgatcattataatagcgcataataaagatgtaatatatgtaacaataccacaaaaagtggtaaaactgaataaactcatacaggaataacttctgtatctcac

SEQ ID NO: 982893 - DNA, 120 bp, Artificial Sequence
  ENSG00000269821_694 (sequence is synthesized)
caggattaatataaatatgaagtaaattttgagacgatacataaggtaagccctagagcaaacactaataacaaatagaatattgaagaatcataaaagaaatgaaaatttatattagaa

SEQ ID NO: 982894 - DNA, 120 bp, Artificial Sequence
  ENSG00000269821_695 (sequence is synthesized)
agtagtcactagatggaaaagaaagcagcaaaggagaaatagaggaacaagaaatagtacatagaaaagaccaaaagtaaaactgtggatataaatctaattatatcaataataatatta

SEQ ID NO: 982895 - DNA, 120 bp, Artificial Sequence
  ENSG00000269821_696 (sequence is synthesized)
aatgtgaatggattaaacaatctaatcaaaggcaggaattatcagaccagatttgaaaaacaggatccatctgtattccatctatatgaggcacactttagatgataaatgccaactgaa

SEQ ID NO: 982896 - DNA, 120 bp, Artificial Sequence
  ENSG00000269821_697 (sequence is synthesized)
agtaaaaggatggaaaaagatatatcatgtaagcagcaaccataagtaacctgaagtgctataataaagtcaaaggagattttaaattaagaatgttactgaagttaaatatgaatatct

SEQ ID NO: 982897 - DNA, 120 bp, Artificial Sequence
  ENSG00000269821_698 (sequence is synthesized)
cataatgataaaatgtcaattcatgagaagatacaatgattataaacatatattcacctaacaatagagaactaaaacataagaagcaaaaactgacagaactgaacagagaaatagcca

SEQ ID NO: 982898 - DNA, 120 bp, Artificial Sequence
  ENSG00000269821_699 (sequence is synthesized)
attcaacaatagtagttggagacttcaacactccactttcaataatgtgtagtacaagaaagaagatcaataaggaaacagaagatatgagcaacaccataaaccaactagactcaaaag

SEQ ID NO: 982899 - DNA, 120 bp, Artificial Sequence
  ENSG00000269821_700 (sequence is synthesized)
gtaattatagagcacttcgcccaacaaccaacattgaatatacagtattttcaagtgcacatgagacattctccaagaaggaccatatgctaagtcacgaaacaaacctgcataaattta

SEQ ID NO: 982900 - DNA, 120 bp, Artificial Sequence
  ENSG00000269821_701 (sequence is synthesized)
aaaggattgaaataatacaaggtatctttttctgaatataatgaaataaaagtagaactcagtagcaaagaaattagggaaacatacacatgtggaaattaaacaacactacattcttaa

SEQ ID NO: 982901 - DNA, 120 bp, Artificial Sequence
  ENSG00000269821_702 (sequence is synthesized)
ataatcaatgggtgaaagaattcacaagggaaatggaacgtactttgagattaatgaaaatgaagatacaacataacagaacttatgggatacatttaaagcagtgtaaagatggaattt

SEQ ID NO: 982902 - DNA, 120 bp, Artificial Sequence
  ENSG00000269821_703 (sequence is synthesized)
tatagctatgaatgcctatatcaaaaaataaggcttcaaatcagtaagccaactctccacctcaagaaactagaaaaagaagagcaaactaaacctaaagcaagtagaaaaaacaaaata

SEQ ID NO: 982903 - DNA, 120 bp, Artificial Sequence
  ENSG00000269821_704 (sequence is synthesized)
ataaatattagagtagaaataaaatatagaatataaaaataataaagtcaacaaatccaaaatttggttctttgaaattaacaaacctttgatagattggtaagagagagggagagggag

SEQ ID NO: 982904 - DNA, 120 bp, Artificial Sequence
  ENSG00000269821_705 (sequence is synthesized)
aagaaaagaaggggaggaagaaagagggggaggaggaaagacagagagggaagtgcatgaggcaaagggggagagagaaaactcaaattactaaaatcagaaatgaatgacagttttaca

SEQ ID NO: 982905 - DNA, 74 bp, Artificial Sequence
  ENSG00000269821_706 (sequence is synthesized)
tggccaggagttcgagaattgcttgtggccaggagttcaagaatagcatgcacaacaaagcaagaccctatctc

SEQ ID NO: 982906 - DNA, 120 bp, Artificial Sequence
  ENSG00000269821_707 (sequence is synthesized)
gttcaagaatagcatgcacaacaaagcaagaccctatctctacaaaatattttttgaataacagctggtgttgtggtgcacacctgtcataggctaaggggcaaggatcacttgagacta

SEQ ID NO: 982907 - DNA, 90 bp, Artificial Sequence
  ENSG00000269821_708 (sequence is synthesized)
tttctcaaaaagaaaaggaaaaaggaatgaatgagggaagtatactaccaacctgacagaaataaaaaggattatgaaggaacactatga

SEQ ID NO: 982908 - DNA, 120 bp, Artificial Sequence
  ENSG00000269821_709 (sequence is synthesized)
acctgacagaaataaaaaggattatgaaggaacactatgaacaattttgtgccaataaattataaaacttagatgaaattgacaaattcctagaaagatgaaaactatgaaaactgacta

SEQ ID NO: 982909 - DNA, 120 bp, Artificial Sequence
  ENSG00000265337_0 (sequence is synthesized)
ccacagagctccacgaaacctcctctagtgctgtataccttgtgaatgctgaataggtgatgcagactggtaatgaaccaaggagtttaaaacgctattgttcaagtggagatacagctg

SEQ ID NO: 982910 - DNA, 120 bp, Artificial Sequence
  ENSG00000265337_1 (sequence is synthesized)
tggagagcctcttggaaggcagccatgatcgtggagaggagtgttcatgtctcatccgggaaatctctcaccgcctgtgccccttccctgtcttctctcagacagcccatagaaacacat

SEQ ID NO: 982911 - DNA, 120 bp, Artificial Sequence
  ENSG00000265337_2 (sequence is synthesized)
tagcatcctgggcctgatgccattccttaagcaaaaggcacctgcccacccacatatgtccatgagtcccaccatctaatgcctacaggaagtaaaccagaagtctcatccgaggacacc

SEQ ID NO: 982912 - DNA, 83 bp, Artificial Sequence
  ENSG00000265334_0 (sequence is synthesized)
ggtaaaggtgtggtctccctgtgttgctcagcctggcctcaaactcctaggctcaagcaatggatgagccatggtgcctggcc

SEQ ID NO: 982913 - DNA, 120 bp, Artificial Sequence
  ENSG00000265334_1 (sequence is synthesized)
ccaggtatggaattttccacttagggcaccatgtcagcactcaaaatgttttggattttggagcatttcaaatttcagatttttggattagggatattcatcctgtataaagctatataa

SEQ ID NO: 982914 - DNA, 120 bp, Artificial Sequence
  ENSG00000265334_2 (sequence is synthesized)
ctgtaatcccagcactttgggaggtcatagtatttggttgactttttgtatcttgaatgttttctgcaagtacctctacttgtttcttgtaacgtaaaacagaagtactactttccacaa

SEQ ID NO: 982915 - DNA, 120 bp, Artificial Sequence
  ENSG00000265334_3 (sequence is synthesized)
gtaacgtaaaacagaagtactactttccacaaaatcattatttaaactatagtcttctttgctatcgtcgctactaatttcaattggagcttcattttcagttttaatattatttagttg

SEQ ID NO: 982916 - DNA, 120 bp, Artificial Sequence
  ENSG00000265334_4 (sequence is synthesized)
atgagataaattaaccctctttcttttcttcttaaactctacatttgagaacatttccaaaggtgtcgtacagtctttgttgctgtcaacaggtactgattcaggtgactttatcttgca

SEQ ID NO: 982917 - DNA, 120 bp, Artificial Sequence
  ENSG00000263278_0 (sequence is synthesized)
gacctctgatggtggcagggttgcctgcagcataccgctggggagggcgtgcacccttcccagccttgccacccagggcaggctctggaacctcagtttaccctgctgagaagcagggac

SEQ ID NO: 982918 - DNA, 120 bp, Artificial Sequence
  ENSG00000263278_1 (sequence is synthesized)
tgctgcgtggatcaggcgatctatgtaaagccgctgatgtgatctcatctaggacagctgagaaggatacacctagaatctgcatgcttttaactctatcggcatccccaggccacagac

SEQ ID NO: 982919 - DNA, 120 bp, Artificial Sequence
  ENSG00000263278_2 (sequence is synthesized)
aggagactttctgcagatctgcactttgtgttggaaaatacgtctgcttgtgtgtgtgcgtcggcagcattgccataaccagcattcactttcctgacttgcccaggctgcagcatgcaa

SEQ ID NO: 982920 - DNA, 120 bp, Artificial Sequence
  ENSG00000263278_3 (sequence is synthesized)
gatgagtgtcgcatgggtacctccccgcctcttggacttttaaaatagagccgtctctccagaacagacgggcacaactaaggccagatcactgataacagtatcagtatctacatgcta

SEQ ID NO: 982921 - DNA, 120 bp, Artificial Sequence
  ENSG00000263278_4 (sequence is synthesized)
aagacacagcccgcccccttcccatggggttctttccttggcagaagtcaccaaggagactgactttgggagaagtaatttctcccccttccggatatgttttgcttaaaacctaagaag

SEQ ID NO: 982922 - DNA, 120 bp, Artificial Sequence
  ENSG00000263278_5 (sequence is synthesized)
aaaactcacaagaccagactaggaaaatttcagcccccaaggataatttttcagaaagtaatgagcactggaaaatgagggctataaaggaagtctttaggtaataatcataactataat

SEQ ID NO: 982923 - DNA, 120 bp, Artificial Sequence
  ENSG00000263278_6 (sequence is synthesized)
gttcaccactttgaagtgcattaatatatactaaaattacagaaaatattaagtctgctgcaggggaagggggcgtgctttggagcttgtggctaaacctcctggaccagctctgttctc

SEQ ID NO: 982924 - DNA, 120 bp, Artificial Sequence
  ENSG00000263278_7 (sequence is synthesized)
ccggccacagctggggctatgtggcccctggcctgtccctgccctcacagagacacccaccctaagagaggatcctgtgcccctagctggggtccagttgcagacaccgtgaatgtggga

SEQ ID NO: 982925 - DNA, 120 bp, Artificial Sequence
  ENSG00000263278_8 (sequence is synthesized)
tggagaatcagtatcccccgcagcgggctccttttggggctgtgatgttttatagcctggcaagggaatgccaagactccctgagggtctggctcactttatcagggtcccgctgcttga

SEQ ID NO: 982926 - DNA, 120 bp, Artificial Sequence
  ENSG00000263278_9 (sequence is synthesized)
gagcaggagcctgggaggcgaggtgtgtagacgccccagccggggcccctcgaggctgcagtcgggctgaggcattcattcctccgcaggggccccggggcgggagcagcgggagcatgg

SEQ ID NO: 982927 - DNA, 120 bp, Artificial Sequence
  ENSG00000263278_10 (sequence is synthesized)
ccatgtcggctgcttgctttctcctgctgcctggctctctctgttcccctcctgacccccttctgcctctcctgcgttccccttcctcactcccctccttcaccttcagagccagcggac

SEQ ID NO: 982928 - DNA, 120 bp, Artificial Sequence
  ENSG00000263278_11 (sequence is synthesized)
ttctccaggctgcacgcaggcgaggggctggcaattgcaggtcaagcaggctcagctcggagcagcgggaggaaagatttacggttcctccctgccctgcttgatggacaattaaagccg

SEQ ID NO: 982929 - DNA, 120 bp, Artificial Sequence
  ENSG00000263278_12 (sequence is synthesized)
tgcatggttggaggagagcagtgtcgtgaagagtcaggatggtcagaataaatcagtcacctccacttagacggctgagctagactgcttccccgggccttcgaggtgggagccccctgg

SEQ ID NO: 982930 - DNA, 120 bp, Artificial Sequence
  ENSG00000263278_13 (sequence is synthesized)
ggtgtggctttgaaggttcctgaatggactgttcaagggtttgacatactctgagctccatcagagtcagagcctgaagaccccgggggtctcctcacaaatggggcatgtgctgtaggg

SEQ ID NO: 982931 - DNA, 120 bp, Artificial Sequence
  ENSG00000263278_14 (sequence is synthesized)
aattaagggaaaattctggataatgtgtttagagggcgttttgtctccatggtatctggcatttgcaagagcctcaaacctgaatgtttggaagtcaggatagtggacccccacctgcaa

SEQ ID NO: 982932 - DNA, 120 bp, Artificial Sequence
  ENSG00000263278_15 (sequence is synthesized)
gcagagcttgtgcacatgtatgtgtgcacaggtgcgtgcatatcagtgcacacatgcacacgtgtagattgtacatgcatgtgcctgtgtgtagagtgtgcacacaggcatgcatgtgca

SEQ ID NO: 982933 - DNA, 120 bp, Artificial Sequence
  ENSG00000263278_16 (sequence is synthesized)
tcctgtatgtgtgcatgtgtgtgcatgtatgtgcacatgcacaagtgtgtttctgcatttgtgtacccacatgtacctgtgtgcgtgcatgagcatatgtgtgtcgtacatgtgtgagca

SEQ ID NO: 982934 - DNA, 120 bp, Artificial Sequence
  ENSG00000263278_17 (sequence is synthesized)
tgtgtgtcatgtattggtactggtgcttgcctcttggacatcgcaggctccacttgtgtctttaaacacacacgcccctctgcaaggctgccgggagctgggcttctgagcatccaccaa

SEQ ID NO: 982935 - DNA, 120 bp, Artificial Sequence
  ENSG00000263278_18 (sequence is synthesized)
gccctgcggccgtccttcttcatttgttctgtgtgttatttcagtaccttgaagactctggcaatttcctcaaggaaactttgtctttgtggaaatgagatgccagcactcctcggccct

SEQ ID NO: 982936 - DNA, 120 bp, Artificial Sequence
  ENSG00000263278_19 (sequence is synthesized)
cccactggctaattgatgatatgatcccgcgtgggagacttgccattcctggaaatgctctttatttcctgggccccccctgccccctgcccgccatcgtctgatttctacgagctgctg

SEQ ID NO: 982937 - DNA, 120 bp, Artificial Sequence
  ENSG00000263278_20 (sequence is synthesized)
catgtgaggtgcagggccaggcatttgctgtgactcagcccatgtgccaggcctttcattaacttggatactacaattatgtgtgccaagagactgcgagggccatttaggatttttctc

SEQ ID NO: 982938 - DNA, 120 bp, Artificial Sequence
  ENSG00000263278_21 (sequence is synthesized)
cctttaagaaaatattcctttttccccagccaggtagcccagccctttgcctctgcagctgtggcccaagcactcctcagctctcccggcaccaacctgcaacaaactcttgttgggggg

SEQ ID NO: 982939 - DNA, 120 bp, Artificial Sequence
  ENSG00000263278_22 (sequence is synthesized)
ctgcggctccgccatggttctgtcggaggtgctcagtgggtggtcaaggcagcctgcccttgggagccgcaagacgtggcctgctgcggtggcttcacggtcacggcacgaatagcagcg

SEQ ID NO: 982940 - DNA, 120 bp, Artificial Sequence
  ENSG00000263278_23 (sequence is synthesized)
tgcgtgcttttgtgcctgtgtgagcacatgtacaccccatcggcacacgcgaggatgacctttggcacagaacacctgctgctgtggcctgcacagagaagggctgaccccaggacagcg

SEQ ID NO: 982941 - DNA, 120 bp, Artificial Sequence
  ENSG00000263278_24 (sequence is synthesized)
gctcccattcgcctccaccaaggccagctggacccttcaagggaccctgagaatctccgagtgtgggcagtggggtcgtgtcgtgcgggggtggagttgcacgggtctcctgtgcaccta

SEQ ID NO: 982942 - DNA, 120 bp, Artificial Sequence
  ENSG00000263278_25 (sequence is synthesized)
cacatgcgtgctggccagcatattagtatgttcgcaggggtagcctgaccctcttcccccacttaggagatgcgtgcgtggaaacttgcccccgtgggtgtcttgggatgaatatttggg

SEQ ID NO: 982943 - DNA, 120 bp, Artificial Sequence
  ENSG00000263278_26 (sequence is synthesized)
atcctggtggatctggattgcagagtagctgggcactgtaagagttcctgtaaatgttgggtctcctggggagggggaggcatggagcacttctcacttctgtgggtgggtggaaggttg

SEQ ID NO: 982944 - DNA, 120 bp, Artificial Sequence
  ENSG00000263278_27 (sequence is synthesized)
gggaggggccacactggctcaagatcaccccacagggagcaacctaatctgaggacagacctgcctgggactctgtggaactgagatgagacacttgcttcccccttcaaaggtcatgag

SEQ ID NO: 982945 - DNA, 120 bp, Artificial Sequence
  ENSG00000263278_28 (sequence is synthesized)
attctggggacacgggctgccttccatacggtacccacaaagctcattaaaagcaccattcagaggcctcgttatctcaaaaaggaaggcaagagtccaacccactaagcaccaaataac

SEQ ID NO: 982946 - DNA, 120 bp, Artificial Sequence
  ENSG00000263278_29 (sequence is synthesized)
aactcaacaactcaaaaacttatttttttaaacttcctggagttgccatggttacttgcacggtccctgcgtctctgttgctctacgtggagctgcttggaggaggaattaaagcctcca

SEQ ID NO: 982947 - DNA, 120 bp, Artificial Sequence
  ENSG00000263278_30 (sequence is synthesized)
aggttcaccccttggaagggtctgtttatgctcctctgtggaggaaaagagctggagaaggtagggatcttccaggaccatgggatgtgattttccaacattgcacttcggagatgctgg

SEQ ID NO: 982948 - DNA, 120 bp, Artificial Sequence
  ENSG00000263278_31 (sequence is synthesized)
agacagaatttgtctcccacgctaaaataattatagccaggagaacagagaatacatcattctaagttaaggtccttaacaacgaggagggtgtgtgcgcgtgtgcatgtgtgtgtgtgt

SEQ ID NO: 982949 - DNA, 120 bp, Artificial Sequence
  ENSG00000263278_32 (sequence is synthesized)
gcgcgcacatgtgcatgtatgtgtgcacatgtgtgcatgtatgtgtgtgcatgtgcatgagcgtgtgtgtgcatgtgtgcacgtgtgcatgtgtgcatgtgcacggtcatctctgcattg

SEQ ID NO: 982950 - DNA, 120 bp, Artificial Sequence
  ENSG00000263278_33 (sequence is synthesized)
ccaccaccttcctcctggagtgctcttttgtactggccacgtgtgtaaaggcagtggcacctgaggcccctgcacctgttggtcaccctccagcaggcagcgctcctgctcctgtggctt

SEQ ID NO: 982951 - DNA, 120 bp, Artificial Sequence
  ENSG00000263278_34 (sequence is synthesized)
ctgcccaggcaatgttattggaaggcagatttctgcagcaggattttggggagaattgctagtgagggatggtggaaagagggtgggtcaaggaggaataataaagaagccaagactcct

SEQ ID NO: 982952 - DNA, 120 bp, Artificial Sequence
  ENSG00000263279_0 (sequence is synthesized)
tgccactgcactccagcctgagcaacagacaaagaccctgtctcaaacaacatcaacaaaccaggaactcaatcatttccaactgtgtgaagggccaagaggaaaatattcagggtgagg

SEQ ID NO: 982953 - DNA, 120 bp, Artificial Sequence
  ENSG00000263279_1 (sequence is synthesized)
gggtgagggtccatgagagtgctggctaataggctaaacatggagacacacgacggaccttctagaaaagacattccctgataaaaagcaatggtgcccattgatgcttctgctctttgt

SEQ ID NO: 982954 - DNA, 120 bp, Artificial Sequence
  ENSG00000263279_2 (sequence is synthesized)
acccttgccttcctgcctcgaatgagaatatcaagaggcccctggcatgcaggaacttgcagtataaaatgcaaaacctccttgggaacaggagaacacaaaccacatgctgtgggtggc

SEQ ID NO: 982955 - DNA, 120 bp, Artificial Sequence
  ENSG00000263279_3 (sequence is synthesized)
agaacagagagaggagcctgggtcccttctggcaccaagttgaggctggagccgcctgatctgtctccctctggaattttcctcatgacagaaaaataaattcctgtttggctaaaccac

SEQ ID NO: 982956 - DNA, 120 bp, Artificial Sequence
  ENSG00000263276_0 (sequence is synthesized)
tatagccatatgagtttgagaaatttttgttccgaactgtgtaaaccagaaaaagattagatgttaatacttggaagatttttaaaatctttttgttttggtctgtttttgtttataaca

SEQ ID NO: 982957 - DNA, 120 bp, Artificial Sequence
  ENSG00000263276_1 (sequence is synthesized)
gctgtaatgagatataattcacataccataaaatttatccttaaaagtatacaactcagtggtttttagtatagtcagagttttgcaactattactagtatctatttttatattgattga

SEQ ID NO: 982958 - DNA, 120 bp, Artificial Sequence
  ENSG00000263276_2 (sequence is synthesized)
gcaactattactagtatctatttttatattgattgattgattgattgattttttgagacagagtctcactcttgtttcccaggctggagtgcatggtgcaatctcggctcaccgcaacct

SEQ ID NO: 982959 - DNA, 120 bp, Artificial Sequence
  ENSG00000263276_3 (sequence is synthesized)
tacaggcatgagccactgcgcctggctactaatatctaattttataactccattactctgaaaagaaactccatactcattagtaattcctccctgtttctccctctctacaacctgtaa

SEQ ID NO: 982960 - DNA, 120 bp, Artificial Sequence
  ENSG00000263276_4 (sequence is synthesized)
cctccctgtttctccctctctacaacctgtaatctattttctgtctctatggattggcctgttctggacatttcatataaatggaatcatatatgaccttttattgtctggcctatttca

SEQ ID NO: 982961 - DNA, 120 bp, Artificial Sequence
  ENSG00000263276_5 (sequence is synthesized)
cttagcagactgttttcaaggctcatccatgttgtagcatgtatcagaacttcattacatctcaaggctgtatattccattttatggatagagacaacttacgtttatccattcatcact

SEQ ID NO: 982962 - DNA, 120 bp, Artificial Sequence
  ENSG00000263276_6 (sequence is synthesized)
tggtagacatttggattgtttccactttttggctattattaataatgctgctgtgaacatttgaaagtttttcatgtggacatatgttttcacttctcttgtaaatatgcctaggagtgg

SEQ ID NO: 982963 - DNA, 120 bp, Artificial Sequence
  ENSG00000263276_7 (sequence is synthesized)
aattagcatagactctttagttgataaggcaaggaatgaaatgatgtgagaactaaaggttcttatttgggggatttgggatgttcccttctatgttagttctgtaagatggaaattctt

SEQ ID NO: 982964 - DNA, 120 bp, Artificial Sequence
  ENSG00000263276_8 (sequence is synthesized)
tgctctggacctcacagagcactgtacctccctgagatgcttaggacatcagagaaattaacagaaaagctagagcctccaatcagaaaagatcacaaacaacagaaatgcccccacata

SEQ ID NO: 982965 - DNA, 120 bp, Artificial Sequence
  ENSG00000263276_9 (sequence is synthesized)
ataaagagtgcttgtattaggatacagtagcaaaatcacccccacatcacagtggtttattctgaccaaagcatttattttcattccatttacataggaggtggcattgtagaaaataaa

SEQ ID NO: 982966 - DNA, 120 bp, Artificial Sequence
  ENSG00000263276_10 (sequence is synthesized)
aactttctcaaagagatatgaattaaagaaaagttagagtaaggtgaatacttatttaaacatacctttagagtgagggtaagcccccttcccaacccaaaatgaactgaatgagagaga

SEQ ID NO: 982967 - DNA, 120 bp, Artificial Sequence
  ENSG00000263276_11 (sequence is synthesized)
tggagcgatgtttccatctctaatgccactcagctcaggagcaggcttcagacactgcctttatctttacagaaagccatgggaagggaaatgtctgaggtagagctcagcgttgggcat

SEQ ID NO: 982968 - DNA, 120 bp, Artificial Sequence
  ENSG00000263276_12 (sequence is synthesized)
catatggctaatcactcagaggtcactaatcactctcccttttcttgtttttcagtgaacgagataattgggagagacatgtcccagatttctgtttcccaaggagcaggggtgagcagg

SEQ ID NO: 982969 - DNA, 120 bp, Artificial Sequence
  ENSG00000263276_13 (sequence is synthesized)
caggctcccctcccgagtcctgagtccctggatttaggaagatctgatgggctctaacagtgcttactgcagccttgtgtccaccaccaacttctcagcatgtttctctccttggacctt

SEQ ID NO: 982970 - DNA, 120 bp, Artificial Sequence
  ENSG00000263276_14 (sequence is synthesized)
gggtttccaactctgcagccttcaggtctggggccaggagtgggacccaccatttgtggggaaagtagcattcctccacctcaggccttgggtagatttggcaaaagaacaggagcagca

SEQ ID NO: 982971 - DNA, 120 bp, Artificial Sequence
  ENSG00000263276_15 (sequence is synthesized)
taggctgtttgagctttggggaaatgaactttgctttttatatttaactaggatacttttatatgatgggtgctttgagtgtgaatgcagcaggctctcttgtttccgaggtgctgcttt

SEQ ID NO: 982972 - DNA, 120 bp, Artificial Sequence
  ENSG00000263276_16 (sequence is synthesized)
tgcaggtgacctggttacttagctaggattggtgatttgtactgctttatggtcatttgaagggccctttagtttttatgataatttttaaaataggaacttttgataagaccttctaga

SEQ ID NO: 982973 - DNA, 120 bp, Artificial Sequence
  ENSG00000263276_17 (sequence is synthesized)
aaaagaaaaaaagaaaaagaaaaaaatatcccaagcccacacctatgcctcagaaagtcagcatgtgtcctgaagacgttcatagatttataggaaataaagccaaatgtagctcatacc

SEQ ID NO: 982974 - DNA, 120 bp, Artificial Sequence
  ENSG00000263276_18 (sequence is synthesized)
catagatttataggaaataaagccaaatgtagctcatacctctttataaaactaaactgttgttagataaaatgagaagagaccattccatcattgaagtgttggaatataaaaagacat

SEQ ID NO: 982975 - DNA, 120 bp, Artificial Sequence
  ENSG00000263276_19 (sequence is synthesized)
tccagagcatagccttttggtaactttctaggtaatcttgcaatctctccatactggctccatgttgaaattgctttttccctcaggaccctgggtaagatggctacatttaaggtgact

SEQ ID NO: 982976 - DNA, 120 bp, Artificial Sequence
  ENSG00000263276_20 (sequence is synthesized)
ctgaatggtggggttctagcttggtcactttcatttcttgccatcataaaaactagtaggctgtggagtgcgcttcctgtttgtgtcatctggtcgtagaaccttttccaaacagaagca

SEQ ID NO: 982977 - DNA, 120 bp, Artificial Sequence
  ENSG00000263276_21 (sequence is synthesized)
tctgcctttggctgttctgtgacctttgaagccagtctcagtggtttaggcagctttgcagttctaactctagctagaggccaggctgtgtgcagagctaaagcacaaatgagcagtaca

SEQ ID NO: 982978 - DNA, 120 bp, Artificial Sequence
  ENSG00000263276_22 (sequence is synthesized)
tcagcatgggcagagaaaatacaggactccagatgggaaggttttaagagtcacactggcatggaaggcttatctgccattctatttatagcctgaaatgattctggcctaccctgtcct

SEQ ID NO: 982979 - DNA, 120 bp, Artificial Sequence
  ENSG00000263276_23 (sequence is synthesized)
gtctgtatgatctaaaaaccagccttttccccagaaggctctgagcacatccagaagtgataacctgaccctccacaccaaagacaccctggtgctgctgctggtgagactggtgtccaa

SEQ ID NO: 982980 - DNA, 120 bp, Artificial Sequence
  ENSG00000263271_0 (sequence is synthesized)
gctttggagaagctcagggcctctttgcgcttgagcttggatttgctgctgctgctggggcctgagcccgcaccggtgccagccaccgtggccctggacaggaagcagcgctgggcatgc

SEQ ID NO: 982981 - DNA, 120 bp, Artificial Sequence
  ENSG00000263271_1 (sequence is synthesized)
gggtgaggcaggtctgcagcagcagagccgggtcctcgtcgtctgagctgtaggacgagtcctcgttgtcggaggagcagaggctggagggcgcgtaggagctggccaggctgctgaagg

SEQ ID NO: 982982 - DNA, 120 bp, Artificial Sequence
  ENSG00000263271_2 (sequence is synthesized)
agtcggcgcggaagccgttgccaaatatgggtgtggccacgctgtgcacggggaacagggcctcgcgggcccgcagcttcttgctgctgccgttgagctggaagaggttctgcagcaccc

SEQ ID NO: 982983 - DNA, 120 bp, Artificial Sequence
  ENSG00000263272_0 (sequence is synthesized)
gttttgtgttctcatttattatcatttttttctgtacaaatctattatttctagatttttgtataacatgatagacataaaattggtttatctcctccaaggcagtttgtctttttctat

SEQ ID NO: 982984 - DNA, 120 bp, Artificial Sequence
  ENSG00000263272_1 (sequence is synthesized)
tcctcccccttcaacctgcgtcacaaaagaccaagaacagatgtcggaaaagtttttttttcttcagtattgtttaaaagtttcaatacaaaataagttataaataaaaggcttgtatgt

SEQ ID NO: 982985 - DNA, 120 bp, Artificial Sequence
  ENSG00000263272_2 (sequence is synthesized)
acaaggctcctcagagggaatgagttgtcttcaaccccatagaatgatgtgagtccaagctggctctagaggatcacagcccaagtatcacaggcctaggtttaaacaggaaaataatta

SEQ ID NO: 982986 - DNA, 120 bp, Artificial Sequence
  ENSG00000263272_3 (sequence is synthesized)
gcttaaattgtattctagtcatgaaagatatctgataaaagttgtaatcaatgagaattctacacattagatgaggtctcctgagtccagtttcaattagttcagtagtgtagtttgtca

SEQ ID NO: 982987 - DNA, 120 bp, Artificial Sequence
  ENSG00000263272_4 (sequence is synthesized)
tgatgaccgcccctctttggcattgctggacctctgtcctgcagccttcaaacaactgccctgggaaccatcagcatcaatagtcttcaagctaagatcaaatcctgtagatgaactaat

SEQ ID NO: 982988 - DNA, 120 bp, Artificial Sequence
  ENSG00000263272_5 (sequence is synthesized)
caaacatcctcaccatcaggaaaccactgaccagaaagattgtattcaaactcttgatagcctggagcttttagagcccagcaggaagatgagactccaaatctacacaagattgaagca

SEQ ID NO: 982989 - DNA, 120 bp, Artificial Sequence
  ENSG00000263272_6 (sequence is synthesized)
ggtatgtatcataggggaggtgcaaaccatgcatgatcagtacgggcagaaaacatgtaaagacatgatcagtaagcacctgagtgtaaaactgcctcccgactcctgggtggctcagcc

SEQ ID NO: 982990 - DNA, 120 bp, Artificial Sequence
  ENSG00000263272_7 (sequence is synthesized)
tgcctcccgactcctgggtggctcagcctctccactatgctaaggaatccagtctgtccttaacccatttatgccagaggttgcaaatttttttgtgtgaaaaatcagaccttggcgatg

SEQ ID NO: 982991 - DNA, 120 bp, Artificial Sequence
  ENSG00000263272_8 (sequence is synthesized)
aataattaaacagtaggcataagtgggttactcttgtttcttaccacttccacaggtaatatgtttggctttctctaaaagacactgtaactctgctaataggcggtttggcatattcca

SEQ ID NO: 982992 - DNA, 120 bp, Artificial Sequence
  ENSG00000263272_9 (sequence is synthesized)
tcccaggaccaccacttgagcaccgccacatccgaaacattcctcgtcttgtgatagagtgcaatcttctgtaacccacccctatctttcaacacatcctcagccatctgtcctgagcgt

SEQ ID NO: 982993 - DNA, 120 bp, Artificial Sequence
  ENSG00000263272_10 (sequence is synthesized)
ccctacgtcctgacctcactggattctaacacaatggtccttgattcccccttaagtgaaaaccaaaggtctagtggaactagagcattccaaatgtctacctttccaaatgttgaactc

SEQ ID NO: 982994 - DNA, 120 bp, Artificial Sequence
  ENSG00000263272_11 (sequence is synthesized)
aagacctacagaatacaattttgtctttccccctcctcttttttttttttttttaaggcacaatctcgctgtcacccagcctggagcgcaatggcgccctctcagctcactgcaacctct

SEQ ID NO: 982995 - DNA, 83 bp, Artificial Sequence
  ENSG00000263272_12 (sequence is synthesized)
caatggcgcccccatcctcccacttcagccttccgagtagctgggagtacaggtgcgagccaccacacccagctaatttctgt

SEQ ID NO: 982996 - DNA, 120 bp, Artificial Sequence
  ENSG00000263272_13 (sequence is synthesized)
gagactctgtgtcaaaaaaaaaaaaaagagagaactgatttctgatgccaggacgaccctgctgattccacatacttggaatctgtgttgttcagaatctgtgtgctcattcattcagca

SEQ ID NO: 982997 - DNA, 120 bp, Artificial Sequence
  ENSG00000263272_14 (sequence is synthesized)
attcattcagcaaacatacaacagtacctagtatctgctagtcacaggggcacaaagatgaaaaagactgtcattgttgagctcacagtctagacattagggaaggggtcaaaaaactac

SEQ ID NO: 982998 - DNA, 120 bp, Artificial Sequence
  ENSG00000259370_0 (sequence is synthesized)
tttcatatgtgggagccactaggcctcctcttttcaagggctaagagaaatttaaatctctcccgattactgaccctgaaaaccacactgcgtttctggcagatgatgttaaaaaagtgt

SEQ ID NO: 982999 - DNA, 120 bp, Artificial Sequence
  ENSG00000259370_1 (sequence is synthesized)
ggtggaactccctctggtacaattgagtgcagacccttgtcttaaggaaataccatttgtcaggggtgggagagaaatatggatctctgtttctatttagaaatcatggcaacaagtaga

SEQ ID NO: 983000 - DNA, 120 bp, Artificial Sequence
  ENSG00000259370_2 (sequence is synthesized)
acattttctgtccacatccagagggagaagccacaggaggaaataccttgaagcttgtgggacgtgcctggtgaggatattccgttcaatgacacatctgtcatctttacatgttgacca

SEQ ID NO: 983001 - DNA, 120 bp, Artificial Sequence
  ENSG00000259370_3 (sequence is synthesized)
gccaacaagaacttgctgagtacaggacggacaaggttggcattccgctggctctacaggggatcaacgggaaggatggagagaacagcttgtgtgccaggtggggagacggacatggac

SEQ ID NO: 983002 - DNA, 120 bp, Artificial Sequence
  ENSG00000259370_4 (sequence is synthesized)
caatactgaataacctacaacacaatggtttagaaagagaattcaaggtatgtggactggacttaagccatggctaagctcacaaaagacttcctggaagaagatgtacagcctatggtg

SEQ ID NO: 983003 - DNA, 120 bp, Artificial Sequence
  ENSG00000259370_5 (sequence is synthesized)
aggcacaacctccctgtctgtactgcgagttcttgggtcaagacacaactcacctctacctatctgtacactgacagcaaagtccttttaatatcaaacagaaatgaatgacaatgatgg

SEQ ID NO: 983004 - DNA, 120 bp, Artificial Sequence
  ENSG00000259370_6 (sequence is synthesized)
tgaccacatttcccaaacccacgaacggtcaggtttctgtggcgcctctccatttgagaggctctctgaaagccagtcgtggatagcatgcttccatgtgtatgtaaataacaagacata

SEQ ID NO: 983005 - DNA, 120 bp, Artificial Sequence
  ENSG00000259370_7 (sequence is synthesized)
tggaacatgttaaatcggaagactgttccatatccagaattactaatgtactaataatcctttgaatcctcaaaaaaaacaaaaaacactatacttttatgccaaagtagatggaatggg

SEQ ID NO: 983006 - DNA, 120 bp, Artificial Sequence
  ENSG00000259370_8 (sequence is synthesized)
tgactagagataaagctgaagaaatttcagatttaaaatctgactggcccattcaccagcagacttaggaaagtgctaactgcgaagctggccagtattcagctcgacagtcctaaaaac

SEQ ID NO: 983007 - DNA, 120 bp, Artificial Sequence
  ENSG00000259370_9 (sequence is synthesized)
aaacggaaccctttggagctggaaagtggtatcataaaagccgccgaatgcggtgcttctagagcggcccaccaggaaaatatgacagtttacatctttacgtagcctaatgtacagtgg

SEQ ID NO: 983008 - DNA, 120 bp, Artificial Sequence
  ENSG00000259370_10 (sequence is synthesized)
gaatataaatatctcgttcaggccccagtcactgcctggaatgggatgctttccttaacaagaagcagatgagaggcccagaagccaaacctcttattctgttggtctgaaggctgtagt

SEQ ID NO: 983009 - DNA, 120 bp, Artificial Sequence
  ENSG00000259370_11 (sequence is synthesized)
tttcagtcggtcagcacagagagtggcaattcagggagggaaggcactgcatgtgtttccttggtcaggacaaaagcttgtagctcttttcctgggccccctgaggctctcgtacgttga

SEQ ID NO: 983010 - DNA, 120 bp, Artificial Sequence
  ENSG00000259370_12 (sequence is synthesized)
gtgtcccgcatgtggtcagcggctttacccacctttccttgggccaccagctccctctgggctgctgaggccgatttgaccagggcgcttgtggcagcagcaatggatttagcagcttcc

SEQ ID NO: 983011 - DNA, 120 bp, Artificial Sequence
  ENSG00000259370_13 (sequence is synthesized)
aagatctgttcctcaaagtccagggtctcatccgcttgctataaccaaaagaaaacagcatcacattcaattcatatccacaaagggctctttcttccaaactacttactgccgggtcac

SEQ ID NO: 983012 - DNA, 120 bp, Artificial Sequence
  ENSG00000259370_14 (sequence is synthesized)
ctggctcttcacctgcctattgttttttgttgacaaaccacacctgaaatgggatggttccttaacaagaagcagatgacaggtcccctgtgcaaactttcaggactcttaagtcagttt

SEQ ID NO: 983013 - DNA, 120 bp, Artificial Sequence
  ENSG00000259370_15 (sequence is synthesized)
ggttaagccaccctcgggtcacagtgtggaagatgtggctggtacctttcaggcattaagagacaatggccaggcacagcaatagttttctttgtatgtgtggtacaatatatataacac

SEQ ID NO: 983014 - DNA, 120 bp, Artificial Sequence
  ENSG00000259370_16 (sequence is synthesized)
aaaatttacccttttacctaatgttaagtattaatacactgacactgttgtacaacagcaataccaggatagaaaggtcaggatgcctctccacctgcagccccttccccctaactccaa

SEQ ID NO: 983015 - DNA, 120 bp, Artificial Sequence
  ENSG00000259370_17 (sequence is synthesized)
aaggaaaaagccgttagcttgacatcccacggaaatttgcagacagactcattttctggaacaaaatctttaaagatatacactcactgtgaacaaaatacactcaaatggttttagcaa

SEQ ID NO: 983016 - DNA, 120 bp, Artificial Sequence
  ENSG00000259370_18 (sequence is synthesized)
catcaataactgaaaccaaaataataaaatcaaaacagtagatcatagcacttactctcttctagagcctaagcctcaaaaatggactttaaaaaaaaaaaaaggaaagatggctaccag

SEQ ID NO: 983017 - DNA, 120 bp, Artificial Sequence
  ENSG00000259370_19 (sequence is synthesized)
ttctgaaaagttgtctttttcctgggtaaaaatcaaagccaaacagcactggcatttctgtggctgagcactgagagagttatagaccaagcacacattgcccagtggtgaaaaagaaac

SEQ ID NO: 983018 - DNA, 120 bp, Artificial Sequence
  ENSG00000259370_20 (sequence is synthesized)
cagggcaacacgacatcaaggtggagcttgttctgtcctctggacacccgaggcacgggatccaccttgggaagaacactggacaccactgtgtaggtgttatcagaccattagggttct

SEQ ID NO: 983019 - DNA, 120 bp, Artificial Sequence
  ENSG00000259370_21 (sequence is synthesized)
ggtctaaattcaccaccatctcctttgctgctaaaacaactcaggaagttgaaaagaagctttggagaagtggaacaagtataaagactgtggtcccaggctcatgggttggagcatcac

SEQ ID NO: 983020 - DNA, 120 bp, Artificial Sequence
  ENSG00000259370_22 (sequence is synthesized)
agttttgccggggggtggtcagattagacctgtgtgacaacattccgtgactctaggtcaatttggttaagctgccctcaggtcacacagtgttgaagatgtgggtggtacctttcaggc

SEQ ID NO: 983021 - DNA, 120 bp, Artificial Sequence
  ENSG00000259370_23 (sequence is synthesized)
attgagagatgatggccaggcccagcaatacttttctctgtatgtgtggtaaaatatatgtaacacaaaacttacccttttatccaattttaagtgtacaattcagtggcattacggaca

SEQ ID NO: 983022 - DNA, 120 bp, Artificial Sequence
  ENSG00000259370_24 (sequence is synthesized)
ttcacactttgtgccaacagtagtagatttttaagagtgcctactgtgtaccaagtattttgttaggcacttctacatacaatgacttaattctcaccaaaaaaaaaaaaaaagatcgta

SEQ ID NO: 983023 - DNA, 120 bp, Artificial Sequence
  ENSG00000259370_25 (sequence is synthesized)
tattggaattatctttatccttatttttacagtgagaaaacccaggctcaggaaggtagatgattgggccaaggtgatgtggcagcatgaagcatctaaaccagaatctaaacctaaatc

SEQ ID NO: 983024 - DNA, 120 bp, Artificial Sequence
  ENSG00000259370_26 (sequence is synthesized)
tgactccaaaatgaggcactttaactagccaaagccaccccttggggcatcagtgagaaacggtttgtgccagaggttcaaagtcagcttgctaacgctcccatgtgaaacgtcagacag

SEQ ID NO: 983025 - DNA, 120 bp, Artificial Sequence
  ENSG00000259370_27 (sequence is synthesized)
gagggatacaagtcttctccagctctccattcataatgccacatcttgaaccatgaaaggtgctaatcctttttctttataacctacattatcaaaatacaatttcaatgcacttctaat

SEQ ID NO: 983026 - DNA, 120 bp, Artificial Sequence
  ENSG00000259370_28 (sequence is synthesized)
ggatctgaatgatggtagcatttcagaagttctgagacagacttgtgcattctttcttattgctgaccaagtcttgctctaagagtattcaggacagacatgaatttagttctactggac

SEQ ID NO: 983027 - DNA, 120 bp, Artificial Sequence
  ENSG00000259370_29 (sequence is synthesized)
tcattttggactggtggagtatagaatttggtgactgaaatacggaaatgatccattgtaagacactctcgtataaaaggaactcttgtgtagtcagtccccaaataaattatagtaggc

SEQ ID NO: 983028 - DNA, 120 bp, Artificial Sequence
  ENSG00000259370_30 (sequence is synthesized)
attaaagcaccagggaaatcacagaatttttgactccaaactcctcatctcattttgcagatgaggaaacggaggcttgtgggagctcttcatggcggctcctgaagtctctcacgctct

SEQ ID NO: 983029 - DNA, 120 bp, Artificial Sequence
  ENSG00000259370_31 (sequence is synthesized)
tgcctcaggtgtcctcagctactctatgggttccacgcccgagtccactttacagtgtggaatactctgtcagactttttatttcccaaattttaagattttcaaaaatggaatttcttt

SEQ ID NO: 983030 - DNA, 120 bp, Artificial Sequence
  ENSG00000259370_32 (sequence is synthesized)
aaaattaagtgctacgtctttagcaggggtagatctgataggatcatctcatcacaactgattttacgagcctctcccacatcttccgctgcctggagttttttttttttttaaacacaa

SEQ ID NO: 983031 - DNA, 120 bp, Artificial Sequence
  ENSG00000259370_33 (sequence is synthesized)
gcttgtaataatagatattcaacttggaaatatttttgacacccacagatttttctggtaatggcaactgttgtaatgttctttgacgaatttttatttttcttcccacaacatctctat

SEQ ID NO: 983032 - DNA, 120 bp, Artificial Sequence
  ENSG00000259370_34 (sequence is synthesized)
gctttaaaacagatacggcagaagttcttatctctgggagacatttgctctgataagaaagtattaagattctccctagaaaggctgactgggatggcacagggatggagggctaatgtt

SEQ ID NO: 983033 - DNA, 120 bp, Artificial Sequence
  ENSG00000259370_35 (sequence is synthesized)
agatactacagtttgggcagagtaccctgatgaaacctgccttctgactgctgtgtccctattttcctgtatgccaggtttatgactaagacgcactgcccaccctacctctactgctga

SEQ ID NO: 983034 - DNA, 120 bp, Artificial Sequence
  ENSG00000259370_36 (sequence is synthesized)
aatcagacaccaatacttaacgtgtcctcataccatacaacttctagccttagagaaaatggcatctctccaagccaaggagacatggtcaaaaacccaggtgccccatcagttccagct

SEQ ID NO: 983035 - DNA, 120 bp, Artificial Sequence
  ENSG00000259370_37 (sequence is synthesized)
cccattagcatgcagaatggaataggggagaaggtaggaaggacacacacttaaccatatcacaagaaggaaacagaattggcttggtcttcaaaggactttcctaaataaaagaatccc

SEQ ID NO: 983036 - DNA, 120 bp, Artificial Sequence
  ENSG00000259370_38 (sequence is synthesized)
aattaaaatgcagaatttgttaatggaacagtccccactgcagctgagagactggggagactaagaagaacaacatggtgcacagtgactccggggaagaatctgcaggctgggccctct

SEQ ID NO: 983037 - DNA, 120 bp, Artificial Sequence
  ENSG00000259370_39 (sequence is synthesized)
cctggagctctcattctcaccttctcaccagagaggctcacctggttggtgtcttaaggccctctttagctgagatgttactgacctgaccagggtcagtcagatctctccttctggttt

SEQ ID NO: 983038 - DNA, 120 bp, Artificial Sequence
  ENSG00000259370_40 (sequence is synthesized)
ataaaggggataacggaatcctcgcttctgggtgtttcattctttccacaattggatcatgtaaagacccgctaaaataatcttttaaagattatgactaatcctgtgcatgtggctatt

SEQ ID NO: 983039 - DNA, 120 bp, Artificial Sequence
  ENSG00000259370_41 (sequence is synthesized)
tatgtttctctataactactggcatcaagctaaagcaaggaactttagaaaacaatttcattaaacaggataaattgatagtctttagccataaaaaagagtgagatcctgccatttgca

SEQ ID NO: 983040 - DNA, 73 bp, Artificial Sequence
  ENSG00000259370_42 (sequence is synthesized)
gtctttagccataaaaaagagtgagatcctgccatttgcaaccacatggctagaactggagtatgttcccact

SEQ ID NO: 983041 - DNA, 120 bp, Artificial Sequence
  ENSG00000259370_43 (sequence is synthesized)
acatagagagtagaaggatggctcccagaggctgggaagggtagtgaggggctgggaggtagggatggttcatgggtacaaaaaaatagaataagacctactacatgtgacagcacaaca

SEQ ID NO: 983042 - DNA, 88 bp, Artificial Sequence
  ENSG00000259370_44 (sequence is synthesized)
aaaaaatagaataagacctactacatgtgacagcacaacagggtgactatggtcaataacttaattgtacattttaaaataattagaa

SEQ ID NO: 983043 - DNA, 87 bp, Artificial Sequence
  ENSG00000259370_45 (sequence is synthesized)
gagtaagtttcatgagatctgtccgcttgcctgccgccatataagatgtatcttgcttccccttcgctttccgccatgattgtgagg

SEQ ID NO: 983044 - DNA, 79 bp, Artificial Sequence
  ENSG00000259370_46 (sequence is synthesized)
ctttatgtatcacccagtcctgggtatgtctatattagttgtgtgagaacaagctaatacaatgcctgtaacaacacat

SEQ ID NO: 983045 - DNA, 120 bp, Artificial Sequence
  ENSG00000259370_47 (sequence is synthesized)
tgtgtgagaacaagctaatacaatgcctgtaacaacacatctcatgtattatatatatataatataatatatattatatatatatacctactatgtaccctcaaaaaccaaacagaaaaa

SEQ ID NO: 983046 - DNA, 120 bp, Artificial Sequence
  ENSG00000259370_48 (sequence is synthesized)
aattttaaagaaaaataaataaataaataaataaatggatagccctcactgcagaatcacctgaggatctggttaaagatgcagatgctgttttggtaggtctggggtgggagtcaggaa

SEQ ID NO: 983047 - DNA, 120 bp, Artificial Sequence
  ENSG00000259370_49 (sequence is synthesized)
tctgtatttcttacagaggtggttacacactactctgtaggaaatgctggcctggactcaggaaaacaaacaccatttaacttaaacctaccagcctgtgatcccctccagggtgagact

SEQ ID NO: 983048 - DNA, 120 bp, Artificial Sequence
  ENSG00000259370_50 (sequence is synthesized)
gtgttttattcaacctatgtttctctagcacaaaatcaggcagaggagcccatgtgatgatcaacatttgctgaatgaatatatccattcaaaatgcatttcccaagttccagagttcag

SEQ ID NO: 983049 - DNA, 120 bp, Artificial Sequence
  ENSG00000259370_51 (sequence is synthesized)
ccagagcacaacgcacaaggtaggagaaggagaaatacacagagtaagcatccacatcattagcatccactcctgagccctggtggacagatgcatacacagctatgagcaagttcctgc

SEQ ID NO: 983050 - DNA, 120 bp, Artificial Sequence
  ENSG00000259370_52 (sequence is synthesized)
cctgtttgaggccttgagttgttaattgtacactctacttgcagccttcaactggaattcacagtttgtgacatttagtcatgcatggacatacaaatgtaaacacagtggcattttacc

SEQ ID NO: 983051 - DNA, 120 bp, Artificial Sequence
  ENSG00000259370_53 (sequence is synthesized)
aagaggcactcttatgtaacaagacagcactgggaaaaagagtgaacagatgtacaaactaagcttctactctgcctaatgaaggtgtttgttgctgcctctgcatgctgaattaacttc

SEQ ID NO: 983052 - DNA, 120 bp, Artificial Sequence
  ENSG00000259370_54 (sequence is synthesized)
tcctttgatatactgttcttttcccccttccccttcatttgaaaaggctatttggccaggtgcccatcagctctaagcaatcgtctttcctgggctgtctggccaactcttgctgaggac

SEQ ID NO: 983053 - DNA, 120 bp, Artificial Sequence
  ENSG00000259370_55 (sequence is synthesized)
agatttatccctacctgggctttttggtagcttctagaaaggtctgagtaccctgtagttgacctcttccctgcatgctgaccttccttgctcaccctttaaaaagtcagtggtctggtg

SEQ ID NO: 983054 - DNA, 120 bp, Artificial Sequence
  ENSG00000259370_56 (sequence is synthesized)
agatccctcttgggaaaggctatatattgggttggctcccttcccctgtttcccagttgggagagtatttgggacccctttatgttgctctgatgggtttaaagtttcagtagctatatg

SEQ ID NO: 983055 - DNA, 120 bp, Artificial Sequence
  ENSG00000259370_57 (sequence is synthesized)
tcccctggaagaggaaatggtggtggtaggggaagtggtgtggaaagtggagaaggtaaaagggacagcctttcctcatgtttcttttgacatttggcctttcatggattctgagaacat

SEQ ID NO: 983056 - DNA, 120 bp, Artificial Sequence
  ENSG00000259370_58 (sequence is synthesized)
ggtcttcacactaattcattcatcttctaagcctacttcccctcctaacctatctgatggagtcattacaagcacgtgattagtatatgtaaagcatggctgactcataggagatgctca

SEQ ID NO: 983057 - DNA, 120 bp, Artificial Sequence
  ENSG00000259370_59 (sequence is synthesized)
aaaactattagcaatttcattatcaaaaattgtttttttcaggtttggggctaaattaatctgtttctctgtctaaaccctgttatgtatccataattccaataaaaattcttcttgcta

SEQ ID NO: 983058 - DNA, 120 bp, Artificial Sequence
  ENSG00000259370_60 (sequence is synthesized)
tggttagataaattaatgtatgtgattagatacgacacagggcagagctgaacgttcctgttttcttctggatcttgaaggttggtgagaggccgctgaatgagacccagcctcgtgttt

SEQ ID NO: 983059 - DNA, 120 bp, Artificial Sequence
  ENSG00000259370_61 (sequence is synthesized)
gccaagagtgtgccagcttttccccaacaggctagggctccagcagctcccctcctcttcagaactggtgcccacacactgtcagtgtcctacacatactctcacttgcttttcctttac

SEQ ID NO: 983060 - DNA, 120 bp, Artificial Sequence
  ENSG00000259370_62 (sequence is synthesized)
agcgtcttttctctaactttactggtctgaaaaaaaaaaattctaatacgtgcagcacttataagtaacttataaatatgggaagctgtcagaagtttatgtattttaaaaccatgacat

SEQ ID NO: 983061 - DNA, 120 bp, Artificial Sequence
  ENSG00000259370_63 (sequence is synthesized)
attgcttccaaatccaaggaacaggcatctcggatcactgcgctgtgagggcaggaggacccttcttttggaaagcggaaacagggctacccgatctatcggtgtcctatggaaccacac

SEQ ID NO: 983062 - DNA, 120 bp, Artificial Sequence
  ENSG00000259370_64 (sequence is synthesized)
tgccccctgtggtcagaaccacctgggatgcagaacagcaaggactgcaaacttgggtgcagagggctttcctccacgcaacccaggaagctccgtgattggcaaactgctctgtcagga

SEQ ID NO: 983063 - DNA, 120 bp, Artificial Sequence
  ENSG00000259370_65 (sequence is synthesized)
cgatccatcaggttggtgagaggccgctgaatgagacccagcctcgtgttttgtgggatgaagagatgcagacaaagtgactcaggaccagaaggccccctcagtaccatctgaggacac

SEQ ID NO: 983064 - DNA, 120 bp, Artificial Sequence
  ENSG00000259370_66 (sequence is synthesized)
cgcagtagtgcctattaaataacatccagacaaggcatggcccttcaactatcttatgaaatgagaaaccaccacaccggccacgaagccgttcacatacacatgtgcagggtggatgag

SEQ ID NO: 983065 - DNA, 120 bp, Artificial Sequence
  ENSG00000259375_0 (sequence is synthesized)
gtggatcttgtgagctgggttgccttgctgtggtgctttcggactcgctaactatgttatcacacagttttgcaaccaaatcgccactagaagtcactgtgttctgttgacatgcagagt

SEQ ID NO: 983066 - DNA, 120 bp, Artificial Sequence
  ENSG00000259375_1 (sequence is synthesized)
ctgcacaaagtttatcgtctccagttgtagaacaaatggctggaatcaccacagaattctgatctactggagcatcagcactctcctcacgacttcgtgaagtttccgtttctgctgttt

SEQ ID NO: 983067 - DNA, 120 bp, Artificial Sequence
  ENSG00000259375_2 (sequence is synthesized)
tttcagtggaggtttcttcattactaaatgcaagtgaagactcagcaggtttgttaccatccagggaactggcagcaggggcacagtttggaacactgattttatccacaggcttacttg

SEQ ID NO: 983068 - DNA, 120 bp, Artificial Sequence
  ENSG00000259375_3 (sequence is synthesized)
agcccatgttccatttcccctgcagtgtctggggtactgacatttgttgttgaaatgcctcccagttcacctccagaggaatactgggctgtgcctggctccatgaccaagtctctctga

SEQ ID NO: 983069 - DNA, 120 bp, Artificial Sequence
  ENSG00000259375_4 (sequence is synthesized)
agcacagcatctccactgctcagggactcctggtctgtgggcattccagaagattttgttccagtttcttcatttctgtttccacaggacgaaaggccttccgtgccctttactccacaa

SEQ ID NO: 983070 - DNA, 120 bp, Artificial Sequence
  ENSG00000259375_5 (sequence is synthesized)
tcaggcaagctctgaaggcagctgtcttgatcagatacagttccagagtccacaataggtgctggctccacctcttccccttttctttccacgcctttatttttcttcctacaggaacgg

SEQ ID NO: 983071 - DNA, 120 bp, Artificial Sequence
  ENSG00000259375_6 (sequence is synthesized)
tctgtattctcctcctcaactatgcttgacaaatcacagggactttcagtctgtgcaacagggctccctgggcagcactgagtgctctcagtctcttcagaagaagaaagtcgctgaggg

SEQ ID NO: 983072 - DNA, 120 bp, Artificial Sequence
  ENSG00000259376_0 (sequence is synthesized)
ctggcctggtgaaggaggcacgaggaagattgcagtcagggacgctcagcctgggagctgaccctcagatccagggatcccagcagccttagaaagctgatgatgccaggagcggggact

SEQ ID NO: 983073 - DNA, 120 bp, Artificial Sequence
  ENSG00000259376_1 (sequence is synthesized)
tgcctggggctcaagggaaccattatgcctgtgctgagatgaaacgtgtcccactattcctggatgtgtacagaacccgacaccatggctatgagtacctaccacgaagaaacagtaaca

SEQ ID NO: 983074 - DNA, 120 bp, Artificial Sequence
  ENSG00000259376_2 (sequence is synthesized)
gtcaatactggatgtcttgggagcttaagagacactgttctgagtattttacatgtatttgtcagtggctgttcccatgcaggaggccctgggacatgcctgctactgtttctttctgct

SEQ ID NO: 983075 - DNA, 120 bp, Artificial Sequence
  ENSG00000259376_3 (sequence is synthesized)
ggtctgaatattttacatgtattatctaatttaatcctcacaacaactatcatacttatggtaattatattatacccattatgcagacgagaaagaaggtagttgggattcatacttgtg

SEQ ID NO: 983076 - DNA, 120 bp, Artificial Sequence
  ENSG00000259377_0 (sequence is synthesized)
attacatatctgaatcacgaggcatttaggacgggaatgaaaagaagatcgggggaggtgttttaaaaaccaggttctcctcttagcttgaccattcaggagctgagggacctgggcaag

SEQ ID NO: 983077 - DNA, 120 bp, Artificial Sequence
  ENSG00000259377_1 (sequence is synthesized)
tccctccacctctctgggcctctgcatgtaaaggggcgtttgggctaaatgatttgtaaacctctgttcttccaagattctcccctctcagggaactgaaaagatgagagtgtttctgtt

SEQ ID NO: 983078 - DNA, 120 bp, Artificial Sequence
  ENSG00000259377_2 (sequence is synthesized)
taaaactgattttctcgatcgactctcttcagtctaacccaataaatacgcattgcaatcattttaatttttgtaagatcttgatggggaaaacagagggaaagaacacctaaaacacga

SEQ ID NO: 983079 - DNA, 120 bp, Artificial Sequence
  ENSG00000259377_3 (sequence is synthesized)
gattattccacaaccaaggacgaaagagaaatagctttgactgagggcttgcgcttgctagacactgcgcctaatatgtacatggtcaccttaagtgtcacctcagccttctgagataag

SEQ ID NO: 983080 - DNA, 120 bp, Artificial Sequence
  ENSG00000236861_0 (sequence is synthesized)
aaactatcaatttaacaagtaaactcacattttcctactctatgctggtggatatgaataatcaggaaggagacatagatgctggacttttcccctagatgctggacttttcccctagga

SEQ ID NO: 983081 - DNA, 120 bp, Artificial Sequence
  ENSG00000236861_1 (sequence is synthesized)
gagaaagattcatttatgacctgcttttttttttggaaaagcagaagaaacccaaattataatccataaggtattcacctgagcacatgctgacttcatgctttcaggaatgaaatgcct

SEQ ID NO: 983082 - DNA, 120 bp, Artificial Sequence
  ENSG00000236861_2 (sequence is synthesized)
cagccacttgccgcttgagaagccgaatacacaagagatggaaaaagagggtgctggcagaaggatccctggttgggcagcgacatgccagtgtgtccagaggagttccctgcctgccag

SEQ ID NO: 983083 - DNA, 120 bp, Artificial Sequence
  ENSG00000236861_3 (sequence is synthesized)
gaatctcagcagacacagtgatgtgaaggagcaagacaaaatgccagcttagttacctgctaagaagatggcaccacgatggtaatgcaacgaatggatgtgggagaaatgagacagaca

SEQ ID NO: 983084 - DNA, 84 bp, Artificial Sequence
  ENSG00000236861_4 (sequence is synthesized)
catgccagtgtgtccagaggagttccctgcctgccaggaatctcagcagacacagtgatgtgaaggagcaagacaaaatgccag

SEQ ID NO: 983085 - DNA, 120 bp, Artificial Sequence
  ENSG00000226317_0 (sequence is synthesized)
accccagccagcagagtcagcctactcagatttcctatccgtgatgtgggagcgttgattttttgcgtttttttttgctcttcaggaatgagtctcgctgttgctcattctgtggatccc

SEQ ID NO: 983086 - DNA, 120 bp, Artificial Sequence
  ENSG00000226317_1 (sequence is synthesized)
tgctgcgtttataagctgtaacgctcagcgctaaggtctgcaggttcagtcctaaaaccagtgagaccagcgacccaccagaaaaaactagcaactgcagacgcgacgcctttaagagct

SEQ ID NO: 983087 - DNA, 120 bp, Artificial Sequence
  ENSG00000226317_2 (sequence is synthesized)
gtaacactcatcgcgaaggtttgcagcttcactcctgaagccagggagaccacgaactcaccagaagaaataaactccggacacatttgagcatctgaaggaacaaactccgaacacacc

SEQ ID NO: 983088 - DNA, 120 bp, Artificial Sequence
  ENSG00000226317_3 (sequence is synthesized)
ccaagaaccacaaattctggacacaacatcatttcctgtgggatcatattctggaatcacagagcatgactatgagatctcagctatccagctgtcacagaggaagtgggaattttcaac

SEQ ID NO: 983089 - DNA, 120 bp, Artificial Sequence
  ENSG00000226317_4 (sequence is synthesized)
catgaatgtcaagtcatcttttcaatgtgaaggtttgctactgccgaataagaaacaccattttgttttcagatgaaaactaacgtggggtcgaggcaccagcccgctgtcggctggcac

SEQ ID NO: 983090 - DNA, 120 bp, Artificial Sequence
  ENSG00000226317_5 (sequence is synthesized)
gaccactcctgcggcctgggcttcagattctctctctagctgcaggcattaaattatgatgaaggccacagaaaaatgattaaggtcaaagtctagaatcaattgtcagcctatgttatg

SEQ ID NO: 983091 - DNA, 120 bp, Artificial Sequence
  ENSG00000226317_6 (sequence is synthesized)
gacataacatttatgtaccattgggtcatgagggtggagcgctcatgaatggaattagcgaccttatgaaagagagactagagagctgtctcatcccttctgctgtgtgaggacctggtg

SEQ ID NO: 983092 - DNA, 120 bp, Artificial Sequence
  ENSG00000226317_7 (sequence is synthesized)
tgaccaccatttcaaatgccttcacggtgcatgttttacagcacagctgaaagttataagaccatgatgatcatccttcttggatgactgacctatcaatcattttgggaaatgcatctt

SEQ ID NO: 983093 - DNA, 120 bp, Artificial Sequence
  ENSG00000226317_8 (sequence is synthesized)
agaaaaatttggttatgagactgtcaggtagatataaagggcccataagaagaatactggacaaagaggtgaaagagagagagagagaagcctagtccaactccacttcttccagcaatt

SEQ ID NO: 983094 - DNA, 120 bp, Artificial Sequence
  ENSG00000226317_9 (sequence is synthesized)
aatctgataatataactgtaggcatcttggatacttcaacctcacttaagctgctagctgattgcagataccggagtgagtgagtgagcccagcagacattccttggagcagaaaggagc

SEQ ID NO: 983095 - DNA, 120 bp, Artificial Sequence
  ENSG00000226317_10 (sequence is synthesized)
tgccaactgaatacagtccaagttacaaaaacagtcaactcttttagagcaaggactcagtcatcatcatcactgcatcccataggcctaaagcacttagtaatactgttgaaaaaaagt

SEQ ID NO: 983096 - DNA, 120 bp, Artificial Sequence
  ENSG00000226317_11 (sequence is synthesized)
gaattgagaataacctgacatgaagagatggattgaggcttcatgaaatcataggatagaatcaagtaaagaaagccactgagaaatggagtcatcttatatgaaacatatttggggagg

SEQ ID NO: 983097 - DNA, 120 bp, Artificial Sequence
  ENSG00000226317_12 (sequence is synthesized)
gaagcagcagggagacagtgatgagcctaagagaaaggatgtaaccatcttcttagggcactttatagaaacattgatgtctcataatgtaatgaataagtactttcttaaaaatcgcat

SEQ ID NO: 983098 - DNA, 120 bp, Artificial Sequence
  ENSG00000226310_0 (sequence is synthesized)
cggagctatgggctctgactccgcctctttccaaatccggagtagttcgtgccacagtcgtcctcggaaccctgtggccccttcctcacccgtttcagggccacttggttcccacctcca

SEQ ID NO: 983099 - DNA, 120 bp, Artificial Sequence
  ENSG00000226310_1 (sequence is synthesized)
ccttcttagtctgcctgccctgctttccatcttcttggaattcgccttgctgccgccccgcgcccacccccgcgcccacccctgcccctgcaccgtcccatgcccttatggatttattct

SEQ ID NO: 983100 - DNA, 120 bp, Artificial Sequence
  ENSG00000226310_2 (sequence is synthesized)
ggatgatgctatatctttatatgacctttggaatatctgtaatcatcctgagggcaatacttatgtaatgaagatggaagaagagagaatatgaatactccgtgcactttgatcttatcg

SEQ ID NO: 983101 - DNA, 120 bp, Artificial Sequence
  ENSG00000226310_3 (sequence is synthesized)
tttagctgctgatcataccatccctggagtcctacttctgactccaagttatgaggtaacaaatttctttatagttaaagcaatttgattctgggttttctgttacttgcagttgaaggc

SEQ ID NO: 983102 - DNA, 120 bp, Artificial Sequence
  ENSG00000226310_4 (sequence is synthesized)
atcttaaatggcttagcgttcccagacttaaatgatatagtatccctagacaataccgttatacttttaagttatatgaaacaatacattctcaggcactcattcatacaaccagctccc

SEQ ID NO: 983103 - DNA, 72 bp, Artificial Sequence
  ENSG00000233970_0 (sequence is synthesized)
acaagtgtaggctacggtctacttacacctctccttgttatggttcatgatgtgcagaaaaacctttaggcc

SEQ ID NO: 983104 - DNA, 120 bp, Artificial Sequence
  ENSG00000233970_1 (sequence is synthesized)
accctcaagatacccgagtctcttgcagatttgagtcaggatggcttcagcctaaggaagagcttgctgggctcctgccaatataaattaccctcagcaagacgacaccagggagaaatg

SEQ ID NO: 983105 - DNA, 120 bp, Artificial Sequence
  ENSG00000233970_2 (sequence is synthesized)
caaaggggctaatagggggcccaggtgaccatgagagaatggagttgctgctgcccgagggaagagaggactgtctcccatgcccagaggccccgtgggagtggtcctagcatgcctgtc

SEQ ID NO: 983106 - DNA, 120 bp, Artificial Sequence
  ENSG00000233970_3 (sequence is synthesized)
caggataaaagccaatagaggcccacacaagccccaggcaggagggacccccaagggagcagccgctgaggatggagagtccgagagctgcggggctgatggggagcccaggggaagcgt

SEQ ID NO: 983107 - DNA, 120 bp, Artificial Sequence
  ENSG00000226312_0 (sequence is synthesized)
ttggatttcctttggcagggttcccttgtatggaagttctcaggagaacaacactctcagagtcccactgtctcaaagaattcttaatggacagactcaccctgaagttatttgaaggat

SEQ ID NO: 983108 - DNA, 120 bp, Artificial Sequence
  ENSG00000226312_1 (sequence is synthesized)
ttttggattgctgcttggagaacattcctgtaacttgtccctgctccttgaactataaaagcagaagggaggtactgagttaaaacttacaaattattatcaaataaatcttcaatagtg

SEQ ID NO: 983109 - DNA, 120 bp, Artificial Sequence
  ENSG00000226312_2 (sequence is synthesized)
ttggatttcctttggcagggttcccttgtatggaagttctcaggagaacaacactctcagagtcccactgtctcaaagaattcttaatggacaggtatttttaaagaagtcagggttatc

SEQ ID NO: 983110 - DNA, 120 bp, Artificial Sequence
  ENSG00000226312_3 (sequence is synthesized)
cacagctatgtacatataataccaaatcagatcatttattctgtacctgaggcaaaaaagcttctgattcctgaatggatttcttcactggttcttctgggggatgagagagagaaacca

SEQ ID NO: 983111 - DNA, 120 bp, Artificial Sequence
  ENSG00000226312_4 (sequence is synthesized)
agtccacccctacactggctgagtttctttgtataacaactgttctcccttcctattttcttcaattatctcttctttccccagctatacttggccccaaggtttcaacctcacactgaa

SEQ ID NO: 983112 - DNA, 120 bp, Artificial Sequence
  ENSG00000226312_5 (sequence is synthesized)
gaaagtgacataagaaaacacaagtcccagtgctatcaggggctatctggaaaagctgcttaaacagcaagtgaaagaaggctctcccctaccccgttctagactcaccctgaagttatt

SEQ ID NO: 983113 - DNA, 120 bp, Artificial Sequence
  ENSG00000226312_6 (sequence is synthesized)
ccaacgaccaaagcaaaggacagcagaactgactgacacagctcagaaaatatccaaagctctgtatgctctggaaaggaagacaagaaatgctaaagactctggatattgctctgtttc

SEQ ID NO: 983114 - DNA, 120 bp, Artificial Sequence
  ENSG00000226312_7 (sequence is synthesized)
tataaggtcccacccatataccatctcttcttttggatttcctttggcagtaacctgaagttatataagtggcatgttcccaagtacaaagggagcccttctattgcttctgcttacaaa

SEQ ID NO: 983115 - DNA, 120 bp, Artificial Sequence
  ENSG00000226312_8 (sequence is synthesized)
ccaacgaccaaagcaaaggacagcagaactgactgacacagctcagaaaatatccaaagctctggtcttgctctgtcacccacactggagtgcaatgccaccatcttggctcactgcagc

SEQ ID NO: 983116 - DNA, 120 bp, Artificial Sequence
  ENSG00000226312_9 (sequence is synthesized)
gggctcaagtgatcctcctgcttcagcctaccatgtagctgggactacaggtatgctctggaaaggaagacaagaaatgctaaagactctggatattgctctgtttctataaggtcccac

SEQ ID NO: 983117 - DNA, 120 bp, Artificial Sequence
  ENSG00000226312_10 (sequence is synthesized)
ataaggtcccacccatataccatctcttcttttggatttcctttggcagggttcccttgtatggaagttctcaggagaacaacactctcagagtcccactgtctcaaagaattcttaatg

SEQ ID NO: 983118 - DNA, 120 bp, Artificial Sequence
  ENSG00000226312_11 (sequence is synthesized)
tttcctctattagggtaatgtgcttaagacaaattattttcatttttatttaattttaatgaaaatcccactctctttattggctttgtggaataaagataatttgaaaaagagagaaaa

SEQ ID NO: 983119 - DNA, 120 bp, Artificial Sequence
  ENSG00000226312_12 (sequence is synthesized)
acctaaagggaacagccttagagagtgcagagcagggaaagtttatatgtgtttgctagttataaaacagatggcactgttttcatagtccagtgatactgggagatcataaaataaaat

SEQ ID NO: 983120 - DNA, 120 bp, Artificial Sequence
  ENSG00000226312_13 (sequence is synthesized)
gtcaatggcaagacagtgacaatgggggcagtgagcctggcaaatggagatgagcctaaagctaatttgctagaaaaaaatgacttgattaggtcagggaggtggaagaacaaccagttt

SEQ ID NO: 983121 - DNA, 84 bp, Artificial Sequence
  ENSG00000226312_14 (sequence is synthesized)
tgacttgattaggtcagggaggtggaagaacaaccagttttgagcagagattgtgccactgcactccaaaggaaaaaaattaaa

SEQ ID NO: 983122 - DNA, 75 bp, Artificial Sequence
  ENSG00000226312_15 (sequence is synthesized)
actcaccctgaagttatttgaaggatccttgagactcttttggattgctgcttggagaacattcctgtaacttgt

SEQ ID NO: 983123 - DNA, 120 bp, Artificial Sequence
  ENSG00000226312_16 (sequence is synthesized)
cactcctcccaagtgttcaatgttaaccagatggcaaagttaaccagacagaggaaatccacataattactctagatgaagccccctaactgcggattagaaggaaaagagatgaagggt

SEQ ID NO: 983124 - DNA, 120 bp, Artificial Sequence
  ENSG00000226312_17 (sequence is synthesized)
gctgcactaataataacaaccattttcaaccaaggcaggattctgggcctagaatcttcagtgacaaattaccaggagaggaggagggaaatgaagagctggaggcctagggagatggtg

SEQ ID NO: 983125 - DNA, 120 bp, Artificial Sequence
  ENSG00000226312_18 (sequence is synthesized)
tgaggagaggagactgtgcctttccacttcttaataattaatgttctcctgctgctctgagtctgcatgtaagtggatttgtgacctctcagctgatgaaaaccatagcacaagaagagt

SEQ ID NO: 983126 - DNA, 120 bp, Artificial Sequence
  ENSG00000226312_19 (sequence is synthesized)
ttataagtggcctcaagcccaattactgattttgttcccagaggcagagaaggcttgagtcaaatcaccctgattctcaggggaaaggcagcaccgagcatccagggtaccctctaatgg

SEQ ID NO: 983127 - DNA, 120 bp, Artificial Sequence
  ENSG00000226312_20 (sequence is synthesized)
cccaggcctactcttgtccagcaatgtaccaccaagatgttgaactttaaaggactatgtctgaccaggaaggacctgctgtctagagctgccattctgattcttggagctcgtatacag

SEQ ID NO: 983128 - DNA, 120 bp, Artificial Sequence
  ENSG00000226312_21 (sequence is synthesized)
atacatccgcaaccatggggcaggaaacagatgtaccagtgcagtcaagaccaatacctgctcatacctgtggccaaaagcatgatgccccaggctctgcctccaattctaccatcttct

SEQ ID NO: 983129 - DNA, 120 bp, Artificial Sequence
  ENSG00000226312_22 (sequence is synthesized)
tccatctttctcttttatcagcaccagtgattcagtttgagtcagacatccaacaacaactgagcaaaagaatcatctcagatccaagcaatggtgacgcgcagatagaagagactgagg

SEQ ID NO: 983130 - DNA, 88 bp, Artificial Sequence
  ENSG00000226312_23 (sequence is synthesized)
gcccacaccagctaatttttaaacaaagtgctggaattccaggcatgagccaccgcacccaggatgaagcacagattcttgaactggt

SEQ ID NO: 983131 - DNA, 120 bp, Artificial Sequence
  ENSG00000226312_24 (sequence is synthesized)
gccaccgcacccaggatgaagcacagattcttgaactggtttgtcacggcagttggtgctgatcactccaatgaatacagcttgcctgtgccatgatctcaatctgggggcaccagttaa

SEQ ID NO: 983132 - DNA, 120 bp, Artificial Sequence
  ENSG00000226312_25 (sequence is synthesized)
tcggaaccacagccatgtgcctcatcagtgtaagactgagtctcagctctcacttcaaggaggactcaagacaagcaaaagaagtaaacttttgctgggtgcagtggctcacgcctgtaa

SEQ ID NO: 983133 - DNA, 120 bp, Artificial Sequence
  ENSG00000226312_26 (sequence is synthesized)
ttctctgaagctaacctagccaaaagagtgaaatacactatctgttaagctgtgtcagtagctaagtctgtgtgtctaaattaaaaacatactcaccctgaagttatttgaaggatcctt

SEQ ID NO: 983134 - DNA, 120 bp, Artificial Sequence
  ENSG00000226312_27 (sequence is synthesized)
tctagttataaacatcacatctcttaacatacggccaagatgatgaagctgatggagtacgatggtgttcaaacttagataagctaattcaatagacaactagaaatgccaatgagtcta

SEQ ID NO: 983135 - DNA, 120 bp, Artificial Sequence
  ENSG00000226312_28 (sequence is synthesized)
tcactcaccctgaagttatttgaaggatccttgagactcttttggattgctgcttggagaacattcctgtaacttgtccctgctccttgaactataaaagcagaagggaggtactgagtt

SEQ ID NO: 983136 - DNA, 120 bp, Artificial Sequence
  ENSG00000226312_29 (sequence is synthesized)
ttggatttcctttggcagggttcccttgtatggaagttctcaggagaacaacactctcagagtcccactgtctcaaagaattcttaatggacaggacagattccaagcctcttggataag

SEQ ID NO: 983137 - DNA, 120 bp, Artificial Sequence
  ENSG00000226312_30 (sequence is synthesized)
gaggtgtcaacctaagaaaaagccagaacaagccaaagttcagggaagtatcactgctgactaatatgttcagcagtcactgagttgagatgaggagtgctactttggaacttccctgca

SEQ ID NO: 983138 - DNA, 120 bp, Artificial Sequence
  ENSG00000226312_31 (sequence is synthesized)
ggcacttgcaactttattgcgccagcaagaacatgcatacagcccagtctaacgtacaggatcaaaaagagaccttatttcggctggcaattaccttacccgcttgttcattatctgact

SEQ ID NO: 983139 - DNA, 120 bp, Artificial Sequence
  ENSG00000259807_0 (sequence is synthesized)
tggctcaccttcccccagcacacgatggggctgcagcctccccggtcagcctggcctgctggaaaggagcagctctgtctccagaggcttctggcgaagcccatggcctcccaatgttgg

SEQ ID NO: 983140 - DNA, 120 bp, Artificial Sequence
  ENSG00000259807_1 (sequence is synthesized)
ctgatttataaggaaagaggggaaaggccaagtgtggatgccattagcataacctaatccagaccccatgacaagtccaggatcctgcagggagagggcatccttgaacgtgaaggactg

SEQ ID NO: 983141 - DNA, 120 bp, Artificial Sequence
  ENSG00000259807_2 (sequence is synthesized)
ggtttggaaacttggcctcccggaagaaaggtctccgggcccacccacaccccccttgtggacgcccccgcagtctaatacactccacagtaagacggaccaggaacagcagcagcctcc

SEQ ID NO: 983142 - DNA, 120 bp, Artificial Sequence
  ENSG00000259807_3 (sequence is synthesized)
ggtgtcggcccagtgatccgggagctcagagtttttgctaaaatagccttctcattggctgcggctttggaggtggcagaaatcatacgtttaatcacggcgccctcctgcttgccaagc

SEQ ID NO: 983143 - DNA, 120 bp, Artificial Sequence
  ENSG00000259807_4 (sequence is synthesized)
aattgtcctgtgagtgactcccgcaggatggagacttttgtgtctggcttccttcacttcgcagcaggcttcgcgggacccgtgtggtggcaccagcgtccagcccttggtactgctgag

SEQ ID NO: 983144 - DNA, 120 bp, Artificial Sequence
  ENSG00000259807_5 (sequence is synthesized)
ttgtaggttgtgggacaggtggaggtaccacagttgctcacgggttcacctgtggatgggcatgtgggctgttgtgagtgaagccacttcagacgtttgcgtgcaggtttggtggggacg

SEQ ID NO: 983145 - DNA, 120 bp, Artificial Sequence
  ENSG00000259807_6 (sequence is synthesized)
tgcagtttcatttcttttgagagtgggattgctggagcctatgttaagggtacgttcaactcatcagctcaactgtcttccaaatggcagccccgttttccacccccgccagcaacgccc

SEQ ID NO: 983146 - DNA, 120 bp, Artificial Sequence
  ENSG00000259807_7 (sequence is synthesized)
gcgactccaggcgcgctgcattttcatcagcacctggcagtggtgattcataatgctttaaatgttaatttccctcatgactagtgatgttaaacatcttattaaacatcttaggtatta

SEQ ID NO: 983147 - DNA, 120 bp, Artificial Sequence
  ENSG00000259807_8 (sequence is synthesized)
agtggggggcagggtgtgttgagcgtcccgggtccagtgtctccggcgtgtcctgcatctcggcagccagctcctctgcagctcaggccccgtgagtcacagccgcttcctcaaatgctt

SEQ ID NO: 983148 - DNA, 120 bp, Artificial Sequence
  ENSG00000259807_9 (sequence is synthesized)
tggctgaccgcatccccccgctccgccagaaccctggatgccggagccctcccagcgagagccgtgtttattttactttacatacattttccaacccggagcggcttcaacacatgcagc

SEQ ID NO: 983149 - DNA, 120 bp, Artificial Sequence
  ENSG00000259807_10 (sequence is synthesized)
tcttaggcccgggccgcacatctcagaagccccgtgtgcgactttgactgccgcacgatcctctgccgggggaggtgggcccgctgcgctttgggagcacccgcgcccgacactgaggtc

SEQ ID NO: 983150 - DNA, 120 bp, Artificial Sequence
  ENSG00000259807_11 (sequence is synthesized)
tcggtgctgtcttcggcctcttcgcccctgagggtcccctctgggagcagaggcggtcggaaaaccctggggctgaagtgcaggcttcgggaggacgcgacctgccaagatcagctcccg

SEQ ID NO: 983151 - DNA, 120 bp, Artificial Sequence
  ENSG00000259807_12 (sequence is synthesized)
tagtattgagttctaagagttaaatattgtgggtacaagtcctctatcagaaatgtgttttgtaaatactttcttctagtctgtggtttgtctcttcgttttcttaagtatgtctttaaa

SEQ ID NO: 983152 - DNA, 120 bp, Artificial Sequence
  ENSG00000259807_13 (sequence is synthesized)
tttagggttatgtttttgtatcctatctaagaatctttgactatcaaattctcacaaagcagttttttgttttcttctagatgttttacggttttaaattttacctttaggtctacaacc

SEQ ID NO: 983153 - DNA, 120 bp, Artificial Sequence
  ENSG00000259807_14 (sequence is synthesized)
attgtgatttagattttgtatttaatgtaaggtataagttgagattcatttctctctgtttttggagacttatgtccagctattccagaaccatttgttggaaagagtatctttatccca

SEQ ID NO: 983154 - DNA, 120 bp, Artificial Sequence
  ENSG00000259807_15 (sequence is synthesized)
acaagttatgtgggcactttgttgaaaaagatctattgaccatatatacatgcgtttatttccaagactctattttgttctgttgaccgacttgtttgtccttatgacaatatcacactg

SEQ ID NO: 983155 - DNA, 120 bp, Artificial Sequence
  ENSG00000259807_16 (sequence is synthesized)
ttttgattacagtggcattattgtacctcttgcaaaaatcaagtgtgaatcttccaaagaagatttggaagattttctctttcaaagttgtgtgagttatttaagtgccttttcattttc

SEQ ID NO: 983156 - DNA, 120 bp, Artificial Sequence
  ENSG00000259807_17 (sequence is synthesized)
atataagtttagaattagcttgcagtttctaaaagaaaaaaaaaaaggctgatgagactttgattgtgattccattggatctatagctcagtttgcagggatttacatcttaacaatact

SEQ ID NO: 983157 - DNA, 120 bp, Artificial Sequence
  ENSG00000259807_18 (sequence is synthesized)
gagtcctcaaatccatgaacatggtacatctctccatttatttaggtcttcttgtattttttctcatcaacatcttatagttttaagtaaacaaattttgcacatattttgtaagattta

SEQ ID NO: 983158 - DNA, 120 bp, Artificial Sequence
  ENSG00000259807_19 (sequence is synthesized)
tcattaagtatttcatgtttgtgatgttatggtgaatattgtttttaaattcaatttcctattgtccactgctagtatacggaaatacaattggttttcatacattaaccttatgtccag

SEQ ID NO: 983159 - DNA, 120 bp, Artificial Sequence
  ENSG00000259807_20 (sequence is synthesized)
caactttgctaaatgtataagctcttacacatttgctggtagattgtttaggattttctacatagatgatcatgttgagtgcatataaaggcaattttatgtcttatttccaatctgcat

SEQ ID NO: 983160 - DNA, 120 bp, Artificial Sequence
  ENSG00000259807_21 (sequence is synthesized)
gcctttcacttcttttcctggctttatttcagtggctagaacctctagcacagtgttaataagagtgatgagagtgacattctgactttgtttccagtctttctgctttgatcattatca

SEQ ID NO: 983161 - DNA, 120 bp, Artificial Sequence
  ENSG00000259807_22 (sequence is synthesized)
tattctttcttttccttacttcgaatttattgtgctcttccttttctaggcttttaagggtagaagcttagattactgattggagaactttcttcttttcacatatatacatttaatgct

SEQ ID NO: 983162 - DNA, 120 bp, Artificial Sequence
  ENSG00000259807_23 (sequence is synthesized)
ataaatgttcttccaagcactgccttgccagcacctacaaattgtcatatgtattttcttttttgctcaattaatttttttttctaatttctctttggattttttgatctatgagtcatt

SEQ ID NO: 983163 - DNA, 120 bp, Artificial Sequence
  ENSG00000259807_24 (sequence is synthesized)
ttaaaatatgttctttaacttccaaatatttgaagagacatactattaatttctggcttaattctgttgtggccacatatttcacataacttcactttttaaaatttgttgagatctgtt

SEQ ID NO: 983164 - DNA, 120 bp, Artificial Sequence
  ENSG00000259807_25 (sequence is synthesized)
ttatggcctggaatatggtctatcttggtgaatgctccatgtgcatttgtacaaaagtgtgtattctggccaggagtggtggctcacgcctgtcatccaaacactttgggaggccgaggc

SEQ ID NO: 983165 - DNA, 120 bp, Artificial Sequence
  ENSG00000259807_26 (sequence is synthesized)
gtgcatgtatattcacatgtgtgagggtgtgaatgtgtgtgtctgtgggtctgggcacatgagtgtgtgtgtgcatatactacattcacgtgtgagtgtgcaaatgcgagtgtgtctgta

SEQ ID NO: 983166 - DNA, 120 bp, Artificial Sequence
  ENSG00000259807_27 (sequence is synthesized)
ggtctgggcacgtgtatgcgtgtgtgtgcgagtactatattcgcatgtgtgagtgtgcgaatgtgtgtgtctgtgggtctgggcacacgagtgtgtatgcgtgtgtgtgcatgtactata

SEQ ID NO: 983167 - DNA, 120 bp, Artificial Sequence
  ENSG00000259807_28 (sequence is synthesized)
ttcacgtgtgtgagtgtgcgaatgtgtctgtgggtctgggcacatgagtgtgtgcatatactatattcacgtgtgtgagtgtgcaaatgtgtgtctgtaggtctgggcacatgtgtatgc

SEQ ID NO: 983168 - DNA, 120 bp, Artificial Sequence
  ENSG00000259807_29 (sequence is synthesized)
gtgtgtgtgcgagtactatattcacgtgtgtgtgagtgcgaatgtgagtgggtgtgggtctggtcacatgtatgtatgcatgtgtgcatgtattatagtcatgtgagtgtgcaaatgtgt

SEQ ID NO: 983169 - DNA, 120 bp, Artificial Sequence
  ENSG00000259807_30 (sequence is synthesized)
gtgtgggtctgggcacacaagtgtgtatgcatgtgtttctattgtattcatgtgagtataagtgcaaatgtgtgagtgtgtgttctctgcacacacaagtgtataggtatgtgtttgtgt

SEQ ID NO: 983170 - DNA, 120 bp, Artificial Sequence
  ENSG00000259807_31 (sequence is synthesized)
gtgcatgcactgtattcatgtgagtgtatgtgaatgtgtgactgtgagagtttgagtgtgcctgggtgtctggctatactagtgcatgtctgtgttcgtgtgcatcagtctgggtgtgcc

SEQ ID NO: 983171 - DNA, 120 bp, Artificial Sequence
  ENSG00000259807_32 (sequence is synthesized)
cgtgtgtgaatgtgtctatgcgtgggtgtcccaatatgtgtgtgcctgtgtatccatgtctgggtgtgcctgtgagtgtgagtgtgcgcatgggtgtctggatatgtgagtgcttgtgac

SEQ ID NO: 983172 - DNA, 120 bp, Artificial Sequence
  ENSG00000259807_33 (sequence is synthesized)
tacctgtgtgtgtatccatgtctaggtgtgcccgtgggtgtgagtgtgtctgtgcgtgggtgtctggatacgtgtgtgcctgtatgagtgtgtatccatgtctgggtgtgcccacgggtg

SEQ ID NO: 983173 - DNA, 120 bp, Artificial Sequence
  ENSG00000259807_34 (sequence is synthesized)
tgtgcataagagcctattgtgagtgcatgtggattgcatttatgtgagtccgtgtctgtgtgcacgcacgtgtccccgcacaagccagcccgagagggagtgtcccctgaacacaccctg

SEQ ID NO: 983174 - DNA, 120 bp, Artificial Sequence
  ENSG00000259807_35 (sequence is synthesized)
gcagcacttgcagcgtgatgaggttgagggaatgtgtcgctgaggtcgtaaatgcctctcgcacgtcccaacacgctggagcaacagcagcccgtgatgccggccgcgcagccgtgaagt

SEQ ID NO: 983175 - DNA, 120 bp, Artificial Sequence
  ENSG00000259807_36 (sequence is synthesized)
ccgtggagcgtccctaatcactgggggttctgctttgcggtgacagcggtgctactcacagctccagaactctgcagcttcccccctgaaacgggaacgggaaggtggcgcgggcgtcca

SEQ ID NO: 983176 - DNA, 120 bp, Artificial Sequence
  ENSG00000259807_37 (sequence is synthesized)
cacctcgagccacagccggcgggaggcacaggctggcaaaactgcctctcagtagtgagaagagacaaacaaaccgaacgccaggagcagaggaaacgaagacgatgtggccaagaaaaa

SEQ ID NO: 983177 - DNA, 120 bp, Artificial Sequence
  ENSG00000223923_0 (sequence is synthesized)
gtgttagtgtactttatgtgtgacccaagacaattcttcttttcccaaggtgccacagggaagccaaaagattggacaccctgttctagatcatcccatccagtagtgttcaaactttta

SEQ ID NO: 983178 - DNA, 120 bp, Artificial Sequence
  ENSG00000223923_1 (sequence is synthesized)
tttttacagctaaattcctcaagcagatgggctcctgtgtggaatcacaatgatgctggttaagattcactgaatgcttgctatatatcaggctctgtttggagcccagcatatatatat

SEQ ID NO: 983179 - DNA, 120 bp, Artificial Sequence
  ENSG00000223923_2 (sequence is synthesized)
caggctctgtttggagcccagcatatatatatataatctcatttaatcccacagtacctgatgagggaggtactgctgtttgtcccatttattttttatttatttattttattttatttt

SEQ ID NO: 983180 - DNA, 120 bp, Artificial Sequence
  ENSG00000223923_3 (sequence is synthesized)
aaggggctggctctcagcaccaggacctggcacagcatctgacccagaggacagctcagttcatgattgccagatggctgcacgcagcgcggaggagagccccctgggtctgaaatagag

SEQ ID NO: 983181 - DNA, 120 bp, Artificial Sequence
  ENSG00000223923_4 (sequence is synthesized)
gctggagaggaggactgtgagtccagaggagggagagtgatggtatcccacacacaagccagcgtgtctaggactcctatctgaagacactgcagaggtgagtcctgagtgacagagact

SEQ ID NO: 983182 - DNA, 120 bp, Artificial Sequence
  ENSG00000223923_5 (sequence is synthesized)
aagccatagaaagacagagagaaaaacagacaaaatgagaccgagtcagaggcagaaagccagagaggcaaagaggcaaaggcatagaaagagagggggacagagagaaagagaaaagga

SEQ ID NO: 983183 - DNA, 120 bp, Artificial Sequence
  ENSG00000223923_6 (sequence is synthesized)
caggggagagagaggggtgcgggaagcagacaggacagagagagaggagcaacagacagacagagaagaaagaaagaccaagataaaggcagacagagagaatgagagagatgagacaga

SEQ ID NO: 983184 - DNA, 120 bp, Artificial Sequence
  ENSG00000223923_7 (sequence is synthesized)
cacgcagaaactaacaagggggtcagagaatgaaagagagacagaaggacacaggagctcccaaaggccaaatccaggaagatcagagcatcaaaatacatgatgataggaatggcttaa

SEQ ID NO: 983185 - DNA, 120 bp, Artificial Sequence
  ENSG00000223923_8 (sequence is synthesized)
atgcgtctttgctgacgatcagaaatgcagtcatcgccacataatgacagtggtcccataaacttatgatactgtatttttagtgtcccttttctacatttagatatgtttagatataca

SEQ ID NO: 983186 - DNA, 120 bp, Artificial Sequence
  ENSG00000223923_9 (sequence is synthesized)
aatacttaccacctgttacagttcccagcctacagcgttcagtacagtgacatgctgtgcgggattttagcccgggagctataggctataccatacagtagcataggtgtgcagtaggct

SEQ ID NO: 983187 - DNA, 120 bp, Artificial Sequence
  ENSG00000223923_10 (sequence is synthesized)
gtaccgtctgggtatatataagtactctctatagtgcttgcacaatgacaaaatcccccaacaacacatttctcagaaggtatccccattgttaagtgactcatgactgtaactgaataa

SEQ ID NO: 983188 - DNA, 120 bp, Artificial Sequence
  ENSG00000223923_11 (sequence is synthesized)
acaaaatttgataaggcacaagatacttacgtcatctccaagcacctccccacattatacttagaaattacaaagaagaagaaagtaacttttcctggcttcctccactttaatcaagtg

SEQ ID NO: 983189 - DNA, 120 bp, Artificial Sequence
  ENSG00000223923_12 (sequence is synthesized)
atcaaagttaacatcactgcaacggtaatgggatgatgaagccaagctgggagcaggggtgcactgagaacagacgccgcttctgcggtatccctgccagaaagcctcaacctgaaccta

SEQ ID NO: 983190 - DNA, 120 bp, Artificial Sequence
  ENSG00000223923_13 (sequence is synthesized)
atcatgaggaaacatcaggccaacccaaactaagggacaacctacacattaaacgtcttggaatctccgaaagtgacaaggtcatgaaaatcaaggaaaggctgaggagctttccagact

SEQ ID NO: 983191 - DNA, 120 bp, Artificial Sequence
  ENSG00000223923_14 (sequence is synthesized)
gaaggcagcaaaaagacttggcaaccgaaagtaacggcggcttctgaaccagattctgttgatgcccacaaggacatcactgggaccactggcgggacttccctgggtctagactgaatg

SEQ ID NO: 983192 - DNA, 120 bp, Artificial Sequence
  ENSG00000223923_15 (sequence is synthesized)
gaccccgagccaggcctgtcccaagtcctcccgggcccgccagcccgcggccccttaccttggcctggcatttccgatgacaggagaagctgcagactgcaagagggcgagacacagaaa

SEQ ID NO: 983193 - DNA, 120 bp, Artificial Sequence
  ENSG00000226240_0 (sequence is synthesized)
agaacctccaactacacttgagggaggaaagtgcaggacaccgaggggacctgtgtcttgtgtttcagatgtatagaaacttgatacctccctgcaagctgagggagcaggctccggcct

SEQ ID NO: 983194 - DNA, 66 bp, Artificial Sequence
  ENSG00000226240_1 (sequence is synthesized)
tccggccttggccagcccagaaaggggatcccacaatgcagcggtgggctgaagtgtgagggctgt

SEQ ID NO: 983195 - DNA, 69 bp, Artificial Sequence
  ENSG00000226240_2 (sequence is synthesized)
gcgcactgcggtgctgataatgacacttcctgataattaggaatgtggagccaagatggccgaatagga

SEQ ID NO: 983196 - DNA, 120 bp, Artificial Sequence
  ENSG00000226240_3 (sequence is synthesized)
ggtgatttctgcatttccatctgaggtttttcccatggtgttccctttccaatgtctttctggaagtcacacattgaccactaacaacaggagagaggacaaagaaaggcagcaaaagac

SEQ ID NO: 983197 - DNA, 120 bp, Artificial Sequence
  ENSG00000226240_4 (sequence is synthesized)
gcagcaaaagactatttccaatgcgaaatatgatcagtgtgccccaaggaagccaaaagattggacacccctggaaactcatcagtcagaggagatgtgagtgagaggcctcaagtgacc

SEQ ID NO: 983198 - DNA, 120 bp, Artificial Sequence
  ENSG00000226240_5 (sequence is synthesized)
agaaagagaggagcaagagatccgcttatgataatccaacaaaacgataactggaacagaaaagaaaacgacggccaatcaaacccctgagtgactccacattgtctttaattctcctct

SEQ ID NO: 983199 - DNA, 120 bp, Artificial Sequence
  ENSG00000226240_6 (sequence is synthesized)
aatcaaagagcagcacacagttgtgagaggtggtccgagccggggagattatgcagagagtgactccattcagagaaattttggcatgattcctaacctcttagcctgagggagaatttc

SEQ ID NO: 983200 - DNA, 120 bp, Artificial Sequence
  ENSG00000226240_7 (sequence is synthesized)
ttaaattttatttgtggttctcacctgagagaattgatgccttcaagagagcaccagacagaggctaaacagacatgcaataaaattatcctccttggatgggtcaggagctggctgata

SEQ ID NO: 983201 - DNA, 120 bp, Artificial Sequence
  ENSG00000226240_8 (sequence is synthesized)
acttactctaagcctacatcaatcagggagcagcaggggcatccacagtcaaggagagctgaaggtggcagggcgtacagccgcagatcatcttaaataaagatatagaaggcagactct

SEQ ID NO: 983202 - DNA, 120 bp, Artificial Sequence
  ENSG00000226240_9 (sequence is synthesized)
cataaaagaaaccataaatgaaacaatgaataacgacttctgtttatcattctctattgtttgcaactttcacaataagcgtgtattgttttcttaaataaatagcaaacaataaactca

SEQ ID NO: 983203 - DNA, 86 bp, Artificial Sequence
  ENSG00000226240_10 (sequence is synthesized)
acttgagggaggaaagtgcaggacaccgaggggacctgtgtcttgtgtttcagataagccttacctactgggctcaagcgatcctc

SEQ ID NO: 983204 - DNA, 120 bp, Artificial Sequence
  ENSG00000226240_11 (sequence is synthesized)
tcctggttgctgtgaggattcaatctaataatatatattagaatgttcctgaacctctaaaaggcttaaaaaatcttgacaggcttactgttattctaataaatgttccaaataatagaa

SEQ ID NO: 983205 - DNA, 85 bp, Artificial Sequence
  ENSG00000259598_0 (sequence is synthesized)
gtgccgtggctcatgcctgggacttgatgccaggagtttgagaccagactaggcaatatagtgagacccctctccccgcaccaat

SEQ ID NO: 983206 - DNA, 120 bp, Artificial Sequence
  ENSG00000259598_1 (sequence is synthesized)
agactaggcaatatagtgagacccctctccccgcaccaatttccaaaaaaaaaaggaaaggtttaagttagagaaatccagacttgaaagtcaccatcagcacagaagaatggtggaaac

SEQ ID NO: 983207 - DNA, 120 bp, Artificial Sequence
  ENSG00000259598_2 (sequence is synthesized)
atatgtaagcagagctcgaagaagcctctagatgaaaagctggagaaggcccaacccaagaggagacaaggacttcaagggtgaatcctctcagagaaatccacattgcaacagcagttt

SEQ ID NO: 983208 - DNA, 120 bp, Artificial Sequence
  ENSG00000259598_3 (sequence is synthesized)
cttgaagtggttggtgctctaaaccaagaacaaaaatgttaatataaggcctttaagcggagtcttactaaagcaggagaggggctggccaggctcatctcttctctcccacccaactgc

SEQ ID NO: 983209 - DNA, 120 bp, Artificial Sequence
  ENSG00000259594_0 (sequence is synthesized)
atgatggacgaaacaggtaacagggctgaggaaaactcttccggaggttgtagaggaaactaaagcaggagaaaaactgcctagtgccgaaaggtcctttgctgcagatcaagacttcca

SEQ ID NO: 983210 - DNA, 120 bp, Artificial Sequence
  ENSG00000259594_1 (sequence is synthesized)
acttgccctatacctatatagaaaaatggctggaaggatatagagaaaaatgctaaaagaagaatatctatgagtcatcagtgtcctgagaagctaaacgtcctactaaggatcctgcaa

SEQ ID NO: 983211 - DNA, 120 bp, Artificial Sequence
  ENSG00000259594_2 (sequence is synthesized)
agggaaaacagaagaggaacttgcactttttgagaacttgctgtgtgccataagcctaagtccctatgtgggaaggattctacccacacatgacagaggaggagactgaagcatgaaaaa

SEQ ID NO: 983212 - DNA, 120 bp, Artificial Sequence
  ENSG00000259594_3 (sequence is synthesized)
ggcgttttgctggagaaagcagcatagcggaatgtaaagcggtaaagcgtgtatgctctggagccacagacctagatggtgaagtctagctctggtacttgacagatcccattctccatc

SEQ ID NO: 983213 - DNA, 120 bp, Artificial Sequence
  ENSG00000259594_4 (sequence is synthesized)
atctccaccctgctctgtgacccagtcggctgctctgcttgaacgacatcaacaagcttcctgcatcctcatgtctagctgaactcaaccagtgggaagtaccagcaggagatcaaaaga

SEQ ID NO: 983214 - DNA, 120 bp, Artificial Sequence
  ENSG00000259594_5 (sequence is synthesized)
aaggagcaaagtccactgtgggatggctgcttctcttgacccatggtttcagctcctgacaggtagccactccatgcagcccttctctcattgggttctggtgaccatcctctcctcttg

SEQ ID NO: 983215 - DNA, 120 bp, Artificial Sequence
  ENSG00000259594_6 (sequence is synthesized)
cctctttgggtataacagtggatagtgatactcttgataataatactattcctcatggttttcctatactgtgaccacacttttgtaaagagtgatttaataaatatgcagtaactgtgg

SEQ ID NO: 983216 - DNA, 120 bp, Artificial Sequence
  ENSG00000259594_7 (sequence is synthesized)
agttgcaggacaagaactcaagacccatcaagtggcagggccaaaaaagctgtaacaccaacagggctgaaacatgccccctgcttgccacgttgaaggtgaagagaaggaggtaaacta

SEQ ID NO: 983217 - DNA, 120 bp, Artificial Sequence
  ENSG00000259594_8 (sequence is synthesized)
ctgtcaaatcactgtaacttgaggagttttggtgtttcaccttgctgaacaggtgtatggaaagcccaagtcgtttggtaaacctctcaacttttgacaggccacaaactccaaactgga

SEQ ID NO: 983218 - DNA, 120 bp, Artificial Sequence
  ENSG00000259594_9 (sequence is synthesized)
cggtgattgaagcctggggtcacatgagaaaaagaaatggcgttttgctggagaaagcagcatagcggaatgtaaagcggtaaagcgtgtatgctctggagccacagacctagatggtga

SEQ ID NO: 983219 - DNA, 120 bp, Artificial Sequence
  ENSG00000259594_10 (sequence is synthesized)
agtctagctctggtacttgacaggctgtacaagaatcatggtgccagcatctgcttctgacaaggacctcaggctgcttgcacttatggcaaaaggtgaaggagagccaacttgtcacat

SEQ ID NO: 983220 - DNA, 120 bp, Artificial Sequence
  ENSG00000259594_11 (sequence is synthesized)
tgccaggctgtgttaaacaagctcttgcatgaaatgatagagcaagaactcactcattaggaggagagggcaccaagccattcatgagggatctggccccataaccctaacacctcccag

SEQ ID NO: 983221 - DNA, 120 bp, Artificial Sequence
  ENSG00000259594_12 (sequence is synthesized)
tcagccctacctgtcacactggagattaaatttcaatgtaagatttggaggggacagatagccaaactatgttagaagtcccaaataaagaaaaaaatcttcgtatatttggaactttaa

SEQ ID NO: 983222 - DNA, 120 bp, Artificial Sequence
  ENSG00000259595_0 (sequence is synthesized)
ctggcggctagggtttagtaactgtgggcgcgctgggttatctcaatttccatcaggcctcagctgaaagctcatctgccaaaacacatcagcactcatgtaaaataaaaggagtaggga

SEQ ID NO: 983223 - DNA, 120 bp, Artificial Sequence
  ENSG00000259595_1 (sequence is synthesized)
ggtgactttctacacaatactgtacagtgtttggcttccagtttccctcttgtgtgtaactattctagcactttaggttttctgaagcattcctttaggacttaaaggacatcattgaaa

SEQ ID NO: 983224 - DNA, 120 bp, Artificial Sequence
  ENSG00000259595_2 (sequence is synthesized)
ccatttgaagctctcgttcttcatcatctgtgccctatcctgccactatcatctagagaatgccagaatgagacaagaaatgttaaatggcaacactcagctcactttagagccatgctg

SEQ ID NO: 983225 - DNA, 120 bp, Artificial Sequence
  ENSG00000259595_3 (sequence is synthesized)
cggatcaacaggggattcattttcatcaaagaatcggcctgtgaagtaggtagaggattaattcaagagtaaagagagaagaaaagaaggaatctatacggaaggcagaccagaaagtaa

SEQ ID NO: 983226 - DNA, 120 bp, Artificial Sequence
  ENSG00000259595_4 (sequence is synthesized)
acaagtgaaagctggcaacttttggggtactggatataaaaggatacattttgtgaaggttatccaagacaaaagtatataagagggaagactctgaaaatatgtaatttttattaagaa

SEQ ID NO: 983227 - DNA, 120 bp, Artificial Sequence
  ENSG00000259590_0 (sequence is synthesized)
gagctgttagtactgctttcatctgttttacagccacagcgacagcagttccctggcttctggaaggagtgtcggtctatccaaaaaatgtactaacagatatgtaaagtctgtcatcca

SEQ ID NO: 983228 - DNA, 120 bp, Artificial Sequence
  ENSG00000259590_1 (sequence is synthesized)
tctgtgaacacgaaatttctttatatttattcaaattatctttggtttttaatgatgttaaatccaagtattctttgtgatgctgttgtaaatggaattttttgtgttgttcattgctaa

SEQ ID NO: 983229 - DNA, 120 bp, Artificial Sequence
  ENSG00000259591_0 (sequence is synthesized)
aggaaattccactcattgataaagctcggcttcgacgcccctgctcacaatgaaataccttccttgccaaccacattgctttatgatcgtgcccctttaccacattgtacttgaaatgcc

SEQ ID NO: 983230 - DNA, 120 bp, Artificial Sequence
  ENSG00000259591_1 (sequence is synthesized)
ttgtcatttaagaaaccataaaaacgacgtctttaaaaatgggttcatcatttagctggagatggcttctgtgcctggaaccagaagcctgtcctctcggtggtatgcctccacaaaagg

SEQ ID NO: 983231 - DNA, 120 bp, Artificial Sequence
  ENSG00000259591_2 (sequence is synthesized)
aagcgagctaccacaaaggacagcatcatgtgttgccttcattgctattgaatcgggaagttggtgcccagtttcaacatggatgacaaagtagtgggaatctgaaatgcctacagtaga

SEQ ID NO: 983232 - DNA, 120 bp, Artificial Sequence
  ENSG00000259591_3 (sequence is synthesized)
ccaggatcccccaccaaaccgaatgaaaataaattcaatgtgtgcccactgagcctggcctgggagttcttgagatcaactcagaatcatggtctttctgtcactcccaaaacaatccta

SEQ ID NO: 983233 - DNA, 120 bp, Artificial Sequence
  ENSG00000259591_4 (sequence is synthesized)
cctaattctacttgttcctaagtattgccttaggatactgacagtcttttctcctacttacagcttttgaatgaaattaaagctaatcctctctggcttggtcgggtcttgtgtaagatt

SEQ ID NO: 983234 - DNA, 120 bp, Artificial Sequence
  ENSG00000259591_5 (sequence is synthesized)
cccacaccccacaatcaaggccttgcaatgtggtgttagaagagatagccaagttaccacacctgtatcacgattcggataaggatagtattttttgccttccatgagacagctttgaaa

SEQ ID NO: 983235 - DNA, 120 bp, Artificial Sequence
  ENSG00000259591_6 (sequence is synthesized)
ggatccccatgtgggacacactttagcatgaacacaaccttgcctcggaaagcatacgtgggaaaatatgccaggggggtagctccccaattctcctgcccaaagatgtttgccatagac

SEQ ID NO: 983236 - DNA, 120 bp, Artificial Sequence
  ENSG00000259591_7 (sequence is synthesized)
tacgctgactggcccattcaggagcccctcgggtttccgctggacctacccttctgatttgagatcatccacgtgttttcccacctccggaggcttttattttctgcttcctcccttctt

SEQ ID NO: 983237 - DNA, 120 bp, Artificial Sequence
  ENSG00000259591_8 (sequence is synthesized)
agtacagtgccaatcactgctctcccccgccgcccccctccccaaaggctctctgaggctgctccctttgtgattggcatctcattaatgaagaagggctggtgtctctcattacagtta

SEQ ID NO: 983238 - DNA, 120 bp, Artificial Sequence
  ENSG00000259591_9 (sequence is synthesized)
gagtgagtgagaggacctcagaactaatttacttgctctcactagggaagacacttgcctccatcaagaacttcactttcctgctgcctgtggcaataaaagaacccgttttgttttaac

SEQ ID NO: 983239 - DNA, 120 bp, Artificial Sequence
  ENSG00000257621_0 (sequence is synthesized)
tggccgtagctccatcgcattttatgtttctggcgagaagggaacggagttttcatcaggtagattggtttttgtgcggccgtcctccaccgtttcctccaggacagcacctagtcgtgg

SEQ ID NO: 983240 - DNA, 120 bp, Artificial Sequence
  ENSG00000257621_1 (sequence is synthesized)
ccggaggagtctcagagctgtcagaaagaataagactgattttatgggaaaattaagcagatgctccagtttgagaaacctggatctgcgatctgtttgtggtaccagcatcaagatgat

SEQ ID NO: 983241 - DNA, 120 bp, Artificial Sequence
  ENSG00000257621_2 (sequence is synthesized)
ttatggtaataagatataaaaccaaggaaaataacctaaagtctgaaaaagaccagaatcgaagtttcctgattcatattttaatgttttgaaatttatactccaggctgggtgcagtgg

SEQ ID NO: 983242 - DNA, 63 bp, Artificial Sequence
  ENSG00000257621_3 (sequence is synthesized)
ttaatgttttgaaatttatactccaggcttgcctgaagtcagaagttcgagaccagcctgacc

SEQ ID NO: 983243 - DNA, 120 bp, Artificial Sequence
  ENSG00000257621_4 (sequence is synthesized)
ccactgcactctagcctgggcgacagagagagagactgtctaaaaaaggaaaagaaaaaaatttatacgccaaaaaagatattctgagataacctgtagttaccactaactttgtgacaa

SEQ ID NO: 983244 - DNA, 120 bp, Artificial Sequence
  ENSG00000257621_5 (sequence is synthesized)
cctgtagttaccactaactttgtgacaaaattataaaaatccacagccatctatgaatctgtaggcagacctgaagtttgaacgactggtgaagacatctgattttctttatagccaagt

SEQ ID NO: 983245 - DNA, 120 bp, Artificial Sequence
  ENSG00000257621_6 (sequence is synthesized)
taggataacaaaatgcaaacaagtcattaatatttactatatgcaagatacagaaagatgaaggaaggagtaagaagttatccttcgtggaactattcaaagcaaaaatgcaaaatacca

SEQ ID NO: 983246 - DNA, 120 bp, Artificial Sequence
  ENSG00000257621_7 (sequence is synthesized)
gggaaagctttgaagaaccaagatttgagcaggttcttagaatatagattggattggatttgatttcaagaaagatgaacgtgtaaagcagaagtgggaagccaaaaacttttttccaaa

SEQ ID NO: 983247 - DNA, 120 bp, Artificial Sequence
  ENSG00000257621_8 (sequence is synthesized)
tactttttggagggtcttctaaaaccttgctataatatgagaggatcttgattttctacaactaagtaaaagataacatgctgctccattttcttaaatgatgaagggatggctttccta

SEQ ID NO: 983248 - DNA, 120 bp, Artificial Sequence
  ENSG00000257621_9 (sequence is synthesized)
tggtctctatgaataaagaaaagcaaatagaatcttatcagataagtgcttttataagtctaaatatattctttggaatctctaaagcaaaacttttaaacttttttttttttttttttt

SEQ ID NO: 983249 - DNA, 120 bp, Artificial Sequence
  ENSG00000257621_10 (sequence is synthesized)
aaagaggctagtcatatctcatcagtggttacaaagtatccttacaattgaacctacatttgttaatcctgttcagtgtgtatgaaaatcacttggtggccgggcatggtggctcacgcc

SEQ ID NO: 983250 - DNA, 68 bp, Artificial Sequence
  ENSG00000257621_11 (sequence is synthesized)
tatagtgaaaccccatttctactaaaaatgcaaacattagtcaggcatggtggcaggtgcctgtagtc

SEQ ID NO: 983251 - DNA, 120 bp, Artificial Sequence
  ENSG00000257621_12 (sequence is synthesized)
tccatctcaaaaaaagaaaagcacgtcactcgatgttctttctttcataagagttgaagaactaggtatatctgcttatattatggcatctatagtagcttagctgctcatatttgggtc

SEQ ID NO: 983252 - DNA, 120 bp, Artificial Sequence
  ENSG00000257621_13 (sequence is synthesized)
tacattcaaagaagaattcaacattcatgtgacattcatactttggaactttgggaaagtataggaatgaccatagattggcttagggatagtcaatttacctgtctgtaaatggatcca

SEQ ID NO: 983253 - DNA, 120 bp, Artificial Sequence
  ENSG00000257621_14 (sequence is synthesized)
atttagtattgttcctgtatttttctaagaccaacacttgtgtcattcacagttaaatatatgagttgtggccaggcccggtggctcatgcctgtaatttcagcattttaggaggctgag

SEQ ID NO: 983254 - DNA, 77 bp, Artificial Sequence
  ENSG00000257621_15 (sequence is synthesized)
caagaccagcctgggcaacatagtgagatgcggtctctacaaaaaatttttaaaagttagccaagcatggtggtgct

SEQ ID NO: 983255 - DNA, 120 bp, Artificial Sequence
  ENSG00000257621_16 (sequence is synthesized)
ctgaggtgggaggattgcttgagccatatgctctaatatattttaaaatacatattttaaatatattttgagtggtaaaatgtagcagataatgttacataaaagaagccatggtaatga

SEQ ID NO: 983256 - DNA, 120 bp, Artificial Sequence
  ENSG00000257621_17 (sequence is synthesized)
ccatggtaatgacatgacattactggttttgagttgtttgtgtagtagttagctattaatactcaggtataatgatttgctatttaaactacacaaatgctcaaagtccagcgataccct

SEQ ID NO: 983257 - DNA, 120 bp, Artificial Sequence
  ENSG00000257621_18 (sequence is synthesized)
gcacccaaattcagtggctagattaccttcttaggaaagcacaacacttcaatggagtgacactggcatgagtccactagagggtgtgtatacatggcctgagttcaaattgttcctgct

SEQ ID NO: 983258 - DNA, 120 bp, Artificial Sequence
  ENSG00000257621_19 (sequence is synthesized)
gtgagtactgcttttcagcttcaagttattcttatcggccacagtactgtttattccacttagtaacagttctgtttacagagcactttaacataaattctgatttttaacatgaaagct

SEQ ID NO: 983259 - DNA, 120 bp, Artificial Sequence
  ENSG00000257621_20 (sequence is synthesized)
gtctgatgttggtatttttattttaatctttagagatcaagaaatttttttagtgacagaatagggactttattgatccttaaatccgcccctcaccacaataaaggaaaaaagcaaaaa

SEQ ID NO: 983260 - DNA, 120 bp, Artificial Sequence
  ENSG00000257621_21 (sequence is synthesized)
acaaaatgttcagtataagaaattacttttaataattacgtcaaaacatgcagtaggtggacttttgagctaaccctggagaaggagctggatttcaccagttagcctcctatggatctg

SEQ ID NO: 983261 - DNA, 120 bp, Artificial Sequence
  ENSG00000257621_22 (sequence is synthesized)
ctaccatcatcaccctcccaccccacctccactgccttttttcccaagacttttaaaaaaatgttttattgcccaggcacagcactttgggaggctgaggcgggcgtgagattgggagtt

SEQ ID NO: 983262 - DNA, 120 bp, Artificial Sequence
  ENSG00000257621_23 (sequence is synthesized)
tggaggctgaggcaggagaaccgcttgaatccgggaggcgaaggtcacgagtggtattcagttaagagaacaattatttcgtataagccacatcagagacgactgaagatgaaaaaacta

SEQ ID NO: 983263 - DNA, 120 bp, Artificial Sequence
  ENSG00000257621_24 (sequence is synthesized)
gactgaagatgaaaaaactaccatccccgtatataactaatttgtgctgtgcaccaacaagaacctgctttaaatttccatggcaatttacaacccccatactgtaccaggcaaggttag

SEQ ID NO: 983264 - DNA, 120 bp, Artificial Sequence
  ENSG00000257621_25 (sequence is synthesized)
aacctggaagatggaggttgcgaataagactgattttatgggaaaattaagcagatgctccagtttgagaaacctggatctgcgatctgtttgtgagtggtattcagttaagagaacaat

SEQ ID NO: 983265 - DNA, 120 bp, Artificial Sequence
  ENSG00000257621_26 (sequence is synthesized)
agaaaaatatccctagggcctagctgaggagtctgtatgttgttgggttttgatagtaaccagtccaagattttgttattagacgtgggtttctgaatagacaggcatttctgaacagac

SEQ ID NO: 983266 - DNA, 120 bp, Artificial Sequence
  ENSG00000257621_27 (sequence is synthesized)
atgacaggatcaaaacaatgtttgagcaaactgcccttcatctactgtggatatgttgggggatgatggaatatagtgaaagataatgggtgctcatacagcagtctagacttaaggtga

SEQ ID NO: 983267 - DNA, 120 bp, Artificial Sequence
  ENSG00000257621_28 (sequence is synthesized)
ttcaactactatatattaaactagattatcttttattttttaattttgaaatctggatgctcaagctctgcctgcacaaccacatgaggaagaaggaacaatgacaacaaaaataacact

SEQ ID NO: 983268 - DNA, 120 bp, Artificial Sequence
  ENSG00000257621_29 (sequence is synthesized)
aaatttaaatttaagagtactacttttaggaaatagacaaaccattatttgggtacaactaaaggcaactggcatggactcaaatattttggggaagaaaaagactaaaagttctaagga

SEQ ID NO: 983269 - DNA, 120 bp, Artificial Sequence
  ENSG00000257621_30 (sequence is synthesized)
agaaaatgcgaaccttgatagtttgaaatagttaaaaagacagtgtagaaactgcttaggcagtttgattatggactattagatgatacttgggtctgataatggtataaggagaataaa

SEQ ID NO: 983270 - DNA, 120 bp, Artificial Sequence
  ENSG00000257621_31 (sequence is synthesized)
gtatttagggatccaatattacgcctgcagctttttccaaatagttcatgggggagggggatgtgtaagtggttaactgaagtctaactagataggtttgttgtaagcttaggatgttta

SEQ ID NO: 983271 - DNA, 120 bp, Artificial Sequence
  ENSG00000257621_32 (sequence is synthesized)
cagttcttcatgttaagttgagcgtgatgggaagggaaagaatgctgatctttaaatttttgtccttagttaagttctgtatttagtgaattaattgcatcctaaaaagtcaaacttgaa

SEQ ID NO: 983272 - DNA, 120 bp, Artificial Sequence
  ENSG00000257621_33 (sequence is synthesized)
aagcacattttaaatggcaaatctattttttacatgtttgtgaagtttttattttttagtaaacagaccatcagaagagaacaatggtacagagcaggggtcagcagatggattttgtaa

SEQ ID NO: 983273 - DNA, 120 bp, Artificial Sequence
  ENSG00000257621_34 (sequence is synthesized)
agcatcaacttgtaaatattttcaagtttattagctgtatggctctggtttctgttccctgttccaaatgttaaagtctactgttgtattctaaaagcagccatggactgaatgtagctg

SEQ ID NO: 983274 - DNA, 120 bp, Artificial Sequence
  ENSG00000257621_35 (sequence is synthesized)
tgttccaataaaacttacacaaaagcaggcagtgggccataatttgcaacacctgattcacagcataattttgtcacaaactgaaagtgttcctcaattaaagtgatttttttttcttga

SEQ ID NO: 983275 - DNA, 82 bp, Artificial Sequence
  ENSG00000257621_36 (sequence is synthesized)
ctgggactacaggcgcgtgccaccacaccagctaattttttgtatttttaatagagccaaggggcttcaccatgttagccat

SEQ ID NO: 983276 - DNA, 120 bp, Artificial Sequence
  ENSG00000257621_37 (sequence is synthesized)
acctcatgatctgcctgcctcggcctcgtaaagtggtgggattacgggcatgagccacgtgcccagccttcatgtgtattttagacaatgaaaatgatgttagacaaaaaagcaaattcg

SEQ ID NO: 983277 - DNA, 120 bp, Artificial Sequence
  ENSG00000257621_38 (sequence is synthesized)
caaattcgagcagttttcgtttttgagttaaaaatgggttgtaaaacaacagagacaccatatcagcaatgcatatggttcaggaactgttaacttacagtgcagtggtgattcaagaag

SEQ ID NO: 983278 - DNA, 79 bp, Artificial Sequence
  ENSG00000257621_39 (sequence is synthesized)
caggaactgttaacttacagtgcagtggtgattcaagaagtttttttgttgttgttgtttgagatggaatcttgctctt

SEQ ID NO: 983279 - DNA, 120 bp, Artificial Sequence
  ENSG00000257621_40 (sequence is synthesized)
ccaaagtgctgggattacaggcttgagccgctgtgcctggcagtttcaagaaattttgcaaagggaaggaaagtcttgaaaatcaggagcgtagtggctggtcgccagaagttgataact

SEQ ID NO: 983280 - DNA, 120 bp, Artificial Sequence
  ENSG00000257621_41 (sequence is synthesized)
aagttgataactaccggttaagagcaatcagcaaagctgatcctcttaaggctacttgagatgttgccgaagaactcaatgtggaccattctacagtccttcagcatttgaagcaaatta

SEQ ID NO: 983281 - DNA, 120 bp, Artificial Sequence
  ENSG00000257621_42 (sequence is synthesized)
ttattttttgcaacaacaaaccatttcttggtcagattgtgatgtgcgagaaaaagtggattttatacaacaactggtgatggccagctcagtagatggactgagaagattctccaaagc

SEQ ID NO: 983282 - DNA, 120 bp, Artificial Sequence
  ENSG00000257621_43 (sequence is synthesized)
caccaaaaaaaggtcatggtcactgttttgtggtctgctgctggtctgatccactatagcattctgaatcctggcgaaaccattacatctgagaagtatggtcagcaaatcgatgagatg

SEQ ID NO: 983283 - DNA, 120 bp, Artificial Sequence
  ENSG00000257621_44 (sequence is synthesized)
gtcagcaaatcgatgagatgcaccaaaaactgcaacgcttgcagtcagcattggtcaacagaaagaggcccaattcttcacaatgcccttccacatgttgcacaaccaatgcttcaaaag

SEQ ID NO: 983284 - DNA, 120 bp, Artificial Sequence
  ENSG00000257621_45 (sequence is synthesized)
ttgaacaaattgggctgtgacattttgcctcatccgccatattcacctgacctctctccattgactacgacttcttcaagcattgcgacacctttttgcagggaaaacacttccacaact

SEQ ID NO: 983285 - DNA, 120 bp, Artificial Sequence
  ENSG00000257621_46 (sequence is synthesized)
ggatgcagaaaatgctttccaagagttcgtcgaatcctaaagcatggatttctacactacaggaataaacaacttaaaaatgtgttgattgtaatggtttctattttgattaataaagat

SEQ ID NO: 983286 - DNA, 120 bp, Artificial Sequence
  ENSG00000257621_47 (sequence is synthesized)
agatgtgtttgagcctagttataatgatataaaattcatggtctgaaaccgcagttatttttgcatgaacgtaaatgatgaattttagatgctgaaatttctgggcatctaaatcttctt

SEQ ID NO: 983287 - DNA, 120 bp, Artificial Sequence
  ENSG00000257621_48 (sequence is synthesized)
tgaaatttctgggcatctaaatcttctttcacatccctgattatttttggaataaactcccagaagtggaaatataaggctgaaggcctggtgtggtggctgaagcctgtaatcccagca

SEQ ID NO: 983288 - DNA, 120 bp, Artificial Sequence
  ENSG00000257621_49 (sequence is synthesized)
caacatggtgaaacctcatctctacaaacagtgcaagaaatcagccagcgtggtggcgtgcacctgtgttccccgctaatcaagaggctgaggtgggatgatcacctgagtccaggagat

SEQ ID NO: 983289 - DNA, 120 bp, Artificial Sequence
  ENSG00000257621_50 (sequence is synthesized)
ggtgaagaagaaagaaaatgaaacatactcaagatttaagaaagagggaacgagcagtaccattcactgatttggcaagtcaagaaaagccactgagtggtattcagttaagagaacaat

SEQ ID NO: 983290 - DNA, 120 bp, Artificial Sequence
  ENSG00000257621_51 (sequence is synthesized)
gtatgtatatatatatgaatagattatgtatttaaggctagggatgcttgtatagtccattagaaagcttttttttcttaactgcacttagatttgttgtcctttttattactgccccgc

SEQ ID NO: 983291 - DNA, 120 bp, Artificial Sequence
  ENSG00000257621_52 (sequence is synthesized)
tgccccgccccccccaaaaaatttctggtctgtctttagcttcatttctgaacattttatcctggacctctctttcttcaagtagaaataatcggctgggcgtggtggctcatgcctgta

SEQ ID NO: 983292 - DNA, 120 bp, Artificial Sequence
  ENSG00000226245_0 (sequence is synthesized)
aaacaagacatttatttttcatactcttttgggggaaaggaaaaaaatcagtttgccctacccaatgatggtctttctgaaagattctccattcattccatagaactggataggttgctt

SEQ ID NO: 983293 - DNA, 120 bp, Artificial Sequence
  ENSG00000226245_1 (sequence is synthesized)
tgtgagcagcttcgctggtgcacagccagactccctctctggttagaatagggaaaaagaaacataatactttgagtgcttatgatgtgccaggccttattctttgcatagacaatgcaa

SEQ ID NO: 983294 - DNA, 120 bp, Artificial Sequence
  ENSG00000226245_2 (sequence is synthesized)
tcctgaaaacaatgccatgagagtgatacagataatgggagcaaagggagcctgtcaaaggtcacagagctaggtaagttagagctgactcaaataggcattctccatagcagtgtactg

SEQ ID NO: 983295 - DNA, 120 bp, Artificial Sequence
  ENSG00000213468_0 (sequence is synthesized)
agagaaccagacaataccaggttgcttataaaaggatgccatgtgcttgctggaggtcccaggtgcaaccaaattgcttgcagctaggaggaccttgaagagaaatgggatcagcccgcc

SEQ ID NO: 983296 - DNA, 120 bp, Artificial Sequence
  ENSG00000213468_1 (sequence is synthesized)
aaaccaagaagggttagcacttttgctaggagagctgaccacgcacaaacagatgagaaccaaaaccgagtgaagaggattgaagatgaacccacattttaaaagttcttgtctgctgga

SEQ ID NO: 983297 - DNA, 120 bp, Artificial Sequence
  ENSG00000213468_2 (sequence is synthesized)
ggtggcattacctgtgacctcgcttcacttctccatacatggctgttatagcagaaaatccagctttctgaagcatatttcacgacatatgatgagacttatgtgatgtgagacctgaga

SEQ ID NO: 983298 - DNA, 120 bp, Artificial Sequence
  ENSG00000213468_3 (sequence is synthesized)
cctcatgtatcatgcaaggatattcctcatatatcatgctttttctatcttctgctctttgccacctgtgaggtccctgaaaatgaaggccaatactacccaggtaagcaaatacccaaa

SEQ ID NO: 983299 - DNA, 120 bp, Artificial Sequence
  ENSG00000213468_4 (sequence is synthesized)
aggccaaaaagactgggtaatctggtgttcccgttaattctctctattagagttttaatctgagactttctcttttgtgaattctttgacacttttaaggagaattttgtatttcgtcct

SEQ ID NO: 983300 - DNA, 120 bp, Artificial Sequence
  ENSG00000213468_5 (sequence is synthesized)
atatattttgtttccattggagagatatggaggagaaatggtccaaatattatagccaaccataaacaaaaactgaattactcctaaatctatttaacaagttgaaatatgactaagctg

SEQ ID NO: 983301 - DNA, 120 bp, Artificial Sequence
  ENSG00000213468_6 (sequence is synthesized)
ttcagtaatatttgtcatttatttcaatgaatattttccttaactttctgaggaaactaagtaactaatttcaaatgagaagaaatacaatgacaacaaacaaaaataaagtgaaataaa

SEQ ID NO: 983302 - DNA, 120 bp, Artificial Sequence
  ENSG00000213468_7 (sequence is synthesized)
aaggatattcctcatgtatcatgcaaggatattcctcatatatcatagactaaggtgtcagtatgttcttcaagctgctctgctcctgggcccaagctattctcctgcctcagccttcca

SEQ ID NO: 983303 - DNA, 120 bp, Artificial Sequence
  ENSG00000213468_8 (sequence is synthesized)
gcaaacaccattgctaataagaagatattgtaagactgatacctaagagataagaggtaacacacacacacacacatgcaggcacacacacacacacacactcaagtcacaagaagaagc

SEQ ID NO: 983304 - DNA, 120 bp, Artificial Sequence
  ENSG00000213468_9 (sequence is synthesized)
acaagaagaagctgaaaaatatttaatggcataggaacatgtggaaatataaattattcactgttaaacagaggacaatttttaaaactgtgtaactatctttttttttttttttttttt

SEQ ID NO: 983305 - DNA, 89 bp, Artificial Sequence
  ENSG00000213468_10 (sequence is synthesized)
tgccccaaaactgtgtaacttctaatgggagtttatacagatgtaagtatatgtatcatgccctgtggaacaatgtattacatacaatg

SEQ ID NO: 983306 - DNA, 120 bp, Artificial Sequence
  ENSG00000213468_11 (sequence is synthesized)
aacagttggtgcaaaatccttattgaccacagatggaattcagtaatttatatttcttcgaaacatagaaaaacggaatactgagatctggtggggggccggcggcagtctgggagcggc

SEQ ID NO: 983307 - DNA, 120 bp, Artificial Sequence
  ENSG00000213468_12 (sequence is synthesized)
gcgccatgtacaccatcatcaacgggcccagcaagttggtcgcgcagcgccgcacaggtctcacgcagcagcaggtgaagggccagctccaggagctcctgaaaagccggcagcccgcgc

SEQ ID NO: 983308 - DNA, 120 bp, Artificial Sequence
  ENSG00000213468_13 (sequence is synthesized)
accttgcagccccagcgggcgcagcccttcgcgcagccgctgggaccctggcccctgtcgagtgcagggccaaggcttgtgttcaatcgtgtgaatcgccggcgggacccctccaagtcc

SEQ ID NO: 983309 - DNA, 120 bp, Artificial Sequence
  ENSG00000213468_14 (sequence is synthesized)
ccatccctccaggggacccaggagacctacacactggcccacaaggagaatgtccgctttgtgtccgaagcctggcagcaggtgcggcagcagctggatggtggcccagccggtgagggc

SEQ ID NO: 983310 - DNA, 120 bp, Artificial Sequence
  ENSG00000213468_15 (sequence is synthesized)
gggacaaggcctgtgcagtggagaggatccccaatccccggctgcagaacttcgtgcccattgacttggacgagtggtgggcgcagcacttcctggctagaatcaccagctgttcctagc

SEQ ID NO: 983311 - DNA, 120 bp, Artificial Sequence
  ENSG00000213468_16 (sequence is synthesized)
ggctgctgggagggagcgctgctatggtctacctatcgccaggagaggagcatggcgtcctgcccatccactgttgcgcctggctgggtgccggccacacctgaagtgccagcatttgga

SEQ ID NO: 983312 - DNA, 120 bp, Artificial Sequence
  ENSG00000213468_17 (sequence is synthesized)
cttttgcacctgttgttcccttggcccagctgtcccaagctgctatggccaggggctgaacccgtctgacctcagtcctgctcactgtgcccagggaccagagaccagcccctggggatg

SEQ ID NO: 983313 - DNA, 78 bp, Artificial Sequence
  ENSG00000213468_18 (sequence is synthesized)
ctcactgtgcccagggaccagagaccagcccctggggatgtcggagaggagctccaggctaataaagtcgagaaactg

SEQ ID NO: 983314 - DNA, 120 bp, Artificial Sequence
  ENSG00000213468_19 (sequence is synthesized)
acttgtttcttggtggtggcattaactgtgacctacctgcttttctttaaacagggctactgtatctgaaaatattgtaaataagcagatctaatttcgagaaatgccaaaaacaggaag

SEQ ID NO: 983315 - DNA, 120 bp, Artificial Sequence
  ENSG00000213468_20 (sequence is synthesized)
gcactcttaaaaacaacctggcatcccacaaaatatttaagaataatctttaagaatatttaacaagtttgcaaatgtttaagctacaataaatgtagagaacatatttgaacactggac

SEQ ID NO: 983316 - DNA, 89 bp, Artificial Sequence
  ENSG00000213468_21 (sequence is synthesized)
acaagaacacaagactgtacctggcttgcaaacaccattgctaataagaagatattgtaagactgatacctaagagataagagagtctc

SEQ ID NO: 983317 - DNA, 90 bp, Artificial Sequence
  ENSG00000213468_22 (sequence is synthesized)
gcctcctgagtagctgggactacaggccctccctccgttgcccaggtgggagtgcagtggtgtgatgtcagttcactgcaaccttgtaac

SEQ ID NO: 983318 - DNA, 120 bp, Artificial Sequence
  ENSG00000213468_23 (sequence is synthesized)
agcgattctcctgccttaaccttccgaacatggatccctgaggtcggtccccaatacgacaagacaatttgatatcataatagaacactgcagaaacaatgctgagtgaagaagagtaga

SEQ ID NO: 983319 - DNA, 120 bp, Artificial Sequence
  ENSG00000213468_24 (sequence is synthesized)
aatgggaagacttggttgagcggaaactgagttcttgaaaagaggagatgcttgatgagggcatggatccctgaggtctgccccagtactataagacaatttgatgtaagaaaacacagc

SEQ ID NO: 983320 - DNA, 120 bp, Artificial Sequence
  ENSG00000213468_25 (sequence is synthesized)
aacacagcagatataatactgagtgaagaagagtataaatgagaagattggttgtgcagatactgagttcatgaaaagaggagatgattgatgaggccaggtgcggtgactcatgcctgt

SEQ ID NO: 983321 - DNA, 120 bp, Artificial Sequence
  ENSG00000213468_26 (sequence is synthesized)
gaggtcaggagttcgagaccagcctgggagacagagcatggaaacctaaggtctgtacccaaaactacaggactatttgacatcataataaaacactgcagatatgatgctgagtaagag

SEQ ID NO: 983322 - DNA, 120 bp, Artificial Sequence
  ENSG00000213468_27 (sequence is synthesized)
tgtgcagtaactgagttcttgaaaagaggagatgcttgatgagggcatggatcactaaggtctgttcccaatacaagaagactctttgacatcataataaaatactgcagatacgatgct

SEQ ID NO: 983323 - DNA, 120 bp, Artificial Sequence
  ENSG00000213468_28 (sequence is synthesized)
gagtgaaaaagagtagaaatgggaagacttggttgtgcagaaactgagttcttaaagagaggagatactttatgaggatgggatcatctagttgcaggaaaacaaggctcagggtgccta

SEQ ID NO: 983324 - DNA, 120 bp, Artificial Sequence
  ENSG00000213468_29 (sequence is synthesized)
ctgattctacattatggtctttagaaaataacttaactctttcaagcaattgccaatcagaaaatcttggaatcctcctatgacctttgcagggctttgactcctgggtacatgtatctc

SEQ ID NO: 983325 - DNA, 120 bp, Artificial Sequence
  ENSG00000213468_30 (sequence is synthesized)
atctgaaagggaatcctgacgcctactgaatcttaatagtcaatattgatatctggcatcaaattcaagttgaccaaagttccatcttcagacctgggagaagatgacagtcaaaatgaa

SEQ ID NO: 983326 - DNA, 120 bp, Artificial Sequence
  ENSG00000213468_31 (sequence is synthesized)
ctgctttcatgtgacactggaccaggcctatatacaaaggcataagtaatcattgaataatgtttcatctatctatcttaatataatttgttctatgccttactagataaatgtttagtt

SEQ ID NO: 983327 - DNA, 120 bp, Artificial Sequence
  ENSG00000213468_32 (sequence is synthesized)
acctgtgagttttcttttcctgccattgtcagagctaggcagggcttaagtccctttcgtttaaacattactaactctatacatagcttgcaaaattggataaaacaacaaaggttactt

SEQ ID NO: 983328 - DNA, 120 bp, Artificial Sequence
  ENSG00000213468_33 (sequence is synthesized)
tttcactctctctctgcttaatatctctgaaatttaaaactattcagaatcccactgggcccgatctattttcaatgctaatgctccactgctaaaactatataagcatcttccctctag

SEQ ID NO: 983329 - DNA, 120 bp, Artificial Sequence
  ENSG00000213468_34 (sequence is synthesized)
gctcaggcactatcttggaagaggtaaatgtgtaagattgtaaaggttgatttttgagcaacaaaattaatttagatcttccaaataaaaaatgggcacacagatgcccaaacagttggc

SEQ ID NO: 983330 - DNA, 120 bp, Artificial Sequence
  ENSG00000213468_35 (sequence is synthesized)
aaaataagatactttacctcctggaccagtatgtggacctttttcatccatcccaaccataatttcctctttcctgtagaattaaaagaaaattgcaaagaggatatgaacttttctggt

SEQ ID NO: 983331 - DNA, 120 bp, Artificial Sequence
  ENSG00000213468_36 (sequence is synthesized)
aagaaaacctcctgggtatagtgctcccagttatgagatttatgcagattgttatataaagtttttttaaatcaagcaccttaggacaaactattaaaaagactgctaaaagcgttgtga

SEQ ID NO: 983332 - DNA, 120 bp, Artificial Sequence
  ENSG00000213468_37 (sequence is synthesized)
cacaacaaaagtctctaaattctgtagcttaaaaagttttaacaaagtacttatcttttgcaagctaattgctacaagtctataactaaaacatgtattgactgatgtcttaggtctccc

SEQ ID NO: 983333 - DNA, 120 bp, Artificial Sequence
  ENSG00000213468_38 (sequence is synthesized)
taaaatatataaaaccaagttgtaaaccaatcaccttggacacatgttctcaggacctctggagactgtgccttgggccatggtcactcatatttggctgagaataaaattttaaaaata

SEQ ID NO: 983334 - DNA, 120 bp, Artificial Sequence
  ENSG00000213468_39 (sequence is synthesized)
gtctttccagaatactacaagagtacttgatatcataataaaacactatagatatgatgctgagtgagtaagagtagaaatgggaagacttggttgtgcagaaactaagttattaaaagg

SEQ ID NO: 983335 - DNA, 120 bp, Artificial Sequence
  ENSG00000213468_40 (sequence is synthesized)
ctgagttcttgaaaacaggagatgcttgatgaggatgggatcatctagttgcaggaaaacaaggctcagggtgcctactgattctacattatgttgcagggctttgactcctgggtacat

SEQ ID NO: 983336 - DNA, 120 bp, Artificial Sequence
  ENSG00000213468_41 (sequence is synthesized)
ctgaagctctggacagagtgaggtccaggtgtaggaactggcccgtggggagggaagactaagtcggcctctggcaggaagtccaggcccaggaagttgtagggtggggtcttggtattc

SEQ ID NO: 983337 - DNA, 120 bp, Artificial Sequence
  ENSG00000213468_42 (sequence is synthesized)
tcccagtatgggcgggactggaggaagccaccaaccaacgaagtactgggcctgtgggtattcgtctctctccccgcccctgagagtctgggaaaggctgacacgtggtgccttcaggct

SEQ ID NO: 983338 - DNA, 120 bp, Artificial Sequence
  ENSG00000213468_43 (sequence is synthesized)
taaaaagtcaccaaatcctgacaacctgtccacatgtgcccacacatgtacaattatataataaaaagagcagaatgcaatataacaaacatcaatggaatatctattaaacttcttaag

SEQ ID NO: 983339 - DNA, 120 bp, Artificial Sequence
  ENSG00000213468_44 (sequence is synthesized)
agtatcatttctttactgctatatatttgttccacttactgatttttttccagatgcatataattcttacggtttgatcaacagtaaaagaatgctatgagatttaaccataaaaaacta

SEQ ID NO: 983340 - DNA, 120 bp, Artificial Sequence
  ENSG00000213468_45 (sequence is synthesized)
tcttgttcctcaagaaaagttaatgatattggagagtactcattttctagtgttgaattgagaattcagggcaccaaattctatgtgtagtgggaccaatgaggatggatttgaagaaaa

SEQ ID NO: 983341 - DNA, 120 bp, Artificial Sequence
  ENSG00000213468_46 (sequence is synthesized)
gtgtgtgtgtgcgcgcgcgcgcgcgcctagcattgtgctgaggaatgtggggagtatattaatgagatatagattaaatttatttcactgaataacatcagttcttattgaacagttata

SEQ ID NO: 983342 - DNA, 120 bp, Artificial Sequence
  ENSG00000213468_47 (sequence is synthesized)
taacatcagttcttattgaacagttatatatcatttttttaatgtttaaaccaatatactcatcaagctgctaatagtggatgcctcaaaaaagtgggatttgtgataaagtgtttccat

SEQ ID NO: 983343 - DNA, 120 bp, Artificial Sequence
  ENSG00000213468_48 (sequence is synthesized)
ttgttcttcatagattgtgtattctaagagatttttcaagaagctgataagatatttgtaatttgagagtcaacccagaacaaatatgtgcagaagaaattgttggtgaaaacttgattt

SEQ ID NO: 983344 - DNA, 120 bp, Artificial Sequence
  ENSG00000213468_49 (sequence is synthesized)
gttggctatttgagacctaatatatttatatatttaactgatcacagaaaacaggtgtattcaagacacccacattttaaaaatccttatctgcttcagtgggcattacttgtggcctca

SEQ ID NO: 983345 - DNA, 120 bp, Artificial Sequence
  ENSG00000213468_50 (sequence is synthesized)
ctgcacttctttgtacaaggctaatgtgtctggttattttgtaaacaggtatgcttaattttaggaaatgcaaaaatatgagaagcaaccttaaaaatattgcatattccaaggagtagt

SEQ ID NO: 983346 - DNA, 120 bp, Artificial Sequence
  ENSG00000213468_51 (sequence is synthesized)
taatgatgtttccaaagacctcaaactgtcctgagaaaagcatgtctgacatacaaggtaactgggattttaggttaaaaaatgtacattatatatggatagggaagataagagaatgta

SEQ ID NO: 983347 - DNA, 120 bp, Artificial Sequence
  ENSG00000213468_52 (sequence is synthesized)
tggcaaagacattttaaaagttatttcttctagttttcattgagataccatttatttttggctttgtaatttcttaaaatatgagcagatttccaacagcagatgttacctttataattc

SEQ ID NO: 983348 - DNA, 120 bp, Artificial Sequence
  ENSG00000213468_53 (sequence is synthesized)
cttcgaagagaaacctccttgtacaatcaagtataaagaaatttccagctagggaaaatagatgttgatatatggaaacatgcaatttatgtaagttggtgcagaagactttgtataaaa

SEQ ID NO: 983349 - DNA, 120 bp, Artificial Sequence
  ENSG00000213468_54 (sequence is synthesized)
ctatgcccagtataagtcaagttataattaaggtgaaataaatgtgcacatatatgtatagcaatattatatattatatatgccatatttaaactataataaatggagcaataagaaaca

SEQ ID NO: 983350 - DNA, 120 bp, Artificial Sequence
  ENSG00000213468_55 (sequence is synthesized)
cttgctctgtcgcccagcctggagtgcagcagcacgatctcagctcactgcatcctccgtctcccaggttgaagggattctcttgtctcagcctcccgaacaactgggactaaaggcatg

SEQ ID NO: 983351 - DNA, 120 bp, Artificial Sequence
  ENSG00000213468_56 (sequence is synthesized)
agaatttatagctaagtcaattttgtaaccttgccttttgacttttggttcttgatgcttacattacaaaattttaaggtttgataaatgcctgctccacttccattcccatctggccta

SEQ ID NO: 983352 - DNA, 120 bp, Artificial Sequence
  ENSG00000213468_57 (sequence is synthesized)
ggatatttaaattggctataagtcttttggctctacatctgttggccgtgagtccccaccaagggataggatagacccagggcacatagccacaccaccccagcaatggtatgcaacaaa

SEQ ID NO: 983353 - DNA, 120 bp, Artificial Sequence
  ENSG00000213468_58 (sequence is synthesized)
catagccacaccaccccagcaatggtatgcaacaaaatgatagtttggccattgatgttgcctctgggaaattttttttttttttttgacgaagtcttgctctgttgcccaagctggagt

SEQ ID NO: 983354 - DNA, 84 bp, Artificial Sequence
  ENSG00000213468_59 (sequence is synthesized)
gcagtggtgtgttctaggctgactgcaacctttgctaaatggctggtattacagacgtgcaccaccacacctggctaatttttt

SEQ ID NO: 983355 - DNA, 120 bp, Artificial Sequence
  ENSG00000213468_60 (sequence is synthesized)
caggtgtgagccaccacgcttggcctcctctgctcaatcctgaccagaaaaatcaaattctaactcccccaatcaactgaattcccctccattcatctgccaaggggattctaaagaatc

SEQ ID NO: 983356 - DNA, 120 bp, Artificial Sequence
  ENSG00000213468_61 (sequence is synthesized)
aaagaatcctgaaaactagttcaggccatgacaattgacattaaaacagatcttaaaactgacaaaacagattctttgtagcaataagataccaaatttcaacctgactcaggtataact

SEQ ID NO: 983357 - DNA, 120 bp, Artificial Sequence
  ENSG00000213468_62 (sequence is synthesized)
tcacatgataaaaaaggaaataaaaatattttacccccaaaatagatttctttgacatattttgaaatggccctgcaaggcagttggggaaattttgcatctgtaaagcatctccttaac

SEQ ID NO: 983358 - DNA, 120 bp, Artificial Sequence
  ENSG00000213468_63 (sequence is synthesized)
ataactagatctttccccttccaggccctcctaaacctgaagagattaactgagattctagcaccttttaaagtctacataggaaacattcaccatttattatctctaagggcagccact

SEQ ID NO: 983359 - DNA, 120 bp, Artificial Sequence
  ENSG00000213468_64 (sequence is synthesized)
tatgagacttcatctatgtaataaaaaccttggtctccacaaccccttatgttaacccagacactcctttctattgattccaggtctttagaaaataacttaactcctccaagcaattgc

SEQ ID NO: 983360 - DNA, 120 bp, Artificial Sequence
  ENSG00000213468_65 (sequence is synthesized)
caaacagaaaaccttggcatcttcctatgacctgtaagcacccactttcccctgctttaagttgtcctacccttctgcaccaaaccaatgtatacctcacatgtattgattgatgtcttc

SEQ ID NO: 983361 - DNA, 120 bp, Artificial Sequence
  ENSG00000213468_66 (sequence is synthesized)
tgtctctctaaaacatagaaaagaaagctgtaacccaaccaccttggtcaggacgtcttgagactgtgccttgcgccatggtcagtcgtattttgtgcagaataaacatttttcaatatt

SEQ ID NO: 983362 - DNA, 120 bp, Artificial Sequence
  ENSG00000213468_67 (sequence is synthesized)
ttacagagtttggcttttttgttgacttttttcataaaacatgaaagattatgtttgagaaaggcgtttctcaagtgaccatgtgaagatgttgggaaatcctctcgccaaagaacaact

SEQ ID NO: 983363 - DNA, 120 bp, Artificial Sequence
  ENSG00000213468_68 (sequence is synthesized)
atgaaatggacaaaaccaaccatttctgtgctctggaaattaaatgtgcacaacaatgttaaactttgggcaagaaagtttgaactctgatacggttttgatttgtgtcactgctgaaat

SEQ ID NO: 983364 - DNA, 88 bp, Artificial Sequence
  ENSG00000213468_69 (sequence is synthesized)
tgaactctgatacggttttgatttgtgtcactgctgaaatctcttgtgcaattgtgaccctcagtgttggaggaggggcctggtggga

SEQ ID NO: 983365 - DNA, 80 bp, Artificial Sequence
  ENSG00000213468_70 (sequence is synthesized)
agatctggttgtttaaaagtgtgtagcatctccccctgctctcttcctccttctctggccatgtaaaacctgcctgcttc

SEQ ID NO: 983366 - DNA, 120 bp, Artificial Sequence
  ENSG00000213468_71 (sequence is synthesized)
atgcttcctgtacagactgtggaagtgtaagtcaattaaacgtctttagtctttaaacctataaatatctttgtaacaacttccttagctacaatctataagttatttatagattacaca

SEQ ID NO: 983367 - DNA, 120 bp, Artificial Sequence
  ENSG00000213468_72 (sequence is synthesized)
gtctcaggtagttcttaatagcaatgcaaaaatgcactaatacaaaccctgttttggtctggcctgtggctgcttccgtatttctctttcctaggtccatctatagggacattctgccaa

SEQ ID NO: 983368 - DNA, 120 bp, Artificial Sequence
  ENSG00000213468_73 (sequence is synthesized)
ggtgaaataaagactgataaaattccttactagcaaacttgtattacaagaaataactaaaaacagtccttcagtctaaaaggaaatgactctatatggtgacttgaatccacaagaata

SEQ ID NO: 983369 - DNA, 120 bp, Artificial Sequence
  ENSG00000213468_74 (sequence is synthesized)
aatgaagggcacaggaaatggtaaatagctgggttaatataaaaaagactctatgtattgttttttcattttttctatattatctaaatgacctaagattatgtgaagtaataattatta

SEQ ID NO: 983370 - DNA, 120 bp, Artificial Sequence
  ENSG00000213468_75 (sequence is synthesized)
actttgccttgtgagcaacaggaagatgtccatctgcacacctggaagaggaccctagccaggaactgaattggctgccaccatgatcttgggcttcccagcctccagaactgctttttc

SEQ ID NO: 983371 - DNA, 120 bp, Artificial Sequence
  ENSG00000213468_76 (sequence is synthesized)
taaagaagcatgattatttctagaaatgcaaaaacatgtggcaagattttaaaacctgtcattattctaaagaatacttaatgagatttgaagagcattcaagttacaaatgaggaaaac

SEQ ID NO: 983372 - DNA, 120 bp, Artificial Sequence
  ENSG00000213468_77 (sequence is synthesized)
ttgttttagcattcaaagtacaagagaatttgaacattttttaagtgtatattatttgtgcaaagtgaagatataagaatgtatggcaaggatatttttaagtggctatttcttgttgtg

SEQ ID NO: 983373 - DNA, 120 bp, Artificial Sequence
  ENSG00000213468_78 (sequence is synthesized)
attgaagtaccgtttactttctacttataatttcttaaaatctaaacggtgccaacagtgggtgtaacttttgtaatttcttgaaatagaaaggtcttctagagtaagatacaaaaaaaa

SEQ ID NO: 983374 - DNA, 120 bp, Artificial Sequence
  ENSG00000213468_79 (sequence is synthesized)
cttaaagagaggagatactttatgagggtctttagaaaataacttaactctttcaagcaattgccaatcagaaaatcttggaatcctcctatgacctgtaagcacccactttcccctgct

SEQ ID NO: 983375 - DNA, 120 bp, Artificial Sequence
  ENSG00000213468_80 (sequence is synthesized)
ttaagtcgtcctgcccttctagaccaaaccaatggatacctcacatgtattgattgatgtcttatgtctctctaaaacatagaaaagaaagctgtagcccaaccaccttgagcacatgtt

SEQ ID NO: 983376 - DNA, 120 bp, Artificial Sequence
  ENSG00000213468_81 (sequence is synthesized)
ctcaggacctcttgagaccatgccttgggccatggctactcatatttggcttagaataaacctcttcacatatgttacagtttggcttttttagtcaatattaattggcaccctacatat

SEQ ID NO: 983377 - DNA, 120 bp, Artificial Sequence
  ENSG00000213468_82 (sequence is synthesized)
ggggcctcagagaagactcagaaccctgaaagagtcacccaaacccagagctaaggtaccagcaggggcccattgaaagccccccaactccaagcttcttcttgagtgaaactggtaagt

SEQ ID NO: 983378 - DNA, 120 bp, Artificial Sequence
  ENSG00000213468_83 (sequence is synthesized)
cctcctcagccctgaacctcctgctcagttgacagtcttctgctttattctgagctggttcttttcctaggaagttgttgttcaggatcctaattttgattcagaaagcattctgaagga

SEQ ID NO: 983379 - DNA, 120 bp, Artificial Sequence
  ENSG00000213468_84 (sequence is synthesized)
tcttttccattgcctctttctccccaaattaatctcacttggcttgtttgtgcatttgcttgagaaactgaactgtcccttgtgtgaatcaacgagagactgaacttctcagctccactc

SEQ ID NO: 983380 - DNA, 120 bp, Artificial Sequence
  ENSG00000213468_85 (sequence is synthesized)
cattgaaacgcagactacagtttggttcctcccttaaagaaaattaaaaaaagggaaacaaataatcaaagaatgaggagatacaaagataacaacccccttttgggcacgttgtttggt

SEQ ID NO: 983381 - DNA, 120 bp, Artificial Sequence
  ENSG00000213468_86 (sequence is synthesized)
tttatgatgcctctacttgcaagcatttgtgtaaatggaaaagtttgaaggcatgccaggttttctaatactccagctggttacatattatggtctattcttgggcacattttaaacttg

SEQ ID NO: 983382 - DNA, 120 bp, Artificial Sequence
  ENSG00000213468_87 (sequence is synthesized)
tggctaaattacatcaagaaaaattcagaggtcaaaagtcaacctgcgaatatagagtctttaaagttttatgtgtatttctctattttcttttctgcctgctttaaatctgttgttact

SEQ ID NO: 983383 - DNA, 120 bp, Artificial Sequence
  ENSG00000213468_88 (sequence is synthesized)
cggagagctgccttggactctccaatgcagctgcctctgttaccttgactcgtctcagatttcattgacccaagatgggtcctggcactaggaatgtctttagaaaataacttaactctt

SEQ ID NO: 983384 - DNA, 120 bp, Artificial Sequence
  ENSG00000213468_89 (sequence is synthesized)
gcatcttcctatgacctaaaagaaagctgtaacccaaccaccttggtcaggacgtcttgagactgtgccttgcgccatggtcagtcgtattttgtgcagaataaacatttttcaatattt

SEQ ID NO: 983385 - DNA, 79 bp, Artificial Sequence
  ENSG00000213468_90 (sequence is synthesized)
actgtctccattcttttggcttgttccagagaagcccatgcaaggttcctactgaccatatgtttctttcttttctttt

SEQ ID NO: 983386 - DNA, 76 bp, Artificial Sequence
  ENSG00000213468_91 (sequence is synthesized)
ggccttgaccatatgttttatttctagctttgatgtctgggcatcgatttccctcggttaaactatttgctcaatg

SEQ ID NO: 983387 - DNA, 120 bp, Artificial Sequence
  ENSG00000213468_92 (sequence is synthesized)
ctgggcatcgatttccctcggttaaactatttgctcaatgttaaggccactctgtagaaatttgtctgtgtaactgaggtgctatgcaggcctgcctgtgtgactgtcatgcaggcctgt

SEQ ID NO: 983388 - DNA, 120 bp, Artificial Sequence
  ENSG00000213468_93 (sequence is synthesized)
ctgtgtgattgtcagggagaattggtctgccacaatccttttctaagcatagccaatagaggtagttaggcataatttgtatattacagaaattgccttacagagagtaacacatttcta

SEQ ID NO: 983389 - DNA, 120 bp, Artificial Sequence
  ENSG00000213468_94 (sequence is synthesized)
tactctccttccataacagacacttaaaaaaacaaaaaaagtaatgtatgcttgctgtggacctcatttaagattgcaacagaagcacttttcaatactattaaacagctttttactttc

SEQ ID NO: 983390 - DNA, 120 bp, Artificial Sequence
  ENSG00000258426_0 (sequence is synthesized)
ctcagctcattgcaacctccaccttctgggctcaagcaatcctcttaccttagcctcctgagtaactgagaccacaagcatgcaccaccataccagaatttgctctatcctcaacgttgc

SEQ ID NO: 983391 - DNA, 120 bp, Artificial Sequence
  ENSG00000258426_1 (sequence is synthesized)
gtctcactgaagtgctttggtttttattgaattgcatgcttattatgtctggacaagaagatgtgtacatgaagaggatgttttgataggcctgacctgagagctgtatgctcacaataa

SEQ ID NO: 983392 - DNA, 120 bp, Artificial Sequence
  ENSG00000258426_2 (sequence is synthesized)
aagctagagacacagtcatttgacattaaaacaactgagaaaagatgatgaatcttgagaagaaattgggatattatgtacaaaagaggcgttataatactttatggccaaaacgaaaac

SEQ ID NO: 983393 - DNA, 120 bp, Artificial Sequence
  ENSG00000258425_0 (sequence is synthesized)
actcacccagctggttggagagcggcagtgtgaaagtggactgcttcagtggggcttccagcaaggccctggggcgggaccccctccctggaggctccctgtccggctgcgggataggca

SEQ ID NO: 983394 - DNA, 120 bp, Artificial Sequence
  ENSG00000258425_1 (sequence is synthesized)
ggtggcagaacttcccggtggagttggcggggcaccagcattcgtccctgccgatgcagcggcctccgttcaggcaggggatctggcagaaatctgcaacatcaaccctcaagtctcagg

SEQ ID NO: 983395 - DNA, 120 bp, Artificial Sequence
  ENSG00000258425_2 (sequence is synthesized)
ccccaggctggtccaaagaagcagtatccccccgattaaggacagtagaggtctggtaacagaagaaggcaagtctcaatgagaaggtgaccacagcccccaggagatgctccatctact

SEQ ID NO: 983396 - DNA, 120 bp, Artificial Sequence
  ENSG00000258425_3 (sequence is synthesized)
atcagccttggaagaaccgctgcaatttcatcaaaggacagaggttcccaaactcacccagcacaagaatggaacttgctatctttctgggactgttccagggaagtcctggccaagcct

SEQ ID NO: 983397 - DNA, 120 bp, Artificial Sequence
  ENSG00000258424_0 (sequence is synthesized)
tcaacggtttatccttcacccatttttctgcacgtcatcctgaggcacagattcccggggctcccacaaacaagaggaagttactccacgttcctgggtagctgatcatcttagcaaact

SEQ ID NO: 983398 - DNA, 120 bp, Artificial Sequence
  ENSG00000258424_1 (sequence is synthesized)
ctgaaggctttgtcaaagaacctaatcaaaagctctgctgccaaatgtttgtgaccagacaagcgattttactacaccaccctcgagtcaatcatctagaaagtaaaatctagatccgaa

SEQ ID NO: 983399 - DNA, 120 bp, Artificial Sequence
  ENSG00000258422_0 (sequence is synthesized)
atgcaaacagcggcagcttcccgaggccccaccgcttcctcccagcgcgtaggccaatgggagatttctccagccatgtcaaatggggaaatgagtatggagaattttgaggggaaggac

SEQ ID NO: 983400 - DNA, 120 bp, Artificial Sequence
  ENSG00000258422_1 (sequence is synthesized)
attgaggcggaaggacactgaatttaggggcaaggctgggctggacatcccatatgtcaatttaatccacattccagtgaccagaattcacatagcaatttctgccactaaggacatgaa

SEQ ID NO: 983401 - DNA, 120 bp, Artificial Sequence
  ENSG00000258422_2 (sequence is synthesized)
ataaagaaaagaagttaattgactcagttctgcaggcaatacaggaagcaagatgctgtcatccgcttggcttcaggtctccagctcactgaaaacagcctcccctgatgagcacaccat

SEQ ID NO: 983402 - DNA, 120 bp, Artificial Sequence
  ENSG00000258422_3 (sequence is synthesized)
tgttatgtaatagcctaacccttacccctcgcctatcagggggtgccaagcctgcagactcactctgctttcctcataactgccctgaggagaaggctgaagactgaggaatcctctttc

SEQ ID NO: 983403 - DNA, 120 bp, Artificial Sequence
  ENSG00000258422_4 (sequence is synthesized)
gactcctccccatgcaaacagcggcagcttcccgaggccccaccgcttcctcccagcgcgtaggccaatgggagatttctccaggtgtgtatttgttcattcgcgcactgctataaagaa

SEQ ID NO: 983404 - DNA, 120 bp, Artificial Sequence
  ENSG00000258422_5 (sequence is synthesized)
cagatgctggaaaggatgcggagaaattggtctccagctcactgaaaacagcctcccctgatgagcacaccattgttatgtaatagcctaacccttacccctcgcctatcagggggtgcc

SEQ ID NO: 983405 - DNA, 120 bp, Artificial Sequence
  ENSG00000258422_6 (sequence is synthesized)
cttgaccacccaggagcttggctgcgcctgctgcagtctgcgtttctgataaattgaaaccagttttaattcttctgcccgggagacctaaccgccgaatgcgttcggagctgtactgga

SEQ ID NO: 983406 - DNA, 120 bp, Artificial Sequence
  ENSG00000258422_7 (sequence is synthesized)
acccaaggagatgttcacaaggaagatggaaagtaagctgtgtaacatcagcattgggagcaagagccacaaacctcattttcaagttgggaagaaactcaggacccgagaagctacagg

SEQ ID NO: 983407 - DNA, 120 bp, Artificial Sequence
  ENSG00000258428_0 (sequence is synthesized)
cttttgctagtacaatgccacggaactgtgactattcctgaaaaaaaatcaaggcctggaaaggttctttgatgcacagttgacaactaatggcagagtgggcctagaagctgggcctcc

SEQ ID NO: 983408 - DNA, 120 bp, Artificial Sequence
  ENSG00000258428_1 (sequence is synthesized)
aatcagggtaatgagctataggatggtagatgatgcagcattcaaagacttggaagtagaaggtgccatgcatctaaccatcatggtatccacacaaccagcaccctcttccctcctctc

SEQ ID NO: 983409 - DNA, 120 bp, Artificial Sequence
  ENSG00000258428_2 (sequence is synthesized)
tccccattgttctgtaagtaggagaacgagaaggacatgttctctttctgttgttttatggtattttgtgggtagcaagtaacaatattaacaattaataaaaaaaaaaattagaaggca

SEQ ID NO: 983410 - DNA, 120 bp, Artificial Sequence
  ENSG00000257193_0 (sequence is synthesized)
agaatccaaaacctcagcaaggtaggcaagctgaaaaagctccgaaaaagccaagcaagctgcttttatcttccgacccagacaaaatccctctccaaactgggccagtttaaggtcaat

SEQ ID NO: 983411 - DNA, 120 bp, Artificial Sequence
  ENSG00000257193_1 (sequence is synthesized)
agtcgttgctgtgagcatcagggttcagagttgagtcttcaacaccagacctctgcgatgggcttccggattcgaggccccgtccctttctcagaagtatatagaaagctgcatggtgaa

SEQ ID NO: 983412 - DNA, 120 bp, Artificial Sequence
  ENSG00000257193_2 (sequence is synthesized)
atgaatggtgtctgttccacttcacagtttatacccagcatctaactcaggacttggcacatcacaggagcctaataaatatctgttgaaaagtgaacgaaataaaagctacacttacgc

SEQ ID NO: 983413 - DNA, 65 bp, Artificial Sequence
  ENSG00000257191_0 (sequence is synthesized)
cagagtgactctacacacttcctgcttccacgtttagcatccccaagtgaagagatatgaagagt

SEQ ID NO: 983414 - DNA, 120 bp, Artificial Sequence
  ENSG00000257191_1 (sequence is synthesized)
ttccacgtttagcatccccaagtgaagagatatgaagagtgttcaaaagatgctacaaaatgtttagttttcaactctccagaggaagctgacatggcaacactctgttatttgaagatt

SEQ ID NO: 983415 - DNA, 120 bp, Artificial Sequence
  ENSG00000257191_2 (sequence is synthesized)
tgatggtgccgctctgaacttggtcctcttcaagagcctgggatgtcccagagcaggaagcacgcgagaacatttgtttgttacatttagctcaccaaatggtttcattcatgctaaagg

SEQ ID NO: 983416 - DNA, 120 bp, Artificial Sequence
  ENSG00000257191_3 (sequence is synthesized)
aactcagttttgttgttggtgttgctgttgttgttgtttggcatttctttaagataagggaaacttagggataaagattgagtcagaaaagtgtttctattttccaaattataaacatat

SEQ ID NO: 983417 - DNA, 120 bp, Artificial Sequence
  ENSG00000257191_4 (sequence is synthesized)
ttacttattcactcaagaaatgagcactgattttgcaggtcactatattgccagattgctgtatatatttaaattgtggcagaaaaatatgaccaaaaaattcctgaaattcaagttatt

SEQ ID NO: 983418 - DNA, 120 bp, Artificial Sequence
  ENSG00000257194_0 (sequence is synthesized)
tgagaagaaaagaagcttgctcaaggtcacatagagctggaatttaaattcagatctattatactcttaaggactgtggaaggagcaaaatctgatccagagactgtggatgctggagga

SEQ ID NO: 983419 - DNA, 120 bp, Artificial Sequence
  ENSG00000257194_1 (sequence is synthesized)
gcgtcaaggctgggaaagtaacatgcactgtgttcgcaatcaacagaaaagatatttttaaacaaaaacaattttccaagtttccaggaagagaaacaaaaggcttttctaaaatgaaag

SEQ ID NO: 983420 - DNA, 120 bp, Artificial Sequence
  ENSG00000257194_2 (sequence is synthesized)
aaactgttcttctcattctgtgacttttatgtcacttggacaacaagccagtgcttaggaacggttattttcctgtcgacatcgctgcatggatacttcttagaagaacataacagcatt

SEQ ID NO: 983421 - DNA, 120 bp, Artificial Sequence
  ENSG00000257194_3 (sequence is synthesized)
gattacactgcaggcacaacctgtgtggggaaacaatatcctggatcatactgaaggttcgcacagatggaacattagtgggaggggttgccagctacttccctgccaacttgttagtgc

SEQ ID NO: 983422 - DNA, 120 bp, Artificial Sequence
  ENSG00000257194_4 (sequence is synthesized)
tggagacattatcctcttattttgccagtttaacagaagatcagtcgtaaagattcactgtaggctcagcaacataattattatctatggtctctgcattaactgtgagaaaacatcata

SEQ ID NO: 983423 - DNA, 120 bp, Artificial Sequence
  ENSG00000257194_5 (sequence is synthesized)
gtctgaatctgcctaatttcaaatgccaagctgtgcccacattcagcccacaactgaacctgaatactcaatatatccttagcattgctactgttgtcatcatggtggatgttaagtaca

SEQ ID NO: 983424 - DNA, 120 bp, Artificial Sequence
  ENSG00000257194_6 (sequence is synthesized)
ggtttgcccaagctatgatgtttaattgttgccttactgcttctgtatttcttctgtttccctgacccttttcaacaccagccccatgcaatttaaaactattaaaaaggtaaaaatcgg

SEQ ID NO: 983425 - DNA, 120 bp, Artificial Sequence
  ENSG00000285842_0 (sequence is synthesized)
agagacaactggacatttgagtcctacagggaaaaggaaccccaaaccatccgtgcatgcatatgtggggtgggggtgatgggtggaatatttaatcagtgtttgtaaaagttgaattta

SEQ ID NO: 983426 - DNA, 120 bp, Artificial Sequence
  ENSG00000285842_1 (sequence is synthesized)
taggttcttttacaagaaagaatagagctgcttggagctaaataccccgaagcaaataacctactggagatgagtagaagctctctgctgtagatggggttttccttcatcctgtctaca

SEQ ID NO: 983427 - DNA, 120 bp, Artificial Sequence
  ENSG00000285842_2 (sequence is synthesized)
tcagatttttgtcatttgcctcacatctatagcctttggacttctcatctctgccaaagaaacgtgggccagatgctccttgaagaaagactgcgactgtgcatgtcaaccactacttct

SEQ ID NO: 983428 - DNA, 120 bp, Artificial Sequence
  ENSG00000285842_3 (sequence is synthesized)
catactgaagcctaggaagaaatgtcagaactggccaggggaagctgacaccctgcgaaatacacccagatcctgctttcctaggacagaaaaaatgacctctggcctctctttgcaaac

SEQ ID NO: 983429 - DNA, 120 bp, Artificial Sequence
  ENSG00000285842_4 (sequence is synthesized)
tttagttaagagttgggagtaagagattcttgaccaccaagaaagcattcttcctattcagaggatgaaatgttcaagtcatcatctttgaaggagaaaccagaccctcaccagatgatg

SEQ ID NO: 983430 - DNA, 120 bp, Artificial Sequence
  ENSG00000285842_5 (sequence is synthesized)
ctccagaatttatctggaagagcaacagaaggaagcattcaaaacaattcctacctaattgacctctgaggttgatgcagttgtacgtggcaaggatgtacaggttgttttgttttgttt

SEQ ID NO: 983431 - DNA, 120 bp, Artificial Sequence
  ENSG00000285842_6 (sequence is synthesized)
tgttttacgattttaagtatttcattgaatggaatgtttggattcatttatttattaatgcaagaaatgtttatttcactcttactttgtttcacctgccttgtgctagccattccctaa

SEQ ID NO: 983432 - DNA, 120 bp, Artificial Sequence
  ENSG00000285842_7 (sequence is synthesized)
tgatgaattgatatggtttctgtcaccaaggagctcacaacctcttgaaggagcaaaacataacaggatcattataacatagtgtgagctcatttgatagagacatgcttagagagctat

SEQ ID NO: 983433 - DNA, 120 bp, Artificial Sequence
  ENSG00000285842_8 (sequence is synthesized)
atgagcacagaagagagattaattctccatgcttcccatgaccgggcaccatttcagtaatagcttatggacaatatacctgagtttctcagtattgagatgatagttttaaactagtaa

SEQ ID NO: 983434 - DNA, 120 bp, Artificial Sequence
  ENSG00000285842_9 (sequence is synthesized)
tgttgtaagagatatgaggaacagtgaatgaaactttacaaaatgaaatgggtgtctgtagggcctgtgaggaactgctgatttaaggctaagggaggatgtcttcatgctcaatgctca

SEQ ID NO: 983435 - DNA, 120 bp, Artificial Sequence
  ENSG00000285842_10 (sequence is synthesized)
gatcattatcagagacaaagaaataaggcaagagagcagatttgatgtagttaattggatgagggagcaagccagaactctgttggaaggctgagttatgatagccaacaaaggagaaat

SEQ ID NO: 983436 - DNA, 120 bp, Artificial Sequence
  ENSG00000285847_0 (sequence is synthesized)
attgatctttgtagccaagatctcaaaacaattacattaatcgtccttgttttttccttttaaaatgtttgtcttgctttatctctgtcagtatgcacatagtttactagggcatacata

SEQ ID NO: 983437 - DNA, 120 bp, Artificial Sequence
  ENSG00000285847_1 (sequence is synthesized)
ttcccattgcaatgccttactcatgaataagtatctttttcttttggagagcctttctctgtttgttatttaggttgatataaatggtgtcagaaaacgggacctgaagaaagctcgctc

SEQ ID NO: 983438 - DNA, 120 bp, Artificial Sequence
  ENSG00000285847_2 (sequence is synthesized)
tcagaagaatcggcggttcttgacttcggcgtgcagtcctcacttgagccctctgagatccctgcctcagcagctggccttttcggccctggagtcttctcttaggctgagcttatctct

SEQ ID NO: 983439 - DNA, 120 bp, Artificial Sequence
  ENSG00000285847_3 (sequence is synthesized)
ttttgtcagagcatttttgatattatttgggatctggtttggttataaggctgccttaaatgaaggatcttacatctcttctgggatgataaacgactatatgtcttttctggtgctgcc

SEQ ID NO: 983440 - DNA, 120 bp, Artificial Sequence
  ENSG00000285847_4 (sequence is synthesized)
tccgcaacccaggatcctaccagctgcagaagtcgcgagtaatgccagccgggctccgaagactccctcagcccccggggccagtggacagtgcccacatcctctgtggccctctcgcag

SEQ ID NO: 983441 - DNA, 120 bp, Artificial Sequence
  ENSG00000285847_5 (sequence is synthesized)
ctgtagaagacaggcacaggtcttccgttgtgtgcagctggaaaaaggtctcgtttgtaatgagcagtggagtgtgacagcctctgactgtttctttgaccatatataggaatgatcacc

SEQ ID NO: 983442 - DNA, 120 bp, Artificial Sequence
  ENSG00000285847_6 (sequence is synthesized)
gtgataataacagcagtgacaacaatccccggatattgggcttttcatttccaagagagagaggtgagcaggagtgaggataaagacatggagagataatgcagacgaccacgttctctt

SEQ ID NO: 983443 - DNA, 120 bp, Artificial Sequence
  ENSG00000285847_7 (sequence is synthesized)
ggccatactgaactgatgtccgagagcaggccttggcaaacttcctctgggaagggccacagtaaatattttaggccttccattccatatggtctcactgcgcttcaactctgccattgt

SEQ ID NO: 983444 - DNA, 89 bp, Artificial Sequence
  ENSG00000285847_8 (sequence is synthesized)
cattccatatggtctcactgcgcttcaactctgccattgtaagcttgaaagcggccatagataaaagtaaatgaatgagtatggctgag

SEQ ID NO: 983445 - DNA, 120 bp, Artificial Sequence
  ENSG00000285847_9 (sequence is synthesized)
cttctttcattttctcccaaccatttaaatgtgtaaaaaccatttttgtctcgcaggctggatgtggcctatgggccatagtttgcctgccctgccccagagaacagaattaaccaccag

SEQ ID NO: 983446 - DNA, 120 bp, Artificial Sequence
  ENSG00000285847_10 (sequence is synthesized)
tagcatcagaggctaacactgttcaagggttttgccctctttagagctcaaacagcagggataatttccaccttgagagacatctctccagagctcttctgcaaaaactgttcttatttt

SEQ ID NO: 983447 - DNA, 120 bp, Artificial Sequence
  ENSG00000285847_11 (sequence is synthesized)
acaaacatgaaaacattgaaaatcaaaattaaatggaaaaattcatctccaacagcatctcttcccaatcagtcttcaaatttcatttcaatctttgtccatatgcatgacatttttata

SEQ ID NO: 983448 - DNA, 120 bp, Artificial Sequence
  ENSG00000285847_12 (sequence is synthesized)
ccattttaatcctattatagacacagtgttttagtttgctttttttcacttaacgttatcttgtaaaattcttccctgttgtgactgatttcttctaatcagacatatcataattttttg

SEQ ID NO: 983449 - DNA, 120 bp, Artificial Sequence
  ENSG00000285847_13 (sequence is synthesized)
tggaatttttttgtggaagatttccatgctatttgttggacttaattaaaagggatgtcttagtgtcttctcaagtgtaacagttaagatgcaaatgctaccaccttgccctcaagccag

SEQ ID NO: 983450 - DNA, 120 bp, Artificial Sequence
  ENSG00000285847_14 (sequence is synthesized)
gaaacctgggaaaacccacttggtagactggagcctcacacacctcccccaggattcacttccttttggacaatggctttagcaaatctggcattttaattcatttgcctcttgatgtgc

SEQ ID NO: 983451 - DNA, 120 bp, Artificial Sequence
  ENSG00000285847_15 (sequence is synthesized)
aatttatgttgaacttggatggaggtttggggagactaatcacacatctcctttcattacagtttttaaccaggaaatacagaaagagttagatgaggatcagttttcttgctggattag

SEQ ID NO: 983452 - DNA, 120 bp, Artificial Sequence
  ENSG00000285847_16 (sequence is synthesized)
agaacttggtaggtccccattagtcccttgcctcacacctgctgagaccctctggatggtgactgactcatccagtcacatgtggagaaagaagaggttgggtttgccccttcactgttc

SEQ ID NO: 983453 - DNA, 120 bp, Artificial Sequence
  ENSG00000285847_17 (sequence is synthesized)
catgggctgggcctctggagagggagaggtgagggacatactttaagttggttcctttctttcctctccacaaaggggggtgacactgtttgagggaccacagggctcaccttcccttcc

SEQ ID NO: 983454 - DNA, 120 bp, Artificial Sequence
  ENSG00000285847_18 (sequence is synthesized)
tttctctttgctttcagaataggaagcacatgcatttggccaggaagaagacttcagctattgatgggagggccctctttctagaaggcagagaacaatggactagccagacaggaagga

SEQ ID NO: 983455 - DNA, 120 bp, Artificial Sequence
  ENSG00000285847_19 (sequence is synthesized)
gagaggcccagagcgcagtaaggagtgggcatctgggacccagggttgggaagaacacttctgtttggcttccttcctcttctagggcatggctaaggtggccaacctgcatgcacccca

SEQ ID NO: 983456 - DNA, 120 bp, Artificial Sequence
  ENSG00000285847_20 (sequence is synthesized)
gaagaggaagataagtaggcccatgggactttattatggagcctgaggctttcactggcctgattaatccattttctgggaatgagcactttgggaggataacaatcaaaggatccccag

SEQ ID NO: 983457 - DNA, 120 bp, Artificial Sequence
  ENSG00000285847_21 (sequence is synthesized)
aggacacgtgacaggctggggccatcagaactactgatccgtgggtactatccggcttactgaattatgaaacacaggttaaattaagggttgtcacacatttggctaattggccaataa

SEQ ID NO: 983458 - DNA, 120 bp, Artificial Sequence
  ENSG00000285847_22 (sequence is synthesized)
gaacagcaattaatagaggtcaggcaattcaactgcatctgtggccatgactatcagagcccttggaaacagcagtgatttcaagtgaaatctaaatcagcagtgtttcaggtgacctag

SEQ ID NO: 983459 - DNA, 120 bp, Artificial Sequence
  ENSG00000285847_23 (sequence is synthesized)
agcagggcccacggcccatagcccatatgttagcacttcctgaaggttttcttccacccaaatccacatgttgggacccaggggaaggtgtagcaaagccagtgaccactgtgtaatctt

SEQ ID NO: 983460 - DNA, 120 bp, Artificial Sequence
  ENSG00000285847_24 (sequence is synthesized)
tgttttttctatttgacactttgtcaaaaaacacattcctgttttcatagacttcttttgattttgagaaatttaaaagatacagaaaagtatgaagaatgtaaagacactatattccca

SEQ ID NO: 983461 - DNA, 120 bp, Artificial Sequence
  ENSG00000285847_25 (sequence is synthesized)
ccactagacataagaactagtaatattttgtaccatctcctgctagcctctgccctccttctaagaaatgaaactaccacccatttctcattccccatccccgggcacagcaatgttcat

SEQ ID NO: 983462 - DNA, 120 bp, Artificial Sequence
  ENSG00000285847_26 (sequence is synthesized)
gggtttggtcggtttgtatgtttggtatcattttagatactttgatattcatcttatatcgatataacaaatatactacacttttatgtgtatatgaatatttaaatatataacagataa

SEQ ID NO: 983463 - DNA, 120 bp, Artificial Sequence
  ENSG00000285847_27 (sequence is synthesized)
aaacacatgccatttgtaaatatgccatgtaaaaactgatggtgcttaataaatatttgttgaatgtccatctataaacaatgtatttgtgtgtttttaatgtacatggtatcatacaat

SEQ ID NO: 983464 - DNA, 120 bp, Artificial Sequence
  ENSG00000285847_28 (sequence is synthesized)
catggtatcatacaatttttatcattctgcataatcctctcttcacttaataattgtatttgaaatctataattgtgactctttctctctatatatgtatatatatacacacacatatat

SEQ ID NO: 983465 - DNA, 120 bp, Artificial Sequence
  ENSG00000285847_29 (sequence is synthesized)
tttcaacaatggcacctcgcttgcctctcctttcaaaactgagtcctagtttttatcactttgcagtagcctcggacacaatacagagcaccagatggacatgaggatgtgtgattttgc

SEQ ID NO: 983466 - DNA, 120 bp, Artificial Sequence
  ENSG00000285847_30 (sequence is synthesized)
tcatcgattctgaaaaagggtaccttacaagttagaaatttgtattgtctctgctttttggagaaaggaatcttaacttttctcaagtaaccgaggttgcagagtgggtcaataaggaac

SEQ ID NO: 983467 - DNA, 120 bp, Artificial Sequence
  ENSG00000285847_31 (sequence is synthesized)
gtgggacaagaacccgcatgcgcctctctccaaaagtcttcatcctcaacccctgcaccagactgtcttccacacatgggctctgagcggccagcactggatctggagaagccaccaccc

SEQ ID NO: 983468 - DNA, 120 bp, Artificial Sequence
  ENSG00000285847_32 (sequence is synthesized)
tgtcctgtcctccaggcagaacggaagtgtgcctgaccccagctgtaagcacccgccctctgtggcccggaaagaatccagtcgcagggcttggcccttccccatcccctcctctgggca

SEQ ID NO: 983469 - DNA, 120 bp, Artificial Sequence
  ENSG00000285847_33 (sequence is synthesized)
gcccgcgttgagtcccatctggaacgtggaggaagaaggccctgtagcaaacgcacagctagaccccctccctccctgccaggcctccctcgccaactccatgcccaatttcagccctga

SEQ ID NO: 983470 - DNA, 120 bp, Artificial Sequence
  ENSG00000285847_34 (sequence is synthesized)
ggggcgagaacagcaggtgctcgggccgccttcgcccttggtgttctgggagcccattgtctaattttgctcgggcctggcctgcttcctttttagtcctgcgcatgtgggcagagtaca

SEQ ID NO: 983471 - DNA, 120 bp, Artificial Sequence
  ENSG00000285847_35 (sequence is synthesized)
agctaattggcagggctgttccaaatcctaaagaacgcgcgcgctgcctgctcgccagcgggagggccgtgtgcccagcttgcgccctgacattttccgaggcctgggcgaggccacctg

SEQ ID NO: 983472 - DNA, 120 bp, Artificial Sequence
  ENSG00000285847_36 (sequence is synthesized)
cctgacgaaggcttaccagggaaaatcaggtcctgacagcctgacagggacaaccgcccagaggattcatctgctcgcgatgcctggtcagcaaggaggagactcgacctgggacgagga

SEQ ID NO: 983473 - DNA, 120 bp, Artificial Sequence
  ENSG00000285847_37 (sequence is synthesized)
agaggccttgaagggacagaggagagcgcatcctccatcccccggccagggagaagtcacgcggacccccaggttgctgggccgcgatggggggaagaggagaccacccccagctccgca

SEQ ID NO: 983474 - DNA, 120 bp, Artificial Sequence
  ENSG00000285847_38 (sequence is synthesized)
aggcaagccctcccggaggagaggagctctgaagggggaaaacagctctgcagagtgtagaggagccggactttgcagccaggtacctctgtgcaagtctcagctgtgcctctgaagtag

SEQ ID NO: 983475 - DNA, 120 bp, Artificial Sequence
  ENSG00000285847_39 (sequence is synthesized)
ctagccgttgcccagcactgtgctaaggtcttttcatcactgtgtaattgaaggctcacagccaccctttaaggaaaacgatcttgtcgtcattattttataagaaatggaatggaagct

SEQ ID NO: 983476 - DNA, 120 bp, Artificial Sequence
  ENSG00000285847_40 (sequence is synthesized)
cagtgccacccctagcccatggacacattcccagagagcggcagtgtgtctggcctggaacttaatgaattctgtcggacagaagtccatgctcttaaccattaggcctcccatacaaag

SEQ ID NO: 983477 - DNA, 120 bp, Artificial Sequence
  ENSG00000285847_41 (sequence is synthesized)
atactttgtacggggacatgagacacagcctaatagcacagaaactcacagaggacgagtttcttagttttgtcatctctgaaatgggaataataatattactcccaccttgcaaggctt

SEQ ID NO: 983478 - DNA, 120 bp, Artificial Sequence
  ENSG00000285847_42 (sequence is synthesized)
tgggaaagattagagagaatgtaaaaaggtccatgtgagaggtcctcgtgggttaatgtgtggggggagtccccagtccctccccgggcactcagagcgatgtgggaagactgtggagcc

SEQ ID NO: 983479 - DNA, 120 bp, Artificial Sequence
  ENSG00000285847_43 (sequence is synthesized)
catgcttattgatgctgtttcatttcaattaaacctccgtcagaaacatcgcatgacatcaaaatggaagagatgttgagtctgaacggtgaggtcatagattttgtttttatttatgta

SEQ ID NO: 983480 - DNA, 120 bp, Artificial Sequence
  ENSG00000285847_44 (sequence is synthesized)
ttttccaaataaaaatatgtatcatgttttctcatcataattgtaatatgtgatgatgtatcaattatggaaaatacagaaactgtaaaagaggaaatgaggaaaacctttgcttctcac

SEQ ID NO: 983481 - DNA, 88 bp, Artificial Sequence
  ENSG00000285847_45 (sequence is synthesized)
ctagagttcgaggctgcagtgaactatgattgcaccattgcactccagtctgggtgaccagcaagatcctgtctctaaaaaaaataaa

SEQ ID NO: 983482 - DNA, 120 bp, Artificial Sequence
  ENSG00000285847_46 (sequence is synthesized)
caccattgcactccagtctgggtgaccagcaagatcctgtctctaaaaaaaataaaaataataaaaattttaaaaatatttaattaaaaaattataatgaataataatttattgtatatt

SEQ ID NO: 983483 - DNA, 120 bp, Artificial Sequence
  ENSG00000285847_47 (sequence is synthesized)
agaggagggaatccactgaaaccatgagaaacgtgaggagagagactgtgtccttcatctcctgtctccacaagtggcacaggtccaaggaaaggtggcctggtttgagaagaactgaat

SEQ ID NO: 983484 - DNA, 120 bp, Artificial Sequence
  ENSG00000285847_48 (sequence is synthesized)
gcctgtatgctccagggactgggataggtgctgaggagagagacgtccagtgcacagggccctcctggctgagcctgggaacttcagggaccaccttctggaggacaggatgcctgtgct

SEQ ID NO: 983485 - DNA, 120 bp, Artificial Sequence
  ENSG00000285847_49 (sequence is synthesized)
gagtcttgaagaatgagagggattccagcatgggacaggctttgagaaggcaaaggagatcctgagaatttcatttcaggatgcaatgaaataaataaaacctctgtcattctctggtgc

SEQ ID NO: 983486 - DNA, 120 bp, Artificial Sequence
  ENSG00000285847_50 (sequence is synthesized)
tgacaacatcctggaatgtatctacagctccagggacgccattttgtcctgagaggaagccagcttcctccctcaggaaggaaacccaggccaagaggacggaatggttactcatgtcat

SEQ ID NO: 983487 - DNA, 120 bp, Artificial Sequence
  ENSG00000285847_51 (sequence is synthesized)
gcgtgctcagtggctgcccatctcagcatcagcggtatgaacagagcactctggaggggcagggagaggtggctttgtgggtagtgggatgccaccttcactgtccttcagtccaatagg

SEQ ID NO: 983488 - DNA, 120 bp, Artificial Sequence
  ENSG00000285847_52 (sequence is synthesized)
ggtcttccgttgtgtgcagatatattgaatgcctggtatgtacaagaggagggaatccactggtgagtgagcaagacgaggtccctatccagtgggggttattctgttgggagataaaag

SEQ ID NO: 983489 - DNA, 120 bp, Artificial Sequence
  ENSG00000285847_53 (sequence is synthesized)
gagactgtgtccttcatctcctgtctccacaagtggcacaggtccaaggaaaggtggcctggtttgaggtcagcagggcttcattattcatagaggttgctgcccagttttggcagggag

SEQ ID NO: 983490 - DNA, 120 bp, Artificial Sequence
  ENSG00000285847_54 (sequence is synthesized)
gaggggctgcttatgggaggagggactgggcttcccagaggcctggtggactcctctctagcagtgggtgggaagaggaatttaatgagcttttaaagaagacaataaagaagatccaaa

SEQ ID NO: 983491 - DNA, 120 bp, Artificial Sequence
  ENSG00000285847_55 (sequence is synthesized)
gacctggccatctggacttctgctcttaatgagaaagtaatcatggctccagaaaatagctggttaaacttagaagagaagccaagtatgtttaatttccattgaaaactgtttggtagt

SEQ ID NO: 983492 - DNA, 120 bp, Artificial Sequence
  ENSG00000285847_56 (sequence is synthesized)
ctccatgggcaaggctgtgacagtcagtgccacttaatgaggctgccatgggcttctccagctcagggagaaggaagtcaggggaccagggaggtaggttcagggcagggaaaatgctag

SEQ ID NO: 983493 - DNA, 120 bp, Artificial Sequence
  ENSG00000285847_57 (sequence is synthesized)
aggctctgggaggtgattccctgggtgcagagacgcagccaagacccctatggtcaggagacctatggtgcccttagaatcagagctgaaggaactgtggagttcatctggcccaacccc

SEQ ID NO: 983494 - DNA, 120 bp, Artificial Sequence
  ENSG00000285847_58 (sequence is synthesized)
tttattagatgagaaacccgaggcccatagaggttagacagcctgatcaaggtcagacagctaggtggtgacaaagccaggagttagccctgagttctcctgactcagcaggaagccaag

SEQ ID NO: 983495 - DNA, 120 bp, Artificial Sequence
  ENSG00000285847_59 (sequence is synthesized)
cccccctcaagtaggatatgggaaacttggctgctaccccaccatatacagacatgtttcaagattagtatctcgtcctccatcctttctctctccctcccaagaagaactgaatgcctg

SEQ ID NO: 983496 - DNA, 120 bp, Artificial Sequence
  ENSG00000285847_60 (sequence is synthesized)
tatgctccagggactgggataggtgctgaggagagagacgtccaggtatggttgcagctctgaggggttggctacaggggaggaagacataataaccgctaggcaattgcagtttggtgt

SEQ ID NO: 983497 - DNA, 120 bp, Artificial Sequence
  ENSG00000285844_0 (sequence is synthesized)
agagacctctgagccgggggcggggaagcaggcagccagcaaaccgcccgggcttcggggcgggaaaggaggggctgcagaggaggccgaggagtcccaatttctaacagcctttagctt

SEQ ID NO: 983498 - DNA, 120 bp, Artificial Sequence
  ENSG00000285844_1 (sequence is synthesized)
cgaattctaaatccggacctgtttggggcgtcactttgagagggtttctcttgctccctcattcccgcgactaccactccctccttcccaaactgcccccggggatagagtgggggagtg

SEQ ID NO: 983499 - DNA, 120 bp, Artificial Sequence
  ENSG00000285844_2 (sequence is synthesized)
cggggcgctccgaggcgcgctcccacgcgcgcacacccagccccaggcttccccttccctctctccactccccacgccctgcagcgaaacggccccagaagcccctctccgaggcgcgag

SEQ ID NO: 983500 - DNA, 120 bp, Artificial Sequence
  ENSG00000285844_3 (sequence is synthesized)
ttcggtttggttctggcaggggctttgcagctgtccggaaggtgaagtcagccttgtgtcctgaggagaaactggagatgcaggtcgctgtgccctcccgctgctacgtcgctgcgccgg

SEQ ID NO: 983501 - DNA, 120 bp, Artificial Sequence
  ENSG00000285844_4 (sequence is synthesized)
atcctgccatccttccgcaaggggtgagagcgggaacagccctgccctgccttccaggtattatctagcctggaggctggagcgcaaggtaacgctccgggaagtggcactcgggtcccc

SEQ ID NO: 983502 - DNA, 120 bp, Artificial Sequence
  ENSG00000285844_5 (sequence is synthesized)
gcacacgggcgagtcctcagcagttcagtggacagacccgcaggacgcggctgccaagtccgcgaggcaaggaccaggcatcttcccgcgcctcactccagcctgcggactgtgactttc

SEQ ID NO: 983503 - DNA, 120 bp, Artificial Sequence
  ENSG00000285844_6 (sequence is synthesized)
catcccagtatcagacaagctcgcgagtaactgaacatcctttccagtccatgggtggggtgtggaaagggcgtaaaactccaaagtggctcctccgcggtgagcgagctgccccggggc

SEQ ID NO: 983504 - DNA, 120 bp, Artificial Sequence
  ENSG00000285844_7 (sequence is synthesized)
tctgcctgactgcagcgcgaagcctgggagaacaaacccagttccctccgtcaagaaatttccatttaagtccgagaaagtcatatgattgagaagttcagcagcggcggcgaggaccca

SEQ ID NO: 983505 - DNA, 120 bp, Artificial Sequence
  ENSG00000285844_8 (sequence is synthesized)
gtgtctgggaaagaacacctggaggatggggtgtccaggacgccggcttttcggggttccgaccccacccaccttatgttgtaacatacaagcttagagacctgttgcaaggaacaactg

SEQ ID NO: 983506 - DNA, 120 bp, Artificial Sequence
  ENSG00000285844_9 (sequence is synthesized)
actgggtcttccaccacccctggcacccgggtggcccaaagcctatgcgcccttggcggagagagaggccacggtgccactggccgcagcctctggccttcagaaacagtgtattacaaa

SEQ ID NO: 983507 - DNA, 120 bp, Artificial Sequence
  ENSG00000285844_10 (sequence is synthesized)
gaaaaggcagtttaaatctcacattcagcatagggaaaactgaagggtgccaggctcggggacttcttccaacagagtggctcttccccaaatatgaaagaaaatcatcaaattaaattg

SEQ ID NO: 983508 - DNA, 120 bp, Artificial Sequence
  ENSG00000285844_11 (sequence is synthesized)
aaggcaaaactaagcttccaccacaaagacatagcagatagttgcaaggtggattccttcgggccttttcctttcctaaggctaaaacaatgctaagacaaaagtcttcttgcagctgtc

SEQ ID NO: 983509 - DNA, 120 bp, Artificial Sequence
  ENSG00000285844_12 (sequence is synthesized)
tccgcccctccgagataaatactttcccaattctcccccaccctgtacacacacccacgcccgcggcagctgatttctgtcttctgcaatagctcgatttaaatgctttgcttttactct

SEQ ID NO: 983510 - DNA, 120 bp, Artificial Sequence
  ENSG00000285844_13 (sequence is synthesized)
ttattatcactattatttgtgtgaagccctctcgcctgctcctggtcaccagcaggagcctgcttccctccctccttccccccaagcctctgggcagcagaagctagctgggagctctgt

SEQ ID NO: 983511 - DNA, 120 bp, Artificial Sequence
  ENSG00000285844_14 (sequence is synthesized)
gcagctggcggcgacgccatgtgactgtgagccgagcaccatcacccagagtcactctctagctttcccctaatacacttcacacccacgcactgtggaggtgcgagagaggttgctccg

SEQ ID NO: 983512 - DNA, 120 bp, Artificial Sequence
  ENSG00000285844_15 (sequence is synthesized)
tgcggtgctattcgaggcagatgcagagagcgccctggagtaagctctccaatcctagagctgcgcgggaccctgactgaaggcggagggggcgggagggggtgctgttgctatatttag

SEQ ID NO: 983513 - DNA, 120 bp, Artificial Sequence
  ENSG00000285844_16 (sequence is synthesized)
tctgcaagcagtaaaatgaaaaccacttcctcttaacttagctgttttccttgttgcagactgctactttcgctggaaattaatcagagaacccaggacaacgtcagagatcatatgagc

SEQ ID NO: 983514 - DNA, 120 bp, Artificial Sequence
  ENSG00000285844_17 (sequence is synthesized)
ctcaccagactgcatgagagtcataacacagtaggagtcccaggcctacctcacatggcaaatgggacagtgttcttcagaacaacctctgccccagggatgcagaaaggagggtttcac

SEQ ID NO: 983515 - DNA, 120 bp, Artificial Sequence
  ENSG00000285844_18 (sequence is synthesized)
aatgatctgcccaccttggcctcccaaagcgttggagttacagacgtgagccaccgcgcccagctggagaagatgtgaaattttgagagctgaccatactttgagaataataagtagttg

SEQ ID NO: 983516 - DNA, 120 bp, Artificial Sequence
  ENSG00000285844_19 (sequence is synthesized)
gagagctgaccatactttgagaataataagtagttggattctactgaagcccagtggcttttggaggtgtagcaataagcaggaggcagcagaagtaagacaagggctgtatgacaaagt

SEQ ID NO: 983517 - DNA, 120 bp, Artificial Sequence
  ENSG00000285844_20 (sequence is synthesized)
cttggcaagaactttgaattttatcctgatgtgagtggggagagccactgaagaacgtgaagccagaaacactacatgttactacttctactttcagaaaaggcttaatatggattatac

SEQ ID NO: 983518 - DNA, 120 bp, Artificial Sequence
  ENSG00000285844_21 (sequence is synthesized)
acctacaagtggcacacactgttccaagtggagactcaaagatgataacgatacagtgtttatgctataggtttgtgaagctaccaatccatggacagatgttaaacctaacttccaatt

SEQ ID NO: 983519 - DNA, 120 bp, Artificial Sequence
  ENSG00000285844_22 (sequence is synthesized)
tcaggtacaaatatctgagtaaatgatggtatcatttactcaatcagtaaaggtcaaagagaaggcagtctgaagaagggaaaggtgttcaattttgcattgagtttgacatacctgttg

SEQ ID NO: 983520 - DNA, 120 bp, Artificial Sequence
  ENSG00000285844_23 (sequence is synthesized)
agacagctcagtggagatatccagttgatgcttggatatatggacttacagctcagggggagctagaaattgaaatttgagaatcatcaacctatatttataatgggtgaaatcaataag

SEQ ID NO: 983521 - DNA, 120 bp, Artificial Sequence
  ENSG00000285844_24 (sequence is synthesized)
tcggaatcaaattacctggggaagcatgcagatttgtttaaaaaggaagaggcctgagaacccaaccctggtaagcatgaccattcaggataagagagaaggagcaagtagggaaagaga

SEQ ID NO: 983522 - DNA, 120 bp, Artificial Sequence
  ENSG00000285844_25 (sequence is synthesized)
ctgaaataaagaaacctgagtaaccactgaggaccactgctacaatagagaaaaaggaacttcattagggaaatgcctgaaagcgaataaggtaaggattttggatttagcaacaaagag

SEQ ID NO: 983523 - DNA, 120 bp, Artificial Sequence
  ENSG00000285844_26 (sequence is synthesized)
gtcatttgaagaagttgtttttatttttatttccttgcagaattgtagaaatagaaatcaaatcagagtgagcagagaaacaatttgaagataagggaatggagataattattttaaagt

SEQ ID NO: 983524 - DNA, 120 bp, Artificial Sequence
  ENSG00000285844_27 (sequence is synthesized)
gggagaagcaagcagaagatttaggtttgaagaaggcactatacaaaataatgttgattcacttgagacttgagtggctgttacagccactctcacaggtcccgaggctgagcctgcaca

SEQ ID NO: 983525 - DNA, 120 bp, Artificial Sequence
  ENSG00000285844_28 (sequence is synthesized)
ggtgtttcgacaactaagctgcaattttgacagacactatttcactgtcaattgtgcggcctgcaacaacttggacatcttttattgattttattgagtactttaataacattttaataa

SEQ ID NO: 983526 - DNA, 120 bp, Artificial Sequence
  ENSG00000285844_29 (sequence is synthesized)
aagccattatattttatttctaacatttcaaaaaattctatttaataagtatgcatttttcgtgtttagttttaccaagaaggaaaatgcatgctagataaactacatttttgtttgatt

SEQ ID NO: 983527 - DNA, 120 bp, Artificial Sequence
  ENSG00000285844_30 (sequence is synthesized)
ttatttgtaatcaaggctgaggaactgaccagatcagaaaaagaaagtcaatacctgctaagtattcaacacagttttcaacagtgctactgaaagctacaggagataccaagagtccct

SEQ ID NO: 983528 - DNA, 120 bp, Artificial Sequence
  ENSG00000285844_31 (sequence is synthesized)
cagacaggtcagggattggcaagagtggggtcatcaagtttctggagtttcaataagatatttgcttttttcttatatatacatattagctttctgcataaaattatattaacagaaacg

SEQ ID NO: 983529 - DNA, 120 bp, Artificial Sequence
  ENSG00000285844_32 (sequence is synthesized)
ttgcagactgctactttcgctgggtaggtaaagtcacttccatctctctggcgcggctgggccccgcgtgcaggcaagaagtctcaggaaggcaggacacagggacacgtttccctggaa

SEQ ID NO: 983530 - DNA, 120 bp, Artificial Sequence
  ENSG00000285844_33 (sequence is synthesized)
gacagccagctgtttaatttctaagtgatgcttttctggggatgcagcattagttctagtgaaactgtattattgattaagcaaatgccatttaagcttaattaaaaaataaaaaagacc

SEQ ID NO: 983531 - DNA, 120 bp, Artificial Sequence
  ENSG00000285844_34 (sequence is synthesized)
tggtagccgttttgagctgctgagaaggacctttcacttatgtcttctagagtaaccgccatttggatacacagcccagaaaaagagggcctgctcaagttttcgcgggtagtgtgagag

SEQ ID NO: 983532 - DNA, 120 bp, Artificial Sequence
  ENSG00000285844_35 (sequence is synthesized)
ttactaggaatccaacaacctggcttcctagttcactgttccttccaccaatcaatctgcatctccagcagagaatggataaaatagcaaacagttctggggttttgtatcaatctctga

SEQ ID NO: 983533 - DNA, 120 bp, Artificial Sequence
  ENSG00000285844_36 (sequence is synthesized)
ctgcaaccattgggaaagactggcttagctgaagttctaaccttcctacctttcaatgcccagaaagaaaaagccaaaaattaatcagagaacccaggacaacgtcagagatcatatgag

SEQ ID NO: 983534 - DNA, 73 bp, Artificial Sequence
  ENSG00000242339_0 (sequence is synthesized)
ggtgttttcaatgcagaagaaaggtgatttctgcatttccaactggggtacttggttcatctcattgggactg

SEQ ID NO: 983535 - DNA, 120 bp, Artificial Sequence
  ENSG00000242339_1 (sequence is synthesized)
actggttggacagtgggtgcagcccacaaaggattatcctcgatacttggataatgtccatatatggtgctgattttggccatgtaactttattttatgttatggtgagtagattaaatc

SEQ ID NO: 983536 - DNA, 120 bp, Artificial Sequence
  ENSG00000242339_2 (sequence is synthesized)
taactttattttatgttatggtgagtagattaaatctctgaaattttaggctttgtcatgtcacttgctttaatcaaataaatatttactggtgtgacacaagcaaacacctgaagctta

SEQ ID NO: 983537 - DNA, 120 bp, Artificial Sequence
  ENSG00000242339_3 (sequence is synthesized)
agttatttcaggaagtggcagcttgttccctccattgtgaactcattgttggttggttggtgttggtttacatcttgaaatcagtaaataatccttgggctgaaacttatgatctttgag

SEQ ID NO: 983538 - DNA, 120 bp, Artificial Sequence
  ENSG00000242339_4 (sequence is synthesized)
agctccagtctacagctcccagcgtgatcaatgcagaagaaagattatcctcgatacttggataatgtccatatatggtgctgattttggccatgtaactttattttatgttatggtgag

SEQ ID NO: 983539 - DNA, 120 bp, Artificial Sequence
  ENSG00000256577_0 (sequence is synthesized)
cgcgctgtgctcgcggccgtccggcccgtccggcagccccgggtcagcccggtgaactaagcggacccgggatggccgagccgggggccggcgttctgtgctccgtttgctcaccctgac

SEQ ID NO: 983540 - DNA, 120 bp, Artificial Sequence
  ENSG00000256577_1 (sequence is synthesized)
cgtggcacccgcataagccgtctgtgtgttccagagaggccagccctgcatgtgctgtccgtgagcgtgcttggacctacgcataggacccagctgagcgggacatttacacgactgctg

SEQ ID NO: 983541 - DNA, 120 bp, Artificial Sequence
  ENSG00000256577_2 (sequence is synthesized)
gggtcgagggcagaacagggggaaactgtgttctggcggaggcacagcaccccgggagcacccagagcctgaagaacaccgggatgccgcagacaaagaagaagatgaagtaggggatga

SEQ ID NO: 983542 - DNA, 120 bp, Artificial Sequence
  ENSG00000256577_3 (sequence is synthesized)
gggctcttcctcagcctccatcctttcagaccctcctcccccaacaaacccgccctccaccatcctgttcttaatctccctcctgacactttccaagggcccactcctgcctgcgtgcag

SEQ ID NO: 983543 - DNA, 120 bp, Artificial Sequence
  ENSG00000256577_4 (sequence is synthesized)
tcctgagtgttaggcaggcacaggtgggaatgttctgatctgaaccctacacagaatgagaaaggccttggaagggaaattagtgaaaacttaggtggaaattctaatatatgcactatt

SEQ ID NO: 983544 - DNA, 120 bp, Artificial Sequence
  ENSG00000256577_5 (sequence is synthesized)
tattttcttagtgtgctttacaaatctagtcaatagattatttttggaataaacacatggcttctgtataacttgatatgcttattaaactcttggtacattttagagaaaaacaaacac

SEQ ID NO: 983545 - DNA, 120 bp, Artificial Sequence
  ENSG00000256576_0 (sequence is synthesized)
ggcgaagaggcccccgcggccggccgagctccgtggactccgcaggagcggccccgcccctcacactacgccgggcggttccctccgagccccgccgggacagcgtcgacgctgcacaca

SEQ ID NO: 983546 - DNA, 120 bp, Artificial Sequence
  ENSG00000256576_1 (sequence is synthesized)
ccccagagaagccagaggacggcgcctgcaccggacacagcgcaacaccggcacagcacagcgtccacaccacaagtgagcctaggcagctgtgtctacactgcagacgccggcctgagc

SEQ ID NO: 983547 - DNA, 120 bp, Artificial Sequence
  ENSG00000256576_2 (sequence is synthesized)
gcacgcgtcttcatgcaggctcagcagagggggaagaacacctccccgagggtggaagagctgtggccagcagacagatggacggacagacggacacaggcgaacaggcagcgcaggggt

SEQ ID NO: 983548 - DNA, 120 bp, Artificial Sequence
  ENSG00000256576_3 (sequence is synthesized)
gagccgagccggtcaaatgggccaggacccggctccgtgtgcccttcacagtcaggatgacagaaccccgtggaatatgaaaaatgccgggagacagaccccggaggcacagcccctcac

SEQ ID NO: 983549 - DNA, 120 bp, Artificial Sequence
  ENSG00000256576_4 (sequence is synthesized)
cgggcagggaggccgccagagggaagcgcagctccagaccaccagagccccatctgattaaggcatcgagatcaaagctcagcagagggcggctcatgatgggcagctcaaaaaaataaa

SEQ ID NO: 983550 - DNA, 120 bp, Artificial Sequence
  ENSG00000256576_5 (sequence is synthesized)
cccaccaatcagagtccgtgttcctgtgaccggtggcgggttcggatgcagaggaggcttctcagtgcggttcctcctcatctcggaacctgccaccccactcaagcccgacataggcca

SEQ ID NO: 983551 - DNA, 120 bp, Artificial Sequence
  ENSG00000256576_6 (sequence is synthesized)
acatcctgaggcccccgggcctgtcgccgagtcccggcttggggagtgtccccgggccacactggtcctgctcccggctgtgtggtctcccaggcgcgtggctcctccctccggggccca

SEQ ID NO: 983552 - DNA, 120 bp, Artificial Sequence
  ENSG00000256576_7 (sequence is synthesized)
ggctctggtgtgagccactttttccataggagacgcccatacttgcagctcacgcctttgtctggtgccctggcctcacacctataggaattgggtacctgggggcctcttcatctttac

SEQ ID NO: 983553 - DNA, 120 bp, Artificial Sequence
  ENSG00000256576_8 (sequence is synthesized)
ttgtctcagcttagagaagcccagctacacttcctccatgcctggattcatgcacggccccacagggtgaggcctggacaccctcacgggcactggggctccacggatgcagaaggcagc

SEQ ID NO: 983554 - DNA, 120 bp, Artificial Sequence
  ENSG00000256576_9 (sequence is synthesized)
ctggcccggtagctcgggggtctgagatggaggtggagtaagacagagtgacaaaggctgcgtcctggaggcaggctcggagcctccctgagctcagagagcccgcgtgcgccaggaagc

SEQ ID NO: 983555 - DNA, 120 bp, Artificial Sequence
  ENSG00000256576_10 (sequence is synthesized)
cacacctgcaggacccgagtcggaactcagaggctggtacagccgcggtgcttgtcctgtagataagaatggcctcctctggcggccaaagttaattaaactgacaatcttgataagttg

SEQ ID NO: 983556 - DNA, 120 bp, Artificial Sequence
  ENSG00000256576_11 (sequence is synthesized)
cacagttacctgctcggggacaaagaagatgggagccttgtttgtggtttcttcttgttctttcctgtgccccacagtcattttaaaattaaattaaatggcttatctgcactaacccaa

SEQ ID NO: 983557 - DNA, 120 bp, Artificial Sequence
  ENSG00000256571_0 (sequence is synthesized)
gctggtgatgtagcttttctagggatcagtcttctcatctataacacagtgctaattctcaccttgttgggttgctgagaattgagtgagcccatgcatttgaaggccaacctcagtgcc

SEQ ID NO: 983558 - DNA, 120 bp, Artificial Sequence
  ENSG00000256571_1 (sequence is synthesized)
tgaaacagataaacccaatgaacagtagttctttcaatcttgaatgagaatcatattctgaaggctaaatgatttttgaaaaactttactgttaatttacatttttttttcttttttttg

SEQ ID NO: 983559 - DNA, 120 bp, Artificial Sequence
  ENSG00000256571_2 (sequence is synthesized)
gggctcaagtgatcctccagccttggccttccgaagtgttaggatcacaagtgtgagcttcctcaccctgtcctttgttctttttaagggggaaaaatgcacctctgcatacttacatac

SEQ ID NO: 983560 - DNA, 120 bp, Artificial Sequence
  ENSG00000256571_3 (sequence is synthesized)
ttacatactctgaattatttggagctgtgcctctcagactatctatggtgaaggcctaattttgttccgaattcgtcatgaactgatgcttttataaagtacaatacaatgaattaatat

SEQ ID NO: 983561 - DNA, 120 bp, Artificial Sequence
  ENSG00000229996_0 (sequence is synthesized)
ctggaaaaagctctgcgttggacacagctgagcaccttaggcaccccggacggggctgaccctctgctggctcaggaggaagcacagagacgtgctccagtggcatttccgacttggatg

SEQ ID NO: 983562 - DNA, 120 bp, Artificial Sequence
  ENSG00000229996_1 (sequence is synthesized)
gcaacagcctgctcccccggacctgagccaaggggctgctctgagcagggcagggtgggcctggaggggagccagggacccaagagacttccgagggccccaggagccaggaagcagcac

SEQ ID NO: 983563 - DNA, 120 bp, Artificial Sequence
  ENSG00000229996_2 (sequence is synthesized)
cctggctccgcaaacgttagatcacaaagggcggctctgcggttccctgctttgactcctctgccaagagtgaaacagcacagcctcgaggtgttttagaagcttgttttgaaaaatgca

SEQ ID NO: 983564 - DNA, 120 bp, Artificial Sequence
  ENSG00000234426_0 (sequence is synthesized)
actgttgtttgccgccttcgcagacccgccgctgacacccatccctctgaatccggcagggtgtctgctgtgctcctgatccagtgaggcgcccattgccactcccgattgggctaaagg

SEQ ID NO: 983565 - DNA, 79 bp, Artificial Sequence
  ENSG00000234426_1 (sequence is synthesized)
caagaaccccaggtcagagaacacggggcttgccaccatcttggaagtggcccgccgagcaaggaccccccggtaacat

SEQ ID NO: 983566 - DNA, 120 bp, Artificial Sequence
  ENSG00000234426_2 (sequence is synthesized)
catcttgggagctctgtgagcaaggaccccccggtaacattttggcgaccacgaagggacctccaaagcgcctccatcagagagctccatccagacctagacttggacaataggcagttg

SEQ ID NO: 983567 - DNA, 120 bp, Artificial Sequence
  ENSG00000234426_3 (sequence is synthesized)
tttgcttgcctctggctctgctcactctccatgggggtctatagctggtgatcatcttgtatacctaattctggcttcatcttcagactcggacagccaggaatccaggaatgtgcagca

SEQ ID NO: 983568 - DNA, 120 bp, Artificial Sequence
  ENSG00000234426_4 (sequence is synthesized)
gtttcaaagacattgtgctcttccctgccgtggtggagtggtgagccggttgacatcccggaaaaggttgttagggagtggaggtgggtggaaggtgagaaattatttaatgggtacaat

SEQ ID NO: 983569 - DNA, 120 bp, Artificial Sequence
  ENSG00000234426_5 (sequence is synthesized)
atatgttatttgagagatggatgcctcaaagctctgacttaaccactgtgcaatctatgcatgaaacaaaattgcacttgcaccccataaatttatacaaataaaaaagaaggttgttta

SEQ ID NO: 983570 - DNA, 120 bp, Artificial Sequence
  ENSG00000234426_6 (sequence is synthesized)
gaacccagacagtttcccatccaatagagactttcagagagtgcaatgctatcgtttgtttagaagtaatctcgaattcccagagtaatgggcacacttacatttaaacaaaagcacaag

SEQ ID NO: 983571 - DNA, 120 bp, Artificial Sequence
  ENSG00000234426_7 (sequence is synthesized)
cacaatgtacatttcaaacccaaatataagctattttgtgctaatgtaaggaactggatacttagaagttgaccagagaaaaacaacttacttgacttgaagaattttgctaaataattt

SEQ ID NO: 983572 - DNA, 120 bp, Artificial Sequence
  ENSG00000234426_8 (sequence is synthesized)
aaaattgtcttccccatgtatgactgctaagaatgattctaaatttgtgtttaagcttctgtgtatttaccacttctatcccagatatggcatgcctggaataaaacaggcactcaataa

SEQ ID NO: 983573 - DNA, 120 bp, Artificial Sequence
  ENSG00000234426_9 (sequence is synthesized)
cacatctggatagagtggctggagctgctgcatccagcttgctacaagcacaggggatggcagagctcagagatgggatgaccctgtgttcttgatggaatcaaccagtcatgcggatcc

SEQ ID NO: 983574 - DNA, 120 bp, Artificial Sequence
  ENSG00000234426_10 (sequence is synthesized)
tgctatttctggactggctgttaggtgagataatgaattatttccacaatgcatgcttcttggagcacagggagactcttacttgaggacctcgttatttctcactggggccatgctggc

SEQ ID NO: 983575 - DNA, 120 bp, Artificial Sequence
  ENSG00000234426_11 (sequence is synthesized)
ggcgttcaagtcaggctgctctcaggcttctccagaagtacctaacaactcatggccactcttctgaccctatccttcacaagtaggcctactttataggcaaactgagctcctgaatca

SEQ ID NO: 983576 - DNA, 120 bp, Artificial Sequence
  ENSG00000234426_12 (sequence is synthesized)
ttttcatcacatcaagagctaagccagtcagttaacacagaggaaatattaaaggcagtattttttcattaagcaaccagcaagcactttatggaacttaagaaaggaagaccccacaag

SEQ ID NO: 983577 - DNA, 120 bp, Artificial Sequence
  ENSG00000234426_13 (sequence is synthesized)
tggacgaagctgagttatgttctgctccccccacccagatacatacaacaggactgcctatcacatgccaaccagtgcaactgaaggagacagaacaaatatgcagatgagtcatccaac

SEQ ID NO: 983578 - DNA, 120 bp, Artificial Sequence
  ENSG00000234426_14 (sequence is synthesized)
ttgcaaagaggccatgggaggcacgatgaggtcaagaaaagagcaaactgacttagtgagagagaccaaagttccactgccatcttccagctgtatgacttgcatatgccatttaaatga

SEQ ID NO: 983579 - DNA, 120 bp, Artificial Sequence
  ENSG00000234426_15 (sequence is synthesized)
agtctgggttttttttaatctgaaaaatttgccttatctacctcaaaaaaaggggatgaaaatgcatcttaagcatgaagtgttatgcaaatcttggttgtggttattactataatttca

SEQ ID NO: 983580 - DNA, 120 bp, Artificial Sequence
  ENSG00000234426_16 (sequence is synthesized)
tgtattgattttaaacaaaatgtactttgagttggaaggtaaaaaatatgaaagactctaagaatgggtaggcggggaaccaaatgatctgtggccacactgaaggtagaaaaaaaggaa

SEQ ID NO: 983581 - DNA, 120 bp, Artificial Sequence
  ENSG00000234426_17 (sequence is synthesized)
gtgaatttgaactaaagaagcagaagttgagaaagtaccaaagtctttgactttcagagtgaccgaacaccagcatagttcaccagagaagatcaggaatgctgtctcttctgaaagggt

SEQ ID NO: 983582 - DNA, 120 bp, Artificial Sequence
  ENSG00000234426_18 (sequence is synthesized)
accaaaaagagagtaaacagatcattctatattgatcaaggagtggcaaactgacatctgcagaacaaatctgatccccagatgagctctatttgttcaacaaagatgttgtcgttgtta

SEQ ID NO: 983583 - DNA, 120 bp, Artificial Sequence
  ENSG00000234426_19 (sequence is synthesized)
acttgctctggggaagccagctgccatgtcctgaagatactaaggcaaccgtgtgcagaggaactaaaataccgagttcaacaacagatcacaggttgcgagaggtcttaaatccatact

SEQ ID NO: 983584 - DNA, 120 bp, Artificial Sequence
  ENSG00000234426_20 (sequence is synthesized)
cttccagtgactagagcaaatgcagccctaggtctggcatcctgaatttttgtcttattttttcattagtacacgagactctactttcatctttttaaaaggtctcttgctatccttcaa

SEQ ID NO: 983585 - DNA, 120 bp, Artificial Sequence
  ENSG00000234426_21 (sequence is synthesized)
gcaaagctatctccaaatctgaagaagagaccaagaaatagaaaaagtagcacctcttgcctgcttccctgtctaatatttgaaagagtgcctccatcagagagctccatccagacctag

SEQ ID NO: 983586 - DNA, 120 bp, Artificial Sequence
  ENSG00000234426_22 (sequence is synthesized)
ataccttagaattgaagttatgctttaatgaataaaaaaattaacacttatttttgaggataacatattctatatatctttataaaatatagaacatggaggaaagtgaaaagaaggaaa

SEQ ID NO: 983587 - DNA, 120 bp, Artificial Sequence
  ENSG00000234426_23 (sequence is synthesized)
ataatttgtgtgtagacatatacttttaggtttttttccagacagctatcagaaaatcaaaccctgcttaccacttataagatactgttctcatttagtctgtaacatcacaaacagttc

SEQ ID NO: 983588 - DNA, 120 bp, Artificial Sequence
  ENSG00000234426_24 (sequence is synthesized)
acctttggttgcacagtgcccagttgaatggatgcagtgcaatatgctcacctacttctgtattgctcaggatttgggttggttctaattcttgaagtctctttgataacaaaggaaagg

SEQ ID NO: 983589 - DNA, 120 bp, Artificial Sequence
  ENSG00000234426_25 (sequence is synthesized)
gagaacaaagagaggggagaaactgggaatttagtattcaaatattaaatttgaacacctctaaacttgaagagtaaattggaattgctcctcagagtaaagtacccaaagaactaataa

SEQ ID NO: 983590 - DNA, 120 bp, Artificial Sequence
  ENSG00000229990_0 (sequence is synthesized)
cacatcctccaagatcctagaatggctaaaatctgtaaagtgctgagagtcttcagagagttaaataagaatccagagaaacaaggttaacgttctgaggacctcgttatttgccaagaa

SEQ ID NO: 983591 - DNA, 120 bp, Artificial Sequence
  ENSG00000229990_1 (sequence is synthesized)
caagcacaggggtgtcacctcctccgtgcagccttcagtaaccccaccacccaccaggaacagtaggagctcctgtactctcattagattcttgtacctacttgtcacattgtaacatga

SEQ ID NO: 983592 - DNA, 120 bp, Artificial Sequence
  ENSG00000229990_2 (sequence is synthesized)
ctgcctgtttgagtgcctgtctccctagatgatcttttggggcagggaccatgcctcattcatctttgtatctccagcacccagacggtaaccagcaccaaagaggtatttaataaacac

SEQ ID NO: 983593 - DNA, 120 bp, Artificial Sequence
  ENSG00000229990_3 (sequence is synthesized)
tggttgtcaagatgcctaactctaccaaatcctcttctttgtctgaaagttgatatttcagcttgaaagaattgtgtataaaaacagagtacgtcaacccacactgatagcctagaggac

SEQ ID NO: 983594 - DNA, 120 bp, Artificial Sequence
  ENSG00000229990_4 (sequence is synthesized)
tctcctaggactttagcgcagaagctttatgcctcagcttttatgcttttaatgactcagaaaccccttctgttgatttgttggatcttggtcaccactccagtggagttgagatctgag

SEQ ID NO: 983595 - DNA, 120 bp, Artificial Sequence
  ENSG00000229990_5 (sequence is synthesized)
tatgaaccccagcttgggaattcactttgggttttgccagctgctttctatcaccggctacctggagtccacaagggtcaacctgagccctcatccaagaacagaaccaatcccagcctg

SEQ ID NO: 983596 - DNA, 120 bp, Artificial Sequence
  ENSG00000229990_6 (sequence is synthesized)
acagccatgagtgggggagagaggagcagtggcccaccagccccatcagcctcccgagtctccctggtgacatttattgaccctggccctcaacagtcctctgcccgcctgctcagttat

SEQ ID NO: 983597 - DNA, 120 bp, Artificial Sequence
  ENSG00000125514_0 (sequence is synthesized)
tgacaactgacggcactggagcagagaggctgactgcccgaggagaccagggaggcttggaccccaggctggagggggccggggacccagacccactcacttgatttggaaggacacagg

SEQ ID NO: 983598 - DNA, 120 bp, Artificial Sequence
  ENSG00000125514_1 (sequence is synthesized)
gctgtcaaacctatgcagggtcatcacacccggcccttcgtttgtcccttttcggccaagctcaggaccctgtaacccaggaagacaagctcgtggttctgagatgacccagggaattgg

SEQ ID NO: 983599 - DNA, 120 bp, Artificial Sequence
  ENSG00000125514_2 (sequence is synthesized)
ccaatcccacccgaaacccttgttccttcctctggtcattgacgttcctcccagacggcttcgagagccccgcagatccttccactactccccagcctagaagatccagggacagaagcc

SEQ ID NO: 983600 - DNA, 120 bp, Artificial Sequence
  ENSG00000125514_3 (sequence is synthesized)
ctcgaggttctggctgggcccacgtgctgagatgcctctgagaaagctgtctttccatggtggatcccgctggatgcccgtgaacacggggccagcttgcagagagctggaaggaggcct

SEQ ID NO: 983601 - DNA, 120 bp, Artificial Sequence
  ENSG00000125514_4 (sequence is synthesized)
agatgcaaccgtgggcctggggcctggggttcctggttggtggccaggagaggcggccagaagactccatggctcccagggcccagtcgcagctgagaggctccccgtcacgatggccaa

SEQ ID NO: 983602 - DNA, 120 bp, Artificial Sequence
  ENSG00000125514_5 (sequence is synthesized)
tagccctttctccaaggacaaggatgggatgctacatgccgctcctgacgccgtggcacggaatcacgctgcgcgtcccttgtttccggatttctcttctgtggcttattgatggcactc

SEQ ID NO: 983603 - DNA, 120 bp, Artificial Sequence
  ENSG00000125514_6 (sequence is synthesized)
aagcaccgcacagcaatgacgtctgtcctggcagggcacacgcactctgcgtctgaatgagtattgagctaattccaaagcccagcagagacgtgggcgcgcgtttatctggaggagacc

SEQ ID NO: 983604 - DNA, 120 bp, Artificial Sequence
  ENSG00000125514_7 (sequence is synthesized)
aggcgcgccatggttggctctggccgcgggaccctgggctgagcaccgacccaggccaccccaagtcaccaaaagagggtagggaggggtggacaaaagtatttattttgcctattttct

SEQ ID NO: 983605 - DNA, 120 bp, Artificial Sequence
  ENSG00000125514_8 (sequence is synthesized)
tgccagtgtccagattcaaatgtactgtttttaaactacattagcactttctgccctgtggcctgcaatgattgtgctgtgattattcaacaccataaataataatgcagcatttcacca

SEQ ID NO: 983606 - DNA, 120 bp, Artificial Sequence
  ENSG00000125514_9 (sequence is synthesized)
agcaagtcaaggggaccctcccctcccgctcctcccacactgcacagcgggttccagccagggcagtgaggcaagaacatggaactcaaatcaccgagattagcaaaaaagatgtagaag

SEQ ID NO: 983607 - DNA, 120 bp, Artificial Sequence
  ENSG00000125514_10 (sequence is synthesized)
tacgcctcacgccgtaggtggaatcgcctaaggaatctacaaagataaaataaaatgaagtaaaacctgataagatgatcgaaggagtttaacaagatcatggggcgtaggatatttctg

SEQ ID NO: 983608 - DNA, 120 bp, Artificial Sequence
  ENSG00000125514_11 (sequence is synthesized)
cactgacagtgaacaccccaagatgaaatgcagaaagcgtcctggtcaaatagcatcagaaagaataagctacttaggaataatttcgcaaaggaagtgtgagacttgtacgctgcaaac

SEQ ID NO: 983609 - DNA, 120 bp, Artificial Sequence
  ENSG00000125514_12 (sequence is synthesized)
tgcgaaacatggctggtaaaaagacccaaagaaaacctgaacagatggagagacttcccacatcgaggctgaaaggctgaaccctgcgcagacggcggggctcccgcggtgctccgtgtg

SEQ ID NO: 983610 - DNA, 120 bp, Artificial Sequence
  ENSG00000125514_13 (sequence is synthesized)
gccttcatccccctctggccgtgttccctccccggctcagagccactcctcctagttaccaccctcggccctccctctgcaagcccaggatgcccgggccacaggccggtgagctgggga

SEQ ID NO: 983611 - DNA, 120 bp, Artificial Sequence
  ENSG00000250850_0 (sequence is synthesized)
caggatgccgctgatggagtacgacgagccggccgaatccgtgctcaccgaggacacctgcgtcacggagccagtggacactgcgcggagaaagacgggcggtcagggccgcagagggct

SEQ ID NO: 983612 - DNA, 120 bp, Artificial Sequence
  ENSG00000250850_1 (sequence is synthesized)
gagggcggcggaccggctgtcaccgcacaaccttaggctctgaagagtttgtagacgtccagcaaggaccacgcatgcgcaagacagcaagtccggcgcatctgagagcagcagaacagg

SEQ ID NO: 983613 - DNA, 120 bp, Artificial Sequence
  ENSG00000250850_2 (sequence is synthesized)
gccacgcgaaaagctccttcggatctaccagaaagctccttccttggcatttgggagaagagtgggtcataataaaatgtccggtttctttggaaaagttatattccagtctcaaactat

SEQ ID NO: 983614 - DNA, 120 bp, Artificial Sequence
  ENSG00000250850_3 (sequence is synthesized)
tattagagttttttctcattataacagtaatatacgttcattgtagactctttggacagtatgggaaagtataaagaagacatctaaaaacggtattttggtgtatttcctttataccaa

SEQ ID NO: 983615 - DNA, 120 bp, Artificial Sequence
  ENSG00000250850_4 (sequence is synthesized)
tataccaacattcctgggcatatttagaaatatccatttttctcttaacaaaatcaggattatgccatgtatacagttttttttgttgtggtggttgtttgttttgagacagagtcttgc

SEQ ID NO: 983616 - DNA, 120 bp, Artificial Sequence
  ENSG00000204949_0 (sequence is synthesized)
acatcatctactaaattgatttcacaccccgctaatggatggtgaggcacagtttgaaaaactgcattctttcaggacactgaatggtcagaacccaatgtgcttttattcattcattca

SEQ ID NO: 983617 - DNA, 120 bp, Artificial Sequence
  ENSG00000204949_1 (sequence is synthesized)
acaaatatttgtggccatgtataatgtatcaggtgctgtatttactgtacttcatgccaggaaagcaacagagaagaaaacatacccagtccagtccctgacctcatgtcatttacaatc

SEQ ID NO: 983618 - DNA, 120 bp, Artificial Sequence
  ENSG00000204949_2 (sequence is synthesized)
tcggctaatcaagttcacaaataaataattccaaatcatgatgggagtgaagccatagaggataagagggctcggggtggtgatcagaggtctctgaggcaatgatctggaagctgccac

SEQ ID NO: 983619 - DNA, 120 bp, Artificial Sequence
  ENSG00000204949_3 (sequence is synthesized)
ctacaagataaagagtaagcaagatagagacagcaggaatgagctctccgacggagggcatgaacagcaagtgcaaaggccctgcgactcgaaagagcatgaaagactgaggaagcggcc

SEQ ID NO: 983620 - DNA, 120 bp, Artificial Sequence
  ENSG00000204949_4 (sequence is synthesized)
agtgtggctccaacacagtggaggagtggggggatcctactgagatagaggccctgggctgaataattctcatccttcaaggcccaactccagccaatggcaccgacctcctggacctgc

SEQ ID NO: 983621 - DNA, 120 bp, Artificial Sequence
  ENSG00000204949_5 (sequence is synthesized)
ctgaccccagagcacttccttagctcctgctgatctcagagcacacacaccaatccactctggccactcagcaatttttcttgatggccctggcatggcacctatgctggggtcagaccc

SEQ ID NO: 983622 - DNA, 120 bp, Artificial Sequence
  ENSG00000204949_6 (sequence is synthesized)
tcaaccagcccttcagtgttgaaatgcacaacctcagccctctagcctcagcggaggaagcagggctcttcagtttgggagaaccatatacaaccagaagaaggggccaaaatatctgaa

SEQ ID NO: 983623 - DNA, 120 bp, Artificial Sequence
  ENSG00000204949_7 (sequence is synthesized)
gcccccaggtagcggggctaaaagaaagggataaatggcctcttctggttttttttctttgtttgtttttgtttttactggaaacaactctaaggggagactggtcccagtgaagatgat

SEQ ID NO: 983624 - DNA, 120 bp, Artificial Sequence
  ENSG00000204949_8 (sequence is synthesized)
cccctgaaaggctagtaagcaggtcacctttgaatgtcaagggcaaaatcactgttggtgtcctgttctccctccaggagctggctcctccacagctctcaggaatgacagtaaacacag

SEQ ID NO: 983625 - DNA, 120 bp, Artificial Sequence
  ENSG00000204949_9 (sequence is synthesized)
acggccctgcatgtattccggctgtggcagccttcctcctgggctgcacatcaggctaacaagcccagccctcagcttcacagggattggagagctggtgaccctagtcaaggaagctgg

SEQ ID NO: 983626 - DNA, 120 bp, Artificial Sequence
  ENSG00000204949_10 (sequence is synthesized)
tgaccctggatcagttgcctcccctctctgtgcctaaatcccccaccccacttctgtcaattaggaggatgatgccttcttcaaagtgttgtcataaagattaaatccttattaaagtct

SEQ ID NO: 983627 - DNA, 120 bp, Artificial Sequence
  ENSG00000204949_11 (sequence is synthesized)
tgagatagaggccctgtgatgcaaaacctgagttccccagggaagaatgtgtgccttgaaatggagtgtcaagagcgctgcaagaattcctcagctaatattcacaatcgccgaaagggg

SEQ ID NO: 983628 - DNA, 120 bp, Artificial Sequence
  ENSG00000204949_12 (sequence is synthesized)
gaaacaacccaatgtctattgattggtgaccagataaaccaactgtggtccatcctgtccatggaatatttgctcagccatgaaaagggagaaagcactgaaacacgctacagctcggat

SEQ ID NO: 983629 - DNA, 120 bp, Artificial Sequence
  ENSG00000204949_13 (sequence is synthesized)
gagcctggaaaacgttatgttaagtgaaggaagccagccacaaaatgccacatattgaatgataattccatttacatgagacaggcacttacatggggaccctcggtgctatgaaggaca

SEQ ID NO: 983630 - DNA, 120 bp, Artificial Sequence
  ENSG00000204949_14 (sequence is synthesized)
ttccagacctcaaggcaagctgggaaggaaggtgtgaactgcacttgtgtgaatgtgcctcctaagccacattctctttttttcccatagccttgttctcctaccttcaaattctataac

SEQ ID NO: 983631 - DNA, 120 bp, Artificial Sequence
  ENSG00000204949_15 (sequence is synthesized)
caagttcccttctgccacccctgccccagccacaggtaactggctcaggggtggacaccagactcagagacagctcatccactggtgggtgatctgggctgacagaatggttggaccagg

SEQ ID NO: 983632 - DNA, 120 bp, Artificial Sequence
  ENSG00000204949_16 (sequence is synthesized)
ggtgatggtggtgggggctgggctgggcagccccaaagtttagggatgaggaggtcagatttaacttatacaatccatgaggcaggagagagaaccaggaaaagtagctaaacaacaggc

SEQ ID NO: 983633 - DNA, 120 bp, Artificial Sequence
  ENSG00000204949_17 (sequence is synthesized)
ctgtggacccatgaaagccagagtgagcagcttttaccctagcttttcccagacttggggaggcctggcagcccctggtcctgcccttggctgtgcctgagattaattgccacagcctta

SEQ ID NO: 983634 - DNA, 120 bp, Artificial Sequence
  ENSG00000204949_18 (sequence is synthesized)
caacaccccctcccttctgcctttacttagccagtttaagtagattttctgtgccttacggtgaaatagccttgacgaacttaataggaaccaaaatgtcgaaaaacagtgcaggaaggt

SEQ ID NO: 983635 - DNA, 120 bp, Artificial Sequence
  ENSG00000204949_19 (sequence is synthesized)
ccttgttgtatttgggaagagaggagaattatcacacaattttggactttgtttggaaaatgtgtaaagtattttaaaaactgaaggagtcccattaaaagaaaagagtaaaaatataaa

SEQ ID NO: 983636 - DNA, 120 bp, Artificial Sequence
  ENSG00000249421_0 (sequence is synthesized)
tattccacatacggttaaaacgaggccggcagaagtgtgcttcatttccgaacttgaccccttaacctgcacctcaagctcatttttattgctacccactgagccctgctctccacgcac

SEQ ID NO: 983637 - DNA, 120 bp, Artificial Sequence
  ENSG00000249421_1 (sequence is synthesized)
cggttgcaccagccctgccgacccgtacgttcgcggtctccgctgggatggctggaaaggaagcgagaaagtcacggaagaacttacctgaaacgatcccattcgacaggaaccccagct

SEQ ID NO: 983638 - DNA, 120 bp, Artificial Sequence
  ENSG00000249421_2 (sequence is synthesized)
ggtaaaggaggcagcagcagcagatgagtttccgaggccgagcaggctagtgctggagccccacaagacagacccacagccagccgagagccgggagtgctgcctctggacaggcagagg

SEQ ID NO: 983639 - DNA, 120 bp, Artificial Sequence
  ENSG00000249421_3 (sequence is synthesized)
acgggcggaggctggtgtcacagtctcagcaacttggtgtgccaagctccgcacactcctcacgctccttaggacgcaccgctgaaggctctcacccgcagcggcgcgggagggaatgag

SEQ ID NO: 983640 - DNA, 120 bp, Artificial Sequence
  ENSG00000249421_4 (sequence is synthesized)
tagggagatgggaagacacgactagagaggtgggttgtagagcagaaaagaatcaagcacatctgaccagaaaaagggaccaaggggtgcccgccaagcgtgactttgcgggacaaaggt

SEQ ID NO: 983641 - DNA, 120 bp, Artificial Sequence
  ENSG00000249421_5 (sequence is synthesized)
cccagaacaccgtgcacgtgctcaaacgccggttgggatggggtggggacccaaaatccctcacctgactattgattggccactcgggaaggcctgatttgcatccatcccctgcccccg

SEQ ID NO: 983642 - DNA, 120 bp, Artificial Sequence
  ENSG00000249421_6 (sequence is synthesized)
ggggcttaaagtgccgcggttccagtagcacaaacatttccaagctcacagtccatagatacagggcgctcgcgttgaatgcaatggagaccacccgtctagaccctgaaactctgcaac

SEQ ID NO: 983643 - DNA, 120 bp, Artificial Sequence
  ENSG00000249421_7 (sequence is synthesized)
cccagaagccttgcgatcagattacagaccccagcattttcagagtaaaagtacgattatattaggggcgggggagggggaatcaaagtttggtgaccgcacttcattgttgaaaagaaa

SEQ ID NO: 983644 - DNA, 120 bp, Artificial Sequence
  ENSG00000249421_8 (sequence is synthesized)
accgatgcaaagactccagcacgagtaaacgatttctgaagtgtatgctagagcagagcgttgctatcaacttaggtacgttctaattttcctccaggtgctgtaaacgtacctttgcaa

SEQ ID NO: 983645 - DNA, 120 bp, Artificial Sequence
  ENSG00000249421_9 (sequence is synthesized)
agttgctgaatgcgtactatgaatagaaatactatggaattggaagatcaggagttttcctgacatataagatctgtggcaacctcaacaatttacaccgtattaacaaaacgtggtcat

SEQ ID NO: 983646 - DNA, 120 bp, Artificial Sequence
  ENSG00000249421_10 (sequence is synthesized)
gccaagctggtcatcctgtgatgatgtgtacgtcagtgtgggaagcatgcagattttttaatcttttttagagctccttttgccctgctgccaagggctacccatggtcatgtaggacct

SEQ ID NO: 983647 - DNA, 120 bp, Artificial Sequence
  ENSG00000249421_11 (sequence is synthesized)
tcatggtgtggtataatcttttgccaggctttacccagcccagaagaatagatttgaaagtagtgcagagactggctttcagactcctattatcagccttattggttttcatgttttgcc

SEQ ID NO: 983648 - DNA, 120 bp, Artificial Sequence
  ENSG00000249421_12 (sequence is synthesized)
aaatacagcctaagcagtgagagatgtattgagttcctcacaacagaacatgttgaaacataagctacacatttaattggaagaaggcaatatagacaggattcagcctttactgctttg

SEQ ID NO: 983649 - DNA, 120 bp, Artificial Sequence
  ENSG00000249421_13 (sequence is synthesized)
tgccagttgatcctgagattacgcatgtgttgaggaaatactaatcagaagtatgtcagtccttcttgcttcacaaagcttctgtatcactaaggtttatactggctttatctctgacta

SEQ ID NO: 983650 - DNA, 120 bp, Artificial Sequence
  ENSG00000249421_14 (sequence is synthesized)
ctctcattactttaaagtttccatcaaagtgtgtagtgtagtatcttgccagattctgccaaggagaatctttgaagtattttggtcttcttaggaacttactgatcatttacttaggag

SEQ ID NO: 983651 - DNA, 120 bp, Artificial Sequence
  ENSG00000249421_15 (sequence is synthesized)
agtgatgacagactgctctgttattcttcagtgctatctcactaactctgaataaagtgaaccactctggtggttttcatgttagatgatgataatgacagttggtttgcccaggatgat

SEQ ID NO: 983652 - DNA, 120 bp, Artificial Sequence
  ENSG00000249421_16 (sequence is synthesized)
agagagctctgcattctggcggtaattttcaatcttctgttctctgtcagccctaacaacccactcacttttcatacatttattcttacataacaagcaaaatacctgttataggtcaca

SEQ ID NO: 983653 - DNA, 120 bp, Artificial Sequence
  ENSG00000249421_17 (sequence is synthesized)
gttccttactacagactattataactgttaatgtattaggaaaatgacaaatagtcatgatatttgtaatagatattgcaggacatagaactaagtaaaagtagggcataagggaataag

SEQ ID NO: 983654 - DNA, 120 bp, Artificial Sequence
  ENSG00000249421_18 (sequence is synthesized)
tagtcatctctgtctgcatgggcaaaggatcatttcatggaggattgatttacaaagtgaaaaattggctacagttctccacatgaggatgagggccagaagctcagctattactgaggc

SEQ ID NO: 983655 - DNA, 120 bp, Artificial Sequence
  ENSG00000249421_19 (sequence is synthesized)
ctgagctttaccagcttcctctagaggcaaacagatggaggtcttgggcacaacaggttggggtgcctgagccgggtaataatactggcaagacagggtagattgtttaagtctcaagaa

SEQ ID NO: 983656 - DNA, 120 bp, Artificial Sequence
  ENSG00000249421_20 (sequence is synthesized)
ttatgcaagctagttgattaacatagccattattagagatcatattaaacttataattaagcaaattaaaaacaaaggtaataaatattcaaaacttataacttcccaatgattttaact

SEQ ID NO: 983657 - DNA, 120 bp, Artificial Sequence
  ENSG00000249421_21 (sequence is synthesized)
atactgtactctttgtatgcttgtgaggttatttctacttgactagagtaatagaaatactatataattctgtactactatgcatctttccaattcctcctatagtgacatcatgttgat

SEQ ID NO: 983658 - DNA, 120 bp, Artificial Sequence
  ENSG00000249421_22 (sequence is synthesized)
agcttgaaattggctatggagaggccaggaaaaatcatgccaggaaaaaatcagcaaactctacaaatcagctttttatttgttgttttgttgattggttgtctgggcctaagaaagtgg

SEQ ID NO: 983659 - DNA, 120 bp, Artificial Sequence
  ENSG00000249421_23 (sequence is synthesized)
tggagaaaatgttaataattcagattacacttaagtgtgctgtatctaaagtttttatattgtgagtagtacaaaaattgaaatatgctatatgtatttgaaaactgttgtctgattcag

SEQ ID NO: 983660 - DNA, 120 bp, Artificial Sequence
  ENSG00000249421_24 (sequence is synthesized)
ttgccattaatgagtgaagttctaacatacgtcactgttcattttcatcatacccataaatataactgaaaatattaacattcatgtcagaaactacagttgcttatgaactatattttt

SEQ ID NO: 983661 - DNA, 120 bp, Artificial Sequence
  ENSG00000249421_25 (sequence is synthesized)
gttccagatacatcagtttggcaaaaatcaacaaaaaatctgttagaattcattggcaatatggaatttacaagaaagggtaatgcatatgttgttacttataaattatgtgctgtgcac

SEQ ID NO: 983662 - DNA, 120 bp, Artificial Sequence
  ENSG00000260198_0 (sequence is synthesized)
atgcttccctgggtaaaatactggcctctccagactttatttttctcatctttaaaatgggttgattcttatttggcctatccctgaccaaaaaaaataatattttttaaaatataaact

SEQ ID NO: 983663 - DNA, 120 bp, Artificial Sequence
  ENSG00000260198_1 (sequence is synthesized)
tttacacaaatcgatctgaaaatcagcatcctgctcccacttggctctggtgcccttgatggagctgaagtctgtctgggtggttcctgagttttctcagattccttcagggctgccagt

SEQ ID NO: 983664 - DNA, 120 bp, Artificial Sequence
  ENSG00000260198_2 (sequence is synthesized)
tgaaccaccaatgtgtggagttttacttaagcctcattttataaatcagaccatttgacttgtctcccactaacttgtcaaagttccagcgagcaagttttagttccagaagccagatgc

SEQ ID NO: 983665 - DNA, 120 bp, Artificial Sequence
  ENSG00000260198_3 (sequence is synthesized)
ttgccactgccagctccctgaggtgggcgttctcaccagccccattccctgctgagcagccacgggcccatctcccagcccagggcaaggccacatttcctcagacctctgagagctctg

SEQ ID NO: 983666 - DNA, 120 bp, Artificial Sequence
  ENSG00000260198_4 (sequence is synthesized)
aagtcagcctgtgtggctggggtggatacaggccagctgaagtggacagaggataccggtgaacaataaaaataacagatagctatggcagtcagtggaacacagctaaaccattctgcc

SEQ ID NO: 983667 - DNA, 120 bp, Artificial Sequence
  ENSG00000260198_5 (sequence is synthesized)
cggcggagtggctcagtcagagtgccagatgtgggtgattcataagcgtagtggccatcatgttgaattgttactattgtcactgagtgtgctgagcacctgactgcactaacttgttta

SEQ ID NO: 983668 - DNA, 120 bp, Artificial Sequence
  ENSG00000260198_6 (sequence is synthesized)
gaactcagccgtctgtgaggtgcacactgtcaccacccccaatttacagacgaagatactgagaccctaataggcctgctcccaaatgactgctcacagcgttactcccttgatgtggag

SEQ ID NO: 983669 - DNA, 120 bp, Artificial Sequence
  ENSG00000260198_7 (sequence is synthesized)
gtgaacagtcttctctgatctacagctcacaatctacttcagccccactgtcaccctctccccacttgtgtgccgtgttcagtcctcagggaccccagaaccagcccaagcagactaagg

SEQ ID NO: 983670 - DNA, 120 bp, Artificial Sequence
  ENSG00000260198_8 (sequence is synthesized)
ttccctgggttctagaatcttgatagctcaaaccactggcctctccctgaagggtttcgacacacccccccaccacccacctcctctctagcctctgcttcccagccagccctacctcct

SEQ ID NO: 983671 - DNA, 120 bp, Artificial Sequence
  ENSG00000260198_9 (sequence is synthesized)
tcccaggatccaccagctaagccaccagtgaccctggaacagtgaactagccccgcctctctgtgcctcagtttcccaacttgtatgatgagggagcatagacagaagcagttctatggg

SEQ ID NO: 983672 - DNA, 120 bp, Artificial Sequence
  ENSG00000260198_10 (sequence is synthesized)
cccctccagctcagacattctccaaacccccatcatctctcatttgacaactgcagtggcctccttggagtgctccctggagccactcttccaggcctcccagccccatctggctataca

SEQ ID NO: 983673 - DNA, 120 bp, Artificial Sequence
  ENSG00000260198_11 (sequence is synthesized)
cagcagccagcatgagcttttgaaacaatattatttcattcccacctttaaaaccctccgtgacttcctaccacacatagaataaaagccaaactccttcccatggccaacagtacccta

SEQ ID NO: 983674 - DNA, 120 bp, Artificial Sequence
  ENSG00000260198_12 (sequence is synthesized)
catgactgggggtcacgcccgggctccctcttctcagaaggtgctttgaacacagccagcccgccagcccctggctgctaggagctgctgccgtgttgccaataccatcactgtgtgtat

SEQ ID NO: 983675 - DNA, 120 bp, Artificial Sequence
  ENSG00000260198_13 (sequence is synthesized)
tgatttctcacccaactggtgtccttaacttcatatttatggcttgccctgacatttcccttctcttacatgttccaaattattaaaaacagctgctttataattaattgagcaaatcac

SEQ ID NO: 983676 - DNA, 120 bp, Artificial Sequence
  ENSG00000260194_0 (sequence is synthesized)
caagtaggaaacggaagatcactgctcactgtctgcatatagactctggcctcgtttctcaaagccagaggcacctacacaaagaatgtctgtcaatccagagtggcgaagaaccaactg

SEQ ID NO: 983677 - DNA, 120 bp, Artificial Sequence
  ENSG00000260194_1 (sequence is synthesized)
tactggtttttaacatttccctgtgggaacgaaacctagcaaattaatgatatcctctgcaatggagtacggagaaaatccacttttccattcttacttgccacagagcttgggagaatc

SEQ ID NO: 983678 - DNA, 120 bp, Artificial Sequence
  ENSG00000260194_2 (sequence is synthesized)
cagccaattaatggtacaatctctattagaggtaaaatgaaggagttgcagtgtgagggcagatgtgatgtctatggagctacaaccatcctgcaaccagaaggaaagaggctaaagttt

SEQ ID NO: 983679 - DNA, 120 bp, Artificial Sequence
  ENSG00000260194_3 (sequence is synthesized)
taagaatagagccaactgagagggcttatgagcagtgagatggatcttggtgacatagttaatacctggatcaagctatgcctgaagctagttaaccatgtacttttcaattacaccaac

SEQ ID NO: 983680 - DNA, 120 bp, Artificial Sequence
  ENSG00000260194_4 (sequence is synthesized)
caacaaactctttttacgtaagtcaatttaagttgggttttctgttccttataaatagaagaacactgagggatacctagattcactatgtagatgctggtttataggctaagtctctga

SEQ ID NO: 983681 - DNA, 120 bp, Artificial Sequence
  ENSG00000260194_5 (sequence is synthesized)
ttgagaggcctaccttctcctgcaacacagatacatggtactgtaaaaattgtgccatcttgaagatgacaagtagacactagcagaagtcctttaatagctgatcccttttgtaacctc

SEQ ID NO: 983682 - DNA, 85 bp, Artificial Sequence
  ENSG00000260196_0 (sequence is synthesized)
ttttttgttgttgttgttgttgcgataaggtctcgctgtatatcctcctgccttgggctcccaaagtgctaggattacaggcatg

SEQ ID NO: 983683 - DNA, 120 bp, Artificial Sequence
  ENSG00000260196_1 (sequence is synthesized)
catgagccactgtgcctggcctagtattggtcattagtattagtaatcattcctaaatgtatatgtaaacatttatttcagtgttaaatattgaagtgtttggtctttatttagaagttt

SEQ ID NO: 983684 - DNA, 120 bp, Artificial Sequence
  ENSG00000260196_2 (sequence is synthesized)
gatgttgtgttttatgaccagaaatatgctgtgaacttaattctttcttatagcagttagcctatgggaaaattggttttgttctacattattttatttaaagtcataatttccaagatc

SEQ ID NO: 983685 - DNA, 120 bp, Artificial Sequence
  ENSG00000260196_3 (sequence is synthesized)
ctatcaactccattaagtgaggacttactgtactgtagcctgaggctcatcttagtcttccctcatcccccctgcctttccttcacagtcagcctgcatggtggtctgaggccttccccc

SEQ ID NO: 983686 - DNA, 120 bp, Artificial Sequence
  ENSG00000260196_4 (sequence is synthesized)
ctacagcctctcccctttatctttcacggtaatcacccctcattactcgtacttctaactccatcttgaaagctgcttcctggaagatccaaacggacacaaggagggactgaaggatta

SEQ ID NO: 983687 - DNA, 120 bp, Artificial Sequence
  ENSG00000260196_5 (sequence is synthesized)
gaatgagggaagtaacccatgcactgcttatttgagatggggaaccgaaggactttggcagttcctacacagagacagatggcagagatgacaaggtttctcagagaatgcgtgagtaac

SEQ ID NO: 983688 - DNA, 120 bp, Artificial Sequence
  ENSG00000260196_6 (sequence is synthesized)
tggaatggcttttcctgatgacccagacagcctgctcaagagcacactgttgcagctgccctccttggatggaactatggaatgatttttattcttctacttcccaggtgaatgggaaac

SEQ ID NO: 983689 - DNA, 120 bp, Artificial Sequence
  ENSG00000260196_7 (sequence is synthesized)
caaggacacagtcagcatttaacaaaaaggaatctgcatctcagtcagaactgtattgcatttgcttctctctggattaccttgaagttactccccttccctcaataataatggcattat

SEQ ID NO: 983690 - DNA, 120 bp, Artificial Sequence
  ENSG00000260196_8 (sequence is synthesized)
gaaaaaaattggaattgatcaaatgaagtaaagagtaaacagaggaaagactacccaaagtctgttttgcttcagttcggggctgatgatctggggaggaggaggttgggacatatttgt

SEQ ID NO: 983691 - DNA, 120 bp, Artificial Sequence
  ENSG00000260196_9 (sequence is synthesized)
gctgcaaggaacaatattgtttcatgcaggggaggtgcatgactaacaaaagggttaactggatcctataagctatagacagcttctaggcagtgccaacctgtgctgcatacctgaaca

SEQ ID NO: 983692 - DNA, 120 bp, Artificial Sequence
  ENSG00000260196_10 (sequence is synthesized)
ttgttgcttcccccacggaaggtaataagctgtggagctgcacaggcattttgtattactcgtttcactcattggccttggtgcctgccagaaattgaggtcgggggaaaggcagaagtt

SEQ ID NO: 983693 - DNA, 120 bp, Artificial Sequence
  ENSG00000260196_11 (sequence is synthesized)
cacactcctggacccagtttggccagtccaggcagcctgctcttcacatcactccagagttggacctgcccagagtggaactagaatagggtgtgggtagcacctgcttcccctcccata

SEQ ID NO: 983694 - DNA, 120 bp, Artificial Sequence
  ENSG00000260196_12 (sequence is synthesized)
tagtgccctagacgggtagctctggcagaggggctgccaataacccagaatccagcacaacgaaaggcacttctggcccagctctgactaaccccactgttcttcctttccccagcttct

SEQ ID NO: 983695 - DNA, 120 bp, Artificial Sequence
  ENSG00000260196_13 (sequence is synthesized)
ttcaagctggaatcaatctgttgttcttcggacctgaggtcaacatgactttgatgaacggaattcatgtcttcttgctaaagttatctggacacttggtacaacacagagtgtctgata

SEQ ID NO: 983696 - DNA, 120 bp, Artificial Sequence
  ENSG00000260196_14 (sequence is synthesized)
tctgggcctggggagacctcagaggccctggggagcccagagacttgtggagtgtcagggcagctctcctgctgtgaatgcaagctccctgggaaagttctccctagaaaaagatgtggg

SEQ ID NO: 983697 - DNA, 120 bp, Artificial Sequence
  ENSG00000260196_15 (sequence is synthesized)
ggaggagctcaggtgaaggacagagcctcctgcccgtggagagaaagtgggccctggagaagctgcatgagtcctctccagcagaagggccagaggtgcacattagtggggctcgggtgg

SEQ ID NO: 983698 - DNA, 120 bp, Artificial Sequence
  ENSG00000260196_16 (sequence is synthesized)
gtctcatggtgacattggctggagatgccaaatccacaggcgttaggcctgggcaggttctagtgtgcgagtgggctagtttttctagactagcacacaggaagagggtggcctggcttg

SEQ ID NO: 983699 - DNA, 120 bp, Artificial Sequence
  ENSG00000260196_17 (sequence is synthesized)
ccttccctctgaagctcaggactgaggcccaggacatgtctcacaccattgatatgagttggggacagatgggtggcagatgtgcccaatcaggctgcattgacacctgactggctggaa

SEQ ID NO: 983700 - DNA, 120 bp, Artificial Sequence
  ENSG00000260196_18 (sequence is synthesized)
gaagagcctgtaaagcaaagagcccagtcttcctgtaagaaggaagaagatggagggctcatcatgcacgtgggccagaaaaagtgccagtgaggttgttctgactccataggtgttctg

SEQ ID NO: 983701 - DNA, 120 bp, Artificial Sequence
  ENSG00000260196_19 (sequence is synthesized)
gacataatctaggctgtcacaaaacagccaagcctgctgccagtttccaatctgggatctcagggaggcccaggggcttgctgagttccaccttccctctttcccttggtttggagacaa

SEQ ID NO: 983702 - DNA, 120 bp, Artificial Sequence
  ENSG00000260196_20 (sequence is synthesized)
ctttctccctgtggtgaatgtgacacttagaacaaggtgcagccctactaaaagctggagcttaggtcactgggactgtgtgctaggggaaagagggggagggaagagcagggctgtggc

SEQ ID NO: 983703 - DNA, 120 bp, Artificial Sequence
  ENSG00000260196_21 (sequence is synthesized)
attagacagactttggctgaaatcttggacctgcctcctactagctgtgagatcttagcaaattacttcctgctataggctaaatgtctgtgtccccctaaaatgcacatgttaaatcct

SEQ ID NO: 983704 - DNA, 120 bp, Artificial Sequence
  ENSG00000260196_22 (sequence is synthesized)
gatgcccaaggtgatggtatttggaagcggggcctttgggaggtgatgagggtggaatcctcatgaatgggattagtacccttatgtaacaaggccccagagagctccctcacaccttcc

SEQ ID NO: 983705 - DNA, 120 bp, Artificial Sequence
  ENSG00000260196_23 (sequence is synthesized)
accatgtaagattacaggggaaagacaggcccttcagcagacactgaatccactggcaccttgatcttggacttcctagcctccagactgtgagtaataaatgtctattgtttataagcc

SEQ ID NO: 983706 - DNA, 77 bp, Artificial Sequence
  ENSG00000260197_0 (sequence is synthesized)
catggctaagtgcccgggttcgtcctactcaaactgaacactagtcgcagggtcccacgcaccgcatggcccaagtt

SEQ ID NO: 983707 - DNA, 120 bp, Artificial Sequence
  ENSG00000260197_1 (sequence is synthesized)
tggaatctgtgaggccaagaaccccagatgagagaacaaaaaccttgcctccatcttgggcgtggcccacctccatcttgggagctctaagaacaaagacctactgataacgttaggtcc

SEQ ID NO: 983708 - DNA, 120 bp, Artificial Sequence
  ENSG00000260197_2 (sequence is synthesized)
ttaggtcctcattaaatgtttggtaaaatttactcatgaagtcaccaggctttgctttagtggaagacttgtattgctaattctgtctccttatgtatatatgatctgttcagattttct

SEQ ID NO: 983709 - DNA, 120 bp, Artificial Sequence
  ENSG00000260197_3 (sequence is synthesized)
atttttttctgatttagttggtagattttgcttgtctatgcaattacccatttcttgaggattttccaatgtaggagcatataattgttcatagtagtctcttacgattctttgtgtttt

SEQ ID NO: 983710 - DNA, 120 bp, Artificial Sequence
  ENSG00000260197_4 (sequence is synthesized)
tgtggtatcaattgtaatgtcttctcttttgaattgtgttcgagacatcttttttcttctttttaagttagtctggctaacgtacgctgttttgtcatctcagtgaaccaatgcttagtt

SEQ ID NO: 983711 - DNA, 120 bp, Artificial Sequence
  ENSG00000260197_5 (sequence is synthesized)
gcttagttgcattgatcttttctgttgtctttctgctccctatttgtgtatttctgtgctttcttactttcttccttctactgattttcggttgttttggtttttcttttttatattctt

SEQ ID NO: 983712 - DNA, 120 bp, Artificial Sequence
  ENSG00000260197_6 (sequence is synthesized)
gagatgtaacagtaacttatctatttgatatctttttggatgtaggtatttattgctataaacttccctcttggaactgctttttcttcattctttaaattctgatgtggttttatagta

SEQ ID NO: 983713 - DNA, 120 bp, Artificial Sequence
  ENSG00000260197_7 (sequence is synthesized)
ttcatctcataagacttaccttttacagttaaaatgttctaatttaagctgatagtaccttaattttattacctcatgaagactcttcatttgtttcatattttatatgttctgctgttg

SEQ ID NO: 983714 - DNA, 120 bp, Artificial Sequence
  ENSG00000260197_8 (sequence is synthesized)
aagggaaaattctattatctggtaggtatatctagtctaaagtgttgttctaattcactaattcaatagaactgttggttctattgaaatgtcccattgttactaaatggaagttcgtag

SEQ ID NO: 983715 - DNA, 120 bp, Artificial Sequence
  ENSG00000260197_9 (sequence is synthesized)
aatctttccaatctattacatcgttatatatataggtatgctgatgaagggagtgtgcatttttacaattggtacagaattttaattaactgaccctattatcataataatattccccca

SEQ ID NO: 983716 - DNA, 120 bp, Artificial Sequence
  ENSG00000260197_10 (sequence is synthesized)
cgctctttacaggttttgactggaagcctttttttctgatatgagcatagcaacatctcctcttttgcttggaatagcttttttaatcagcttttttaaaaaatagcttttttaaacatt

SEQ ID NO: 983717 - DNA, 120 bp, Artificial Sequence
  ENSG00000260197_11 (sequence is synthesized)
tcaacatttgcttggaatagcttttttaatctctttactctcagtctctgtgtgttgttaagtctaatgtgagtgtctcgttagtggcgccatattgtttaatattttttgttctttttt

SEQ ID NO: 983718 - DNA, 120 bp, Artificial Sequence
  ENSG00000260197_12 (sequence is synthesized)
ttttaatctaacttgactttctgtgtcttttgattgaagaatccatgtagttaacaacttactacttgcattttgttaatttttgactgactgttttgttctcttctacactttcagtct

SEQ ID NO: 983719 - DNA, 120 bp, Artificial Sequence
  ENSG00000260197_13 (sequence is synthesized)
ttgtttttgattagttgtgttttatcagtggtatatttttgtctcttgtgtaactactagagattttttttctattacctagcatggttcttatgtaaaacatcttgtattctaatttaa

SEQ ID NO: 983720 - DNA, 120 bp, Artificial Sequence
  ENSG00000260197_14 (sequence is synthesized)
gctgatagtacgttaattactatatgaagactctaccttttcatttcccaccttttatgttattaatattatactatgcaactatttgtattgggtatccactaaggagttctgtatagt

SEQ ID NO: 983721 - DNA, 120 bp, Artificial Sequence
  ENSG00000260197_15 (sequence is synthesized)
ttgttattaatacatctcttatttatatttgtatactaattttaatagtaatttaaacattacttttagagtaggagagaatactgtattgactgttcatttaactttactggagagcca

SEQ ID NO: 983722 - DNA, 120 bp, Artificial Sequence
  ENSG00000260197_16 (sequence is synthesized)
gccatatgttttgttattattatttatcatgctcttgtttcacatggaaaaactctttagacatttcttgttaagtcttgtctgatggtgacaaattctcaaattttgtttgtgttaaaa

SEQ ID NO: 983723 - DNA, 120 bp, Artificial Sequence
  ENSG00000260197_17 (sequence is synthesized)
tgtacttacctgtttttttattgctgaaatacagctttgcagtttagagtatttttaataagcttttttaaattttattttagcactttcaacatgtcatcccactttctactcacttgc

SEQ ID NO: 983724 - DNA, 120 bp, Artificial Sequence
  ENSG00000260197_18 (sequence is synthesized)
aagtattttgttaagaagtttcctgatagccttacctagaagacccctttgagtttatcctcttgctgctttcaagattcttttcatctttgatatttacaatttgattaatgtgtcttg

SEQ ID NO: 983725 - DNA, 120 bp, Artificial Sequence
  ENSG00000260197_19 (sequence is synthesized)
gagtattctcttttaaattgatcctaattgtggcattttgaatttcttgagttcatatcccgcctagaattcgggaagtgtttgtacagtacatatttaaataagcttcctggtcttctt

SEQ ID NO: 983726 - DNA, 120 bp, Artificial Sequence
  ENSG00000260197_20 (sequence is synthesized)
tctctcctcttttgggtacactcataattgttatatttatgcatggatgtggtgccacagatcacttttaaccttttcctctttttttttttcccaatcatttgttgttgttgttcctct

SEQ ID NO: 983727 - DNA, 120 bp, Artificial Sequence
  ENSG00000260197_21 (sequence is synthesized)
aattggctaattttcatctgactgctatttgagcttgtcagttctttcttctgcatgatcagctatgctgttgtaactattgaaattttaaatctaatattaaattgtaaatatttaaaa

SEQ ID NO: 983728 - DNA, 120 bp, Artificial Sequence
  ENSG00000260190_0 (sequence is synthesized)
gtgggagtggtggctacaggaacccatcagagccaaacttggggccagaaagtccctcacagctcagtgcggctgtattgagggtgggaccacccccattagctttcctcccctgtcctc

SEQ ID NO: 983729 - DNA, 120 bp, Artificial Sequence
  ENSG00000260190_1 (sequence is synthesized)
ctgccacatagactccaacgcggcccagtcaagggcatgtcactgtctgaactgacagtgagtgagcccagcaaccaaacccagcgtggggagcttgggaagcacccacatggggtggct

SEQ ID NO: 983730 - DNA, 120 bp, Artificial Sequence
  ENSG00000260190_2 (sequence is synthesized)
gtggatgccgggctcagctcacatgcagacacatgggtctaatgatcacaccatggacgtggggaactgcagaccagccttgggtcccagaccaaagaccagcagctctgaagacaggag

SEQ ID NO: 983731 - DNA, 120 bp, Artificial Sequence
  ENSG00000260190_3 (sequence is synthesized)
ccaggaccaagtgcctgctaaccaaagatactcatgcgggcaggaacaatgtgggcccaaccttcacaggaccaagtgcctgctaaccagacttcaacatttcccacaggattcaaacat

SEQ ID NO: 983732 - DNA, 120 bp, Artificial Sequence
  ENSG00000260190_4 (sequence is synthesized)
gacccagatctcataaagtcatattcaaaatgtctagaatatagcccaaaattgcttgacacacgaagaaccacaacatttcaacttgcagctgggcaccgcggctcacacctgaaaccc

SEQ ID NO: 983733 - DNA, 88 bp, Artificial Sequence
  ENSG00000260190_5 (sequence is synthesized)
tcaacttgcagctgggcaccgcggctcacacctgaaaccctagttccctgggaggccacggctgcagggagcaatcaccgggccgttc

SEQ ID NO: 983734 - DNA, 120 bp, Artificial Sequence
  ENSG00000260192_0 (sequence is synthesized)
tggttagggatatttatacgttgggtattagtaggatggaagtgatgaagggagagaggccaattaggccatgattgctctgaggatgggaagtacgtgaatgtggaatcttggggcaat

SEQ ID NO: 983735 - DNA, 120 bp, Artificial Sequence
  ENSG00000260192_1 (sequence is synthesized)
agaacggacagaacgtagtgtagcaaagcttctctccataacgttcctctggccaagtgagaaacatgaagattagaagtgcagcacatgccttctgaagaagccaggcatggaacagtt

SEQ ID NO: 983736 - DNA, 120 bp, Artificial Sequence
  ENSG00000260192_2 (sequence is synthesized)
ctgggaacacagcactgataaaactcttagggatgaatttacctatacctgtgtttcagccttgtgatctgatggaagctgaggaatgatgaagacaatggaatcaaaggcaattgatcc

SEQ ID NO: 983737 - DNA, 120 bp, Artificial Sequence
  ENSG00000260192_3 (sequence is synthesized)
cgccacatttgaagaaccacaaaaggaggctgagtgagctgaaagaaatacacaagtggatcagcaacatgacagctgctgcagtgaaatctggattgtaatatgtcagtttccaaccca

SEQ ID NO: 983738 - DNA, 120 bp, Artificial Sequence
  ENSG00000260192_4 (sequence is synthesized)
tcacatacaatccagacagagacatagctttttgtctgcctcgttgtgatttccctgtctggtgcggtttgggtcacatctgttggctgcattctcatcttcatgagatctgcattgact

SEQ ID NO: 983739 - DNA, 120 bp, Artificial Sequence
  ENSG00000260192_5 (sequence is synthesized)
gatagtttaaaccccatgtttatctatgtctgcggctcttatttctctcacagggaagtctccagagaagcccagtatcccctgatgtgagaatcttgcttggttttattaatcaacagc

SEQ ID NO: 983740 - DNA, 120 bp, Artificial Sequence
  ENSG00000260192_6 (sequence is synthesized)
ttcctgaatatatcacactgatttaaaacagaacttctcacgatgaacaacccaagctcactgtttctttgacttttgcatattttctactcgtgcattattctgtcatttcatgataaa

SEQ ID NO: 983741 - DNA, 120 bp, Artificial Sequence
  ENSG00000260192_7 (sequence is synthesized)
atgattgaaaaacactgctttaaccctccaaacttggctagtggctatataaggatttaaacttcagcatgcctgtctatgctcaagccttggaaatccttttgcatttcaaccattgct

SEQ ID NO: 983742 - DNA, 120 bp, Artificial Sequence
  ENSG00000260192_8 (sequence is synthesized)
aatgtttcatatctgcacattgaatctaacccttgatttcttttgtagacatatgtaatctgaaggcatgcaacattttgcaaatgttggcccatatttttatttcataaggtcttattt

SEQ ID NO: 983743 - DNA, 120 bp, Artificial Sequence
  ENSG00000260192_9 (sequence is synthesized)
ggtctgtcgaccaagttttgattacttccatattgctcttaattgccttaatatccccaaagactttcctattctgtgcatccctttatctttgcttcttttatctcttgctgtgagagt

SEQ ID NO: 983744 - DNA, 120 bp, Artificial Sequence
  ENSG00000260192_10 (sequence is synthesized)
acaaaattgctgacatattcaatgtatttaaattctgagtgttgcagaagagttttcaaatctgttttaattttctgatactcagctgaggaccattacacattctgttcagctaatctg

SEQ ID NO: 983745 - DNA, 120 bp, Artificial Sequence
  ENSG00000260192_11 (sequence is synthesized)
tttttaatcatatctgtaaatgctaaagttgtacatgagagaaatgatgcataaagtaaaaccagaccaagtgtactttcgcatatgtaaaactaaattcttactttcttccacttacaa

SEQ ID NO: 983746 - DNA, 120 bp, Artificial Sequence
  ENSG00000260192_12 (sequence is synthesized)
attcttgttgatggtggtccgcacataggaggtggcaggcttccgctggctggatctccgcttcatgaccaccacacctctgctgtcggctgcaggctccacgcccacagtcttgcggtg

SEQ ID NO: 983747 - DNA, 120 bp, Artificial Sequence
  ENSG00000260192_13 (sequence is synthesized)
aatcagccctttttagcgaaggagttgcgggccttcaagttattgggctctgtgctgtctgtctacttcttcctcttgatcaggaaactggagcagttcctcacgaccatccattgcaga

SEQ ID NO: 983748 - DNA, 120 bp, Artificial Sequence
  ENSG00000260192_14 (sequence is synthesized)
tgcgcagacatggcggcggcttctctcgcagcggcctcaggggcaatttaaaaggtccgcgctgcgtttatgagctgtaacacgcaccaccgagaaggtctgcagcttcactgcagaagc

SEQ ID NO: 983749 - DNA, 120 bp, Artificial Sequence
  ENSG00000260192_15 (sequence is synthesized)
cagtgagaccacaaacctaccgaaagtaagaaactctggacacatgtgaacatctgagggaacaaactccggacacaccatctttcagaactgtaacactcaccgcgagcgtcggcggct

SEQ ID NO: 983750 - DNA, 120 bp, Artificial Sequence
  ENSG00000260192_16 (sequence is synthesized)
tcagcgagaccaagaacccaccaattccgaacactctccctctgatgaagtacctcaaaagctaagctcccatcaatcctggagagatagaatcagcagagcatagtggcagaatgaatg

SEQ ID NO: 983751 - DNA, 120 bp, Artificial Sequence
  ENSG00000260192_17 (sequence is synthesized)
gcagaatgaatggtttaaaaggaacagcagcgaccaaagaactttttatgcagagaaaccccaaatctggggcaaagccctcctgttcattttatctcacacaagggcattgttgatcca

SEQ ID NO: 983752 - DNA, 120 bp, Artificial Sequence
  ENSG00000260192_18 (sequence is synthesized)
accatagtcgccgctagagacaaaactacatacactgacccagatacggttcttccccagaccaagtgaccccagctgcagccggagtgctcacagtaaactgaaattacatgaatgaca

SEQ ID NO: 983753 - DNA, 120 bp, Artificial Sequence
  ENSG00000260192_19 (sequence is synthesized)
cccagggaaagacgcttgtattataaagaggctacatttctatttggtttactgatgtattaatttttcaaagtttggaatctcttcaaatacaaggtaaatgcattttctaagaatttg

SEQ ID NO: 983754 - DNA, 120 bp, Artificial Sequence
  ENSG00000260192_20 (sequence is synthesized)
gcccagtggcactcgtctggatgtgataacctgtttttcctgtatcatgatttaacttaaactactcttgtaagtgactgattctgtatcttcaagttacattcatacatcctgtgactg

SEQ ID NO: 983755 - DNA, 120 bp, Artificial Sequence
  ENSG00000260192_21 (sequence is synthesized)
gatattgacgaattcagtaggtgccacaggcatatcttgcttgtctgaaaggaaagttaattttatactaagatgccaccattaaaatagataatgaaagcattgttaggatttaccaga

SEQ ID NO: 983756 - DNA, 120 bp, Artificial Sequence
  ENSG00000260192_22 (sequence is synthesized)
ttagctaaagcaacaaaacatcagattgtaactagatgacctcggggaaaaacacaggatgtatatttccacaaaacatcccgcatcatttgacatattcaaagtaaaggtaagccatgt

SEQ ID NO: 983757 - DNA, 120 bp, Artificial Sequence
  ENSG00000260192_23 (sequence is synthesized)
attttggcctttatgttgttcacagaagagttctttgcacactggatatacattggaattcatcttccttttcttcttagtatgttagaatatctatgtcttcaaaagggtcagcctcaa

SEQ ID NO: 983758 - DNA, 120 bp, Artificial Sequence
  ENSG00000260192_24 (sequence is synthesized)
atgagtgagccaaaggcacttacatgcagaccagtacttattagaaagaactgagaaatgaaacataaactgataagtgagtgcaagtcattcatctttttaaagcccataaaaagagaa

SEQ ID NO: 983759 - DNA, 120 bp, Artificial Sequence
  ENSG00000260192_25 (sequence is synthesized)
gttcttataaatactttaattacactgaagctttatcagcagggagccatgggaagtatgtagggccctggataaacatttttaaaagcaagaactattcaagttacacaaaagacagga

SEQ ID NO: 983760 - DNA, 120 bp, Artificial Sequence
  ENSG00000260192_26 (sequence is synthesized)
cagtcataacaacagcagcaacgacaaccacaacaaactggggaagctgtactttttaggagaggaggattgaattgtttttcttttctttttatgtcccactgttgttttggggaaaat

SEQ ID NO: 983761 - DNA, 120 bp, Artificial Sequence
  ENSG00000260192_27 (sequence is synthesized)
acctaaaaaatgggaaagatgaagcctgagcaaccgaaggtaccgaagaattttaagtagtgtcttaggagaaaattaaaaggaaacctgattaacagtggttcagagacattgaaactc

SEQ ID NO: 983762 - DNA, 120 bp, Artificial Sequence
  ENSG00000260192_28 (sequence is synthesized)
ttgagatctgataccacaaatgccttaatgtggctggcattcatgagaaggtatgcaactattgttgaaatatgaagaactcagaatgtcaagagagaagaggaggctatataagcaata

SEQ ID NO: 983763 - DNA, 120 bp, Artificial Sequence
  ENSG00000260192_29 (sequence is synthesized)
ggactgggatatgtgtgcattccgagtgcctggagtggcgaagatggggaagagaaaggatacagatggagttcgaatggatctggcatggaacagttctgggaacacagcactgataaa

SEQ ID NO: 983764 - DNA, 120 bp, Artificial Sequence
  ENSG00000260192_30 (sequence is synthesized)
actcttagggatgaatttacctatacctgtgtttcagccttgtgatctgggtttggcacgatgaaatgctactttcagaaagatgagtatgtcagaatccctggtgatttctaacgctta

SEQ ID NO: 983765 - DNA, 120 bp, Artificial Sequence
  ENSG00000260192_31 (sequence is synthesized)
tggaacacatcacataggagcaatttagatgacaaaaaagagcactcttcagtctggatttacactgtgttcctattcaccgacacatcagcaaacattataaatgccttgcctgagtaa

SEQ ID NO: 983766 - DNA, 120 bp, Artificial Sequence
  ENSG00000260192_32 (sequence is synthesized)
tcttagggatgaatttacctatacctgtgtttcagccttgtgatctgattccacaggatgcgagcatatgcagtggaaacattgtgttattccatcctcagaagaaaagagacagtatta

SEQ ID NO: 983767 - DNA, 120 bp, Artificial Sequence
  ENSG00000260192_33 (sequence is synthesized)
tacttcgtctcttgctagtacagaactaccacagaaacataccaggaaagctgagagaatccacagatcctttgaaggaagtggcttgctgttgcaggctccttgagacagccaaaaact

SEQ ID NO: 983768 - DNA, 120 bp, Artificial Sequence
  ENSG00000260192_34 (sequence is synthesized)
gacctccagtacaattttcaggagaagtggcaagaatggacatccacctcccaccatgtgatgacatggccagttaaaaggaaatgatctgactgttctgcatctgctagtgattgaagg

SEQ ID NO: 983769 - DNA, 120 bp, Artificial Sequence
  ENSG00000260192_35 (sequence is synthesized)
caaatgggaagcagtgcgcaagttcccgttcaagaaatatatagtgaacacggctattgtgaagttcaggatctccaatgtgtaagcagtgaaaagaatctacgcatccaagaagtatcc

SEQ ID NO: 983770 - DNA, 120 bp, Artificial Sequence
  ENSG00000260192_36 (sequence is synthesized)
tgctcacccctaggaagtttgctcttcttttaaggctttaataaaagctaaccctttctttcacttcccttagcatgatagatatttctttcatttcccttagcctgatagattatttcc

SEQ ID NO: 983771 - DNA, 120 bp, Artificial Sequence
  ENSG00000260192_37 (sequence is synthesized)
agtgtaatatatcaaatatgaagtgttaaaaacattaacttaataggtaggaacaatgaattcatagtaagaagcataagaaccatcttcactgaaaggatttggtcacaagggccaaag

SEQ ID NO: 983772 - DNA, 120 bp, Artificial Sequence
  ENSG00000260192_38 (sequence is synthesized)
tgaaaggatttggtcacaagggccaaagaagccaggaaaggtggttctcgggcttcatacttggggaggtgctactgatatggacaggaggcaaggaaatactgggtagaagagggcagt

SEQ ID NO: 983773 - DNA, 120 bp, Artificial Sequence
  ENSG00000260192_39 (sequence is synthesized)
ctggatacctgcagccctacatgagaacaggcattcctgtttttgcacccccaaagttgccttttggcccaccatgccctctatcctgcacgcatataaaccccaaaccccaagctccag

SEQ ID NO: 983774 - DNA, 120 bp, Artificial Sequence
  ENSG00000260192_40 (sequence is synthesized)
aagcagaccagcaggtgaggagatgaggaaagcaagcagacggacagtggaacaacgtggcagagaaagagggaagaggagggacattcagatgcctagaggagttcggctggggccaga

SEQ ID NO: 983775 - DNA, 120 bp, Artificial Sequence
  ENSG00000260192_41 (sequence is synthesized)
gaggagtccggccgctgggcagcccggctccagaagaagatcaccttcccttccagctccccatccatcttgctgaaagccatttccaccactcaataaaacctcgcatacatccttcaa

SEQ ID NO: 983776 - DNA, 65 bp, Artificial Sequence
  ENSG00000260192_42 (sequence is synthesized)
ctatgccctctgatgaagtacctcaaaagctaagctcccatcaatcctggagagatagaatcagc

SEQ ID NO: 983777 - DNA, 120 bp, Artificial Sequence; identical to SEQ ID NO: 813760
  ENSG00000260192_43 (sequence is synthesized)

SEQ ID NO: 983778 - DNA, 120 bp, Artificial Sequence; identical to SEQ ID NO: 813761
  ENSG00000260192_44 (sequence is synthesized)

SEQ ID NO: 983779 - DNA, 120 bp, Artificial Sequence; identical to SEQ ID NO: 813762
  ENSG00000260192_45 (sequence is synthesized)

SEQ ID NO: 983780 - DNA, 120 bp, Artificial Sequence; identical to SEQ ID NO: 813763
  ENSG00000260192_46 (sequence is synthesized)

SEQ ID NO: 983781 - DNA, 120 bp, Artificial Sequence; identical to SEQ ID NO: 813764
  ENSG00000260192_47 (sequence is synthesized)

SEQ ID NO: 983782 - DNA, 120 bp, Artificial Sequence
  ENSG00000260192_48 (sequence is synthesized)
atttacaaacatatatttttaggatggatacatgtaccagaaatacattattgtgtgccctctaaggtgttattagtaacaatggtaattagagggaacaaaagctgggaaaataaaatt

SEQ ID NO: 983783 - DNA, 120 bp, Artificial Sequence
  ENSG00000260192_49 (sequence is synthesized)
gggaggaggctataagccagttctttagggttaatgaaacaatagttgacatcatgttttccctccccaaagaagccaccaaatggcaacacataattagtatgaaataacactattcag

SEQ ID NO: 983784 - DNA, 120 bp, Artificial Sequence
  ENSG00000260192_50 (sequence is synthesized)
aacaattcttaggtgctaaatactttgttatctacaaagaacacatatttgaaaaacgtcaacttttgaaaagactcaaatagagtgtttgaatatgtgtcatgtttagaatctggtctg

SEQ ID NO: 983785 - DNA, 120 bp, Artificial Sequence
  ENSG00000260192_51 (sequence is synthesized)
tttcatagggaatgttcttgctgtcaataccactgtgtgttacctcttcactgggaaggagtccatatgtctcagatttgcccttgaccacagacatttgccaagaagagacaagaaatg

SEQ ID NO: 983786 - DNA, 120 bp, Artificial Sequence
  ENSG00000260192_52 (sequence is synthesized)
tgtcctcatttgtacagatgtacggagaagaaagctcatcattttcaaaaaacaactaaaatgccttctctgtactgaacattatgtgtgtggattacagagtggaataagagggatgca

SEQ ID NO: 983787 - DNA, 120 bp, Artificial Sequence
  ENSG00000260192_53 (sequence is synthesized)
acctggccttaataagggagaggtgttcatggcacacgtatacctttgtaacaaacctgcacattctgcacatgcatctcagaacttaaagtaaaataaaaaataaaaataaagaagtga

SEQ ID NO: 983788 - DNA, 120 bp, Artificial Sequence
  ENSG00000260192_54 (sequence is synthesized)
gaggagcttatcttggattattcaagtagcttccaaatgcaatgacagatctttgtaagagatgcatagaggagacagatgtacaggaggaagccaagtgaagacagaggcaaagatgag

SEQ ID NO: 983789 - DNA, 90 bp, Artificial Sequence
  ENSG00000260192_55 (sequence is synthesized)
tgagtgatccagtcacaagcttctgactgccatcagaagctggaagagagatggggtctcgctatgttgcccagtcttctcccttggcct

SEQ ID NO: 983790 - DNA, 120 bp, Artificial Sequence
  ENSG00000260192_56 (sequence is synthesized)
gccctgaatttggacttccggccaaaaaactattcattcatagctgctacacattcatctctatataaaacctactctcccctctgaaaaagcagcataaccagtcaacgaacaagtata

SEQ ID NO: 983791 - DNA, 120 bp, Artificial Sequence
  ENSG00000260192_57 (sequence is synthesized)
taggattagcacattatgaagaataaagagaagctttcagctctccgtcatggatgatatttatcacattttccacgactggctctaataacagtgcagagataaaataggcttgatgca

SEQ ID NO: 983792 - DNA, 120 bp, Artificial Sequence
  ENSG00000260192_58 (sequence is synthesized)
tctttcctgtacagagaattttacaacagcaactgtaagaaattcaggagatgaaacacttctcccctcttgcagtttttattagtcttaaaaatgggaggtgggtgtgtgggggagact

SEQ ID NO: 983793 - DNA, 120 bp, Artificial Sequence
  ENSG00000260192_59 (sequence is synthesized)
gtttctacaaaagtgggcttgaattttctgtctgttatgctaatgtattcatagaaaaagctggtgctgagggcggttctccaattaagacaaatgaggcacattgaatttctcccccag

SEQ ID NO: 983794 - DNA, 120 bp, Artificial Sequence
  ENSG00000260192_60 (sequence is synthesized)
ggcacagcaggggtgctggcaaaatctactttattcttttctgtcaggactgaactggaaacaaaagcatgaaaattcaacacatccacttacagaataataaaggctgttgtttaaagc

SEQ ID NO: 983795 - DNA, 120 bp, Artificial Sequence
  ENSG00000260192_61 (sequence is synthesized)
ggacagagactcagagtttcctcagtgctgataagaaactggcaattaccagacaattaacaaacatttttgaataaatgaatgactgaataaatgactggtgttattaccgttgaccca

SEQ ID NO: 983796 - DNA, 120 bp, Artificial Sequence
  ENSG00000260193_0 (sequence is synthesized)
cgactaatggggacagccggagccaaggggctctcagggcagcaggagggccatgcagggccaccatcgtgtcagcagcacgttgaccatggctcacgacatggggacgggcattcttgc

SEQ ID NO: 983797 - DNA, 120 bp, Artificial Sequence
  ENSG00000260193_1 (sequence is synthesized)
cgcttcctcagaatattaacgacggtcccagcagaatgctgtatgaatattcatatggagctcaatcaagcctgggctggcggatggcacagggagaggcgccgtgacaggctgggcccg

SEQ ID NO: 983798 - DNA, 120 bp, Artificial Sequence
  ENSG00000260193_2 (sequence is synthesized)
ggtcccagtgggcacaccttggcagggtgtggccgtaagtctccgccagctccagccaggatctgcctccctcgggatgggacaggcctgggcctgttgtatggccacaggcagaagagg

SEQ ID NO: 983799 - DNA, 120 bp, Artificial Sequence
  ENSG00000260193_3 (sequence is synthesized)
atgctggggcggggctccttcctgaaagacccagagaagttcatctcaggtttaatgggggcactgctgcctcagaagccaggcagtgggtggtgaggtccctgtcctcactggggtctg

SEQ ID NO: 983800 - DNA, 120 bp, Artificial Sequence
  ENSG00000260193_4 (sequence is synthesized)
cagccgaggaggactggccaccgaggcccaggccaggcacagggatgctgggtggccatggccagtcctcccgggagcccctagcaccttgggcctgcccccagctctcacgccgggaga

SEQ ID NO: 983801 - DNA, 120 bp, Artificial Sequence
  ENSG00000260193_5 (sequence is synthesized)
ggttttttcccactccggtggccgacgccctggtgaagggattcgcagaacgggagcacatggatttccagttcttcccagcgggcgcacgtaggccggcaccctctctctcgtctttgg

SEQ ID NO: 983802 - DNA, 120 bp, Artificial Sequence
  ENSG00000260193_6 (sequence is synthesized)
agcaggggcaggaggcagggcggggagggcagaggggtcagggctgaggaggagaagcaggggcaggagcggtgaggaagaggggcatttggtcgaggttgggtcaggtaaggacacggt

SEQ ID NO: 983803 - DNA, 120 bp, Artificial Sequence
  ENSG00000260193_7 (sequence is synthesized)
ggtaggcaaaggccagggggcaggtggggtgcctgggaggtccgtggtcagaggatgggtgctggtggggcctggagatggcggtgctgcctccaccctcctgagcctggaggcctgaca

SEQ ID NO: 983804 - DNA, 120 bp, Artificial Sequence
  ENSG00000260193_8 (sequence is synthesized)
acccatttcctcccagcaagggcggtccctggactcctctgacctgaactgcttccgagtttgcttctcagaaccaagaggggctggctctgcgccctgcctacctgtccaggggtgggg

SEQ ID NO: 983805 - DNA, 120 bp, Artificial Sequence
  ENSG00000260193_9 (sequence is synthesized)
gctgccctttgaagctatcaatctgggttttaagtgtggattcattattgacaacaccatgacgttatgctgacatgaattatttgtatgtttttcaaattgtgctgtgataaccctggc

SEQ ID NO: 983806 - DNA, 120 bp, Artificial Sequence
  ENSG00000246523_0 (sequence is synthesized)
ggctcttgctttcctcccacccggatctaggcgcgcaggggccaagcagggacgcagcccagtggctccagccacgccgtcctgcccccttctgcagaaactgatgctctgagaggccaa

SEQ ID NO: 983807 - DNA, 120 bp, Artificial Sequence
  ENSG00000246523_1 (sequence is synthesized)
gcagtttgcccaagattacacagtcatagccgtgcctgggagaaccttctcttcaactctgccgcaccactgtcaagctcacctttcttctaaggttttattttagagttaacatcctcc

SEQ ID NO: 983808 - DNA, 120 bp, Artificial Sequence
  ENSG00000246523_2 (sequence is synthesized)
aaaaagccttcctcaggagttgaaggtgcccctaatatcacagccatggcatcctgtacactggaccttattgtctgtctgcctgttgtaccttgtatgagtctataagcaaaacctata

SEQ ID NO: 983809 - DNA, 120 bp, Artificial Sequence
  ENSG00000246523_3 (sequence is synthesized)
agaagccacatctggctattctatgtactcaaaaaataattggcaagtgaaagaatgaggaaaaggagaaaaaattcagaaggcccctaccccttccaatgggtcaagtcaggaatttcc

SEQ ID NO: 983810 - DNA, 120 bp, Artificial Sequence
  ENSG00000246523_4 (sequence is synthesized)
tacctgcatgtgattccctgtgtcctagagggttttatttactcctcagaccttggaaactgttaaccagagtctctgtttggagatcttatctgtgtgcttctccatgggtgttgtttc

SEQ ID NO: 983811 - DNA, 120 bp, Artificial Sequence
  ENSG00000246523_5 (sequence is synthesized)
agctctttaagtggtggagcctgtctgcctggatagagtgcaaaagctacagtgtaatcttgctttctttcagggccactgaccagaggaaataaaaactggactgattgggctctcctg

SEQ ID NO: 983812 - DNA, 120 bp, Artificial Sequence
  ENSG00000246523_6 (sequence is synthesized)
atgtagaccagccagtggccctctaagtttccttctatgtttaaaattccttatctgacattgctagctgatcagcaggcccacaggtcagctgagggcttatctccagggctggagctt

SEQ ID NO: 983813 - DNA, 120 bp, Artificial Sequence
  ENSG00000246523_7 (sequence is synthesized)
caaagagatacatgcacacgactcccctgggtcagatgggctgtgtcacagtgagttggggataatttgggatcagtcaacataacacacataacacaacccattaattttttttttcaa

SEQ ID NO: 983814 - DNA, 120 bp, Artificial Sequence
  ENSG00000246523_8 (sequence is synthesized)
aaagcgaagtttattttactttttcccattatgaaagtcatcaatgctcattatagaaaatttggcaaataacaaaaagtggaaagaaaaaaattccttaataatttagtatatttgata

SEQ ID NO: 983815 - DNA, 120 bp, Artificial Sequence
  ENSG00000246523_9 (sequence is synthesized)
aggcgccccagagctgcggagctgcagacccgccgacggtctcgcgctctgatttcctcaccgtatgaaatgaaattccacagggggattcgaaaggaaatgagaccgggactctccgtg

SEQ ID NO: 983816 - DNA, 120 bp, Artificial Sequence
  ENSG00000246523_10 (sequence is synthesized)
cagaaaagacaactaactctacccagaaggcttcacagagaagttgcatttcagttggatcctgaaaggtgaatagaaggtcaccaaaagaagggaagataaattaagtatttgtttgtt

SEQ ID NO: 983817 - DNA, 120 bp, Artificial Sequence
  ENSG00000246523_11 (sequence is synthesized)
ttgaaaacacctcaagtgttctaaactatctgttgactaaccaactgaacagtatttcaggcaaagagaaccataggcacaataacaaaataaataacagaatgatttttctaggctatg

SEQ ID NO: 983818 - DNA, 120 bp, Artificial Sequence
  ENSG00000246523_12 (sequence is synthesized)
gcttgtaatattaacactgttcactcctggagaggaagagtatatcataagacagctaaaaagggcaggtattatagaaggaaccagaagatttgcattctagtcccatccctgttatta

SEQ ID NO: 983819 - DNA, 120 bp, Artificial Sequence
  ENSG00000246523_13 (sequence is synthesized)
actaactacatgactttgaataaatgcttagcttataccacctgtagttttctcacttgtaaaatagctttggaagagtatattcttgtaagaaaaaaaattaaagaaagatcaagaatg

SEQ ID NO: 983820 - DNA, 120 bp, Artificial Sequence
  ENSG00000246526_0 (sequence is synthesized)
caggaggtttcaggaaaacacaagctatgcagtggggcaggtgaggcttggcctgcccagcctgtcctgagtgtcatgggaacagctctggaagtgactcctctgtcctctggaatctgg

SEQ ID NO: 983821 - DNA, 120 bp, Artificial Sequence
  ENSG00000246526_1 (sequence is synthesized)
atcagatggggccttctccagacatctgtgctcagcagatgcgacagacggcccctcgagtgtagcccaggatccagcaccggcccaagcaggtgggagctaaggggaaaccgaggctca

SEQ ID NO: 983822 - DNA, 120 bp, Artificial Sequence
  ENSG00000246526_2 (sequence is synthesized)
cagcgaggaacttggtcaacaagcccaggcccctccaccctgcccgcgtttcctgcactgcactggatcaaaccggtttgatccttgataatgcctccgacaaatatttgatgagggagg

SEQ ID NO: 983823 - DNA, 120 bp, Artificial Sequence
  ENSG00000246526_3 (sequence is synthesized)
aggctgagagaggggctgtggaacaaatcaccacaaactggagggccgaaaacaccagcaatgggctccctcttggttctggagccgagaaggcagaaatgaaggcgtcatcagggttgc

SEQ ID NO: 983824 - DNA, 120 bp, Artificial Sequence
  ENSG00000246526_4 (sequence is synthesized)
tccttctggggcctcagagcaggactctgttccctgcccgtccccagctccggtggttggcggccttcctccgcctgtggccctgcactccaatcgctgcctctgttgtcacttggcccc

SEQ ID NO: 983825 - DNA, 120 bp, Artificial Sequence
  ENSG00000246526_5 (sequence is synthesized)
ccatgtgcctctgtgtctcagaaggacacaagtcatattgaattaaggaccctccctaccccagcatgaccccgttttaacttagaactttcacaatgatctgatttgcaaagaaggctg

SEQ ID NO: 983826 - DNA, 120 bp, Artificial Sequence
  ENSG00000246526_6 (sequence is synthesized)
gattctgaggtcctgggaaggacatgaattttgggggatgctgttcacctcagtacaccggtgcagagttcggtgacaccgccaagttgcttgacggtgagcagcctggcattgtagaaa

SEQ ID NO: 983827 - DNA, 120 bp, Artificial Sequence
  ENSG00000246526_7 (sequence is synthesized)
ggtccctggctttgtcctttatttgttctgtgacaccttggacaagttttgtgacccgagtgtcagtttcctaggaaccagtgacaatgatcagagatagggggactcaagggtaagtaa

SEQ ID NO: 983828 - DNA, 120 bp, Artificial Sequence
  ENSG00000246526_8 (sequence is synthesized)
agtgcaggatgaactgcagcggagcgtgtgaggtgcctggcaggtgtcggccacccagtggcgctcgaagcacctgctgctccctccttcctcgctcccagctgccttctctgctgggag

SEQ ID NO: 983829 - DNA, 120 bp, Artificial Sequence
  ENSG00000246526_9 (sequence is synthesized)
ctctttggagaggagctgtgtgactggttcatcctgtccctcgaggagctaccagttcagtcaaggacattgagaagcagcggatggtgacagtgcagtgtgacagtggtgtgctgtggg

SEQ ID NO: 983830 - DNA, 120 bp, Artificial Sequence
  ENSG00000246526_10 (sequence is synthesized)
agccccatggagcggctacccaggcaggaacgtcagggaggcttcctggaggaggtggtgcttcagatgagacttgaaggagcagaaggtgtttgctagacaaaggggcttgcttggatg

SEQ ID NO: 983831 - DNA, 120 bp, Artificial Sequence
  ENSG00000246526_11 (sequence is synthesized)
aatggtcttcagagcgtggtcccagtaaggaaggagaccactactactcttgctgccctcctcccccgaccttgcctagtttacaagacaggaggaaagagagaaagcaaaaagttagaa

SEQ ID NO: 983832 - DNA, 120 bp, Artificial Sequence
  ENSG00000246526_12 (sequence is synthesized)
aaaaaaaaaaaaaaaacagaagtaagataaatagccagaagaccttggcaccaccacctggccctggtagttaaaaaaagtaataataataatatcgacccctgacttaaactacttgta

SEQ ID NO: 983833 - DNA, 120 bp, Artificial Sequence
  ENSG00000246526_13 (sequence is synthesized)
ttatctgtaaattccagacattgtaggaaaaagcattgcaaaattttctgttctgttagctgattcatgtagcccccagtcacgttccccatgcttgttcgatttatcatgaccctttca

SEQ ID NO: 983834 - DNA, 120 bp, Artificial Sequence
  ENSG00000246526_14 (sequence is synthesized)
cgtgggccccttagaggtgtaagcccttaaaagggccaagaatttctttttccgggagctcggctcttaagacgcaagtctgctgatgctcccggctgaataaacctcttccttctttaa

SEQ ID NO: 983835 - DNA, 120 bp, Artificial Sequence
  ENSG00000246528_0 (sequence is synthesized)
cacacacacacacacacaccggcgtactggaacctctctcgcgatcccgcacccagcttgaattcagcaagaatcgaaaacaggtgtgcccccgtgtccaacaaccgtcgtatctacagc

SEQ ID NO: 983836 - DNA, 120 bp, Artificial Sequence
  ENSG00000246528_1 (sequence is synthesized)
gatccttagagaacaattaaggccagttgacagtaaagaacaatcagtgtgtatttgaagtccatgctgagagagcatcaatcttctggcagctgcaagactgacctatcaaccgaggca

SEQ ID NO: 983837 - DNA, 120 bp, Artificial Sequence
  ENSG00000246528_2 (sequence is synthesized)
tttcttcattccctgccattgtctcctcctcttgagatcgccatcaggcacagtcacttttctacaaacaggcaataggactcccgctgccaccctgcccagattttagtcctctactgc

SEQ ID NO: 983838 - DNA, 120 bp, Artificial Sequence
  ENSG00000246528_3 (sequence is synthesized)
ctgtgtcccattctctcatttcagtctcagctccagacatcagtgaattcaatgtgatacatcaggggacatcacaggacttccctacttgaaaatcaagcaatcgtgtccctgaaacac

SEQ ID NO: 983839 - DNA, 120 bp, Artificial Sequence
  ENSG00000246528_4 (sequence is synthesized)
tctgtctttattcatgctcagttaccgtaaagtagatgcaactctaagaacctatggatttttttattgccactaatagatcatgatttacagcaaaattttaaaaggtccaattttact

SEQ ID NO: 983840 - DNA, 120 bp, Artificial Sequence
  ENSG00000246528_5 (sequence is synthesized)
cacataagaagaagaaaacattcagcaagaagcatttcttttgctttatctttcccagttaaatatgactttaaaaaagacaaaattttaaaaggtccaattttactcacaaaagaagaa

SEQ ID NO: 983841 - DNA, 77 bp, Artificial Sequence
  ENSG00000246528_6 (sequence is synthesized)
gatcccgcacccagcttgaattcagcaagaatcgaaaacaggtgtgcccccgtggggcggttcttgagcgacacaga

SEQ ID NO: 983842 - DNA, 120 bp, Artificial Sequence
  ENSG00000246528_7 (sequence is synthesized)
aactcatgaatttttcgccatccttctctgcccgcctttcctttactacacagtgagccgcactcctggaacaagcttcccttgaagttcaccctctgagcgccacggcccctctccagc

SEQ ID NO: 983843 - DNA, 120 bp, Artificial Sequence
  ENSG00000246528_8 (sequence is synthesized)
ctgcattccactgtaaggttgagaaatatctgattgttagtgatgagagagaaaacctagcctcattctctggtggcctgtcttgcaaaagagagatgaaatcaaacctggcttcctgag

SEQ ID NO: 983844 - DNA, 120 bp, Artificial Sequence
  ENSG00000246528_9 (sequence is synthesized)
aggaaacaagaagaaaacattcagcaagaagcatttcttttgctttatctttcccagttaaatatgactttgaaaaagaagagcacacctcattagccgtaattgtctgattaatacaaa

SEQ ID NO: 983845 - DNA, 120 bp, Artificial Sequence
  ENSG00000246528_10 (sequence is synthesized)
gaaatggactcatatcacggggttctactacccctatggtagtgtttactatccttatttcactcaataattacagttactttaaccagaatgcctgccttgtttggcattttgggagag

SEQ ID NO: 983846 - DNA, 120 bp, Artificial Sequence
  ENSG00000246528_11 (sequence is synthesized)
gaagcatatgactgtaaaccctcttcaaactttcagacttacgtttgcttcttctaagtccatcgactttatacataaatgacttctttttaaaaataaataaataaataaataaataaa

SEQ ID NO: 983847 - DNA, 120 bp, Artificial Sequence
  ENSG00000246528_12 (sequence is synthesized)
atagtttatagcttcctagcccctttgatacagaaaagcatgcaagaaaggtggaccagtcatctgcatctgtcacaaaattgccctaagaaccagcttgtcagccatagaagaaaactg

SEQ ID NO: 983848 - DNA, 120 bp, Artificial Sequence
  ENSG00000246528_13 (sequence is synthesized)
tatctcattattttatgttcacattttgctttttgagagaaagcactgtgagtagatttgatcagatactttatttgtgttgttggttctgaaaatctttttaatccccaaaaaataaaa

SEQ ID NO: 983849 - DNA, 120 bp, Artificial Sequence
  ENSG00000203446_0 (sequence is synthesized)
gaattatgcttgaagaaggttaatcttataatggcatgcagagcggagctgggcaaggccagaggctaaatatggagccagaaagatactgcagaaagtgagcaaaaaggatgagtggat

SEQ ID NO: 983850 - DNA, 120 bp, Artificial Sequence
  ENSG00000203446_1 (sequence is synthesized)
ggcctggggtggaatccgtgaaaaagggcagattgtcagtctcaggaaatcaacaggactgagttctaacttcagctgggctactatgccctggggaatcagaagattctccctaacatt

SEQ ID NO: 983851 - DNA, 120 bp, Artificial Sequence
  ENSG00000203446_2 (sequence is synthesized)
ggagtccaaagaagaggagccaccatctccttaactacaaaacaactgagagaagaaatgtctccctttagtgccagtgaagagttttgcttctctagaacaactgtttatttttgatct

SEQ ID NO: 983852 - DNA, 120 bp, Artificial Sequence
  ENSG00000203446_3 (sequence is synthesized)
tatgaaacgcgtgacacttgtaactgatttgccttctttttgcttgctgctagaaatctcagaaccaaattcgaggtcatttctgaatgtgctggactacacagcatgaattctgtgtcc

SEQ ID NO: 983853 - DNA, 120 bp, Artificial Sequence
  ENSG00000203446_4 (sequence is synthesized)
tctcacctcattcatagatacatttttttattcctacccatcttttcctttccccagattttcctattgctcttttatcatcttgagtaaagaaggttaaactatgaataaaaagtacaa

SEQ ID NO: 983854 - DNA, 120 bp, Artificial Sequence
  ENSG00000203446_5 (sequence is synthesized)
tctcaatgacgagtcagggaaaagtaagttttggacttccatttagagccatttataggtcagcaatcttttgtctctgtgtcttctttctgccctgaacaaccaaggcatcctagtcag

SEQ ID NO: 983855 - DNA, 120 bp, Artificial Sequence
  ENSG00000203446_6 (sequence is synthesized)
aaggcatcctagtcagtctctcttcatctgcataccactttaaagagcccaggggtcttccaagtacagtcactactaagaaaatgtcttcagtaaattttttttttttttttttgagat

SEQ ID NO: 983856 - DNA, 120 bp, Artificial Sequence
  ENSG00000203446_7 (sequence is synthesized)
tacaggcgtgagcccccgcgcccagccttcagtaaaattttaatgcatgttgcttatcattctttgtattgtaagcaccaatccttaatctgtgctgtggtttttgttcagaaacatttc

SEQ ID NO: 983857 - DNA, 120 bp, Artificial Sequence
  ENSG00000203446_8 (sequence is synthesized)
gtggtttttgttcagaaacatttctttaaaaaaatttccccagacgctcagccttcatattctaatctttattattctgaactacctacaaagctaaatataccttgtctacatgcagtg

SEQ ID NO: 983858 - DNA, 120 bp, Artificial Sequence
  ENSG00000203446_9 (sequence is synthesized)
cttatgtaacaatggtgcttattttgttttacattgcttcaacctctgaccagaaacttagaggacagaatgccctgcttttacaaaaaatgtggtgaccacaacggtaaccttatctaa

SEQ ID NO: 983859 - DNA, 120 bp, Artificial Sequence
  ENSG00000203446_10 (sequence is synthesized)
ttgagaccattttaggaaggaggggaggagatatttttactgcaaagactgagtcataagccttcattttttaccctgggttgtgcagaaactttaaactttctatattatttcatttct

SEQ ID NO: 983860 - DNA, 120 bp, Artificial Sequence
  ENSG00000203446_11 (sequence is synthesized)
tccataccaggacatttatttcctattcagtgacaatcttgatgtcttcatccttcaaactgctctctaacatagtttcaaaatccaagcattaaacattattaatgctcaggggatgaa

SEQ ID NO: 983861 - DNA, 120 bp, Artificial Sequence
  ENSG00000203446_12 (sequence is synthesized)
tatgttcattacctttactgtagtgatgatttcctatggcaaaatgttaaatgatgtaaagataaaaataattatcatagttattaatcatagcaataaaactggactacctaaagcaca

SEQ ID NO: 983862 - DNA, 120 bp, Artificial Sequence
  ENSG00000203441_0 (sequence is synthesized)
gaaaaagttctggagacacctggttgggagcaggctaaggaaacaaatggggaggaattagccacaaatcctcaaatagacagctactcaaaggcatcttcacggacaatttccaagcat

SEQ ID NO: 983863 - DNA, 120 bp, Artificial Sequence
  ENSG00000203441_1 (sequence is synthesized)
tggatgcagtggtgcattcttgcattgggcagtgattgtgtgcacacatctctttaagggagagtggaaatggggtgaggaggaaaatgggagtaggatagagtgtagcgttgacattta

SEQ ID NO: 983864 - DNA, 120 bp, Artificial Sequence
  ENSG00000203441_2 (sequence is synthesized)
ttttctttaaaggaagacccgagcatacctgagagctcagtgaagaaagtagttctggcgaatcggattaatatggtatgatcagcctttagcaagattctatcacttttcccactgatg

SEQ ID NO: 983865 - DNA, 120 bp, Artificial Sequence
  ENSG00000203441_3 (sequence is synthesized)
acacgtgtgtgtgtgtgtgtgttgcatcttctgagtatttttcaaggagaagctttttagtgatctgaaaaagtcaattcagttagccactagagttcaatcaaaaacttcggaagagtg

SEQ ID NO: 983866 - DNA, 120 bp, Artificial Sequence
  ENSG00000203441_4 (sequence is synthesized)
catcatcttaaagtacataagagagaatcatgacctccagctcagaattcaagaataggcaggtttgtgaaatagtaagctcagaaagttgagggccagtgaactcctatttcaagttct

SEQ ID NO: 983867 - DNA, 86 bp, Artificial Sequence
  ENSG00000203441_5 (sequence is synthesized)
tcagaaagttgagggccagtgaactcctatttcaagttcttgcgggtgtttgtacttttttcccagcaccactgaaacttgacctt

SEQ ID NO: 983868 - DNA, 120 bp, Artificial Sequence
  ENSG00000287417_0 (sequence is synthesized)
ctctctctctctctctctctctctctgtgcagactggtaaaaatcattgtttatctcctgtaaagttttaattaattagaaaaaggatttgtgaggctagtcttaagctgcagcgaatct

SEQ ID NO: 983869 - DNA, 120 bp, Artificial Sequence
  ENSG00000287417_1 (sequence is synthesized)
ggtgtgctttacgtgtttttctgtattgttccatcataaagaggggtaccttatgatggaacacaggcttaggacacccataagcctgcttttcaagacggcccagcaaactgagtcaag

SEQ ID NO: 983870 - DNA, 120 bp, Artificial Sequence
  ENSG00000287417_2 (sequence is synthesized)
gacggcccagcaaactgagtcaaggaaacttttcagctatttacagcttttaacaattgagtaaagcatactcctgtgaacaaaatttggaacatatttgtttctctctacctgatttct

SEQ ID NO: 983871 - DNA, 120 bp, Artificial Sequence
  ENSG00000287417_3 (sequence is synthesized)
caccttttgttggactcaagagttatgaatggccctcaccatactgatgctttctgactgagctcctcactaccctgaacacaagagggaggaatatcatcgcccctattcagcctggag

SEQ ID NO: 983872 - DNA, 120 bp, Artificial Sequence
  ENSG00000287417_4 (sequence is synthesized)
aagttacaaaagatggatcttcgtccctctgcaacccttaggattaatggttctcctataaaagggatggggggaaaatgtcagaggcatttgaacaagagcaactccatcttaaagagg

SEQ ID NO: 983873 - DNA, 63 bp, Artificial Sequence
  ENSG00000287417_5 (sequence is synthesized)
gggaggttggcacaaaatacaggtcataaagaccctgctgataaaacaggttgcagtaaagaa

SEQ ID NO: 983874 - DNA, 66 bp, Artificial Sequence
  ENSG00000287417_6 (sequence is synthesized)
tctggtcgtcctcactgctacactcccatcagctagaaaggggaggcatgaataatccacctcttg

SEQ ID NO: 983875 - DNA, 65 bp, Artificial Sequence
  ENSG00000287417_7 (sequence is synthesized)
aggggaggacaaccagcagccctggggactgctgtgcctgtggagtagccattcttttattcctt

SEQ ID NO: 983876 - DNA, 120 bp, Artificial Sequence
  ENSG00000233607_0 (sequence is synthesized)
actcaaagcctttgttacactatttatgactcacacttagtaatgctcacccaattacctttcctagtatatcttcatcttgttaaagtgtatgagaactgctttggagagtctaataag

SEQ ID NO: 983877 - DNA, 120 bp, Artificial Sequence
  ENSG00000233607_1 (sequence is synthesized)
tccaaatgagcattaaaaaggagagagagtaggagaagtatctcttgagaaagattaaaaagcgagcacaggctgagtgcagtgggtcacgcctgtagtctcagcactttgggaggtcga

SEQ ID NO: 983878 - DNA, 120 bp, Artificial Sequence
  ENSG00000233607_2 (sequence is synthesized)
atttgattgggaagtgttagaatggcaacagtgacaaatcctgtggcaaatcttcatgcaaaggtctttggtgtttctttaatttcatatatattacctactatgtgacaagcacactgt

SEQ ID NO: 983879 - DNA, 120 bp, Artificial Sequence
  ENSG00000233607_3 (sequence is synthesized)
gccaggttccaaatataaaagagtaaattaaggaatgcattatagctgttaaagcaatcttaagggaaatccgaagcttccactgcagcaccatgcttagtaaaaccaactggataatat

SEQ ID NO: 983880 - DNA, 80 bp, Artificial Sequence
  ENSG00000237436_0 (sequence is synthesized)
cgcggggggcctcggggctgaggtccgcaggggtgccgcgccctggagtccgactgcctaggagtccgggcgtcgctgcc

SEQ ID NO: 983881 - DNA, 120 bp, Artificial Sequence
  ENSG00000237436_1 (sequence is synthesized)
gcccgcccccggtaataccggaaacaaaaggagaggctgcaatcgcaaattgtttaaaaagaagaaaaaggaaagaaaagttgaatcaaaataagtgaaaaatcctcgttcaagtgttct

SEQ ID NO: 983882 - DNA, 120 bp, Artificial Sequence
  ENSG00000237436_2 (sequence is synthesized)
ggcattaagattgactgtcacactgaattctgtgccaatcctaacaacatgtgttctttttctggtcttcacaagtaagaatgtcttaggttttccagaaataaagatgtcccaaaagaa

SEQ ID NO: 983883 - DNA, 120 bp, Artificial Sequence
  ENSG00000237435_0 (sequence is synthesized)
aggagagaaatcatgtgagcttgagaaggaatcagattctgcatatatttccaagttaacatgaacaagattttctgaaagactgctatggagtctgagaaaaaatgtcaaaggtagtgc

SEQ ID NO: 983884 - DNA, 120 bp, Artificial Sequence
  ENSG00000237435_1 (sequence is synthesized)
caaaattgtcacttaaagaactgcaggaatggagttggcatttacagaatttggaagagaagcaggtttagtgataaagaccagaagcacagagctaagcatattaaatattgaggacat

SEQ ID NO: 983885 - DNA, 120 bp, Artificial Sequence
  ENSG00000237435_2 (sequence is synthesized)
gaagaggaaagaactgacagaggaggtgaagaaaggtgatcaggaagagccatcaaagtgttatcctggaattcaagtgaagacagtgtttcaaagtggaaatgaacagtgtcctgtaac

SEQ ID NO: 983886 - DNA, 120 bp, Artificial Sequence
  ENSG00000237435_3 (sequence is synthesized)
cctcagagtgagactagagtcagaatgcaggcttttctcatttgaaatctattgaataaacatcagtaaaagaagcaatccaagttctcatgccaaatatgtatatgtccaagaccagga

SEQ ID NO: 983887 - DNA, 120 bp, Artificial Sequence
  ENSG00000237435_4 (sequence is synthesized)
atggagcctagagtactagcaaggtaagtccaggtccttacctccacctaaaagttctgccatcaaggaacatctgctcattatcttctgttcacacatcaaatgacttcaatgtgatcc

SEQ ID NO: 983888 - DNA, 120 bp, Artificial Sequence
  ENSG00000237435_5 (sequence is synthesized)
ctggatgttctccaaagagctgaagggaaataaatattctttctttatcaccaaatacttcaactgcagagtgattgtgctaccaaggcctgaaacttcggaaaaacctgcataacacaa

SEQ ID NO: 983889 - DNA, 120 bp, Artificial Sequence
  ENSG00000237435_6 (sequence is synthesized)
aatataaaatatgccacagagaggatccagagagcccatctccggtcagttatctgtatttgtatgtcaactacagcatcaaaaagcataggcatggatactaaggaccccctctgtaca

SEQ ID NO: 983890 - DNA, 120 bp, Artificial Sequence
  ENSG00000237435_7 (sequence is synthesized)
ccaacgccagtccaaaggacagtgtgtcactgtgaactggaaattcatctctcttcttcaatttttttctacctactttatgctttatctctaagttgaggctgtttatggcctcatcct

SEQ ID NO: 983891 - DNA, 120 bp, Artificial Sequence
  ENSG00000237435_8 (sequence is synthesized)
caattaccttgtccctcattactcccagttaatggagattaagctttgtatcatgacttcctaactaaaattgaaatcacaagacatcacataaataaagttacaaatggattagataaa

SEQ ID NO: 983892 - DNA, 120 bp, Artificial Sequence
  ENSG00000237435_9 (sequence is synthesized)
taaccaatgttagagcctggtgtgtatctttcagaggatagtttctttgtgattgtgagtagcttagctgttgagcaagccactggatacaagactaaccttacagaaaggtcaatcctg

SEQ ID NO: 983893 - DNA, 120 bp, Artificial Sequence
  ENSG00000237435_10 (sequence is synthesized)
aggatgtcatcaacatatgaggcatggttaaaaccatgaatgtggatgagatcctcccggaggatcacataaagaggtcagcgcactgtgacctgacttacggggattactatatggaag

SEQ ID NO: 983894 - DNA, 120 bp, Artificial Sequence
  ENSG00000237435_11 (sequence is synthesized)
ctgcatacaaagatcagaggtccagcagggagagtggggacaatgagttttgggtggaaattctgacaacacaggattaaaacactgaggatgtccctttacatcgagaaagtgctgaat

SEQ ID NO: 983895 - DNA, 120 bp, Artificial Sequence
  ENSG00000237435_12 (sequence is synthesized)
aaacatcctgaaggaggttggtggattttaataaaaattaaaaagggagtctttattagactataataattctcctgtgtttttctgcatattatttacatataatgcaactcatcttca

SEQ ID NO: 983896 - DNA, 120 bp, Artificial Sequence
  ENSG00000237435_13 (sequence is synthesized)
gtcaggacttcagggacacttgtgccagcagaccggtacccagagaaataagtgaagaacagagtttactgtaaatttaaatattaaacaaatggacagatatttgtatgttctaccaaa

SEQ ID NO: 983897 - DNA, 120 bp, Artificial Sequence
  ENSG00000237435_14 (sequence is synthesized)
cagcattgaatggttggcaaacaatggaaatttcgttttcatttttggatcagtctgcttgatgaatttaaacctagtgattatgtttgctcatctgcttctccaagtcatctttagtgt

SEQ ID NO: 983898 - DNA, 120 bp, Artificial Sequence
  ENSG00000237435_15 (sequence is synthesized)
gtggctatatgaggctagagttctgggaaggctgggctgatgacagaaatgtattagtcattaacatttatgtgtgtgtgtacacatatgcacatgaacactggatatgcgaatgcacag

SEQ ID NO: 983899 - DNA, 120 bp, Artificial Sequence
  ENSG00000237435_16 (sequence is synthesized)
atgtagatgtgattccatgaatgtgcattggctaaatgttgaaagaatgaaagaacaaatgatagcttgattaagcaaatgaatgaatgtctctctttcatactgagagaacggtagatg

SEQ ID NO: 983900 - DNA, 120 bp, Artificial Sequence
  ENSG00000237435_17 (sequence is synthesized)
agggcttagctttctcctttcctgaagcaagcctattggagaagtgtggctggctcatgcaaagggtgatggaggggcaactgatctgctctgacatgtttcaatttaagcttatctttc

SEQ ID NO: 983901 - DNA, 120 bp, Artificial Sequence
  ENSG00000237435_18 (sequence is synthesized)
cctcactcctttcctgtaagtctatcttcttggctatgggatttttattgaatttctgatatgtgaatgaatcaccataaaaatgtaagctctctattgaataaaattacacacacaaaa

SEQ ID NO: 983902 - DNA, 75 bp, Artificial Sequence
  ENSG00000277017_0 (sequence is synthesized)
tgcttctgcatttgcctgttgcctccttttctttgtcatgcatgcatattaattgaggatggagaatatctacgc

SEQ ID NO: 983903 - DNA, 80 bp, Artificial Sequence
  ENSG00000277017_1 (sequence is synthesized)
aggagacatgggttgaatgctggtatgttttaactctgcagtgcaaacagttgcaacaagtgtggtgaactaatcaccag

SEQ ID NO: 983904 - DNA, 73 bp, Artificial Sequence
  ENSG00000277017_2 (sequence is synthesized)
aggagacatgggttgaatgctggtatgttttaactctgcagtgcaaacagttgcaacaagtgtggtgaactaa

SEQ ID NO: 983905 - DNA, 120 bp, Artificial Sequence
  ENSG00000277017_3 (sequence is synthesized)
tctacacaaagggggaaatatttgcaaatcatttatcttgtaagagactaaaatttagaatatttttaaatatatttaagatatattcaaaaatctacagcaacaaactaactaaataaa

SEQ ID NO: 983906 - DNA, 71 bp, Artificial Sequence
  ENSG00000277017_4 (sequence is synthesized)
aaatgaaaaacacaagcagaaggacgtaaagaaattgtaaccctgatacattgatggtagaaatggataaa

SEQ ID NO: 983907 - DNA, 66 bp, Artificial Sequence; identical to SEQ ID NO: 885647
  ENSG00000277017_5 (sequence is synthesized)

SEQ ID NO: 983908 - DNA, 120 bp, Artificial Sequence
  ENSG00000277011_0 (sequence is synthesized)
gaaatggatcagagcggggggtgtggacttccatctggagccgggacaggacctcaggaggcaaatgacgaccgtctgtgacacgcaggcccacgtctgtgctagaaaagccaccccttg

SEQ ID NO: 983909 - DNA, 120 bp, Artificial Sequence
  ENSG00000277011_1 (sequence is synthesized)
atatggggcgaggatgggacccgagagaccctcgccccaccctgcactggctcagcagccgggtccagactcccaggcctctggaaaacgaacctcggggggacgcagagggtcacacag

SEQ ID NO: 983910 - DNA, 120 bp, Artificial Sequence
  ENSG00000277011_2 (sequence is synthesized)
ggcttcacccccagctcgggttcagtcctgactcagagacgacccggcccccacgactggaccccacaacgcacagggcccccgccggccaacaagaccaaggtcacgcacagcggtgct

SEQ ID NO: 983911 - DNA, 120 bp, Artificial Sequence
  ENSG00000277011_3 (sequence is synthesized)
gggatcctccagaggactccacaggggaccgagggcctgcagggattcgaaaaccagtgccggacgcagccttcctcccttacagcaagagctaggagataaaacaggcaggccgggaga

SEQ ID NO: 983912 - DNA, 120 bp, Artificial Sequence
  ENSG00000277011_4 (sequence is synthesized)
gcagggcccgggtcgcgccttcctcacggctggaagcctcccaggtgacgggaggaatgatggggacggggcggggtacttggagaccttcctctgtcagatggctctgatgtttccact

SEQ ID NO: 983913 - DNA, 120 bp, Artificial Sequence
  ENSG00000277011_5 (sequence is synthesized)
gttgctgtgagcaggaaagggttaacttggcagctggctcctccacaccctgagcgcccacatccggcccctccttgccccggaacctcctgccggagaggacagccctgctcacctggc

SEQ ID NO: 983914 - DNA, 120 bp, Artificial Sequence
  ENSG00000277011_6 (sequence is synthesized)
cttggcagccccagctggtctgtgcaatggtgggattcacggtgggcacttggcctcacggcatcagcctgacctctggagggtggagaccaaggtcagccatgtccacgagaccagccc

SEQ ID NO: 983915 - DNA, 120 bp, Artificial Sequence
  ENSG00000277011_7 (sequence is synthesized)
acacctgggagctcgcacctggcctctcctgggccctgcctgggcatctcttccctctgctgactttaacccatgtcctctgctgtgagaacccacagcagggaaaagcagcctgtctgg

SEQ ID NO: 983916 - DNA, 120 bp, Artificial Sequence
  ENSG00000277011_8 (sequence is synthesized)
gctctgtctgtccttctagcaagttgtggaccgtcaaggtggtctcgggggtcttcctgccacacagctgcctggaggctcacagccaagaacggtgctcactccagcagtggggctagc

SEQ ID NO: 983917 - DNA, 120 bp, Artificial Sequence
  ENSG00000277011_9 (sequence is synthesized)
cctgagagcaaacagatttcacccccaaattcaggacacacaggagcgttcaaaaaccacacacacacgtgcacacatgcacacacacgcatgtacacacgcacacatatgcacacacgc

SEQ ID NO: 983918 - DNA, 120 bp, Artificial Sequence
  ENSG00000277011_10 (sequence is synthesized)
acatgcacgcacacccacgcacatgcacgcacacgcacgtatacacacacacgcacacccacgcatgtgtgtgcacacgtgcacacacagactcctgtgcacacatgcacacatgcgcac

SEQ ID NO: 983919 - DNA, 120 bp, Artificial Sequence
  ENSG00000277011_11 (sequence is synthesized)
acacccgcacacatgcaggtgcacacgcacacacccacacccacccgcacacaacgcgcgcgcacgcacacacacacacaccgtgcaccctcagtgcacaggctggctaacacacacgag

SEQ ID NO: 983920 - DNA, 120 bp, Artificial Sequence
  ENSG00000277011_12 (sequence is synthesized)
ccgctttccaaaccgaagtcattccagccccatgcctgtagctggcgccacatgaaaacaccactgtgttcttatttatggagcatgtttctttaaactggcctattttaaaactaaatg

SEQ ID NO: 983921 - DNA, 120 bp, Artificial Sequence
  ENSG00000277011_13 (sequence is synthesized)
cattttttatttgaaagggaatcttcatttcaccgctgcaaatggaaagctggcatcacttgtgttaaatcatggtaaccatgaaaataagtagaatgaaaataaaataatgttgtcaca

SEQ ID NO: 983922 - DNA, 120 bp, Artificial Sequence
  ENSG00000233602_0 (sequence is synthesized)
tgaacagcatggtgccagagcaggttgtgatgaagaaactgagtctcagtgaagtgaactgcctaaggtcacatagccagttggttgaggagccaggattcaaacccaagcccatctgag

SEQ ID NO: 983923 - DNA, 120 bp, Artificial Sequence
  ENSG00000233602_1 (sequence is synthesized)
tgcagagcctgtgttgttatcactgtggaactatgaagcacccttttggtgttgggctttgcgctaccaatagagacgatgtggaagaaaacaagctcgcttccctcatttccctcagcg

SEQ ID NO: 983924 - DNA, 120 bp, Artificial Sequence
  ENSG00000233602_2 (sequence is synthesized)
ctgaacagaccttcggtagcagcagctgaggaagaaagcaaaggcagcatcaccactccctctctgctgctacagtcaccctgagccagggacctgcaattgttggcatctgacctcctt

SEQ ID NO: 983925 - DNA, 120 bp, Artificial Sequence
  ENSG00000233602_3 (sequence is synthesized)
ctggccctgacggttctttgtgatttcagttctctacctcatggcccaggaaagttctgctaatcttccaggggccacctcctctgggagtctcgcctggccctcccagtatgagtgttc

SEQ ID NO: 983926 - DNA, 120 bp, Artificial Sequence
  ENSG00000233602_4 (sequence is synthesized)
aaaacacacacttgggccctattataatttgtcagaggtaatgatctggccctacgcacttgggttctctaagggcagggcctggacctccttcccttcttttttggaaatctgcacagg

SEQ ID NO: 983927 - DNA, 120 bp, Artificial Sequence
  ENSG00000277013_0 (sequence is synthesized)
acacctgagctcgccctgcggtcccgggcagtgactccgccgagcctcggtgggggaggggacaggggagagaatagggaagaggggcgcgatctgtgtctgggacccgttgccaagaaa

SEQ ID NO: 983928 - DNA, 120 bp, Artificial Sequence
  ENSG00000277013_1 (sequence is synthesized)
cccgaccctcgggctctggccatcagcagccgcggtgcagctgcctccccctgcctccaggtcgcccagcagagctttctagagctgggtgctcagaagaccccaggcggaggcaagaac

SEQ ID NO: 983929 - DNA, 120 bp, Artificial Sequence
  ENSG00000277013_2 (sequence is synthesized)
cttgggccgcggctctgtgggaaaagccctcggggaagccagacggcgcgctccagctccccatcgcgggcgtgggccccggggtggaggcagttgggtcgcggccctgccacccccatg

SEQ ID NO: 983930 - DNA, 120 bp, Artificial Sequence
  ENSG00000277013_3 (sequence is synthesized)
ctgcacggcctcggcccagtgccaccacctctgtgggccgccgtttcagcctccagatggggtggcggcgggccccagcccttgccccaagtctctaaggaagggtctggcctggcccgc

SEQ ID NO: 983931 - DNA, 120 bp, Artificial Sequence
  ENSG00000277013_4 (sequence is synthesized)
ccagatccgagctgctgcgtacgcgcggggctgggagctgcaaaaacgcccggggcccagggtgagcggctgggccctcgggggacccggcgcgcgcgggggctccagctccgccctgtt

SEQ ID NO: 983932 - DNA, 120 bp, Artificial Sequence
  ENSG00000277013_5 (sequence is synthesized)
gggggccagagcaggagggaggccgccccagcttgttctgggccgcagccctgccgaccgcacgggacaggcgccgcgtcctctctgggcctccaagacgcagactagaagcccatagct

SEQ ID NO: 983933 - DNA, 120 bp, Artificial Sequence
  ENSG00000277013_6 (sequence is synthesized)
gctgggaagatgggcaccccaggtctccgcgcacggccttcccagggccacggtgaaacatggatgcgacactcaggcaccttcccggcccccggcgaaaacgcaaagcctgagcccatg

SEQ ID NO: 983934 - DNA, 120 bp, Artificial Sequence
  ENSG00000277013_7 (sequence is synthesized)
atgggctcggaagctctgcgggattgagtcatcagaggaatgctgatctagaagtacaatggctggaagacacccgcagaaaccgcgggcactggagagcaagtgcagctttaatctcca

SEQ ID NO: 983935 - DNA, 120 bp, Artificial Sequence
  ENSG00000277013_8 (sequence is synthesized)
ggcgtgatttagatggaaagcagcctgaagaccagttaagagaaccgcgagcagagcgcgctggactagcaccaacagacgtgagttcgagaccgtcctgccccttaatcctgtgtgacc

SEQ ID NO: 983936 - DNA, 120 bp, Artificial Sequence
  ENSG00000277013_9 (sequence is synthesized)
ttggtccattttttaagtctgtgagcctcgcagtgttctcattcctgaaaagagcctgccccatctccggactgcagtgagaacaaaaggagactatgaacatgactttttgccactttt

SEQ ID NO: 983937 - DNA, 120 bp, Artificial Sequence
  ENSG00000277013_10 (sequence is synthesized)
gaagccccacactgaggaaagattttcctagcacttgggagattttctttagcaccagctgccaagaatgctgggaaggagacagccccatcccagaaggaagacaccttaaatcagaac

SEQ ID NO: 983938 - DNA, 120 bp, Artificial Sequence
  ENSG00000277013_11 (sequence is synthesized)
tttatttttcctcctatgaaaatacaatctaatactggagaagtgtaaaaattaaggagtcattagaagccatttgttgttgttgttgttgttattgttttgagacaggatcttactctg

SEQ ID NO: 983939 - DNA, 120 bp, Artificial Sequence
  ENSG00000277013_12 (sequence is synthesized)
tcacccaggctggagtgaggtggcacgatcattgctcactgtagcctccaactcctggactcaaacaatcctcccttctcggcctcccaagtacctgggacgagaggtgcactgggcgtg

SEQ ID NO: 983940 - DNA, 120 bp, Artificial Sequence
  ENSG00000277013_13 (sequence is synthesized)
gtagcacacatctgtagtcccaggtactttagaagccgagaagggaggtctcactattttgcccaggctggtctccaactcctgggatcaagccatcctcttgcctcggcttcccaaagt

SEQ ID NO: 983941 - DNA, 120 bp, Artificial Sequence
  ENSG00000277013_14 (sequence is synthesized)
gttgggattataggtgtgagccaccactcccagcctgttgttttaactttctatcaaagaaatggatggagggtggacagggatgctgggtgctttagattagacttgaaagagttaaca

SEQ ID NO: 983942 - DNA, 120 bp, Artificial Sequence
  ENSG00000277013_15 (sequence is synthesized)
gcataggttacagaatcacacatacccgaattggaatctcatcttgaccctttactaccactgtttcgttatgttagtgacttaacctctctgtgcttcagtttcttcatctgtaaaatg

SEQ ID NO: 983943 - DNA, 120 bp, Artificial Sequence
  ENSG00000277013_16 (sequence is synthesized)
aagaaaatggcaccaacctgtggggttgttgagaagatgaaatgcaatagtgaatgtaaaagtgcctgacaggacccagcacgtggtaatacataataaatgctagctagttttggtttc

SEQ ID NO: 983944 - DNA, 120 bp, Artificial Sequence
  ENSG00000237385_0 (sequence is synthesized)
cggcactgtgggggatttttttaaatgtaaataaccagcaggcttatatataatgcagcaagtgtgaaaagcatcacaggtctaataataatgtatgtagatgtcagtaaagtatacttt

SEQ ID NO: 983945 - DNA, 120 bp, Artificial Sequence
  ENSG00000237385_1 (sequence is synthesized)
tgcttctagtgcttcacttgcctcatgatatccatcaagcttttgagaagaaagtacaggatctgttaggttcttaacctagcagtttaccagatgcattccttgatcagcctgcatgtg

SEQ ID NO: 983946 - DNA, 120 bp, Artificial Sequence
  ENSG00000237385_2 (sequence is synthesized)
gagaggggcaggcgctgacaagatcctggagtcagaggctgggctgggctgttgcctgattgactatgcgaccctggatgtgcccatccccatgtgctttgaattcatcatggatcacat

SEQ ID NO: 983947 - DNA, 120 bp, Artificial Sequence
  ENSG00000237385_3 (sequence is synthesized)
gagggagtccacagagtatgccagatcctttttggcatctttccccaagtctaaatttctttagtgtcattcatttttctgattttgtaattgttttgagtctattattgccttattttt

SEQ ID NO: 983948 - DNA, 120 bp, Artificial Sequence
  ENSG00000237385_4 (sequence is synthesized)
ctgattttaaagcaatataagctcattgtcaaaattttgtaaaatccagaaaagtatgataaagggaatcagcatgctgagccctactattcagcagcaaccaccaataacattttgaga

SEQ ID NO: 983949 - DNA, 120 bp, Artificial Sequence
  ENSG00000285948_0 (sequence is synthesized)
catcccagataagtgtgcctctcaccaggagccgcacagctcttcaacccccacattctgcatacaaacctcttgactatgacatttcctagagaccctcttcagctccatcgacctcca

SEQ ID NO: 983950 - DNA, 120 bp, Artificial Sequence
  ENSG00000285948_1 (sequence is synthesized)
tgacctgatttgatacatgaaacagaggaatcttttgatgcactttctatacaagaggaaagagcaccgtcacagctcactgatttgaccaaaggagaagctgtatcaccaagactcgcc

SEQ ID NO: 983951 - DNA, 120 bp, Artificial Sequence
  ENSG00000285948_2 (sequence is synthesized)
aacttatgccctgtaggttgtctgctatactccaacaaagaattaattcttctgacggactgacgaacaggagtacgctgaaacttaagaggtgacttgacttttattctatttggttca

SEQ ID NO: 983952 - DNA, 120 bp, Artificial Sequence
  ENSG00000285948_3 (sequence is synthesized)
tttaaagaaagcttgttaaaccactgtatgtgatcagaaacctttctatgttctgtcatttgtgaactttcagaaactgttttctcacatgtttccaatgactgctgtttagcaattctc

SEQ ID NO: 983953 - DNA, 120 bp, Artificial Sequence
  ENSG00000285948_4 (sequence is synthesized)
ataggcctaggttttgacaagtttgttacaacacatgtactctgctgtgagaaagaggatctagcctcgtccttgctatgtgctgcacacttcgatgtactcgagttaaaatgaggtcat

SEQ ID NO: 983954 - DNA, 120 bp, Artificial Sequence
  ENSG00000285948_5 (sequence is synthesized)
ttgggtgggccctaatccaatgtgccctgtaagagggaagttctgacacagagcaacatcataggatgacataggcagggattggagtgacgcggctgcaagccaaggaatgctaaggac

SEQ ID NO: 983955 - DNA, 120 bp, Artificial Sequence
  ENSG00000285948_6 (sequence is synthesized)
tgacagccactaccaggagccaggaagaggcaagaaaggattctcccctgcaggtttcaggcattctgccaacaccttgatttcagacttctagcctccagaacggagtttcatattcac

SEQ ID NO: 983956 - DNA, 120 bp, Artificial Sequence
  ENSG00000285948_7 (sequence is synthesized)
cttcttcaaagccttccagtgatggagtagcacagagaccatcaatacccaacatggctggtatcttttccaggataaaatctggtacacgccctaaatgaaaatgttcacaagaggggc

SEQ ID NO: 983957 - DNA, 120 bp, Artificial Sequence
  ENSG00000285948_8 (sequence is synthesized)
cggtactgtagggtgggggtgaggtcagtaatataccaactttctaacagttgccttcatagttcctttgaaagaaacagagattttcctcatttaaacaaattctgttaataatgcaac

SEQ ID NO: 983958 - DNA, 120 bp, Artificial Sequence
  ENSG00000285948_9 (sequence is synthesized)
cttttctgtgttagaagacatcttttcatgtccttcacttgtctgaagaagattcggtgcaaatattactgcaagattgctgctgtccatcttattctcactggatcttaagtgaataaa

SEQ ID NO: 983959 - DNA, 120 bp, Artificial Sequence
  ENSG00000285948_10 (sequence is synthesized)
cgctttattagatggagccaaacgtgaaaatacagaagagttaaaataacgtatgtagtacattttgaagaccttattatcagtcatacacaagtcaaaatagttacccttcatctacat

SEQ ID NO: 983960 - DNA, 120 bp, Artificial Sequence
  ENSG00000285948_11 (sequence is synthesized)
gattggcttgaacacaagaaagaaccagaaatatatagcctctctatatttaaatatgtattctaaaaaccatgctaatcttagagttcatactttgcttttccacacaaattgaacatc

SEQ ID NO: 983961 - DNA, 120 bp, Artificial Sequence
  ENSG00000285948_12 (sequence is synthesized)
tttatctgattttcagacctacacataaaaagttggaagtatcagaaggcagcaagtatgtctagaataagcaggctcactgacagcagggagagggaaattttgaaaagcaaaacagaa

SEQ ID NO: 983962 - DNA, 120 bp, Artificial Sequence
  ENSG00000285948_13 (sequence is synthesized)
atattttaaaaacccagtaaacaaaggctttcagtggacaatgaatcttataaacaccaatgaaccattaaggcattcatgatgatgactttaagataaggaaatattaaatcatttggt

SEQ ID NO: 983963 - DNA, 120 bp, Artificial Sequence
  ENSG00000285948_14 (sequence is synthesized)
atgctgtttcttaaattggagtatactcctcatagtaatgaaatatggaatttttaaagaaaaatttccattccaaatgaaattgtacatatctacaagcataaaacgttagttgaaaaa

SEQ ID NO: 983964 - DNA, 120 bp, Artificial Sequence
  ENSG00000285948_15 (sequence is synthesized)
ttcaactattatttgccaagagttttaattaccacttacctaagagaaacattcctgagaaagttaaagaagtatcttaatacatgaactgtgtggtcagccagaagacaggagagcaac

SEQ ID NO: 983965 - DNA, 120 bp, Artificial Sequence
  ENSG00000285948_16 (sequence is synthesized)
agtgtagctttattcttttcctctgtgcctaactgttgagctttcaaaagtgcttcatgcaaatcagctgggagaatgggctctggcagttccctaaaaaactgcttaagaagtcccgca

SEQ ID NO: 983966 - DNA, 120 bp, Artificial Sequence
  ENSG00000285948_17 (sequence is synthesized)
atatcacaaggaggtgcagaagataggcaaccttcaccatgatccactttattctgaaataaatataataatcttgagtattttggcaacttaagagtttattgcaaataaagtatcttt

SEQ ID NO: 983967 - DNA, 120 bp, Artificial Sequence
  ENSG00000237380_0 (sequence is synthesized)
gggaaatgtaggggagcagccggactgagctgcccaagggggtcggcgccccaggcttcttggtggcatgctggggagcggggagggggcgattcttacccgaaggctgccgagctacag

SEQ ID NO: 983968 - DNA, 120 bp, Artificial Sequence
  ENSG00000237380_1 (sequence is synthesized)
gcggcggtcggtccgggcgtctgctgtaatccactaggcgctgcccggctgcgctcactctcggacgcagagacccgctcatgttggtgaagaagccgcgccagaaccgcgcggctgcag

SEQ ID NO: 983969 - DNA, 120 bp, Artificial Sequence
  ENSG00000237380_2 (sequence is synthesized)
gaagaagccgcgccagaaccgcgcggctgcagtcacctcgagcaggccggctgctcctggcaggcggtgtcggcgccggcgggggactcggcgcccagggccccttccaggccctccctc

SEQ ID NO: 983970 - DNA, 120 bp, Artificial Sequence
  ENSG00000237380_3 (sequence is synthesized)
gtgactggagcccacctctgcagagacaaaggaactgctctggtgaactccccctgaaagtaaatgtccttggctggcctccagcattcccctcatgggcatagccatgcagccttcaga

SEQ ID NO: 983971 - DNA, 120 bp, Artificial Sequence
  ENSG00000237380_4 (sequence is synthesized)
accttcctgaaagagatgcccaaggattcagcaaacacgggggaagcagaggacacaagaagcttggatgtgaaatagcacttccttctgtgttacagaataaaacaatattttaaatta

SEQ ID NO: 983972 - DNA, 120 bp, Artificial Sequence
  ENSG00000237380_5 (sequence is synthesized)
cacaagcagatggggcaagtttttgggccctcagaagcccagaagacttcacactagtatactggtatatacatgtggaattgagcaaataacttgtttaattccaaaattttctgagaa

SEQ ID NO: 983973 - DNA, 120 bp, Artificial Sequence
  ENSG00000237380_6 (sequence is synthesized)
ataatctcaatagtcaatttgcctcattatcctctccccatcttacccaaataaaagcagagctttatgaccctccctttcaacttggggaatgagggccgcaaagacactttgcactga

SEQ ID NO: 983974 - DNA, 120 bp, Artificial Sequence
  ENSG00000237380_7 (sequence is synthesized)
aaagagccctcggtcccgcagtcgggccccgtcgctgactctccagcttccgagccgcgggcggcgagtccagggcacacggagcggccgcgggggcgccaggccggtgtcgcccgaggc

SEQ ID NO: 983975 - DNA, 120 bp, Artificial Sequence
  ENSG00000237380_8 (sequence is synthesized)
cccgaggggagctgttctcccctcgcctctctccctactcacacccacccctccccacacatccccacacacacgcttgctcacagcttgtcgtgttgtttaaaacaggtggaagacctc

SEQ ID NO: 983976 - DNA, 120 bp, Artificial Sequence
  ENSG00000237380_9 (sequence is synthesized)
tgtaatgatattatgcctttcaataaaaattttatgaggtgtatttgattatagattaatgtgtccctaataaaacggacggatggagcagatcggagggccccctccccctgccacact

SEQ ID NO: 983977 - DNA, 120 bp, Artificial Sequence
  ENSG00000237380_10 (sequence is synthesized)
cacacacgcccgcgcggccacacacaccccgacgtgaggctgggtccttgggacactcccttctgatttttttccccctacagaggtgaggttgagcagccttgaatctgagggaaatgc

SEQ ID NO: 983978 - DNA, 120 bp, Artificial Sequence
  ENSG00000237380_11 (sequence is synthesized)
tcctgaaagagggcttgtttcaaataggtgaggctatcgctttcctgaagaacagcggaggacgtaccaaccgacgtctgagatgcacacagcaagctggtttaaaaccagcggcgaaca

SEQ ID NO: 983979 - DNA, 120 bp, Artificial Sequence
  ENSG00000237380_12 (sequence is synthesized)
cggcagccaccgcataaagaactagcgatttcaggcgattacaagggcggttcaaaacgaaagcaagttaaaaaatgagacgcattttacaaggcgatttgccagagttgccagattatt

SEQ ID NO: 983980 - DNA, 120 bp, Artificial Sequence
  ENSG00000237380_13 (sequence is synthesized)
taatttgtatggactatagaaaaataattgtcaacttggacattgtctttaaattcttgtcactggcccaatctttttcttaagtttaaggaagctgcagagctggactacaagttacat

SEQ ID NO: 983981 - DNA, 120 bp, Artificial Sequence
  ENSG00000237380_14 (sequence is synthesized)
tcttcagctaatacgtgcttttctaatattttccccgagatattacatttagaaaatacgcaaagaaaccttttaggagtaaacaaaacgcacccgaactattcattataaaggaaagaa

SEQ ID NO: 983982 - DNA, 120 bp, Artificial Sequence
  ENSG00000237380_15 (sequence is synthesized)
cgcacccgaactattcattataaaggaaagaataaaaaatccataaataatacattgtaatcaaataatataaagtattctgcagacataattttttttaattaataaactccttttaat

SEQ ID NO: 983983 - DNA, 120 bp, Artificial Sequence
  ENSG00000240207_0 (sequence is synthesized)
cctgaggatgtaccccttgccctcagggtccacgatggacactagccatcagcaggactccctttatggatttcctagaagtctcacagggcacttgtgccctgtatcttattggcaaga

SEQ ID NO: 983984 - DNA, 120 bp, Artificial Sequence
  ENSG00000240207_1 (sequence is synthesized)
acttggttgcaaaggaagctgggaaatgtagtttttattcacggtggccatatgccaaaataaaactcaggattttgttactgaggaagaagattgtgtcttacgttgggtttcctagaa

SEQ ID NO: 983985 - DNA, 120 bp, Artificial Sequence
  ENSG00000240207_2 (sequence is synthesized)
gcaggcccagaaacaaagattgttcctaaaagaaatgctccgagcagaattcagtaaggagctagaagaaggatagccatgcaaggatctcagacagttatatgacaggtaggttcagcc

SEQ ID NO: 983986 - DNA, 120 bp, Artificial Sequence
  ENSG00000240207_3 (sequence is synthesized)
tgacctgaaggggagctctcaactgtaaacaatgcctctgagatgtccctgccccaggcagggtatctgggcttccattcttctatgcctgtcagccactggctaagagccaccctcgtt

SEQ ID NO: 983987 - DNA, 120 bp, Artificial Sequence
  ENSG00000240207_4 (sequence is synthesized)
gataacccaggtacttcagtctttctataggtgggcacaaaagggcagtagcacaagaacagccctcccagaagagctgcaggagccttaggtcagaagcaaaagcatgccaagtggaag

SEQ ID NO: 983988 - DNA, 120 bp, Artificial Sequence
  ENSG00000240207_5 (sequence is synthesized)
gggcagactcagagaaagggatctgggaatctgcagagccccagtggggtccctgcagggataatgcctagtgggaaggaagtagccacctctgtcactgaggcgaggaggggaagggtg

SEQ ID NO: 983989 - DNA, 120 bp, Artificial Sequence
  ENSG00000240207_6 (sequence is synthesized)
ggaatggctgatagtggccaacaggcagcctgtgcagcgtgtgtgcagttcctgcctatgagatgagatggtgagaatcatggaaagtcataagcaagagggaagacagaaaagaccagg

SEQ ID NO: 983990 - DNA, 120 bp, Artificial Sequence
  ENSG00000240207_7 (sequence is synthesized)
agaccaagtgctgctgtgtgagctcagggcactcttccgaggttagctattttaaatagtgataacagttacaatgggggcaaattgatgctgatcagcaatgcatgtagacatttaatt

SEQ ID NO: 983991 - DNA, 120 bp, Artificial Sequence
  ENSG00000240207_8 (sequence is synthesized)
atagtatttattttataaacagggattttctggaacacagagtatttcctttgcaagaactgtccatattctttgtccacttacctgtggggtggttggatttctggttgatttgtagaa

SEQ ID NO: 983992 - DNA, 120 bp, Artificial Sequence
  ENSG00000240207_9 (sequence is synthesized)
gccttggtctgtcatgggtatccctgtgttttttctcagttcatagacagattttgtgtgtacacagattcttcttccttgccacatactgtgtgggggagtgacattgctaactgtcca

SEQ ID NO: 983993 - DNA, 120 bp, Artificial Sequence
  ENSG00000240207_10 (sequence is synthesized)
ccacgttctccaaaagacctgtcatcatatcccacccctggcccagggctgctggaagactgtgccacataggaggtgaggaaagtatcagccagcaggttctgccccagcctctgcaca

SEQ ID NO: 983994 - DNA, 120 bp, Artificial Sequence
  ENSG00000240207_11 (sequence is synthesized)
gaagcagatgtgtccccacaagggtgtcctgatatgtcatgttccctagttccttagtcattgctcaggttatcatgagcattttagagaacttactttgtgtttaagaaacctaatggt

SEQ ID NO: 983995 - DNA, 120 bp, Artificial Sequence
  ENSG00000240207_12 (sequence is synthesized)
atataaagctataatgacttttaatcatatgaaaagatagtacagacggtgagaggggaaactgacatgacctgtttggtggacaatttgcaatatctattgaaattagaaatgcacatg

SEQ ID NO: 983996 - DNA, 120 bp, Artificial Sequence
  ENSG00000240207_13 (sequence is synthesized)
gctctgacccagcaattccaccttgagagtttataataacaatacattcacacatgtacataaagaagtatgtgcaaggatgttcatttccacatatggattgtaaactcctccacggca

SEQ ID NO: 983997 - DNA, 120 bp, Artificial Sequence
  ENSG00000240207_14 (sequence is synthesized)
gtgacactgaatgtctcattttctactctctattccctagaacagtgactggcacacaatagacacgaatacagatttttttttttaaacaatgaagagttaagggctgggaaaacacct

SEQ ID NO: 983998 - DNA, 120 bp, Artificial Sequence
  ENSG00000240207_15 (sequence is synthesized)
gtgtttcatggttgactaattatagtacctccatagaatggaatattgtacagtcatgaagaagaggtagattgaggtgtgtgtgatactgaaccatctctaaggtataatgttgttaac

SEQ ID NO: 983999 - DNA, 120 bp, Artificial Sequence
  ENSG00000240207_16 (sequence is synthesized)
agcaaggtgtagagtagggcaagtagtatgctgctatttgtttaaaaagaaaaaaataacatacataaatgtggaaatatgcaaaaactgtctctgcaaaggtttataagaattgccaat

SEQ ID NO: 984000 - DNA, 120 bp, Artificial Sequence
  ENSG00000240207_17 (sequence is synthesized)
ataggatgagagagaaactcttcaccattggctctcttttgtggtggttgcttttttcatgtgtgtataatgtatattgtctattctaaataagtaaataaatgaggtgctgtttccgaa

SEQ ID NO: 984001 - DNA, 120 bp, Artificial Sequence
  ENSG00000240207_18 (sequence is synthesized)
ttgcttgcttgttgtgtagttccagcttgtctccctttctctgagtcttgcctcgccacactctttcttgcctcggacctagtcatgtttcctcacactgaaacttccagggaaggagct

SEQ ID NO: 984002 - DNA, 120 bp, Artificial Sequence
  ENSG00000240207_19 (sequence is synthesized)
gctgagcagattcgtactgtagtgtcagtggctgccacggctcactgcattgctcatcttggaagtactgttatttaaatagggaccaggtcttgagccaagagacctaagttctgactg

SEQ ID NO: 984003 - DNA, 120 bp, Artificial Sequence
  ENSG00000240207_20 (sequence is synthesized)
agcagattgcagcattggcttctgtgccctatgctaggtagacgtatccagcagcccctgaacagctgtacttgcccccctcctatcctcttgactacataaagaggccagagagcagag

SEQ ID NO: 984004 - DNA, 120 bp, Artificial Sequence
  ENSG00000240207_21 (sequence is synthesized)
agagagggctctgagaggcattggctgtttattttccttgtcttaaccaacttgttctgccataacaaaataccacaaactgggtggcttaaacaacagaaatgtgttttcgatggattg

SEQ ID NO: 984005 - DNA, 120 bp, Artificial Sequence
  ENSG00000240207_22 (sequence is synthesized)
agttcctgccgaggcccctcttcctgacgtggcctgaaactgcatgctcacacagcagagagggaagcggcaagcctctgtgtctcttcttataaggacactaatcccatcatgggatta

SEQ ID NO: 984006 - DNA, 120 bp, Artificial Sequence
  ENSG00000240207_23 (sequence is synthesized)
gtaattatggttagacttcatctaactgtaatcgcctcccaaaggccccacctccaaataccatcacattggaggttagggcttcaacacatgaactggggggacacaattcagtctata

SEQ ID NO: 984007 - DNA, 120 bp, Artificial Sequence
  ENSG00000240207_24 (sequence is synthesized)
gcaaacccgtcccagagggcctgggatgtgtcttcgcagcagatgagaggactgggcatgaggagaccaggtggttggctgcggagaaagaaggtcatagtgacactgccatcctggtta

SEQ ID NO: 984008 - DNA, 120 bp, Artificial Sequence
  ENSG00000240207_25 (sequence is synthesized)
cctttggccaccccagcttgtggaatgtaagaaggcccaggagccagttcccaagcatctcaggccccaggttctcttagccaagccctgagaatacatcaagaacaggtgagggcatgt

SEQ ID NO: 984009 - DNA, 120 bp, Artificial Sequence
  ENSG00000240207_26 (sequence is synthesized)
ggacgcaggtgtgcggggggcctcccagcagctgtcccctcttcctgctaatgctgctctgattttcacctttgctcacctctctccagtgctgctgaacacacctcattctggcaatct

SEQ ID NO: 984010 - DNA, 120 bp, Artificial Sequence
  ENSG00000240207_27 (sequence is synthesized)
gactggagagagacagtgtcactgtggtgggttcagggataggctcaggaccctatttgggcaagtaagtcaggagaagcggttggtggagtcttggagggaagttgtcttgctcttctg

SEQ ID NO: 984011 - DNA, 120 bp, Artificial Sequence
  ENSG00000240207_28 (sequence is synthesized)
agagtgtgtgctctcccttcctctaccgtgcatgtgagaggaagtgtgtgccccagaagctggtggtgccatcttgcctccctcaggaaagaggctcaggatggtgtcgactcagtggaa

SEQ ID NO: 984012 - DNA, 120 bp, Artificial Sequence
  ENSG00000240207_29 (sequence is synthesized)
ggcagagatgaagcctggaaagaaaccaggcccttgggggtgttactaacccactggaccgtgacccatctgaagcctgccctgtctctagactcagaaccagttgcacagtggctcaga

SEQ ID NO: 984013 - DNA, 120 bp, Artificial Sequence
  ENSG00000240207_30 (sequence is synthesized)
gagtagacttggagccaggctgcccggttttatagccctgcttgacctgtgtgatccgagaataatcttgtttaatctccacaagtttgaggactaaactgggtgccacagagaattaag

SEQ ID NO: 984014 - DNA, 120 bp, Artificial Sequence
  ENSG00000240207_31 (sequence is synthesized)
taactggtcgaggttgtatcagtaagaagggagcacggaacagattcaagctcaggtatggcccacccaagtgctgcttgtacattccacaattgggtagactctgatttacttaagggt

SEQ ID NO: 984015 - DNA, 120 bp, Artificial Sequence
  ENSG00000240207_32 (sequence is synthesized)
ttcgattacagtggcaaagtgaattaagggccaggaaatgtggctttgtggttaggtaagttgagattatttcacttgaagagaagaatacagaagaagtcactcaatctttagaactat

SEQ ID NO: 984016 - DNA, 120 bp, Artificial Sequence
  ENSG00000240207_33 (sequence is synthesized)
gaagaagtcactcaatctttagaactatattcaaagatcatttccttttttttcttttttttttcttgagatggagtctcacactgtcacccgggctggaatgcagtggtgtgatcttgg

SEQ ID NO: 984017 - DNA, 89 bp, Artificial Sequence
  ENSG00000240207_34 (sequence is synthesized)
caaagatcatttcttagagaagaacagctagctgtctctgtcaccattaatgaaagcttcatttttttctggtttacctgggggctatg

SEQ ID NO: 984018 - DNA, 120 bp, Artificial Sequence
  ENSG00000240207_35 (sequence is synthesized)
atgaaagcttcatttttttctggtttacctgggggctatggaagaagtgataaagccttgtttctgacatgggcatttctccacatctcagggagcctggttggacttcaggcccctgtg

SEQ ID NO: 984019 - DNA, 120 bp, Artificial Sequence
  ENSG00000240207_36 (sequence is synthesized)
aggctgactctgtagtcctggagaaactcaacagccaggaacttaggaccatttgtgtgtggcatttgggctaaccagactggtggcttctaaagaagatggaaagcatcacgtttcctg

SEQ ID NO: 984020 - DNA, 120 bp, Artificial Sequence
  ENSG00000240207_37 (sequence is synthesized)
tatttaaattatttggtgatctcaatactggttgttagccaaagtacacaatggagacagcctatttgctctactacttttgatgtagaaatattactaagcttgagctgattaatagaa

SEQ ID NO: 984021 - DNA, 120 bp, Artificial Sequence
  ENSG00000240207_38 (sequence is synthesized)
ctgttacacatttctgtgctccccttactggtggcatgaaataattcttttaaaacctgccatgtgttcacatttaaaactaaaagtaatttagattacatggatttgagaagcccatgt

SEQ ID NO: 984022 - DNA, 120 bp, Artificial Sequence
  ENSG00000240207_39 (sequence is synthesized)
tgacacgtaattgccaacagatgggctttcaaatgtaatgaagtgaaaatggtcagtaccccatgtgttggattttgcaattttccaaagtaagctgtcatttttggcatgtcatgctag

SEQ ID NO: 984023 - DNA, 120 bp, Artificial Sequence
  ENSG00000240207_40 (sequence is synthesized)
ttaagaacacaatgtatttatagctcaattatacattttctgatgaatttggcatggcattttgtttttccatcagtcacttaagacaggacatttgccattccaagaatgaattaacac

SEQ ID NO: 984024 - DNA, 120 bp, Artificial Sequence
  ENSG00000240207_41 (sequence is synthesized)
ccacagagaattaagtaactggtcgaggttgtatcagtaagaagggagcacggaacagattcaagctcagatggagtctcacactgtcacccgggctggaatgcagtggtgtgatcttgg

SEQ ID NO: 984025 - DNA, 120 bp, Artificial Sequence
  ENSG00000240207_42 (sequence is synthesized)
tcaagcaaagggtgtttaaataaagcttgaaatcataaaccttatttcctgtttgagaagatggtgtattcattacagagtgaaataaaggattttaatgtttttttttttttccggcaa

SEQ ID NO: 984026 - DNA, 80 bp, Artificial Sequence
  ENSG00000240207_43 (sequence is synthesized)
atcctgaggctgcccagggtcgtcggggtccccggaccccgcgggcgccgccaccggggcgagcaacagcagcagcgcga

SEQ ID NO: 984027 - DNA, 120 bp, Artificial Sequence
  ENSG00000240207_44 (sequence is synthesized)
gggagcaggcagccgttgccggcggggctgcatggacgcaggaaagttggctcggcacccgacagacacgggctcggagcgggcagtgccggcgctcgcggaaataaggccgtggtgggc

SEQ ID NO: 984028 - DNA, 120 bp, Artificial Sequence
  ENSG00000240207_45 (sequence is synthesized)
tctgccttcctggagcacaccttctagctggagttgctgtttcttgccctcagaggcaagcctagcacagattcttcttccttgccacatactgtgtgggggagtgacattgctaactgt

SEQ ID NO: 984029 - DNA, 90 bp, Artificial Sequence
  ENSG00000240207_46 (sequence is synthesized)
aaacctcactgtaatctccattcccccgggttcaaaagattttcctgcctctacttgccaagaagctgggattccaggcatgcaccacga

SEQ ID NO: 984030 - DNA, 120 bp, Artificial Sequence
  ENSG00000240207_47 (sequence is synthesized)
aaagattttcctgcctctacttgccaagaagctgggattccaggcatgcaccacgatgcctagctaatttttgtacttttagtagaaatgggttcttgccatgttgaccaggctggtctt

SEQ ID NO: 984031 - DNA, 120 bp, Artificial Sequence
  ENSG00000240207_48 (sequence is synthesized)
caggaggaaaagaatcacaaacatctggagtttgttgactagaaaaattccttgtggtctgacagattaccatttcctacccagccattctcatcagagaaaccagtcccattttcaact

SEQ ID NO: 984032 - DNA, 120 bp, Artificial Sequence
  ENSG00000240207_49 (sequence is synthesized)
ggcgcggctagttgaaagttccacatgtttccccagaaaatggcatagccagaaggccctcaccagattccagcaccagcctccagaacatgagccaaataaatcatcgtttataaatta

SEQ ID NO: 984033 - DNA, 120 bp, Artificial Sequence
  ENSG00000285940_0 (sequence is synthesized)
agtcgccggccggccggtcggcccgccagcccgctcctgctccccggcaaagttgggagggaaaggtgtactcacctttgtgcatgcctgtgaacctgtccttcagaaccaacatggccc

SEQ ID NO: 984034 - DNA, 120 bp, Artificial Sequence
  ENSG00000285940_1 (sequence is synthesized)
taacagtgggcagcatgaaactgaggaacacagcaggaagctgatttaggcaaactcagcaggaagtgttccctgtgaacccatgagacttcatccctgcgttggtctggctggctttcc

SEQ ID NO: 984035 - DNA, 120 bp, Artificial Sequence
  ENSG00000285940_2 (sequence is synthesized)
ctgtgagatacaggttcctcctgaagagctgaagctccattccagctctagacttctccttgctttcagacttcaagatgagaagcatttttccagtccacaagtgttagaggacactgc

SEQ ID NO: 984036 - DNA, 120 bp, Artificial Sequence
  ENSG00000285940_3 (sequence is synthesized)
cgatgatgtgtgttttgcccaggctggactcagcttctttgtctcgcagcctggcgaagaggcagtgctgtgccaggaaatagcacccaggcaggactccagggtggggaccgctaatct

SEQ ID NO: 984037 - DNA, 120 bp, Artificial Sequence
  ENSG00000285940_4 (sequence is synthesized)
ggctttgccacaagaccactgtgggaggaggtactttctctttgtcagaagaacagaagcaaatggtctgcttatagccttttatgtgacgatgtgccctttctgccactgcaagggaaa

SEQ ID NO: 984038 - DNA, 120 bp, Artificial Sequence
  ENSG00000285940_5 (sequence is synthesized)
gagtcatctttgctcctccattttggtttatcctaagaaagaccaacactatgtctagcccagagagagaaacacataaaataaatacaagttaaatcttcaatgggacatcaagttcca

SEQ ID NO: 984039 - DNA, 120 bp, Artificial Sequence
  ENSG00000285940_6 (sequence is synthesized)
tgtacaaggctaacctagactataaagtccttgaaaatgtacacttgataagagtaggggtcttgcctgccttatccactgcatagctccagtcaagagaagtcattgccacggaaaagg

SEQ ID NO: 984040 - DNA, 120 bp, Artificial Sequence
  ENSG00000285940_7 (sequence is synthesized)
cacccaacaaacatgcctttaacttgttgaatgaacccatcaaattcctgatagtggaagtttggacactggagtcgcaggtggggaaagaaaccatgatgcaataggaccccaattaca

SEQ ID NO: 984041 - DNA, 120 bp, Artificial Sequence
  ENSG00000285940_8 (sequence is synthesized)
cgtgggttctgcttatgttagaaaagcttcctgactttgtgtgcagtcaagtcctgtggcttgtggccaagggaggatcttttcttttttacccatggaagatgacattggtatgttgga

SEQ ID NO: 984042 - DNA, 120 bp, Artificial Sequence
  ENSG00000285940_9 (sequence is synthesized)
gtaatgatccagaagataaacatgaatacagacaaattctgaatttggattcaaataacaagttgcacaaaaacaaggtactcagttatttctgagtattgctctgtgcgtggcactgtg

SEQ ID NO: 984043 - DNA, 120 bp, Artificial Sequence
  ENSG00000285940_10 (sequence is synthesized)
ctgtacattgaggatatgaagatgagtaagtctcagtctatatctttagagacctcacagcctggaaagagagttaaaaaataattactattcaacatggcaatggttataaaggagcag

SEQ ID NO: 984044 - DNA, 120 bp, Artificial Sequence
  ENSG00000285940_11 (sequence is synthesized)
attgacgaagaaacaatttggttattcttgactcagtggccaaggagggaacacagaatcatggcagcaaagatgaagctaaacagcctgtgtatacatatggaaaatttaaattcacat

SEQ ID NO: 984045 - DNA, 120 bp, Artificial Sequence
  ENSG00000285940_12 (sequence is synthesized)
gcacaggacaggctcatgctgtccttgcccatgcttagtctgcctatggcaataaaactctgattgacaatccagagctacagttgctaagataagccactaaggtggaccattaaggtg

SEQ ID NO: 984046 - DNA, 120 bp, Artificial Sequence
  ENSG00000285940_13 (sequence is synthesized)
gcagtgtcaacatttgcaggggtttagagaagggaaagaaattgaggcatcacccagtgggagagagaagtgtacagatagctttcatcatggagaaaaataaccctaatatcaaaatga

SEQ ID NO: 984047 - DNA, 120 bp, Artificial Sequence
  ENSG00000285940_14 (sequence is synthesized)
ccaggtttttgtgatgaggacttgactgtttctacaagcagctagtttgtatttgagtgttgagatttttgaagcatttggcatgattagcattgagtgaagtagcaaaaaacagcatct

SEQ ID NO: 984048 - DNA, 120 bp, Artificial Sequence
  ENSG00000285940_15 (sequence is synthesized)
tcagcaactttatatggccttcagagaatgatgctcaaacttcttggctgatattcaagtttctgcccatcatatccttgcctattttgacagccacatctccttctcttctactggact

SEQ ID NO: 984049 - DNA, 120 bp, Artificial Sequence
  ENSG00000285940_16 (sequence is synthesized)
cttccccagccagactgagctcctctctgcttcccaaacaggacatgtacttttctctatctttgcatcatctgctcatattgttccctactcttggaatgcccttcccaagccctctat

SEQ ID NO: 984050 - DNA, 120 bp, Artificial Sequence
  ENSG00000285940_17 (sequence is synthesized)
gtgcatgcgccatccaggaactgggatgataactcttggacgaaataggaactgttgagaagcagcaggaagtgggtcaccttaaacacagaagaaaccaaaggaaagatttgtttaaaa

SEQ ID NO: 984051 - DNA, 120 bp, Artificial Sequence
  ENSG00000285940_18 (sequence is synthesized)
tgaactggaacttgaggctaggaagttcctggatacctagacagctggaagaggagcatgaaccaggaggccagaagagacttcactccaatctggtgccctcactatggcacaactcat

SEQ ID NO: 984052 - DNA, 120 bp, Artificial Sequence
  ENSG00000285940_19 (sequence is synthesized)
ccaaagagaaaagctccatgaaaacatgttgagcaaaattattcgttctcatttcttaacgtagctttctgatttaatagtaaaaaaatgcttgttttggtttaaatttctctagttttt

SEQ ID NO: 984053 - DNA, 120 bp, Artificial Sequence
  ENSG00000285940_20 (sequence is synthesized)
agataccattttctctcccaaactaggtcatttgaattatctgctgatagttcaaatctgtagataatttgcttttactcacattcctaagaactaattacctgtacatataaaatgatg

SEQ ID NO: 984054 - DNA, 120 bp, Artificial Sequence
  ENSG00000285940_21 (sequence is synthesized)
aaatctcattatattttcttttaaaactctgacatgcatttaattacattagtcaattattactgtacatgctgaggatttgctattgaccagctcgtgctggaatatttactgcacaga

SEQ ID NO: 984055 - DNA, 120 bp, Artificial Sequence
  ENSG00000285940_22 (sequence is synthesized)
tctgcaattttaattaaagaaatgagaccccagctgcctgcaaacccaggccaaccccatttggtacaagcacaatacggagctctccagcgccggaggaggcccggaggcccgaggttc

SEQ ID NO: 984056 - DNA, 120 bp, Artificial Sequence
  ENSG00000285940_23 (sequence is synthesized)
gcagccccaggccccgagtccgctcaggacgcctctctctgaggatcccgggcccaaaccaaagagcaagtatgatttttagaactgtggaacttcatcctttcattttagcttctcctg

SEQ ID NO: 984057 - DNA, 120 bp, Artificial Sequence
  ENSG00000285940_24 (sequence is synthesized)
cctttgcttgccggaatcgggtgaaagcagaatatttaaacttctgccaaactcccaagaagctgactttgcaatgtgcagtgtcattcctcaggttgtttcccgcccatcaaatgccag

SEQ ID NO: 984058 - DNA, 120 bp, Artificial Sequence
  ENSG00000285940_25 (sequence is synthesized)
tggcctggattgaccgttgccactgtgcctggagagcccaggaaatacactatggtgatgaaaacgactgtggcaatccagcagtctgctctaactggatgattgtaagagggtaaagaa

SEQ ID NO: 984059 - DNA, 120 bp, Artificial Sequence
  ENSG00000285940_26 (sequence is synthesized)
agtcagacccagcccagtggatgagggcagggtctcactagtgttggtctcaccagtgttgagtagaagatgcccggagtgagtgagacaacttccaggactagaactgtgcgtggagtc

SEQ ID NO: 984060 - DNA, 120 bp, Artificial Sequence
  ENSG00000285940_27 (sequence is synthesized)
caaaccaggagagttggaggaaagagggcagctgaacatcatctttgtggatggaatcttgccagtaactaatgaatgcttcagtagctctactggatcttgggacaatctggtaaacag

SEQ ID NO: 984061 - DNA, 120 bp, Artificial Sequence
  ENSG00000285940_28 (sequence is synthesized)
acaagatactttcttggagcttggaagggaatatattaaaactgataaacaaatacataaaatgatcacaaactgctaaaagaactatgaaggaaacaaagagtgctaacaaagaactag

SEQ ID NO: 984062 - DNA, 120 bp, Artificial Sequence
  ENSG00000285940_29 (sequence is synthesized)
gaagcgttggagaacacagttgagaatgaatggttaagaaagccaagactcgaagaatgagatggagccagccaggttcagaacatagcagagcaatgcgtaacagagagcaatgcacag

SEQ ID NO: 984063 - DNA, 120 bp, Artificial Sequence
  ENSG00000285940_30 (sequence is synthesized)
catgtgcgaaggtcctgagtcagaaaagtgttggcttattgaaggaaataaaggcatctgtatggttggagaatgggcaaggtggaaacaagttacagaagaggggcttattgtgggaac

SEQ ID NO: 984064 - DNA, 120 bp, Artificial Sequence
  ENSG00000285940_31 (sequence is synthesized)
acacattcccagctgtgagaaggtgctggctgtgtcacctgcagccctgtcaatcatcagaattgacatggtgggactggccagcaagccatggcctcttcctccctctcttctgtatgt

SEQ ID NO: 984065 - DNA, 120 bp, Artificial Sequence
  ENSG00000285940_32 (sequence is synthesized)
tgatgcctgctgaaattgcattctgaactaaataaagaatgctccctgaagacaagcgggtgccagtgtctgggtttttccaagcctggccctggtcctagccccagtagttccccactg

SEQ ID NO: 984066 - DNA, 120 bp, Artificial Sequence
  ENSG00000285940_33 (sequence is synthesized)
gggcggtgggtggggagacatcagcacagccagtcagcaggtcagtgtgatacaaactcttcaatgcctgacaaatggggtattggtcattggtggcaatgtgtgaattctgacagcatc

SEQ ID NO: 984067 - DNA, 120 bp, Artificial Sequence
  ENSG00000285940_34 (sequence is synthesized)
atgtggacagcaggtgactcgtgtagatggacatcaaaatgtaaagagacatcgagtagaaacagaagctacaagagcctcacacccagacttgccctgtgagcctgttggaccaaatcg

SEQ ID NO: 984068 - DNA, 120 bp, Artificial Sequence
  ENSG00000285940_35 (sequence is synthesized)
gcctcagcacccctaagcccaccatggttggggagagagtgagcacgggaggcagaggaagaatcatctcacctctcatcaaatagagggcagtaaaactttagctaattagcaaccagt

SEQ ID NO: 984069 - DNA, 120 bp, Artificial Sequence
  ENSG00000285940_36 (sequence is synthesized)
tgccagagagtattatttaattaattcccccatctgaattcacttttattggaaagaggcaaccacaagaaaacaagatgagaagcagagacttaatgtaaaaaataactttgggggaaa

SEQ ID NO: 984070 - DNA, 120 bp, Artificial Sequence
  ENSG00000285940_37 (sequence is synthesized)
gtcgccttcatgtcacttctctgcttaaaacccgtcaatggtgtcttagcaatttcaggataaagctcaaatctcataacttagtatataactcatcacaccctacttgaccagtagtac

SEQ ID NO: 984071 - DNA, 120 bp, Artificial Sequence
  ENSG00000285940_38 (sequence is synthesized)
tgagatttttgcactttccagatatgttatgctctcttgctctcttacctccacttggggccccttctgcccctcctcatcccaagtcatatcctctggacagtttcccaggccctagac

SEQ ID NO: 984072 - DNA, 120 bp, Artificial Sequence
  ENSG00000285940_39 (sequence is synthesized)
tgtgtttgagcctctgcgataacacttattatattatgcattaatagcaagagaggctggtatgaccagccagcccatgggctcctcaggcctgattcactgtagcatccatgaggtcag

SEQ ID NO: 984073 - DNA, 120 bp, Artificial Sequence
  ENSG00000285940_40 (sequence is synthesized)
ccacatgggaggaggttggtgaacgcatcttgaactcatgcattcataacgtgatgactcagtgaaggaaatggggtcagtttcattgtcccgcagcccacccaatccaatgattacctc

SEQ ID NO: 984074 - DNA, 120 bp, Artificial Sequence
  ENSG00000285940_41 (sequence is synthesized)
tacaacataaaatacgacttgcatttaccaagcttctctcacttgtaaagtggagatcatacagtccacctgatgctccttatgaggggaaatgagctaatacacataaaaagcagtgcc

SEQ ID NO: 984075 - DNA, 120 bp, Artificial Sequence
  ENSG00000285940_42 (sequence is synthesized)
tggcactccaagagtgcttaatgaatgttagctattattctgcacaaataagttgatagtggcccatcccagtactgttctggaaacaagtaagtgaaagtgatttcctctgttgttaga

SEQ ID NO: 984076 - DNA, 120 bp, Artificial Sequence
  ENSG00000285940_43 (sequence is synthesized)
accattagcaactagttagtgaaaatgcttccagaacacaatgtctgggagaggggtgggctgggtaggccaggagaatatctcagtcagacctgggatcaggaatcagacttttagggt

SEQ ID NO: 984077 - DNA, 120 bp, Artificial Sequence
  ENSG00000285940_44 (sequence is synthesized)
tcaccaggactctctactcaggctgttggtgttgccagatgtcaaggttggattggggaaatggtagtcaggcagggatggaggaaactcctagaagagcccgtgccgatctctagctag

SEQ ID NO: 984078 - DNA, 120 bp, Artificial Sequence
  ENSG00000285940_45 (sequence is synthesized)
gctttatttaagttatgggaaggaatccatgctgggtaaatgaggtaatgaatgtgcaagtgctttgcaaactgcaaagtgctatacaaatgtgaagcattattacactcatctatttct

SEQ ID NO: 984079 - DNA, 120 bp, Artificial Sequence
  ENSG00000285940_46 (sequence is synthesized)
cttctttgtgttcccagggtttcctaataagagctctttttgaaagtcctagcctgactttgggtaactaaaaggaaagggtgtgtgcagtgtggtaaattgggggttttatgtaccctg

SEQ ID NO: 984080 - DNA, 120 bp, Artificial Sequence
  ENSG00000285940_47 (sequence is synthesized)
agtatagcagaggtcctggcagggagagcagagacttgctggcaacaggaattggggagtgaagatgctgaacgtcacacagtgattaatcccttccgatctgggatgttttccagttcc

SEQ ID NO: 984081 - DNA, 120 bp, Artificial Sequence
  ENSG00000285940_48 (sequence is synthesized)
aggggccatcctggagctgctcaaaccattctagagagacaggatggcctgagctgagaagggtgggagcaaacccagggtcctcgtggctgagagtaagtgcaggctgtcatgggaaaa

SEQ ID NO: 984082 - DNA, 120 bp, Artificial Sequence
  ENSG00000285940_49 (sequence is synthesized)
gttctcatccctgagtctgcatttgtaactcagtcacccagcctggctcagcacaatgcaaaccatttccagctgctttgtgtaaggaataaggactggcttgagaagaagggaagagat

SEQ ID NO: 984083 - DNA, 120 bp, Artificial Sequence
  ENSG00000285940_50 (sequence is synthesized)
ctgcccctaatatccctgattatctcagcagcatggattcaccagcctgatttgctgcttcttcctgcatccagcctgctcctgggtctccttccccacctcacagccatggcaaccaaa

SEQ ID NO: 984084 - DNA, 120 bp, Artificial Sequence
  ENSG00000285940_51 (sequence is synthesized)
tgcacgggcttgtgaagaccagcagcccaacttcagcaaggtctcgctggcctggacagaagagccaaggtaccagatccatttccaaggcaaaagtccccaagtttacagttaaactca

SEQ ID NO: 984085 - DNA, 120 bp, Artificial Sequence
  ENSG00000285940_52 (sequence is synthesized)
acttgcttatttgtggattttgctggggcacagtagccccacctaaagggagtcacatgaaatcttagccttttacttgtcacagagtataagaataaaacctttgatgattgaacggat

SEQ ID NO: 984086 - DNA, 120 bp, Artificial Sequence
  ENSG00000285940_53 (sequence is synthesized)
tatcctcaggataacatctgtgattcttcatgagagttatgtcttcttaaacccttggaagctgtcaacactacagatttcccaaagcaccaagctgcaaacagcagattgctctcaagc

SEQ ID NO: 984087 - DNA, 120 bp, Artificial Sequence
  ENSG00000285940_54 (sequence is synthesized)
aatgatgctgaagcatgaagcaagaatcatgttcccatatcagtgttttcactgctctgaacccagcacctagcacagctcctgatagagctgtgtcaaacatgacagaactcctgatag

SEQ ID NO: 984088 - DNA, 120 bp, Artificial Sequence
  ENSG00000285940_55 (sequence is synthesized)
agctgagagtcaacatgtccgttcaatgagtgaataggagtgggctatcccaatgcaaatttcaaagctctcagcaagacaaggtggagatgaattaccatgtgcatggagagaagccat

SEQ ID NO: 984089 - DNA, 120 bp, Artificial Sequence
  ENSG00000285941_0 (sequence is synthesized)
ctccttcaaaggcacacaaggtgggactgtccagttacagggaacacacttcagagtttctaccaattctacattatggtcccagcttcaaatcaatgcagcctctattgcttcctgatg

SEQ ID NO: 984090 - DNA, 120 bp, Artificial Sequence
  ENSG00000285941_1 (sequence is synthesized)
cttgataacatcacttatgttgcccaggaagagctttgagttactgatgactctcattccatgtcgctatgtgttcattcactctgcaatgatttactgaatgccttctatgtaccaagc

SEQ ID NO: 984091 - DNA, 120 bp, Artificial Sequence
  ENSG00000285941_2 (sequence is synthesized)
actctgccaggtgcttgggtacaaaaggttgccacataacttggctcatagcttcttcctctatcttcaaagccagtgctggctgattgcatctcccgctggccaccaacagaaaaagtt

SEQ ID NO: 984092 - DNA, 120 bp, Artificial Sequence
  ENSG00000285941_3 (sequence is synthesized)
ctccaattttgaggacttccgtgattttattgggcccacccagataattcagggtcctctctcccgctcgaggttcttaataaaaccacatctgcaaattctcttttccaggaaagctct

SEQ ID NO: 984093 - DNA, 120 bp, Artificial Sequence
  ENSG00000285941_4 (sequence is synthesized)
gtagacaacgattgtaacagaactgagaaagtgaaaccaaaaagtggaaatacaactctagtgccctgaggaagatggtgaatgagttaagcattaatattacaggaaagaagactggat

SEQ ID NO: 984094 - DNA, 120 bp, Artificial Sequence
  ENSG00000285941_5 (sequence is synthesized)
ttctgggcaagttcacagaggaaaatgaaagcacatttattaagaaagtaaagcaataaaacaaaaacaatggctactccacagacacagcagctctgaggctgctggatggctactttc

SEQ ID NO: 984095 - DNA, 120 bp, Artificial Sequence
  ENSG00000285941_6 (sequence is synthesized)
aagtatgagttttcttgtttcaagacagctttccttctcatgctcctttgatcctgtggttctgcaatcttcagcattcagatcaaggtggctgtattcattttcaagccagagaatgga

SEQ ID NO: 984096 - DNA, 120 bp, Artificial Sequence
  ENSG00000285941_7 (sequence is synthesized)
aggaataagaagtatggcacatgaatgttattatgatccagctgtggaagtaacatcactttcattcacattctattggcactcggtcacatgactacatttaaccacaagacaggttgg

SEQ ID NO: 984097 - DNA, 120 bp, Artificial Sequence
  ENSG00000285941_8 (sequence is synthesized)
aaagtatgtactatctgtgcgcccaggaaaacagaaaagcattggtgcagtgtttggaagttgagaggaaaaatcacagatgtaccaaaaaccaccatatgcccaaggtcaataacaaac

SEQ ID NO: 984098 - DNA, 120 bp, Artificial Sequence
  ENSG00000285941_9 (sequence is synthesized)
tggaatcagcattaatcatcagaggatcttcagaaattttgattaacatcagtagaagggatagaaaggttgatggcagcacaaggctttggaacgagactatctaagttcaaatctgga

SEQ ID NO: 984099 - DNA, 120 bp, Artificial Sequence
  ENSG00000285941_10 (sequence is synthesized)
ccccaccactctcaagatccctcactctttactacttatgcaaattgaggaagttatttaatgtctgcttgtgagcaggtttctttaatctctaaaatgaatcttataacaaatggacct

SEQ ID NO: 984100 - DNA, 120 bp, Artificial Sequence
  ENSG00000237389_0 (sequence is synthesized)
attaaatataatgtttaaaaggtgaactgttaaaagcaaggattacatagtgtttatcttctggaggggtgctcataattttcttttttttacaatccagaggtcttctattttattttt

SEQ ID NO: 984101 - DNA, 120 bp, Artificial Sequence
  ENSG00000237389_1 (sequence is synthesized)
ctcaagctccttcccatttgttctcacacagtgcgcttctctgggcagagcagactggcacttctgctgaatccagattcacatatacgtgaccaaagggaacaactccatgcttcctaa

SEQ ID NO: 984102 - DNA, 120 bp, Artificial Sequence
  ENSG00000237389_2 (sequence is synthesized)
aaggcctagaagacatctaccaggagcctctcctctttccctttgtgtttgtcattttgtcgaattactggaagacggtggttctggccaaaagggccataataaacttttattttcttg

SEQ ID NO: 984103 - DNA, 120 bp, Artificial Sequence
  ENSG00000280711_0 (sequence is synthesized)
gcagacttttagaagaactaacttcaaaaaagattccctatataataagagtcattttaaactgaaatgatcaagacctcctagggattctaggtcatgcctaaaccatcacggtcaagt

SEQ ID NO: 984104 - DNA, 120 bp, Artificial Sequence
  ENSG00000280711_1 (sequence is synthesized)
tggacatgtatagagacctggtactctcactcttccaccttcggccccacttatatcccaggctgggcattgaagttccccatcagtcagttggacgggggtacaggacaggccccttta

SEQ ID NO: 984105 - DNA, 120 bp, Artificial Sequence
  ENSG00000280711_2 (sequence is synthesized)
aacgcagaactccctcaatactgcagaacactggaagagctcttgttcaagtgggtaagtgcagcctgagtgtctggtgagatcaaacctgaagagagcgtgagataaggagagagttga

SEQ ID NO: 984106 - DNA, 120 bp, Artificial Sequence
  ENSG00000280711_3 (sequence is synthesized)
gtcattagtcatctcttttaactaactctctgaagttggctggcttcacactagacctggtgattaatggtaaagagatagctcttgcaattcaacttctgtaagtagaaagaaatttaa

SEQ ID NO: 984107 - DNA, 120 bp, Artificial Sequence
  ENSG00000280711_4 (sequence is synthesized)
agcttcccctgagcattcgcttcctcttcgaatgcttcaaaacaaatctcagcatcagtaggctgatgccagttctcatcatgccccacaggccttgatgagggagacggagagagccag

SEQ ID NO: 984108 - DNA, 120 bp, Artificial Sequence
  ENSG00000280711_5 (sequence is synthesized)
gtgtgccctattgaacaggccccaatggttctctgccttttcatagcaatctcctaaagggagaaccagagtcatcaaatctcaggacaaaatggcagccctaagagggcaatccactgt

SEQ ID NO: 984109 - DNA, 120 bp, Artificial Sequence
  ENSG00000280711_6 (sequence is synthesized)
cagaaagcatgcataagctattattctgaagagaagaagattatttccattcactatagggctagtctgaagtttgcaaagaagtccttttcattcaattatcccttgaaggaaagtatg

SEQ ID NO: 984110 - DNA, 120 bp, Artificial Sequence
  ENSG00000280711_7 (sequence is synthesized)
gttttggctttgaaatttttcttaatatgtaagcaaaattcttagttctggagttgcagttactcagttatcaaaaatgatacagataagataacaaaccccattaaccacccagttgct

SEQ ID NO: 984111 - DNA, 120 bp, Artificial Sequence
  ENSG00000280711_8 (sequence is synthesized)
caaacagaaatctaggattcatgttaattcctttcttctttcacccctcacacccaatccatttgtttcattagttctcccttcaaaataccttaattcatccactttctccattctcat

SEQ ID NO: 984112 - DNA, 120 bp, Artificial Sequence
  ENSG00000280711_9 (sequence is synthesized)
ggcaccattctaatataaatcatgtctcacctgaattgttatcataacctcttaaacagaactaactcttgcttccatagtctatttcatggcagccagagagagatttttaaaacaccc

SEQ ID NO: 984113 - DNA, 72 bp, Artificial Sequence
  ENSG00000280711_10 (sequence is synthesized)
tgagatcgctcaaaaaacaaaaaaattggccaggcgtggtgatgcatgcctgtaattccagctactagggag

SEQ ID NO: 984114 - DNA, 120 bp, Artificial Sequence
  ENSG00000285945_0 (sequence is synthesized)
ggggagcatctgacatcctggaacagcaccccacacctccagggggagcatctgacagcctggagcaacaccccacacctccaggggagcatctgacagcctggaacagcactccacacc

SEQ ID NO: 984115 - DNA, 120 bp, Artificial Sequence
  ENSG00000285945_1 (sequence is synthesized)
tccaggggagcatctgacagcatggacaagtcctgccccccggttagtgtctgaattcctggaatatgtgctgtccttttccaccagaggaaccaggagtatgggaggaacatgaaagtg

SEQ ID NO: 984116 - DNA, 120 bp, Artificial Sequence
  ENSG00000285945_2 (sequence is synthesized)
tccctgactcctccaagtaaaggagactccctttcccggtctgctcagtaatgggtgccttcccagacactggtgttaccacttgaccaaggggccctcaagcagcccttatgcgggtgt

SEQ ID NO: 984117 - DNA, 84 bp, Artificial Sequence
  ENSG00000285945_3 (sequence is synthesized)
acttgaccaaggggccctcaagcagcccttatgcgggtgtgacagagggctcacctcttgccttctatcacccactggttatta

SEQ ID NO: 984118 - DNA, 120 bp, Artificial Sequence
  ENSG00000244968_0 (sequence is synthesized)
gccgcgcgcccgcgcgcgcgggtgctccaaggagtcggaggaacgcggccgcgcgacgggccccggacgccgagggtggtgcttcctccgagcctccggtggtgaggccgctctcagaag

SEQ ID NO: 984119 - DNA, 120 bp, Artificial Sequence
  ENSG00000244968_1 (sequence is synthesized)
ctcagaaggtcatggaagcgcaggggagagcgaggcggccgagcccaggcaaatcctcgagaaaggccgagtgcgcgacggctctgcggggaggaccgcgcctccccgaatgcggccgct

SEQ ID NO: 984120 - DNA, 120 bp, Artificial Sequence
  ENSG00000244968_2 (sequence is synthesized)
gctgccgctgcaaacagtgccttgaggagaggaaagcggggaaccgtgttttcgccgcctctgtaaccactgcacacaagaaaaccagcttctgggagagggggatgattgttgggactt

SEQ ID NO: 984121 - DNA, 120 bp, Artificial Sequence
  ENSG00000244968_3 (sequence is synthesized)
tgcgaattacctaaacagcccagggccgaggcgccgccgctcgcgtcctggtcctcctgccgggtgtggggctcccctgcccgagatggccagcgggcgcgccgagagtatcctggagcc

SEQ ID NO: 984122 - DNA, 120 bp, Artificial Sequence
  ENSG00000244968_4 (sequence is synthesized)
atctagtcttgcctcggaggcggggtgggcttatttgtgcggagaagaaacggatctcttaatggggtgagatttttcctccgtacattgttcccatttccgcagtttcacttggcctcg

SEQ ID NO: 984123 - DNA, 120 bp, Artificial Sequence
  ENSG00000244968_5 (sequence is synthesized)
gttttctagcagagtaatcaccaaatgaaattagctggagagcgtttgatggcgcagaatcacggtctgaagatgtttacgctgtatgccggacgcgtttgatggtgttctcttcggcac

SEQ ID NO: 984124 - DNA, 120 bp, Artificial Sequence
  ENSG00000244968_6 (sequence is synthesized)
aattaattttgcaaagttcagaaatgtgccagacagagcccctggcacgcagtcaggactctacagacacaccttgagtaggaaacaggcttgtttgtttcatctgtgatttatgtgatg

SEQ ID NO: 984125 - DNA, 120 bp, Artificial Sequence
  ENSG00000244968_7 (sequence is synthesized)
caccagcaccaaggccaacgtgttttttaaagacctttcgatgaaactccaaagcaatttataaattggcaaaatgaagcttgttttgtaaaataactcttccttgttgatcatgtaatt

SEQ ID NO: 984126 - DNA, 120 bp, Artificial Sequence
  ENSG00000244968_8 (sequence is synthesized)
aaatgggcaacaaaacacctgaaaggacatttactgaaaagtagactcccaaaacaaaaatatgtatttcacagctagatacggtcgctattagcgtcctaatggccaactccatccatg

SEQ ID NO: 984127 - DNA, 120 bp, Artificial Sequence
  ENSG00000244968_9 (sequence is synthesized)
tgcgtattttgaacactaaaaacgcctcctgttacccctaagaccttgtttggataacatttttctattataagtactcgaaaccaaccccatttaagatgtttacccttattcttgagt

SEQ ID NO: 984128 - DNA, 120 bp, Artificial Sequence
  ENSG00000244968_10 (sequence is synthesized)
ccttgatggtttgggaaatttatcattattcatattgcacaatcctgtcactgtcttttccattaggcacagtgcctaaggtccacaatatttttagaggcccacaaaaaatattttaat

SEQ ID NO: 984129 - DNA, 120 bp, Artificial Sequence
  ENSG00000244968_11 (sequence is synthesized)
gtccacaatatttttagaggcccacaaaaaatattttaatttcttttcaaatcagaaggaaaaaaaatttaggtttaagaaagtattttaatatatattaatatatttgtttttgtgcta

SEQ ID NO: 984130 - DNA, 120 bp, Artificial Sequence
  ENSG00000244968_12 (sequence is synthesized)
tgtatatatattttaatggagtaaggggctcaacgaaggcaaaaaggcctagagcccaagaaaaacatgatgtggccctgttgcctggggttgaaaaatcccattccatgagaagaattt

SEQ ID NO: 984131 - DNA, 120 bp, Artificial Sequence
  ENSG00000244968_13 (sequence is synthesized)
agttttaagaatattacataaaatgctcatttctgtggccttgctataatagaaagatggagattcagagtagtgataatggctaacatccacctgatacacaccatgtgtccattacct

SEQ ID NO: 984132 - DNA, 120 bp, Artificial Sequence
  ENSG00000244968_14 (sequence is synthesized)
cttaatcctcacagcacacctgtgaaataggtactattctcacacttagggggtaatgcaggttttgtggggcctgcaatttatgcaatttgggtggtcctcttaaagaaaaagcaaata

SEQ ID NO: 984133 - DNA, 66 bp, Artificial Sequence
  ENSG00000244968_15 (sequence is synthesized)
acaatcgtggtggaaggagaagcaagtaccttcttcacaaggaagcggaaagaattgtgagcggag

SEQ ID NO: 984134 - DNA, 120 bp, Artificial Sequence
  ENSG00000244968_16 (sequence is synthesized)
taccttcttcacaaggaagcggaaagaattgtgagcggaggaacttgccaaacacaaaaccgtcagatcgcgtgagaattcagttactatcacgagaacaacacgggaaaactgtcccca

SEQ ID NO: 984135 - DNA, 120 bp, Artificial Sequence
  ENSG00000244968_17 (sequence is synthesized)
taatcaagtcatttctctccctaacaagtgaggattacaattcaagatgaggtttgggtaggaacacaaagcctgaccctatcccacagcatgtccaggctgccctagcaccacccaata

SEQ ID NO: 984136 - DNA, 120 bp, Artificial Sequence
  ENSG00000244968_18 (sequence is synthesized)
gaagggaaaatggcagagggaaagtcctagtggaaagagacctcagtctcagctaattgtggtgacaatatattgcttttgcaaattgtacataaacatatgaccaggtgaatgtatcgc

SEQ ID NO: 984137 - DNA, 120 bp, Artificial Sequence
  ENSG00000244968_19 (sequence is synthesized)
caaggctcctgccaaggcctgggatggaggcctagagaagatgcccgaaagtttatgctgtgtgagcttcacagaagacctgccttccatgtatacccattttacaggtgtctgtgcggt

SEQ ID NO: 984138 - DNA, 120 bp, Artificial Sequence
  ENSG00000244968_20 (sequence is synthesized)
gcagaaactgtacaactgtatacagtgaccatttctactctgggtctctaaacaagggctggtatcgttacagagactgaagactgaggaagaccatctctgtaggatgccaaggattga

SEQ ID NO: 984139 - DNA, 120 bp, Artificial Sequence
  ENSG00000244968_21 (sequence is synthesized)
ctggagaaagtctggggtccctctacctgggatgtgattcagtacccaatggtggagcggtcgttgaggaatgaagacacatacaaagggtaaaggagcagaattttccacaaatgagtt

SEQ ID NO: 984140 - DNA, 120 bp, Artificial Sequence
  ENSG00000244968_22 (sequence is synthesized)
catttataaagagaaaggcaagctttgatgacaacaccttcacaaaatggaggcctttgaaaacattggtctggattgaggagttggagaagaatgaagtgcacatcaaccaaacagaag

SEQ ID NO: 984141 - DNA, 120 bp, Artificial Sequence
  ENSG00000244968_23 (sequence is synthesized)
agaagcaatttggaggaggaaaaaatcagttcttcatgaaaggatcacattgatcttggttcatcccagtgcctcctctgcagacaatcttgtcctcagtctttcaattgttttcttccc

SEQ ID NO: 984142 - DNA, 120 bp, Artificial Sequence
  ENSG00000244968_24 (sequence is synthesized)
atgccctgacaagcgaaccagatcaggaatttaggagcagcttacctaatggcacctggttacctaatggcaccctcaacagcttacctaatggcaccctcacttggttctggctccggg

SEQ ID NO: 984143 - DNA, 120 bp, Artificial Sequence
  ENSG00000244968_25 (sequence is synthesized)
cctctcacaagattgtacacatgatgatggccaagtttgcagtcatctgaagtcttgactggagctggagactacatttccaagatggctcactcatattgctagtaagttggtggtgtc

SEQ ID NO: 984144 - DNA, 120 bp, Artificial Sequence
  ENSG00000244968_26 (sequence is synthesized)
tgttggcaagaaaccccaattcctggtcatatgaatctttccatagggctgtgatgagagtcctcataacagggcagctggtttacccctaagcaaataatccaagagagagaaacgcag

SEQ ID NO: 984145 - DNA, 120 bp, Artificial Sequence
  ENSG00000244968_27 (sequence is synthesized)
aagccacaatgtcttttgtgacccaaccttgggagccacataccatcatttctacaatgtcctgttgcttatgcatgttggcactattcattgtgggaagagactacacaaggacatgga

SEQ ID NO: 984146 - DNA, 120 bp, Artificial Sequence
  ENSG00000244968_28 (sequence is synthesized)
taccggaaggaagcgaccactggggtcatcttggagactggctaccacaagatgtttgacagatctagaagtcttgaaccaaaggtcgttttgtcaaatgctcttgtcattttgataata

SEQ ID NO: 984147 - DNA, 120 bp, Artificial Sequence
  ENSG00000244968_29 (sequence is synthesized)
aactcagtgtcttagaggtgctaacaaaaaggttatatgtacccagaaattgaaagcggctggaattcaacttcttgagtgccatcatgtttttttcctgctacatggtttaataaagta

SEQ ID NO: 984148 - DNA, 74 bp, Artificial Sequence
  ENSG00000244968_30 (sequence is synthesized)
caatttggaggaggaaaaaatcagttcttcatgaaaggatcacattgatcttggtaagtgtaaactctagatgc

SEQ ID NO: 984149 - DNA, 120 bp, Artificial Sequence
  ENSG00000244968_31 (sequence is synthesized)
agttcccataatctccatgtgttttgggaggggccccatgggaggtaattgaatcctgggggcagttattcccatgctgctgttatcatgatagtgagtgagttatcatgagatctgatg

SEQ ID NO: 984150 - DNA, 67 bp, Artificial Sequence
  ENSG00000244968_32 (sequence is synthesized)
gttttataaggagcttttccccacttgcttggcacttctccttgctgctgtcatgtgaaaccatccc

SEQ ID NO: 984151 - DNA, 120 bp, Artificial Sequence
  ENSG00000244968_33 (sequence is synthesized)
ttacccagtctagggtatgtccttatagcaacgtaagaacagactaatacaccatgtcagtgagccctcaccctctgaacatacaatctactaattcctactaatttcttttgcagagtc

SEQ ID NO: 984152 - DNA, 120 bp, Artificial Sequence
  ENSG00000244968_34 (sequence is synthesized)
gtattcagcttgattccagcctgagtgtccaggcagttggtacccacagccccttctgggccccaggggaaggcatccttcccctccctcctccctgaggctctgaggtggctggcctcc

SEQ ID NO: 984153 - DNA, 120 bp, Artificial Sequence
  ENSG00000244968_35 (sequence is synthesized)
tgcctggctgtgccagaaagcagcatgaccaccagcactactgtggttaggacaagaagaaaatctcgggcattcacagctaaactatggtttgagaaatgctggcgactaagggttggc

SEQ ID NO: 984154 - DNA, 120 bp, Artificial Sequence
  ENSG00000244968_36 (sequence is synthesized)
tgggtaaaggaataagaatagcagctgcaatgcactctttgactctgcctctcccaaaacagtccctaaaaggaccatagaaaggatcacaatgttcacggctgggcttggcatagtctt

SEQ ID NO: 984155 - DNA, 120 bp, Artificial Sequence
  ENSG00000244968_37 (sequence is synthesized)
agtcctggggtgagggctggtgagaaacccacaagggtttcttttggggtctttctgagggtactaaagggagtctcatggcccatcctacttctaagtagcactcttttggccctaaga

SEQ ID NO: 984156 - DNA, 120 bp, Artificial Sequence
  ENSG00000244968_38 (sequence is synthesized)
tctaagtagcactcttttggccctaagaaagacctgctggaagtcaggattttttttcagtccagtttaaaatcccagatgaaattagccgagtgtggtggcatgcgcctgtaatcccag

SEQ ID NO: 984157 - DNA, 82 bp, Artificial Sequence
  ENSG00000244968_39 (sequence is synthesized)
caagtctttttcaatgcagaagcttaaagaagacactaaaaaatgtgtttaagatctctttaaactgaagtcttctgaacaa

SEQ ID NO: 984158 - DNA, 120 bp, Artificial Sequence
  ENSG00000244968_40 (sequence is synthesized)
atgtgtttaagatctctttaaactgaagtcttctgaacaagtgaagcaggtacatgcctgggaagacagccagggaacaggcagctacatcaaccaagaaggctgacaacatgttccatc

SEQ ID NO: 984159 - DNA, 120 bp, Artificial Sequence
  ENSG00000244968_41 (sequence is synthesized)
ccacaactatgtggtaattgcaaagatgagaaaatagcagagatcctccagtcagccctggaatgagtttaggggagagaaatcatgcaatctcttagtaacatggcatctgtaaattca

SEQ ID NO: 984160 - DNA, 120 bp, Artificial Sequence
  ENSG00000244968_42 (sequence is synthesized)
ggctcttcgagtgtctgatagaagaaacacaccttacccacagccatgttacattggccaaaacaggtcacgtggccacacttggggccagtgaagtagagaaggataatatttctacag

SEQ ID NO: 984161 - DNA, 120 bp, Artificial Sequence
  ENSG00000244968_43 (sequence is synthesized)
aaaagggataccacagggaggagcagccaacattttgaacagaaatataatctgctatataggacatttcataaagtaggtcaaatatttttggaaaaaaaaaagaggggagtctatgta

SEQ ID NO: 984162 - DNA, 120 bp, Artificial Sequence
  ENSG00000244968_44 (sequence is synthesized)
tggtcagttaagtttaggaactcctacataatacccatctctagagctatgcaatgtaaaccagcacaccgaaggctctcagaagtcctgcaatagaaaaataaaatcaagattgtttaa

SEQ ID NO: 984163 - DNA, 120 bp, Artificial Sequence
  ENSG00000244968_45 (sequence is synthesized)
ttttgggcctgattctctggaactgcgggaggaagctgaatgctggtccaccttttaacaatgtggccagcagccctgggttgatactggaagcaaacattagtctggtaaactacacaa

SEQ ID NO: 984164 - DNA, 120 bp, Artificial Sequence
  ENSG00000244968_46 (sequence is synthesized)
ggacaaaggtagaacaggacacacaggggtaacactgaccttagaggggtgttatggactgaatatttgtgttctgctcaaaattcgtatgttgaaacatatgtctatctcatgatttcg

SEQ ID NO: 984165 - DNA, 120 bp, Artificial Sequence
  ENSG00000244968_47 (sequence is synthesized)
ctcccctctaatgtaatggtagtagaaagtggggtctttggaaggtatttaggattagacgaggttacaagatggagccttcatgcatgggattagtgtccttaaagagagtcctgagag

SEQ ID NO: 984166 - DNA, 120 bp, Artificial Sequence
  ENSG00000244968_48 (sequence is synthesized)
agcttgcttcctctttctgccacgtgaggacacagggagaatactgctgtctatgaaccagaaaataagccctctctagacaccttatctgctgacaccttgatcttggccttcccagcc

SEQ ID NO: 984167 - DNA, 120 bp, Artificial Sequence
  ENSG00000244968_49 (sequence is synthesized)
ttgaccagagaaggttacagctggaggccccagagattgcccacttcccccctccatttgacagcaagggaaacaatggccagagaggatctggaactttctctcaatttcagtgaaggc

SEQ ID NO: 984168 - DNA, 120 bp, Artificial Sequence
  ENSG00000244968_50 (sequence is synthesized)
cagaggtaaaatcaggattgtctgaagacaagtaaggtcaggtgcatagggttatatgtaggagtatagttaacaggtgtcagaaacttggatttaatttagaggtggttaggacatgca

SEQ ID NO: 984169 - DNA, 120 bp, Artificial Sequence
  ENSG00000244968_51 (sequence is synthesized)
taatatttttcaactatgcgtgaaatctgggattctgcatttatttaaaatataggattgtccattaattctttctcttgagagggcgcttctttcagaaatgatctaggcacttacaaa

SEQ ID NO: 984170 - DNA, 120 bp, Artificial Sequence
  ENSG00000244968_52 (sequence is synthesized)
cattttaaaaatatatacacgtgagatcatactttcatagtgatataagcatcattgctcatatccctaatgaacagatggggaaaaggaggtagagacagagagagagacagagagtca

SEQ ID NO: 984171 - DNA, 120 bp, Artificial Sequence
  ENSG00000244968_53 (sequence is synthesized)
gcaactcaccacaagaatctcctggttgcctgtctgggcttctgtcagctccatttagttgaatttctattcaatattattactgaggtcttatacttaagaacatgttctttgggtttc

SEQ ID NO: 984172 - DNA, 120 bp, Artificial Sequence
  ENSG00000244968_54 (sequence is synthesized)
ctgcttatctccaagctgaagaatttattttcttctatttgcttttccaatcttcagcttccatgaccttaaaaaaaaaagtacacaaactgagctggtctaagagcagcctgtttgcaa

SEQ ID NO: 984173 - DNA, 120 bp, Artificial Sequence
  ENSG00000244968_55 (sequence is synthesized)
cctgatatgagacctggaatgcaaccagataaaccttggtgtagggttctctaaacacattcaacattttttccaagaggcaatcggtttatttcctttgaaatgcttgatgatgaatta

SEQ ID NO: 984174 - DNA, 120 bp, Artificial Sequence
  ENSG00000244968_56 (sequence is synthesized)
acagtacattttcgaaactattgaaagagcagaggtaaaatggtagttatacatgtcggaatgggaaatagagaactatggaatttatcttactttgaagcttaaaccccttttaatatt

SEQ ID NO: 984175 - DNA, 120 bp, Artificial Sequence
  ENSG00000244968_57 (sequence is synthesized)
ccttgtatttagccacatgtatttttaaggtggaaattagttaatggaatattctcatagtccatactttttattaaggttgatgtttgatgaaccagataatgtctactcactttctgc

SEQ ID NO: 984176 - DNA, 120 bp, Artificial Sequence
  ENSG00000244968_58 (sequence is synthesized)
tttaaagtttataattcttgataaaaggaaaagtggtgaattatgtgagccaaccctggaaagtatttccgtattgagttttgtttgtttcaaagaacctactgtacatatgcaaaaaaa

SEQ ID NO: 984177 - DNA, 120 bp, Artificial Sequence
  ENSG00000244968_59 (sequence is synthesized)
caccatctttcactgcgttcgttgaaaggaaggaattggaaccaattctggtgatctactttccatgtggtctgtttggaaagagcctggctgagaatgcagaccctcagagaagtgact

SEQ ID NO: 984178 - DNA, 120 bp, Artificial Sequence
  ENSG00000244968_60 (sequence is synthesized)
agcagagctgagagatggagacagaccaaattctgggatcactgttggagtccttggatcttgtccagcctgaacctctggacattgctgttacatgagccaataaatccccttcgtttc

SEQ ID NO: 984179 - DNA, 66 bp, Artificial Sequence
  ENSG00000244968_61 (sequence is synthesized)
gcaatttggaggaggaaaaaatcagttcttcatgaaaggatcacattgatctaccatccctgcaga

SEQ ID NO: 984180 - DNA, 120 bp, Artificial Sequence
  ENSG00000255121_0 (sequence is synthesized)
ccagagctgggcgggttaaggaggaggatggcgccgtcctgcagatgtgcggggacgcgcgcccgccgcaacgtgaggctcataggccacacgcaactctgagcattggccaggacctgt

SEQ ID NO: 984181 - DNA, 120 bp, Artificial Sequence
  ENSG00000255121_1 (sequence is synthesized)
agtagccaacaggacacttaataactgatgtataggtgcgcactgtgtgtccagagctttacgttaaccacctcactgtgtcatctcgctgaggttgtgtggtttactattactgctatt

SEQ ID NO: 984182 - DNA, 120 bp, Artificial Sequence
  ENSG00000255121_2 (sequence is synthesized)
agcgcatttttaagcgggaaacctgaggcatgaggagggtcagtcctcgaccttgtccccccaaattgcttcgtctctgaatccagactctgaagttcggctctgcctaccaccttaagt

SEQ ID NO: 984183 - DNA, 120 bp, Artificial Sequence
  ENSG00000255121_3 (sequence is synthesized)
tatccgatgtggccttaccgtcagcctagtctttgactacaggaagacctctcttcctgaagaagacgcctcttttcatccattcactctggaaatgattcaacgtctgcctgctgctga

SEQ ID NO: 984184 - DNA, 120 bp, Artificial Sequence
  ENSG00000255121_4 (sequence is synthesized)
tgctttactctccaccaggggttttcgaagtgtgcttccccattccccctgggcctatagcatcagcatcagggaacttgtcagtaacgcacattcttgggccccaacccagaactactg

SEQ ID NO: 984185 - DNA, 61 bp, Artificial Sequence
  ENSG00000255121_5 (sequence is synthesized)
atcacctgaggtcaggagttgagatgtggtggcgtgtgcccataatcctagctactcggga

SEQ ID NO: 984186 - DNA, 120 bp, Artificial Sequence
  ENSG00000255121_6 (sequence is synthesized)
gactccgtctcaaaaaaaaaaaaagaactcagggtgaggcccagccggctgtggttttatgagcttttcaggggatactgatgcgggatcaaatttgagaagcactggtctaggtcttag

SEQ ID NO: 984187 - DNA, 120 bp, Artificial Sequence
  ENSG00000255121_7 (sequence is synthesized)
tctaggtcttagatcctcttgcttcagtttcgtcattggatctcaggaatgttcagctgccctctcaaggcaacttcttacttcacttgaccttccaagacctctcgttctgtcaaaccc

SEQ ID NO: 984188 - DNA, 120 bp, Artificial Sequence
  ENSG00000255121_8 (sequence is synthesized)
caattttggatcaacccaggcatgcttccctcatgtgttccaaagctggtcagagtagtctacaccactatctgcttcaacttctagtaacgtctaagccttcagcagttttgcttatga

SEQ ID NO: 984189 - DNA, 120 bp, Artificial Sequence
  ENSG00000255121_9 (sequence is synthesized)
aactgcttcactgaagttctccaccaccaagtagtcagctggcatcggaattcggcttgtgtcaaatggaactcaacatcttcctcttcaggacatcccctattttcatcctcccagtga

SEQ ID NO: 984190 - DNA, 120 bp, Artificial Sequence
  ENSG00000255121_10 (sequence is synthesized)
atgctgggctggtcaaagtgctgggattacaggcataagacaacgcacctggaacttggcttgtgtcaaatggaactcaacatcttcccttttactaaaccccacccaacattcactgcg

SEQ ID NO: 984191 - DNA, 120 bp, Artificial Sequence
  ENSG00000255120_0 (sequence is synthesized)
ctcacctgttctttctgagacaaatcatctgccaggtttccgcctcgggacacccaagctcagcacagacagcctagcagcctgggtgacaggatcccaggggacaggattctctccttg

SEQ ID NO: 984192 - DNA, 120 bp, Artificial Sequence
  ENSG00000255120_1 (sequence is synthesized)
ccatggggatgaggacaaattctcccttcatccttgagattggactcccgccacacatcctggaggagcctacagagaagccggcaggtctccctcacctggatggtgccagcgggtggc

SEQ ID NO: 984193 - DNA, 120 bp, Artificial Sequence
  ENSG00000255120_2 (sequence is synthesized)
ggccctctcctgcacctgacaggaagcccctggggcatacgtctcccctgccacttccactgtggccactggaagtgtggcagagaaaatagctaggacaaaaagaagtcaatgatttca

SEQ ID NO: 984194 - DNA, 120 bp, Artificial Sequence
  ENSG00000255120_3 (sequence is synthesized)
accaacggaatttctttgtcctttgtaaaaatcaacacatgatctgttactgattgggatgtgaaataaaactaaaaataacagcacactgagcctggctcagggctcagctcaccttta

SEQ ID NO: 984195 - DNA, 120 bp, Artificial Sequence
  ENSG00000276760_0 (sequence is synthesized)
agtagctttgcctggtgtttcttgcttggattggcgtttcctccctcgcattcctttgctggacttgaccttttctctgctgggtttggcattcccttgactgggctgggtgtttccttg

SEQ ID NO: 984196 - DNA, 120 bp, Artificial Sequence
  ENSG00000276760_1 (sequence is synthesized)
tcccttgactgggctgggtgtttccttgggagggggggcttggcctttcctggggtgggcgtggggtccccctggtgggcgtgggctttccccgggtgggtgtgggttttccctgggtgg

SEQ ID NO: 984197 - DNA, 120 bp, Artificial Sequence
  ENSG00000276760_2 (sequence is synthesized)
gcaagttttggctgggattgacctttctcttcaaacagattggaaacccagggtttcctgctagttggtgaaactggttggtagacgcgatctgttcgctactaccggcctcccctggct

SEQ ID NO: 984198 - DNA, 120 bp, Artificial Sequence
  ENSG00000276760_3 (sequence is synthesized)
gttaaaagcagatggtggctgaggtttgttcaatgcccgctgcctctgctgtgaagaagccatttgatctcagaagcaagatgggcaagtggtgccaccaccgcttcccctgctgcaggg

SEQ ID NO: 984199 - DNA, 120 bp, Artificial Sequence
  ENSG00000276760_4 (sequence is synthesized)
agggggagcggcaagagcaacatgggcacttctggagaccacgacgactcctttatgaagacgctcaggagcaagatgggcaagtgttgccatcactgcttcccctgctgcagggggagc

SEQ ID NO: 984200 - DNA, 79 bp, Artificial Sequence
  ENSG00000276760_5 (sequence is synthesized)
tgcttcccctgctgcagggggagcggcacgagcaatgtgggcacttctggagaccatgacaactcctcactgcttcccc

SEQ ID NO: 984201 - DNA, 70 bp, Artificial Sequence
  ENSG00000276760_6 (sequence is synthesized)
gcagggggagcggcaagagcaacgtgggcacttggggagactacgacgacagcgccttcatggagccgag

SEQ ID NO: 984202 - DNA, 80 bp, Artificial Sequence
  ENSG00000276760_7 (sequence is synthesized)
caagcaaaagaagtagtacaactcctgctggacagacgatgtcaacttaacgtccttgacaacaaaaaaaggacagctct

SEQ ID NO: 984203 - DNA, 120 bp, Artificial Sequence
  ENSG00000276760_8 (sequence is synthesized)
acaatgccaggaagatgaatgtgtgttaatgttgctggaacatggcgctgatggaaatattcaagatgagtatggaaataccgctctacactatgctatctacaatgaagataaattaat

SEQ ID NO: 984204 - DNA, 90 bp, Artificial Sequence
  ENSG00000276760_9 (sequence is synthesized)
aaaaacaggaagtggtgaaatttttaatcaagaaaaaagctaatttaaatgcacttgatagatatggaagaactgccctcatacttgctg

SEQ ID NO: 984205 - DNA, 69 bp, Artificial Sequence
  ENSG00000276760_10 (sequence is synthesized)
agtggtgaaatttttaatcaagaaaaaagctaatttaaatgcacttgatagatatggtcttctacttga

SEQ ID NO: 984206 - DNA, 68 bp, Artificial Sequence
  ENSG00000276760_11 (sequence is synthesized)
ctgtttctagtcatcatcatgtaatttgtgaattactttctgactagaagcagaagaataatttttgg

SEQ ID NO: 984207 - DNA, 120 bp, Artificial Sequence
  ENSG00000276760_12 (sequence is synthesized)
gaagaataatttttggcaggaggaacatgcaacaagtttgtgtgtttgccagaagaacatctgatgagattgcctgtttggcaggaagagcaacaactgcaaaagacaagatgccgagtg

SEQ ID NO: 984208 - DNA, 71 bp, Artificial Sequence
  ENSG00000276760_13 (sequence is synthesized)
agtgaacttaccagagtttgggaatgaggtgaatacttagctaagtgtgaaagccaccatgattatatgta

SEQ ID NO: 984209 - DNA, 120 bp, Artificial Sequence
  ENSG00000276760_14 (sequence is synthesized)
tgagctcctataaaactttatttacaaagccaaaaggcagattggatttgtcctgtggcctatagtttgctgggattgatggaagataaccatgtaaagaaaccaggagacaaaggaagc

SEQ ID NO: 984210 - DNA, 88 bp, Artificial Sequence
  ENSG00000276760_15 (sequence is synthesized)
gtttccatgtcacacatccttggactagtatcaatgtattctaaggttttcacctgcccatggtgaaataaagtttggaatctccgtt

SEQ ID NO: 984211 - DNA, 120 bp, Artificial Sequence; identical to SEQ ID NO: 768341
  ENSG00000276760_16 (sequence is synthesized)

SEQ ID NO: 984212 - DNA, 120 bp, Artificial Sequence; identical to SEQ ID NO: 768342
  ENSG00000276760_17 (sequence is synthesized)

SEQ ID NO: 984213 - DNA, 120 bp, Artificial Sequence; identical to SEQ ID NO: 796991
  ENSG00000276760_18 (sequence is synthesized)

SEQ ID NO: 984214 - DNA, 120 bp, Artificial Sequence; identical to SEQ ID NO: 796992
  ENSG00000276760_19 (sequence is synthesized)

SEQ ID NO: 984215 - DNA, 120 bp, Artificial Sequence
  ENSG00000255126_0 (sequence is synthesized)
aagttaagcaaattctttccagagagaaggtgagcctgacagactaaaacgttgagcacggatgatacagcagaaataacatttccagtgtaatgagagataaagaggaatactgcccac

SEQ ID NO: 984216 - DNA, 120 bp, Artificial Sequence
  ENSG00000255126_1 (sequence is synthesized)
cgaggaaatgactttcttcaccatgctgaccacactgcacagcgcccgatccggctggtgaggatggggaggtgggaagaatctcaaagcactggacagggtgaggactcaggaagtcac

SEQ ID NO: 984217 - DNA, 120 bp, Artificial Sequence
  ENSG00000255126_2 (sequence is synthesized)
gagaacaccaagtgagggggctcctctgtgaacccaagaaacttcaaggaaccccacagcgtctcccttatgacctcccatctccagattaggaagctatggattcccagagggtccttt

SEQ ID NO: 984218 - DNA, 120 bp, Artificial Sequence
  ENSG00000255126_3 (sequence is synthesized)
ggaagtatctagaaatgtccagggtgagtctagccaggttcaccttcaggatgctttccccatgccctgtggttgagacggctccgatgtcattgtcggcataacctccagctcctgctc

SEQ ID NO: 984219 - DNA, 120 bp, Artificial Sequence
  ENSG00000255129_0 (sequence is synthesized)
aaaagccaggaggcgggacagggggcgggcatggacacgcgatcagattcgctaccgcagagctctagctccggagcgcgccaagttgaaggccaaagtcgaggttgggatgcccgatgc

SEQ ID NO: 984220 - DNA, 120 bp, Artificial Sequence
  ENSG00000255129_1 (sequence is synthesized)
ctggcgcggggagacggaggaagcaaagtgctgctgcctggtggaaatacagtattatataatgacatgctactatgcatctctacctaactcctcgtctggtgatgccatattgaaatc

SEQ ID NO: 984221 - DNA, 120 bp, Artificial Sequence
  ENSG00000255129_2 (sequence is synthesized)
agccatactgagagtatttacacactgctgaagtcagtaaatgctacaaatcaaggcttgaatgtaacctacatgagaaagagttgccttgctcactgccgtatcccagtatcccaagaa

SEQ ID NO: 984222 - DNA, 120 bp, Artificial Sequence
  ENSG00000255129_3 (sequence is synthesized)
tcttggggagattaagcaactctttcaaggtcaaccggggagcggcagaaccagagttcgaaggaaacctttctgaatctgacgtctgccccttctaaattaggactctcatctatcagc

SEQ ID NO: 984223 - DNA, 120 bp, Artificial Sequence
  ENSG00000255129_4 (sequence is synthesized)
ctgtgagaaaaaatacagaaagcatcattcaggcaacacatgaactcaagacactgagacttcgctaaccttcctcgcacacaaggtcctaaaggaactaccacacgcatgtccacattt

SEQ ID NO: 984224 - DNA, 120 bp, Artificial Sequence
  ENSG00000255129_5 (sequence is synthesized)
gatgcacataacagactctcaccgcattgaaataaaccccagtatgatcataatagcttttttctttcaatttttattgaacacaagtattccgacagaatgcaaagtcaaaattctcag

SEQ ID NO: 984225 - DNA, 120 bp, Artificial Sequence
  ENSG00000255129_6 (sequence is synthesized)
ttagtactcagtatttacaccagtgagaatggaaacaaaggtggtatcgatgtttcacttggtaaaaagttttataacaagagagaaggcccccgaagtacagaatgctgggtagggatg

SEQ ID NO: 984226 - DNA, 120 bp, Artificial Sequence
  ENSG00000255129_7 (sequence is synthesized)
tggagatgaggaggtcaaactgaggggcctttgtgttggaggaattgcccatataatgtactgaagtcactgaggatgatggtggaccttcaggagagaggaggatcatgggctaaagat

SEQ ID NO: 984227 - DNA, 120 bp, Artificial Sequence
  ENSG00000255129_8 (sequence is synthesized)
ggaccaacggagagtgagtgtcatcattttatgttttctccaaatcttgtaaacaatgtgttttagtcttagcctgtcatatgcagctgaaatctggggcaaataaaatcacatagatgc

SEQ ID NO: 984228 - DNA, 120 bp, Artificial Sequence
  ENSG00000276768_0 (sequence is synthesized)
ttttaaaagcaagccgaacgtcacacatggagagatgactgagatgaaaggacagcaggataagttagaggaaagttggatgatatcaaaaaggattgcaggaaaactaaaattcaagaa

SEQ ID NO: 984229 - DNA, 120 bp, Artificial Sequence
  ENSG00000276768_1 (sequence is synthesized)
acaaagctgggtcagagacacagtggaaatatcctttctcccttttcttttcttgacattattttggttttgttagaggtgaggctggtgttagagaggccaaattttgacgatgatgaa

SEQ ID NO: 984230 - DNA, 120 bp, Artificial Sequence
  ENSG00000276768_2 (sequence is synthesized)
aaagccgagggcactggggggtttgggctccaacatccttattccactgaaccacgaccctcaactgcctatccctagacatttcattatgtgagcaaaataaacacctattttaagtca

SEQ ID NO: 984231 - DNA, 120 bp, Artificial Sequence
  ENSG00000257435_0 (sequence is synthesized)
ccctgggactaagcctccacattaagcttcctggcattctttctgagtttggcctgctggagctggccgatcctgtgtgcatttctgatcaaccatcaatatttcaaggccaagaatttg

SEQ ID NO: 984232 - DNA, 120 bp, Artificial Sequence
  ENSG00000257435_1 (sequence is synthesized)
gctgtgggatggtgatttggatataaaattctctgagccaggtgacatgtttatgactaactcacttcagacttactcatttagtattggcactatttcaaataaaaaaaattctctttt

SEQ ID NO: 984233 - DNA, 120 bp, Artificial Sequence
  ENSG00000264843_0 (sequence is synthesized)
ggcaggcccgtctcaagagagggcacagggacacaagcagcagctcgctggccgtcagctcatgggtcaggggaggtaagatgctggaccccagcttgtcggtgcggctgtcgtccgggc

SEQ ID NO: 984234 - DNA, 120 bp, Artificial Sequence
  ENSG00000264843_1 (sequence is synthesized)
tgactgccatacggttcttgcctgcagagtcgtcctgcgagccgaaggacagatgctcgaagctcacagccttgctgtaggagggtggggcctccacatccccgtccaaggtggagaact

SEQ ID NO: 984235 - DNA, 120 bp, Artificial Sequence
  ENSG00000264843_2 (sequence is synthesized)
gtgtcagctcttcctctggggtgaggctggcctcctcggcacccatggctcccacatcgtacccagtggcctcgtactccttggcctccctgggctcaggcgccgtgctccctgcctcct

SEQ ID NO: 984236 - DNA, 120 bp, Artificial Sequence
  ENSG00000264843_3 (sequence is synthesized)
gtacccaaaggagcagtgactggcgagggaagatggcagatccaggcctaggatgctgctgggtgaggatgctcatgagaggaggcacacagaggtgtgacacacgcatagtttcagttc

SEQ ID NO: 984237 - DNA, 120 bp, Artificial Sequence
  ENSG00000264843_4 (sequence is synthesized)
ccacacatggctcaaccccaaagagggacagacagcccaaagatcctctacagaaagcaactggaatacttatcttccaacttgtgtgctcatgggctggctgacccagggaacagaaac

SEQ ID NO: 984238 - DNA, 120 bp, Artificial Sequence
  ENSG00000264843_5 (sequence is synthesized)
agatctttagagatataggttgcctgatttccaggctgaacgtggtaggctgaactctgtcatcaagtgaactcactaggagagtactaggtgcctggcctgcacagccatacactgttg

SEQ ID NO: 984239 - DNA, 120 bp, Artificial Sequence
  ENSG00000225506_0 (sequence is synthesized)
gaagttgagcttcaggcgcggctcttccccgtcacactgggaccggacgcatttccatggcgtggtcccaggaacctctcagagtgaactgaattggatgcaagatcacggtgcgtcaga

SEQ ID NO: 984240 - DNA, 120 bp, Artificial Sequence
  ENSG00000225506_1 (sequence is synthesized)
gctagcaagatccttaggatcatttagcctggtttactaatattacactatggaatttaagcccaaggaatggagagtacccgacgagcgttatgtaaggagtcgagtgagaagtaagct

SEQ ID NO: 984241 - DNA, 120 bp, Artificial Sequence
  ENSG00000225506_2 (sequence is synthesized)
ggatgctctgcttggctggcaggtacagaatgtgccagacccatctgtaccagcctggatctcttgaggcatcagcacaatggacctggccacaccagtttattccacaccgctgaggct

SEQ ID NO: 984242 - DNA, 120 bp, Artificial Sequence
  ENSG00000225506_3 (sequence is synthesized)
gagaacacatggacacgtggtgcgggaacaatacacctggggcctgttggagggtgggggctgggaggagggagagcatcaagaatagctaatgaggccaggcacagtggctcacgcctg

SEQ ID NO: 984243 - DNA, 63 bp, Artificial Sequence
  ENSG00000225506_4 (sequence is synthesized)
attagccaggcatggtggcaatgcccgtagtccctgcaacttgggaggctgaggcaggagaat

SEQ ID NO: 984244 - DNA, 120 bp, Artificial Sequence
  ENSG00000261055_0 (sequence is synthesized)
caccccagaagggtcagctctaagcagaaagtcattgttgacaggaagaggggtcagactttcccttttccggccagcttcctgggtaccaaaatagcaacgcggcacaacaaagagttg

SEQ ID NO: 984245 - DNA, 120 bp, Artificial Sequence
  ENSG00000261055_1 (sequence is synthesized)
gggcggtggaggcctcccaaatgggctggaggacacaccgaccccaccccatgctgcccacccgcctgtgggatccaccatgccacatgacagccagcctgacagcaccagtcgctggtg

SEQ ID NO: 984246 - DNA, 120 bp, Artificial Sequence
  ENSG00000261055_2 (sequence is synthesized)
agtctggtagccctggaaaccctctcacagccagccgagatgtgagggacacagagagaggaggtgccatttcagacccctatgcctggcacgttggggtgagaaggacacaccagtcag

SEQ ID NO: 984247 - DNA, 120 bp, Artificial Sequence
  ENSG00000261055_3 (sequence is synthesized)
agctggttctgaggctcgcatccggagggagatcctggaaccagggctgaggctcgcatcctgagggacatgctggaaccagggggcatccgagttggggacacagtctgggaaggtgtc

SEQ ID NO: 984248 - DNA, 120 bp, Artificial Sequence
  ENSG00000261055_4 (sequence is synthesized)
taaaggaagtgagaattgaaggagggacagagcgctacccagaagggcataactagaggctgggaccaggtcaggaaacatgtccctcaggtgtagaagctgcaagtgagaaaccaacgt

SEQ ID NO: 984249 - DNA, 120 bp, Artificial Sequence
  ENSG00000261055_5 (sequence is synthesized)
ggtaggaacctcagcaggctggctccagctccagaagctgttggagttgaggatttgttctctgtagaggagcaacatcacctgtgtagtctggttcctaggctaggccatcctctagaa

SEQ ID NO: 984250 - DNA, 120 bp, Artificial Sequence
  ENSG00000261055_6 (sequence is synthesized)
ttctgtgtgagccagaatgttcaactaataagagaaggctgcacattgtgggtggagagcgggaaagagagggggcttgcagcatctgcaggggccagaaactacatgcacagagaagct

SEQ ID NO: 984251 - DNA, 120 bp, Artificial Sequence
  ENSG00000261055_7 (sequence is synthesized)
tctttctctgtgtatggaattccaaacacccgttgtacaggaggaagcagctacagatcgtcctactcaccagctgggtggcaccaccggctttaagtaatgggtaaactggctcaagca

SEQ ID NO: 984252 - DNA, 120 bp, Artificial Sequence
  ENSG00000261055_8 (sequence is synthesized)
agcctgggactcagagacagatgtgcgaagcagagatgttgccatgcctaggctgagggctttcagccaatcggtgaggggaatggaggagaaaggagagaggggtgttgggttgagggc

SEQ ID NO: 984253 - DNA, 120 bp, Artificial Sequence
  ENSG00000261055_9 (sequence is synthesized)
cgggatgttaagaaaaggattgtatcctgggagatgggctaaggatcaagaggatgaggagaaacaccccctcccacagcctctgcagcacccagagttgcaagatccaaagagatgttc

SEQ ID NO: 984254 - DNA, 120 bp, Artificial Sequence
  ENSG00000261055_10 (sequence is synthesized)
ctttctgtcctctctttgctgtccccctcccctcctggccctcccagcattgcagacccttgcctctggtttgcagctgggctaagggcaaaagcagaagcaagagcctgagctgctttt

SEQ ID NO: 984255 - DNA, 120 bp, Artificial Sequence
  ENSG00000261055_11 (sequence is synthesized)
tcctgcctggatttctgttcttgcagttgccacagagctggctccttctcatcatgctagtcttggcttaaacgttacatcctccaagaggcctttgctggccaccgcagtgacgtattc

SEQ ID NO: 984256 - DNA, 120 bp, Artificial Sequence
  ENSG00000261055_12 (sequence is synthesized)
caccctgacatcactatcacagtccctgctttagttttaagacagcacttaccacgaactggtattttctctcgtttccttgtttatttttgtctctgccatctagaatggaagctcccc

SEQ ID NO: 984257 - DNA, 120 bp, Artificial Sequence
  ENSG00000261055_13 (sequence is synthesized)
gagagcaggaaccttgtctgtgttgttcatggctatatccccagcactcagaacagggcctggcacagagtaggtgctcaaatatttagttgattcatgatgaataataattgctaacat

SEQ ID NO: 984258 - DNA, 120 bp, Artificial Sequence
  ENSG00000261055_14 (sequence is synthesized)
tggttgagtgttactacatgacaagtacttatttcacatattaactcatgggccagtgagctataggcctctgggcaaatccagctccctgcttgtttttataaatacattttattggaa

SEQ ID NO: 984259 - DNA, 120 bp, Artificial Sequence
  ENSG00000286716_0 (sequence is synthesized)
aatatacaacagggagaagaaccaaccgagaacctctgatggtgtcactgggcagaaactagaagagacattgccttcatataaggagtcctgagtccgaattcccgagggtcacaggaa

SEQ ID NO: 984260 - DNA, 120 bp, Artificial Sequence
  ENSG00000286716_1 (sequence is synthesized)
tgttttcaaaatcaaagagttgctcagtggcagaactggtagaataccagctcttcatcctgtgagcgacagtcacagaggagtcctgatgccagcttgcctacatgcactcccttatgt

SEQ ID NO: 984261 - DNA, 120 bp, Artificial Sequence
  ENSG00000286716_2 (sequence is synthesized)
tcctttttagagggtctctaagtcacccaatccaagtttcaaggtcatctcctcatagagttgattgctgaagaagactatcccatcttagaacccaccatacatcatattctaaaatac

SEQ ID NO: 984262 - DNA, 120 bp, Artificial Sequence
  ENSG00000286716_3 (sequence is synthesized)
ttcagtctggagagattctttgctgggccatatatcttcaaacaaatgattctggaccttttaatatgatggtggctggattacaagaaaccactatcccttgaggaccctatactaccc

SEQ ID NO: 984263 - DNA, 120 bp, Artificial Sequence
  ENSG00000286716_4 (sequence is synthesized)
taaccaagatctcaagcttagctttctgtctgatgcaatttcaagctgcagctgacccctgtcttcactctcctcctgctgttcaatgtagctgtcccatgtattgcctgcccttggggc

SEQ ID NO: 984264 - DNA, 120 bp, Artificial Sequence
  ENSG00000286716_5 (sequence is synthesized)
ttatcaaaggggatcaaccaattcatcatcaataatttaacagtggcatactaccatagcatgagttaacaaaggggaatgacgggcagagcagtgtcttgatgctattgcgatgggtgc

SEQ ID NO: 984265 - DNA, 120 bp, Artificial Sequence
  ENSG00000286716_6 (sequence is synthesized)
tcttgctaaaggagaaattttattaggaagagaagagaggagtgaatacagaccatgtggaattgccatgatgaagatggatggagggaagagaaaagcatcaaagaacagcgttcatga

SEQ ID NO: 984266 - DNA, 120 bp, Artificial Sequence
  ENSG00000286716_7 (sequence is synthesized)
tattagtgatgatgatgataacttattgagcactttctacaaaaatcatagctgacactattgaacacttagtgtcagatattatgtaataaactttacatactaatgaggttaaacatc

SEQ ID NO: 984267 - DNA, 120 bp, Artificial Sequence
  ENSG00000286717_0 (sequence is synthesized)
gcagcgctgcgatgcctggaggaagaatttcccacttagaggcttactgctctgtgcacagacacgcgagttgcagaatgagtgtctaatttggcgtggcccatgaagggtgaaggctca

SEQ ID NO: 984268 - DNA, 120 bp, Artificial Sequence
  ENSG00000286717_1 (sequence is synthesized)
gccccacgtcttggtttaccttcagctgctggcaatggagggagggttggcatgttccagttccagcagccggtgtgccgggcgatgttcagcagagccagagagcaggaacagcaggaa

SEQ ID NO: 984269 - DNA, 120 bp, Artificial Sequence
  ENSG00000286717_2 (sequence is synthesized)
ctcctggaaactgaatcacagatcagatcatgttgttccacaagaacgatgtgtcactgtgaggctgcattcctgaccacgaactgagcaccaaataagtcatggacatgcaccaaaagg

SEQ ID NO: 984270 - DNA, 120 bp, Artificial Sequence
  ENSG00000286717_3 (sequence is synthesized)
tgtgacccaagggaggcagggtgagccccatgtctcagaacatcctcgcggacagcaaagcccttgatgtggtggagtaggggcctgtggcaacccctcacacatggcaggtcctttgca

SEQ ID NO: 984271 - DNA, 120 bp, Artificial Sequence
  ENSG00000286717_4 (sequence is synthesized)
accccaagtgcttcagatgctaccagccctccttgggcaggtctgagatgtgacagagaagaagatgagaatggaaaaagagaaagaagagcggaaaactaaaagagggaagggcagagg

SEQ ID NO: 984272 - DNA, 120 bp, Artificial Sequence
  ENSG00000286717_5 (sequence is synthesized)
aaagagcagaaatgcagtctagctggagggcaggctgctggctccagccactgcctcagatccccccgacctggggtactcaggagtctgagtgggtacagggctatagcctcaatttcc

SEQ ID NO: 984273 - DNA, 120 bp, Artificial Sequence
  ENSG00000286717_6 (sequence is synthesized)
ccatctgatgtgggacttgccttgacccaatgcctggaccacaatcatccctgatacctgaagcctccatagatatgactctttctaacgtttgctgcttcaggattcaaccttgtccac

SEQ ID NO: 984274 - DNA, 120 bp, Artificial Sequence
  ENSG00000286717_7 (sequence is synthesized)
ttttggcttcttcatgccctctccaatgagcagtgattcaaaaccttttataaaactacccatcactatcatctctggcaacatggctgtctagagaactcagaaaactgtctccctctg

SEQ ID NO: 984275 - DNA, 120 bp, Artificial Sequence
  ENSG00000286717_8 (sequence is synthesized)
taatgtttaaaatgctggctatatttcagaaatgtagatggctgcacatgacaaagttaaaaagaaagggaagtgttcagaggtcaaaagaggatgccaaagtccagagagctgcaggaa

SEQ ID NO: 984276 - DNA, 120 bp, Artificial Sequence
  ENSG00000286717_9 (sequence is synthesized)
tgctggagggaggctgccctggggcaggtgctaaccccatgacctcaggtggctttggtgtgcccacttcctggggacttggcacagcagcttgggtgagactcacgtgcagagctcact

SEQ ID NO: 984277 - DNA, 120 bp, Artificial Sequence
  ENSG00000286717_10 (sequence is synthesized)
aggcacctgcctgggcacacacctacactctcttccttttttctttcacaactggtcccctccaacttgaccaagaaaggccatgttttaccaggattcctgccacagggtgcaaggccc

SEQ ID NO: 984278 - DNA, 120 bp, Artificial Sequence
  ENSG00000286717_11 (sequence is synthesized)
tagacaaaggggcgagagataagaaatatcagtgctgttggacacccttctaatagtggcatcatgtgccccaggctggcttcggggctctccttctctcccatgctctaccctgaatgg

SEQ ID NO: 984279 - DNA, 120 bp, Artificial Sequence
  ENSG00000286717_12 (sequence is synthesized)
gaagcactggtcgtggggtgttctggcccagctgtgaggttctgaattcatttgagttgtagagtgggctagcacatgggatgctgattttcctttaatgaccttgccccttccattccc

SEQ ID NO: 984280 - DNA, 120 bp, Artificial Sequence
  ENSG00000286717_13 (sequence is synthesized)
tactatggccacagaatgcattgttcccataaggaccaaacaaagacttgtagacgatggtagctcatgtcacccaggcagcaaacacacacctcactggcgtacctgtgttagaaataa

SEQ ID NO: 984281 - DNA, 120 bp, Artificial Sequence
  ENSG00000286717_14 (sequence is synthesized)
tttgggatggggagaaggcgtgctgggactctccatgaggttcagagcatgctgctgtcatgctcaccaccagggctggagggagcttgttggagagcacgcttactgcgggccaggcac

SEQ ID NO: 984282 - DNA, 120 bp, Artificial Sequence
  ENSG00000286717_15 (sequence is synthesized)
tgcaccagagggcacccgtttggccttaattgacaccgctaatcttggtaaggcctgtctcccatcggtgtccccgtctgtgccttggttggatcatttgcatgattttaaggttgagaa

SEQ ID NO: 984283 - DNA, 120 bp, Artificial Sequence
  ENSG00000286717_16 (sequence is synthesized)
agtgaaaatgtgcacacctaagcagattgatggaacatctctgacagaaagtcacataggatagaggtaagatagtgtcttagtttcttcaacatttacagggaaaacactttcatgatc

SEQ ID NO: 984284 - DNA, 120 bp, Artificial Sequence
  ENSG00000286717_17 (sequence is synthesized)
ttttggccaaaatacaattgaatattgtaaatccatattcaactttttttgcaagggtctattgaaattcatactatctctatgtttctgaaattttcacaggatatcaggctaaaagag

SEQ ID NO: 984285 - DNA, 120 bp, Artificial Sequence
  ENSG00000286717_18 (sequence is synthesized)
gcttttctaactatgagtaacagattaatagttatttgataactgttgataagaccccctccccactcccaccttttggtataattccttgaaagtgagaatgtgactgtctataatgac

SEQ ID NO: 984286 - DNA, 120 bp, Artificial Sequence
  ENSG00000286717_19 (sequence is synthesized)
tagtaacaaatgactagtaacttttgtaagataggtgggttctaattatttgcttttaacaaaacggaaacagcttatgggtaatttaaaataactttccatgattaatcagcacgtgat

SEQ ID NO: 984287 - DNA, 120 bp, Artificial Sequence
  ENSG00000286717_20 (sequence is synthesized)
ttttaataacaaatgactccaaaggggttcatagaacagagtgatgtgctacatcaatactcatttcttcccttttctgtaattttgagaataatgttcataagtgcatatatctaaact

SEQ ID NO: 984288 - DNA, 84 bp, Artificial Sequence
  ENSG00000286714_0 (sequence is synthesized)
actcttctcatcaaaaggcatgtggcaggaagtggggagaattctctgagccttaggactatttaaataggagggagaggggcc

SEQ ID NO: 984289 - DNA, 120 bp, Artificial Sequence
  ENSG00000286714_1 (sequence is synthesized)
gagatggagaccatcctggctaacacggatttctggactgggtgaatcttatctgcatttggcaatcatgattctgagactgaaattgtgtaactctggaattttagaggtgactgcgtg

SEQ ID NO: 984290 - DNA, 120 bp, Artificial Sequence
  ENSG00000286714_2 (sequence is synthesized)
cagcacgctatagagggccatgtgggaaagcactggagtagctccaggccgggcttgccagtctctctgcactctggaaggagtttgcctgggttggggttgtcccttggtagattccaa

SEQ ID NO: 984291 - DNA, 120 bp, Artificial Sequence
  ENSG00000286714_3 (sequence is synthesized)
accttcattttgtcaatttacttaaaggtgactgggtttaaaggggctgactgattgtaaataacttggagaataaatcaatattcattaataaagttaaataattcacgtaaaattaaa

SEQ ID NO: 984292 - DNA, 120 bp, Artificial Sequence
  ENSG00000286715_0 (sequence is synthesized)
gcggagccgcgtctgacgcggcagccccccaggcttcggctcagctctcctgttcctcagtctcgatatttgaagatatggaaaaagatgatttttagaaaagatcataggtctttaaag

SEQ ID NO: 984293 - DNA, 120 bp, Artificial Sequence
  ENSG00000286715_1 (sequence is synthesized)
agatgagttatggcagttttgcttcatgtttgggactgatggaaagtcaggagtggagaaggtttgggccacagatgggattgatgagtctggctgttcaaacacagtccatacagactc

SEQ ID NO: 984294 - DNA, 120 bp, Artificial Sequence
  ENSG00000286715_2 (sequence is synthesized)
cacagaaggtcagtgagacaaaaggcagagggcctcagttactgctgtgggcaatactcaatcaaaagcaagagtggagagcacagcagacagtctaccacgatgcttggatctcactac

SEQ ID NO: 984295 - DNA, 120 bp, Artificial Sequence
  ENSG00000286715_3 (sequence is synthesized)
ttccaatctggggaagatatgaacactaaattgggagatttcagatgtattcaagacccagaaaagatatgtagactcttcatgtagtaacagtaaaggctttgtaaatatgtatctttt

SEQ ID NO: 984296 - DNA, 120 bp, Artificial Sequence
  ENSG00000286715_4 (sequence is synthesized)
aaatcgcaaaaataatcatgtttgcaattgcttgttttattctctgtctctcctatttgctttcactgagtgggcagggatcctgtctgtcttggtcaacatatctccagcatcctggat

SEQ ID NO: 984297 - DNA, 120 bp, Artificial Sequence
  ENSG00000286715_5 (sequence is synthesized)
ggtgcttggccagtggttagccctcagtaatattcttcagtggaagaagagccattgttgaaatttggaaaatatatctgagtacaaagaagacaataaaacatcatccataatcagact

SEQ ID NO: 984298 - DNA, 120 bp, Artificial Sequence
  ENSG00000286712_0 (sequence is synthesized)
cctactgagggagataatccagcattgtatatttttgtgcacagaggaaagcaagatactcatcagagactcagctattcctccattccgaagcatcccagaggaatttctgaaggcagg

SEQ ID NO: 984299 - DNA, 120 bp, Artificial Sequence
  ENSG00000286712_1 (sequence is synthesized)
agggaatcctgagagacagatgagcagaacagaagaagacttctgtggacagattcaggaagaaagaagactctcattgtctgaaggaaaaaaaaacaacatgccaggcttactgacaga

SEQ ID NO: 984300 - DNA, 120 bp, Artificial Sequence
  ENSG00000286712_2 (sequence is synthesized)
agcttttacaggaaacaaaacccacgacaacttctctcgtcaagggctcttcagactgtttctaaacactcacaggaaggccaggctgacattttacacatgattgactgagagcgctat

SEQ ID NO: 984301 - DNA, 120 bp, Artificial Sequence
  ENSG00000286712_3 (sequence is synthesized)
gcttgcttctggatatgtgcgtgcttgtatacgtgtgcaactgtgtgtgtgcacgcatatgcctgcatgcaagcctacgggtgcttacctggtcctgtagctcagcctaaacaaagattc

SEQ ID NO: 984302 - DNA, 120 bp, Artificial Sequence
  ENSG00000286712_4 (sequence is synthesized)
agacttgcttatgcataaataatgagttggcggggccagaagctgcctagggtctatttatatagattgatttgcatgtgccaaggggaattgggaagatacagtggagaagacagcctg

SEQ ID NO: 984303 - DNA, 120 bp, Artificial Sequence
  ENSG00000286712_5 (sequence is synthesized)
gtgattggttcaggggccaggatagcagctgaacccatgcaatcctccctgagactttagtgagtctgcaaggaatgagccctctctgtttgcaagacctccaaggccagcaggataaaa

SEQ ID NO: 984304 - DNA, 120 bp, Artificial Sequence
  ENSG00000286712_6 (sequence is synthesized)
gcttggcaaccgtgaagtgagagtcatccttagaatgaagccagcacagaggagagcagaagaaggatggagagagagactagtcctaatgtccttgtgtggtggcttggctagcacctg

SEQ ID NO: 984305 - DNA, 120 bp, Artificial Sequence
  ENSG00000286712_7 (sequence is synthesized)
tgggagccttagtctcatgcccagttgatccctcccctggtgtcaactaagcttgagttggattatctgctacttgctgatgctccactcacagtctccctgcattatcccagcacctga

SEQ ID NO: 984306 - DNA, 120 bp, Artificial Sequence
  ENSG00000286712_8 (sequence is synthesized)
gacatttctgattagattggcatccatgggggtgtgaaagtcacattctcagagaaagaaagtgatgaaccacctgtactgcagaacccaccagtaacaaccccaccctacaccctagtc

SEQ ID NO: 984307 - DNA, 120 bp, Artificial Sequence
  ENSG00000286712_9 (sequence is synthesized)
caggttcctcagctgtctgtcaaatccaggagccaggacaccaggtggagtcctgcaaccttttgcaatctctgtgtcagaggtattagaacaagaatgactccatcttgaaaacaggct

SEQ ID NO: 984308 - DNA, 120 bp, Artificial Sequence
  ENSG00000286712_10 (sequence is synthesized)
gggtagaatgaggcttagacttactgggctgcattcccaagaggttaaggcattcctagtcacagaatgagatagacggttggcacaagatacagatcataaagaccttactgataaaac

SEQ ID NO: 984309 - DNA, 120 bp, Artificial Sequence
  ENSG00000286712_11 (sequence is synthesized)
aggttgcagttaagaagccggccaaaacccatcaaaaccaagatggtgacaagagtgacctctggtcatcctcacagctcattataagctagttacaatatattagcatgctaaaagaca

SEQ ID NO: 984310 - DNA, 120 bp, Artificial Sequence
  ENSG00000286712_12 (sequence is synthesized)
gtttacagatgccatggcaacatcaggaaattaccctatatggtctaaaaaggctaagaaccctcagttctgggagttgtccactccttactgtgaaaactcatgaagaatcaacctctt

SEQ ID NO: 984311 - DNA, 72 bp, Artificial Sequence
  ENSG00000286712_13 (sequence is synthesized)
tcatgaagaatcaaccaagctcttgagaatgctctgcctagggagtagccattcttttattcctttactgtc

SEQ ID NO: 984312 - DNA, 120 bp, Artificial Sequence
  ENSG00000286712_14 (sequence is synthesized)
tctcccacctccaacatgtgatttggcgtctaggaagtatctatatgtgcttgaagaaagaaggaagagagaaggaaagaaaagaaggagggtagaaaagaagaaagaagactctcattg

SEQ ID NO: 984313 - DNA, 120 bp, Artificial Sequence
  ENSG00000286713_0 (sequence is synthesized)
agggaataaaagctggccaccagcgccagcagatgcaaggtgctcaggtcctctttcgtgctgtgggaggtttgttctttctttgctcttcacaataaattcttgctgctgctcaccctt

SEQ ID NO: 984314 - DNA, 120 bp, Artificial Sequence
  ENSG00000286713_1 (sequence is synthesized)
ttcacaataaattcttgctgctgctcaccctttgggtctgcaccacctttaagagctataacacccgcggtgaaggtacgtggcttcattgttgaagtcagtgagaccaagaacccactg

SEQ ID NO: 984315 - DNA, 120 bp, Artificial Sequence
  ENSG00000286713_2 (sequence is synthesized)
cagactccggccacactatctttaagagctgtgacactcaccgcgaagtgttccactgggtggatgtagaagaagctgttgaacccttcgcccagtggatgacatccgggatgtttccag

SEQ ID NO: 984316 - DNA, 120 bp, Artificial Sequence
  ENSG00000286713_3 (sequence is synthesized)
tttggactattaaactgccaaactctttaccagatggccgtgtcattctacatccccaccagcaatgtatgagtgaaccagtttctccatatcctcaccagcattttgttttgtcactat

SEQ ID NO: 984317 - DNA, 120 bp, Artificial Sequence
  ENSG00000286713_4 (sequence is synthesized)
tcattaaaaggcgaatagaatggccttcagagtgtccatcgcagagggccttagcagagcttagaatgatgggactggcctctgcccagggcccctctgcacagcatgacaaagcggtga

SEQ ID NO: 984318 - DNA, 120 bp, Artificial Sequence
  ENSG00000286713_5 (sequence is synthesized)
tatctacttatggcttccattttcagttccctggcggctgatgatacggagcatgttgtatgcctatttgccatctgcatatcctctgcagtgacatggctcttcatggttttggccatt

SEQ ID NO: 984319 - DNA, 120 bp, Artificial Sequence
  ENSG00000286713_6 (sequence is synthesized)
atgggtgttgcagatactttctccctgtttgtagcttgtcttttcatgcccttcttatgggctttcacagagaaaagactttgtgaggtacaatttaccaacattttaatgggtagtgct

SEQ ID NO: 984320 - DNA, 120 bp, Artificial Sequence
  ENSG00000286713_7 (sequence is synthesized)
tacaatttaccaacattttaatgggtagtgctttgggtgtcaaatctaagaaccctttggttagtcctagatcctgaagactttttcctatatttttctttttctttttcttttctttct

SEQ ID NO: 984321 - DNA, 120 bp, Artificial Sequence
  ENSG00000286713_8 (sequence is synthesized)
attacaggcttgagccactgtgcccggctgactttttcctatatttttcttaaagttttatagttttacattttgcatttaagtccctggtacatttgagttaaattgtgattaaggttt

SEQ ID NO: 984322 - DNA, 120 bp, Artificial Sequence
  ENSG00000286713_9 (sequence is synthesized)
gtgaagtttaggttaaggttcattttgtgtgtatgtgcctgtgaatgtccagttgctcttctctgaagaggctatcttttctgcgttgaatttcttttgcatttttgtgacaaattaggt

SEQ ID NO: 984323 - DNA, 120 bp, Artificial Sequence
  ENSG00000286713_10 (sequence is synthesized)
gggcatatttgtgtggttcttgtcatgggttctctaccttgttccattggtctgcactctgctaatatcacacacccttgtttactatagctgtataagttattaaatcatataaattaa

SEQ ID NO: 984324 - DNA, 120 bp, Artificial Sequence
  ENSG00000286710_0 (sequence is synthesized)
gacagcaccagtgcccagtggcagccagccccatgcagatgaaagaaaaaggcacagcccagggcggatgcttctgaggtgcaggtgcctgtctgtcatcgggcaggagcccgcaggtgg

SEQ ID NO: 984325 - DNA, 120 bp, Artificial Sequence
  ENSG00000286710_1 (sequence is synthesized)
acagcatggggcccgcacacctggggaccgggcgaggggtgtggagcgccgtggggcaccctgcagcatcgggtacatctgcgtgtggacagcaggacatcaagagtcgaaaaggtaaaa

SEQ ID NO: 984326 - DNA, 120 bp, Artificial Sequence
  ENSG00000286710_2 (sequence is synthesized)
tttacagtggaattcacagatcttaacagttccgtgagatgagttctgagacgtgcacacacctgcgtctcccaaaccctcaccgggaatattgtcagcccctgtggagcacagtaaaga

SEQ ID NO: 984327 - DNA, 120 bp, Artificial Sequence
  ENSG00000286710_3 (sequence is synthesized)
gatttatcaaagaactgaaaacagaactcatccagcaatcccactgccccagtaaagagatttatcaaagaactgaaaacagaactcatccagcaatcccactgccgggcagctactcga

SEQ ID NO: 984328 - DNA, 120 bp, Artificial Sequence
  ENSG00000286710_4 (sequence is synthesized)
aggaaatgattacatcaaaaagacacctgcacgtgcacgtccatcacagcaccattcacaacagcaaagacacggaatcagcctagggctccaccaacagacggctggagaaagagaatg

SEQ ID NO: 984329 - DNA, 120 bp, Artificial Sequence
  ENSG00000286710_5 (sequence is synthesized)
gagaacatagtgctgagtcaaacagttcagaaacagaaggacaaagagcacgtgtcctcacttacaggtgggagctaaatgatgtgtgcacgtggacacagagtggggaacactcacccg

SEQ ID NO: 984330 - DNA, 120 bp, Artificial Sequence
  ENSG00000286710_6 (sequence is synthesized)
tggatgctcaggagggtggggcgagggatgagaaagttcccggtgcgtttgatgtacgctctctggtgatggctacactgacagccccgacttcaccactacacagtgtttccatgtaac

SEQ ID NO: 984331 - DNA, 88 bp, Artificial Sequence
  ENSG00000286710_7 (sequence is synthesized)
acagccccgacttcaccactacacagtgtttccatgtaactgcacttgtaccccttatatttacaaataaaaaataggccaggcacag

SEQ ID NO: 984332 - DNA, 120 bp, Artificial Sequence
  ENSG00000286710_8 (sequence is synthesized)
atgagttgagcctaggagttcaagaccggcctgggcaacatagcgagacctcatgtctacaaaaagtacaagattagccatgcgtggtggcacgtgcctgtagtcccaggtactcgggag

SEQ ID NO: 984333 - DNA, 87 bp, Artificial Sequence
  ENSG00000286710_9 (sequence is synthesized)
caccccctgcactgcagcctgggcgacacagcaaggccctgtctcaaaaattaattgatttaattaaataataataacgatacaacc

SEQ ID NO: 984334 - DNA, 120 bp, Artificial Sequence
  ENSG00000286710_10 (sequence is synthesized)
tcaacctagacatggtccgatatggtagctatttatgtttacacttaaattcattaaaattaaataaaatttaaaagccggctcctcaactgcacaggccacacttcctcaactgtacga

SEQ ID NO: 984335 - DNA, 120 bp, Artificial Sequence
  ENSG00000286710_11 (sequence is synthesized)
gccacatttcaagggctcagcagccacacgtgaccagtgaccaccacgtggctcacacagacacgggcattcccgccacgtgtgaccagtgaccaccgcgtggctcacacagacacaagg

SEQ ID NO: 984336 - DNA, 120 bp, Artificial Sequence
  ENSG00000286710_12 (sequence is synthesized)
attcccgtctccacatgtgaccagtgacccaccgcgtggctcacacagacacgggcattcccgtctccacatgtgaccagtgaccaccacgtggctcacacagacacgggcattcccatc

SEQ ID NO: 984337 - DNA, 120 bp, Artificial Sequence
  ENSG00000286710_13 (sequence is synthesized)
accacagacactcccactggacaggctgccctaggaagttcccgcagaccacacttggtgtttaaaactgggctttcttcctccctgttacccaaagcctttttaaaaggctcttggtgg

SEQ ID NO: 984338 - DNA, 120 bp, Artificial Sequence
  ENSG00000286710_14 (sequence is synthesized)
gaggatgaactcgtgggtcccaggggaagaccattcccttactccctggtgagaggcgcggtgtctgcaggatctacaaggcccctcgcacgagggacatttggctcatccattggcaac

SEQ ID NO: 984339 - DNA, 120 bp, Artificial Sequence
  ENSG00000286710_15 (sequence is synthesized)
atgggcggcaggaccggggcgctgacagccagtcggccgtgcgaggacccctgcacgggcgtcgcgaaacttcccagcggcttcccgacgccatcatgcatttttcatgcaaggcaaatg

SEQ ID NO: 984340 - DNA, 120 bp, Artificial Sequence
  ENSG00000286710_16 (sequence is synthesized)
gtctgcgcgctacgtgggcccaatcctgacacagcagcacgggacccctgcagtacttcaaccccatataaataaatcacagggtgcagattgcaagccgtcggttatgcgttccaggca

SEQ ID NO: 984341 - DNA, 120 bp, Artificial Sequence
  ENSG00000286710_17 (sequence is synthesized)
gccctggagagccgccttctcgcagggaggctgctgccccaggaaggaagcaccttctatcctcaggcacgacggggccctgctctgcactccctcctgcacgtctgtgtggcctcagcc

SEQ ID NO: 984342 - DNA, 120 bp, Artificial Sequence
  ENSG00000286710_18 (sequence is synthesized)
atgctgcctggctcctctgagcacctggatcacggagaggaggcaggaggtagccgctgcctgttggctcccgtcacccctggggcagagtccaaattcctcaatgaaacccactgaacc

SEQ ID NO: 984343 - DNA, 120 bp, Artificial Sequence
  ENSG00000286710_19 (sequence is synthesized)
ctgcacaacctgggatccgctgagccctggggcctcccctcctgcacccccaaccctcagtctggacccctcggagactctcaggcagggagagctcactcttccctcctcccgccttca

SEQ ID NO: 984344 - DNA, 120 bp, Artificial Sequence
  ENSG00000286710_20 (sequence is synthesized)
ccggctgtgtttccaccgagaacacgcctgcaccgtcatggacggggcctagagctctgtggaggcccaggcactacatgggcatttaaatacagccgacccggccgatgccctaacgca

SEQ ID NO: 984345 - DNA, 120 bp, Artificial Sequence
  ENSG00000286710_21 (sequence is synthesized)
ggcagggcccagagaccaagagaggcccatacactgcacgtcctggcgttaaataacaccgccccggctgatgccccgtggaactcgcagagtagcctccgtgctcccgccgtgacagac

SEQ ID NO: 984346 - DNA, 120 bp, Artificial Sequence
  ENSG00000286710_22 (sequence is synthesized)
ttcacaccagcctggacgttcagactcaaggttagaaatctcagcttcccgaggacacacagccatgcctcctgcctccctccatcgcctccggcttcactctcacgggaagggggcttc

SEQ ID NO: 984347 - DNA, 120 bp, Artificial Sequence
  ENSG00000286710_23 (sequence is synthesized)
gggatgccgggcccgcactccgagtggccatgctgggtccgggtcctgcacagagcgcccttggctgcccccacaccaggcccagcaccgcaggcagaggacttggaagaggaagacacg

SEQ ID NO: 984348 - DNA, 120 bp, Artificial Sequence
  ENSG00000286710_24 (sequence is synthesized)
tggtgctcgtgggacctttggggcaggagcctcgggaaccccagggccttgaggtactcaggatgggattgcgaaggcagctcaggcctcagcggggctggaggggaactacaggtcccc

SEQ ID NO: 984349 - DNA, 120 bp, Artificial Sequence
  ENSG00000286710_25 (sequence is synthesized)
tcttgcctggggctgagggtgatgctgtcctcgccggggccttcacggtcagaccaaagcctcggtcttgttggggtctggtgtgaattgcagccgtcacacaggtggtgtgcagagcca

SEQ ID NO: 984350 - DNA, 120 bp, Artificial Sequence
  ENSG00000286710_26 (sequence is synthesized)
gctcctaagagctgagccttcatgtcctggaatcgggtgagctggccgtcatacacagaactattaaaattaaatcagcctggcgtgggggctcatgctgtaaccccagcacgccaggag

SEQ ID NO: 984351 - DNA, 120 bp, Artificial Sequence
  ENSG00000286710_27 (sequence is synthesized)
gccaggagtccgaggagggaggatggcttgaggacaggagtgagagaccagcctgggcaacacagcaagatctcatctctgcagataaaaaaataaataggccaggcgcggtggctcaca

SEQ ID NO: 984352 - DNA, 90 bp, Artificial Sequence
  ENSG00000286710_28 (sequence is synthesized)
aggcaggcggatcacgaggtcaggagacagacaaactaaaaatacaaaaaagttagccaaatgtggtggcaggcgcccgtagtcccagct

SEQ ID NO: 984353 - DNA, 120 bp, Artificial Sequence
  ENSG00000286710_29 (sequence is synthesized)
ggggtgaggaaagagacatgccggtcactcaatgaaataaccatggaaacgctggattcagcggaggcgtccacctgcccagccgctccccccggaacttcctccttcagtccggggacc

SEQ ID NO: 984354 - DNA, 120 bp, Artificial Sequence
  ENSG00000286710_30 (sequence is synthesized)
gcatccagcttctccggggcccgcgtgaaacaggctcgcccctcacccggcagccacccagagtcccggcttatccatcactgtcaggctccgagagcagctctgttctgaatgcccggc

SEQ ID NO: 984355 - DNA, 120 bp, Artificial Sequence
  ENSG00000286710_31 (sequence is synthesized)
cgcttctgcaacacacaggagggaacaggggtccacgtgagaccggccactggcagaggcctgggtcaggctgaaaggtgccttgcgagatgggcactcgccagcctgctccagccagag

SEQ ID NO: 984356 - DNA, 120 bp, Artificial Sequence
  ENSG00000286710_32 (sequence is synthesized)
cccagttccttctgagaatcacacggccagacagaggcttgctgagaagtgggtgtcctcctctctgtccagccccagctgcacggaagcgaagccggccccagcgtgactgagtccaga

SEQ ID NO: 984357 - DNA, 120 bp, Artificial Sequence
  ENSG00000286710_33 (sequence is synthesized)
gcccagccctgagcactcaccaagggccaggacgagtcagtgtgtggggcaggtgccgcccccacgacctcattcccaagctccctctgtgtccccgcagcccgtgctggccagggaggc

SEQ ID NO: 984358 - DNA, 120 bp, Artificial Sequence
  ENSG00000286710_34 (sequence is synthesized)
aggagggcatggcaggtgctcccagagctcgcttctctgcgcgttcccgccgccctccctccctggtcctgcgggctgccggcctcaggatccaggtcaccttaggtggcaaagttggag

SEQ ID NO: 984359 - DNA, 120 bp, Artificial Sequence
  ENSG00000286710_35 (sequence is synthesized)
cgtgccccacctgccttcactggctcatgttgactccttcatctacgagacagtctgagcttgaggcttggaaactctcctctgccggacctagctctgggccatggatgcacagagccc

SEQ ID NO: 984360 - DNA, 120 bp, Artificial Sequence
  ENSG00000286710_36 (sequence is synthesized)
tgagctcagagaccaggagaggctggcaccatgctccacccagcaggtggctccaggtcatctggagtgtcccaaagctgcaaggctgagggaggctcccccttcctggaggggcccagg

SEQ ID NO: 984361 - DNA, 120 bp, Artificial Sequence
  ENSG00000286710_37 (sequence is synthesized)
cagcccttgggatggagccagggacggtccctgaccccaggagctccctctcctcccacgccttccacagacccatctccctcaggactgccttaacttggggtcacctagaaataggtt

SEQ ID NO: 984362 - DNA, 120 bp, Artificial Sequence
  ENSG00000286710_38 (sequence is synthesized)
tatggggaggccatcccagggaactttcgcaggaatgagggctgagatggggaagggctgttgtcaccaccatgggggattgctccagtgagagggccagcacgggaccctcagagtctt

SEQ ID NO: 984363 - DNA, 120 bp, Artificial Sequence
  ENSG00000286710_39 (sequence is synthesized)
cccacccaagggtcatgagatccgggtcagaggtcacaggctgctcctagggcctctagatctctggagagcccttggctgcagtttgccgatgccaatggctggaggtcagctggcact

SEQ ID NO: 984364 - DNA, 120 bp, Artificial Sequence
  ENSG00000286710_40 (sequence is synthesized)
cccaccacgatggccagcggacaacaacagtgtgggcacagtgatgggcacccccccgtgtccactcggccgggctgcagtgcccagcggcacggtcaagccccatccagatgccactgt

SEQ ID NO: 984365 - DNA, 120 bp, Artificial Sequence
  ENSG00000286710_41 (sequence is synthesized)
ggctgtgctgcaggtgtgatggacacgcacaattggctaattgcaagtgctgcagatcacgagatgtggctgggcctcagctgcagctgaagatgaacgccgaggcttcctggagaagga

SEQ ID NO: 984366 - DNA, 120 bp, Artificial Sequence
  ENSG00000286710_42 (sequence is synthesized)
tttctgccccaagactgcaacataaaatcctgcccgggctcccagcctgctcccctgcgggtctgccctgcagatttcagattcatcagcctggaccatcacatgggccagcgcattaaa

SEQ ID NO: 984367 - DNA, 120 bp, Artificial Sequence
  ENSG00000286711_0 (sequence is synthesized)
atttacagaggtagggaaatctgaatagcagttgcttattgttcttattttgtttagaaatcaggagtgccattttgaacagcctgtatttgagatccaatgggtaggcgttaagtagac

SEQ ID NO: 984368 - DNA, 120 bp, Artificial Sequence
  ENSG00000286711_1 (sequence is synthesized)
atttgtaaacatagctatctaactcagaggagaggtcgggctgatgatgtgcttttaggagtcatcagaatgtagatgatatttaaagctgcagattgtatatgttcacttggagagagt

SEQ ID NO: 984369 - DNA, 120 bp, Artificial Sequence
  ENSG00000286711_2 (sequence is synthesized)
atgtcgccaaagaagagggcagagaagaagcaatcggcaaagaagacagaaggaataggcaagaggttgcagggaaaccaggagaattagaaactaataatgaatgaatcatcatatcgg

SEQ ID NO: 984370 - DNA, 120 bp, Artificial Sequence
  ENSG00000286711_3 (sequence is synthesized)
atagtgttaccatcaagaatttttaaaaagccatttttaccaaaggaaataaacaagacagaaatacattaattctcattccagcatgacatgaggaagaatgcttactgtttgacaaat

SEQ ID NO: 984371 - DNA, 120 bp, Artificial Sequence
  ENSG00000286711_4 (sequence is synthesized)
tgaaaaacaaaggatctttggagagataaaaatgaaatttgtaaccttctaagaggatgtggggtttttttttcctctcctttttttcttctctactcatgccttggattttctgctttc

SEQ ID NO: 984372 - DNA, 120 bp, Artificial Sequence
  ENSG00000286711_5 (sequence is synthesized)
ttaatagagagaagagctggaggttactaagcctctggggttctctgtgtcttgagctagagaagaggttctttgcttgttacctgtatgggcttcagtgggtttatggagtccctgaaa

SEQ ID NO: 984373 - DNA, 120 bp, Artificial Sequence
  ENSG00000286711_6 (sequence is synthesized)
tcacatgcaaaatattgtgtgtgggaatgtgtgagtgttttttttgggaagagttcccctagttttcatcattgactcaggatgctgtgactctgaaagggtaacaaacattgctctaag

SEQ ID NO: 984374 - DNA, 120 bp, Artificial Sequence
  ENSG00000286711_7 (sequence is synthesized)
aaagaaaaagcccctttgaattgcaatccagtcacctgagcaccaaagcagtcacactggctttaaatcaaaaaggttgttcgagagaagacgcatggttggagtcaacatgctattact

SEQ ID NO: 984375 - DNA, 120 bp, Artificial Sequence
  ENSG00000286711_8 (sequence is synthesized)
tgttattataaacaacaaatagattgcttttgagtactgtactataaataatgcatttaaagagaactttattgtttccaaatcacttttatctatatttactcatttaaaaaatcacaa

SEQ ID NO: 984376 - DNA, 120 bp, Artificial Sequence
  ENSG00000286711_9 (sequence is synthesized)
taatcccctgctgaggttagatattataattattgttatccccaatttagagctaagctctgggtgattgaaagattcagagatgagctcctctctcataaatgattggactcgaagtgg

SEQ ID NO: 984377 - DNA, 120 bp, Artificial Sequence
  ENSG00000286711_10 (sequence is synthesized)
gtatctgcctcgaactaggtcagagggtcctctatgtgaatctagaattgtgaccaaaacccaaactgtctgccccacagtgcttggagatgtttgtcttctacctattataatcagcaa

SEQ ID NO: 984378 - DNA, 120 bp, Artificial Sequence
  ENSG00000286719_0 (sequence is synthesized)
ttcctctttgccttccaccatcattgtaagtttcccgaggcctccccagctatgcctcctgcacagcctgcagaactgaaatggtcccactgaggcccaagacttgacagtggaagtctt

SEQ ID NO: 984379 - DNA, 120 bp, Artificial Sequence
  ENSG00000286719_1 (sequence is synthesized)
gccaatttaaagtctaatgaagattgtgaattattgactggcacaagtagagcttcctgcactcaatgatggacaactgaaggcctgtgctagcactctgtttggtacttaggagagtgt

SEQ ID NO: 984380 - DNA, 120 bp, Artificial Sequence
  ENSG00000286719_2 (sequence is synthesized)
ggctcaatttttccactttctttaagatgtgaaacttcagtcaacctctttgtgtcagattccctccatcttgaaaacaatttctgccgcctcctaccttctctgctacaggatgactaa

SEQ ID NO: 984381 - DNA, 120 bp, Artificial Sequence
  ENSG00000286719_3 (sequence is synthesized)
tgtccgtgcagaactgcaggacttctgaaagaaccacatgcttttggggccagaggaagccaaccacctggctgtgtgttccccttctttcatctcctactgctaagggccttggcctct

SEQ ID NO: 984382 - DNA, 120 bp, Artificial Sequence
  ENSG00000286719_4 (sequence is synthesized)
gaagggcagcaacaagagcaccagctaactttcttgaaaattcactctgccagaagccctgctgagagctctacacaccttcgtctatttaatcatcccaaagacactgttgggaggtat

SEQ ID NO: 984383 - DNA, 120 bp, Artificial Sequence
  ENSG00000286719_5 (sequence is synthesized)
agttaccagccccatttagcaggttgggagactccgaggttgtcacctgccaaaggccacagacctagaaagtgttagaactgggacaaacccacatcggaatgattccaaagcccttac

SEQ ID NO: 984384 - DNA, 120 bp, Artificial Sequence
  ENSG00000286719_6 (sequence is synthesized)
tcttagcagtaagacctcgatgtctccctggcattgttaggagtcctcaaatccattgtctatggactgagtacaaaatacatacatattctatagagaataataacatataaattcatc

SEQ ID NO: 984385 - DNA, 120 bp, Artificial Sequence
  ENSG00000286719_7 (sequence is synthesized)
gctggcattctctgtccttcagtcgttatccctgtgtcctctgtgtacagtactgattagcttgtctggtgccattactcatctcccagtgtttgtgtcacttcttcaacaaggtaaact

SEQ ID NO: 984386 - DNA, 120 bp, Artificial Sequence
  ENSG00000286719_8 (sequence is synthesized)
cctagtaagtgggactacagaaaatagggtttcttttgagtcctgcctggtcccactccaaggtcttacacttgatagatacagatttagctaactggttgattacaacaacctctgtaa

SEQ ID NO: 984387 - DNA, 120 bp, Artificial Sequence
  ENSG00000286719_9 (sequence is synthesized)
tactcctcctcatattggcccacagaatgatacatctcaagtctcctgccctgtatcccgctggagatgccctaatgtggcctgcatgcttccaacagcccagactgtaatgaaaatagc

SEQ ID NO: 984388 - DNA, 120 bp, Artificial Sequence
  ENSG00000286719_10 (sequence is synthesized)
taccatgtattcagcacgttctgttcactaggctctatactcggtgcaggggatactgttgtgaagaaaacaaagcgcagagctcagctattgtattaatgcaatgtgggatggcatttc

SEQ ID NO: 984389 - DNA, 120 bp, Artificial Sequence
  ENSG00000286719_11 (sequence is synthesized)
attaacataaccacctagaggagggtatcatcttctcccttttactgatggaaaagttgtagaggagcagaacttgaactagggtttatctcaatatgttttgatttgtgggtcactacc

SEQ ID NO: 984390 - DNA, 120 bp, Artificial Sequence
  ENSG00000286719_12 (sequence is synthesized)
cattgttggattaatgggtgctaaatgtatttagtgggtcataactaacatttattttaatggattggtttgggatggaaggaccagagtacatagcatgtaatagaagtattatttgct

SEQ ID NO: 984391 - DNA, 120 bp, Artificial Sequence
  ENSG00000286719_13 (sequence is synthesized)
gaaacttttgtttcatttacatacagacatatagagagttgcaatatatttcttactgtgagtcatgtcagaaaacatatgaaagccactggtttgttcaaatcccaatctgttcttcta

SEQ ID NO: 984392 - DNA, 120 bp, Artificial Sequence
  ENSG00000179840_0 (sequence is synthesized)
gcaatttaagtaaaacaagatgaagcaggaaccgactctcaccatccccactcccacctccatgaattccatcggacagttgtgcgaaagcgggctggctttcgcacaaccattggtgga

SEQ ID NO: 984393 - DNA, 120 bp, Artificial Sequence
  ENSG00000179840_1 (sequence is synthesized)
ctgtctgtcctgtaagccccccaggggctgatgccctcccagtctgcctgccctgttcttagcacagcccctggcaccccgtgtgatctcaggaaacacttgctaaacatggtatcggag

SEQ ID NO: 984394 - DNA, 120 bp, Artificial Sequence
  ENSG00000179840_2 (sequence is synthesized)
gagaaacggagcccacagcttagtgcaaagacctggcggcgtggactgaggctgcagaaacgcagaaacgcgcttttcctgccagaaggggacatctgcgtggtcgggagtacctctggg

SEQ ID NO: 984395 - DNA, 120 bp, Artificial Sequence
  ENSG00000179840_3 (sequence is synthesized)
catctgcgtggtcgggagtacctctggggcacgtgccctaattccagaaacatctaagctggagcgcagtggcactgtaatagcttactgcaaccttgaactcctggcttcaagtgatcc

SEQ ID NO: 984396 - DNA, 120 bp, Artificial Sequence
  ENSG00000179840_4 (sequence is synthesized)
atgacaggtatgagctaccgctctcagccacaactgggttttaagagcactcctccagcccactccagtgtcttccatcattctgtgaaagcaccaaaagaggaccaagcccaggaagcc

SEQ ID NO: 984397 - DNA, 120 bp, Artificial Sequence
  ENSG00000179840_5 (sequence is synthesized)
gccagcaggcctctcaccagccaagatggctggaatcctaatatcaagaaatgaaactccagcaggccatggaaatgctaaggggttggcatttctgctctagagagagccaaagagaaa

SEQ ID NO: 984398 - DNA, 120 bp, Artificial Sequence
  ENSG00000179840_6 (sequence is synthesized)
gctctatttatatctccttgcgtttggtcgcagcctcatcaaccaaaagaaccttccgccccactcaacacatcaatcaaattggggagggggtgtgaacagcagcagcgggtgttacag

SEQ ID NO: 984399 - DNA, 120 bp, Artificial Sequence
  ENSG00000179840_7 (sequence is synthesized)
gggtgcctctctgaacagtcgtcccctccaaatcccccccaagagaattactaggacattctccttcccccgcaagcaacggcacccccagatgattaaacgcgctggcgtcggaaagag

SEQ ID NO: 984400 - DNA, 120 bp, Artificial Sequence
  ENSG00000179840_8 (sequence is synthesized)
ctgggatcctggagaaactacttgtaaactgtgtgggttggtgagttatttaacttttctgagccttcgtttccttaactgtaaaatgaagacaacaccactcagctcctacagttgtcc

SEQ ID NO: 984401 - DNA, 120 bp, Artificial Sequence
  ENSG00000179840_9 (sequence is synthesized)
agctgaaatcacctaggtaagaacgaccagttctttggggagtaatgtcccgatggtaccattcaattgtcaagaacaccaaggcaccgtcaggcacccgggcggtatcccactctcctg

SEQ ID NO: 984402 - DNA, 120 bp, Artificial Sequence
  ENSG00000179840_10 (sequence is synthesized)
gaagagagcagggggttagcccttggtttcaaagtccctagggagcagtaaaccttcccctccgagagccctgagagaggaataattgccccttcccactccaacccacggcacacccgc

SEQ ID NO: 984403 - DNA, 120 bp, Artificial Sequence
  ENSG00000179840_11 (sequence is synthesized)
ccacatccacgtgcggctgtgcccagcatctcagaggtaggacttctcaggaatcggcgggaagaagcccccttgatggagtctggtggggttcaagatctgcaggtcccaccttccagg

SEQ ID NO: 984404 - DNA, 120 bp, Artificial Sequence
  ENSG00000179840_12 (sequence is synthesized)
gaacacctgcacaagtgagacctgcccgatcagccccgcgctccatccgcaaactgggcagatcccaagggtgccacgcgaggaccctgcaccttggccgctccagggcgccccccaccc

SEQ ID NO: 984405 - DNA, 120 bp, Artificial Sequence
  ENSG00000179840_13 (sequence is synthesized)
gcgaccccggaaatctcgcccctacctgcttcaccctcgccccacccacagcgcacttttcgggacctcccagcggcccttccccggttctctggacccccgtctccccgccctgcaacg

SEQ ID NO: 984406 - DNA, 120 bp, Artificial Sequence
  ENSG00000179840_14 (sequence is synthesized)
cccccatcctggtgcccacgaaaggtcgtcccagttcccctcttctctacctcaaaggaggaggtgcaaatgaggaagcctaaataaaaacaggaaactcgatttttttaaaaagcctca

SEQ ID NO: 984407 - DNA, 120 bp, Artificial Sequence
  ENSG00000267201_0 (sequence is synthesized)
ctgggacttggagtccagtccctgggggtcccgcggggatggctctgggcacccgaagcccctccccagcgccgagacaggagggctggggtagattcgagaccccggtttgcagagcgc

SEQ ID NO: 984408 - DNA, 120 bp, Artificial Sequence
  ENSG00000267201_1 (sequence is synthesized)
ccagggccgcgcagtcaggcaggaaacggcgctcctggcggatggaacagcacgggcaaaggctgggtatggggggtctcgctccgttgcccacactggagtgcagtggcgcaatcatgg

SEQ ID NO: 984409 - DNA, 72 bp, Artificial Sequence
  ENSG00000267201_2 (sequence is synthesized)
gctccgttgcccacactggagtgcagtggcgcaatcatggctgactgcagacttgaactcctggatgtgtgc

SEQ ID NO: 984410 - DNA, 120 bp, Artificial Sequence
  ENSG00000231154_0 (sequence is synthesized)
ccccgaacacggaaaaaaaaggcgcagtgggggttctgctgtgtttgcaagtgagggtcgtgagtgcaacgggcgcaaggcattaaggccagtgtgttagtgcgcgggcaggctcgcgtg

SEQ ID NO: 984411 - DNA, 120 bp, Artificial Sequence
  ENSG00000231154_1 (sequence is synthesized)
gtgctggggttgctgtgtgagcggccctcgtggctcgggaggtgctgtgtttgcgcaggcgtgcgcccctggcgtcgggactgggactccggatttctgtggcgactgaggcgctcttac

SEQ ID NO: 984412 - DNA, 120 bp, Artificial Sequence
  ENSG00000231154_2 (sequence is synthesized)
ctttgcgtcctgatctccaagcaagcacactgaccttcttcaggcaaatacgcactgttaattttccagaaagttctgtgagtaaggtttatacctctcgagtctgccactagatgccgc

SEQ ID NO: 984413 - DNA, 120 bp, Artificial Sequence
  ENSG00000231154_3 (sequence is synthesized)
caaatcccagcaaaggattggctgtttggtccctgggattctgggattttgtttccctcccccctcccctttctgatttgctgaacggtaatatctataggcatcatggatatcgttcat

SEQ ID NO: 984414 - DNA, 120 bp, Artificial Sequence
  ENSG00000231154_4 (sequence is synthesized)
tcctaggaaaaaataaaatcaacttctgtaaatagcactagtaggcaggggactgtgacccaagatccaaataattttgctcatttctttccttttctccttgggttaaaaaaaaaaaaa

SEQ ID NO: 984415 - DNA, 120 bp, Artificial Sequence
  ENSG00000231154_5 (sequence is synthesized)
ggcccctctccatccctcttttcttttgtccttgccttgtttaatcaaagagttaatgaatgacgcaagcactgatgctgaagatcctaaccctttttcctcaccttttcaaatgctcgc

SEQ ID NO: 984416 - DNA, 120 bp, Artificial Sequence
  ENSG00000231154_6 (sequence is synthesized)
aactcacccaaactgaaaatacagatagctgttccgtcagtaaagatagataagaactcatcagtaaaacctggaccctggtattgaaaactgattttccttttctcttgaaatttgtat

SEQ ID NO: 984417 - DNA, 120 bp, Artificial Sequence
  ENSG00000231154_7 (sequence is synthesized)
cagatatgtgtttttgcaccctattttctgtagtggtattggtaaactttattgtgtctttggagtaagagaaagagacctaattgtaaacctcattccaccacttactagtctcagtac

SEQ ID NO: 984418 - DNA, 120 bp, Artificial Sequence
  ENSG00000231154_8 (sequence is synthesized)
ctttctatattttagatgctgtgttatatcgttcacgttgatttttttattcatcaccaagtccttattagatgagcactactggatcaaagtcaaacaacaaaaatcatacccctttca

SEQ ID NO: 984419 - DNA, 120 bp, Artificial Sequence
  ENSG00000231154_9 (sequence is synthesized)
attatctatcttatatacttgtacaccacacaggagggatttttttagagcagtggttcccaaggtgtgtttcctggatgtaccagaaacatcagcgtcacctgaaaagttgtcagaaat

SEQ ID NO: 984420 - DNA, 120 bp, Artificial Sequence
  ENSG00000231154_10 (sequence is synthesized)
tcggattctcaggtcccacctcaaacttaatgaatcagaagttcgcagggtggggtttagtaatctgtgttattacaaactatcccagtgattccagcacacactgaagtttgagagcca

SEQ ID NO: 984421 - DNA, 120 bp, Artificial Sequence
  ENSG00000231154_11 (sequence is synthesized)
ctgctttggagagtagaaatgcaatgcatatttttgtacacaccactagagggtgctacagaatgtaaagcaaaataataaatgatgcacagtatatgttttcagacaccctctatatta

SEQ ID NO: 984422 - DNA, 120 bp, Artificial Sequence
  ENSG00000231154_12 (sequence is synthesized)
tcagtcctattttacagattaaaaactaatgtgtagatatgtcaaattattttcttagtgtacgcaacaagtatgggaaccaggatttgaacttcacctgcctctagcccaagcccctaa

SEQ ID NO: 984423 - DNA, 120 bp, Artificial Sequence
  ENSG00000231154_13 (sequence is synthesized)
tagtactctgttgtttaaccatgatgacttgtctttccaagcctcaaaatacattagaaatatcttgttccctgctttggctaatgttgactggagtgtcaagaagagtgcaggaaagca

SEQ ID NO: 984424 - DNA, 120 bp, Artificial Sequence
  ENSG00000231154_14 (sequence is synthesized)
aaccaagctgttgcaacctcaccagaacagctgaagaatgaatttcagcctggactctaccttattagttgggcacccttggggagggtgcaacctgcccaacattttctgctggccctg

SEQ ID NO: 984425 - DNA, 120 bp, Artificial Sequence
  ENSG00000231154_15 (sequence is synthesized)
tcttacctcatgactaagagagccttcctaggtctggaaggtagcagtcagtctgttctggagggtggagagagacaccagtgttttcccatggtttctgggtagtagataaaattggtc

SEQ ID NO: 984426 - DNA, 120 bp, Artificial Sequence
  ENSG00000231154_16 (sequence is synthesized)
tattctaaggttaatttgatattttaaaattttgattctgactagcttattggatttttttgaataatgtttgattaatgtaaaggttaaaaataaaacctaatatttcagctaagcaaa

SEQ ID NO: 984427 - DNA, 120 bp, Artificial Sequence
  ENSG00000267207_0 (sequence is synthesized)
cggaaacttgatgatagcatagtggtcaagcttgtttctcctgggagcgctcttccgaggatatttgggctgtctccagagtcgcagtgtcttcggctgccggaaggtaaggaacctgct

SEQ ID NO: 984428 - DNA, 120 bp, Artificial Sequence
  ENSG00000267207_1 (sequence is synthesized)
ggctcatgtctgactgccagtgttagcataaaggagagccattttgccaagaacaatacagcctgtggaactcaccagagaagtgccccagtaacaacccgacctgcattatttgcaaac

SEQ ID NO: 984429 - DNA, 120 bp, Artificial Sequence
  ENSG00000267207_2 (sequence is synthesized)
catgacctggatgttccgaagatagcagccacacaaaattctccgcccatcgatttgctgggtgaaatttgtggaggaggtttaactttgcttaaaaaataaaataagagtaaaaaacaa

SEQ ID NO: 984430 - DNA, 120 bp, Artificial Sequence
  ENSG00000239775_0 (sequence is synthesized)
gggaacaatctcctcgttccagaagggcagggcccgggcaatggtgtccttgaggctctcgcaggtggggagttccccgggcttcaggcctgcgtaccgacgctcctgggggacacaggc

SEQ ID NO: 984431 - DNA, 120 bp, Artificial Sequence
  ENSG00000239775_1 (sequence is synthesized)
acgctgctttccctcccaagccagtgggcccccacccgactccccactctgcagcttcccagaggccttcccagcaaaggcagcccaccttgctaatggagttgtagtaggggtgcttct

SEQ ID NO: 984432 - DNA, 120 bp, Artificial Sequence
  ENSG00000239775_2 (sequence is synthesized)
aatgccgctcattgaggcgccaagtgcgcaccacaggcagccacatctggtccgtgccgtccaggatggcccagagggtgcggatggcccgcttcagcactgacgtgtagcagatgtcaa

SEQ ID NO: 984433 - DNA, 120 bp, Artificial Sequence
  ENSG00000239775_3 (sequence is synthesized)
actccatcttggcatccttgatggccttggctccccgcttggcctcctcggtccccttttcactcagctctgcatcgaaccagccacagaaacggttctcctggttccatgtgctctcgc

SEQ ID NO: 984434 - DNA, 120 bp, Artificial Sequence
  ENSG00000239775_4 (sequence is synthesized)
cgtgccggaccatcacgaggcgccaggctaggaggcggccctcagcaggcagaggaggagagccagaggagctggtgcagaccacagctttgtggagaggagtctggccttgtggaaggt

SEQ ID NO: 984435 - DNA, 120 bp, Artificial Sequence
  ENSG00000287395_0 (sequence is synthesized)
acccacctccaaccctgggggttacaactcaacatgagatttggactgggtcacagatccgaaccatatcgaggaagaagcacctaactcaacctctctgctaggaaattaccaactgag

SEQ ID NO: 984436 - DNA, 120 bp, Artificial Sequence
  ENSG00000287395_1 (sequence is synthesized)
aaattccctttggatgcttccctgccctcaagcctctcacttcaccctaaagaaaaaccggcggttgatgtagaacgatgggatggccattttcccccgaagaagtttctcttttgaacc

SEQ ID NO: 984437 - DNA, 120 bp, Artificial Sequence
  ENSG00000287395_2 (sequence is synthesized)
tggccaactttttcaatcatatctatcgttaggattattgttattccggaattgcaggcaatgtttaaattttgcacccagtactaaagacacagctttttaagatgttttaaaaacttg

SEQ ID NO: 984438 - DNA, 120 bp, Artificial Sequence
  ENSG00000287395_3 (sequence is synthesized)
caaaatctttccttgaaagatcttaactttcaagatattgtaagaagcatttaaaaagaacattacaaaactataaataagaggtattgaatgattttctccaagctatttctaaaaaga

SEQ ID NO: 984439 - DNA, 120 bp, Artificial Sequence
  ENSG00000287395_4 (sequence is synthesized)
agcacttatttaggtaatgtgccaacattgtaacaaggtttaaaggatggatatctcacacatgagcatgaaaaactgtaagtgtgtttcacatttatgaaccacaaaataatgtgtttc

SEQ ID NO: 984440 - DNA, 120 bp, Artificial Sequence
  ENSG00000287395_5 (sequence is synthesized)
aaatctttcttactacattgaaagcaacagctgaagatcatgaagacagttcaacaaagaaatacaagctggtggcttgcacctgtaatcccagcaactccggaagctgaggttggagga

SEQ ID NO: 984441 - DNA, 120 bp, Artificial Sequence
  ENSG00000287395_6 (sequence is synthesized)
ttgcttgagcccagcagttctaagaccagcacgggcatcatagtgagacttcatctctaaaaaaattttttttaaattagctgggtgtatattaatacattttgcatttctataaaggaa

SEQ ID NO: 984442 - DNA, 120 bp, Artificial Sequence
  ENSG00000287394_0 (sequence is synthesized)
ggtactaccctgggttccgggcaggggtggaactggattctgcctggatggggatcggatgggggtggaggtttgatttgggaagcagagcacagcagcccaaatttgttgtaatggcgg

SEQ ID NO: 984443 - DNA, 120 bp, Artificial Sequence
  ENSG00000287394_1 (sequence is synthesized)
cggctacagacttggcatatggcataagacacacagagagagccttgctggtgtagctgagatttacgaccctcatccaaccaaaccatttcagattcttggggctcagagctctcatcg

SEQ ID NO: 984444 - DNA, 120 bp, Artificial Sequence
  ENSG00000287394_2 (sequence is synthesized)
tctcttccagaacttacatcccagaaggccctcccctacttcgggtctccctagagagtggagagacctgctgcccttgaagaagcaaacagccatgttgtgagctgcctaagcctctag

SEQ ID NO: 984445 - DNA, 120 bp, Artificial Sequence
  ENSG00000287394_3 (sequence is synthesized)
gtcttgagggaagcttacagttaagagccagcaaaagccagggccctcagtcatgccacacaaggaaacgaatcctgccagcaactatgggggcttggaagaggatattaagcttcagtt

SEQ ID NO: 984446 - DNA, 120 bp, Artificial Sequence
  ENSG00000287394_4 (sequence is synthesized)
gagaatgcagcctgactgacaccatcattgcagccttgtgagaccccaatcagaggacccagctgagctgtacccagactcctaacccacggaaactgagaaaataaatgtgtgctattt

SEQ ID NO: 984447 - DNA, 120 bp, Artificial Sequence
  ENSG00000287397_0 (sequence is synthesized)
gtcttgacggaaagtaaaaagaacaaacttgttttatacaaaatcagatgctccaaatggtcagttgatgatgataccaatcaaagaaaactaaggaggaagaaaaagaaaacaggaaag

SEQ ID NO: 984448 - DNA, 120 bp, Artificial Sequence
  ENSG00000287397_1 (sequence is synthesized)
agaggaggcaacaggaaaatcggccttcttccttcagtctacgcttgaaattgccagggatggataaatctgaagatgaatgaaaaaaagaaactactgggaacggaacagaaacaaaaa

SEQ ID NO: 984449 - DNA, 120 bp, Artificial Sequence
  ENSG00000287397_2 (sequence is synthesized)
tagcaggatacagttgaataataacattatctattggagatcactgaaatgtagggagggaattccattttgaaaactttaatatgtagagagtcaatacatcattttcacaagcaatat

SEQ ID NO: 984450 - DNA, 120 bp, Artificial Sequence
  ENSG00000287397_3 (sequence is synthesized)
ccttagaagaaaggattttttttagaactatcatgctacagaaaactgcatttttatagtaactgaaagatgcaaagttactgaaaaaataaaactgccattttattgtattgccattaa

SEQ ID NO: 984451 - DNA, 120 bp, Artificial Sequence
  ENSG00000287396_0 (sequence is synthesized)
ggggcaacccgctggggtcgtcttccatgcggtagaagctttgttcttttgctgtttgcaataaatcttgttgctggtcactgtttgggtccgcactgcctttgtgagctgtaacgctca

SEQ ID NO: 984452 - DNA, 120 bp, Artificial Sequence
  ENSG00000287396_1 (sequence is synthesized)
ccacgaaggtctgcgggttcactgctgaggccagtgagagcccgagcccaccaggaggaatgaacaactccggatgggagaaacgaacaactccagatccgccgacttaagagctgcaac

SEQ ID NO: 984453 - DNA, 120 bp, Artificial Sequence
  ENSG00000287396_2 (sequence is synthesized)
aaaactgtgaacacacccgaggaataaactccggacacaccatctttaagaattgtaacactcaccacgagggtccacggcttcattcttgagcaagctaccactgtttagagagagtct

SEQ ID NO: 984454 - DNA, 120 bp, Artificial Sequence
  ENSG00000287396_3 (sequence is synthesized)
cctgttgtcttcgtcctgaggcttcttccatctgcacggaggttccgaagcgtttatgacatatcaatccctctaccatcaggcacacatttcactgttttgggagaaggcctttggact

SEQ ID NO: 984455 - DNA, 120 bp, Artificial Sequence
  ENSG00000287396_4 (sequence is synthesized)
gaagctggaatcactgctgctccgtgggtgcttgtcatggctcctgtggatgggaacccgctaggcttctaggctctgcatgggtttgtctttttgaataaattgagcaattgaattatt

SEQ ID NO: 984456 - DNA, 120 bp, Artificial Sequence
  ENSG00000287391_0 (sequence is synthesized)
gacaaaagatctgaaaggctttccttcttcaagtgccagggacactgacgatccaaccaagtccctagccagggctggccaggctgggcaggagctctggcttcatcctagaaatgcctc

SEQ ID NO: 984457 - DNA, 120 bp, Artificial Sequence
  ENSG00000287391_1 (sequence is synthesized)
ggagttcccaaagcttaagactgcggctccttacaggcactggctctgaatggcttgttcatcttcatatctcccatcaccaccaaacagttccccaagtggctggaaccccacagctat

SEQ ID NO: 984458 - DNA, 120 bp, Artificial Sequence
  ENSG00000287391_2 (sequence is synthesized)
agcacaagtgagcagggtcatcaagaagccactttgttcttctggaagctgcagagaagggaacccagacacctgctatgccagcaaaaaggcaactgttgtctcactttgggagcccaa

SEQ ID NO: 984459 - DNA, 73 bp, Artificial Sequence
  ENSG00000287391_3 (sequence is synthesized)
acaatagagcaaaactccatgtcaaaaaaaaaaaagtttcataatcagttgtaaaatttaacaggtattctca

SEQ ID NO: 984460 - DNA, 120 bp, Artificial Sequence
  ENSG00000287391_4 (sequence is synthesized)
aagtttcataatcagttgtaaaatttaacaggtattctcaagggcaaaattctgattagtaactctagagattgtgacattagaatagaggaaaaactttcaaatataaaagtaaatggt

SEQ ID NO: 984461 - DNA, 120 bp, Artificial Sequence
  ENSG00000287391_5 (sequence is synthesized)
tggtgtttggttttcattggagtatttgtataaatatgttattaatgtgttcaaaaaattatgggacacttctataattctaatatgatttagtatacattattgttaattataattgtt

SEQ ID NO: 984462 - DNA, 120 bp, Artificial Sequence
  ENSG00000287391_6 (sequence is synthesized)
tgccacagaggtaaccaaaattcctgtcaattgtagctttaatagtgacaatagacatctgtcatccacagacgttttgtcttgctttgatccttttcaaaaggcagtttataatcagat

SEQ ID NO: 984463 - DNA, 120 bp, Artificial Sequence
  ENSG00000287391_7 (sequence is synthesized)
ataggagtctaagtccaagtctcagataactttaaaagttgtgctattggaatagagaagaaacgaaacttccaggactctcatggagagccgatgtgttaaacattgctaatccttttg

SEQ ID NO: 984464 - DNA, 120 bp, Artificial Sequence
  ENSG00000287391_8 (sequence is synthesized)
ttttcagagtcaagataacttatttctttagagctatttgcaacttttaatgagtaaactatgttgctgtgaaaaagatttttggagcatatttgtttctctctacctaatttctccaga

SEQ ID NO: 984465 - DNA, 87 bp, Artificial Sequence
  ENSG00000287391_9 (sequence is synthesized)
tttggagcatatttgtttctctctacctaatttctccagaatttggaaactatttgttagtattctcaatttatagtggtatagtta

SEQ ID NO: 984466 - DNA, 120 bp, Artificial Sequence
  ENSG00000287391_10 (sequence is synthesized)
ggctttgactagaatggcatgctttatttaaagaatcgaagttgacttatagagccaattaaagcctcttaggaaatctggcctcataccttgtccacacagagtccctgtacaaggttc

SEQ ID NO: 984467 - DNA, 120 bp, Artificial Sequence
  ENSG00000287391_11 (sequence is synthesized)
ctgacctgtggtaagtaaagcatgtcactttctaacaggtccaggagccccaagttatcttgggacctcaagaggagagaaatttacccaactcataggtaatttaagggtacagaccca

SEQ ID NO: 984468 - DNA, 120 bp, Artificial Sequence
  ENSG00000287391_12 (sequence is synthesized)
tggctgggctcagcttttaaaaagtcttgtctgagattccctgcggaacagagttccaacaaagccaattaaatatgaaaaataattattcctgcttactttatacaaacaatcaggcaa

SEQ ID NO: 984469 - DNA, 120 bp, Artificial Sequence
  ENSG00000287391_13 (sequence is synthesized)
gtacaataagactaaagtttattttgtaatcaaatcagttctatcattttttttaaataggaactggagagaaaaaaatatgctaaccaaaaaaaaaaaaaccatagtacactcttgtta

SEQ ID NO: 984470 - DNA, 120 bp, Artificial Sequence; identical to SEQ ID NO: 806335
  ENSG00000268191_0 (sequence is synthesized)

SEQ ID NO: 984471 - DNA, 120 bp, Artificial Sequence
  ENSG00000268191_1 (sequence is synthesized)
ggcaggggctgaggggagtgaggcagggaggatgcatggggcctgtgggaatcagagagaagctggggtcagaggtaggagctgacgctgtggggggtggggggtgaaaggtgaggcaag

SEQ ID NO: 984472 - DNA, 120 bp, Artificial Sequence
  ENSG00000268191_2 (sequence is synthesized)
aaaccagaacttataggtctagaggtaaaatgggattcatggggggcagaggtcaaaggtgaagcagaagtcaggggtgaaggaaggtctgcaaagttaaaggtgcggtttccagagtca

SEQ ID NO: 984473 - DNA, 120 bp, Artificial Sequence
  ENSG00000268191_3 (sequence is synthesized)
gaaggggtgaagcggggctcctcctgggaatgtcaaggttggaagagctcaagggggttaaagataaattagggctcaaaggggagccagggtcggagatgaagtagccagaggtaaagc

SEQ ID NO: 984474 - DNA, 120 bp, Artificial Sequence
  ENSG00000287393_0 (sequence is synthesized)
actgttaaaaaggaaaattggcctcggtcgtttcttaacaatgctaccatttacttcaagaagaaaattgtgggctttaacctttgcgcatttgattcttccgcacggccttccaaggaa

SEQ ID NO: 984475 - DNA, 120 bp, Artificial Sequence
  ENSG00000287393_1 (sequence is synthesized)
ctaggctttgggcacccgccaccttcattcttagctccatcctggtcctgacgcagctagcctgaccaagccttgaagtacatcagatgctgtaaccctactcataggtacaattttgaa

SEQ ID NO: 984476 - DNA, 120 bp, Artificial Sequence
  ENSG00000287393_2 (sequence is synthesized)
tttgtgctggatccaaggccattgcgtctggggtgagcttcaacgtctttgagccccttgagctgtatcctttctcttcctcctggccttcactgagcttgctctgtccatgtcactagg

SEQ ID NO: 984477 - DNA, 120 bp, Artificial Sequence
  ENSG00000287393_3 (sequence is synthesized)
cagcttgccctggttaacactgaaatccctatctgggcctggagccagctcatgaactgcactcaggttctctggggtcttgacaacatgatatcttattgccagatatgtgttccttta

SEQ ID NO: 984478 - DNA, 120 bp, Artificial Sequence
  ENSG00000287393_4 (sequence is synthesized)
ttctgtttatcagtaggtcaagtcaataaaaatatattgattgcctactccatgccaagctactatgtgggggatattactgtctggactttgatctgctgttgagatatcaatccaaac

SEQ ID NO: 984479 - DNA, 120 bp, Artificial Sequence
  ENSG00000287393_5 (sequence is synthesized)
aactagatctcagtcaaccctgccgaatgcctgattccaaaattcaccattggctggacagtctgttttgccccagattggacctcttagatactgataccgtgtcaagcttactatatc

SEQ ID NO: 984480 - DNA, 120 bp, Artificial Sequence
  ENSG00000287393_6 (sequence is synthesized)
acactataacttgaaaatctagctatccatctcaggtcccagttctacagaaaggttagtccccagtaattctggcttcttttcctgtcctcatgtctcccttgccaagatcctgcaaac

SEQ ID NO: 984481 - DNA, 120 bp, Artificial Sequence
  ENSG00000287393_7 (sequence is synthesized)
tttccaggtaagccttcttgggttctgacctttataacatttatgatttacaaaaatatctttatatatattttcccattctagttttgaatcttaaaataactctttgagataggaggg

SEQ ID NO: 984482 - DNA, 120 bp, Artificial Sequence
  ENSG00000287393_8 (sequence is synthesized)
gaggcttattaaatctctgtttcactaaagaggaaactgtctttaagaagactaatgacgtatttatgtttaataaatggcctttttaggatgtgaactcagaccttatctctcatttta

SEQ ID NO: 984483 - DNA, 120 bp, Artificial Sequence
  ENSG00000287393_9 (sequence is synthesized)
atgttctttaccctggggggtggggtggctaaccttcactttgaacagaccttataattcatttcaggaagcagtcaactctttggtatgaaggattgatgtgttagacctcctaggacg

SEQ ID NO: 984484 - DNA, 120 bp, Artificial Sequence
  ENSG00000287393_10 (sequence is synthesized)
ctaggacgacactttaacccccaaataattactcaaaacacataaatattacatcctatgtagttagaaggataaaagtcagtagatgtaaggccaagcatggtggctcatgcctataat

SEQ ID NO: 984485 - DNA, 61 bp, Artificial Sequence
  ENSG00000287393_11 (sequence is synthesized)
accaccacactccagcctgggcgacagagtgggactttgtctcaaaaaaaaaaaaaaaaaa

SEQ ID NO: 984486 - DNA, 120 bp, Artificial Sequence
  ENSG00000287392_0 (sequence is synthesized)
accaggtgctggtcctccacactcacgccagccagtaccacgcggtcgggggtgtagtaattccgcaggtaggaatgcagcacttcccgattgatctttgctatgttttctgtgggacag

SEQ ID NO: 984487 - DNA, 120 bp, Artificial Sequence
  ENSG00000287392_1 (sequence is synthesized)
aaacggtggaggccaactgtggtgcctgttgagcacgttgaggtagagcctgtaagccgcttcatgaatcatctcggtgaggagtggctctgggtcaggctgcatgttcgggtcctccag

SEQ ID NO: 984488 - DNA, 120 bp, Artificial Sequence
  ENSG00000287392_2 (sequence is synthesized)
ctcaaactggaccgccatctgcatcatctcgacttcttcatctgttagctggggctgcagaaccgcatcagccagtaagccgaacaccgtgtccaagcctttactatcagcagacacagc

SEQ ID NO: 984489 - DNA, 120 bp, Artificial Sequence
  ENSG00000287392_3 (sequence is synthesized)
atacgtggtggtgtcacttgatgtctggcagtcacaaatacctccatgcttttccaacgtaagcagtatttcatctttgctgttaaatcgagcattagaagaaaatgccaatttttccaa

SEQ ID NO: 984490 - DNA, 120 bp, Artificial Sequence
  ENSG00000287392_4 (sequence is synthesized)
ctatgtttggctgagaataaccttggattatatcctatgtgcaagctaacttgtttagtcatggatgctggcaaaagatacgaggcttgggtcagaaacaaaggaacttcttactctcat

SEQ ID NO: 984491 - DNA, 120 bp, Artificial Sequence
  ENSG00000287392_5 (sequence is synthesized)
gacatagcaagcagtttaagctttgtacttactttggattgctctgtttatctccaagcaccactaacataattagaatggcccaatgcagggaatttgtgttatacagtcaacgaaccc

SEQ ID NO: 984492 - DNA, 120 bp, Artificial Sequence
  ENSG00000287392_6 (sequence is synthesized)
tgaatctgagaaacctcaactttgcccgagagagagacattgtccttactattctcaacaacagacaaacctgcctctcctccaaatggaaatacaatctttattatgtttcaaggctgt

SEQ ID NO: 984493 - DNA, 120 bp, Artificial Sequence
  ENSG00000287392_7 (sequence is synthesized)
ttgctatacaaatatctttgaaaagatagtctggaacgaaagctgtcaatgcttctgctcagaaaacatatggaaacccaacattcataaagagttgtctccaacagggttctatttttt

SEQ ID NO: 984494 - DNA, 120 bp, Artificial Sequence
  ENSG00000287392_8 (sequence is synthesized)
ccagtaaataaaatcatggccagtagccatggaaagaaaaaacaatgctgtatttagaaacagaggttaaggtcaagtctccacttaacaaagagaaataaagaattaagctcaggccaa

SEQ ID NO: 984495 - DNA, 120 bp, Artificial Sequence
  ENSG00000268199_0 (sequence is synthesized)
gttgagtgttatgttctccatggcccctggctcgttccacctgcaccaccgccgctcccgtcaggccttttccccatccccactagtggcacaggggatgcccctgccccagtgtgggaa

SEQ ID NO: 984496 - DNA, 120 bp, Artificial Sequence
  ENSG00000268199_1 (sequence is synthesized)
gaacagggctgcctgcgggcgacacagcaaggtccagctgactctggaggcctcctggagcctgctcggcccttccccggcccggcccggcccaaagagaaaaacaacaacagctattga

SEQ ID NO: 984497 - DNA, 120 bp, Artificial Sequence
  ENSG00000268199_2 (sequence is synthesized)
aggaggcacccctccaccccccagtttagaaaaatagacatctgtatttttgcatttctgttctccctgcctgactgctgatggcagcagtgacccccatgtgatccctgggccctgagt

SEQ ID NO: 984498 - DNA, 120 bp, Artificial Sequence
  ENSG00000268199_3 (sequence is synthesized)
cacagccgccatccaccccccaccacctttccaagtcatggcttcattcagccctaaatgggaacacacgcctcagaccccaccatgccctggggggtccccacatacgcacactcacac

SEQ ID NO: 984499 - DNA, 88 bp, Artificial Sequence; identical to SEQ ID NO: 878354
  ENSG00000270356_0 (sequence is synthesized)

SEQ ID NO: 984500 - DNA, 120 bp, Artificial Sequence; identical to SEQ ID NO: 878355
  ENSG00000270356_1 (sequence is synthesized)

SEQ ID NO: 984501 - DNA, 120 bp, Artificial Sequence
  ENSG00000272844_0 (sequence is synthesized)
gcagcgggtacagcagcttcctcagctgctgcttcggcagccgcagcacctcagcaaaagcttgggacgtgctattatagcggctcagtcgctctagcaccgcaggcatttcaaagagtc

SEQ ID NO: 984502 - DNA, 120 bp, Artificial Sequence
  ENSG00000272844_1 (sequence is synthesized)
ttcccgctcccagccgcagcccgggcgccgccattctcccttcccagaagacgggcagagagattttactcctgtggcctgggttgcgcgtgcgtgacttcccgctgccgcgacgcctgc

SEQ ID NO: 984503 - DNA, 120 bp, Artificial Sequence
  ENSG00000272844_2 (sequence is synthesized)
tgggtttctttaacaccgtgggcttaacgattatgtcttactggaaggatgtttaacggtttgcagaggtgaaagacctatctggccatgtggcctttgagtctcaagcgaaggactaaa

SEQ ID NO: 984504 - DNA, 120 bp, Artificial Sequence
  ENSG00000272844_3 (sequence is synthesized)
gtgtgaagctccgatgcattccaggaacgtttgattttcacagtttttggttatcttattaactgttgacgtttgtcgtaagtccgcagcactaggataaacacttttgcaaaaaagaaa

SEQ ID NO: 984505 - DNA, 120 bp, Artificial Sequence
  ENSG00000272844_4 (sequence is synthesized)
agggctgatgagaaatgtgattgtaatagcacctcgttttcgtggaagggactgtttgtatttccgccttcactataggtgcaggaaatgtcattaaattttagagatttcttataaaaa

SEQ ID NO: 984506 - DNA, 120 bp, Artificial Sequence
  ENSG00000272841_0 (sequence is synthesized)
gagtctacaagggaaggggagccggcaacacgctcgagcggaaccctgcggagctgcaaccccgggaggagtcgccggacagactcagacgcggtcccctgggacccagggatgcaccgc

SEQ ID NO: 984507 - DNA, 120 bp, Artificial Sequence
  ENSG00000272841_1 (sequence is synthesized)
gcccctcccgccccagcctgcagagactggatgcttccctccccacctggcgggaagcagaggccctcgggcccgaccgagttcgggccaggacccgccccgctttctgcgagcgaccga

SEQ ID NO: 984508 - DNA, 120 bp, Artificial Sequence
  ENSG00000272841_2 (sequence is synthesized)
ctgcggccgccacactcacctcgccgccaagcagcactcgggttctgactcggtctcgggttccggtggcggtggtggcggcggcggcggtggcggcggctcctccatggcggcggcagg

SEQ ID NO: 984509 - DNA, 120 bp, Artificial Sequence
  ENSG00000272841_3 (sequence is synthesized)
cgtgacggcaaaggcgggaggagggaccagcgcggcagcggcttctctcatccgtgcacggagccccgcatggccgcggcgggcagtaagctgcagcctggcgcggggcaccggagcccc

SEQ ID NO: 984510 - DNA, 120 bp, Artificial Sequence
  ENSG00000272841_4 (sequence is synthesized)
gaagtgcgggagtgactcgactccgcctccgcctctaccccgccgcaggagccgtgcgcgccgcggccatcttggaaacggcgaccggccgagcgccggggctacggtgggcggcgaggg

SEQ ID NO: 984511 - DNA, 120 bp, Artificial Sequence
  ENSG00000272841_5 (sequence is synthesized)
cggcgggcgccggaatgcgaccggacgggggcggagacggcggcagggaggggcggggagcgccgtcaagtgtcggcgcgattcggtcctggagccgggtctcgccagctcgcccggtgt

SEQ ID NO: 984512 - DNA, 120 bp, Artificial Sequence
  ENSG00000272841_6 (sequence is synthesized)
ggtcctggagccgggtctcgccagctcgcccggtgtcgccccggccggtggcagtgggggactgtggagcggagccgggctgtgcagcgggctgggagctcgaggcttcccaggcggtcg

SEQ ID NO: 984513 - DNA, 120 bp, Artificial Sequence
  ENSG00000272841_7 (sequence is synthesized)
tcggtctgggagggacgctgggtagggccgatgagcggggcgggcgcgacgctatgagcccggccggagtcgccgcccagggacctgccacccggatcccaccttccaggaggacggacg

SEQ ID NO: 984514 - DNA, 120 bp, Artificial Sequence
  ENSG00000272841_8 (sequence is synthesized)
accccctcatttcaacccggcaaaacttctcaccccagtgtcataagattcgatagcgatctcccagaaacttggactggaatgctcctacactgaggggatggggggaagaagaaatgc

SEQ ID NO: 984515 - DNA, 120 bp, Artificial Sequence
  ENSG00000272841_9 (sequence is synthesized)
taaagattatttcagagttacagaaatcctgttgaaattccaatgcatcgtttactcttagcgctggggcttcacagtttttttttaagttggaaatatttacaaaatttcccatagggt

SEQ ID NO: 984516 - DNA, 120 bp, Artificial Sequence
  ENSG00000272841_10 (sequence is synthesized)
gaaatccagagttaatccaaaaccagaatcttttaaaattaagtacattcaaatgtgcagatttcttaaacctcatttagttgagctttgataggtgaaacgcacgttttgaacaactct

SEQ ID NO: 984517 - DNA, 120 bp, Artificial Sequence
  ENSG00000272841_11 (sequence is synthesized)
ggtaacaaagaaaaacattaaattgattataggtatgttatatttaaagaccagttgtgaaattagctatattgtgctcaaagtatgttactgacatttctccgtcgttaaaaggaactg

SEQ ID NO: 984518 - DNA, 120 bp, Artificial Sequence
  ENSG00000272841_12 (sequence is synthesized)
ctccattctagttttttataatagtctgtattatgtatatagcctgatagtgctgaatttctgaattgaccttcatcttatttactcaataatattcatttgacaaatacttattaagtg

SEQ ID NO: 984519 - DNA, 120 bp, Artificial Sequence
  ENSG00000272841_13 (sequence is synthesized)
catatatgtgtcaggaactgtactagatgctgaggatatagcagtaagcgcaacagaccaagctaacagcttagtaaagggtgaggtaaaacaaaacaaaaaagtattcaaaaaaataaa

SEQ ID NO: 984520 - DNA, 120 bp, Artificial Sequence
  ENSG00000272841_14 (sequence is synthesized)
ctaatttttatcttaatttaaaaaattacaaatttttaaaaatcacaaattggtatccatgtataattcatttccgtgcattttcttgtgtgaagaaagctcagtaaaagtatttcttag

SEQ ID NO: 984521 - DNA, 120 bp, Artificial Sequence
  ENSG00000272841_15 (sequence is synthesized)
gtttctgtaattctagttctctactcgattttcttctgcaattttctgagccagaacccttcttagaaggcatattagagactttaaaagttaaataataaaataaatctcttctttaaa

SEQ ID NO: 984522 - DNA, 120 bp, Artificial Sequence
  ENSG00000272840_0 (sequence is synthesized)
ttgggacagagacctatggcctgcaaagctgaactatttaccatctggctctcaagaaaagggaaaaaaaaatgcttatctttgtaccgcgacagtcttagattaagaggactttgtacc

SEQ ID NO: 984523 - DNA, 120 bp, Artificial Sequence
  ENSG00000272840_1 (sequence is synthesized)
aggcggccgtgagtccagccacccctgaaatgtacacaagtctgggctagggttgcagcagataaccttcactcttctctgcaatgaatcccaaaagtatgtagttgagctgactgcaag

SEQ ID NO: 984524 - DNA, 120 bp, Artificial Sequence
  ENSG00000272840_2 (sequence is synthesized)
gtgcttgagatgcaagagactccacaaatgggattcggcctctggaaagtggtggtagttccagatttatgtggatgttactttgtttttccctataaaatatattctttaaactatcaa

SEQ ID NO: 984525 - DNA, 120 bp, Artificial Sequence
  ENSG00000272843_0 (sequence is synthesized)
acatcgcggctccgcgccgcggaggagacttaaatatcccagcgtgcaccgcgccgcgcgtcgcgtcatcgcgcgccctctacgtcatgcgcgcgcgactccgggagacgctaccgcccg

SEQ ID NO: 984526 - DNA, 120 bp, Artificial Sequence
  ENSG00000272843_1 (sequence is synthesized)
gcagcgcccgagacccaactggtttggaaaatgccgcctgcctttaacgcctgtttctgactcttgaggttttccgcgtggctcccagcgccacatccatccggaggcgatcccgtggaa

SEQ ID NO: 984527 - DNA, 120 bp, Artificial Sequence
  ENSG00000272843_2 (sequence is synthesized)
ttttcacaaacgctactagcggttgtgagtccctcccccctccatttctatgttacaaattgaaaacgtgggacgattacctaccaaatttcacatcatggcccagatatcgggtggatt

SEQ ID NO: 984528 - DNA, 120 bp, Artificial Sequence
  ENSG00000272843_3 (sequence is synthesized)
ttgtggctctgtgatcgacttatacctatgctaaagttaacggtctgagaaggtagattagtggttgcctagggctagggagtgggtttgggggtggggaatagaaagtgactggtcatg

SEQ ID NO: 984529 - DNA, 120 bp, Artificial Sequence
  ENSG00000272843_4 (sequence is synthesized)
gttataggcttttttgtagcaccataaagatagtttaaaattagattgtggtggtgattgcaccaccctatgatttgcatggtatgtgaattatatcttaataaagctgtttaaaaagtc

SEQ ID NO: 984530 - DNA, 120 bp, Artificial Sequence
  ENSG00000272842_0 (sequence is synthesized)
aatcttttaaatcttttatacataccagctacatttttaaaaattacttttgaaaataaaatgtaaaacttcctttcataatcttttattaaccaacttaccaatatcaatattctctct

SEQ ID NO: 984531 - DNA, 120 bp, Artificial Sequence
  ENSG00000272842_1 (sequence is synthesized)
cttaccaatatcaatattctctcttcctagagacactaatgataagaagaggatttctctgtataaactcctataaaacaaatatgttttaaaagtcaatgggcaaatagcataaaaaca

SEQ ID NO: 984532 - DNA, 120 bp, Artificial Sequence
  ENSG00000272842_2 (sequence is synthesized)
tttaatattacattacagttagttatatgaggtgtcacatttggaggaagctgtgtgaaggctacattgaattctgtactatttttgtaacttcctgcaggtttctattccaaattaaag

SEQ ID NO: 984533 - DNA, 120 bp, Artificial Sequence
  ENSG00000272842_3 (sequence is synthesized)
ttaaaacatagttaatgggcataaagcttcacactagtaacaaaaatggcttaactttattacatttcaacaatacataactgttttaactctaatttctaaataaaatttacaaaagca

SEQ ID NO: 984534 - DNA, 120 bp, Artificial Sequence
  ENSG00000272849_0 (sequence is synthesized)
aggggtacagtccagccaggtgggtcccgacaccgtgccgagaaccacatccagaccacagctgagcacccaacagctcactgattggatccagggaggggagaaactggctggagccct

SEQ ID NO: 984535 - DNA, 120 bp, Artificial Sequence
  ENSG00000272849_1 (sequence is synthesized)
ccagggtgcagctgggagggagacgtacatcaattacttaattatccaaagcaggtggggagtaaagaccccacccggagagcaacgaagactctaaagggaggcgccacaccctcgggc

SEQ ID NO: 984536 - DNA, 120 bp, Artificial Sequence
  ENSG00000272849_2 (sequence is synthesized)
attaacaatgtgaacctcaatttttatcagggttgggtaggcaaaaaggcggcttcgctgaggactgtttactgctctggatatagcaatggtgtgatcgtcattaagagacaaaaggcg

SEQ ID NO: 984537 - DNA, 120 bp, Artificial Sequence
  ENSG00000272849_3 (sequence is synthesized)
aaaatacagtcaaatcaaacaaaaggcacaagacgcaccagccgcccaaccaccatagaaaataccccccacttaacgttggtgtttgctggaaccagctaggacttgttttccagtttt

SEQ ID NO: 984538 - DNA, 120 bp, Artificial Sequence
  ENSG00000272848_0 (sequence is synthesized)
gcctcggctgctctcactgcagccgtttcttcacagggtgatcctcacagaaacactcaaagccttctgttacgtacaaaggaccgcgtgtcagtaatctacagccatttaccagttacc

SEQ ID NO: 984539 - DNA, 120 bp, Artificial Sequence
  ENSG00000272848_1 (sequence is synthesized)
aagaaaacacggacgtttccactaaaaatcgcaaacgtttctttcaagcaaggagcgccctgcgccagaggctgtgggaggagtgaggagtctgggttcgttccagccgcaatgaggaca

SEQ ID NO: 984540 - DNA, 120 bp, Artificial Sequence
  ENSG00000272848_2 (sequence is synthesized)
gctctgtgccagagaatgagctgggatctgccctgacaagtggagcctcgtttgaaagtgtcggtaacaggctctgtgtctgaaccaaagtttcccttgcaacctggtgtggctgcatga

SEQ ID NO: 984541 - DNA, 120 bp, Artificial Sequence
  ENSG00000272848_3 (sequence is synthesized)
tggagtttgggccgtgacatatggtgggtttgacgtgtgccactcttagggccaacttctaaagcctccaagacacagccccatgccctgtgcccttctgcagctcagagcagatgagcc

SEQ ID NO: 984542 - DNA, 120 bp, Artificial Sequence
  ENSG00000272848_4 (sequence is synthesized)
cagtgaccttgaggcccttgaagatggtggaaccaggagacatgaggggccttggcctggaaacacaactcgaagggaaatcactcatctggaaaacgtgtttggacccataccacaccg

SEQ ID NO: 984543 - DNA, 120 bp, Artificial Sequence
  ENSG00000272848_5 (sequence is synthesized)
tggcaaatacctggtaaaactgtcatctgaaattgcttggaaataggacactaccacctaaacccacagctcgtaggccagggcacctcaactgtagtccccagaccagcagcatcggtg

SEQ ID NO: 984544 - DNA, 120 bp, Artificial Sequence
  ENSG00000272848_6 (sequence is synthesized)
ttacctggaaaattaaaaatgcaaagttttgggcccacttcagaccccaggtcagaaattgtgggttgcagaaatctgtgttttaataacccttcagatgactgtggtgcccgacaaagt

SEQ ID NO: 984545 - DNA, 120 bp, Artificial Sequence
  ENSG00000272848_7 (sequence is synthesized)
tgaaatgcctgctcccatgtgtgctgggtttagtttgtgctttagcaaagcgggataagaaagaaaggaggccaggatggaattcgctggtttccaactagaagtgacagaaaatagaaa

SEQ ID NO: 984546 - DNA, 120 bp, Artificial Sequence
  ENSG00000272848_8 (sequence is synthesized)
gagtccagtaatgtgaggtcttgaagtgttgggagaattcattcatcacttctagattccagacaatcagaaataaaattttaaaagtctttcaatgacaaactaagacttctcagttgg

SEQ ID NO: 984547 - DNA, 120 bp, Artificial Sequence
  ENSG00000272848_9 (sequence is synthesized)
gaaaaaaaaaaaaaaaggactcagtcttgttgcagacatgagatgaagagtgtggtcttttcacaaatgcctgtgcaagggagtcaaggacagaagccatccggtgggctccttggcacg

SEQ ID NO: 984548 - DNA, 120 bp, Artificial Sequence
  ENSG00000272848_10 (sequence is synthesized)
ggggcggctgaagcaaaccaaccaggagcccacgcagctgtcaagggcttgtgtcagcaagtaaagcctagactgcttgtgactgtgaagtgtaaaagtgcccctgggtcctcaggcctg

SEQ ID NO: 984549 - DNA, 120 bp, Artificial Sequence
  ENSG00000272848_11 (sequence is synthesized)
tggacaggacaaagccaaagccgcccagcgccgtgtgatgcggccacagagaacacgagcctcgggagagaggagcctggggctggaaaacaagggtgaaggacgctcccctctggctgc

SEQ ID NO: 984550 - DNA, 120 bp, Artificial Sequence
  ENSG00000272848_12 (sequence is synthesized)
aggagaggggctgctgagggcaagatccatcatttcttgggaccaatgatgctgcttcctactctctgctttctgcctgggagttttgtctgggacgcctgtgtctgccccactcactgt

SEQ ID NO: 984551 - DNA, 120 bp, Artificial Sequence
  ENSG00000272848_13 (sequence is synthesized)
gtggtgcaagctccatttccagtgaggacaaccgtggctgccgagagcaccttacaagccaggcatcctcctctgagctcaaggcagccttgagaagtgggacgaagacttccttcacgg

SEQ ID NO: 984552 - DNA, 120 bp, Artificial Sequence
  ENSG00000272848_14 (sequence is synthesized)
gaagaggagcggctcagagaaaggaagaggctagtccagaaccaccacgtggacatcttctgtgaaggcaagggctcaccctcaccctgacgccagccacctgcccctcttaataggagg

SEQ ID NO: 984553 - DNA, 120 bp, Artificial Sequence
  ENSG00000272848_15 (sequence is synthesized)
gcgggccctccccgcacagcaggcacttcactgcaggctctgctgcctttgggaaatgtgcctcccttgtagagctctgtggtgcagattcggctatcaaaggagtagaacccccccctc

SEQ ID NO: 984554 - DNA, 120 bp, Artificial Sequence
  ENSG00000272848_16 (sequence is synthesized)
ccccccgccaccgtcccacccccacagagcagctaagaaagctgtttgatttaacccgtggtttcccaaatactttagaccactaattaattttgttttctgaaacattcgttaatatgt

SEQ ID NO: 984555 - DNA, 120 bp, Artificial Sequence
  ENSG00000272848_17 (sequence is synthesized)
gaaaatatatctgtttaagaacagataatgaatacataacaaatttagaactgtgttaagattccataactaaaaccactctaaactttctgaaatggctgaaaacgtttccctaacttt

SEQ ID NO: 984556 - DNA, 120 bp, Artificial Sequence
  ENSG00000272848_18 (sequence is synthesized)
tctgaaagtacttgctgggcttcttggagactgaatcatcccttttgagcccacttaggggaaagttcaaaagacctcagagaagacaaaaagcagggcaagagagacggcccagtcttc

SEQ ID NO: 984557 - DNA, 120 bp, Artificial Sequence
  ENSG00000272848_19 (sequence is synthesized)
tagctctccactggagaaaatgcatgtgggaaaggctgggggtttccatcctcaatatttagtaaaagataaagtaaaaattacaactgccttctgaatggctcccctcccctgacttca

SEQ ID NO: 984558 - DNA, 120 bp, Artificial Sequence
  ENSG00000272848_20 (sequence is synthesized)
tgggagtgatgactcagccctctgttttgtaactgcggagattgaaagtggagacgggacctttggcatttcagaaaatgtcgacgccgctttcttctgctttctccgggacccctctgg

SEQ ID NO: 984559 - DNA, 120 bp, Artificial Sequence
  ENSG00000272848_21 (sequence is synthesized)
ggcctcgcctcctcccctcccgctgaaagcctgctgtgaaaggagcaaggatgtgaaaaagatgtacgactctttgcttccttatgctcggcccaagtttatcaaaagctgtggagtttg

SEQ ID NO: 984560 - DNA, 120 bp, Artificial Sequence
  ENSG00000272848_22 (sequence is synthesized)
ttttttttttttttggttgttgtttgtcttcacttgttccaaagaagcaaaataagacaggggctgccccttgtcctgtctcattcatttttgacacccttgtttctccacacaggccct

SEQ ID NO: 984561 - DNA, 120 bp, Artificial Sequence
  ENSG00000272848_23 (sequence is synthesized)
tcatttttgacacccttgtttctccacacaggccctggggtgaagggcacaggtgggattcagaatagaaatgactcgagggacgcaaggagttgggatcagaagaagcagcagaaactc

SEQ ID NO: 984562 - DNA, 120 bp, Artificial Sequence
  ENSG00000272848_24 (sequence is synthesized)
ctgctctgcagacacagcagacattactgggaaagacaccagagacccaggagttcacccaagtcctctgcacactgtcttcccagccctctctcctggatctgagatgatttcacttaa

SEQ ID NO: 984563 - DNA, 120 bp, Artificial Sequence
  ENSG00000272848_25 (sequence is synthesized)
aaacacaagcctttgcttaaaggtagatgaacattcctttcagtttctaagatggggggcccacggtcctaggcgctgagtcagaaactttttagatgtccccagagtgcacaggtttaa

SEQ ID NO: 984564 - DNA, 120 bp, Artificial Sequence
  ENSG00000272848_26 (sequence is synthesized)
ggacagagggagattctcagtcttcctgggtcctccctgtctctcagcccagtcatcacactctaaatcccagggacttgactctgccttccaatagttctcagatccacctactttgct

SEQ ID NO: 984565 - DNA, 120 bp, Artificial Sequence
  ENSG00000272848_27 (sequence is synthesized)
cccttctttcagagcgcaggtagccacttgctctcccagagagtgctgcagcggtgatgatcggtttcccccctccccacctgctcagtcctgcaaagcctggactctgctccaaggcct

SEQ ID NO: 984566 - DNA, 120 bp, Artificial Sequence
  ENSG00000272848_28 (sequence is synthesized)
ttgggacccaacacctgctttccagcctcagggcctcaggcctgagaccacaggggctcttcccggcggctgtacctcctgccattcacctgctgatttcttcctcatctgtttattcct

SEQ ID NO: 984567 - DNA, 120 bp, Artificial Sequence
  ENSG00000272848_29 (sequence is synthesized)
ctgatccaacaaggtcaggatggtatgcaaccgccaccccccccccactgcccccaccaccacagcactgccacgacccttgtctgggacggatgatgtggggctgcacttcctctgtcg

SEQ ID NO: 984568 - DNA, 120 bp, Artificial Sequence
  ENSG00000272848_30 (sequence is synthesized)
gccccctgccctcgtcaggaggcccagcatgtagcaggcaagcagcaggcagcaggcaggtgctgagtgggtgtggaaggtgtggcccctcacacctctgtgtcctatgctcagcgctgt

SEQ ID NO: 984569 - DNA, 120 bp, Artificial Sequence
  ENSG00000272848_31 (sequence is synthesized)
gcttgggcatggcgaggcctcagcagatactgtgcagcacagtgacaccaatggaacccagtaaaaagacagtttccaattttcctcgctgctggggcccacccagatcctggagcagag

SEQ ID NO: 984570 - DNA, 120 bp, Artificial Sequence
  ENSG00000272848_32 (sequence is synthesized)
catggcctgcaggaagcacaggctggtggactgtggctgtgtcacggcgagcttccagtggctctcgcagaactcaattggcacggtaaagggacaaatgaagtttccagcttttttctt

SEQ ID NO: 984571 - DNA, 120 bp, Artificial Sequence
  ENSG00000272848_33 (sequence is synthesized)
ttaatagctcagatatcaattttatagctctgatggacataatttataaaataagtctatatcttactgtaaatttgagacggttaacctttaataaagttaataaggggcttgtcaaaa

SEQ ID NO: 984572 - DNA, 120 bp, Artificial Sequence
  ENSG00000288019_0 (sequence is synthesized)
gctggtgagttctgagtacccatgtctgtccttaatcttgatcctgttctggatggtggaatcaatactgcagcccacttgcatgtgctctctgtaacccagagaatgttttattgctct

SEQ ID NO: 984573 - DNA, 120 bp, Artificial Sequence
  ENSG00000288019_1 (sequence is synthesized)
ccttgtattctctgtcccctctaaagaataaaaggtgaagtttatcaagtggtatactttttgctcacaagccaataaagaagctgagtttgtttttcaaactttgttttaattggggct

SEQ ID NO: 984574 - DNA, 120 bp, Artificial Sequence
  ENSG00000288019_2 (sequence is synthesized)
tttggggcacaatgagatgaacttgttaaatagagaaatgaatctattatttcctgccatgaaactgcgaaactgtgaaagagtcaatcttagttgcagttaatggtgacttacagaatg

SEQ ID NO: 984575 - DNA, 120 bp, Artificial Sequence
  ENSG00000288019_3 (sequence is synthesized)
gagtcttgagaatgtctatgcatctttaccaaggacatgttcatacaaaatagggaattaagatgcttttcctcagcaattatttgcttttgaattttgtacctatttgcgtaattccat

SEQ ID NO: 984576 - DNA, 120 bp, Artificial Sequence
  ENSG00000288019_4 (sequence is synthesized)
ttaaagtcttaatagaatttttcaaactaagtctacatgcacagcctagatatactgcagaaaaaattgagttcagagtataacttttttcctgtcaagacttgcaaactacaatttact

SEQ ID NO: 984577 - DNA, 120 bp, Artificial Sequence
  ENSG00000288019_5 (sequence is synthesized)
tattgtttgaagatagcagtttccatgggcttcaagcttaattaactaacagtgaactatgagctttgattttattttttaaacagtttcataaatgaacttaattattccatagtgagt

SEQ ID NO: 984578 - DNA, 120 bp, Artificial Sequence
  ENSG00000288019_6 (sequence is synthesized)
acaatttttttggcattaacaaatcaaacagtcaaatatttgaactagttttctagtgctaccataacaaagtaccacagagtgagtggcttaaataacagaacttttttatcttacagg

SEQ ID NO: 984579 - DNA, 120 bp, Artificial Sequence
  ENSG00000288019_7 (sequence is synthesized)
agttgtttctttcttaggactgtgagagaaggagttgatccaggcatctctacttgcttagttgatatgaatttgagataaagaaatgcacaaagtggcacaaagaagatccagacatgt

SEQ ID NO: 984580 - DNA, 120 bp, Artificial Sequence
  ENSG00000288019_8 (sequence is synthesized)
taagaagggaaaacaatctatttcagtctgaaaaggagatgttgtaataacctgacaacattcaattgactgatcagatcttggcctttgtacaaatcgagaagtagaaaataagctaga

SEQ ID NO: 984581 - DNA, 120 bp, Artificial Sequence
  ENSG00000288019_9 (sequence is synthesized)
aatattactcagagacagccctgattccattgaatctcattttccttctgtacaaagtaaaggtaatagaattttgtgctaacactgtgtacatgtactaccatgataataaaaagtaaa

SEQ ID NO: 984582 - DNA, 120 bp, Artificial Sequence
  ENSG00000288019_10 (sequence is synthesized)
taaagatgttttattctttaaaatatttatctatactgagacccaatcataataacaatttttttattgtactttcctttgtgctaacattgctctatgactttttgtaagttatctgga

SEQ ID NO: 984583 - DNA, 120 bp, Artificial Sequence
  ENSG00000288019_11 (sequence is synthesized)
aattttgcaaggggtgtttctaacttacaaacaagacaataaaatatgagaaagatgaaagattaaaaatagctatgcattcttagcagctcctcactttaagagggagaatctattttc

SEQ ID NO: 984584 - DNA, 120 bp, Artificial Sequence
  ENSG00000288019_12 (sequence is synthesized)
caacccccttgattctgtgctgactttatgacttgctttggcactaggatactttaaaagtgatgttgtagatgttccaggtgaacaaggcaagaagcctaggagcttctctcctaccct

SEQ ID NO: 984585 - DNA, 120 bp, Artificial Sequence
  ENSG00000288019_13 (sequence is synthesized)
gttagaatgctgctgccaagctgatccgctagagacactaggaccaggaaatgggtaataccaacaaccagacatgtgagtgaggcagctccaagcaagtcaccaagaaactgactacag

SEQ ID NO: 984586 - DNA, 120 bp, Artificial Sequence
  ENSG00000288019_14 (sequence is synthesized)
ccccatgagtgaccccaggagacaccatcagaagaaccactcaggtgatcccaaggttgtttcgtcacctagcccaaactgatgaccttcagagtcatgagtcagaataaaatggtggtt

SEQ ID NO: 984587 - DNA, 120 bp, Artificial Sequence
  ENSG00000288018_0 (sequence is synthesized)
agcagtaaaaactgaattttaattatctactggaaattcctccagaataaagggtctggttcagtttctatattgactctatgggttccagtctgtgaaatgccaagggttggactgact

SEQ ID NO: 984588 - DNA, 120 bp, Artificial Sequence
  ENSG00000288018_1 (sequence is synthesized)
agaagtctccagattacctctctcttctttccacccctactgcttcttgcctaccatatgccatagtgccggccggcaaaatgtacctgtttaattctctaggttagaaaaaattcccta

SEQ ID NO: 984589 - DNA, 120 bp, Artificial Sequence
  ENSG00000288018_2 (sequence is synthesized)
acctgtttaattctctaggttagaaaaaattccctagatttttctccttgtctttctatgtccaaatgctacctactttttaaaacaaagacaacaggccaggcatggtggctcacgcct

SEQ ID NO: 984590 - DNA, 87 bp, Artificial Sequence
  ENSG00000288018_3 (sequence is synthesized)
ccgggaggcggaagttgcagtgagccgatatcgcaccactggactgcagcctggacaacagagtgaggctgtctcaaacaaaacaaa

SEQ ID NO: 984591 - DNA, 120 bp, Artificial Sequence
  ENSG00000288018_4 (sequence is synthesized)
ataaataaaataaattaaaacaaaacaaaacacagacaacatacctccttcatcatgaagcctcctttaattcttacaaacaaacaaaaccttcctaaactttcaaagggcgtttaagaa

SEQ ID NO: 984592 - DNA, 120 bp, Artificial Sequence
  ENSG00000288018_5 (sequence is synthesized)
ggagaatttagtgcatgctaggttctgggttaagcattttacatttattaacatatgtaggtagatacaacttttacttcaattttgcatttgagcagaaaggtgcaaagatgataaagt

SEQ ID NO: 984593 - DNA, 120 bp, Artificial Sequence
  ENSG00000288018_6 (sequence is synthesized)
gacttgctcaaggacatgggtaaatggctgagccacttatttgctgtattaatagagatgatgtccttcatcctttactgatgtttttaccatgtcttatccatacctcgttaagtcttt

SEQ ID NO: 984594 - DNA, 120 bp, Artificial Sequence
  ENSG00000288018_7 (sequence is synthesized)
acattttacccatttatcagctaatttatctcaagaacattctagtgatgtggctattaccattttcttcattttatcaattttttcctctgttttcaggctataacaaaatataataaa

SEQ ID NO: 984595 - DNA, 120 bp, Artificial Sequence
  ENSG00000288018_8 (sequence is synthesized)
ctgggtaccttagaagcaacggaaattgatttctcatcgttctagaagctaggaagttcacgatcaaggtagcagcagagttggtgcctgatctttaccatgctggattggaagagaaaa

SEQ ID NO: 984596 - DNA, 120 bp, Artificial Sequence
  ENSG00000288018_9 (sequence is synthesized)
gaccatcactaaagcaaatggatcaaatggagttataaatcaactctgtactctacaggattgactcaactgcagacatctccaatacactccctcatggctttattttttctgcttatg

SEQ ID NO: 984597 - DNA, 120 bp, Artificial Sequence
  ENSG00000288018_10 (sequence is synthesized)
tggaaaaataacagtaaatacagttaactatcccaagacagaagagtattattaaaaaagaatacaacgttattgatttttcaagacataatcagatatttttaaactctgatttaataa

SEQ ID NO: 984598 - DNA, 120 bp, Artificial Sequence
  ENSG00000253279_0 (sequence is synthesized)
gatgacagaaggctgaggatggagagaggcactgatagaggccagaccagacaagcagtgccaagtccatagtgggacaccaaagggaggaggcaatcccagatgaggtccatcccagaa

SEQ ID NO: 984599 - DNA, 120 bp, Artificial Sequence
  ENSG00000253279_1 (sequence is synthesized)
ccagaccttgcagggacctcaaggagctatgaacatagaaaccctatacatgatatcacttgaatccctccacaagggcttctgatattgtcttagacctttggaaagttcaggggtagt

SEQ ID NO: 984600 - DNA, 120 bp, Artificial Sequence
  ENSG00000253279_2 (sequence is synthesized)
agcctctgggcccatagtgctcccctgatgatgcagccccaccctcaactcttgccactgcagatgctccttgggcagtttcatctgggcctttcacatcagctccctccaaatgtgact

SEQ ID NO: 984601 - DNA, 120 bp, Artificial Sequence
  ENSG00000253279_3 (sequence is synthesized)
ggacctcaaatggatcttcagacccccatgcccaaccacctcccagctaccttccctggacaacccacaggtcacatgatcaccaggaagcccatgtctctgcatgataacctggagaaa

SEQ ID NO: 984602 - DNA, 120 bp, Artificial Sequence
  ENSG00000253279_4 (sequence is synthesized)
cctacagatgccaggcttctgaatctcattcaccatgcttcccagggatcaaggaagaaatacccagagatacagactgaaaaatcaggaaactggatgggattcagagcccttggaatg

SEQ ID NO: 984603 - DNA, 120 bp, Artificial Sequence
  ENSG00000253279_5 (sequence is synthesized)
gagccttctcattcattcacccaactccagtctaaaacgtgcagctctgaagcagggctgcttcatagagacttgagtaaatagcacagtaaagcccaggttttaccagtgaggaggaga

SEQ ID NO: 984604 - DNA, 120 bp, Artificial Sequence
  ENSG00000253279_6 (sequence is synthesized)
gtaaatacactgatcatttgcaagagcacctcttcagatatggcacctctccttggagagaggagactatggaagacagggagaccattctagctgaagctcacaccacttacacaacaa

SEQ ID NO: 984605 - DNA, 120 bp, Artificial Sequence
  ENSG00000253279_7 (sequence is synthesized)
aagatctaagtcgaaaagggagagagtaaagacctggctcacatgggtgtgaagtgtgcatgtggaaacattgcatctttaacatttcacaacatcttgtagcaggcttactatggcagg

SEQ ID NO: 984606 - DNA, 120 bp, Artificial Sequence
  ENSG00000253279_8 (sequence is synthesized)
tgggataatagggaagccacactcaatgagcatctctcagcctcacatctcctggtcaacccagaatgccacaaccacaggccgaaccacagatctggaggctgggaaatccaagaacat

SEQ ID NO: 984607 - DNA, 120 bp, Artificial Sequence
  ENSG00000253279_9 (sequence is synthesized)
ggcactggcatcaggcaagggtcagcccatgctggagggcagaaggcagaagtgagcatgtgagacagagataagaaattaggctgaacttgcttgtatagcaaacccagcctctcaata

SEQ ID NO: 984608 - DNA, 120 bp, Artificial Sequence
  ENSG00000253279_10 (sequence is synthesized)
actaacccgctccagcaataatggcattaatccattcatgagggcagagcccccatgacctattcacatcctaaaggccccacatcaatcatatctcaacatgaggttcagaggacacaa

SEQ ID NO: 984609 - DNA, 120 bp, Artificial Sequence
  ENSG00000253279_11 (sequence is synthesized)
acattcaaaccatagcagtaagtaatcctttttcttaaaaaaaaatttatgtttttactaaaatattttataaatttgctttaaaatttttaaataatatggaagctatagagtgggagt

SEQ ID NO: 984610 - DNA, 120 bp, Artificial Sequence
  ENSG00000253279_12 (sequence is synthesized)
gggtaggaagattctgcaaatctccagtcttctcctgctccctcttcactccccatcccaacctaccattctgcactaccagggtaaccactgctaacattccatgctttgtgaatattc

SEQ ID NO: 984611 - DNA, 120 bp, Artificial Sequence
  ENSG00000253279_13 (sequence is synthesized)
tgaatgttttttaaaggaaataagatcatttcttacatactattctgcaacttatgttttaatgtaatgtatgttagagagctttccatattaatacaatatgtgtggcccattttaata

SEQ ID NO: 984612 - DNA, 120 bp, Artificial Sequence
  ENSG00000253279_14 (sequence is synthesized)
gctataagccattgtattaacataccatcatgagggtacactgccaccttggatgaacacgtaggctacttccttgtgtctatatatttgcttttgttattattagaaagcagcaaggaa

SEQ ID NO: 984613 - DNA, 120 bp, Artificial Sequence
  ENSG00000253279_15 (sequence is synthesized)
cagcctgtacacataactttgcaagtttacatgaatttatctacaaaataaattcatagaagtagaaatggtgagtcaaaggaatgaagcatttaaaatttttatagatattgccaaatt

SEQ ID NO: 984614 - DNA, 120 bp, Artificial Sequence
  ENSG00000253279_16 (sequence is synthesized)
gatcttcaaacacttgtaccaatttgttctcccaggaacaacagtgtgcaggcatatttgtttgcatagatcctagccaactgagggagttatcgaactattaaatctctgccaatccaa

SEQ ID NO: 984615 - DNA, 120 bp, Artificial Sequence
  ENSG00000253279_17 (sequence is synthesized)
caggattcttatgctatggtcactcatatttttgagtttcatcaaatgaatgtccttcacatcaccagcaagcagcttccaccttctggatcttcagaatggtcttaaagatgagggatg

SEQ ID NO: 984616 - DNA, 120 bp, Artificial Sequence
  ENSG00000253279_18 (sequence is synthesized)
gaggccaggcatgctggcttatgactgtaatcccagcaggaagctaggagcccaaggcaggaagattgcttgaggctaagagttcaagatcagtttgggcaacacagcaaaaacctatct

SEQ ID NO: 984617 - DNA, 120 bp, Artificial Sequence
  ENSG00000253279_19 (sequence is synthesized)
ctacaaaaactaaaaataaaaataaatcacctgagcatggtggtgcatgcttataggctgaggtggctaaggtggaaggattgcttaagcccaggaagttgagaccgcagagagccatga

SEQ ID NO: 984618 - DNA, 120 bp, Artificial Sequence
  ENSG00000253279_20 (sequence is synthesized)
attgcactctgagcaacagggcaagaccccaactctaaaaaaataaataaacaaatagagatggaaggaagaattaatggataaagttttgagactatcccacttataaaagaattattt

SEQ ID NO: 984619 - DNA, 120 bp, Artificial Sequence
  ENSG00000253279_21 (sequence is synthesized)
ttatttcttgaatataagaaagacagggtcttgccatattgcccaggctggtctcgaatgcctgggctctatcaatccaaccatgcccagttaatgtatttatttatatttattttttgt

SEQ ID NO: 984620 - DNA, 120 bp, Artificial Sequence
  ENSG00000253279_22 (sequence is synthesized)
agagataggttcttgctatgatgcccaagctgatcttgaactcctggcctcagttgagccactgtgcccagccttaggagaattattaaatgtataagtaaatgtgattcaatgctcata

SEQ ID NO: 984621 - DNA, 120 bp, Artificial Sequence
  ENSG00000253279_23 (sequence is synthesized)
cctctctaaacttatttcataaacacattcagaatcataaaatgatggttcacttttttaacccacatttgtaaaatatagtaaacatagctataacttaattactatcttagcttgggt

SEQ ID NO: 984622 - DNA, 120 bp, Artificial Sequence
  ENSG00000253279_24 (sequence is synthesized)
gtccctgaaagcagagcttgaggcaaagacttacgtgtgattgttttcctgagatacatgattccaaggagaggatgtgaatgacagtgtcagcaagtgagcaaggaggaagggtcccta

SEQ ID NO: 984623 - DNA, 120 bp, Artificial Sequence
  ENSG00000253279_25 (sequence is synthesized)
gaaatgggcattggcaagttggcctccactgtgggtaattggcttctcagtcctgaaggactatttgacaagccatatgaaatatgttttagaactgtgaatagaggaagaaacatttat

SEQ ID NO: 984624 - DNA, 120 bp, Artificial Sequence
  ENSG00000253279_26 (sequence is synthesized)
tcaccagtttccaaaacccattgatcaaaggtcatgccccaagtgttaacacccccagtgccttccagcttatgcatatgtgagccctggtgggtttccaggcacctggcacccagactg

SEQ ID NO: 984625 - DNA, 120 bp, Artificial Sequence
  ENSG00000253279_27 (sequence is synthesized)
caatggcagagaagcccagggtgggatgttagagggcatagtaagggtcagaggcatctgcaggaaggaactgatgatccgcagcatcttgtcatattctgagaacttattaaaagcaag

SEQ ID NO: 984626 - DNA, 120 bp, Artificial Sequence
  ENSG00000253279_28 (sequence is synthesized)
caaaagaaactgtacttttttcttgatctgtctgtaacccttttaaagctgaaaaggaaataaaagctttttatttcatggcctcctgtgcaaaaaacataggtcagatgaaaaatcaaa

SEQ ID NO: 984627 - DNA, 120 bp, Artificial Sequence
  ENSG00000253279_29 (sequence is synthesized)
agcagaaggaaaatgataaccatggatttttgagataagaggagccattctgaatgaggcatcaattgagttgagactcacacaaaagaaaaatctccctttgcagacaccaggaagtct

SEQ ID NO: 984628 - DNA, 120 bp, Artificial Sequence
  ENSG00000253279_30 (sequence is synthesized)
gaaactgattccatctggtttgtctgtgatgtataacattactgggtcattagtctttgcctttgctcaaagctaactctagcatctggaccggcaatgtcagagccctcacaggcatcc

SEQ ID NO: 984629 - DNA, 120 bp, Artificial Sequence
  ENSG00000253279_31 (sequence is synthesized)
ccacaccaacaattctgtagcccacgtgggagaagacctttgacttcaaaggctgaaagagaatcaacaaaaaaaccttttggctccttagtgactagagaatacataaggcccaaaaac

SEQ ID NO: 984630 - DNA, 120 bp, Artificial Sequence
  ENSG00000253278_0 (sequence is synthesized)
cagctcctggggctgctaatgctctgggtccctggatgctgtgatgacccaacctccactctccctgcccatcacccctggagagccagcctccatctcctgcaggtctagtcacagccc

SEQ ID NO: 984631 - DNA, 120 bp, Artificial Sequence
  ENSG00000253278_1 (sequence is synthesized)
ctggagtcccagacaggttcagtggcagtgggttggggacagatttcatgctgaaatcaggaggatggatgctgaggatgttggggtttattgctgccagcaaagtacacattatcctcc

SEQ ID NO: 984632 - DNA, 120 bp, Artificial Sequence
  ENSG00000288013_0 (sequence is synthesized)
aatgggtggtcctaatggaaactcaaggtttgaaaggcagtgatgtaagacaagcaaccctagagaaagaagcggctgtcacaaaggccagacccaaatgccatgttaagagatggatga

SEQ ID NO: 984633 - DNA, 120 bp, Artificial Sequence
  ENSG00000288013_1 (sequence is synthesized)
agactaggaactgtagagaagggtagaaccagtgttaacttcagctgatgtacatgcttctgccaaataaaactgcacagcagtaaaacaggcagagaagaaagaatcaacagcaaaggt

SEQ ID NO: 984634 - DNA, 120 bp, Artificial Sequence
  ENSG00000288013_2 (sequence is synthesized)
agaactggaaccatggaaatctccaggagagagatacttctgcctctgaatgttttcagaagagtaacttctgctcctctctctcccaaccttgtggaggagtgacctgatggctaaatt

SEQ ID NO: 984635 - DNA, 120 bp, Artificial Sequence
  ENSG00000288013_3 (sequence is synthesized)
gagaatagaactgcaattcatggttctctctctgtggctacagggcaaggagccatggaaactgaaggaaacttggactggacatcagagaccataggagctgacctgtagagccccttg

SEQ ID NO: 984636 - DNA, 120 bp, Artificial Sequence
  ENSG00000288013_4 (sequence is synthesized)
actttaccggttaggttcaaaagctaaccaccaaatactagggctagtgcttctttcagtgtgctaccctcctctcttctttcttcatcagtcctgaggcaagcaggcccacgctgctaa

SEQ ID NO: 984637 - DNA, 120 bp, Artificial Sequence
  ENSG00000288013_5 (sequence is synthesized)
tcccaagttgacccaggagtacactaaggcttggacagtttagttgatctacccaagaacacaggaacactcctgacttccagcccagtgtggtttccattagacattcttgccatggca

SEQ ID NO: 984638 - DNA, 120 bp, Artificial Sequence
  ENSG00000288013_6 (sequence is synthesized)
tgaaaaccacaatgaggtcaggcagatagctctgcaacctggaactctgagtgaaatcggttatgactgcagctgacatacacggccccatacagcccagcaaggaagggggcaaaggtc

SEQ ID NO: 984639 - DNA, 120 bp, Artificial Sequence
  ENSG00000288013_7 (sequence is synthesized)
acaccaagtcaggacagaggctgtgcctctgctgtgttcaggaaaccttgagacaaatttcttctccaataacaactccctgatgtaaactaaccaaaagaaagcaaacccaagtttctg

SEQ ID NO: 984640 - DNA, 120 bp, Artificial Sequence
  ENSG00000288013_8 (sequence is synthesized)
ttgtgagtcagaagcaatttcaggaaatgctgcccatgtcaccagctggaatccaggctcctgttctgcaagagctttcagatgcaggcacatgtttgagcatgcgtgcacacacacaca

SEQ ID NO: 984641 - DNA, 120 bp, Artificial Sequence
  ENSG00000288013_9 (sequence is synthesized)
cacacacacacacacacacacaagctctcacacatgcctacactcacattcacaaactggcacattcacatacactcacaggcatacacacacacgtaaactcatatacacatacattcc

SEQ ID NO: 984642 - DNA, 120 bp, Artificial Sequence
  ENSG00000288013_10 (sequence is synthesized)
cacatgcagtggcacacaaattcacatacatacacatactcacatacttatacaaacacacatgctcatatatactctcacataatacacacaaacccacatacacacacccaatcatac

SEQ ID NO: 984643 - DNA, 120 bp, Artificial Sequence
  ENSG00000288013_11 (sequence is synthesized)
tccctcatatacacacatacattcgcatacatactcatgcactcacacatacccacacacgtgcacatgcacacacgtgcaaacacacagagccaagacttagctgtggccaagtcttcc

SEQ ID NO: 984644 - DNA, 120 bp, Artificial Sequence
  ENSG00000288013_12 (sequence is synthesized)
tgacactaaatataagcatgatatgctcggtgcaaaaggcacttgttgcatgagaattgaaactggatcaagtccactgattatttagctatttccaaatatctgcatgttttgctttgt

SEQ ID NO: 984645 - DNA, 120 bp, Artificial Sequence
  ENSG00000288013_13 (sequence is synthesized)
ggacatctgaatagttggcgggggcaagcttttctctgtacctccttccctctggggatgtgtgaatcagttgttcctaaccatcccttcccaccaagccatagcagtgggaagtgaggt

SEQ ID NO: 984646 - DNA, 120 bp, Artificial Sequence
  ENSG00000288013_14 (sequence is synthesized)
cagttaactgtctccgttgcaaaaggtacacataaaattgccgatttgaaggacgggggactgaagggactttgcaaagtgacagctgcagccccctgtctcagcaggggccatccttcc

SEQ ID NO: 984647 - DNA, 120 bp, Artificial Sequence
  ENSG00000288013_15 (sequence is synthesized)
ggaggaagagaagccgacagccctccctactccctccccactttctcataagtcctcaacaaaggtctggaagccttcacaccttctagtctttccacaggggtacatcccaggccacat

SEQ ID NO: 984648 - DNA, 120 bp, Artificial Sequence
  ENSG00000288013_16 (sequence is synthesized)
cacacttccacagggactttggatctctgccgaatccaggagcctaggatacagtgatggctctctgtctatgggaacaaaattctttctgtaaaatgtgatacaacataataaacaaag

SEQ ID NO: 984649 - DNA, 120 bp, Artificial Sequence
  ENSG00000253275_0 (sequence is synthesized)
atttccagttttagttttgacagcattcctagaactagctccttagggttttttaaagacaccaacgccaaccagcaagcgccccctactgagcggtctaggtcccagctctgagaagcc

SEQ ID NO: 984650 - DNA, 120 bp, Artificial Sequence
  ENSG00000253275_1 (sequence is synthesized)
cagtttttaggatactactttgattgacatttcagtttcttttagatctatatcttctatttttcttgaggctattttgataattatttcttaagatattatcaattttcatctagataa

SEQ ID NO: 984651 - DNA, 84 bp, Artificial Sequence
  ENSG00000288010_0 (sequence is synthesized)
ccacctgacgagagtctgccgccaatgtgggtgcctttctctaaggtgaaggtacattaagaacgtgagcattgaggacagtcg

SEQ ID NO: 984652 - DNA, 120 bp, Artificial Sequence
  ENSG00000288010_1 (sequence is synthesized)
ggtgaaggtacattaagaacgtgagcattgaggacagtcgacgagagattcccgagtacgtccaccgtcagccttgcgtttctacagtttaaaccgtggtggatcgatggagtacaagaa

SEQ ID NO: 984653 - DNA, 120 bp, Artificial Sequence
  ENSG00000288010_2 (sequence is synthesized)
cagaaatttaaagttctacaatgaaccccttggagatgcgaagaaaagcgcctctgcggagacaaaaaaccctcaattgagcatcatcgactcgccagtccacaggtgtatccaccagct

SEQ ID NO: 984654 - DNA, 120 bp, Artificial Sequence
  ENSG00000288010_3 (sequence is synthesized)
ccgaagagacagcgaccagcaagaacgggccataacgacgatggcagttttgtcaaaaagggggatatgtagggaaaagagagatccgactgttactgtgtctacatagaaaaggaagac

SEQ ID NO: 984655 - DNA, 120 bp, Artificial Sequence
  ENSG00000288010_4 (sequence is synthesized)
ataagaaactccattttgatctgtaccctgaacaattgttttgccttgagatgctgttaatatgtaactttagccccaaccttgtgctcacggaaatatgtgttgtatggaatcaaggtt

SEQ ID NO: 984656 - DNA, 120 bp, Artificial Sequence
  ENSG00000288010_5 (sequence is synthesized)
aggattagtaaaagaggaaggcctcttgcggttgagataagaggaaggcctctgtctcctgcatgcccctgagaacggaatgtctcagtataatacccgattgtacattcgttctattct

SEQ ID NO: 984657 - DNA, 60 bp, Artificial Sequence
  ENSG00000288010_6 (sequence is synthesized)
ttgtacggcaatactgctgtgttattctttactacactgagatgtttgggtggagagaag

SEQ ID NO: 984658 - DNA, 68 bp, Artificial Sequence
  ENSG00000288010_7 (sequence is synthesized)
ctatcaccctgttctcctgctgcattccccttgctgagacagtgaaaataataatcagtaaatgctga

SEQ ID NO: 984659 - DNA, 120 bp, Artificial Sequence
  ENSG00000288010_8 (sequence is synthesized)
ccttgctgagacagtgaaaataataatcagtaaatgctgagggaactcagagactggggccagtgcaggtcctccgtacgctgagcgctggtctcctgggcccagtgttctttctctata

SEQ ID NO: 984660 - DNA, 120 bp, Artificial Sequence
  ENSG00000288017_0 (sequence is synthesized)
tggtcagttcagggctgaaatgggccaggtaggcagggtatcctggtcagttcgggctgctacagcaaagtgccataccctgagtggctctaacaagcaaccattatttctcgcagctct

SEQ ID NO: 984661 - DNA, 120 bp, Artificial Sequence
  ENSG00000288017_1 (sequence is synthesized)
ggaggctacaagtccaagctacttcttcaatgtgcctccttcaagactgcaaccacctagaattggccaagctcagcgccagggaccagggcatggagacacagcccctgctggcgagaa

SEQ ID NO: 984662 - DNA, 120 bp, Artificial Sequence
  ENSG00000288017_2 (sequence is synthesized)
gcttgcagtgcatggggatttgatcccgggggagcctgagttcttcaggttgagaattgtcatccctgcggtgttctagaacccagcaagtggctagcccgctgaaggcactgttatcag

SEQ ID NO: 984663 - DNA, 120 bp, Artificial Sequence
  ENSG00000288017_3 (sequence is synthesized)
ctctcattttcattctgaatatgcagcttctccctcttcccgtttagtcaaaatccctcaaataaaatgatatctgccttgccaaacctggtctccaccccgcagccttaggggttggtg

SEQ ID NO: 984664 - DNA, 120 bp, Artificial Sequence
  ENSG00000288017_4 (sequence is synthesized)
gagcctctgtaagcctgggcacctgtgcagttgacattagaagcaatggaggaggacaggtgacccattagaggtagagaatggatcactcagggccaaggaactcagtcagaactcccc

SEQ ID NO: 984665 - DNA, 120 bp, Artificial Sequence
  ENSG00000288017_5 (sequence is synthesized)
tgagatgcgactgcattctcatggcaacggcaacccttcctctgattctgctgcaagaattctcccagatgctagcccccatggtgtccagaggctggatagcccctttgggaggctgca

SEQ ID NO: 984666 - DNA, 120 bp, Artificial Sequence
  ENSG00000288017_6 (sequence is synthesized)
acagtgtcccctggccagacgtccccagacaggtgccaggacatagtgctacaaagagtacgtactaaacccagaagagacctggcagtttcatttgtctttctgccaatccttggaaca

SEQ ID NO: 984667 - DNA, 120 bp, Artificial Sequence
  ENSG00000288017_7 (sequence is synthesized)
agctaagatgggatttttaaaaagtccagtcaactaaaggcttggatagattgggaggttctgatttttaaaagtttttaaattgtgaaatatgttctgtcttaaaaggtatgtaatatt

SEQ ID NO: 984668 - DNA, 120 bp, Artificial Sequence
  ENSG00000288017_8 (sequence is synthesized)
tttatagtttaaaataataaaatgagcagtcgtgaacctactatccagtttaagaaagaaaacatcatcccatgtgcccctcccagactcatccctccccttccaggtaaccattaccct

SEQ ID NO: 984669 - DNA, 120 bp, Artificial Sequence
  ENSG00000288017_9 (sequence is synthesized)
ggagtttgtgttcactgttcttcaattttctgcatagctttcacaaactgcgtgtgttcctaaataggatatttagtcatgcccatttctgaaactgaaatttaaatgtttccactctat

SEQ ID NO: 984670 - DNA, 120 bp, Artificial Sequence
  ENSG00000288017_10 (sequence is synthesized)
atatgtgttttgcaatatgctgtttttgctccatattatgctttcagaaatttacccatcataatgaatataactgttaatttatttcactgctatatagtatttcataacatgcattta

SEQ ID NO: 984671 - DNA, 80 bp, Artificial Sequence
  ENSG00000288017_11 (sequence is synthesized)
tttatttcactgctatatagtatttcataacatgcatttatccagtttgctgttaatggttactttggttgttttcagag

SEQ ID NO: 984672 - DNA, 120 bp, Artificial Sequence
  ENSG00000288017_12 (sequence is synthesized)
catggctttggggtacatataccccaaaagaattattattctcaacaccagcaccacccttctgacaagtattttgtgatgttctttttactatcttgaaataaaattcttgaaattcta

SEQ ID NO: 984673 - DNA, 71 bp, Artificial Sequence
  ENSG00000288016_0 (sequence is synthesized)
cccgagagcgagcgagggctgccagtatgctgtcacctctcattattatttgccgatgggagtggagaagg

SEQ ID NO: 984674 - DNA, 120 bp, Artificial Sequence
  ENSG00000288016_1 (sequence is synthesized)
gtcacctctcattattatttgccgatgggagtggagaaggagacttggtgataacaggactgaaaaccttgtgtagcctacagtccatatgcttcagtctattgtgtcttgatctaagaa

SEQ ID NO: 984675 - DNA, 120 bp, Artificial Sequence
  ENSG00000288016_2 (sequence is synthesized)
gagatgcagaacagatgctaagaagacttagacgcaatgagccccagaaacaaccttatctttcaccaccatctgcctggtttattctactcctcaagttcaccaaaagcgtgctgccct

SEQ ID NO: 984676 - DNA, 120 bp, Artificial Sequence
  ENSG00000288016_3 (sequence is synthesized)
caagtttttctacctactgtttcttctgcttggaatattcttcctctaggaatgctgatgttccatgtagagaggaattatgactatgcctctcgtgcaagtctgagcctggaggacact

SEQ ID NO: 984677 - DNA, 120 bp, Artificial Sequence
  ENSG00000288016_4 (sequence is synthesized)
catcctgtggtatgccgtcgccccaaagtgatccagaaaagctgtctgcagacgcgctcctgccaaactcctgtggaagaagccccagctatgttttcagtggtgggtctggggagaaga

SEQ ID NO: 984678 - DNA, 120 bp, Artificial Sequence
  ENSG00000288016_5 (sequence is synthesized)
agtatcctttggcaaaatccttcaaaagtaccagagagccctggctgttggggtacacttgcagactttccccactgagccactttacctgtgcctctgctgaaagaaacttctcacaag

SEQ ID NO: 984679 - DNA, 120 bp, Artificial Sequence
  ENSG00000288016_6 (sequence is synthesized)
tggaaagttgaggggctgaaggcctgcagtctgatttcttttgttctacaggatactcccttaatgtgatcaaaactgcttttgcaaagattataaccgaggaaattacgacagtgaaag

SEQ ID NO: 984680 - DNA, 120 bp, Artificial Sequence
  ENSG00000288016_7 (sequence is synthesized)
agatcagacctaactgactccatcttgcttctaatcttgttcaatatccttgttaattcctgggcataggtcgaaaaaccttgtgaaggaattcagtttatggtttgactctgaaacaaa

SEQ ID NO: 984681 - DNA, 120 bp, Artificial Sequence
  ENSG00000288016_8 (sequence is synthesized)
gctgctaacagccctttctcgaaaagacctccttctcacccgggaactagtctgcctttgtaggactaacaaattagctacaaggttagaaattactgtttaggggtcatgcagcctctg

SEQ ID NO: 984682 - DNA, 120 bp, Artificial Sequence
  ENSG00000288016_9 (sequence is synthesized)
gctccaagagtctgaacctccccacattgctcctaggaataacgccactactgtaaaacctaagatcaggttttattttaaaatatcaggtgatattttgcagaccctgcattgggtgga

SEQ ID NO: 984683 - DNA, 120 bp, Artificial Sequence
  ENSG00000288016_10 (sequence is synthesized)
tcaactgacaccacccagacctgtaatctggcccaaccagttctgcgatcctactcaggaacagaagatagcaagaaaacctcatcttgaccccctatgatttcatttccaacctgacca

SEQ ID NO: 984684 - DNA, 120 bp, Artificial Sequence
  ENSG00000288016_11 (sequence is synthesized)
atttccaacctgaccaatcagcactccccacttgcccagctcctacccaccaaattgtctttaaaaactccctatcctggaatgctcagagggactgatttgagtaataataaaactctg

SEQ ID NO: 984685 - DNA, 120 bp, Artificial Sequence
  ENSG00000288016_12 (sequence is synthesized)
ggtgaacccattgtgcggttacatggtgccctcccatatgccctagaagtagccattcctgagggtcagactactatgaatcctgatgctcctctatgtctaactgcccagcggggaaac

SEQ ID NO: 984686 - DNA, 120 bp, Artificial Sequence
  ENSG00000288016_13 (sequence is synthesized)
cacattccaggctggtgctggggaatgtctgctaagtatccaatgatgtggcctgttctctagtctccctgcagtgggtaacagcaccagctctgatgggggtgggagggggcttacata

SEQ ID NO: 984687 - DNA, 120 bp, Artificial Sequence
  ENSG00000288016_14 (sequence is synthesized)
gactctgagattcccttagttatatatagccttattgtgttggtattctcaaaggccaaatttagtattaatgtactgggcgtgtgaacagactcaagacctcctggtcagccagggtga

SEQ ID NO: 984688 - DNA, 120 bp, Artificial Sequence
  ENSG00000288016_15 (sequence is synthesized)
tgcaagaaatggtggtaaccgaggccatgcaaaagttttctctttcctgaatgctgttattctgtctgcagatgctgtaatggactgtgttggttggcctccagccaggaggtggtgctt

SEQ ID NO: 984689 - DNA, 120 bp, Artificial Sequence
  ENSG00000288016_16 (sequence is synthesized)
gcaaaatagtaccagctgcagtggtagcagtggggtttgcgcttgccttatgtttcccagagaatgtactctggtgtctcgggcaaggggcgggaccatggagctctaaaacatccctgt

SEQ ID NO: 984690 - DNA, 120 bp, Artificial Sequence
  ENSG00000288016_17 (sequence is synthesized)
ctattgtgttgtacaaccagagcagatgaaggggtaaagccagagcaggtggaggctgggtcaggcaagtccgtgctcgggctccccatgtgcaagctcaggaagtggctccaatgtgga

SEQ ID NO: 984691 - DNA, 120 bp, Artificial Sequence
  ENSG00000288016_18 (sequence is synthesized)
tcagagggcagttgccttgcctctggggtaatgttctagggaggagtgcagcttcttctgctgcataaaataatctgcacagggagcggtgggtagccggcagcagtaagctccactcag

SEQ ID NO: 984692 - DNA, 120 bp, Artificial Sequence
  ENSG00000288016_19 (sequence is synthesized)
ctcccatgcacttggcaaggcacatctcacactcacagtgttctattagcaacagctagctgagttccaggcagcctctacccagaactcaaaactggtggagaacacagctttcaggcc

SEQ ID NO: 984693 - DNA, 120 bp, Artificial Sequence
  ENSG00000288016_20 (sequence is synthesized)
atgcccctcccagtcaacctatgaagcaggtggctataagcacactttccgcttgctactccattctggctgatggggctcatccccactcaagatcatattgaaaatttcagctgggag

SEQ ID NO: 984694 - DNA, 120 bp, Artificial Sequence
  ENSG00000288016_21 (sequence is synthesized)
attctctcaacctgtgaccaacacctgagttagctggccaacttccatgatgtcccttgtgaggtgagaataggaatggctctgtacccattggggtctgggagtgcatgcaaagcacat

SEQ ID NO: 984695 - DNA, 120 bp, Artificial Sequence
  ENSG00000288016_22 (sequence is synthesized)
cctgatgccgcttcttctcctatattccccacctctcactaaatcagctccagagcctggaagggttaacaccttcacctgtggcctagatcgcccagctccctgtgggagtgtgtgtca

SEQ ID NO: 984696 - DNA, 120 bp, Artificial Sequence
  ENSG00000288016_23 (sequence is synthesized)
cagcatcatctctctccctctcatgacctggagactcacacttttctgtatggcccacagtgtaggctgcagcccattgcttctttcaaaaggcctgtggtttctttgactttttctgtt

SEQ ID NO: 984697 - DNA, 120 bp, Artificial Sequence
  ENSG00000288016_24 (sequence is synthesized)
aagttcctgtgttgcttcatggaaaaccgagttcacagaataaatcttaacacactatttttgcctttccaagtgggagaggcaggcaaacattgactctaatctaccatcttgcggggg

SEQ ID NO: 984698 - DNA, 120 bp, Artificial Sequence
  ENSG00000288016_25 (sequence is synthesized)
agttcacataaaatatatctcctagtgtccagtttggttttatctgatgaagcaaagcagagaaaatagagtatgcatcgcctggccattcaaaacccttgagctctctgagatcatctt

SEQ ID NO: 984699 - DNA, 120 bp, Artificial Sequence
  ENSG00000288016_26 (sequence is synthesized)
ttgtctttgtaataacctctcttttccttgtttgattcacataaatgtttatgaagaggtctgatctttgatgtcaaaatcctttcctaccacagaatggaaaaagcctacagtccatat

SEQ ID NO: 984700 - DNA, 120 bp, Artificial Sequence
  ENSG00000288016_27 (sequence is synthesized)
gagttaagcttatcttctgtaagaaaagatttctactgtccatatttctgacttattatacccaattttaatatgcatcttaaatgacaagtgtgaaaatataagcacttaaatatttgc

SEQ ID NO: 984701 - DNA, 120 bp, Artificial Sequence
  ENSG00000288016_28 (sequence is synthesized)
agttctttaaatcttgacgaacattggtggacatagttattatatgaaaatttaagagctgttttcatgatgatttttaaatccagactttcttcagtctttgctaaatttaaatctcac

SEQ ID NO: 984702 - DNA, 120 bp, Artificial Sequence
  ENSG00000288015_0 (sequence is synthesized)
aggtggctgtggctggtacacagagaaccaaagtgagaggaagagccagaccatgcaagactgtgggtagtatatgataccaaaaagggaaaattgaacagaagcttgatgacttcccaa

SEQ ID NO: 984703 - DNA, 120 bp, Artificial Sequence
  ENSG00000288015_1 (sequence is synthesized)
gaacaatttggtagaaaagagtgctgatgaagaagagaggacaacacaaaagaagacacagaagcaccatgggcaaaccatggaacaagaactggaatgaatatctattccactacctga

SEQ ID NO: 984704 - DNA, 120 bp, Artificial Sequence
  ENSG00000288015_2 (sequence is synthesized)
actaaagactgcagacggagaaagggaagacaggggtttaactggcaattcaaagtgaggtgatcagccttctgttacagagttaactgtgtgtgaaagaatgtaagattcatgtataca

SEQ ID NO: 984705 - DNA, 120 bp, Artificial Sequence
  ENSG00000288015_3 (sequence is synthesized)
tctgacagtgacagctgtatggccacagcttcatgctatcaaggcccttcagtacaagattgaagtgaagtgatgatatttgacatccttgacttcaaaggaaagctttgaaaatctcac

SEQ ID NO: 984706 - DNA, 120 bp, Artificial Sequence
  ENSG00000288015_4 (sequence is synthesized)
cattagataagatgcttgcagtggatttttttttaaatttgtaattagcctttatcagattgaggaagctccattctagttctagttttccatgagtttttatttttaacttttatcagg

SEQ ID NO: 984707 - DNA, 120 bp, Artificial Sequence
  ENSG00000288015_5 (sequence is synthesized)
aatggattttaaaactcatcaaatgctttttatgtatcaatgagttgaaacctatttttttattttattcttaatatgaccaattacattgcctttctaatgttaagctaacctgaattt

SEQ ID NO: 984708 - DNA, 120 bp, Artificial Sequence
  ENSG00000288015_6 (sequence is synthesized)
ctagtataaaccaacttgcttatgatgaagtctttttaccaactgctgggtttacatttttaagaattttggggtctatgttcataatgagattggactgtatgtttcccttgtcatact

SEQ ID NO: 984709 - DNA, 120 bp, Artificial Sequence
  ENSG00000288015_7 (sequence is synthesized)
ctcttgattggtttttggtatcaagaaaatccagtctgataccatgtattagagtttatcttattttgtcgttctctggaaatatgtaggattgatattaatttttcattgtgcctgtta

SEQ ID NO: 984710 - DNA, 120 bp, Artificial Sequence
  ENSG00000288015_8 (sequence is synthesized)
gtaaagatgtttgaacctaaacattattttggaggaagttttatattgctgtttcagtttctttatgtttatctcagttttttattatatcttttgtcaaatttataagtggtcgttttc

SEQ ID NO: 984711 - DNA, 120 bp, Artificial Sequence
  ENSG00000288015_9 (sequence is synthesized)
attacatacagttattatctttgtaatatctatagaatctcctgttttattcctgatgtaagttaattttctcttcttaattattctcttgaaaaaaaaatatatgtgtgtgtgtgtata

SEQ ID NO: 984712 - DNA, 120 bp, Artificial Sequence
  ENSG00000288015_10 (sequence is synthesized)
actagcctcccagttttggctttgtcttctctattatatttaattattagtttcatcctcattcatcaatgctctttctttaatggtttcttctttttactttcttttttgctgttcttt

SEQ ID NO: 984713 - DNA, 120 bp, Artificial Sequence
  ENSG00000288015_11 (sequence is synthesized)
tgtaatttctcaagacagatgcttaaagcattacttttaagccatcttttcttttgaatgtgtgcttctaaggctatacattttacatgctgtacttttcaaattttaatatgtagtatt

SEQ ID NO: 984714 - DNA, 120 bp, Artificial Sequence
  ENSG00000288015_12 (sequence is synthesized)
ttcattatcattcagtttagtatactttcttttttctcccatgatttcctttcgatgtgtttttataatgtccaaacatatagtaattttctaggtatattttgattgttaatagttgtt

SEQ ID NO: 984715 - DNA, 120 bp, Artificial Sequence
  ENSG00000288015_13 (sequence is synthesized)
aaaaacatatacctttttaattaatttatttgtacttgttttatggcataggatactgtccaatttttatatttttgcatttgggggctataatatttattaaatctttctttctctgta

SEQ ID NO: 984716 - DNA, 120 bp, Artificial Sequence
  ENSG00000288015_14 (sequence is synthesized)
tccttcttgaatttatatatgcaaactgccactgactgtgcatttgggttcttcttataattttattattttataaaattatgcattttgaggtcatgtaattgagtggatgtgtatttt

SEQ ID NO: 984717 - DNA, 120 bp, Artificial Sequence
  ENSG00000288015_15 (sequence is synthesized)
attgagtggatgtgtattttaaactgtttaaactttcttggtgattcttttatcattatttatttatatttaatgtggtaactgatatttttgtcatattcactatctttataaattctt

SEQ ID NO: 984718 - DNA, 120 bp, Artificial Sequence
  ENSG00000288015_16 (sequence is synthesized)
ttaatacttacttagagctgcctacaaatttaccactttattttttcttcatttcttttttcatctcaaccttcttttgtagcagcaatttcatttggcatgaagaaaataccttattta

SEQ ID NO: 984719 - DNA, 120 bp, Artificial Sequence
  ENSG00000288015_17 (sequence is synthesized)
gcaatttcatttggcatgaagaaaataccttatttacctttagggagaaatgtaataatctagtcttgcatagataaatctggagaatagctgaaacctgggaggtggagcttgcagtga

SEQ ID NO: 984720 - DNA, 120 bp, Artificial Sequence
  ENSG00000253270_0 (sequence is synthesized)
agtccaagacaaacagtgtaaaggaaaatgtcaacaataaagtcatcactggtgggacctcaaggcagcagagtggaatcacaactagatcctgcaatgtaactaatcaaaatcttatga

SEQ ID NO: 984721 - DNA, 120 bp, Artificial Sequence
  ENSG00000253270_1 (sequence is synthesized)
ggaggaggcatccaaaaggacaagacctgctaagcactctgagagcatcgtctacacctgctgcttccagatcatcatctcccagttgttcccagcagcccagcagtctgacttccatcc

SEQ ID NO: 984722 - DNA, 120 bp, Artificial Sequence
  ENSG00000253270_2 (sequence is synthesized)
ctaccatcccaacagaactgccctcgccaacctcctccacatgcaccatggtccgaagataatgaacactgctcaggactcgcctaactgggacaaaattgattcctatctggacgtgca

SEQ ID NO: 984723 - DNA, 120 bp, Artificial Sequence
  ENSG00000232265_0 (sequence is synthesized)
agacagactccggggccctcaactggtctccgaccttcccctgcaacctgcgacacctgccattttcccatcttaggctccagaagcagaatcaagtgggatgtcttggaagaaaaacaa

SEQ ID NO: 984724 - DNA, 120 bp, Artificial Sequence
  ENSG00000232265_1 (sequence is synthesized)
acaaaaggcccactaggtggagtgaaatggatcaggagcaattatgttcaatttcacctttaagttttctcaaaaggaggagcattaagaatcagccaccttagtacatacttaaaggct

SEQ ID NO: 984725 - DNA, 120 bp, Artificial Sequence
  ENSG00000232265_2 (sequence is synthesized)
agcacacatgattttttctgcttgcacttcaggagaagatagtcattggacaaaaggtcgagaggaaccatacttgaagaaacatacctgaagggtttcatccatatgtgggcctgattt

SEQ ID NO: 984726 - DNA, 120 bp, Artificial Sequence
  ENSG00000232265_3 (sequence is synthesized)
ggatgataaaatcctgcatcttgagcctgatcttgatgctgcctgtgttctgatgccatcaggagttgagagtctaggggttttagaaagggtgaatgtattttcccataggcaaggaac

SEQ ID NO: 984727 - DNA, 120 bp, Artificial Sequence
  ENSG00000232265_4 (sequence is synthesized)
gccaaaatgtgcactgtgacagattaaaggttgctacaaattctctgatacccttccattaagaggtagggcagatattccctcccctcaaatctgggtgggctccatgacttgctttga

SEQ ID NO: 984728 - DNA, 120 bp, Artificial Sequence
  ENSG00000232265_5 (sequence is synthesized)
tcaacagaaaacggcagcagtgatgctgggccagttgttggatccaggccttaagaaccaacaacttccacttaagttctcttggaacactgagtccctgactaccctaatatcatgttg

SEQ ID NO: 984729 - DNA, 120 bp, Artificial Sequence
  ENSG00000232265_6 (sequence is synthesized)
gaaaggctacatgtaggcactctagttgccagtcccagccaagaccagcttttcagccatccccatcactaaatttgtaaatgaagccatctggaatctccagaccagctcatttggcag

SEQ ID NO: 984730 - DNA, 120 bp, Artificial Sequence
  ENSG00000232265_7 (sequence is synthesized)
ctgggtatcatcaagttatctctgctgactccacatggaacaaaggaatcacccagctgagccctattcaaactattgaccaaaaaaatagtgagacataataaaatgatgttttaagcc

SEQ ID NO: 984731 - DNA, 120 bp, Artificial Sequence
  ENSG00000232265_8 (sequence is synthesized)
agatagtcattggacaaaaggtgggtcattctcacgttgaccaagtttctgttccagtatcaccctcccaggagcaagttgagaaacaactgcaggaatccagctgatgaacatctatct

SEQ ID NO: 984732 - DNA, 120 bp, Artificial Sequence
  ENSG00000232265_9 (sequence is synthesized)
ggctgaggcaggagaatggcttgagcctgggagttagaggttgtggtgagccgagatagcgccattgcactccaccctgggcaacaagagtaagactccgtctcaaaaaaagaaaagaaa

SEQ ID NO: 984733 - DNA, 120 bp, Artificial Sequence
  ENSG00000232265_10 (sequence is synthesized)
aaaaaaagaaaagaaaaaaaataaatcctaaaggttgactaaactgcattagagaagcagctcaacctgtggctacaagcctaccacttttccttcagaattaaacacttccatccccaa

SEQ ID NO: 984734 - DNA, 120 bp, Artificial Sequence
  ENSG00000232265_11 (sequence is synthesized)
gcacacatgattttttctgcttgcacttcaggagaagatagtcattggacaaaaggtgggtcattctcacgttgaccaagtttctgttccagtatcaccctcccagtttgggttcctcca

SEQ ID NO: 984735 - DNA, 120 bp, Artificial Sequence
  ENSG00000232265_12 (sequence is synthesized)
gagagtaagaagagaaacaaagaagaaccaacaaaaaagtgccttacctgggttgctgatgtgggcagcaggcactcaatttcatctgggtttcctgagagatgtgcagaatacctccca

SEQ ID NO: 984736 - DNA, 120 bp, Artificial Sequence
  ENSG00000232265_13 (sequence is synthesized)
aaatacagaagatggaacattaattcacacaaactgaaaagtttgaaaaaaaaattagtctttgcccttgagaaaactttactctgagtgaaaatgaaaacaagaaatgcttgtgactta

SEQ ID NO: 984737 - DNA, 120 bp, Artificial Sequence
  ENSG00000232265_14 (sequence is synthesized)
gaaacatcagaggaatgggatcctgtaggtgaagatcatcagcttataaaatcctgttgccatcaatgggggtagcaggaaaatgatgaagattggttaaggggccagtggactcagcat

SEQ ID NO: 984738 - DNA, 120 bp, Artificial Sequence
  ENSG00000232265_15 (sequence is synthesized)
tgaaatgaatcatggacttgaagccaaaagactcagtttgtgtcccagctctctcaagcaaagcccccaagtcccagtttcctcatctataaaaaataataaaaatacttaatggacaaa

SEQ ID NO: 984739 - DNA, 120 bp, Artificial Sequence
  ENSG00000232265_16 (sequence is synthesized)
ctctctgagagtgttactgtgcttaataagtctcttgctgctttgctacatgtgtgtgtgtcacttccaattctttgttaaagacaccaagaacctgggacttcacaacaccagccggta

SEQ ID NO: 984740 - DNA, 120 bp, Artificial Sequence
  ENSG00000232265_17 (sequence is synthesized)
agtcgttttgattcttggactttactagagactccaaagacgcatctgaggagaaaagctctgggtccctgggatgactgtgccactcgacatagcctcctggagtggccaaagagagtg

SEQ ID NO: 984741 - DNA, 120 bp, Artificial Sequence
  ENSG00000232265_18 (sequence is synthesized)
tggataagaaaagaaatattggagtgaactttcactcactcccacttctgtaggtttcttaaaatatatgggtttagaagcaagatacttggcgttttcaaatgactcaaaagagatgta

SEQ ID NO: 984742 - DNA, 120 bp, Artificial Sequence
  ENSG00000232265_19 (sequence is synthesized)
gatgaagagaagttcggtcatcccacagatcttccggagtaacctggacacatccctaaatctctagctcctgggtcttcgaaagcctgtttgcctcagggttgggaggaaagggtttgg

SEQ ID NO: 984743 - DNA, 120 bp, Artificial Sequence
  ENSG00000232265_20 (sequence is synthesized)
aaagtaccaaggcaagggttggcaaaaagattacctcatcagtgaggaaatgaaatttccagaagttttcgccagatctgggaccagagacaaatgctggatgaatttcctatgcaaacc

SEQ ID NO: 984744 - DNA, 120 bp, Artificial Sequence
  ENSG00000232265_21 (sequence is synthesized)
tcttttagaaccaccgcttcaaaggccgtccagagacttcaaattagatctggtgaaactgctcccggtaggggattggtagttcagcggtagaggtttttgtctcccacgccggcgact

SEQ ID NO: 984745 - DNA, 120 bp, Artificial Sequence
  ENSG00000232265_22 (sequence is synthesized)
ccggtacgactcccggccatgcaggacttcttacccttccggcaggaagggctactacgtttctacccaacgaagttattatattatacaggctgtactgcatttatggaccttggtcgt

SEQ ID NO: 984746 - DNA, 120 bp, Artificial Sequence
  ENSG00000232265_23 (sequence is synthesized)
tgtgctcgaactaataatcccggaatttacgttcctgtgctcgaagcctgtccttgaaagtggggagtgtttccggtgggttgctgcagttttaaatactgggaattaaaacctttgcta

SEQ ID NO: 984747 - DNA, 120 bp, Artificial Sequence
  ENSG00000232265_24 (sequence is synthesized)
ctttcatctagtctcccggcaaacccctgggtaacccaaagcccatcagagggattcgcgtgctgggctttccgctacgttaggccacgtctcactatggagcgaggatcaagaaggtcc

SEQ ID NO: 984748 - DNA, 120 bp, Artificial Sequence
  ENSG00000232265_25 (sequence is synthesized)
gggaaggagagaagctgcggggtccagggagactcttcggcggttggtcggagaggtttcagcggcccaaggaaaagggaagcgtgtgggaatctatccgcgtagagatgaggggcgcgg

SEQ ID NO: 984749 - DNA, 120 bp, Artificial Sequence
  ENSG00000232265_26 (sequence is synthesized)
cggagacagtcccacgcagaggtatgcccaaacaccgagttacttaacctcctcaaccaccttggcatccgcgccttccgtgggcccgtcggtcttccgggagagattctgtgtccctgg

SEQ ID NO: 984750 - DNA, 120 bp, Artificial Sequence
  ENSG00000232265_27 (sequence is synthesized)
tattgtgtgtcaacaggtgttagcctgatagttatatttttaatgagagaaaacgaactacagaatttgcgagttttgctttttttctggttttgctttatacctcttggattctccttc

SEQ ID NO: 984751 - DNA, 120 bp, Artificial Sequence
  ENSG00000232265_28 (sequence is synthesized)
caaaggattccaatctgaggggcattgaggtgtgactatggtagacaaggggtggtgaattttcatccaaaaatctttggcggattcccttgctctcccgctccccagtctaagagcagt

SEQ ID NO: 984752 - DNA, 120 bp, Artificial Sequence
  ENSG00000232265_29 (sequence is synthesized)
ttaaaacagaagatcagaaacatttggagagtgtttttttctctgcgttctaatgataaacttgatttattcaattccaaaagtttccttattctgaggttgtctttccatattttgagt

SEQ ID NO: 984753 - DNA, 120 bp, Artificial Sequence
  ENSG00000232265_30 (sequence is synthesized)
ataaaaccatggccatactatatgttggacccacgaaggttcttctcttcacttgtttatttgtaaagtctctttgtaatctgagaatttcttgagtaaactgggaactgttacacataa

SEQ ID NO: 984754 - DNA, 120 bp, Artificial Sequence
  ENSG00000232265_31 (sequence is synthesized)
aatattacatttaagaaaatccttgttatcttaatgtggcactgagaaaatactatcaagtacagcacgtggactaagttagaacattaaatacacaggatctcttgatagaattatcct

SEQ ID NO: 984755 - DNA, 120 bp, Artificial Sequence
  ENSG00000232265_32 (sequence is synthesized)
aaaggcattcttttcatctgagaaattgaagaaaaagatgccctgaacaagaaagacaggagaaaagattttttttttttttaatgaaggataaaatgatgaaatccccccaggtattgc

SEQ ID NO: 984756 - DNA, 120 bp, Artificial Sequence
  ENSG00000232265_33 (sequence is synthesized)
tagcccagcactcagtctgaaagattggacactgagaaatatgtgcatcccatttttctaactagcagcattttgatcctgtcttattatccatacccaggctagcacacatgatttttt

SEQ ID NO: 984757 - DNA, 120 bp, Artificial Sequence
  ENSG00000232265_34 (sequence is synthesized)
gtatgaatagcgctagaggcatactacctttcatcactttcagctatagcattgcaatattgattaatttgttatattttgtatctaattatattgctggttaaatcctgagtctcaatg

SEQ ID NO: 984758 - DNA, 120 bp, Artificial Sequence
  ENSG00000232265_35 (sequence is synthesized)
gaatgtgacacaggacaaatagatttgatagaagaaggaagtattaggatatgttctaaaggcttaaatcattttcaaaaaagctacacattaattaatttgattaactaactagaaaaa

SEQ ID NO: 984759 - DNA, 120 bp, Artificial Sequence
  ENSG00000232265_36 (sequence is synthesized)
gggggtcgctggtcgctcctggagtcgtctcacaaggcctttccctccctcctttctccaaaagaggagcccgcaggcgacacacccagcactctgcgaggcccaccaaggccctgattc

SEQ ID NO: 984760 - DNA, 120 bp, Artificial Sequence
  ENSG00000232265_37 (sequence is synthesized)
ccgagtcctggagcgagttgcagcgccctggctgcagctgaccactgacctagagatgtgcctttgcgaagtggcagcgcatggagaaacagtagcgggtcgctggggccagagccgccc

SEQ ID NO: 984761 - DNA, 120 bp, Artificial Sequence
  ENSG00000232265_38 (sequence is synthesized)
accgggtagccaggagcaggccggagcgaggaggctcccggggtgagaccggggcaccctgaacatcataaaggactcagaccttggcattcccgacgtcataaaggactcacacggatg

SEQ ID NO: 984762 - DNA, 90 bp, Artificial Sequence
  ENSG00000232265_39 (sequence is synthesized)
aggacccaaagcccaaagttcaccaaactgacgctgatctcattttgcagaagtcagcccgttctcccctctctgagagtgttactgtgc

SEQ ID NO: 984763 - DNA, 120 bp, Artificial Sequence
  ENSG00000232265_40 (sequence is synthesized)
gaggtaggcctactttccacattgaattgtgctttctaaagaggtgatgatgaattacctttttgtaaaggtaatacatttcaaatgtgctaaggatgctttctctttttcttatccata

SEQ ID NO: 984764 - DNA, 120 bp, Artificial Sequence
  ENSG00000232265_41 (sequence is synthesized)
aaacatgcagacaatagtcactctctccttagttcataagaattttgagaggaacaaaggagataatatatgtcaaaggcatctgcaaagcatttctcactaagcaaatgtaagacatta

SEQ ID NO: 984765 - DNA, 120 bp, Artificial Sequence
  ENSG00000232265_42 (sequence is synthesized)
ttacttttatagaaatttaagtaaaatacagggttttgtgcaatttaaataatcacctagtttctatcaactttggaagtttagctaatcacatatctgattcttctacatactcaggta

SEQ ID NO: 984766 - DNA, 120 bp, Artificial Sequence
  ENSG00000232265_43 (sequence is synthesized)
ttcatacacaggtataaaattgctgtccaataaacatagactttcttcagtactaaattaaagcagtgcttgttaataaaaaaatcagtaatacattttagcacaatgttgacatgtaac

SEQ ID NO: 984767 - DNA, 120 bp, Artificial Sequence
  ENSG00000232265_44 (sequence is synthesized)
acatatattttaactcaaatatgtaaagcacaactggtattagttaattcaatcaagcatgcaactcttgaaggaggtgggaggatgcagaaaacagctagcttgaaatggaaaccaccc

SEQ ID NO: 984768 - DNA, 120 bp, Artificial Sequence
  ENSG00000232265_45 (sequence is synthesized)
ctgtgctgtcgttctgcctcatcttggttcatgatgttctcatctttatgcacactgtgcataaaggagagagataaaggggtgttaaaatactttattctgtagcacagaataaagtgt

SEQ ID NO: 984769 - DNA, 120 bp, Artificial Sequence
  ENSG00000232265_46 (sequence is synthesized)
tatgaaagtacagaagtagacacgtgcattgtttcttgttaggaaacctgagactgtggaaaacttgctgaacttcaggttactgaactcaaatataatgtgatgttttatgcttttaat

SEQ ID NO: 984770 - DNA, 120 bp, Artificial Sequence
  ENSG00000232265_47 (sequence is synthesized)
gatagttcttccctctcagaaacttagcatgtatagtctttgaaaggtcttttcctatatttactatcaaaaagaaagctaaaagcatataaacacatgagcacacgtgcatacaaaaaa

SEQ ID NO: 984771 - DNA, 120 bp, Artificial Sequence
  ENSG00000174171_0 (sequence is synthesized)
aggccccagctcctctgttctgcccagtggcctggcgcaggaaaggtgacccagtagttcagcctgtcccagctgcctgccccagcaccatcccagacccctttccctggggcccacctt

SEQ ID NO: 984772 - DNA, 120 bp, Artificial Sequence
  ENSG00000174171_1 (sequence is synthesized)
ggccctgaggaaggccagagctcggctgctgttctccaggaagtgcacacgcaggcggccccggctcgggggtggcagggcctcccctgagatgagctccagcagccgcaggaggtggat

SEQ ID NO: 984773 - DNA, 120 bp, Artificial Sequence
  ENSG00000174171_2 (sequence is synthesized)
gccgtcagccagctctgtgtacaggttccggatcttgatgcccgcctggggaggggacagggattcttcttctcagagcccctgctgccaggtccctccaccacagtgactgggacaggt

SEQ ID NO: 984774 - DNA, 120 bp, Artificial Sequence
  ENSG00000174171_3 (sequence is synthesized)
ggaaggaagacaggaaactgcttaccttggtgatgcctgggtcccacagagacggctctgctggacggatggagatggtagatagcaggggctgcttaccttggtgatgcctgggttcca

SEQ ID NO: 984775 - DNA, 120 bp, Artificial Sequence
  ENSG00000174171_4 (sequence is synthesized)
cagaggcggcccagctggacggatggagatggcagatagcaggggctgtggagggagggagagggacatcaggagaggccaaggctggagcagggctgcaccacagccctccccttgagc

SEQ ID NO: 984776 - DNA, 120 bp, Artificial Sequence
  ENSG00000174171_5 (sequence is synthesized)
cagcgtgctggggtgacggcacacaggcggcattgtcctcccacctgccacagggcgtggcccagacagggagggggtggttcaggaatgctccagggccattgccagatgatgtcctcc

SEQ ID NO: 984777 - DNA, 120 bp, Artificial Sequence
  ENSG00000174171_6 (sequence is synthesized)
ttcatcatcctcccttccccgccagcaacttctccaactccaggtgggggtcctggctcccaggacgcagaggcccatggagcggccctgccaccgcatggggtgctgcagtctgcgtag

SEQ ID NO: 984778 - DNA, 120 bp, Artificial Sequence
  ENSG00000174171_7 (sequence is synthesized)
gaggtaccaaagggcagagcctctgtgggaagcctgtggacgcacttcccaatctgagactgccctctgtaccctcttggggcctctctgtgagcacccagggcgaggggatgagggagc

SEQ ID NO: 984779 - DNA, 120 bp, Artificial Sequence
  ENSG00000174171_8 (sequence is synthesized)
gtcctgggccgtggtcttctcattcacccccagggaacagcccatagactgagggcctcacagaccctgggcttggctttccaggccctgccagagtgcagcctgcctagcccggggctg

SEQ ID NO: 984780 - DNA, 120 bp, Artificial Sequence
  ENSG00000174171_9 (sequence is synthesized)
aagggtaggctccctggaggaaggggtgacctggaactgcgagggctgtggagtctcctccaaaattagagacacggtgttaactctgggctccacagagctggccgtggcccggggctc

SEQ ID NO: 984781 - DNA, 120 bp, Artificial Sequence
  ENSG00000174171_10 (sequence is synthesized)
ggaggcaggggtgcagagggagctggtgggcgcccatcccttcctccccgagcagccgtggactacatgccagagtgaaggcgagttctaattctgggggtctcacccgcctctggctaa

SEQ ID NO: 984782 - DNA, 120 bp, Artificial Sequence
  ENSG00000174171_11 (sequence is synthesized)
actcagggtagcagtgtgggctggggtgtgtgtgtgtgggtgtcttccagcggccctggagcctctgaagcgacagcccgctcctcagggaggcgctcctggcagccacagcccacagca

SEQ ID NO: 984783 - DNA, 120 bp, Artificial Sequence
  ENSG00000174171_12 (sequence is synthesized)
ggacagccgctcagcgcgcccttgagagctgggctagggatgagtcacacttgaaccgcctgggcccactgcaggcagtcaggggtgacgctgagaggtgccgtggtctcgggtggggtg

SEQ ID NO: 984784 - DNA, 120 bp, Artificial Sequence
  ENSG00000174171_13 (sequence is synthesized)
cggcttcctgcgtctgagagacgcttcctctcctgctgtcctctccctgccaggccccttctgcagcggctggcttccagacaccctgcgtccctcccttgctcgcagcagttgctgtgg

SEQ ID NO: 984785 - DNA, 120 bp, Artificial Sequence
  ENSG00000174171_14 (sequence is synthesized)
cggtcctcccgtgcacccccccttctgccctcactgcccctgggggtcctcatcacggaccccctaactcggcatcctggacaccaccaccccgcacctttccacagtgcagctctgctc

SEQ ID NO: 984786 - DNA, 120 bp, Artificial Sequence
  ENSG00000174171_15 (sequence is synthesized)
gtgcctgtgaagcctcccacagcctgggaaggaaaatccagacttgccagaccttgcctcagccaggccttggaagcctgccagcttacctaaccaggctagtctgcccccctcactctg

SEQ ID NO: 984787 - DNA, 120 bp, Artificial Sequence
  ENSG00000174171_16 (sequence is synthesized)
ggtgctctccatgggccactcaccatttcctgagcaggaccagagctctcctgccccaaggctgggcttcagctgctctttcagctttgaacgtcctttcccattctccatcatccacat

SEQ ID NO: 984788 - DNA, 120 bp, Artificial Sequence
  ENSG00000174171_17 (sequence is synthesized)
tcacctatcctgcctgccccagttaaaatcctgtttcttctaggaagtccctcatcccacccgcttaccccagggagactgagcttgttccttctcctagtaagaccctcagcccatgga

SEQ ID NO: 984789 - DNA, 120 bp, Artificial Sequence
  ENSG00000174171_18 (sequence is synthesized)
gtcctgtgtgatgttgtgagcgtgggaggacagactgaactgctcggcccgtggagtcctgtgtgatgttgtgagcggggaggacagactgaactgcgtggtgcttcgcacatagacctc

SEQ ID NO: 984790 - DNA, 120 bp, Artificial Sequence
  ENSG00000174171_19 (sequence is synthesized)
aacagggattggcattttgaagctgttggcgggggctgtggactgcttttcttcctttctagctcaacggcagctaaagccactgcatacaatgcaaggactggctcctgtttggccacg

SEQ ID NO: 984791 - DNA, 120 bp, Artificial Sequence
  ENSG00000174171_20 (sequence is synthesized)
actgattgcagcccctggtgaaatgagaaccctgtgggtcggaacaaagtttggattatttatgttgcaagtaactaaaatctcaagtgaaactggtttaaacattatatttttattatt

SEQ ID NO: 984792 - DNA, 82 bp, Artificial Sequence
  ENSG00000174171_21 (sequence is synthesized)
ttatatttttattatttatttatttatatttaattcttttttagagacagggtcttctgatcttcccacttcagcctcctgc

SEQ ID NO: 984793 - DNA, 120 bp, Artificial Sequence
  ENSG00000174171_22 (sequence is synthesized)
ttggcccacacagtggaaaaaaatatctagtaggaataggaaggacttcaggtgaggtttgatccagcagctcaaatgttgtcaccacaggcctggattcctctggcctttctcaaggtc

SEQ ID NO: 984794 - DNA, 120 bp, Artificial Sequence
  ENSG00000174171_23 (sequence is synthesized)
tctttcattttcatgctccacaagatggcttctgccaggctgacctccctcccctgaccccagcagctctggacacccctctcagtgccatttatattgttgcatcaataggctcatttc

SEQ ID NO: 984795 - DNA, 120 bp, Artificial Sequence
  ENSG00000174171_24 (sequence is synthesized)
tatatactgcaaggttcagagaagacagagtatctctctcaagagttctaacataagtctgggggtcctggctctcataggcttgaacagggccacatgtccattcctgagccaatattt

SEQ ID NO: 984796 - DNA, 120 bp, Artificial Sequence
  ENSG00000174171_25 (sequence is synthesized)
gtgaccaaggggatgtggtcaatctcatccaaacctcacttgaagtgagggtgggaggaggagtgctctgcaaggagactgtaggtctggaccaccaaaaaggtagatgggttggtggga

SEQ ID NO: 984797 - DNA, 120 bp, Artificial Sequence
  ENSG00000174171_26 (sequence is synthesized)
aaagccagatgcctactatggtagtgggcggggggagggcacactggcaaggtacagcaagaggcaggggcagtgctggacaggcaggggctcctccctagcacgactggagaaaggact

SEQ ID NO: 984798 - DNA, 120 bp, Artificial Sequence
  ENSG00000174171_27 (sequence is synthesized)
cctgtgaagcggtcacctccatgagtccctcctgtcctggcttccaaccactctgaagtggggcttttgtccacagacctggcctctgctgcctaccctcttctgtccccacctgatggg

SEQ ID NO: 984799 - DNA, 120 bp, Artificial Sequence
  ENSG00000174171_28 (sequence is synthesized)
gccgctttccttctgaagcggctgcattttgggtttctctccacaggaagagttggggctcacaggcacaccctctccctaactcttctcccccggttcaacctggatccagggatccac

SEQ ID NO: 984800 - DNA, 120 bp, Artificial Sequence
  ENSG00000174171_29 (sequence is synthesized)
actctgctccgagaggccagcacgcagccactggaaaatgagccagtgggagagggcagctccatgtttattgatcagcagactatgtctttttgtttgaaacttctaaataagattaca

SEQ ID NO: 984801 - DNA, 120 bp, Artificial Sequence
  ENSG00000174171_30 (sequence is synthesized)
aaaagaaaaaaaatagaagcattgcgtattaactgcattggttaaccaacattggaacccaatactcttgtattaggcccgcatttacctgagtaaactcagtggttttctgtcctaagc

SEQ ID NO: 984802 - DNA, 120 bp, Artificial Sequence
  ENSG00000174171_31 (sequence is synthesized)
atgcttgcctgctacatcccatggagaaaataaacagtgaaacactttcctcatcttcaaggcaattgtctcaggcatcctccaggcatcatgaaggagggtgagcgagggtgcgaggtg

SEQ ID NO: 984803 - DNA, 120 bp, Artificial Sequence
  ENSG00000174171_32 (sequence is synthesized)
gaaaggtccaggccgcggctgtgactcccgcgggtgaaccacagctccacagccccaaatccaaagatgctcttgctgcagcacgacaagtgttcaaaagagaaccaggcccagcccgga

SEQ ID NO: 984804 - DNA, 120 bp, Artificial Sequence
  ENSG00000174171_33 (sequence is synthesized)
gaaaggaaagccaaaagccaactgaatgaatgaccctcccccagaagagcaaccctgcccccaggccatccaagtgcgaacattaccaggtgccagcagggaaaggactccgctgcctga

SEQ ID NO: 984805 - DNA, 120 bp, Artificial Sequence
  ENSG00000174171_34 (sequence is synthesized)
cgcctctcccacctgagagcgcagaggtagggagatcacagtgcctgagaggttttcctccacggagaaatcagagacctcaacctgctgccctctaaagcagctttctgtatccagaca

SEQ ID NO: 984806 - DNA, 120 bp, Artificial Sequence
  ENSG00000174171_35 (sequence is synthesized)
aaacttacatatgtacacgttgttttaaaacgacatactcatgtgacacacatgtatataaattcatgtttatatatgacaattgaggagagttaaagaacaagataattctggatggaa

SEQ ID NO: 984807 - DNA, 120 bp, Artificial Sequence
  ENSG00000174171_36 (sequence is synthesized)
aaatcagtttgcctgggcatctgtaaacctttgggcaagtgaattccctcttctctctcagttcaccctttggtgacctccaccgtggctgcagacttcaggtggtcctcacgcattcac

SEQ ID NO: 984808 - DNA, 63 bp, Artificial Sequence
  ENSG00000174171_37 (sequence is synthesized)
caccgtggctgcagacttcaggtggtcctcacgcattcacagaactgtctgcttaggttttga

SEQ ID NO: 984809 - DNA, 120 bp, Artificial Sequence
  ENSG00000174171_38 (sequence is synthesized)
cctgggtgacagagacttcctctcaaaataaaaataaaaataataaaataataaatggttcttttctatgcgtctaatgaatttaagtgcttgttaagactaaaaaccatgttatgcatt

SEQ ID NO: 984810 - DNA, 120 bp, Artificial Sequence
  ENSG00000174171_39 (sequence is synthesized)
tcctgctcttaaaactaaattatgtagaaagtaagctagggagtgtaagggtaggcatctggatataaatgcttctcccaaatcaagattttctcttcaatctgtgcctttgaccctgtc

SEQ ID NO: 984811 - DNA, 120 bp, Artificial Sequence
  ENSG00000174171_40 (sequence is synthesized)
accaaaggcaggtgacagaaaaaaaaaattatgtgccttttggaagactcagtgggacggttctgatttcattcacttctggtgccagcaggcccccataccatgtggccattgctgttt

SEQ ID NO: 984812 - DNA, 120 bp, Artificial Sequence
  ENSG00000174171_41 (sequence is synthesized)
cgtgtctcttcctgcataaataatgcagagaggccatgcaggtatgcaattttctggagatgaggcagggagatttgcaaggaaaagtcacctacctccccaagctggtgcccacagagg

SEQ ID NO: 984813 - DNA, 120 bp, Artificial Sequence
  ENSG00000174171_42 (sequence is synthesized)
gggaggcacctccacctgacgcaggtgtctgagcagcagtccagagaggtttactcaggggatttggggagcgcacactctggagcagaagtacaggtatgtgcccgaatcctgcctcgt

SEQ ID NO: 984814 - DNA, 120 bp, Artificial Sequence
  ENSG00000174171_43 (sequence is synthesized)
gatgggcattcatgatacgaaccacacagcctttaaagaaaaggttttatatgaaaggttccattttgtttctgtataaaggcttttatcctgtaaggaaaaaaaaaaaacacaaaaccc

SEQ ID NO: 984815 - DNA, 120 bp, Artificial Sequence
  ENSG00000174171_44 (sequence is synthesized)
tggaaggctgttgtgtgccacccctccctgggagctggggagattcccaagtcttagtgcagtgtttctctacaaacggggtcaggagaccctcactggcaggctgacaacttggaagca

SEQ ID NO: 984816 - DNA, 120 bp, Artificial Sequence
  ENSG00000174171_45 (sequence is synthesized)
gactgtgggagcaataggctggagttttcattttccctttaaactcaagaccggaaggtttgtgttatgcgataccatatgctgtgtagaaaacagggcctcagcttcttagatgttgta

SEQ ID NO: 984817 - DNA, 120 bp, Artificial Sequence
  ENSG00000174171_46 (sequence is synthesized)
gttctagagtttaggtacttccaccctctctcctatacataaacactctgtggaagaggttctttgaaaattggggtggtgcaggaagggcaacggtgatggtgagcaggccccagggtc

SEQ ID NO: 984818 - DNA, 120 bp, Artificial Sequence
  ENSG00000174171_47 (sequence is synthesized)
ggccctgccgccctgccgtgtggggtagggagacagctggtggtgtggacacattcacagaactttgtactggtcctgggaagatacaagtcctcacttggtcgccatccctcatatttt

SEQ ID NO: 984819 - DNA, 120 bp, Artificial Sequence
  ENSG00000174171_48 (sequence is synthesized)
ctagtgttttcttttccagtcaacttttcttgatgaatgactgcatgtaagaggatattaagaaaagtggccaaatgatttcctttttttttcctttctctccaagaacattaccaggtg

SEQ ID NO: 984820 - DNA, 120 bp, Artificial Sequence
  ENSG00000174171_49 (sequence is synthesized)
cccatggagtcctgtgtgatgttgtgagcgtgggaggacagactgaactgctcggcccgtggagtcctgtgtgatgttctcaacggcagctaaagccactgcatacaatgcaaggactgg

SEQ ID NO: 984821 - DNA, 120 bp, Artificial Sequence
  ENSG00000174171_50 (sequence is synthesized)
gtgtacaggttccggatcttgatgcccgcctggggaggggacaggggtaagtatggggtcagcccagcctcacctgtcctcccatcctgggacctgagaggtacgacccagagcagctgc

SEQ ID NO: 984822 - DNA, 120 bp, Artificial Sequence
  ENSG00000174171_51 (sequence is synthesized)
tttggaagaaggagctctggcctcagcttggcctcaggcagatgaccccacagctcaccccggaggcccactggccagagctgggggcctggtatgggtgggctgtgggtcacagctggc

SEQ ID NO: 984823 - DNA, 120 bp, Artificial Sequence
  ENSG00000174171_52 (sequence is synthesized)
tatactcacctggccgcactggaagacgttattgatccacttggtgaaagtcttctcctgcatctgcatgtgccgggcctgtagcttgcgaatgtggcccgtctcgtactgagagtccat

SEQ ID NO: 984824 - DNA, 120 bp, Artificial Sequence
  ENSG00000174171_53 (sequence is synthesized)
ggtgagacttggactgggcgggacccggagttctgtgctgggcctcctgctgcggtgccctgcagccccgaggagctcccggggactgtggggctgaccagccatcagccctgcagactt

SEQ ID NO: 984825 - DNA, 120 bp, Artificial Sequence
  ENSG00000174171_54 (sequence is synthesized)
tggggatgaggagctgctggatggctccctaaacctggagggcatgcagattaggggatgatgtgaatggagatggcccctctaccaggggcctggggtcccgccttgccagactgtcct

SEQ ID NO: 984826 - DNA, 120 bp, Artificial Sequence
  ENSG00000174171_55 (sequence is synthesized)
cacatttcatgggggttgcagcttggagcccagccaggtaagggccagtgcttctggtcccctgtgcttgaatggcccagggccccctttgccccaccccaccttccagattcttcttct

SEQ ID NO: 984827 - DNA, 120 bp, Artificial Sequence
  ENSG00000174171_56 (sequence is synthesized)
gttctgcccagtggcctggcgcaggaaaggtccaggccgcggctgtgactcccgcgggtgaaccacagctccacagccccaaatccaaagatgcaaccctgcccccaggccatccaagtg

SEQ ID NO: 984828 - DNA, 120 bp, Artificial Sequence
  ENSG00000234142_0 (sequence is synthesized)
aggcccgtcaacccacaagcggattgaaaataagctagttatgtaggacagaaaaaggaaaagacgaggggtcataaggggacataagcataagacagaagcaaaaaaacggcagccctt

SEQ ID NO: 984829 - DNA, 120 bp, Artificial Sequence
  ENSG00000234142_1 (sequence is synthesized)
ccaggtccccttccaccacgtggaagctttacttttgctttcattttactttcgcttttgctctaataaatcttgccaccgcaccctctttgggtccgcgggtttctctaatctagctgt

SEQ ID NO: 984830 - DNA, 120 bp, Artificial Sequence
  ENSG00000234142_2 (sequence is synthesized)
aacactcgccactgcggcccacggcttcattcctggaagcccgtgagaccaggaacccttcgatcgagaaaagaccttccattgggagaagacttctcgtcttatttccacctataatct

SEQ ID NO: 984831 - DNA, 120 bp, Artificial Sequence
  ENSG00000234142_3 (sequence is synthesized)
cttcaaaacatagcagtcagagttacctgctgaactcataagtcactcatctgctcaaagcctcccagtggcttctcatctcacagaagtaaccagcctgggtttcataaggattaatgt

SEQ ID NO: 984832 - DNA, 120 bp, Artificial Sequence
  ENSG00000234142_4 (sequence is synthesized)
cactgctaatttaatctcagcaagaacaattcatctgtctttggggcacaaacttgtataatccaagtcgaccttcctggagcctctatccactacttgttttgctcaacaagaacacac

SEQ ID NO: 984833 - DNA, 120 bp, Artificial Sequence
  ENSG00000234142_5 (sequence is synthesized)
atcgtgttgactccatcttttatatgatgcctcaccacaatgttccattggccagtgcaagagaaaccaggatgcttcctcatactgcacatctttatctgagaaccaaaggacaaatat

SEQ ID NO: 984834 - DNA, 120 bp, Artificial Sequence
  ENSG00000234142_6 (sequence is synthesized)
gggtgtcacatgccagctccttctacctccttctgaaaccagaggactggattggaaccaacagagatcatgctgtttacttcacagatttcaagaaaagtgaattctgagtaatcattt

SEQ ID NO: 984835 - DNA, 120 bp, Artificial Sequence
  ENSG00000234142_7 (sequence is synthesized)
ttttttagatcttcctatgtgtaaaaatctttggtgagatttaccatctcatttaaagttctttcacaatttttgtgaaaattgagtgatgtgtaataaataagttattttttttcttta

SEQ ID NO: 984836 - DNA, 120 bp, Artificial Sequence
  ENSG00000234142_8 (sequence is synthesized)
cagttgttgttttggggattatgccacagagtcatcaaatgctgtctaacactaaattagattttcctgtgaggttgtaagcaacctgttgtgggaagtaatcaagcagggactagatat

SEQ ID NO: 984837 - DNA, 120 bp, Artificial Sequence
  ENSG00000234142_9 (sequence is synthesized)
ccatctatcagaaaaaatgaatttctagagagatatggcatagcctttccaaatttaaggttccatgagtgtagagaaatgaggataatgactgttaatggttagtgtttaccttaggaa

SEQ ID NO: 984838 - DNA, 120 bp, Artificial Sequence
  ENSG00000234142_10 (sequence is synthesized)
agccaccaatctaagtattctatctgcactaactcatttaatccagaaagagatggctccgaaaagggaattttaacaatactctgcctttctgcaaagaaaatgccaagtgagaaagtt

SEQ ID NO: 984839 - DNA, 120 bp, Artificial Sequence
  ENSG00000234142_11 (sequence is synthesized)
gtattgttgatatacacacatattcacaaaagaccgctatatagggaataagcttttgcaaataaacacactattgcctctaaatcagtgagcagtatttctaaaccaggagatttaatc

SEQ ID NO: 984840 - DNA, 120 bp, Artificial Sequence
  ENSG00000234142_12 (sequence is synthesized)
ttctgaaatttcatgaaaaatattgtatttatgtgcccatttctggagaaaggtgacaattgccctcatcagctttgcgctcaaaggtcaaaataataataattataaaaaactttaaag

SEQ ID NO: 984841 - DNA, 120 bp, Artificial Sequence
  ENSG00000234142_13 (sequence is synthesized)
cttacccagaaacagatgtatttcacaaggtcaatgtattatatatttcaaaataactaaagaatatgattttaaatgttctcaccacaaagaaatgataaatatttgaggtgatagaca

SEQ ID NO: 984842 - DNA, 120 bp, Artificial Sequence
  ENSG00000234142_14 (sequence is synthesized)
cacttattcgcctgatttgatcattccacaatttatgagtgtattgaaacatcatattgtgacccaaatatgtatagaataattgtttatcaattcaaaataaaactgtttttaaaagtg

SEQ ID NO: 984843 - DNA, 120 bp, Artificial Sequence
  ENSG00000287978_0 (sequence is synthesized)
cagcgcaggggctgctgcttcgccacgaaggatttcccgtgccgtgggagcgggttcaggaccgctggtcggacctgagagtcccagctgtgggaagctcagctgtgtaatttgtagtaa

SEQ ID NO: 984844 - DNA, 120 bp, Artificial Sequence
  ENSG00000287978_1 (sequence is synthesized)
tgtgggaagctcagctgtgtaatttgtagtaacgaagcagaagttacaacgaaaagacaagttttcctgtgcttggcagggcccccctcccccccaccaaggcctgcagtggatagagcc

SEQ ID NO: 984845 - DNA, 120 bp, Artificial Sequence
  ENSG00000287978_2 (sequence is synthesized)
cacggtccgcccccagcaagtataagaggaaaaacaacaaatgtctttactgccttgtctttcccccttgccacttgtcattattcaagttttgtaagttcctgatttccattcagtgca

SEQ ID NO: 984846 - DNA, 120 bp, Artificial Sequence
  ENSG00000287978_3 (sequence is synthesized)
gctgcaaggttaccagctgtgcttgcgttgcaagacctgtcacagtttgattaactgccttctttctgcttctgtaagccctcttgcctgccccgcgagtttcacaccatcaaattcctg

SEQ ID NO: 984847 - DNA, 120 bp, Artificial Sequence
  ENSG00000287978_4 (sequence is synthesized)
ctgcaccattcaaactagccaaccccctttcagaagtgtgtataaaagtcaagccccctgtctttcttcggggctcatgctaggcccgagtgcattcaataaaatccttctgttccaccc

SEQ ID NO: 984848 - DNA, 120 bp, Artificial Sequence
  ENSG00000234141_0 (sequence is synthesized)
ataatccactttaaagcaagaaaacaagataattcaagggaaaaatgtatgactctaaatttggaaaccagacaggatctgctaatacggggcagaatgttaaaaagaggatgaattttg

SEQ ID NO: 984849 - DNA, 120 bp, Artificial Sequence
  ENSG00000234141_1 (sequence is synthesized)
atttcagaaaatttagaagaaaatggatttctcaggcaactgaaagaacatatttggatctgttaagatgaaaggagacttcaagagaactggactttgtgttggacaggctgtctgtga

SEQ ID NO: 984850 - DNA, 120 bp, Artificial Sequence
  ENSG00000234141_2 (sequence is synthesized)
ggcccagcaaaagatataatgggcaaaagatataatacacataaattggaatgaatctgcattttccaagcctgatgactttattaaaactgaattaagtcactaactggcagcctgaag

SEQ ID NO: 984851 - DNA, 120 bp, Artificial Sequence
  ENSG00000234141_3 (sequence is synthesized)
atgaaaggaaagaactcagtcatgcttcttaaggtaaaagggcagtctaactgagaattttgttatctctgaggacaaattacaaggagataaagacactcaagatcacatggaaggctt

SEQ ID NO: 984852 - DNA, 120 bp, Artificial Sequence
  ENSG00000234141_4 (sequence is synthesized)
ctgctcccacttagagactgcaatgtaaggtatggaaacagaatattctctatagaaacatacatattaaaatatgaacatttttgttcttatttcaatccaaaaataaataaatgaatt

SEQ ID NO: 984853 - DNA, 120 bp, Artificial Sequence
  ENSG00000234147_0 (sequence is synthesized)
acattctttcagatgccagaggatgctatagaaaaatgcgtgccctcttgtaatactttgttcaagttctgatcagaaggatgaatgatggagcccaagaagccagagtctcattgtgtt

SEQ ID NO: 984854 - DNA, 71 bp, Artificial Sequence
  ENSG00000234147_1 (sequence is synthesized)
cagcatcaggttggtcaggctggctcgaactcctgacctcaagagatccacctgctttggcctcccaaagt

SEQ ID NO: 984855 - DNA, 120 bp, Artificial Sequence
  ENSG00000234147_2 (sequence is synthesized)
tgagctgccacacccagcctccaaatactttttttttaaatcaaaataatgatttcaatgactgagatctgttatgtatttcaacataatcatgtttcataaagatttagtcttctgaaa

SEQ ID NO: 984856 - DNA, 120 bp, Artificial Sequence
  ENSG00000235042_0 (sequence is synthesized)
ggtctcgtccgcctccgccgccttcctgccagtctaccactttctcacccagggaggcctagaacgcgagccacattcgcccccggccctgaccccaggcgcgactgcagagcctcccga

SEQ ID NO: 984857 - DNA, 120 bp, Artificial Sequence
  ENSG00000235042_1 (sequence is synthesized)
gcgggaccggtcttccgagtggacggttaggccacgggtattcaagcgctgcgagttcgccagccttattgtagcggccaggcctgaagggctaggccaccgctgaactacatttcccag

SEQ ID NO: 984858 - DNA, 120 bp, Artificial Sequence
  ENSG00000235042_2 (sequence is synthesized)
tggagacagccatgtgttgaggaacacagcgtcctgccagcagccagcacccacttgccagcctttcatggaggcatttgttgaaatggaggtgccaaaagattgaagagatgtggattg

SEQ ID NO: 984859 - DNA, 120 bp, Artificial Sequence
  ENSG00000235042_3 (sequence is synthesized)
ctgacccactgcatgaaggtggttgccctacagagtcacctggacctgcactgacttggtataaagcccttcatcacctactgctctcaaatcccaaggatcgacaggccgtgtcttcgt

SEQ ID NO: 984860 - DNA, 120 bp, Artificial Sequence
  ENSG00000235042_4 (sequence is synthesized)
atctaagtttggaaagaacccagctctatgaggtttgatctgttttgtttgtggatgaggaagcaagcacaaggagtaaagtggccaaggtgacatgaccatgaattatcagaatccaga

SEQ ID NO: 984861 - DNA, 120 bp, Artificial Sequence
  ENSG00000287971_0 (sequence is synthesized)
gagaacaggtaattggagtgacaaaaattgtatcagacggttttaaacaagcaagaaaggctttattcaagaccatgcggtaagggagagcccccagctcctctgcagcacatggcagga

SEQ ID NO: 984862 - DNA, 120 bp, Artificial Sequence
  ENSG00000287971_1 (sequence is synthesized)
gggctgaggagcctgaggggccaccgagcaggtgggagagccctggaggcctcagcagggggccagccccctaaccctcctcagaggccccctaaccctccacagggcttggggggctgg

SEQ ID NO: 984863 - DNA, 120 bp, Artificial Sequence
  ENSG00000287971_2 (sequence is synthesized)
gccatttctttctcgatgcctcattttccaaggcagctcccaggcctgaagaaggacatttcctgggctgtggaactggccagtggctggaagaagatttacacctggaagaggcagaga

SEQ ID NO: 984864 - DNA, 120 bp, Artificial Sequence
  ENSG00000287971_3 (sequence is synthesized)
gagtttacaattttacgttttccaaagtcagtgctctggacaggggaggttgacacccgagtcaggaagaaatctgtctggagtgagcgaagcctgggggagggaaggccgcctcggccg

SEQ ID NO: 984865 - DNA, 120 bp, Artificial Sequence
  ENSG00000287971_4 (sequence is synthesized)
gggtgtggccggcagccaagctgttggcgcagaggtgtcctgaccatggtgctccaggatcgctgctctgggcccaccggcagggtccagggttcctgtgtcaccagccaggggcctgac

SEQ ID NO: 984866 - DNA, 120 bp, Artificial Sequence
  ENSG00000287971_5 (sequence is synthesized)
agctggctgaagccctcactttcctccacatgcctggcttggctgggaggcccctgtttgagcccctcatccatgctgtcctcaccgagcagcggactctcagtggctgtgcctaggagt

SEQ ID NO: 984867 - DNA, 120 bp, Artificial Sequence
  ENSG00000287971_6 (sequence is synthesized)
gtgcactgcccagtgaccctcatgatgctccacgcatgcacaggcgcgtctgcagggcagctgggtcctccacaggcgtgtgatcggcaggagccaacacctctgctctgcccaggtgta

SEQ ID NO: 984868 - DNA, 120 bp, Artificial Sequence
  ENSG00000287971_7 (sequence is synthesized)
cccagggcaatgctcttcatcctgacggcagtgcgcccagcctgctgctgacacgacataaggaagcttcagtgcagaggctgaaggacccgtaccagggctccagcagctcacagtggg

SEQ ID NO: 984869 - DNA, 120 bp, Artificial Sequence
  ENSG00000287971_8 (sequence is synthesized)
tggacaggtcactgctgcagcacctgagattgggcagggtggagaggcagtgagtcggggatacgatggcggaaggggaggcgacctccctctgggattcgaatccagccctcccacctg

SEQ ID NO: 984870 - DNA, 120 bp, Artificial Sequence
  ENSG00000287971_9 (sequence is synthesized)
gcggtttaactgccaagtcccagatcccatctgtgaagccagccctccgaccatggcctctcgcaggacccctgggaatcaccctcatctgtcactgtttccccaccgggacccaccacc

SEQ ID NO: 984871 - DNA, 120 bp, Artificial Sequence
  ENSG00000287971_10 (sequence is synthesized)
gaggctaccagggaaaagccacaggatttgtttgcatctggggaggcagctccaccttcctggcatgaatggtcactaatgattggactttgtcagcctgcaaggcaggaaggagattta

SEQ ID NO: 984872 - DNA, 120 bp, Artificial Sequence
  ENSG00000287971_11 (sequence is synthesized)
ctctccacagactggacagtccttagctttgtgcttgccacataaatggcatttaatacatgctccctggactcagcaccactcctgaaggcctgtattgtggtcagcagttatcatttc

SEQ ID NO: 984873 - DNA, 120 bp, Artificial Sequence
  ENSG00000287971_12 (sequence is synthesized)
ttccacaaatgagctcattcttctcctctcaggatcaaccctttcgccttcactgaggcatcagacaccagcattcggagggacacccactccatcctcttctctcagctgcctgtggaa

SEQ ID NO: 984874 - DNA, 120 bp, Artificial Sequence
  ENSG00000287971_13 (sequence is synthesized)
attcccatctcaaacacgtgactccccacagagtggcactcactgatcacggatcttaactttaaaaggtgaaaaataagtcaaggcttaaggtaaagtaacgggaggtgtggatgtctg

SEQ ID NO: 984875 - DNA, 120 bp, Artificial Sequence
  ENSG00000287971_14 (sequence is synthesized)
agcaatgcggtgaaccgagtcacggggccgcggagatgttcgcagctgggactttccaggcctcccgaacgcagagcgcccgaagccatcagtggccacagagtgtgtttcaggtgtgat

SEQ ID NO: 984876 - DNA, 120 bp, Artificial Sequence
  ENSG00000287971_15 (sequence is synthesized)
ttggggtcatttatgccaattttattcttcttttatttccatctggttttctttctataaattgcatacgtcatgcatgctacgttttatagtcatccgtgtgacatccgtctcgcacag

SEQ ID NO: 984877 - DNA, 120 bp, Artificial Sequence
  ENSG00000287971_16 (sequence is synthesized)
tgagttaaggaggacgttccgctacagctgtactttttactcagcaaaataaaaaaagaataaagatgagcttgaaactcctttggaatcactacattatctgttgcttagcaaaagcaa

SEQ ID NO: 984878 - DNA, 120 bp, Artificial Sequence
  ENSG00000287971_17 (sequence is synthesized)
tccatgaataacacacatgtacacacatgatacacattcatacacacacaaaaacacgtctgcacatatgtgtatacatacacatagagacataggcacacatgctctgaaggtctgcat

SEQ ID NO: 984879 - DNA, 120 bp, Artificial Sequence
  ENSG00000287971_18 (sequence is synthesized)
ggtggaaaattctagacatgttcatttctacttcctgccaagcgctgaaaacttggtgtgcctgaaaaatcacttggcttctgtaaccagatttaccaaattaaaaaattaaaactgtcc

SEQ ID NO: 984880 - DNA, 120 bp, Artificial Sequence
  ENSG00000287970_0 (sequence is synthesized)
aggacttctgggattgtagcaatggggcagaagatatgagatgagttgggaatgttttacgggcccagaaaataaggcattgctcctaagaagatgcaggcacacacactggaaaaagca

SEQ ID NO: 984881 - DNA, 120 bp, Artificial Sequence
  ENSG00000287970_1 (sequence is synthesized)
ggcgacaaccggaaggagctcccaagggccagagctggaacaatttgagcaaagtaacagctcacagaacaaagtcagcatccctgagtccaaacggatacagccaagcagctgaatgag

SEQ ID NO: 984882 - DNA, 120 bp, Artificial Sequence
  ENSG00000287970_2 (sequence is synthesized)
gagatgcacagaggagaggccagcgcctcccagcagaacaaatgtaaaaggaaaagggaacttcagcccctcagaaatcagtgctgaaggccagattcactgctgaacctcaaatcccag

SEQ ID NO: 984883 - DNA, 120 bp, Artificial Sequence
  ENSG00000287970_3 (sequence is synthesized)
cacacaggtctgcggagggacaagagacttgccaagtcctgaagtatttactaattaccaagagaaaaataataacgttcccaggaagagacggggcagacattgccttaacccagtgat

SEQ ID NO: 984884 - DNA, 120 bp, Artificial Sequence
  ENSG00000287970_4 (sequence is synthesized)
caggtatcagcatggcttttgttgtattccagctaaaacggagtcaccaacccaatcatgggaaacaccagataaacccagacagaggggcgtgcttccgagtgactgacagaaggcttc

SEQ ID NO: 984885 - DNA, 120 bp, Artificial Sequence
  ENSG00000287970_5 (sequence is synthesized)
aaggcacccaggccgagagagacgaggagagcctgaagaactgtcctagacaggggggaaaccaggagccaggacacctaatcacaacatgggacctgagattcaacacaggaacatgca

SEQ ID NO: 984886 - DNA, 120 bp, Artificial Sequence
  ENSG00000287970_6 (sequence is synthesized)
aaagggcgttcctggaaaaaaaggtgcaatctgaattggtctgtagcagagttaatagtattacatcatcattcagcgcctggttttgatggttataagggatgctttcttctgatccat

SEQ ID NO: 984887 - DNA, 120 bp, Artificial Sequence
  ENSG00000287970_7 (sequence is synthesized)
cagccagcgttcaaatccctgctctttcacttagtaggggcgtgactgacaaaatgacatgtttctctccctgaaccccagtttccacatctataaaatgtgggtataaatacctaactc

SEQ ID NO: 984888 - DNA, 120 bp, Artificial Sequence
  ENSG00000287970_8 (sequence is synthesized)
acagggtatttgtgaggattagataaaaataacatgtgttgaacgtgtaacacaaagtacctgcttgctaacactaacatgacctacatctacacacacttcctgtgtggtcacacacat

SEQ ID NO: 984889 - DNA, 120 bp, Artificial Sequence
  ENSG00000287970_9 (sequence is synthesized)
ccacagggcgtgtgtttaatcctgtgtgtgggtgtgtgtttaatctctgtaccccccagacccagcacagcgcatggcctgtactacaaaccacacaaggctgaagaggggggtggcctt

SEQ ID NO: 984890 - DNA, 120 bp, Artificial Sequence
  ENSG00000287970_10 (sequence is synthesized)
tcccagaagatgaacgtgtttatgacggatggcaggacacacattgcaagtgtgtacaacttacagcaagacaatatgctgtaaataagaaggaagctcaaagatgctgatgattaattc

SEQ ID NO: 984891 - DNA, 120 bp, Artificial Sequence
  ENSG00000287970_11 (sequence is synthesized)
tccttttccaggggaaggtttgattcagctagaaacatagatttactcattgtcccacaaaataaatcccgataaacaattatatcacaaaactcaccagagttctagtcctgtaagctc

SEQ ID NO: 984892 - DNA, 120 bp, Artificial Sequence
  ENSG00000287970_12 (sequence is synthesized)
ctgttatcacagtcctttaaaaaaagaccctgccttcaatacactttcctaacaaatcccttaacatgggatctacagtgactccatttgagtttgaataaaccaggctagtaaaattaa

SEQ ID NO: 984893 - DNA, 120 bp, Artificial Sequence
  ENSG00000287970_13 (sequence is synthesized)
agacgtgagagattccaagcacagatgtactgactccattataagaaaaaagcacactatgtcaaaattgaaataggaaaaaagctaagaacatacatgctttcaactcttcaatttact

SEQ ID NO: 984894 - DNA, 120 bp, Artificial Sequence
  ENSG00000287973_0 (sequence is synthesized)
tagttcgaatgtgctgagtctgaggtgctaatgagacagacaggtggaggagagtgcaaaggacctaggaagtcctggacacatgtttgagactggagctataaaaagtagtatgacaca

SEQ ID NO: 984895 - DNA, 120 bp, Artificial Sequence
  ENSG00000287973_1 (sequence is synthesized)
aatgagtactctttaaacaattttgatcatgaaccctgtcaataaaaattggtcagctggatttgaaggccatgatttacatgtgcagcaacaatggattcccaaatatgcccgctgcaa

SEQ ID NO: 984896 - DNA, 120 bp, Artificial Sequence
  ENSG00000287973_2 (sequence is synthesized)
ctttttgtaggtggcaaatccccaaagaggaaggaagaaaggactgggacaagcaccttcagcttcttccaagcttaccatcctataagctactcctctttcctggaagaggagagtttc

SEQ ID NO: 984897 - DNA, 120 bp, Artificial Sequence
  ENSG00000287973_3 (sequence is synthesized)
ctggtggagccggaagctgtagacccttccacttgtaacatcaaagtagagaaaagaaatccccctgatgccacacatgcttttaaataagatgcaataaactctttgcttatgatcaca

SEQ ID NO: 984898 - DNA, 87 bp, Artificial Sequence
  ENSG00000287972_0 (sequence is synthesized)
ggatcctgggaattgagaagcttcagcagaactctgtacttactgctccgtcactggtaatgacaatgaacatcttcacaatctcag

SEQ ID NO: 984899 - DNA, 120 bp, Artificial Sequence
  ENSG00000287972_1 (sequence is synthesized)
ataagttatgccacagaaactaaagaaatcccgtcaagcaaatggtgtgtcatagaaagtcttagggcagccgtgtatgttttctcccccaatgaatcaattgaaaatgagaagctgtta

SEQ ID NO: 984900 - DNA, 120 bp, Artificial Sequence
  ENSG00000287972_2 (sequence is synthesized)
ccgccatgttctgggcagaagctatcagaagtataagccatgatattataatttgatgatttttcatccgtcaaatggatatggcccaggggtgaaaagtggatgctccgtaactagatg

SEQ ID NO: 984901 - DNA, 120 bp, Artificial Sequence
  ENSG00000287972_3 (sequence is synthesized)
atgttcaagagttataaaaatgaggtcctctatgttcaacatttctcctttcttgaaaggatactcaatgtcatgctcagggcctctaatggtcagagataaaattcctcccagttccag

SEQ ID NO: 984902 - DNA, 120 bp, Artificial Sequence
  ENSG00000287972_4 (sequence is synthesized)
agcaccccagggcaaccccataaccagagcaactgcttattaccacgtagactatgtactgtgcaattcctggggtggcattttcataaatatgtgggtgtcgacccctggagttgtgca

SEQ ID NO: 984903 - DNA, 120 bp, Artificial Sequence
  ENSG00000287972_5 (sequence is synthesized)
atgcacatcttgcacaaatggtaagtcatcgtatcccaaagtccaccaagaagaggtaaacaaaattcccatcgatgttgccatcagtcatgagtctgccttttcttcatgggacagtag

SEQ ID NO: 984904 - DNA, 83 bp, Artificial Sequence
  ENSG00000287972_6 (sequence is synthesized)
tttggggctggatcattattctgtcttagtgggagttgtccggggcattgtaggatgcttagcagcatccctggcctctaccc

SEQ ID NO: 984905 - DNA, 120 bp, Artificial Sequence
  ENSG00000287972_7 (sequence is synthesized)
ggatgcttagcagcatccctggcctctacccattagctgccagtagcaccacctcctccagccgcaacaaccaaaactgtctccagacatggccacatgttctctggggggcaaaatcac

SEQ ID NO: 984906 - DNA, 120 bp, Artificial Sequence
  ENSG00000287972_8 (sequence is synthesized)
cccctggctgagaagccctgaaataaagacataatacacagatcacatatatgtaagagagcctaagggccacacaggtgatgctgtacccatgacaaagacagagtcttcaagaggtta

SEQ ID NO: 984907 - DNA, 81 bp, Artificial Sequence
  ENSG00000287972_9 (sequence is synthesized)
atgctgtacccatgacaaagacagagtcttcaagaggttagagaagtggagaaagagaaaggaaatgaagtcccagctgcc

SEQ ID NO: 984908 - DNA, 120 bp, Artificial Sequence
  ENSG00000287972_10 (sequence is synthesized)
ctatcctgctctccagggacaacgctgctgaaaaaggcctggagatcaacaaagccccaaacacagctgcactgagcaaagaaaccagagattgagacaaaatgacattccctcaaagac

SEQ ID NO: 984909 - DNA, 120 bp, Artificial Sequence
  ENSG00000287972_11 (sequence is synthesized)
tactcatttccaagaggggagaaaaagtggagtcatgaaaaacagttgaggctgcatagagtgactcacacctgcaatcccagaactttgggattactcccaggctgagacgggaaaatt

SEQ ID NO: 984910 - DNA, 120 bp, Artificial Sequence
  ENSG00000287972_12 (sequence is synthesized)
gcttgaactcaggagttcaagaccagtctgggcaaaatagcaagaccttgcctctagaaaaagggaaaaaaaatagccaggtgtggcgatacacacctgtggtctcagctacacgggagg

SEQ ID NO: 984911 - DNA, 87 bp, Artificial Sequence
  ENSG00000287972_13 (sequence is synthesized)
gtgtggcgatacacacctgtggtctcagctacagggaggtagacgctgcagtgagtcgggattgcaccactgcactccagcctgggc

SEQ ID NO: 984912 - DNA, 120 bp, Artificial Sequence
  ENSG00000287975_0 (sequence is synthesized)
tcttggatttccagcctccagaacgcaacagtttacaagcctggccaaccccatcagaaaatgaaaaagaaaccaccaggcgaagtgaaagcagttccgtgtgatgcggccgctcactca

SEQ ID NO: 984913 - DNA, 120 bp, Artificial Sequence
  ENSG00000287975_1 (sequence is synthesized)
gagctatgctgtgatccaccagatgggctcgcgctgatgggagtccggttgagtcctgctcagccaatggcaggttgtgtgccacgggcgagctacttcatttctctggacctgtttccc

SEQ ID NO: 984914 - DNA, 120 bp, Artificial Sequence
  ENSG00000287975_2 (sequence is synthesized)
cagatggctggtcgcaataatgacgacgaggcggatggcggcggggaggctagagcccatttcagaagcctgcagtgaggattccaccagttcacatgcatcgggcactgagccctgaac

SEQ ID NO: 984915 - DNA, 120 bp, Artificial Sequence
  ENSG00000287975_3 (sequence is synthesized)
cgcacctaataaacactctcccagctattagtattacaaacctgagaacgggggccatatctgggtcctcctcctttccagatgtgcgaccttgattgaaagtcaccagttccctggggt

SEQ ID NO: 984916 - DNA, 120 bp, Artificial Sequence
  ENSG00000287975_4 (sequence is synthesized)
tgctccatttgcatagtgagggtctcagtgacacttgggggcccttttggctctaacattttatcattctaataagtgttgatatgaagagccattctttgcaaggagtagggccacatt

SEQ ID NO: 984917 - DNA, 120 bp, Artificial Sequence
  ENSG00000287975_5 (sequence is synthesized)
tcggacatactgcagagatgtgatggtccagcagaagcgcagccttccccttatgcattcacatgctggagctggaaaaaagctggaggaatccaacccattcaagttatgaggaagaac

SEQ ID NO: 984918 - DNA, 120 bp, Artificial Sequence
  ENSG00000287975_6 (sequence is synthesized)
ccaacaacctcagtgactgaaggaagatgagttggacaagaaaaagtgaaagaggagcagctatggttcccgctggaaggaaacggaagacttcagttctctggagggagcttctcccgc

SEQ ID NO: 984919 - DNA, 120 bp, Artificial Sequence
  ENSG00000287975_7 (sequence is synthesized)
agcatacaggttcttgctggaaccctgttgcatttcctctgtaggacacacaggtttatctaagctgtgaaagcaacacagagataagacccatggtgttttccttgttagaaaaaagct

SEQ ID NO: 984920 - DNA, 120 bp, Artificial Sequence
  ENSG00000287975_8 (sequence is synthesized)
gtctacttcctgtctggagaaaccagggacacttgattttgaagggacttcagcaatgtaagcacaaaatcagccccttctctttaatttaaattccacccttctcttgggtgacggctg

SEQ ID NO: 984921 - DNA, 120 bp, Artificial Sequence
  ENSG00000287975_9 (sequence is synthesized)
tttctaagttatttaaagatttagaaagtagctagaaggtcactgggtttgtggcggcattggcttttaagcttgtgcaataaaaccacattcggcttgttccctaaggtgagggcagaa

SEQ ID NO: 984922 - DNA, 120 bp, Artificial Sequence
  ENSG00000287975_10 (sequence is synthesized)
atgactggacggaatgcccacctgcccatacagtttgaagagaacagtccaagttctcaaatagttcgaaaccttttaagaaatcagaaatagtaggaaacattgcatctgaagtcacag

SEQ ID NO: 984923 - DNA, 120 bp, Artificial Sequence
  ENSG00000287975_11 (sequence is synthesized)
aatatgttaatattaacccgtgtggctggaataaatgtgcaagctgatgtgttaatctctgacgtatttggagatatttcctttatgtaaataatttaaactgtccacaagataacttca

SEQ ID NO: 984924 - DNA, 78 bp, Artificial Sequence
  ENSG00000287975_12 (sequence is synthesized)
aaaaaaaaatacatgatctattaaaaaaaaaaaagaaaacgtcattgggtctggtgcttcggaaaattgggatctgaa

SEQ ID NO: 984925 - DNA, 80 bp, Artificial Sequence
  ENSG00000287975_13 (sequence is synthesized)
tggctgatcatctgagatcaggagtttgagatcagctgggccaacaaagtgaaaccccgtctctattaaaaacacagaaa

SEQ ID NO: 984926 - DNA, 79 bp, Artificial Sequence
  ENSG00000287975_14 (sequence is synthesized)
tcagctgggccaacaaagtgaaaccccgtctctattaaaaacacagaaaaaaaaattagccaggcatggtgttgagcat

SEQ ID NO: 984927 - DNA, 120 bp, Artificial Sequence
  ENSG00000287975_15 (sequence is synthesized)
ccagcctggacaacaagagcgaaactccgtccccaaaaaaagaaaaacaaaggttaaaaaagacgttgctcagctattccacacctgcagggagtacaaagcatggcagatgggtttcaa

SEQ ID NO: 984928 - DNA, 120 bp, Artificial Sequence
  ENSG00000287975_16 (sequence is synthesized)
gatgggtttcaaaggtagcaagaaacaattttattaaaccagacgggagtagtaagagaagcttctaaaagcatagtcttacacagggccatggcatagatttgtgactacttcaatgta

SEQ ID NO: 984929 - DNA, 120 bp, Artificial Sequence
  ENSG00000287975_17 (sequence is synthesized)
attgaaatttaggagctttgtaatttgggttctaaaatttaataaaatgggaagcccaacagttctttaatttcattttaataaaggaatcttcattttatctaccatgctgtcttcctc

SEQ ID NO: 984930 - DNA, 120 bp, Artificial Sequence
  ENSG00000287975_18 (sequence is synthesized)
cctcccaactgtgattactggtagtcagaactagcaccaggctagcataaaattgaaggagaccctcacccaggcaccagcactgcatttgcgggggccctgaagtgaaggcctccttaa

SEQ ID NO: 984931 - DNA, 120 bp, Artificial Sequence
  ENSG00000287975_19 (sequence is synthesized)
atattgcacccagggctcctgaccctctgcaatggaagtgtggtgatttcattttcctaaaagcagaactttttggtgttttagatgaggtcaatcactttatccttctctttctgacct

SEQ ID NO: 984932 - DNA, 120 bp, Artificial Sequence
  ENSG00000287974_0 (sequence is synthesized)
aggagtataaagaccagtggtgacaattcttggagaatgagatggactcaggaaagtaaacgagaattgcactaggcataccaagcaccatgaagggagcactatatttgggagcatata

SEQ ID NO: 984933 - DNA, 120 bp, Artificial Sequence
  ENSG00000287974_1 (sequence is synthesized)
atgagtgcaatcctagactgggtgacagaaaaggcttccctacaggaactgatatttaagctgagagctggaggatatgtaagactgagccaagcaagcagaaggaggaagcgtgttcca

SEQ ID NO: 984934 - DNA, 120 bp, Artificial Sequence
  ENSG00000287974_2 (sequence is synthesized)
ggcagacggacagcaaagaaggcaacgtgctttgccgtgagcctgaacggaaggagagctcttctccaatctcctgcgtcctctggttggcttcggaccacacctgccattgaactttcc

SEQ ID NO: 984935 - DNA, 120 bp, Artificial Sequence
  ENSG00000287974_3 (sequence is synthesized)
atagctggaatagagaacacttggcttccacacccctgttctggcgtgttcactacactaacaacctcttctgttacgtacaaggtaattaaaggatgagcttagaagctggcacctttc

SEQ ID NO: 984936 - DNA, 120 bp, Artificial Sequence
  ENSG00000287974_4 (sequence is synthesized)
ctttaaagtaaaaggcagcttacgttttgctagtgacagtctcctgtaaaaataactctcttattagcgatgacataagagccactgaaaccatctccgctcatggttaagcttggagcc

SEQ ID NO: 984937 - DNA, 120 bp, Artificial Sequence
  ENSG00000287974_5 (sequence is synthesized)
gcccttctgaggccctttctccaatacatgctgacaaaatcggctccctgtgcgccaacatcaacataatgacctcaccgtggatgagtctatgagtctctgaaggctgaatgattcttc

SEQ ID NO: 984938 - DNA, 120 bp, Artificial Sequence
  ENSG00000287974_6 (sequence is synthesized)
agaacacgctgaggagatgagctagaggcatgaataaattgcttgtacttttccttgctggctgtaaagccagcattgctctatctaatggaatgtctacaaaaagccacaagaactcca

SEQ ID NO: 984939 - DNA, 120 bp, Artificial Sequence
  ENSG00000287974_7 (sequence is synthesized)
tcgttgttgttgttgtttttctttttaggctgataggttttctttttcatctcctgcagcaggtcttgtttgagagaactttggaatgtgtagtgaccactaagagcatggaattgaatt

SEQ ID NO: 984940 - DNA, 120 bp, Artificial Sequence
  ENSG00000287974_8 (sequence is synthesized)
ccactaagagcatggaattgaattagctgattgattacaaagagagagcctcaatttaaaagatagaggcccagaccgggcaaagtggatcgttcctgtaatcccagcactttgggaggc

SEQ ID NO: 984941 - DNA, 89 bp, Artificial Sequence
  ENSG00000287974_9 (sequence is synthesized)
accagcctgggcaacatagtgagaccttatctctactaaagataaaaaagctacctgggcatagtggcacatgcctgtggtcctatcga

SEQ ID NO: 984942 - DNA, 120 bp, Artificial Sequence
  ENSG00000287974_10 (sequence is synthesized)
aggatcactcgagtccagaaagttgaagctgcagtgagctgtgatcatgcccactgcactctagcctaagcgacagtgagaccccatcaaaaaagaaaaaaaaaaaagtaaaagacagag

SEQ ID NO: 984943 - DNA, 120 bp, Artificial Sequence
  ENSG00000287976_0 (sequence is synthesized)
aggtcctacccacatggctctctgaggagctgtgcgagtttaccttcgacgatggcccacagaaacgtagtgatggtggctggctttttaaagaagtgaaggtggtaccttgaaaactaa

SEQ ID NO: 984944 - DNA, 120 bp, Artificial Sequence
  ENSG00000287976_1 (sequence is synthesized)
ggtgttaggtgttcctaggccgatggatacacccaaggatgaaagatggttaggagcctggaccaagtcctattattcatggaatttgttctgcaaattaaaaaaaatgaccccttgaaa

SEQ ID NO: 984945 - DNA, 120 bp, Artificial Sequence
  ENSG00000232849_0 (sequence is synthesized)
agtgtgggagagaccttagctccacgcgtcatgtctcccaattcctctgattttagcctcagctgatggacagtgccacacaagttctgattgacagttactcacctcaagcatactcca

SEQ ID NO: 984946 - DNA, 120 bp, Artificial Sequence
  ENSG00000232849_1 (sequence is synthesized)
tacatctttctgccaagaacattctgcaacattatgaagtccatgtgccctatatgcaagtaaagccagaagtcctggagtaatacctccagtagcagcccctattgggaaacagaagcc

SEQ ID NO: 984947 - DNA, 120 bp, Artificial Sequence
  ENSG00000232849_2 (sequence is synthesized)
agaaataaggaaaaaaacaacggactggattttcctagtttctacagatgcaagagccaaatgacttttgagatcaagcttctcaatacaaagcccagatcaagcttttcaacacaaaaa

SEQ ID NO: 984948 - DNA, 120 bp, Artificial Sequence
  ENSG00000232849_3 (sequence is synthesized)
gccatcagcctcaacaaaatcctaggaagcagaattcaagcagtgaaggataatgttttgtttaagttgtcagtgttcacccttcaaaaatgtaaaatataattccaaatcaaaatccaa

SEQ ID NO: 984949 - DNA, 120 bp, Artificial Sequence
  ENSG00000273073_0 (sequence is synthesized)
taatagtttactgttgtaattcatttataacatgtgttggacaacttagctaatatgttaattgatttatacaattcctttcaattttatctaaaaatagcagaccaaaattaaataaga

SEQ ID NO: 984950 - DNA, 120 bp, Artificial Sequence
  ENSG00000273073_1 (sequence is synthesized)
aagttacataagattccatttgagcatacataaggccatgatactttaatgtgaaccaccatttcttggaagaaagaagacatccaaatgtccgattcagagagaaagttcctggccagt

SEQ ID NO: 984951 - DNA, 120 bp, Artificial Sequence
  ENSG00000273073_2 (sequence is synthesized)
actctggatatactggaatagaaagcaacttacataccagaacaattaaccggaacaaagggagatatttctttgtgcagattctgtaagggctgtgcagaaatgtgtatggtcaaagcc

SEQ ID NO: 984952 - DNA, 120 bp, Artificial Sequence
  ENSG00000273073_3 (sequence is synthesized)
aagcagttccatttacagctctgttttttatgtagttacaacatgatgtgattgtagctttttaaactatgaaacctctgagagattgtaccttctagttgaaataaagtatttataata

SEQ ID NO: 984953 - DNA, 120 bp, Artificial Sequence
  ENSG00000273077_0 (sequence is synthesized)
gctttgctgaggaacatggaagggggaaaacaccgactgtgataaacaccagcaggatgactggagtccgctggaacctggaatggagttttctgacagcaaaggattacaggagcgtaa

SEQ ID NO: 984954 - DNA, 120 bp, Artificial Sequence
  ENSG00000273077_1 (sequence is synthesized)
caagcaggttacccaccaatatccctttaaacaccaaattatggactattaggccactgcttcaaggcttctacaaatgtgaaaccttgacaaattcccaaataaaagccataaaaccaa

SEQ ID NO: 984955 - DNA, 120 bp, Artificial Sequence
  ENSG00000273076_0 (sequence is synthesized)
tcccagaccaggaagctgtttttattttaacttcatgcaaatgttgctaatacaagatatattcatttttttaacttacccttttttacaaaaaagatggttctgaaattgaactgtatt

SEQ ID NO: 984956 - DNA, 120 bp, Artificial Sequence
  ENSG00000273076_1 (sequence is synthesized)
taatgtctttaatggtgaaaaaaggaaaagtcatagatgacatgtcattattttgtaaaataataagatcatggtctggtactcactttggcagcacatataataaaattggaaagacca

SEQ ID NO: 984957 - DNA, 120 bp, Artificial Sequence
  ENSG00000225708_0 (sequence is synthesized)
ctcagagtctgcatggcagtcaccattgtcttgacttgggaaagaatctgacccccgcaggtaaggggaagagccagggtctacgctcatcttccgaaggtgtttttcacctctccaagt

SEQ ID NO: 984958 - DNA, 120 bp, Artificial Sequence
  ENSG00000225708_1 (sequence is synthesized)
cccggtcacttcatctcttagatgggagttaatttagtcaacaaatattgattgccatgttcctatgtgttggacactggggtttagtggtgagctagatggacatggtccctgttctca

SEQ ID NO: 984959 - DNA, 120 bp, Artificial Sequence
  ENSG00000225708_2 (sequence is synthesized)
caatgctctcttttaaataagagaggtgaacaagaagtgaataaatgaatctacgcacagtgcgatggctgtcaggcagagaaaggtgctataaagaaagatccttcaatcaggggctgc

SEQ ID NO: 984960 - DNA, 120 bp, Artificial Sequence
  ENSG00000225708_3 (sequence is synthesized)
tgctgagcttatgatgatttttcttctaaaggtcagcaactcattggggctgatggcgtccctgccctgggcagacaggcaggacttgctcatgagtctctgtatcactcagctccagga

SEQ ID NO: 984961 - DNA, 120 bp, Artificial Sequence
  ENSG00000225708_4 (sequence is synthesized)
aatgaaagagactcgcagtgcagtcccaatcaatgtccgtcggccgtctctgtcgataactgccgggctgtccaatctttcccctgatagaaaggcgcctgggggtcagcctgaagaagc

SEQ ID NO: 984962 - DNA, 120 bp, Artificial Sequence
  ENSG00000225708_5 (sequence is synthesized)
tctggagggaagaggcggctgtttgattcagagcctcctcgctgggctggaattaacctggctctttctctaatgaaactgactccaagggtccctgtgtgctagagattcaatggccct

SEQ ID NO: 984963 - DNA, 120 bp, Artificial Sequence
  ENSG00000225708_6 (sequence is synthesized)
taggagaagcaatgatgagaggtaatattaaagcagtgtacacatgcagcctcgaattcctaaccacgctgatgatgttttcaaggtgctttgagccctgtaggaagcagcacctgtctg

SEQ ID NO: 984964 - DNA, 120 bp, Artificial Sequence
  ENSG00000225708_7 (sequence is synthesized)
gcatgatgctgaatgcacagtagaaacagtgaatgcagggagagtagaccctgggctgcctttcctatctactgatgaagagatcaggccttaagaagcttagtgacttaaccacgatgt

SEQ ID NO: 984965 - DNA, 120 bp, Artificial Sequence
  ENSG00000262358_0 (sequence is synthesized)
ctcagaaggacagtgtccacattcatcctgaccaccagctccatctacgagagagagcccaaagctgccccctgggcgatggagtcacaccgctgctggcctcttgggagtactcacttg

SEQ ID NO: 984966 - DNA, 120 bp, Artificial Sequence
  ENSG00000262358_1 (sequence is synthesized)
gtgggtctcgttggccaaagaccgtctttcattggaactaggaataagagtgttagttcatagcacacctgctttgtacatagcaagtgcttcttaaaaagggcttcgctctgttgccca

SEQ ID NO: 984967 - DNA, 120 bp, Artificial Sequence
  ENSG00000285536_0 (sequence is synthesized)
gcacttgcactgtagctcaggaaccttggaaacagttctcctgtttgtcaaacatcgccagacatccaattctaggagagattggaacagaacttgggctgctctggagagcccctcttt

SEQ ID NO: 984968 - DNA, 120 bp, Artificial Sequence
  ENSG00000285536_1 (sequence is synthesized)
atctcagaatgttgcattgttagcacattctatagttattcttgagaactatagacaagaaatgagagagaactgggatagtctaaggccacatggagatctgtcttgcactatgttgac

SEQ ID NO: 984969 - DNA, 120 bp, Artificial Sequence
  ENSG00000285536_2 (sequence is synthesized)
ttagtttagaggccccggctggagaggagtcaggcccttttcttgtggggtcaattaagtccgatcctcaattacctccttgtttgtctctcagacccttggccgctattcagtcgccat

SEQ ID NO: 984970 - DNA, 120 bp, Artificial Sequence
  ENSG00000285536_3 (sequence is synthesized)
gctcccacgagtggccccctgtggcatggcacgctgtgttctccccagggaactctttaggagacaggatgtctgaggtcagaagttccccctggtgaccaaaccagttaagactgatga

SEQ ID NO: 984971 - DNA, 120 bp, Artificial Sequence
  ENSG00000285536_4 (sequence is synthesized)
gattcaagatccagctcacttcgcctttgaagaacctccaacttcattataatttattttccatactaaatgacactcccaccagtgccatgacagtttataatcaccatgacaatgacc

SEQ ID NO: 984972 - DNA, 120 bp, Artificial Sequence
  ENSG00000285536_5 (sequence is synthesized)
agaagaaattatgaaaggacaaaaaggaagaccacaactccggttctgaggaattctccacccattcccagaaaagacaagaatactcctccccttgtttttaatgcccaaacccttcat

SEQ ID NO: 984973 - DNA, 120 bp, Artificial Sequence
  ENSG00000285536_6 (sequence is synthesized)
taaagatgtcccatatctgtgacttcctgtctctcattaattgagaagttaatctgtgagtcaagctcccacttcttaagtccatggccattgaataaagcctgcactgcttgatgctca

SEQ ID NO: 984974 - DNA, 120 bp, Artificial Sequence
  ENSG00000285535_0 (sequence is synthesized)
gggagaagggctttcccaggcaggcaagttcctgatgggtggggagtggatagggagcagcaggtggcacggggtttctgtgaccgggacctgtgatcctcttgcctttgggcagccagt

SEQ ID NO: 984975 - DNA, 120 bp, Artificial Sequence
  ENSG00000285535_1 (sequence is synthesized)
gggtccacaagccatccaagggcaaagtttgtgcttttagaaatttctttccgaggaagcgattagccagccagacctgttgtccttttgcaagcagcaaattacccaggaaaatgtaat

SEQ ID NO: 984976 - DNA, 120 bp, Artificial Sequence
  ENSG00000285535_2 (sequence is synthesized)
tacccatttgctttgttattagtgcacagctaagaagattgaagcaatcgcccctttcatggtatttcaaagcttactcacacgatgcatccctgatattaaacacaatgagactttttt

SEQ ID NO: 984977 - DNA, 120 bp, Artificial Sequence
  ENSG00000285535_3 (sequence is synthesized)
gaattcaattaagcatttgcctactgtgactctttattcattgcaaattgtctcagtaaataatcttcatcaaaagtcagaaccaatccccattagttgtttagattaattaatgggtcc

SEQ ID NO: 984978 - DNA, 120 bp, Artificial Sequence
  ENSG00000285535_4 (sequence is synthesized)
ccctggagccacccaaatcaattcaatttgaacgtcaacaacttggcgatggagtttcccaggttggcattaagacaatattaaacctgcaataagtcacatttaaaatgttaattcaga

SEQ ID NO: 984979 - DNA, 120 bp, Artificial Sequence
  ENSG00000285535_5 (sequence is synthesized)
gaagctctccatttagagcatttaattaaatccttaaataaactgcctgggctcagtaccagatggttctgcgttttcatggcagcacaaaaccttgaagtcattgtgggaagtaatatc

SEQ ID NO: 984980 - DNA, 120 bp, Artificial Sequence
  ENSG00000285535_6 (sequence is synthesized)
ggaggcgcggtgaagacaaccaggatatatagagtaataaaatctaatctcgtttccagcggggagattcagtgtatgtacacaacccgggctcaaattgtaagttaattacattaaccc

SEQ ID NO: 984981 - DNA, 120 bp, Artificial Sequence
  ENSG00000285535_7 (sequence is synthesized)
cagtgtactccaggatctgagcagccagagatgaaattagtctttttcctatcataagattcttttcaacttcactatattaatttttagccaaatactcactcataaggaaaattgaag

SEQ ID NO: 984982 - DNA, 120 bp, Artificial Sequence
  ENSG00000285535_8 (sequence is synthesized)
ggagaagaaatgaagacgccaagaagaccctcgtctctgcccattttcccccctgccagcctagggttaataaaggacctaatctaggaaatgtagtccttggagcaaacagcctcccaa

SEQ ID NO: 984983 - DNA, 120 bp, Artificial Sequence
  ENSG00000285535_9 (sequence is synthesized)
gggtggtggagggtgctgggggaggagacagatggcctctgagagcagttaggccttcatgtcaggggcaggtgaggggcccaagtgtcccctggcagcaggattacctctgtccgcccc

SEQ ID NO: 984984 - DNA, 120 bp, Artificial Sequence
  ENSG00000285535_10 (sequence is synthesized)
ctgggtggcccagaaatctccatggttcagcctcttaatctccctactctgaggagacaagtcacacttctcggtctttcccttgggatgtcaagagggaccactggctcctctgtctgc

SEQ ID NO: 984985 - DNA, 120 bp, Artificial Sequence
  ENSG00000285535_11 (sequence is synthesized)
caacccggagaccctcaggtagcacccttagttactgcagtggtcccgtggtgactgaagatctaacgcaaatttcttttaaaacagcttcctccaaaagtctatcaattctccaacaac

SEQ ID NO: 984986 - DNA, 120 bp, Artificial Sequence
  ENSG00000285535_12 (sequence is synthesized)
taagaaaaactacacatcacccattcagtcttgggagcctgcattcccaaggggctgtgtctcccactgcagtcccatcaccctgccatctggggaaagaaagcaaaccgaaaaccttag

SEQ ID NO: 984987 - DNA, 120 bp, Artificial Sequence
  ENSG00000285535_13 (sequence is synthesized)
aacagtaaaagcattcatcgcgtggccggctgaggcttgagcttgctggagaagtgaggtttctaaagagctctgccccactgacacctcaagctgccctgactgctcctccctgagctg

SEQ ID NO: 984988 - DNA, 120 bp, Artificial Sequence
  ENSG00000285535_14 (sequence is synthesized)
agaggtgccatcagctgtcagacctggcctcagggtaacaggcaacgaaggcacagggtcagaaggatggaaggctggagttgctgtttctgctgctacttgggtagaatctgccgggaa

SEQ ID NO: 984989 - DNA, 120 bp, Artificial Sequence
  ENSG00000285535_15 (sequence is synthesized)
atgaagccagcacagcggagttgagagatggtgagaggttcttggagacgttgtctgctcatttgagtccagccatgtggaacattctggactttttagttatatgaaccacaacttgct

SEQ ID NO: 984990 - DNA, 120 bp, Artificial Sequence
  ENSG00000285535_16 (sequence is synthesized)
gtgaaccactgcgctcggctttgccacgatcagcttggctttttaaaactttagttttgtttttattactccatacctcttcaactctcagtaagtcactagtggcctgaaacaaaatgt

SEQ ID NO: 984991 - DNA, 120 bp, Artificial Sequence
  ENSG00000285535_17 (sequence is synthesized)
aagtgcgctagggagcttcctctgtgggatgagccattttataacacaaaaccttctgccacacggatcgccttttcatcattaatttgtctggtaaatatcacattagtccaggcttta

SEQ ID NO: 984992 - DNA, 120 bp, Artificial Sequence
  ENSG00000285535_18 (sequence is synthesized)
caaaatcagatactagatgtacttcccatgaaaacatgaacaaatctgcatttggaagatctgggtggcaggacacagaggtgagggacctttccggagggtccaagtcctccctctgga

SEQ ID NO: 984993 - DNA, 120 bp, Artificial Sequence
  ENSG00000285535_19 (sequence is synthesized)
ggacagtcactatctagaactgtgtctacaggaactgttttcatgcatccagatgtggacatgaaggaccagcccacggtaatgactggctaagtcaattccatacatatttactgagca

SEQ ID NO: 984994 - DNA, 120 bp, Artificial Sequence
  ENSG00000285535_20 (sequence is synthesized)
ttccccatgccctgggcgctgagagggtccccctaggaagcaggtgcatcctgcccttggtgagattaggcttctgtcgtactcagtcagtgcaatatcgtcaactcccaagacccctac

SEQ ID NO: 984995 - DNA, 120 bp, Artificial Sequence
  ENSG00000285535_21 (sequence is synthesized)
ctagccaggtagaggagaggattggagagaaatcattaagtcacttcagcccttttaattagctttttccagtctcaagtgctactgcaggtatgagggaagtgaagccctgagcgctgc

SEQ ID NO: 984996 - DNA, 120 bp, Artificial Sequence
  ENSG00000285535_22 (sequence is synthesized)
tccggaggatttggcatgcgagtgagtgggaaagaaagaaagctccttcaatgactgccgtggaaaaagtgccccggattggcgcatctgaagctgacgtgcgcacgggtcacctgggag

SEQ ID NO: 984997 - DNA, 120 bp, Artificial Sequence
  ENSG00000285535_23 (sequence is synthesized)
tcctgtcaaaatgtaggttctgatttgctggattggggtgtggcccaacaacctgcatttccggtttgcccaggtgatgttcatgccactgatcctgagccacactttgagaagccagct

SEQ ID NO: 984998 - DNA, 120 bp, Artificial Sequence
  ENSG00000285535_24 (sequence is synthesized)
cacaggaaatactctttgagctgctgaacactttagtgttcagccccttaacctaaggaggagctacacaaatgaagaactgtggaactgacctcagatgctctctcgttggaaattggc

SEQ ID NO: 984999 - DNA, 120 bp, Artificial Sequence
  ENSG00000285535_25 (sequence is synthesized)
acgcaaaccacaaccacgatggcggcttctgagaggtggaggagaggggtgtggcaaagcagcaaggaagggggtctggggtccagcccagctgggacagtgaaggttccctgttcaagg

SEQ ID NO: 985000 - DNA, 120 bp, Artificial Sequence
  ENSG00000285535_26 (sequence is synthesized)
ggactctgttccttggacaatgattgcttcctttatgctctggagtccagcagagactgacacacagttggggctaaacacgtctgagggtgatgaaactcccatttctgacgccgtcaa

SEQ ID NO: 985001 - DNA, 120 bp, Artificial Sequence
  ENSG00000285535_27 (sequence is synthesized)
cttgttttctgtaatgttagccctgccatattccagctcgacagagcttgggcagcccgaggtggtgactgtatttggccatcagccatgtcccttgcagggccagtctctgaggtgcca

SEQ ID NO: 985002 - DNA, 120 bp, Artificial Sequence
  ENSG00000285535_28 (sequence is synthesized)
tgagaccttctgtgcctggcaagccggggcacttcggagaatggcagctgcctggtttctcaggggagcaactacattcctaagtcgcttggggatcgcttgacttccctcattcattca

SEQ ID NO: 985003 - DNA, 120 bp, Artificial Sequence
  ENSG00000285535_29 (sequence is synthesized)
cccatccttccatccatctattccttcatccagcaaattggaccccttccgtgtgccagacactgttctgagcagaagcacctgcccttgaggaagtgacactccagtggggagagacaa

SEQ ID NO: 985004 - DNA, 120 bp, Artificial Sequence
  ENSG00000285535_30 (sequence is synthesized)
gtaagctcacaaagatctatctgcaaaatcaaattccaggtagtgatcagtgccacgaacaaaaataaaaatgaataaagagatgtaaaatgatttccttccccaagggcagaggattct

SEQ ID NO: 985005 - DNA, 120 bp, Artificial Sequence
  ENSG00000285535_31 (sequence is synthesized)
ttctagcaggttatttggaaaagttccctctgaagaggtgacatttgatcattgttaaagtcacatgcatcattgtgaacatttcacaaaacacagaagaacctaatgctttcgcacaaa

SEQ ID NO: 985006 - DNA, 120 bp, Artificial Sequence
  ENSG00000285535_32 (sequence is synthesized)
ccatcatctagaaatcacaccatctcaacatcttgtcgtttaaaaattgatatataataatggtacatatttctggggtccctgtgatattttgatacatgcagacaatgtgtaatgatc

SEQ ID NO: 985007 - DNA, 120 bp, Artificial Sequence
  ENSG00000285535_33 (sequence is synthesized)
aaatcagggtaattaggctatccatcacttcaaacatgtatcatttctttgccaatgccttgtcttttgtcgtcttaaagtacagatttgcatcatgctttttaaaatttaacattacac

SEQ ID NO: 985008 - DNA, 120 bp, Artificial Sequence
  ENSG00000285535_34 (sequence is synthesized)
tataattattttgtagctgtgtttatgtttttctgttttcaagtatcaatatatagtatggatttttaaaaaattggtactgtaaatgtacatgaagtttttctgtctttacaaaagaag

SEQ ID NO: 985009 - DNA, 120 bp, Artificial Sequence
  ENSG00000285534_0 (sequence is synthesized)
cagctggggtttagtcctgttttctcctcagagcagaagtcctgggatgccgttctggactgattgtcagttttttctcctgtccttgagctattctaatgccagacatctgtggcttta

SEQ ID NO: 985010 - DNA, 120 bp, Artificial Sequence
  ENSG00000285534_1 (sequence is synthesized)
cacagccaggctttcagttagagaacttggttagctcaggtcaacaaatgctgctctgagaacactgactcccatgtggggagactctgcacctggagctccgggagagccggctcaggc

SEQ ID NO: 985011 - DNA, 120 bp, Artificial Sequence
  ENSG00000285534_2 (sequence is synthesized)
ctcttcctgctatccagggaactgcagtggcgttggagggccttgctggggctggggctggggagaagggattccaaccctactgataattcgtttggaaacaccgggctgtggatttca

SEQ ID NO: 985012 - DNA, 120 bp, Artificial Sequence
  ENSG00000285534_3 (sequence is synthesized)
gaagttcttgggcagcctgattaccactggcagtgagccggggacgaagccgaagctatgagtgacagacggaaagaactgggggctttggtgaaccagagaacacttagctcctccagc

SEQ ID NO: 985013 - DNA, 120 bp, Artificial Sequence
  ENSG00000285534_4 (sequence is synthesized)
cctgaagcaggcgtcaccgcagggcttatggtcctaagagccacttagtttccttattcattaaactagtttaatttgggttttctgcatcctggaggacaccaagtcggtgtgcggagg

SEQ ID NO: 985014 - DNA, 120 bp, Artificial Sequence
  ENSG00000285534_5 (sequence is synthesized)
gaccctgtagacacgtgtgcaaagaataagccgacgatcatggaatttctgatgacgccactgacacgtgggatggaggcctccttcccagggcacccctacactcatgacaatgaatcc

SEQ ID NO: 985015 - DNA, 120 bp, Artificial Sequence
  ENSG00000285534_6 (sequence is synthesized)
gaagaagtaaagaagatgaaaatgaggaagataaaaaacaaactgaagacacaatgtgaaccctgggaattcaaggctgaatagtacgaagtcctttcctcacagagttcaggacccagg

SEQ ID NO: 985016 - DNA, 120 bp, Artificial Sequence
  ENSG00000285534_7 (sequence is synthesized)
agtggaggccagataagggttcattgagcacagacatattagaaaataacaaaggaaagaggatactttttggcggtggtattgtctaaaacatgagaacacttcaagaccaagaccaag

SEQ ID NO: 985017 - DNA, 120 bp, Artificial Sequence
  ENSG00000285534_8 (sequence is synthesized)
atgggggtgtctggcttatggtcttcagagaaggagaaagtcgtgtgcgtgcagaggctgagggccacacagcaagctgtgatttcatagcagtacagagttgtgtttgttccagactgc

SEQ ID NO: 985018 - DNA, 120 bp, Artificial Sequence
  ENSG00000285534_9 (sequence is synthesized)
gctggccttgaggaaaagacaaggatgtgtccaataattatgatgagactgaatatctaacaaagctagtaggggtttattttaatgtccttccttaaggttcctgtagcttctgttttg

SEQ ID NO: 985019 - DNA, 120 bp, Artificial Sequence
  ENSG00000285534_10 (sequence is synthesized)
ttctgagtagcttttgaagtttctctgctctgtgacagtcccatctctaaatccatctctaaacccaacgtaactgacctgggtccgctcccagctctggaaaattacattttcttggac

SEQ ID NO: 985020 - DNA, 120 bp, Artificial Sequence
  ENSG00000285534_11 (sequence is synthesized)
aattcacttaatttctttcttacattgttaaaaaaaatctatgcggtgagggttttgaaagtacgtacttcaaagaattatttagagtaataagtaaaataattcatatgcttagaatac

SEQ ID NO: 985021 - DNA, 120 bp, Artificial Sequence
  ENSG00000241921_0 (sequence is synthesized)
aagctctgacatgggttaaaatcctttgaatgatactcttgatccaagacttgttttaacctggaccatctggattggctgtatccatagctcagaggtgattaggaacctgggaagccc

SEQ ID NO: 985022 - DNA, 120 bp, Artificial Sequence
  ENSG00000241921_1 (sequence is synthesized)
tccgcttttagagtaaatattgcaaccagagcagacgaggaaaacctaccactaatgttgaagaaacccaacattatgacaggtgagaatcacataaattggtctggactggtagagctc

SEQ ID NO: 985023 - DNA, 120 bp, Artificial Sequence
  ENSG00000241921_2 (sequence is synthesized)
gacacacacagctgccaggagtatctatggagtgacaataagaagtgtgcactgtgaaaattgacatcctgagtacataagagctgtcaacatctaggggaagactgtgaccttacttcg

SEQ ID NO: 985024 - DNA, 120 bp, Artificial Sequence
  ENSG00000241921_3 (sequence is synthesized)
tagccctcactcctccccaagggacaagattaagatatttagaagccctacacacttaaggactgtggtgcttcattcacatgtcatccttaatgaaaacaacatcagagagtaaaataa

SEQ ID NO: 985025 - DNA, 120 bp, Artificial Sequence
  ENSG00000241921_4 (sequence is synthesized)
atgtaaagatgttcagcgaagtttgtccaaaaatactattgccttaagcacaatggtatagtttggagatattccaggttctgttccggaccattataataaagcaaatatcacaattaa

SEQ ID NO: 985026 - DNA, 120 bp, Artificial Sequence
  ENSG00000243276_0 (sequence is synthesized)
accttcggccatgattgtaagtttcctgaggccttctccgcctgcagagctataatcctctctccacaacttgataatgcacaaactgcaaatcttctggtactcactgctgcaagcaaa

SEQ ID NO: 985027 - DNA, 120 bp, Artificial Sequence
  ENSG00000243276_1 (sequence is synthesized)
cttgaagtctttctgagcctgactcttcattcctgccttgtgtgacccagggatggaggactgccctcccaactcattatcctctttgcccaggagctatctgcttcatcgacatggcag

SEQ ID NO: 985028 - DNA, 120 bp, Artificial Sequence
  ENSG00000243276_2 (sequence is synthesized)
ggaacgtggctgaacacagaggactcatttttgcagcttccctaccagagagagagagacaccctttttacccgagttctgagttgaaatatcctagaagagaactctgattggcctggc

SEQ ID NO: 985029 - DNA, 120 bp, Artificial Sequence
  ENSG00000243276_3 (sequence is synthesized)
ttgggtcacatgcctgtccttgagttgatcaactgtgattagttataagtgtactcattagtaacttcccctggaaccttagatttgatgtggggtaagacttccaaaaacaaacaaaaa

SEQ ID NO: 985030 - DNA, 120 bp, Artificial Sequence
  ENSG00000243276_4 (sequence is synthesized)
aacaatataaaggcagcacaagtagcaaagagttaataagctgtaatttcaggagcactcccttattgtctcataattccttggactacctccaatagttaagaatcttagtaataacac

SEQ ID NO: 985031 - DNA, 120 bp, Artificial Sequence
  ENSG00000243276_5 (sequence is synthesized)
tctgaaaaaggcaacttgtgaaactcacttgagtttaaatgactggtaggccatctcttttctgagatcagaaccttttgtttgcagagggagaaagaaataggatggagaaggcagact

SEQ ID NO: 985032 - DNA, 120 bp, Artificial Sequence
  ENSG00000243276_6 (sequence is synthesized)
tagagtgtctggaggaagtaggatgcaggaattctatgccactgccactcctttgtcgtttcttggtaccaatttctccctgtcaagctggtagcgttactgaggtatcaataccaccaa

SEQ ID NO: 985033 - DNA, 120 bp, Artificial Sequence
  ENSG00000243276_7 (sequence is synthesized)
tagggccatagaggttgcatatctccatcactcacattataccctatagatttctagaatgttttacaacgtcattgtgaatggtggcttctggagttaaataatggggcagtctacatt

SEQ ID NO: 985034 - DNA, 120 bp, Artificial Sequence
  ENSG00000243276_8 (sequence is synthesized)
gattatcaaatgtgcatacttgcttcatttcaaaagctttattttattcttattatgtatataatacatacatctgtggggattagtcctaaaatatcaaaataaaaatattccattaaa

SEQ ID NO: 985035 - DNA, 120 bp, Artificial Sequence
  ENSG00000243276_9 (sequence is synthesized)
attggtagccttgggagagaggtgtggggatttgctgggaaagcacatgagaaaactttctagatgatgtgtcctagaaacaaccacatgctggagaatggaattccataaggtactctc

SEQ ID NO: 985036 - DNA, 120 bp, Artificial Sequence
  ENSG00000243276_10 (sequence is synthesized)
ttagataaaggaagtgccagccatcctgttgccatctgctaaaatcctcagcccacctgcatagtgaacagcattcattgttttccagaaatgtgcaagaaccacagtctcccccaagac

SEQ ID NO: 985037 - DNA, 120 bp, Artificial Sequence
  ENSG00000243276_11 (sequence is synthesized)
aagtcaactgagactccctgtggttttccccaaaacctgataataagtcaagagttaagaaggtatggagaggaaattaagctggagtgcactttggtcccagctccactacaacactat

SEQ ID NO: 985038 - DNA, 120 bp, Artificial Sequence
  ENSG00000243276_12 (sequence is synthesized)
ttctagcaaaagaggtttcatggagagcttacttcctcaagttcactttggtcttaatgaacggttaagtctcatgggtggaacacagattatctacctgtgctttaactacaaagtagc

SEQ ID NO: 985039 - DNA, 120 bp, Artificial Sequence
  ENSG00000243276_13 (sequence is synthesized)
ctggtgaggcactgatggagatctaaaagcatcaggaccatctgggaaatcatggcctcaccaaatgaactaagtaaggaaccagtgaccaatcctggagagacataggagatctcttaa

SEQ ID NO: 985040 - DNA, 120 bp, Artificial Sequence
  ENSG00000243276_14 (sequence is synthesized)
ccagttgaccaatcaaccatcactctgttccatctagtcttactgaggcccactgatcagtagacctcctcgacattcaatgttcttctcccatcagctaaattatatatttattaggtg

SEQ ID NO: 985041 - DNA, 120 bp, Artificial Sequence
  ENSG00000243273_0 (sequence is synthesized)
ttttttcctaataggtgaaatttagctgtctttcggacagtggatatggaaatatcatttatgattatttcagatgggagatattcttggtcctggtgaattccatagcaggaatttaaa

SEQ ID NO: 985042 - DNA, 120 bp, Artificial Sequence
  ENSG00000243273_1 (sequence is synthesized)
acaggactctttgttgtgtctgcttggatcacttacagcccttggtacctgcctctttggaaggcacctccggtcacatcaggagcatggatggggccccacctgcatacacatgacttc

SEQ ID NO: 985043 - DNA, 120 bp, Artificial Sequence
  ENSG00000243273_2 (sequence is synthesized)
gcccctgattcctaaatcgagactatgaaacttctgtggctgccacctcagcctcagcctactctgcattggttctgaggagcactctgtagagttggaaataatttcccagagggtcta

SEQ ID NO: 985044 - DNA, 120 bp, Artificial Sequence
  ENSG00000243273_3 (sequence is synthesized)
gaacacatttaaggatgctgggcaaaaatattcattgaatcataatacttatgtggctcccaaaagcaggagacaccaacctcacaccatcaacagcaatggcatttctgtgttatttgt

SEQ ID NO: 985045 - DNA, 69 bp, Artificial Sequence
  ENSG00000215498_0 (sequence is synthesized)
aggaaatctggagcttaactgctggcttttgtctggagagcctccatgatccaagacatctgagaatac

SEQ ID NO: 985046 - DNA, 120 bp, Artificial Sequence; identical to SEQ ID NO: 881397
  ENSG00000215498_1 (sequence is synthesized)

SEQ ID NO: 985047 - DNA, 61 bp, Artificial Sequence
  ENSG00000215498_2 (sequence is synthesized)
aagaagatggtccaggagaagctcattccatgcttgttaaccaggcacatgctgtgtccct

SEQ ID NO: 985048 - DNA, 120 bp, Artificial Sequence; identical to SEQ ID NO: 881359
  ENSG00000215498_3 (sequence is synthesized)

SEQ ID NO: 985049 - DNA, 78 bp, Artificial Sequence; identical to SEQ ID NO: 881387
  ENSG00000215498_4 (sequence is synthesized)

SEQ ID NO: 985050 - DNA, 120 bp, Artificial Sequence
  ENSG00000215498_5 (sequence is synthesized)
ttatccccactgctcaggtggagaacctgaagggccaagggagtggccccagctcccgagttcctgaatgaaacagtgaaaacacgaacccaggagtgtggaccagtgctgacgctgaca

SEQ ID NO: 985051 - DNA, 120 bp, Artificial Sequence
  ENSG00000215498_6 (sequence is synthesized)
agtgctgacgctgacatgcacttagtcatggggtgttcaccaccacacacggagtccagcattcatgtataagccctaaagcaacgagcccaaaaggccccagacactgcccatcatcat

SEQ ID NO: 985052 - DNA, 120 bp, Artificial Sequence
  ENSG00000215498_7 (sequence is synthesized)
cccaaaaggccccagacactgcccatcatcataaagtggcctccgtggtcacacaacccagggcagttatagcctcatctccccacggaccgacatagtcatcagtgtgtcaaaagcaca

SEQ ID NO: 985053 - DNA, 120 bp, Artificial Sequence
  ENSG00000215498_8 (sequence is synthesized)
gcaggatgtgcaggtttgctacatatataaatgtgtgttatgagagttttttgtacagattattgcatcacccatatattgagcctaatatcagttatttttcctgatccaccccctcct

SEQ ID NO: 985054 - DNA, 74 bp, Artificial Sequence
  ENSG00000215498_9 (sequence is synthesized)
cagcccaactgaaacaaaatgttgctttaaaacaagtgtaaatctcatacatacaacaggcaaatgcagaagca

SEQ ID NO: 985055 - DNA, 120 bp, Artificial Sequence
  ENSG00000215498_10 (sequence is synthesized)
cttcaacctgggtagaagacatgagggaacctgtcactaaatcacggcagagttcaaggccacttgtagactatttcatgttacagaaggtggcctttagctactaagcaaaggcctctg

SEQ ID NO: 985056 - DNA, 120 bp, Artificial Sequence; identical to SEQ ID NO: 881394
  ENSG00000215498_11 (sequence is synthesized)

SEQ ID NO: 985057 - DNA, 120 bp, Artificial Sequence
  ENSG00000215498_12 (sequence is synthesized)
cgaggttttgtgcagtttattatcatccaggtaatcaggtgcaacccagtctgcctagccgcccccctatctctgctctgtgttttcatttaataaacattttggtctacttactatgtg

SEQ ID NO: 985058 - DNA, 77 bp, Artificial Sequence; identical to SEQ ID NO: 881396
  ENSG00000215498_13 (sequence is synthesized)

SEQ ID NO: 985059 - DNA, 120 bp, Artificial Sequence
  ENSG00000215498_14 (sequence is synthesized)
cgctaacgaggatactgtacacgacatcgctaacgaggccgccgacaagggcatcgccaacgaggatgccgcccacggcatcgccaacgagtacgccgcccacggcatcgccagcgagga

SEQ ID NO: 985060 - DNA, 67 bp, Artificial Sequence
  ENSG00000215498_15 (sequence is synthesized)
ggacgaccatccagggcatcgccaaggagtacgccgtccacggcatcgccaacgaggacgccgccca

SEQ ID NO: 985061 - DNA, 120 bp, Artificial Sequence
  ENSG00000215498_16 (sequence is synthesized)
gggcgccgcccagggcatcgccaaagaggacgccgcccagggcatcgctaacgaggccgccgacaagggcatcgccaacgaggatgccgcccacggcatcgccaacgaggacgccgccca

SEQ ID NO: 985062 - DNA, 65 bp, Artificial Sequence
  ENSG00000215498_17 (sequence is synthesized)
gcgccgcccagggcatcgccaaagaggacgccgcccacggcatcgccaacgaggacgccgcccag

SEQ ID NO: 985063 - DNA, 82 bp, Artificial Sequence
  ENSG00000215498_18 (sequence is synthesized)
tcgccaacgaggacgccgcccacggaatcgccagtccagggcatcgacaaggaggatgccgcccagggcatcgccaacgagg

SEQ ID NO: 985064 - DNA, 120 bp, Artificial Sequence
  ENSG00000215498_19 (sequence is synthesized)
aggacgccgcccagggcatcgccaaagaggacgccgcccacggcatcgccaacgagctgtatacgacatcgctaacgaggacaccctacaagccgtcgctaacaagtacactgtacacaa

SEQ ID NO: 985065 - DNA, 120 bp, Artificial Sequence
  ENSG00000215498_20 (sequence is synthesized)
ttatacgacattgctaatggcaccgacaaggcacgctaacgtggacgctgtacacgacattgctaatgaggacagcgtataagacatcgctagtaactatcgcaagaacaaaaaaccaaa

SEQ ID NO: 985066 - DNA, 120 bp, Artificial Sequence
  ENSG00000215498_21 (sequence is synthesized)
gcacgctgtatacgacatcgctaatgaggacaccatacaaggcatcgctaacgatgacgctgtacacaacatcactaatgatgacaccgtataagacatcgctaattatgacgctgtata

SEQ ID NO: 985067 - DNA, 120 bp, Artificial Sequence
  ENSG00000215498_22 (sequence is synthesized)
accgtacaaggcacgctaacgaggatgctgtacacgacatcactaatgaggacagtgtacaagccatcactaatgaggacactgtatatggcatcgctaacgaggacactgtacaagcca

SEQ ID NO: 985068 - DNA, 120 bp, Artificial Sequence
  ENSG00000215498_23 (sequence is synthesized)
gacactgtacaagccattgctaacgaggacgctgtacacaacatcgctaatgaggacaccatataagacatcaccaatgaggatgctgtatatgacatcgctaatggcacccacaaggca

SEQ ID NO: 985069 - DNA, 120 bp, Artificial Sequence
  ENSG00000215498_24 (sequence is synthesized)
tgctaacgaggacgctgtagacgacattgcttataaggacaccgtacaagacatcgctaacgaggacgctgtatacgacatcgctaatgaggacgttgtatatgacatcgctaatgagga

SEQ ID NO: 985070 - DNA, 120 bp, Artificial Sequence
  ENSG00000215498_25 (sequence is synthesized)
tgctttacaagacatagctaatgaggttgctgtatatgacatcgctaatgaggacattgtatatgacatcgctaatgaggacgctctatacgacatcactaatgaggacgctgtatacaa

SEQ ID NO: 985071 - DNA, 120 bp, Artificial Sequence
  ENSG00000215498_26 (sequence is synthesized)
catcgctaatgaggacgctgtatatggcatcgctaatgaggatgctgtatacgaattcgctaataaggacgctgtatatgacattgctaatgaggacactgtacaagacatctgtaaaaa

SEQ ID NO: 985072 - DNA, 120 bp, Artificial Sequence
  ENSG00000215498_27 (sequence is synthesized)
agaagatgctgccaatgagccattgacactggagaatgatacgtaccctgaaataactcacttcctgaggaaaaagcgccatctctaggatttgattgtggagagcatatctgatgatgg

SEQ ID NO: 985073 - DNA, 120 bp, Artificial Sequence
  ENSG00000215498_28 (sequence is synthesized)
ggatttgtaggactttaaaaagcactcatgtttccatcctcactgttgactcctggcttaaagggatctcccggggtgagtgaggaggcgggatcggaccctggcagtctgacggcagca

SEQ ID NO: 985074 - DNA, 120 bp, Artificial Sequence
  ENSG00000215498_29 (sequence is synthesized)
cctgtgttcctctgcactgggccgtggatgacattacataccttgccactcccacggtcctgtgtgttccggatattttaaaataatggctataaggttgagcacttcaggatacgctgt

SEQ ID NO: 985075 - DNA, 120 bp, Artificial Sequence
  ENSG00000215498_30 (sequence is synthesized)
tttgctgtgtgcagatggaggcagtggctggagtgaatgaacggcaacacttgctggcaaccggcagaagctgagagacagggaacaggctctcctccagagcctccaggagccaggcct

SEQ ID NO: 985076 - DNA, 120 bp, Artificial Sequence
  ENSG00000215498_31 (sequence is synthesized)
ttggacaacttgaatgtgggcttctgggagaccatgcgtttctgttataagcagcccagtctctggcagtttttacggctgccccggaacactcatctatacctgtctgacaaggtcaag

SEQ ID NO: 985077 - DNA, 120 bp, Artificial Sequence
  ENSG00000215498_32 (sequence is synthesized)
ctccaaggaagggactctctacatatctacattgtttgcagattttacaataatcatttattcttgcatggctgatcattgttaaccaatacaaataaaataataaagaaatgacccaca

SEQ ID NO: 985078 - DNA, 120 bp, Artificial Sequence; identical to SEQ ID NO: 881385
  ENSG00000215498_33 (sequence is synthesized)

SEQ ID NO: 985079 - DNA, 120 bp, Artificial Sequence
  ENSG00000215498_34 (sequence is synthesized)
aagccttccaaaaagcatgtgaaaaggaagccctactctactaccaaggtgacttcagggagcacattcaatgccagtgaagagatcactattccccatgcaagggagttccagcaccct

SEQ ID NO: 985080 - DNA, 120 bp, Artificial Sequence
  ENSG00000215498_35 (sequence is synthesized)
ttgacactggagaatgatacgtaccctgaaataactcacttcctgaggaaaaagcgccatctctagggtacagaaacctgattctgggctccttttgggaaggaggatttggggtctggt

SEQ ID NO: 985081 - DNA, 120 bp, Artificial Sequence
  ENSG00000215498_36 (sequence is synthesized)
gagagcaaatgattttgcaagtataaaaccatgtccagagaggctgtagggatatctgtgagcccagaggaaacaccaggggatcctgtgcgaagcaccatggcttcagctagggtggga

SEQ ID NO: 985082 - DNA, 120 bp, Artificial Sequence
  ENSG00000215498_37 (sequence is synthesized)
ggagtgggtgggcctctctctaatgacttatcctggtgtttgtgtttctaaagatttgattgtggagagcatatctgatgatggggatttgtaggtaggtaactgctttccacgtaagat

SEQ ID NO: 985083 - DNA, 120 bp, Artificial Sequence
  ENSG00000215498_38 (sequence is synthesized)
gagggggcatgaaatcaaaacgaaacaggaaatatgtgtcatatcggatttggtcttttccgggtttattggcataatagttagaactgtctctctgggctatgagggtgctgtgttatt

SEQ ID NO: 985084 - DNA, 120 bp, Artificial Sequence
  ENSG00000215498_39 (sequence is synthesized)
ttgagtgtcacctgtggtgaacagaatctgagggacacaactctctcacaggcacttcctccaacctggagacagagttctcctggtgtgtgcccaggggtggaggagaaattgacagtc

SEQ ID NO: 985085 - DNA, 120 bp, Artificial Sequence
  ENSG00000273920_0 (sequence is synthesized)
agcataatccttaggccttagaggtcttgctcagacatttttctggagaggaatatttcccttccaattagtgaagtattgcaacagctgtgagagctagcccctaaagcccttctgggt

SEQ ID NO: 985086 - DNA, 120 bp, Artificial Sequence
  ENSG00000273920_1 (sequence is synthesized)
cccattctcattcatgtaggctgtgccatgttaatggtgcccagtgagccttctagctcacagcactctgttagtggtcctgagaaacagatccatctccttcgagctgccgttgcccac

SEQ ID NO: 985087 - DNA, 120 bp, Artificial Sequence
  ENSG00000273920_2 (sequence is synthesized)
ggacaggacagaacctaaggaggctcagggaagggacctgggagggaacattgcaaggaagagatgggccatggagaggaagtatacaaaagtgacccagacaaagagattctttgggct

SEQ ID NO: 985088 - DNA, 120 bp, Artificial Sequence
  ENSG00000273920_3 (sequence is synthesized)
ttcatccacgtgaatgtgctgcttttcctctcctacttcgatacttccttctgattttacacatgttttgggattattcatgggcctggatatgatataaaaattaaagatttaaaacaa

SEQ ID NO: 985089 - DNA, 120 bp, Artificial Sequence
  ENSG00000273923_0 (sequence is synthesized)
catgtgtttacttggattagtaattgtaccaatctacattttaaaggtaaaactagccattcattcttttgtttcagcagttgcctaattttattgtttaagtataatgtgagtgaagga

SEQ ID NO: 985090 - DNA, 120 bp, Artificial Sequence
  ENSG00000273923_1 (sequence is synthesized)
aacttcctagttagaaatctatgaatattaacttcttgtcttcactaaccagagttgttctcaactcataacacgtggtttggtaaaccatttgcaatgtaaacatagcagattttactt

SEQ ID NO: 985091 - DNA, 120 bp, Artificial Sequence
  ENSG00000273923_2 (sequence is synthesized)
atgaagaatcaccattttgtcattagagattacaacaaatgtagtttattctttttaccggtaatatcaatgtaagcaaaaattatactttttagctaagcatgttatcttcccagactg

SEQ ID NO: 985092 - DNA, 120 bp, Artificial Sequence
  ENSG00000273923_3 (sequence is synthesized)
gaggagttattatcttccatattttctctatcttccactatacaaagggaaaatagattggaattgtactggccattgctttgtaaagagaatataaatagcaataaaacataaagaaaa

SEQ ID NO: 985093 - DNA, 120 bp, Artificial Sequence
  ENSG00000273925_0 (sequence is synthesized)
gttttgaaaaactttcttttcctgggccttgttgctcaccatgtaacaacatcctcttacttttcctgtggtgggaaagtaccctgtagtactagcaaggtgcacccaggtagaggacaa

SEQ ID NO: 985094 - DNA, 120 bp, Artificial Sequence
  ENSG00000273925_1 (sequence is synthesized)
caggaatagttatcctacttgctcaggcttacatttttacacatgaaacatagtttcttttacatgtttatttacttatttgttctcaggaagactgacagctgggtgatgtgaaaggga

SEQ ID NO: 985095 - DNA, 120 bp, Artificial Sequence
  ENSG00000273925_2 (sequence is synthesized)
taatttcttgtgcatattcagctgctggattgcatacatcacatcactagcaacctgtgcagattggccaagggatggagtatgtggcattgggaacagagattgtccttggagatttct

SEQ ID NO: 985096 - DNA, 120 bp, Artificial Sequence
  ENSG00000273925_3 (sequence is synthesized)
gctgtattccctgcaacttcaggaccttcttgctcttgaaagttgcagtttcatattggctgctggaccagtcctgtatgatgtgccacttatcaataaaatgaattggtttctccaggg

SEQ ID NO: 985097 - DNA, 120 bp, Artificial Sequence
  ENSG00000286511_0 (sequence is synthesized)
acaactctttggaggaattttgctgcaaaggagagtaggaaaatggagtggtagcgagagggaaagatagatatgagcccaagaaagtattttctgtcttcttttttttttttttcttaa

SEQ ID NO: 985098 - DNA, 120 bp, Artificial Sequence
  ENSG00000286511_1 (sequence is synthesized)
gatgggagaaatcacagtggtcggtatactcatggaaagactccattagacagggacaaattgctgatgcagaagaaataaagaggacgttttgtgctatggacttggataggtgaaagg

SEQ ID NO: 985099 - DNA, 120 bp, Artificial Sequence
  ENSG00000286511_2 (sequence is synthesized)
aggcaggatctatcgcacagatggagagactggacttaggcgaggttccagctcacagttcagagaaacagaaggtggaggtagggtggctggacacaggtacaggccgtgccatccccg

SEQ ID NO: 985100 - DNA, 120 bp, Artificial Sequence
  ENSG00000286511_3 (sequence is synthesized)
gggaggacaagaaaaaagtaacaaaaataatttttggcttcaagcacccaacaatggaaatgctgaaacccatgtcctttaagtccttttcttctcctagcagagggccctctgcctaca

SEQ ID NO: 985101 - DNA, 120 bp, Artificial Sequence
  ENSG00000286511_4 (sequence is synthesized)
tggggcaccgtggtggccatttaatgtactcctgcttggtacccacctctgctctgccccctggtggccacagacaccattgctgctgcctcagcacagtttgaccttgttgctgccaag

SEQ ID NO: 985102 - DNA, 120 bp, Artificial Sequence
  ENSG00000286511_5 (sequence is synthesized)
agccacctctcctctcatcactgtccccactctcctgccatgcctcaggtggctgctggcagaagagcagtgggctttgtttcttcagaacatcacagcaaccactgtcttatcagctca

SEQ ID NO: 985103 - DNA, 120 bp, Artificial Sequence
  ENSG00000286511_6 (sequence is synthesized)
caccctcaggatcttactgccccttttcccaaaaatctccactccggcaaccctggccctgcatcattgaaggacatttaagtgatataacatattgttgcctcaaaaaagttttttccc

SEQ ID NO: 985104 - DNA, 120 bp, Artificial Sequence
  ENSG00000286511_7 (sequence is synthesized)
tcttcaacagctgggacaactggataaccacatgcaagagaatgatgtttggccactaaccacaccatacatacaaattaactcaaaatgaatcaaagacttaaatgtaagagctaaaac

SEQ ID NO: 985105 - DNA, 120 bp, Artificial Sequence
  ENSG00000286511_8 (sequence is synthesized)
aagcacaagcaacacatggaaaaaaagagatacattagacttcatcaaaattaaaaactcttttgtgcatctaaggacactatcaagaaaataaaaagaaaaactacagaatgggagaaa

SEQ ID NO: 985106 - DNA, 120 bp, Artificial Sequence
  ENSG00000286511_9 (sequence is synthesized)
acatttacaaaccatatacgaaaggatctaatatccagaatatttaagaagtctatgactccccaacaaaaagacaacccaatttaaaaatggccaaaggactcgaattgatatttttcc

SEQ ID NO: 985107 - DNA, 120 bp, Artificial Sequence
  ENSG00000286511_10 (sequence is synthesized)
ttccaagaagatacgcaaatgaccaacacacacttgaaaagatgcccagagctggacatggtggtatgttcctgtggtcccagttactcaggagctgaggcaggaggatcacttgagcct

SEQ ID NO: 985108 - DNA, 86 bp, Artificial Sequence
  ENSG00000286511_11 (sequence is synthesized)
aggatcacttgagcctaggagttcaagcctggagtaaactatgatctcaccactacattccagcctgagcaacacacggagacctg

SEQ ID NO: 985109 - DNA, 120 bp, Artificial Sequence
  ENSG00000286511_12 (sequence is synthesized)
gaaatgcaaactgaaaccaccttgaaatacttaacactcactagaaggactaggactataattaaaaacacagacaatagcaagtattagctagaatgggtagaaattggaatcttcata

SEQ ID NO: 985110 - DNA, 120 bp, Artificial Sequence
  ENSG00000286511_13 (sequence is synthesized)
cactgctgatgggaatgtaaaatggtgcagcaactgtggaagacagtttgatggttcctcagaattttaaacagaattactatatgacccagtaactcttggatggaataaaaactttgt

SEQ ID NO: 985111 - DNA, 120 bp, Artificial Sequence
  ENSG00000286511_14 (sequence is synthesized)
ctacacaaaaacctgtacacaaatagcagcactattcataatagctaaaaggtgaaacaatctgaatgctccatcagctgatgaatggataaacaaaatgtggtatatctgtggaaaaga

SEQ ID NO: 985112 - DNA, 120 bp, Artificial Sequence
  ENSG00000286511_15 (sequence is synthesized)
gcattactcagccctaaaaagacaaagggagtactgatacatgctgtaacatggataagccttgaaaacattatacctaataaaagaagccagacccgaaaggccatgtattatatgatt

SEQ ID NO: 985113 - DNA, 120 bp, Artificial Sequence
  ENSG00000286511_16 (sequence is synthesized)
gaagaagcaggagagggccccgagagcaccttcttaccagtgagggcttgacattcacctgcacacacaccgcacttttaaaaatcgtgttggctttggttggttttggccctgctcaca

SEQ ID NO: 985114 - DNA, 120 bp, Artificial Sequence
  ENSG00000286511_17 (sequence is synthesized)
ctacttttccaaagcacctcctgttgacgaagctggctttgggacaagagaggatgcatttgtccttagggtctctcagggacaggccacgcaacaccacatacacaggtgctcagtaag

SEQ ID NO: 985115 - DNA, 120 bp, Artificial Sequence
  ENSG00000286511_18 (sequence is synthesized)
tttatacagaatgttcagaataggtaaatccaggcagacagaaagcaggttaatgcttgccaggggctgaggggaaggagaaattggaaatggctgcttaatgagtcctttaggggtgat

SEQ ID NO: 985116 - DNA, 120 bp, Artificial Sequence
  ENSG00000286511_19 (sequence is synthesized)
gaaagtgtttcggaactaaatagggatagtggttttacagcattgtgaatgtacaaaatgccacagaactgtgtactttaaaatggttaattttatgttatgttaattccatcttaataa

SEQ ID NO: 985117 - DNA, 120 bp, Artificial Sequence
  ENSG00000184274_0 (sequence is synthesized)
gcaccctggctgctcgcatctgcaggaagcatggtggggctgggcggtcccaggctgccgtggcccctttgtgctgctgtaagaaggtacctgtgactgggtgactcataaggagcagaa

SEQ ID NO: 985118 - DNA, 120 bp, Artificial Sequence
  ENSG00000184274_1 (sequence is synthesized)
atgtactgctcacagctctggagtctgggaagtctgaaaccagggccccggcaggtttggtgtttggcgaggactgctctctgcttccaaggtggtccccttgttactgtgtcctctcat

SEQ ID NO: 985119 - DNA, 120 bp, Artificial Sequence
  ENSG00000184274_2 (sequence is synthesized)
agcagaaggcaggagggcaaaaggggcctggccagtcagacagccctttcgtaaggctctaatcctacccttgacggtggaaccctcacggcctaaccctcccgaaggcctcacctctga

SEQ ID NO: 985120 - DNA, 120 bp, Artificial Sequence
  ENSG00000184274_3 (sequence is synthesized)
acactgttgcgctggggattaagtttcaacatggatttcggaggaacacagacattgaaaccacagcagtgccatcgctcccaggctgagaccccaccttggctctctgcccctagcatc

SEQ ID NO: 985121 - DNA, 120 bp, Artificial Sequence
  ENSG00000184274_4 (sequence is synthesized)
tcctccctggcccctggagagacacaggagaaggagagaagggctattctgtaggaatcacaaggccgagtggactctcacctgagggagggcacctgcagcttggctggccccagggat

SEQ ID NO: 985122 - DNA, 120 bp, Artificial Sequence
  ENSG00000184274_5 (sequence is synthesized)
ctgtgggcacggagcatgtggctgggtgcctatcaccttcttccccactttaccctgggcatccagcccctggaccatgactgccaggcacggagcaggtgtggaggagtgtcagcatga

SEQ ID NO: 985123 - DNA, 120 bp, Artificial Sequence
  ENSG00000184274_6 (sequence is synthesized)
tgaaattcacccacaccacggctgccacagatggacagcctcacggagaggtgccgcccacagcccctcgctgccctgggtccagctgatgctcagctccatggtccggccgctgctggt

SEQ ID NO: 985124 - DNA, 120 bp, Artificial Sequence
  ENSG00000184274_7 (sequence is synthesized)
ggcggtgttggcccaagggtgatgctctcctccctctgccgggaacacccctggcaaggacgctgcccacccatccccgcacatggaaaggaggtgaggcagctgcggcatcttcacaga

SEQ ID NO: 985125 - DNA, 120 bp, Artificial Sequence
  ENSG00000184274_8 (sequence is synthesized)
acacgtccccccgacacgcaccaagacatggctcgaggcccgggcctcccacacacccatgggcttccagcacgtccttcccacgtcagacaccagacagagccggtgcaggtggcttcc

SEQ ID NO: 985126 - DNA, 120 bp, Artificial Sequence
  ENSG00000184274_9 (sequence is synthesized)
tgcaccagctgctgcatccacccttagtgccagctctgggggcctaagcaggagctcagggacatggagaccgtggagaggaggcattcactgtggggtgtcccaaggctgggcaccaag

SEQ ID NO: 985127 - DNA, 120 bp, Artificial Sequence
  ENSG00000184274_10 (sequence is synthesized)
gcaggacctccgtgtgccccgaatgccggcttccctggagactgcagccagcggggatctctcacatcagcctcccaagaccaccgtgaggggggcgcttaggagcagaaacacccaggc

SEQ ID NO: 985128 - DNA, 120 bp, Artificial Sequence
  ENSG00000184274_11 (sequence is synthesized)
cgagcaggatgagcaggtgaagctgcccaacgcaggggacgggacgcagaggcgattcacgagcctggggctccagcagcagccaggcggatcccgccacacctttcgctctcagctacc

SEQ ID NO: 985129 - DNA, 120 bp, Artificial Sequence
  ENSG00000184274_12 (sequence is synthesized)
agtctgcctgccaccatcaccttcccgcgtgtgagtggggccctggttccccaagcagccgctgactcccggacgcctgctggccaggccccggtcatgagtgcatccggggaaggcttc

SEQ ID NO: 985130 - DNA, 120 bp, Artificial Sequence
  ENSG00000184274_13 (sequence is synthesized)
gggcctacaggaacggaaggaaaagccatccagcctccctgaccctccacacggaagctgaggggttccccatacaccggctgccggggactgcctcgactctggttttggcagagacag

SEQ ID NO: 985131 - DNA, 120 bp, Artificial Sequence
  ENSG00000184274_14 (sequence is synthesized)
gccctgctgtgtccgtcatctctgatggaagtgacagccatttcccctgcagacaggccagagcggcctatccacgctccacggtgtgaggccagtggtggcgtccccagggccacagcc

SEQ ID NO: 985132 - DNA, 120 bp, Artificial Sequence
  ENSG00000184274_15 (sequence is synthesized)
cagcgagggtgaggtgggggagcgtcctggctgagggctgggccgcctcccgcgtgctctggggaacaatgcttccgcaccacccccgccccttcctggcttctgtgaaactgaacatct

SEQ ID NO: 985133 - DNA, 120 bp, Artificial Sequence
  ENSG00000184274_16 (sequence is synthesized)
ccaagtaaatattttcactgctaagcacaggcagcacttcgaggcttcgtgacgaagacgtggaatgcttgaccctcacctctcacctctcacctctgcaggtcctgggcgcagacttca

SEQ ID NO: 985134 - DNA, 120 bp, Artificial Sequence
  ENSG00000184274_17 (sequence is synthesized)
ccttctggaccttctcctatccggaaagtatgtggctcacacggtggtgcaaggagccttgggctgggcagctgctggcctggatccgagtcctgccctggtgaaagtgctgattacttt

SEQ ID NO: 985135 - DNA, 120 bp, Artificial Sequence
  ENSG00000184274_18 (sequence is synthesized)
acatacttctacatctgcagaaccaggtgattgatcctcaaagcccagccagctccagcaagctctggtacctgcaaccacgggccgccctgtgcccggcccaccttcctcgaaccgtgt

SEQ ID NO: 985136 - DNA, 120 bp, Artificial Sequence
  ENSG00000236173_0 (sequence is synthesized)
taaaatactgaagtttatttctggaaacataagtagttacatttacattatgtgtagcatgctgtctttccaaacgtcacccaactccacacaccgaactcagagcagagtctcctcgga

SEQ ID NO: 985137 - DNA, 120 bp, Artificial Sequence
  ENSG00000236173_1 (sequence is synthesized)
gagtgggggcattggcttgaggaaaaggatggaagcgtttcaatgtatatgtgatagatagaaaaaagagataacactcagaatagttaacaacctttgctccaacaacacaggctccac

SEQ ID NO: 985138 - DNA, 120 bp, Artificial Sequence
  ENSG00000236173_2 (sequence is synthesized)
tagaggttctatgttgttctctgtactattctgtgagttctaaccaagaataaataaataacaaattactgttatgtattgacagcaggggctgtcactgctggggtctcagtgccaggg

SEQ ID NO: 985139 - DNA, 120 bp, Artificial Sequence
  ENSG00000236173_3 (sequence is synthesized)
gtgtcagtgctgcggacgtcaatgttggggtgtcagtgctggggacgtcagtgttggggtgttatgcagggctgtcagtgctggaggtatgagtgctgggggtctcagtgttgggggtct

SEQ ID NO: 985140 - DNA, 120 bp, Artificial Sequence
  ENSG00000236173_4 (sequence is synthesized)
cagtgttgggggtgtcagtgctggaggtatgagtgctgggggtctcagtgttgggggtatcagtgctgggagtgtcagtgcagggctgtcagtgctggaggtatgagtgctgggagtctc

SEQ ID NO: 985141 - DNA, 120 bp, Artificial Sequence
  ENSG00000236172_0 (sequence is synthesized)
atgccattcctgggaccatcaaaaatggcagaggtcacacaaaaaggcaaaacttttaagaggtgttttaaacgtcgtatgggccaaagagaagctggatttcctattggagtcacctgt

SEQ ID NO: 985142 - DNA, 120 bp, Artificial Sequence
  ENSG00000236172_1 (sequence is synthesized)
aacacacgtgtgacgaaattggcctgtgaggacaaggcagtgagcagagaggacagcagtccttatgagatcaagctctaagaaaagttgctaaaactgctgtgagattctggctaagaa

SEQ ID NO: 985143 - DNA, 120 bp, Artificial Sequence
  ENSG00000236172_2 (sequence is synthesized)
catcgttaccctccattgtcctcttgacaccctgctttcacagagaaagagtttgagaccctctcccaggagccaaggagaggggaacagctggcttcacatcatctttctattcaacaa

SEQ ID NO: 985144 - DNA, 120 bp, Artificial Sequence
  ENSG00000236172_3 (sequence is synthesized)
gatacaaaaagctgaagccaggatgatagaaaagcaacaaagaagacacggtccttactcatttcccttcccacttcagagcaaatatggtgcctggtgttcgaagggagaacttgtggg

SEQ ID NO: 985145 - DNA, 120 bp, Artificial Sequence
  ENSG00000236172_4 (sequence is synthesized)
cagagcaggaagcgtgtatccattttctaatttcatcttattttcctgcatatgtgctcatgacttggacctgatatgagattttgcttctcccatttttgcctcaatattaccccttgg

SEQ ID NO: 985146 - DNA, 120 bp, Artificial Sequence
  ENSG00000236172_5 (sequence is synthesized)
ggtggcaaagcctgtggagtactcacctacctgctgcatgaaggcagcatggagggactgtggtggattatctgcaaagatggccaaaattctctcatccctgcaggcacatacaagatg

SEQ ID NO: 985147 - DNA, 120 bp, Artificial Sequence
  ENSG00000236172_6 (sequence is synthesized)
ccagaatcagtcaaaactaagctcactgtccttgctaatattctgccccagagaagaactgaagctcagctcttcaccctacagaaagcctgaattttgtaaatgttctgcttagaatga

SEQ ID NO: 985148 - DNA, 120 bp, Artificial Sequence
  ENSG00000236172_7 (sequence is synthesized)
ggaagaaagatgaagaatgaggaggaagaaggaaggaacgagagagaggttgttgcatggcataagtaaagtgacagttataggatacatgcaacttttcagtgacaaagatctgtgcag

SEQ ID NO: 985149 - DNA, 120 bp, Artificial Sequence
  ENSG00000236172_8 (sequence is synthesized)
atgaagtatcacaaccagtttacagaccagaaaactgagacacaggaaggggtggtgacttgagcaaggtgcatcagctggaaattgaagtatacagaatgcttatttggtctactcagt

SEQ ID NO: 985150 - DNA, 120 bp, Artificial Sequence
  ENSG00000236172_9 (sequence is synthesized)
atcatcctaaatgtatgtaccaatgcttaggagtttgcagttcacccgcaaacctcagcgatccaagctcccctggatgaccatcactcaccaagaaaagagcaataacaggacctgttt

SEQ ID NO: 985151 - DNA, 120 bp, Artificial Sequence
  ENSG00000236172_10 (sequence is synthesized)
tgctaatccaggactgttctccagcactaactctaaataatcccttctgctagagtccactttctggaacctgttgcctccgttttcaacgtttcccaaacttggtccgttgtgtgagct

SEQ ID NO: 985152 - DNA, 120 bp, Artificial Sequence
  ENSG00000236172_11 (sequence is synthesized)
ggctgataaaagttccagggagaagacatcttactcttattggatcatgcacagtgcctgaagcattctgttgcatgtagaagtcagtaaattgcagatgtaagattcaaaaccagactt

SEQ ID NO: 985153 - DNA, 120 bp, Artificial Sequence
  ENSG00000236172_12 (sequence is synthesized)
attatgggccttacaaactggtagaagatgcataacagaagagcttatgaagttaaagatgacagcatagcagcactggtatcctagacacatttggagaattcacctgagctacaggat

SEQ ID NO: 985154 - DNA, 120 bp, Artificial Sequence
  ENSG00000236172_13 (sequence is synthesized)
caggtaggaccacttccctcttcattgtgcaaagattcaccactggttccagccttctctggcacttttaagatatgcatcaggttttattcatctctgattttctagcctctggcagac

SEQ ID NO: 985155 - DNA, 120 bp, Artificial Sequence
  ENSG00000236172_14 (sequence is synthesized)
tacctggtgtaccagaggctttgtaagtaatagttaaataaagagaaaacattaaagcaacattgaaggaagagggttaaccagactacagatttgagacctctatctcagagggccaac

SEQ ID NO: 985156 - DNA, 120 bp, Artificial Sequence
  ENSG00000236172_15 (sequence is synthesized)
agtcatgttgatgttttcatgctttcttggatataaaagtcacactacactttccctctcggtgaccatgtacaaaggttcatttataattaatagacaaagtctttaataaagcaaacc

SEQ ID NO: 985157 - DNA, 120 bp, Artificial Sequence
  ENSG00000236172_16 (sequence is synthesized)
gtgtccacatgagaacattggcaagagtggggacatggaagctgtgttcaggccggtccacgctgggtgacccatgtgacctgctgcttagcaattccttgtcaccatcttcccttctca

SEQ ID NO: 985158 - DNA, 120 bp, Artificial Sequence
  ENSG00000236172_17 (sequence is synthesized)
gcctcttttttcatgctaacaggcataaatgaaatgataaaagtttgagctcttctcgtggaattctcgtgatacagatatgtgctacatgttcatcatctcgttggtcttcaccatgat

SEQ ID NO: 985159 - DNA, 120 bp, Artificial Sequence
  ENSG00000236172_18 (sequence is synthesized)
acatttgctttcttgggagctctgagttatcatgtgagaaccaccagtctccccaacctgcaccctaagctcattatccacaaggctgtgcaaaataataaatcactgttgttaggacgc

SEQ ID NO: 985160 - DNA, 120 bp, Artificial Sequence
  ENSG00000236172_19 (sequence is synthesized)
taatgtttaaagtcaggatgtaacatattgtctccatgtgactttgttgaactaaataaagaatgctaataccagatgcggaccctgcctcttctgttctctaagactaggcattgctct

SEQ ID NO: 985161 - DNA, 120 bp, Artificial Sequence
  ENSG00000236172_20 (sequence is synthesized)
ctgatcagaagagtcaatcctggtgagtttaacttgagcctcagaatcctactcaacacaaagttccagagagaagcgattatcaatgccaataccttagagatggtactggctgtggaa

SEQ ID NO: 985162 - DNA, 120 bp, Artificial Sequence
  ENSG00000236172_21 (sequence is synthesized)
tctgtcatcccttgactaggtggtctctaagttcctttccaattttaatgttttctgttctgatttatcttttggcattgtgcaggtgtcaggagaaaaaaataatgccaatgtgtctct

SEQ ID NO: 985163 - DNA, 120 bp, Artificial Sequence
  ENSG00000236172_22 (sequence is synthesized)
gaaggaacgagagagaggtaaagccaacaagcagaacagacctacatttgcagcatctccaagtttctgcaacagcattatgttgttgttatgttttgttttaataaaagcacataccat

SEQ ID NO: 985164 - DNA, 120 bp, Artificial Sequence
  ENSG00000236172_23 (sequence is synthesized)
atcatctccttctctacattaaaaattatggaggccttacaaactggtagaagatgcataacagaagagcttatgaagttaaagatgacagcatagcagcactgttcacaaagacgttat

SEQ ID NO: 985165 - DNA, 120 bp, Artificial Sequence
  ENSG00000236172_24 (sequence is synthesized)
tgcatatgccaagtagttatggagaaagacacagcagcttacctctgcaggcatcattgtgtgaaaggaagacccaggctctctcaccacccttgaacagaagccttttgctaaggtgat

SEQ ID NO: 985166 - DNA, 120 bp, Artificial Sequence
  ENSG00000236172_25 (sequence is synthesized)
cgcctcccggattcaagtgattctcctgcttcagattctcgagtagctgggattacagttttgagaagaatgcgaagaagaaaggaagagtgagcctctctttcccatcgttaccctcca

SEQ ID NO: 985167 - DNA, 120 bp, Artificial Sequence
  ENSG00000236172_26 (sequence is synthesized)
tgctttagagaggggatgcctcagacaatcggtcatcagtgaggaagaactgaagcaaaacctgctgagctgtgaggctgacttgcttctcaggcagcgctgggatgatgtattgtcctt

SEQ ID NO: 985168 - DNA, 120 bp, Artificial Sequence
  ENSG00000236172_27 (sequence is synthesized)
cctgacttgtgacaaagagaactattcggtgctggggttgagctagggatatgatagatatctttaattatatgataatcagagatgagctaattagatatcacttgataactgatcagt

SEQ ID NO: 985169 - DNA, 120 bp, Artificial Sequence
  ENSG00000236172_28 (sequence is synthesized)
ggcagcattcatataactgtttctcatttcctcctcacatcaatttaacagatggtgcctggtgttcgaagggagaacttgtgggcagagcaggaagcgtgagtatggttgaaggatcaa

SEQ ID NO: 985170 - DNA, 120 bp, Artificial Sequence
  ENSG00000236172_29 (sequence is synthesized)
atatttggttcaggcatcagggagccagcaagactatgatgctgggaaacacaagtgatgtactgttggatttaatctacttggaaaaaacctaggaaaaccaaaatgtcatcaactaac

SEQ ID NO: 985171 - DNA, 120 bp, Artificial Sequence
  ENSG00000236172_30 (sequence is synthesized)
acctgaaatgcctcagcaccatctgtctccaacattaaacaaaacccacgagattccaggagaaagaaaataggaaatttaatgatgaacttaacctgagtaacttgataaatgttacct

SEQ ID NO: 985172 - DNA, 120 bp, Artificial Sequence
  ENSG00000236172_31 (sequence is synthesized)
ttgtggctagccattcaccagcaagtccctaaaatgacctgaaacctgaagagtgtttcacccatgaaagggtttgctctctctgggcatggctacccagcacatatgttagtcaacttt

SEQ ID NO: 985173 - DNA, 120 bp, Artificial Sequence
  ENSG00000236172_32 (sequence is synthesized)
ctttcccttgcagggccccttggaaaactagtttgaatcattcattaactcagctccactccttccctttcccatggaccatagtttctttgagcaattaaaacttataagacaccaaaa

SEQ ID NO: 985174 - DNA, 120 bp, Artificial Sequence
  ENSG00000236172_33 (sequence is synthesized)
tgttcacagagagcatttaacataactgtcttcatcatctccttctctacattaaaaattatggttcacaaagacgttattggtgattcaatcttgagtcatgaaaagtcaaccttgagc

SEQ ID NO: 985175 - DNA, 120 bp, Artificial Sequence
  ENSG00000236172_34 (sequence is synthesized)
ctaaggtgaggttgcaggatctgaaggccagctcccctgcttgctcactgtatgactttaggcaagtcattttacttctgaatgattcatattggaagtaaaatatatgattggttaaaa

SEQ ID NO: 985176 - DNA, 120 bp, Artificial Sequence
  ENSG00000236172_35 (sequence is synthesized)
acataacatggtaggaaggactgtttgacaaagtgaatgcctgtctttcagaatatacagggaggtgtgatgtacccattatcacaagcagatggaatccctatagagtcggatctcatc

SEQ ID NO: 985177 - DNA, 120 bp, Artificial Sequence
  ENSG00000236172_36 (sequence is synthesized)
tacatatcacctattatatgtagttattgatggataaatacttcaacaactaaaggcagaaagagagcagttcacaaagacgttattggtgattcaatcttgagtcatgaaaagtcaacc

SEQ ID NO: 985178 - DNA, 120 bp, Artificial Sequence
  ENSG00000236172_37 (sequence is synthesized)
tacatcagtcaatcagatgattattaaatttaggaaatagtagatcaactggattaactggattaaaatgcagaatcccaggccccagcccagacctactgaaccagcatctgctcttta

SEQ ID NO: 985179 - DNA, 120 bp, Artificial Sequence
  ENSG00000236172_38 (sequence is synthesized)
acaagagccccatgtgatgtgtgggacagaaaactttgtgaagcacagggctagacagtctctaaagtcttctgcagatcagaaacgcagcaattctgaggttttcttcaattttctaat

SEQ ID NO: 985180 - DNA, 120 bp, Artificial Sequence
  ENSG00000236172_39 (sequence is synthesized)
agattcctaagatgtaggaggaaattatcatactgagtaagagggtgcaattttggaaggttggacttgatgacctctccagcattaaggttcacaaagacgttattggtgattcaatct

SEQ ID NO: 985181 - DNA, 120 bp, Artificial Sequence
  ENSG00000236172_40 (sequence is synthesized)
tgcttaatatcaccagagacatctagccatcttcgcaaggtcacataggtacattcactcactttcaaccaatatttcttaagactgtgttacgctgtgcacaggagacaagacacagaa

SEQ ID NO: 985182 - DNA, 120 bp, Artificial Sequence
  ENSG00000236172_41 (sequence is synthesized)
ttaggaggaatcactgagctcagcccagggagctagactagctcagaggagtacctgattcacactaggaaggtattggcacaggcttcctggaagtggagacactgaatggaattctaa

SEQ ID NO: 985183 - DNA, 120 bp, Artificial Sequence
  ENSG00000236172_42 (sequence is synthesized)
aggatgtgataccttctacatgttctttaagatacaggatggtgggtgttcttaatggagaagtaggagaaaagggttttcctggtgtgagaaacaatggagattagaaaaagcatgata

SEQ ID NO: 985184 - DNA, 120 bp, Artificial Sequence
  ENSG00000236172_43 (sequence is synthesized)
atcagaggacaattcacagctgtggtatgactggaataaaaccatccatcctccagatgccaggaggcaggcacaacagtcactgtcctgtggccttcattccttggggaaaacaccaca

SEQ ID NO: 985185 - DNA, 120 bp, Artificial Sequence
  ENSG00000236172_44 (sequence is synthesized)
atggtcatcacctgaacaaatggagtggggagatgtggaagtgaaagaaagggaacgctgaagaagacagtatcagagacccagtagcaatgaaacctcaattggcacagaggatttggg

SEQ ID NO: 985186 - DNA, 120 bp, Artificial Sequence
  ENSG00000236172_45 (sequence is synthesized)
cattcccaagaaacagccaaacccagagtaaggaaaccatctggcaagaaccgctcaagagaatgcttcttggctctcacatcttaaaggtcttaaaatagctaacatttattgaacatt

SEQ ID NO: 985187 - DNA, 120 bp, Artificial Sequence
  ENSG00000236172_46 (sequence is synthesized)
ttactatatgccaggtattatgggctaagcccattatatatgtgatctcatataattaatcttcaaaacaatcttgtgtcataaatgctacaaatactttgattttaaaactgatgaaaa

SEQ ID NO: 985188 - DNA, 120 bp, Artificial Sequence
  ENSG00000236172_47 (sequence is synthesized)
gaggacagcagtccttatgagatcaagctctaaggtatcctagacacatttggagaattcacctgagctacaggatgtgatgggaacactgaggttcagaaagatatgtaatatattcgt

SEQ ID NO: 985189 - DNA, 120 bp, Artificial Sequence
  ENSG00000236172_48 (sequence is synthesized)
ggaaaccatctggcaagaaccgctcaagagaatgcttcttggctctcacatcttaaaggtcttaaaatagctaacatttattgaacattttactatatgccagtcagtaaattgcagatg

SEQ ID NO: 985190 - DNA, 120 bp, Artificial Sequence
  ENSG00000236172_49 (sequence is synthesized)
agtagcttctgcttgaagatttctgctgtaggcaatgagccaactggccagaaaatatccagttatgctctgcaggttcatggtggatggggactttcactgttgtttagagaaaccatt

SEQ ID NO: 985191 - DNA, 120 bp, Artificial Sequence
  ENSG00000236172_50 (sequence is synthesized)
gagtggataacgttccaaacagcaaaatcaaatggggattctgtacactcgggagtgtcggctctggacaaattaggttgcacttgattgtaagaagccaggctttattaaaatagaata

SEQ ID NO: 985192 - DNA, 120 bp, Artificial Sequence
  ENSG00000236172_51 (sequence is synthesized)
taaatattaacagaaacggactgcttctaatccccactaccgttggccagggaggcctctcttcaggttttctgaatggaactaaataaggagcccatgttaccgcggaaagggcactgt

SEQ ID NO: 985193 - DNA, 120 bp, Artificial Sequence
  ENSG00000236172_52 (sequence is synthesized)
gattaggagcctttcatgagcttccatgaacgtctagggcttggaaacttcattttcaaaataaggctgttggattagatgattttcccaacccctaaccctctgtgttaatgaatggac

SEQ ID NO: 985194 - DNA, 120 bp, Artificial Sequence
  ENSG00000236172_53 (sequence is synthesized)
agtctgttgtgtcacagagagggccacgggccactgatacagggacttgtgtgaaagaaagtgggagaagggaagggagaaagtgagaagggaggaagagaaaagagagagaaaccagcc

SEQ ID NO: 985195 - DNA, 120 bp, Artificial Sequence
  ENSG00000236172_54 (sequence is synthesized)
accatctgccagccaaccttctcccagcaccttgcatactgtgctctgcttaaccataagctgatccctgtgacacaaagatttaaggccctttgaaatgcattcagtgaacaggagagg

SEQ ID NO: 985196 - DNA, 120 bp, Artificial Sequence
  ENSG00000236172_55 (sequence is synthesized)
aggatgcctcttgcatgttatgtgcatcttcctgttggcaagagtgaccaggcaactcatttgtggctttatctgcttttgtgcacccaataaatagtatcttacttgagacaacaaaaa

SEQ ID NO: 985197 - DNA, 120 bp, Artificial Sequence
  ENSG00000236172_56 (sequence is synthesized)
gaaataatgccaacttaaaccttccctcccctagggagctctccctaacaatctgggctggaaagagtgtgttcctttaggaaacaaagcatgtattacccattgagaatccattattac

SEQ ID NO: 985198 - DNA, 120 bp, Artificial Sequence
  ENSG00000236172_57 (sequence is synthesized)
atggaaaagttgctaaaactgctgtgagattctggctaagaaagtttcatgagaagttttacagaaaaatgtgaacggaagacagaactagatataaatttgaatggtaatctaaataaa

SEQ ID NO: 985199 - DNA, 120 bp, Artificial Sequence
  ENSG00000236172_58 (sequence is synthesized)
ggtggcaaagcctgtggagtactcacctacctgctgcatgaaggcagcatggagggactgtggtggattatctgcaaagatggccaaaattctctcatccctgcaggcacatacaaggga

SEQ ID NO: 985200 - DNA, 120 bp, Artificial Sequence
  ENSG00000236172_59 (sequence is synthesized)
agcccctgcccacctcaatctatttgactcacacctcttttggaccattgagtcctctgatgagttaaaagcagccataaattcttaggtgatgagaagggtaatgaagaagacagatct

SEQ ID NO: 985201 - DNA, 120 bp, Artificial Sequence
  ENSG00000236172_60 (sequence is synthesized)
aggtgggcataggagttagtaaacatctcactgctattgtttttcaaggtgaagctagagaagaagattcctaagatgtaggaggaaattatcatactgagtaagagggtgcaattttgg

SEQ ID NO: 985202 - DNA, 120 bp, Artificial Sequence
  ENSG00000236172_61 (sequence is synthesized)
aaggttggacttgatgacctctccagcattaagggtgaatgattctttctagggatttggtttgttgccagagagcctggctacctgctatttagttgctttgttgattagcaaatttcc

SEQ ID NO: 985203 - DNA, 120 bp, Artificial Sequence
  ENSG00000236172_62 (sequence is synthesized)
tctgaaatattcctcacattcatgagcccccttcctggggtaggtggacccagaaaatgttttctcccattttagttggccatgtgtttgaaactcagatggacctaagtctttcagcat

SEQ ID NO: 985204 - DNA, 120 bp, Artificial Sequence
  ENSG00000236172_63 (sequence is synthesized)
cattgtcactactgtatgtctatccataaaaagaaggcataagactctctgtagtatcacgaagttagccatttgggattgcaaaaactttcctctttccattggagagaaatagtttag

SEQ ID NO: 985205 - DNA, 120 bp, Artificial Sequence
  ENSG00000236172_64 (sequence is synthesized)
attagatggtggagcccctaccacatctcccaaaatttaaattataacatgaacagtaatttaggtctgattttaatattttgtcattcttaaacctaataaaagctacatcttcctaaa

SEQ ID NO: 985206 - DNA, 120 bp, Artificial Sequence
  ENSG00000236172_65 (sequence is synthesized)
gcagcccactaaaggtacacaaacaccattagccaatctgaaaaaagaaattgatgtctaactggttattatttcctagcaagtgttctgcaagttgggaaattgaagtatacagaatgc

SEQ ID NO: 985207 - DNA, 120 bp, Artificial Sequence
  ENSG00000236172_66 (sequence is synthesized)
tgaagcattctgttgcatgtagaaggcaacagaaagaaactgagggtctgctatttgtctccagaggccttacaaactggtagaagatgcataacagaagagcttatgaagttaaagatg

SEQ ID NO: 985208 - DNA, 120 bp, Artificial Sequence
  ENSG00000236172_67 (sequence is synthesized)
ggaattctaggtaagtgatgatgctatttactaagagaagacatccagaagaaggagcttgcattgtctttattttgattttgttttggtggaattgagaatacaatgtattattactgt

SEQ ID NO: 985209 - DNA, 120 bp, Artificial Sequence
  ENSG00000236172_68 (sequence is synthesized)
ataccaggaacttatgatgaaaggaggcaaggaatatgaagatggggagaatatctcaggagctgggcacgctttccgtttaaaccatatgtactcatctgcatgcatacatctggcatc

SEQ ID NO: 985210 - DNA, 120 bp, Artificial Sequence
  ENSG00000236176_0 (sequence is synthesized)
ttattatagagtatctgtctcttggcttcctgagaatctgtcgtgattaaatagtgaatgaaagaaactgaatggaattttctgtaccattgtgcccagaattggttccttccggtgggt

SEQ ID NO: 985211 - DNA, 120 bp, Artificial Sequence
  ENSG00000236176_1 (sequence is synthesized)
tctttgtctcgctgacttcaagaatgaagctgtggatcctcgtgagaacagagaaaaactgttttctgaaaagcaattctgcaaaaacattgacattaacaaaaaacacacctgcttgga

SEQ ID NO: 985212 - DNA, 120 bp, Artificial Sequence
  ENSG00000236176_2 (sequence is synthesized)
gaagttcacatttattatggagggcacttgtaaaagtgtatctgaagcctgtaagagccagaaggactcagtcatatgctgccttctgtgcctgatgttttcttttgaactagggagaga

SEQ ID NO: 985213 - DNA, 120 bp, Artificial Sequence
  ENSG00000236176_3 (sequence is synthesized)
cgtgaacatacagtctgttattgtagtttatgcacaaagactcaaataagaaagatgtgggtgtatgtataagaaaaggtttagaaaacttggcatattttctatgaatgttaagaactt

SEQ ID NO: 985214 - DNA, 120 bp, Artificial Sequence
  ENSG00000236176_4 (sequence is synthesized)
gtattactgtaattctgtaagtctaaatgcaatcgaaggacacaaacatctctatgtataatgagattaactgaaacataattgaacaaaactggaaataaagaaaaatctatcaaataa

SEQ ID NO: 985215 - DNA, 120 bp, Artificial Sequence
  ENSG00000286517_0 (sequence is synthesized)
gggcaggggcaggtgcgggctgcgggagggactcggagcccacagaggtaattccactctgcgcctcaattattcatcgcgctggggctgtctctgcgtggtcacctgcgcgctgcagag

SEQ ID NO: 985216 - DNA, 120 bp, Artificial Sequence
  ENSG00000286517_1 (sequence is synthesized)
tcccccagcgctccggggactgctcgggggctgctggggggcctctgggaggcctgtcgctcgaggggaggccggatcaaggagagtcacgcggctccctggggagaacgggcgccgggc

SEQ ID NO: 985217 - DNA, 120 bp, Artificial Sequence
  ENSG00000286517_2 (sequence is synthesized)
tttgccaggaggaagcagctggttgaatagcatttaaaaagagatttgaagattgaggagcagatgttctgagttctggtctggtcctgggagccatgcagccttggtcaagtcagttcc

SEQ ID NO: 985218 - DNA, 120 bp, Artificial Sequence
  ENSG00000286517_3 (sequence is synthesized)
atcttcctgaggctacacttcagcatctgtaggatgggagtgttgagcgctagatctatgactggtgggccaaacctgccctgctgcctgtttttgcaaataaagttttattggaacaca

SEQ ID NO: 985219 - DNA, 120 bp, Artificial Sequence
  ENSG00000229331_0 (sequence is synthesized)
tgttatgcttatctgacagaaggtttgttgatttcaagtcactaggaacagtgcctccaaaattaaaattcactctccaactgagcagcacacactagctcaaggcaattaaatagactg

SEQ ID NO: 985220 - DNA, 120 bp, Artificial Sequence
  ENSG00000229331_1 (sequence is synthesized)
agcggtagagtcagctctgtttgcctgtcactgggctcaaggaattacaaagtataaagagttacagtagcaattccaaaatacaaagagttacggctgggcatggtggctcacacctgt

SEQ ID NO: 985221 - DNA, 80 bp, Artificial Sequence
  ENSG00000229331_2 (sequence is synthesized)
ggtggctcacacctgtaatcccactactcaggaggctgaagcaggaaaaacacgccgagccgagatcatgccattgtact

SEQ ID NO: 985222 - DNA, 120 bp, Artificial Sequence
  ENSG00000278097_0 (sequence is synthesized)
cactgcgagaacgggaacaatggaacaggccctcaccaaatgccaaatgtgctaccaccttgattttggatttcccagcctccggaactgtgaggaataaatttttttacttataaatta

SEQ ID NO: 985223 - DNA, 120 bp, Artificial Sequence
  ENSG00000234997_0 (sequence is synthesized)
gacgaacttccagccctggagcatgtttcttcctttcctgggatgtggcgctgaaaagggcagaaacctctagtaaggcacaagcaacagattgggggtggagcagcaggtctctttgga

SEQ ID NO: 985224 - DNA, 120 bp, Artificial Sequence
  ENSG00000234997_1 (sequence is synthesized)
ggtggcctggaagaaaccggacagagaggatgggaaggggagaaacagaagagtgtgacgagatcatgaaggaaagaggaggcgtctactgaatgtaaggtagagccaaaggcatctatt

SEQ ID NO: 985225 - DNA, 120 bp, Artificial Sequence
  ENSG00000234997_2 (sequence is synthesized)
gatgactgaagaagaggcatgaatatgacaaaaacaggaagctgggaaaacggcaatggattaataacaagaaattaatggtgaagtggtgacgaaaattctacattgcttagaaagcaa

SEQ ID NO: 985226 - DNA, 120 bp, Artificial Sequence
  ENSG00000234997_3 (sequence is synthesized)
atagtgaaatgaacatttacattctggcaacctcagaagtacaacgaacagaggacaccagccaggtagggcaaaggcctgtgcgcccccttttgctgttacatgtttatcagatgcgtg

SEQ ID NO: 985227 - DNA, 120 bp, Artificial Sequence
  ENSG00000234997_4 (sequence is synthesized)
gaacaagtagctcctcaggcaagtcaactgttaactctgcagtttttatttaatctcccaggaatgtaacccttaactttaaagaatgtagtgaccataaaacttataaggcatgtttct

SEQ ID NO: 985228 - DNA, 120 bp, Artificial Sequence
  ENSG00000234997_5 (sequence is synthesized)
taaggaaattgtacctgtttatttaatctatcagatatgaatgttatagaaaattaaatttgtccacttaagctgtagatgaacttttcacctttctgatcagaaattcaccattttata

SEQ ID NO: 985229 - DNA, 120 bp, Artificial Sequence
  ENSG00000234997_6 (sequence is synthesized)
gtataggttctgttattaatcagaatatttcatttagactctttctatccaactttttcttagaggctattcaaaataaaggtgcttctaacagtttcatatcgaaatacgatgcaaagc

SEQ ID NO: 985230 - DNA, 120 bp, Artificial Sequence
  ENSG00000234997_7 (sequence is synthesized)
cttgctcttccatggtatcctttgagtgagccaaacttatttagccattcccctatagttaaatagctaggatgtttccaacatctcacctttaaaacaatagtgctatgaatgtcataa

SEQ ID NO: 985231 - DNA, 120 bp, Artificial Sequence
  ENSG00000264207_0 (sequence is synthesized)
gtcatttcttttctgttttcctctccctcctcctccactctgctcaggtccctctcactcttttttttttttaaccgctacgccacagtccccgggagaattcagatcccaaccggggct

SEQ ID NO: 985232 - DNA, 120 bp, Artificial Sequence
  ENSG00000264207_1 (sequence is synthesized)
tccggattctgtagtggctttggcctgtgtctggtctgaggacgcccggaaggcattgcactgaggctaagggaaaggtctctggagggagcctcaggaagagcaaatggaggccagaga

SEQ ID NO: 985233 - DNA, 120 bp, Artificial Sequence
  ENSG00000264207_2 (sequence is synthesized)
ctggcaggagcgcgccagcgcaggatttaatcccgacgagcggattcagagccgtgcttatataaagcttcaggaagcgccgttccgacgatgaggtcgacacgcgagaggcgacctcaa

SEQ ID NO: 985234 - DNA, 120 bp, Artificial Sequence
  ENSG00000264207_3 (sequence is synthesized)
gagcggcggcgccagggatctgtgcgccaagggaggacgggagggagcaggttcgccataattcctggctccaggctctgttttgttggaccgagccactgtattttagctcacacagga

SEQ ID NO: 985235 - DNA, 120 bp, Artificial Sequence
  ENSG00000264207_4 (sequence is synthesized)
gaattctggccctgggaaaattggtctcagcatgctgccaagctttctcatggacgtcagcgaatcccaacacactgtcggtcaaagccgtgctggaagaaacaaaacagttctccctcg

SEQ ID NO: 985236 - DNA, 120 bp, Artificial Sequence
  ENSG00000264207_5 (sequence is synthesized)
ccgataccaaaatccaggttgctcaagtctctcatagaaagtggcgtagtatttgcacataactatgcacatcctcccgtgtactttaaatagtctctaaattacttcgtaacacctaat

SEQ ID NO: 985237 - DNA, 120 bp, Artificial Sequence
  ENSG00000264207_6 (sequence is synthesized)
ccagtgtaaatgctatgtaagtaattgttatactgtttttatttttactatcttttgttgtacttttttttaaaaaagaaattcatttgtttaatattttcggtcttggggaacccgcgt

SEQ ID NO: 985238 - DNA, 120 bp, Artificial Sequence
  ENSG00000264207_7 (sequence is synthesized)
atatggagggcctgctacatagagaagactgagggatattctgtgcatccgtttctacggatcctctaaatcggcctttgttttcagccaggatttagtgcccagctgtgtcctttggag

SEQ ID NO: 985239 - DNA, 120 bp, Artificial Sequence
  ENSG00000264207_8 (sequence is synthesized)
gccccacatggagctagcaaagtttgctaaatcgggttttgcaagaggactgtctgctccatactgggagtagttaccgcaaactgccctatgaaattggttggggttcttactgttagc

SEQ ID NO: 985240 - DNA, 120 bp, Artificial Sequence
  ENSG00000264207_9 (sequence is synthesized)
atgtttattactttatcagggctctctgtaggagagtctatgagaaaatcttctggtttctgctgaaagaatcgtgttttgttggggtttttttcccgaaaaatattatttttaaaaact

SEQ ID NO: 985241 - DNA, 120 bp, Artificial Sequence
  ENSG00000234998_0 (sequence is synthesized)
gtaatgagttggccctcagtcatccccgtctagtcttactgagttgcttgttatctgtgctacgagattagaaaggttaataggacccatcctttggaagtaggaaagtggcatagaagg

SEQ ID NO: 985242 - DNA, 120 bp, Artificial Sequence
  ENSG00000234998_1 (sequence is synthesized)
aagagagaattggggagacagaattaatgtagactctgagggatcaactcagatctcttgagtttctatttctctttctcaaaatccagtactaacagaactgaacaagctacaggtggt

SEQ ID NO: 985243 - DNA, 120 bp, Artificial Sequence
  ENSG00000234998_2 (sequence is synthesized)
tatcaaggaaacttcactgcggtgtgtccaggcttaatgctacctcagggttgcccttcccatccttttcataaaataagctctaataaacagtggaagcacagatacaagttgcttcat

SEQ ID NO: 985244 - DNA, 120 bp, Artificial Sequence
  ENSG00000275185_0 (sequence is synthesized)
caacagttggtgttacgttagagctaataattatactttagcacgttaacctcagaattctaaggctgagagtcaaacactgctaattcatagaaggcaatagcttgtaataatgaatca

SEQ ID NO: 985245 - DNA, 120 bp, Artificial Sequence
  ENSG00000275185_1 (sequence is synthesized)
taaagctcttctactctttgtagttcagtagataaaaacatctgtctgtagtgaactattttatctgatgggaagaacacccgaggatccgccttcagtatagaatcgaagagaaactgc

SEQ ID NO: 985246 - DNA, 120 bp, Artificial Sequence
  ENSG00000275185_2 (sequence is synthesized)
tgcatttcgattcatgctcagcacctgatgctgcccatcctgggcaaaagttttatttaataaggcatacagcatggcttccatgatatgaaaatgtaacagtattggaaacagagatga

SEQ ID NO: 985247 - DNA, 120 bp, Artificial Sequence
  ENSG00000275185_3 (sequence is synthesized)
gttctgaatggaaagtcctgttttttccagaacatagaaatctgctttaggcatctttgaaatgatcgaggaaatctttttaaaaaaagacaaaataaaggaacagaaataattcattac

SEQ ID NO: 985248 - DNA, 120 bp, Artificial Sequence
  ENSG00000275186_0 (sequence is synthesized)
tctccccatttaatgcctgccccccgccccagggagggtgaagggaactctccctctgggccccatcacagaccatcagccagaggtgtcagccccacctgagcccgggggccccctgca

SEQ ID NO: 985249 - DNA, 120 bp, Artificial Sequence
  ENSG00000275186_1 (sequence is synthesized)
ctcagatgcctgattcccggaggccgaccactgcgaccttctgactcaaaaggagacgtgaggccccctgaagacgggaggcggggccgggacaggggctgcggactgagctcatcttcg

SEQ ID NO: 985250 - DNA, 120 bp, Artificial Sequence
  ENSG00000275186_2 (sequence is synthesized)
gcaccggacacctcgggcacctggattccaaatgcttggagctctcggaggggcctccctgtgctgcctgtggggatggcaattttgaaggaaaacctacaatgagacttgactttacaa

SEQ ID NO: 985251 - DNA, 120 bp, Artificial Sequence
  ENSG00000275186_3 (sequence is synthesized)
acatgtacgtgaaatgaattccacagctggagtggtcggcagaagcagagctggcaactatctctcggaccacatggcagaagccatctgagctggaccccaagacacagatgcacagca

SEQ ID NO: 985252 - DNA, 120 bp, Artificial Sequence
  ENSG00000285752_0 (sequence is synthesized)
agaacgcggacccgcgcccgcccggaggacgcagcgcgagccgggcactcccccacaacccgtgctcccgggccccccacgatcccgcagacggggtgtccccgaggactgggagaggac

SEQ ID NO: 985253 - DNA, 120 bp, Artificial Sequence
  ENSG00000285752_1 (sequence is synthesized)
ggagacggcggggatgggaagaagagtcggaggcacaggaagtactcaacaaaccctagcagaatcaacaagagttccagcatgcagctgaccactccctataccaaaggctgtttctga

SEQ ID NO: 985254 - DNA, 120 bp, Artificial Sequence
  ENSG00000285752_2 (sequence is synthesized)
agtggcaccaagtttgttagagaaggagcagagctacaagtcccggagccagaccacagaggcagacaggttcctccgaactgggttgtgccgggaaggcagctgctgtttaccctgcct

SEQ ID NO: 985255 - DNA, 120 bp, Artificial Sequence
  ENSG00000285752_3 (sequence is synthesized)
gtcacagacacagctactgctctatgtcagctgtcagccacagaacaggtctccacacacagaaaaacaaggatgacctctgttgcagaaaaagcaaaacacagtagtgttggggagctt

SEQ ID NO: 985256 - DNA, 120 bp, Artificial Sequence
  ENSG00000285752_4 (sequence is synthesized)
tacagtaagttctcttgcagaaaggcaagctatagaacaaaggtgatggacatggtgaaacagccaatcaaacagctctgtgtacaggttacttacctcttatgaccgtttgaccccttt

SEQ ID NO: 985257 - DNA, 120 bp, Artificial Sequence
  ENSG00000285752_5 (sequence is synthesized)
ctcagttctgtccaatctaaatcttgactttgaatacaaaggccaggactgttcctatttcccagcacaataaacaccacagccatagttcttatcgctagctctcatctacacctgata

SEQ ID NO: 985258 - DNA, 120 bp, Artificial Sequence
  ENSG00000285752_6 (sequence is synthesized)
attatctcacctgtctccaattgctgactactaagcgctaacctgattaatcaccacagcacatatttattgaggaccaaactttaatatttcaagggcaccccaaatgagttactggtg

SEQ ID NO: 985259 - DNA, 120 bp, Artificial Sequence
  ENSG00000285752_7 (sequence is synthesized)
gggttacataacctttcattcatgccaccaaaccaagattcatgaattctgaaagttaaagttgattacctctttggatacataaaaaatatatatattaaagcatgtcacacagtgcaa

SEQ ID NO: 985260 - DNA, 120 bp, Artificial Sequence
  ENSG00000285752_8 (sequence is synthesized)
aaaaaaaaaaaaaaaaaaaaagaggcatccagcagatgaaaaataggctcttggaaaagcccaaagcagcaggctgattgtcctaacaagaggacagagaaactctttctgtaggaaata

SEQ ID NO: 985261 - DNA, 120 bp, Artificial Sequence
  ENSG00000285752_9 (sequence is synthesized)
aagctgcctcagccaaagagagatccagacatgggttttgatggattcttattacaaccaaagacaagctcaaagaaagtggaagttcagatttcccatgggtgcagttggatcttgcat

SEQ ID NO: 985262 - DNA, 120 bp, Artificial Sequence
  ENSG00000285752_10 (sequence is synthesized)
caagacttagccagtgattctgattccaggctgacatctctgtgcttgagctctgagctcctcgggcaggacagcctggaattgctcctgcaccagcatttccacagtctgctcctttgt

SEQ ID NO: 985263 - DNA, 120 bp, Artificial Sequence
  ENSG00000285752_11 (sequence is synthesized)
gtggatatcaggtctcagccaccaccgtccagcaaggtcctagagatgcctgaggacatccctggggccagctgcatcctcatagcagaacttcctgaacctctgccgggaggctttcta

SEQ ID NO: 985264 - DNA, 120 bp, Artificial Sequence
  ENSG00000285752_12 (sequence is synthesized)
gcatggtcttaaagtcttcaacagagtcttcactgagggtctctggtgggagcccagaaggctctcgtggaatctggacctggaaagcaggtagtaggacaacttctggctcctcggccc

SEQ ID NO: 985265 - DNA, 120 bp, Artificial Sequence
  ENSG00000285752_13 (sequence is synthesized)
atcatttcattgggtagtgatctcatttgatcattctggacttctgtatttctttgtgtctctgggtacacttcagtctcaattctggaactctaagaaaaaacgttccagacttctagg

SEQ ID NO: 985266 - DNA, 120 bp, Artificial Sequence
  ENSG00000285752_14 (sequence is synthesized)
cacaaacagaaaagtaagaatcagcaaaaacagaccataaaagctgttaaaccactctgatctcacggatctggtccagacccaggttccatcagccttccaatcttaacagggtttctt

SEQ ID NO: 985267 - DNA, 120 bp, Artificial Sequence
  ENSG00000285752_15 (sequence is synthesized)
aataaaggtactagaaactcatttttgtcttcttcctggtagatcaattaacacaattgaggaaacatgacagtagtttaccaaaataagaaatgtaggttctcaaagctgattgaagaa

SEQ ID NO: 985268 - DNA, 120 bp, Artificial Sequence
  ENSG00000285752_16 (sequence is synthesized)
tactggccttgctagagaatcgtgcattcattttgtctctcactatgaagtgttttacattatgttgaaacaagaattgcatatgcacatgatttgcttgggagagggctttaaaatcat

SEQ ID NO: 985269 - DNA, 120 bp, Artificial Sequence
  ENSG00000285752_17 (sequence is synthesized)
atgatttgcttgggagagggctttaaaatcatgggtgtttgcttcctccaaccatttttgtttcttttttggagacagcgtcttgccgtcattcaggctggagtgcaatggcatgatctc

SEQ ID NO: 985270 - DNA, 120 bp, Artificial Sequence
  ENSG00000285752_18 (sequence is synthesized)
atcaagaatgaagcacctctgatcagtgtatgggacttgtcaaaatcctaatagagtacacttccaactctttggatatttgagagctccaggattatcaaaccagctatagccgtgggg

SEQ ID NO: 985271 - DNA, 120 bp, Artificial Sequence
  ENSG00000285752_19 (sequence is synthesized)
ggcggcggggcgggaggcaaattaaatacctgtaaaatgccagaaaaaaagcctttgcttcatttgggctagggccccagttcaaaagaggagttatttacaggaaaacacatcctatgt

SEQ ID NO: 985272 - DNA, 120 bp, Artificial Sequence
  ENSG00000285752_20 (sequence is synthesized)
taattaactttaaaacaagagagttcaaataacagaaatgactaaattaattctcacattaggatacagccccatgatgcagtcacttttcaaggatcatcattttcttttttttttttt

SEQ ID NO: 985273 - DNA, 71 bp, Artificial Sequence
  ENSG00000275450_0 (sequence is synthesized)
attgctctggctaggacctccagtactatgttgaaaaggagtggtgagagtaggctcttcgtcttgttcca

SEQ ID NO: 985274 - DNA, 120 bp, Artificial Sequence
  ENSG00000275450_1 (sequence is synthesized)
ctgtgggtctgtcatagatggcttttattacattaagactcagcttcgcactccagggctgcgtaccaccagccactgtcatgttaaccccttcccaggccaatgtgtccttggcctgga

SEQ ID NO: 985275 - DNA, 120 bp, Artificial Sequence
  ENSG00000275450_2 (sequence is synthesized)
gcccaatctgctggacagcttgggaccgtccattttcggggtggtgggcaacctggtggccatcgtggtgctgtgcaagtcgcgcaaggagcagaaggagaccaccttctacacagttat

SEQ ID NO: 985276 - DNA, 120 bp, Artificial Sequence
  ENSG00000275450_3 (sequence is synthesized)
gcggctggctgccaccgacctgttgttcactttgctggtgagccaggtgaccatcgccatgtacatgaagggcgggtaacctgggggccagctgctgtgtgagtacagcatcttcagcct

SEQ ID NO: 985277 - DNA, 120 bp, Artificial Sequence
  ENSG00000275450_4 (sequence is synthesized)
gttcttcttcagtcagtccggcctcagcatcgtctgtgccatgatatctatacaggatgtctcaactcaaatgtgaaattttcatggagaatatttgaactgtatttagattaatacaaa

SEQ ID NO: 985278 - DNA, 120 bp, Artificial Sequence
  ENSG00000275450_5 (sequence is synthesized)
ttgcagttaaaaagtttaatatagatttaccagggggcgtgcagccctcttgccaatcagatcgttgctgagcggtcccgcagccaacccccgaagagcagcctgctggcttccccagcg

SEQ ID NO: 985279 - DNA, 120 bp, Artificial Sequence
  ENSG00000275450_6 (sequence is synthesized)
cccaggagttggggatgtcctacaaacctaccacccctgcccccagcagcacccccggcttcagcacccctgggccaggcactccggtccctacaggaagcgtcccgtcgccgtcgggct

SEQ ID NO: 985280 - DNA, 120 bp, Artificial Sequence
  ENSG00000275450_7 (sequence is synthesized)
cagggccgggagccactgccccttgcagaccgctgtttaaagactttggaccgcctaccgtcggttgtatgcaggccatgaaaccacctggtgcccagggctcccagagcacctacacgg

SEQ ID NO: 985281 - DNA, 120 bp, Artificial Sequence
  ENSG00000275450_8 (sequence is synthesized)
aactgctgttggtcacaggggagatgggcaaagggatccggcccacctatgctggcagcaagagcgccgcggagcgcctgaagagaggtatcatccatccctagtcagagtgcctggtag

SEQ ID NO: 985282 - DNA, 120 bp, Artificial Sequence
  ENSG00000275450_9 (sequence is synthesized)
agacagagcggaacgcccacacttaacaggaagctcctaggcctctgtgtctggacttcagagcacctgcttctccctggccttcatccctagttgcactaaccatcctgggcttcctgt

SEQ ID NO: 985283 - DNA, 120 bp, Artificial Sequence
  ENSG00000275450_10 (sequence is synthesized)
cctgtgtcccttgatgggtgccctccaggaaccaaggggcggttctcactgcaggtggcagcactaaggacccccctccccaccccaccccgccaacgcaacaagagttagcagcgaggt

SEQ ID NO: 985284 - DNA, 120 bp, Artificial Sequence
  ENSG00000275450_11 (sequence is synthesized)
ccccgtgagtcccacccatgacctgcagacagtgttgcccactggaactttctgtggcccccaccactcagcccttcccagcacttgtccagagcctctttctccctcagcacagctcag

SEQ ID NO: 985285 - DNA, 120 bp, Artificial Sequence
  ENSG00000275450_12 (sequence is synthesized)
acctcaggcctgacacttccttgccttgtgtcttttgctaaatatgacctttctatattaataaaagatgctttggagttgtgctctctaaaaaaaagtttaatataaaggagaaataaa

SEQ ID NO: 985286 - DNA, 120 bp, Artificial Sequence
  ENSG00000275450_13 (sequence is synthesized)
aaatttagcaaagaaatatgtagatgaatatttaaatactcagaggtgacattactaccagacataatgagattatcagatgtttcatttacttatgattaatatgtttgtatttatttt

SEQ ID NO: 985287 - DNA, 76 bp, Artificial Sequence
  ENSG00000275450_14 (sequence is synthesized)
taatgctctccctccccgcctgtgtccaagtattctcattgtttaatttccacctatgagtgagaatatgcagtgt

SEQ ID NO: 985288 - DNA, 120 bp, Artificial Sequence
  ENSG00000275450_15 (sequence is synthesized)
tgagtgagaatatgcagtgtttggttttctgaccttgcgatagtttaaacaaactaggaagttcagaagtcactttacaagagaaataaagaaaaataaagtattaatgacattggtaac

SEQ ID NO: 985289 - DNA, 120 bp, Artificial Sequence
  ENSG00000275450_16 (sequence is synthesized)
taatgacattggtaacaataaaaattagagttagacaaagtattaacaagcaagcttatatatttataagagatgggaaaatattagaaaggaataaatcatgtcttgtcaacatgaaga

SEQ ID NO: 985290 - DNA, 120 bp, Artificial Sequence
  ENSG00000275450_17 (sequence is synthesized)
aaaagtgtatttttttgttaacttattattgtgtttccttgtataattttcacttggttttgttggttttactacttgcttcattctttcaaaaactgcatcttcatagaccatttcagc

SEQ ID NO: 985291 - DNA, 120 bp, Artificial Sequence
  ENSG00000275450_18 (sequence is synthesized)
ttttgctatgtgggcagaattataaaacccaatttcaaaatttcagctgaacgttgtcagcatttttctttgggctttttatcggaaaaaaaacctaagtaattgtgtgtgtgtgtattt

SEQ ID NO: 985292 - DNA, 120 bp, Artificial Sequence
  ENSG00000275450_19 (sequence is synthesized)
tagtattaccatgaatgtaataacaataaaatcaaacaaaaacaaatggatatgcaatatgttggactagcatctcaaatatgaaaaaggcattgccaacagtgatataattttttttca

SEQ ID NO: 985293 - DNA, 120 bp, Artificial Sequence
  ENSG00000275450_20 (sequence is synthesized)
taatggtaagctttttaaagtataatcttattttaacctaaaatcttactatcagaaaatgcagtgtacattaaaatgttctgaaatgctttattcacatttattaaatggttgtactca

SEQ ID NO: 985294 - DNA, 120 bp, Artificial Sequence
  ENSG00000275450_21 (sequence is synthesized)
ctcagatatctacaaattggtttttcacttatgtaattatcttatagaatgttcaaaagtcatgcagaatgtgagataactttctattgaatatgattgttttatcattgcaagacatca

SEQ ID NO: 985295 - DNA, 120 bp, Artificial Sequence
  ENSG00000275450_22 (sequence is synthesized)
aacatccctgtttcctgccaaatgaatgtacaatagcaataaatgtaaagatgtgttttttggaaaagacacatttttgagttataaaacaaggattttaaaacttgaattgttacagtg

SEQ ID NO: 985296 - DNA, 120 bp, Artificial Sequence
  ENSG00000275450_23 (sequence is synthesized)
agcatgtcttaatataggctacagtcactttagataaaaaattacctcacatctattttcaatattacttaaagatgttcatttagtggcaaatattttttttttgcctggaggcagata

SEQ ID NO: 985297 - DNA, 120 bp, Artificial Sequence
  ENSG00000275450_24 (sequence is synthesized)
ttttgccacatggctatttatgaaactgtatttaaatgcatgtacacatataaaagctgccactgtggctgtaaactattacaagttatcaagattaaaaaataaacaaaaaatatttca

SEQ ID NO: 985298 - DNA, 120 bp, Artificial Sequence
  ENSG00000275457_0 (sequence is synthesized)
gaaccctataggcccttgccccgccgagggtcctgaattcctcgcccccggggtgctgaatcccacagcccgcgtcccatcgcgtgtggggctgcgactgctcgcgaggctggcagcagg

SEQ ID NO: 985299 - DNA, 120 bp, Artificial Sequence
  ENSG00000275457_1 (sequence is synthesized)
gagctccggcaaggctccccgggggcaggcggcggagcccatgggccgcggcctagacgtgccgggggcccgggctcgagtgtggcggccgcctggcgcctcctcaccttctcttccacg

SEQ ID NO: 985300 - DNA, 120 bp, Artificial Sequence
  ENSG00000275457_2 (sequence is synthesized)
cacgcagttgactatgatggacgggtacttgcggctgagccagcggaagaacgccgggactcccatagcggcacacggctggaggcggcggccgaccggctgacgagcgtaaccaaagag

SEQ ID NO: 985301 - DNA, 120 bp, Artificial Sequence
  ENSG00000275457_3 (sequence is synthesized)
acgggagcagcggcagagggcaccagcacttcctcccacgtgcgcgctggagaacggaagtgacgtcacggcgccgccgccggggaagctgggaaggaggcttcgctggatgagggagcg

SEQ ID NO: 985302 - DNA, 120 bp, Artificial Sequence
  ENSG00000275457_4 (sequence is synthesized)
tgccgggctgtttgtgggaggcggagtccggcggcggaccgggtggcgaaggctgcagctcgccctcggtggtcccagccccggagcgcgaggccgagcgcgtctgagttgcgggggctc

SEQ ID NO: 985303 - DNA, 120 bp, Artificial Sequence
  ENSG00000275457_5 (sequence is synthesized)
acgggcgactgctctgccggggctccgccgggatctcccagccccagccctccggctccctgggcacagaatcgctgcgctctgcatgcccgggaggaggtctcccttgcccgtttggtc

SEQ ID NO: 985304 - DNA, 120 bp, Artificial Sequence
  ENSG00000275457_6 (sequence is synthesized)
acctcttgtttggaagaaaatgtctttttttgcctctatgctcacccgtctcaatctagggtagaatcgaagcatccaaacttactcgttacttccatttcctggtttctcctagttttg

SEQ ID NO: 985305 - DNA, 120 bp, Artificial Sequence
  ENSG00000275457_7 (sequence is synthesized)
tgctgcagtacgtacctggactatcaaaaggagcattttaaagcattttacagtaataatggctgctttgcaccaataatttgattgttatgcaaataaataattatgatagttaccgaa

SEQ ID NO: 985306 - DNA, 120 bp, Artificial Sequence
  ENSG00000275454_0 (sequence is synthesized)
gtacgtgcccttgctccacaaaggccacggcagcctgaaggtgctgcgccatgcgcagcttgaggagcacggtggggaggcggcggcggcagaaggacgaggccgtgacgaagtcgcaga

SEQ ID NO: 985307 - DNA, 120 bp, Artificial Sequence
  ENSG00000275454_1 (sequence is synthesized)
gctccagcgaaccgcgcgtgggcaccaagccgagagcatacagcttgtccagcagcgcggccgaagcgcgcacgcggaactggtcgcgttcgggcaggtcgcgcaggcgccgcgccagct

SEQ ID NO: 985308 - DNA, 120 bp, Artificial Sequence
  ENSG00000275454_2 (sequence is synthesized)
cacgcacggcacggctcagctggttgtagcgcgtgtagtcctcccgccgctgcagccggtaacgccgcagcacgcgcagctcgtgcaggttgtggtcggtgacctcccagttcaggaagt

SEQ ID NO: 985309 - DNA, 120 bp, Artificial Sequence
  ENSG00000275454_3 (sequence is synthesized)
ccacctgcttcagcagcttctgctcgtggaacttaagcttccgcaccatgatggcggcagccgcagccgcaggacccgaagctgagagcgcgttctggcatccgcgcgatttccgccgcg

SEQ ID NO: 985310 - DNA, 120 bp, Artificial Sequence
  ENSG00000275454_4 (sequence is synthesized)
gcgccccaagacctggacggcctgggaccctgggccaatgaaagaaagacttaaagtcacgccctcacttcccattggccagggtgggaccacgcctctgcactgggatctcgcgtttct

SEQ ID NO: 985311 - DNA, 120 bp, Artificial Sequence
  ENSG00000275454_5 (sequence is synthesized)
cgagggagggggtagaagcaccggaggtgggtggttgggagcgggtccctaggcggttccgcgcggtttttagtagccaagactgtatccctttctgcggcaatcatttcctcctagact

SEQ ID NO: 985312 - DNA, 120 bp, Artificial Sequence
  ENSG00000275454_6 (sequence is synthesized)
tctgtcctttggggactttcagagtctcccccgcaagagctgaagaggccatttctggggaagaggggtgactgcggcttgttgattgggtttactgtgctaacttgcactgggctcctg

SEQ ID NO: 985313 - DNA, 120 bp, Artificial Sequence
  ENSG00000275454_7 (sequence is synthesized)
ccatgccttgggggagcttgccggagccggctctcctggggctgacctggtagtccccgccgcccgccagcgtcaggtccttcacctggcatgcagagcgatctctcattgtcaagttgg

SEQ ID NO: 985314 - DNA, 120 bp, Artificial Sequence
  ENSG00000275454_8 (sequence is synthesized)
gataggtggcaccgaacccatgaaatactgattggctgcttcctaggcccacagaaaagggatctataagggagtcgcctggaaatctgtattattaactaaagtgtcagatgattcata

SEQ ID NO: 985315 - DNA, 120 bp, Artificial Sequence
  ENSG00000275454_9 (sequence is synthesized)
aaacccagcaagtttgagaaacttggactataactacaagtccaaaccctttagtctgtgctcaaatgaattatcctgacatgaatttctggccaccaagcattgagttaacaaatttaa

SEQ ID NO: 985316 - DNA, 120 bp, Artificial Sequence
  ENSG00000271564_0 (sequence is synthesized)
gccaggctcgctgggcagcgcctcctcccggaggtccctccgctggttccttcattccgctggttccttcatttcgctgaatggagatattctcaacatgggatgtgcatctaagttatg

SEQ ID NO: 985317 - DNA, 120 bp, Artificial Sequence
  ENSG00000271564_1 (sequence is synthesized)
aagcataacaattaaataacatccataaacccatgacctcatgcagaatgaaacatttctagtcccgtggaagctacaggactgctggaatttcttctctgatccagtccccttgcttcg

SEQ ID NO: 985318 - DNA, 120 bp, Artificial Sequence
  ENSG00000271564_2 (sequence is synthesized)
caacagaggttcctgcttctccacgccaatgacatggtgagagaatagaggggaagctgaagacaaacaacataaacttatgtttgaaaagcaccttttactctatgaaataaagtgagt

SEQ ID NO: 985319 - DNA, 120 bp, Artificial Sequence
  ENSG00000271564_3 (sequence is synthesized)
tggaacaacaagctttcagagtcactgcagggcaagagctggggagggaagagctggctggtcatggaggatgcactggagtgaaaaaacatcactcaattggccaggacattccaggac

SEQ ID NO: 985320 - DNA, 89 bp, Artificial Sequence
  ENSG00000271564_4 (sequence is synthesized)
gtgaaaaaacatcactcaattggccaggacattccaggacatcagggagaccacacaacagctagagtgtctcttttcatccaaatgac

SEQ ID NO: 985321 - DNA, 120 bp, Artificial Sequence
  ENSG00000271564_5 (sequence is synthesized)
gggctgaggctgagtattgctgaggcaataccatttagaacataggcacaggtaaggatttcatgacaaaaacgccaaaagcaattgcaaccaaagcaaaaattgataaatgggatctaa

SEQ ID NO: 985322 - DNA, 89 bp, Artificial Sequence
  ENSG00000271564_6 (sequence is synthesized)
gcctctgcatgagcctacagaatgggagacaatttttgcgatctgtctgtctgacaaaggcctaatatccagaatctataaggaactta

SEQ ID NO: 985323 - DNA, 120 bp, Artificial Sequence
  ENSG00000271564_7 (sequence is synthesized)
ggagcagcttccagttgtcttctccctgtggagttatatgaacagaacttaattctcccagcaatgacgtgtgacaatatggacaaagaattgtcaaccagggatgctcacacaaacttt

SEQ ID NO: 985324 - DNA, 120 bp, Artificial Sequence
  ENSG00000271569_0 (sequence is synthesized)
tcctccctgtctgcatctgtaggagacagtgtcaccatcacttgccgggcgagtcagagttttaccaatcagttagcctggtatcagcagaaaccagggaaagctcctaagctcctgata

SEQ ID NO: 985325 - DNA, 120 bp, Artificial Sequence
  ENSG00000271569_1 (sequence is synthesized)
gtttgcaaacgggggttccatctctgttcagtggtagtgaatctgggacagatttcactctaaccatcagcagcctgcagcctgatgatgttgcaacttactactgtcaacagtaactcc

SEQ ID NO: 985326 - DNA, 120 bp, Artificial Sequence
  ENSG00000224905_0 (sequence is synthesized)
aatctggcgcggcctttgtctcacttcagccagagagcggggttagggcttcattgccttgtgtcctctgctccgggagacttcggtgattctgccactccctccgtcgctctgtgacct

SEQ ID NO: 985327 - DNA, 120 bp, Artificial Sequence
  ENSG00000224905_1 (sequence is synthesized)
gctggcattgaatgatttatagctaagactccaggacacccctgaagccgagaaatgaaatcccaagttgaccgtcaagtccaacgctcgctgcagacatctagtggacccggcgctcgc

SEQ ID NO: 985328 - DNA, 120 bp, Artificial Sequence
  ENSG00000224905_2 (sequence is synthesized)
ggacggaagcggacagacctagttggatccttatcccaccaatctggcccacctttgctgccatctaactccgctgaccggcccaccgttcctccactgttcgctggttgacccgggcag

SEQ ID NO: 985329 - DNA, 120 bp, Artificial Sequence
  ENSG00000224905_3 (sequence is synthesized)
cggagagaggagggtgttgtcaatggaaatatggattcttctacagcaaacatgtacatctatatcatgtggaacaaggatagtgggaaaacctctgattgtgaggacgtagaactgaga

SEQ ID NO: 985330 - DNA, 120 bp, Artificial Sequence
  ENSG00000224905_4 (sequence is synthesized)
catatgaaatgtcataagaaaaacacttctggagcatgtcgtcttcaagaaaatggtgcccagacagtcaggattgtgttacattttaataggaatggggatatttgtgatatactgaca

SEQ ID NO: 985331 - DNA, 120 bp, Artificial Sequence
  ENSG00000224905_5 (sequence is synthesized)
aaccaagacaggtgactataaaactgcaatgtaaagtgtcagcttctcctcacacctttatagtagacatctgagaacctcactcctgtcagcatattcttggggttgaatctcaagtga

SEQ ID NO: 985332 - DNA, 120 bp, Artificial Sequence
  ENSG00000224905_6 (sequence is synthesized)
tccatagaatcttagataaagcagatgaaaataggcttttctgtcttcctaagtaaacagcaatgaagttgagagaaagaagatattgctggaagtcatgataaagtctatcttctgtga

SEQ ID NO: 985333 - DNA, 120 bp, Artificial Sequence
  ENSG00000224905_7 (sequence is synthesized)
ccatatgtttccttagagagttttagacattgaccctcatctaaaaaattgtgaaaaaggactctcaccagtctgttaatatgtatgtatatgaaagaaattactggtaaacttctaagg

SEQ ID NO: 985334 - DNA, 120 bp, Artificial Sequence
  ENSG00000224905_8 (sequence is synthesized)
caggcattggtgttacttttttttatctttattgtgtctgtgaaatgattgtgtgtattttttctttgattagacaatgagattcccaaataaattttattaaagccaaaaaaaccttta

SEQ ID NO: 985335 - DNA, 120 bp, Artificial Sequence
  ENSG00000224905_9 (sequence is synthesized)
cggagagaggaggttcttgtgtactatgtttaacattgacaagaagataattaggaaataaatatatataaatacaggaacataaagagaaataaagaggaagcaccacagtcaactaaa

SEQ ID NO: 985336 - DNA, 120 bp, Artificial Sequence
  ENSG00000224905_10 (sequence is synthesized)
aaagagagattcccagcaacctacacaaccatttctataggctctcagctgatgcttagtgtttggacaactcacacatgcagattgacagatgaccaacttataaaagagatttttaat

SEQ ID NO: 985337 - DNA, 120 bp, Artificial Sequence
  ENSG00000224905_11 (sequence is synthesized)
gtcaggctgtgtttggatgttagcagttagtttagctttgcgtcttcagagcaattgttcttagctacttaaaaaaagaaaagaaaagaaaggaaaatttaaaattttcttcattgatca

SEQ ID NO: 985338 - DNA, 120 bp, Artificial Sequence
  ENSG00000224905_12 (sequence is synthesized)
ttcaggagcatgtttaatttccatgtatttgtacaatttcaaaagttcaccttgttgttgacttctagttttattccattgtggtcaggaaagatactcgatataatttcaattatttta

SEQ ID NO: 985339 - DNA, 120 bp, Artificial Sequence
  ENSG00000224905_13 (sequence is synthesized)
aatttgttgagacttgttttgtggcctaacatatggtctattctggagaatgtttcttgtgctgatgaaagaatgtgttttttgcatctgttggatgaaatgttctgtaaatgtctcttt

SEQ ID NO: 985340 - DNA, 120 bp, Artificial Sequence
  ENSG00000224903_0 (sequence is synthesized)
ataagaggtgacaaaaaatcacttctgatttaagagacaacctactatgacatattagaaattactaagagtagcccagagaacacaactgactgtcaacgactgaagataaaaaactgg

SEQ ID NO: 985341 - DNA, 120 bp, Artificial Sequence
  ENSG00000224903_1 (sequence is synthesized)
aaagaatgtaaaggaaggatgacgcaatcgtgcatggcggtcctttaccaaattgagaatgaacacccgagacgaatgatctctgaagatcagagacactgctctcaggaacagaacaca

SEQ ID NO: 985342 - DNA, 120 bp, Artificial Sequence
  ENSG00000224903_2 (sequence is synthesized)
cagtaactcatctccatattctaggaaaggagttaatagtgataataaatacagaatttccagcacctactgtgtgctgggccattataaatgctacagctcttctcaggccaacactgc

SEQ ID NO: 985343 - DNA, 120 bp, Artificial Sequence
  ENSG00000224903_3 (sequence is synthesized)
caggaagaagtgatggctttcatatgacagcctcggagctgctgctgtttgcctgaagccacaggctgatggggtaggactgtccttttcatatggggacaaggaatgggaaattgttaa

SEQ ID NO: 985344 - DNA, 120 bp, Artificial Sequence
  ENSG00000224903_4 (sequence is synthesized)
ataagtcccccaaaagtaaaactaaagcataaatagtggttaagaggaagggtagacatggaagttagctctaaagctcattgtgatgaccccacgaggtactcaatacaatggtagcat

SEQ ID NO: 985345 - DNA, 120 bp, Artificial Sequence
  ENSG00000224903_5 (sequence is synthesized)
gtgggggctttatttttataggcagcttctattttcattactatgagatgtgcagcagatgtcttcatttacatatagcccaggagatgggaaaaattaagctggtttccagtcttgtgt

SEQ ID NO: 985346 - DNA, 120 bp, Artificial Sequence
  ENSG00000224903_6 (sequence is synthesized)
ctgaagagataagtttatttaaacaattagcacaaaatggccaaacagaagttgctttgatttaacctaattttatgatttaactagaaaagaaagtctagaagtatttgaacatctagg

SEQ ID NO: 985347 - DNA, 120 bp, Artificial Sequence
  ENSG00000224903_7 (sequence is synthesized)
ttggaaagccaactaaagttaaacaggatttttagcagcatctcacccatttttaaaaagccctcaaagtgaagtaagtctcaaagttttaccacctctgttagccttcctgaccccaag

SEQ ID NO: 985348 - DNA, 120 bp, Artificial Sequence
  ENSG00000224903_8 (sequence is synthesized)
tgaaccacccgcacggagaccatatctggagaacataatgatctttacctacctttttttcaaagaatttttttcttaacttggcatctgtgggaggtactgttttcctcaggtttctgt

SEQ ID NO: 985349 - DNA, 120 bp, Artificial Sequence
  ENSG00000224903_9 (sequence is synthesized)
accactttctaacaacacatcctctccagtaggcttggattctaaaacacagatatttgaaaatgactaatttatgatgactctatgtcaaccaatacttcagtagttgttataagccct

SEQ ID NO: 985350 - DNA, 120 bp, Artificial Sequence
  ENSG00000224903_10 (sequence is synthesized)
gtgctgtacaaggccctggggaaattatggtggccaagaagagagataaaatcccactattcaaaaaacaagttagttgtcatagcctgatctgtgtctgcttagcgccaaacgggcctg

SEQ ID NO: 985351 - DNA, 120 bp, Artificial Sequence
  ENSG00000224903_11 (sequence is synthesized)
gcgtcctcacctggtcacacacttgattctgaacaggcgggccccatcgtgtatcactcgggtttgatactggttctttctacagagaggacaggttttcttatttgtgaacttttcaaa

SEQ ID NO: 985352 - DNA, 120 bp, Artificial Sequence
  ENSG00000224903_12 (sequence is synthesized)
agcctgaagacatgcctgaagaaaaacatttcacttaaaattttacaagtaattacttataaacaacgtttttacttccaatgttagtgttctaattatagtgttcttttctcccataac

SEQ ID NO: 985353 - DNA, 120 bp, Artificial Sequence
  ENSG00000224903_13 (sequence is synthesized)
tatgagacttagcccaatttaggttataaagtgaggaggcttcatcaggtgctaccaccttcctcacaaaacctgttccaaaaatgatttcttacaagaatatacatgcagagacatcaa

SEQ ID NO: 985354 - DNA, 120 bp, Artificial Sequence
  ENSG00000224903_14 (sequence is synthesized)
aaacttctgaaatccactagcacaaagatggtggtgatgaataaaataaatggctctccttaggagccttgaaaatgactatggtttctctgcactgtgagagcgacatgtgcagcacct

SEQ ID NO: 985355 - DNA, 120 bp, Artificial Sequence
  ENSG00000224903_15 (sequence is synthesized)
cgtgaggggtggacttactttgtggaacacatgggagcatgaaagcagcacctgttcatgaggaaacagaacgacgttgaagtttacaaaagagaagcagcatgtatccaacagttaaaa

SEQ ID NO: 985356 - DNA, 120 bp, Artificial Sequence
  ENSG00000224903_16 (sequence is synthesized)
tcctgaatgcttagaagggaaagtgtgctcacaagaaaacttcacctttctgtgacccaaattccccactaaacagtgatatactgggctgtgacaaaagactgaagcttagaccaaatg

SEQ ID NO: 985357 - DNA, 120 bp, Artificial Sequence
  ENSG00000224903_17 (sequence is synthesized)
aagaagaaggcagtgggtacttagtagaagggacagccgccagcccaccagcgccaggccctgcgggctgccacacaaaggccaggctcctgcttcccttgggaggggctgctttcagca

SEQ ID NO: 985358 - DNA, 120 bp, Artificial Sequence
  ENSG00000224903_18 (sequence is synthesized)
acggggaggaaagcaggggaaacttgtgagactgagcaaagcggtggggtcaggcgaagggttttccctttttgtcaagaatctgacttgggtgaccacagtctggggcactcctgggtg

SEQ ID NO: 985359 - DNA, 120 bp, Artificial Sequence
  ENSG00000224903_19 (sequence is synthesized)
aggtttcaatctcagccggcccaggatgcctgctgtggggaaaacttaacagtttttaaagtgaatcccacctgccttcactcaatgtatgcttttcttcttaaatggaagaaatacaga

SEQ ID NO: 985360 - DNA, 120 bp, Artificial Sequence
  ENSG00000224903_20 (sequence is synthesized)
aataactagaactcagaaagttgtaaaaccttttcttgaaacttattgccaagagtaagtctgaattgaataaactcagtaatagggtcctttttcattaccaccatttaatagcaatct

SEQ ID NO: 985361 - DNA, 120 bp, Artificial Sequence
  ENSG00000224903_21 (sequence is synthesized)
tttctatacttaattcattctttatagaatacttttcagtgttttatcaacatatattctatctatatggagcaacattagacgtcagtatattaaagtgttatctttttaagtgtcccc

SEQ ID NO: 985362 - DNA, 120 bp, Artificial Sequence
  ENSG00000224903_22 (sequence is synthesized)
aaatatttgttattggcaaacattctctgatgtaacaaaaatcaaggattaagtagtggaaaacacactaaaaatggcctagaagttaggattggattccagcaggactctgatactttc

SEQ ID NO: 985363 - DNA, 120 bp, Artificial Sequence
  ENSG00000224903_23 (sequence is synthesized)
tgcgtcggcctactatgagtcatttgaattgtttttattccctcatctgctaaatgggcagaatgcctactatacggaattaattgaaggccctctgaaatcactaaatgttataaaaat

SEQ ID NO: 985364 - DNA, 120 bp, Artificial Sequence
  ENSG00000224903_24 (sequence is synthesized)
gccaactattgtttataactaaggaaaaatctgaacatggaaatgatcactggaaatgcaaaatatacaggatgggtcttatatcaaaaccaagtaaaaataatggaatttagtgagaaa

SEQ ID NO: 985365 - DNA, 120 bp, Artificial Sequence
  ENSG00000224903_25 (sequence is synthesized)
tttataaaaatcagaaagaaatgttgggcagggtacaccctgatccccataagatagtaactttcacttttcattcttcatacagacactcgggttggatattttagtataagtaagaaa

SEQ ID NO: 985366 - DNA, 120 bp, Artificial Sequence
  ENSG00000224903_26 (sequence is synthesized)
gagggtgcttagccagaaagacaccctctggctttattcacagttttgctacattaaattactaaattatcctagacaatttgtggtttcagggctaaaatctgtccaaaatacccaact

SEQ ID NO: 985367 - DNA, 120 bp, Artificial Sequence
  ENSG00000224903_27 (sequence is synthesized)
ttcacatatgtaagattaggtcctgatagagaactggaatataataagtatgtctaaagtaacttatgaattcaaattagtgaatagaagtgtaactgttgtgagctttcttgctgatga

SEQ ID NO: 985368 - DNA, 120 bp, Artificial Sequence
  ENSG00000224903_28 (sequence is synthesized)
aacctactcaaattcaatgaagactcagagttcatttgcccagattgtaataagcctgggttcctaggctacaaactccaaggctgattttaactgtatttgctgtgttttctcagcaaa

SEQ ID NO: 985369 - DNA, 120 bp, Artificial Sequence
  ENSG00000224903_29 (sequence is synthesized)
tctctgagggcctgctatgcaggaagcgtaatgccacaccacgtgggaaattgttacagggcaaccacgcacgcacgtgcacgcacacacacacttctgataaatctaagtgtccccaac

SEQ ID NO: 985370 - DNA, 120 bp, Artificial Sequence
  ENSG00000224903_30 (sequence is synthesized)
ttcaggggacaatagtttagttaggcagacaaaatatgtatagaaaaaaccctatatgcattctctctctctctctctatatatatatatgcattctctctctctctctgtgtgtgtgtg

SEQ ID NO: 985371 - DNA, 120 bp, Artificial Sequence
  ENSG00000224903_31 (sequence is synthesized)
tggggcatggttgcacggagtccccttgcaggagagagcgctgtttcaccttctcccattcatctgatgacagtggaggtggtggaggcccaatgaggcccaacttctgtgctaaagtaa

SEQ ID NO: 985372 - DNA, 120 bp, Artificial Sequence
  ENSG00000224903_32 (sequence is synthesized)
agtgtcttttagcatatggcacccacctataactttaatgacaccatttgcaaacaaagattaaagaactacatatagatcacatactttatttcacaatagaagctgtccattggtatc

SEQ ID NO: 985373 - DNA, 120 bp, Artificial Sequence
  ENSG00000224903_33 (sequence is synthesized)
cacagggaatgtgttccaggacattccaaggatgctcaagtccctgatagaagatggtggagtatttgcatacaacccatgcatatcctcctgtatactgccagtcatctcgattaccaa

SEQ ID NO: 985374 - DNA, 120 bp, Artificial Sequence
  ENSG00000224903_34 (sequence is synthesized)
ccagtcatctcgattaccaataattcctaatgcaagtgctatgtaaatagctgttatactatattgtttttaatctgtattatttttattatattgttgtattgttattttttattcatt

SEQ ID NO: 985375 - DNA, 120 bp, Artificial Sequence
  ENSG00000224901_0 (sequence is synthesized)
cagtgaacaaaagcagtgaataaaaagccagtctcaccaaagaaaccataaagagaacatcccagcctgtgcctctctaatggattcgagtgataattaagaaggaactgaaaaaggaaa

SEQ ID NO: 985376 - DNA, 120 bp, Artificial Sequence
  ENSG00000224901_1 (sequence is synthesized)
atcttgatctttaccagttctgcctacaaagttacagtttgtggtttttcaacagctctatttaaaaaaaaaaaaaaagttttttttaaataaagtgcccgttgcttgtgatgacaaaaa

SEQ ID NO: 985377 - DNA, 120 bp, Artificial Sequence
  ENSG00000244459_0 (sequence is synthesized)
cggccgcggggctgcagctcccggctcgcactccatcatcgacggatgacagcgggaacggtgggagttcattacagggaccatgaattgttggagaggaatctgaagaaacgtgctgga

SEQ ID NO: 985378 - DNA, 120 bp, Artificial Sequence
  ENSG00000244459_1 (sequence is synthesized)
tgtccccagagaaggagctgaaccatttgagtgggggcttcactgactctccccacacacagggcaccgggggagagcagtcacatgaccggcaggcgggggttttgaccctggtgggag

SEQ ID NO: 985379 - DNA, 120 bp, Artificial Sequence
  ENSG00000244459_2 (sequence is synthesized)
aaggccgtcctagaccagcggggcctcaggagatggtgcagagtcctggaccagacaaacggcactgggaaagcaggagcccaaaggaaggctggaattcagggaagagccacgtgccag

SEQ ID NO: 985380 - DNA, 120 bp, Artificial Sequence
  ENSG00000244459_3 (sequence is synthesized)
gctgtgacgaaggcgacaagatgaaacagtaggggggcgggggaggcatccaaactctatgtgctgtctttgcactactctgtaaatctaacattattcggaagtgaaagttaaaaatca

SEQ ID NO: 985381 - DNA, 120 bp, Artificial Sequence
  ENSG00000235480_0 (sequence is synthesized)
gaaagaatcgaagcctcaagcgtcacgtctaggaatagcgctggagtcgggccaagtcattagagacgatgagtaatctggctcttccagaccttcctgagtggtagtggccacggctga

SEQ ID NO: 985382 - DNA, 120 bp, Artificial Sequence
  ENSG00000235480_1 (sequence is synthesized)
aggagcgataagcagaactactggtgacactgtgggagagaaattctgcaaaataacagctgggcagcccgggaccccagggagttgaaatgggacctcggagacatcaggatgtcctgg

SEQ ID NO: 985383 - DNA, 120 bp, Artificial Sequence
  ENSG00000235480_2 (sequence is synthesized)
agaggcaccaaggccagaggtcccccagggaccgtggagggggcattaagccctgaaaacagatcatgatgcccatccccccagcacaattagaaataaaaacaacccgggacagttaaa

SEQ ID NO: 985384 - DNA, 120 bp, Artificial Sequence
  ENSG00000235481_0 (sequence is synthesized)
gttaaccacttgagcaggtttcaattttgtctctgaaagtaggaagctatcagtctccctacatgactcgttccaccctttgtggatacttctacctgtagaaaaaaaggttggcaaact

SEQ ID NO: 985385 - DNA, 120 bp, Artificial Sequence
  ENSG00000235481_1 (sequence is synthesized)
tggtggcatggtgaggacaaagggcattttgaaagaaccagtgactgaggtcagagtggggagctggtgttagctgtgggattcactgcagcgtcctaccacaaaggcaaagaagatgaa

SEQ ID NO: 985386 - DNA, 120 bp, Artificial Sequence
  ENSG00000235481_2 (sequence is synthesized)
cccgctatgggtaggaggctttacactcagcctgggtcagcaccggagcatccaggcacttcagctcgtctgggtagtcagctgtgaggatcaggaagagatcaaagaaagtagaaatgt

SEQ ID NO: 985387 - DNA, 120 bp, Artificial Sequence
  ENSG00000235481_3 (sequence is synthesized)
gggtgaggccagagaaggagacaataatctgggatggaacattgaagaggaacactgcctctggagaggactccaaaacgtggttgagtttctgcaggatatgcaaaaaccagtcttccc

SEQ ID NO: 985388 - DNA, 120 bp, Artificial Sequence
  ENSG00000235481_4 (sequence is synthesized)
cctggtggaactgtgtggctcttcactcaggatgagtcttcatgcacaagccttgcagcatgcaccggccacttaccaccgttctcccattacttttccatctgccattactgaacacca

SEQ ID NO: 985389 - DNA, 120 bp, Artificial Sequence
  ENSG00000235481_5 (sequence is synthesized)
acactgaccacttggaacaaatcccatggttatctgtgattttcatgccctgtttctgctggcaacccttctgagtggggtgactcactttcctgtataaagagtttgagtagcccaggt

SEQ ID NO: 985390 - DNA, 120 bp, Artificial Sequence
  ENSG00000235481_6 (sequence is synthesized)
aggaggtggaagcagccatctggaaggccattgggatccttatgtctgtctcttggcttcagataaccagctgggctttgataggaatgatctgaatggagacagaaaacagtgaaaact

SEQ ID NO: 985391 - DNA, 120 bp, Artificial Sequence
  ENSG00000235481_7 (sequence is synthesized)
aacgctccccgcccagccctgtttatatgaagcatttggttcctctcttgactcttgagtgatgatgagattcagacgaggcattgacattatggtaagaaagggagaaaatgtatctgt

SEQ ID NO: 985392 - DNA, 120 bp, Artificial Sequence
  ENSG00000235481_8 (sequence is synthesized)
cttgtctgtctatctatctactggatatatagctccaaaagcagacaaacccaaggccgtaaggtgaactagggtctgcgtttggactccatgaaaacaaaatccatgttgaacaaagtg

SEQ ID NO: 985393 - DNA, 120 bp, Artificial Sequence
  ENSG00000235481_9 (sequence is synthesized)
atgtttgtatgcagtgacattctgggtgacccgtgtgtatctgtccatcgtgtgcaagccctgagccctgtttccctcggaagatagtgagtggtagccatctcctcacacgaaccacac

SEQ ID NO: 985394 - DNA, 120 bp, Artificial Sequence
  ENSG00000235481_10 (sequence is synthesized)
atgtggagcacagatggccctctcaaggtaattgatcttacacatttactgttcaccaaacaagtgtctgatgcatacttgggtatattccacagcatgtggactgcggtcccctgtgtt

SEQ ID NO: 985395 - DNA, 120 bp, Artificial Sequence
  ENSG00000235481_11 (sequence is synthesized)
tgccaggaatgctgtgctccatgtagaggttttcctctactcctcactgcaatttgcatgctgctccatggacacttggaggcctgtgctctgttccctgtaactggaaatgtgctctga

SEQ ID NO: 985396 - DNA, 120 bp, Artificial Sequence
  ENSG00000235481_12 (sequence is synthesized)
acttgtctgtctcccttggctgctcctggcccttggtaccagctcccatgggtgtccacaaccacttgggacagaaggtaaaggtggaatttcaaagagaagcttgcttggatcttcagt

SEQ ID NO: 985397 - DNA, 120 bp, Artificial Sequence
  ENSG00000235481_13 (sequence is synthesized)
cctgccctcctctgctgcgtgcagtggatgcaagccagccaacgtgtggccagagtggctggatggtgtcacagccctcagatgtctttccttccacgtttttaaaagagtcccaaataa

SEQ ID NO: 985398 - DNA, 120 bp, Artificial Sequence
  ENSG00000235481_14 (sequence is synthesized)
ctcacttgaagtgtctcaaaggtgagcaagttttatgaaaatgaatccttcctcagttaattgatcaaatgggtgaatcttgaccctctctaatttctatcccaggtcagagtggggagc

SEQ ID NO: 985399 - DNA, 120 bp, Artificial Sequence
  ENSG00000235481_15 (sequence is synthesized)
taagaatggaggatcctgagctggcaatataaatatgcacaagggcgtgaccagccagggggtccttgactgcaactcccttcaaagactgcaatgcattggctgtgaaccaagtctggg

SEQ ID NO: 985400 - DNA, 120 bp, Artificial Sequence
  ENSG00000235481_16 (sequence is synthesized)
gtgggcagaacagcctctccacaccctgtaagcctgccagaatccgcctgttaaattcctggttggcctgctgcttgccccaagtggggctgcaacctcaagctagcgaagctgtggatt

SEQ ID NO: 985401 - DNA, 120 bp, Artificial Sequence
  ENSG00000235481_17 (sequence is synthesized)
tgtcctgctcatttccaagtgttcattcccatgttaagccaacaaagccaaggattttcaaccccccagccactgctctgaattgaatctgtttgtatggcagcaaagctactagttttc

SEQ ID NO: 985402 - DNA, 120 bp, Artificial Sequence
  ENSG00000235481_18 (sequence is synthesized)
atggtcagccccatcttacttaaaagtcattggctgagctggggggtgacgggagcagccacaggcagaaaaagccacaatctcctacttgcctaaagatctagtagtttttcaagaata

SEQ ID NO: 985403 - DNA, 120 bp, Artificial Sequence
  ENSG00000235481_19 (sequence is synthesized)
gctgcaacaatccatggacatgatttatacttctatattttaaaactgtctttcatttcctttagcaactatttttatttttctgtatacaagtcttgcatgccttttgctaaatttaaa

SEQ ID NO: 985404 - DNA, 120 bp, Artificial Sequence
  ENSG00000235481_20 (sequence is synthesized)
tgagtagttaatgtatagttttttaaatatttggatgtaagtagtcctttcatctctgaaaaaggttttccttatcctttgatcttcagctttttagtatttttcttgtctttatgcatc

SEQ ID NO: 985405 - DNA, 120 bp, Artificial Sequence
  ENSG00000235481_21 (sequence is synthesized)
agtacaatatggaatagaagtggttaagagtgaacattattgacttctttatgatcttgaacatgtttagtatttaagaaataaaaatgggaagacgtttaatatttctctcattaagtg

SEQ ID NO: 985406 - DNA, 120 bp, Artificial Sequence
  ENSG00000235483_0 (sequence is synthesized)
atgcaaatgccaatggtgtgaaaccccactgtaccggtagaattaatatattactttagtaatgtacctgagctaaatgacggaagctttagaggtgcatagaaaccaccacaatttgta

SEQ ID NO: 985407 - DNA, 120 bp, Artificial Sequence
  ENSG00000235483_1 (sequence is synthesized)
tgacattttgaagtgaattaagcatctttgaacatgcttctttgatagccattgttatatttttcaatcaacacaaagcacaatgattactctaagttcaatattttcatattcatatat

SEQ ID NO: 985408 - DNA, 120 bp, Artificial Sequence
  ENSG00000235483_2 (sequence is synthesized)
tactggctgccaaatttatacctgtttcttcagctgtaccttttgatatttagaatttttaaatttctgtgaagtagattttgtagaatgtaatgtgttcactgcctttgtgaagcgata

SEQ ID NO: 985409 - DNA, 120 bp, Artificial Sequence
  ENSG00000235483_3 (sequence is synthesized)
tataattgcataatttctgtgtgtaaactgaatgcttgggctttcaatctagtattcatatatagtaataaatattaatattatgaaaaagaaatgcatgcatacttgaaaaatgtgaca

SEQ ID NO: 985410 - DNA, 120 bp, Artificial Sequence
  ENSG00000235488_0 (sequence is synthesized)
gcggagagggggcgcgctgacgtctcgccggcttaacctgttgctctcgagactgcgtcggagcccgcaggcagggccgcgggaagccggccgggccgccgccgccatgctcggccgtgt

SEQ ID NO: 985411 - DNA, 120 bp, Artificial Sequence
  ENSG00000235488_1 (sequence is synthesized)
gctgctctccacctcaacgaggtccggaatgggaggcggggtgcggttctcgtccaagttctaccccatttgctttgtggctgcatccgaaacggacgtgccccgggaaggcgtccacgc

SEQ ID NO: 985412 - DNA, 120 bp, Artificial Sequence
  ENSG00000235488_2 (sequence is synthesized)
tccaagacaaggttgcctcagtgcagtttctacagcccgagtttaaactagtcctttgcattctacccagccctctgcaatgcggatgtattttaattcttaaattctttatggaacagc

SEQ ID NO: 985413 - DNA, 120 bp, Artificial Sequence
  ENSG00000265555_0 (sequence is synthesized)
ttacatatttcagtcctgaaaatattatgataaatcaaatagaccctatgacataggatatattaaatatttaagttttggaaatgtcctttatatacaaaatatttccattgttaacaa

SEQ ID NO: 985414 - DNA, 120 bp, Artificial Sequence
  ENSG00000265555_1 (sequence is synthesized)
gtgcttttcaaaaaatatttttattataccttagaaagagccaatttagggtctacactatctttgttcatctcgttttcttttttgcacatattcctttactaatgtagattagcacta

SEQ ID NO: 985415 - DNA, 120 bp, Artificial Sequence
  ENSG00000265555_2 (sequence is synthesized)
caagataaaaagtatccagcatcataacattgtaattaattcccccatatcaaattatatgaaaaatcccacctcagacactctgccaaagggtatggaacatttaatcaagatgaagtg

SEQ ID NO: 985416 - DNA, 120 bp, Artificial Sequence
  ENSG00000265555_3 (sequence is synthesized)
cttcaattgaagcagtatatgctcacctctatcagtaattttgtctcactttatttcaaagtattattatttttcgtcccaagattttagtaacacgttgtgttaaattcttgtcatatt

SEQ ID NO: 985417 - DNA, 120 bp, Artificial Sequence
  ENSG00000265555_4 (sequence is synthesized)
taaaattaaaccctcttattcgtattatatttaaaagcaaattttcattgtttcaatgaaatcgttcagtatactcggcaaagtttatagtaaagttctgaacaataaatacattctgaa

SEQ ID NO: 985418 - DNA, 120 bp, Artificial Sequence
  ENSG00000265555_5 (sequence is synthesized)
atgtcctgtgctttcaaaagtacatattagagctgatggcttaagcaccattatttagtggcatttctaattattactttcctttatgtggttttttttaagaggcaccaaagttccttt

SEQ ID NO: 985419 - DNA, 120 bp, Artificial Sequence
  ENSG00000265555_6 (sequence is synthesized)
tggaaatgatgttagacaaaaagcaaacttgagcgattttctcattcgagttcaaaatgggtcataaagcagtggagacaattcgcaatatgaacaacacatttggcccagggactgtta

SEQ ID NO: 985420 - DNA, 120 bp, Artificial Sequence
  ENSG00000265555_7 (sequence is synthesized)
cagggactgttaatgaaggtacagtgcgggggcggttcgagaagttttgcaaaagagatgagacccttgaagacgaggagcataatggttggtcacaggaagttgacaacaaccgagagc

SEQ ID NO: 985421 - DNA, 120 bp, Artificial Sequence
  ENSG00000265555_8 (sequence is synthesized)
aatcattgaagctgatcctctcacaacaccacaagaagttgcagaactcattgttgaccattccacagtcattcggcctttgaagcaaattgggaaggtgagaactctagataagtggga

SEQ ID NO: 985422 - DNA, 120 bp, Artificial Sequence
  ENSG00000265555_9 (sequence is synthesized)
tgccccatgagctgagccaaaataaaataaaaaagtcattttgaagtgtcatcttctcttattctatgcaacaacaatgaaacacttttctattggattgtgatgtgcgacgaaatgtag

SEQ ID NO: 985423 - DNA, 83 bp, Artificial Sequence
  ENSG00000265555_10 (sequence is synthesized)
aacacttttctattggattgtgatgtgcgacgaaatgtagattttataggacaaccagtgatgaccagctgaataactggatc

SEQ ID NO: 985424 - DNA, 120 bp, Artificial Sequence
  ENSG00000265555_11 (sequence is synthesized)
tgccagcctaatttactacagctttctgaatcctaatgaaactattacatctgagacgtatgctcagcaaatcgatgagatgtcctgaaaactgcaatgcctgcagccgacactggtcca

SEQ ID NO: 985425 - DNA, 120 bp, Artificial Sequence
  ENSG00000265555_12 (sequence is synthesized)
cagaaaaagcccaattattccccacaactacacgtgaccgcatgtagcacaaccaatgcatcaaaagtcgaacaaattgggctacaaatttttgcctcgtccactttattcacctgacct

SEQ ID NO: 985426 - DNA, 120 bp, Artificial Sequence
  ENSG00000265555_13 (sequence is synthesized)
ctcaccaactgacctcccaactctctgccacttcttcaagcatctcgccaactttttgcaaggaaaaagcttccacaactagtaggaggcagaaaatgctttccaagagttcatcgaatc

SEQ ID NO: 985427 - DNA, 120 bp, Artificial Sequence
  ENSG00000265555_14 (sequence is synthesized)
ggaggcagaaaatgctttccaagagttcatcgaatcctgaagcacgtatttttttttttatgccatggaaataaacaaacttattttctttctttggcaaaaatgtgttgattgtaatgg

SEQ ID NO: 985428 - DNA, 120 bp, Artificial Sequence
  ENSG00000265554_0 (sequence is synthesized)
aggcatcctcaacaggataacttcctgcagcaacacatttcactgagtggcaaaggccaggtcgcccagcaagccactggggaggaaggcaggacatgtgtggccccagagcctcagtct

SEQ ID NO: 985429 - DNA, 120 bp, Artificial Sequence
  ENSG00000265554_1 (sequence is synthesized)
gtgacctggagaacagccaatttggttttagggaatcaggttgtcctgttgtctgggccacatcaggcctggccagccagagatccaaaacaaacctgatgccgctcacagctcagcggc

SEQ ID NO: 985430 - DNA, 120 bp, Artificial Sequence
  ENSG00000265554_2 (sequence is synthesized)
caggctctgccaacagactcaacacttccatgtaaccagctcccagatcaagaaacagaaccttccaggagcctcctggtgtccccttaatcactacccctcctcccaagatctaggcac

SEQ ID NO: 985431 - DNA, 120 bp, Artificial Sequence
  ENSG00000265554_3 (sequence is synthesized)
agaggtcactctgagcttccatttggacagctgcctgttcgtgggaagatcaccaagctcttaacccaggaagggatgctgtgctgcatattggcgttgttgtgaggtcaagagagattt

SEQ ID NO: 985432 - DNA, 120 bp, Artificial Sequence
  ENSG00000265554_4 (sequence is synthesized)
catccctgctgtccttcctcagatgggtcattatgtctggattcaggaagagaatatgcaaatgttgagtctgtgcctcttaacaaactcatcctgcatgaaaaatcattatttacttca

SEQ ID NO: 985433 - DNA, 120 bp, Artificial Sequence
  ENSG00000265552_0 (sequence is synthesized)
tgtatctgtgccattccatatggaagccataaacctcatgtggcaaccaaagacatgaaatgttcctagtgagactgaggaactcgattttttattttgcttaatttaaattaatttaaa

SEQ ID NO: 985434 - DNA, 120 bp, Artificial Sequence
  ENSG00000265552_1 (sequence is synthesized)
tagccacatttttaaatagccagtggctaccatactggatgatgtaagagcctcagggaaccaaaggctttgggactagactcttccactgactcagaaaaagaaagcagagaaggagag

SEQ ID NO: 985435 - DNA, 120 bp, Artificial Sequence
  ENSG00000265552_2 (sequence is synthesized)
gagagcccgaaatcaacatccgcggttgccctgagatagcatcacccatcgttccgccggtgcgccctccctgagatggtggcgtgtgttgtttgggctgtttttcatagccgccgcagc

SEQ ID NO: 985436 - DNA, 120 bp, Artificial Sequence
  ENSG00000265552_3 (sequence is synthesized)
tgggaattcaagatgctatacttaggcagaagtccatgaaggaattaattgatatgagccagaagttgattgccatttaagtactcagcctccaccattgccaagtttccctctttgcag

SEQ ID NO: 985437 - DNA, 120 bp, Artificial Sequence
  ENSG00000265552_4 (sequence is synthesized)
aaagaactgagcttgcctgcaaactggctcattcaggatgtgagcacaagatggaattcaacctttaatatgctgcaacacctgcttggaaataaaggggctctgtgcttttccccccaa

SEQ ID NO: 985438 - DNA, 120 bp, Artificial Sequence
  ENSG00000236289_0 (sequence is synthesized)
tggaaaatagcctcaaggatgagatgatgaggattttgaagatggcgcctaccttcggggtgtggaggtagagacaggagagaagctcaggatgctgctcagaacaacccatggctcaga

SEQ ID NO: 985439 - DNA, 120 bp, Artificial Sequence
  ENSG00000236289_1 (sequence is synthesized)
acaccaacctcaggtggaaggtcttaagagaaaacactgaggtccctcgaagatgaagaaatcctcatgaagatgaatccaaaggtggattcaatttcagctgtctttggactgaagact

SEQ ID NO: 985440 - DNA, 120 bp, Artificial Sequence
  ENSG00000236289_2 (sequence is synthesized)
gcaacatcaacacttcccagggtctccagcctgcccgcctctcccgcaaatttcagatttgcaagtatccacagtcatgagcaattccttaaagtaaatatttctctgtttctttctgga

SEQ ID NO: 985441 - DNA, 120 bp, Artificial Sequence
  ENSG00000236289_3 (sequence is synthesized)
atccagcaggcagctcctgccaaggcggcctcctcgctgtcctctccgtaggatgctgctcgccaggccttcttggctgttcctcggccttgggtgcaggccgtgggtggggggacagcc

SEQ ID NO: 985442 - DNA, 120 bp, Artificial Sequence
  ENSG00000236289_4 (sequence is synthesized)
agctggtagacaccggtattcgatgtcagctcttacaacagggagccagctcctgtgtaaggaagtcaagattttctcaagggaaaaatcaccctagaaaccatcaactcatgacaaacg

SEQ ID NO: 985443 - DNA, 120 bp, Artificial Sequence
  ENSG00000236289_5 (sequence is synthesized)
tgatctccaacgttcattgtggaaaatagcctcaaggatgagatgatgaggattttgaagatgggcctagtacgttccgcaaggctggcctggtcttgtcccttctgtggtcctctgggt

SEQ ID NO: 985444 - DNA, 120 bp, Artificial Sequence
  ENSG00000236289_6 (sequence is synthesized)
gtccagctgaggacctgacctgccctggagcacagtgggcatttcctaaatcaaatggacaaatggattgacttgtctcttgctaagagcgcctaccttcggggtgtggaggtagagaca

SEQ ID NO: 985445 - DNA, 120 bp, Artificial Sequence
  ENSG00000236289_7 (sequence is synthesized)
atgcatctgcttaacttttcagttgtcaatgcaaattaagcacaaagaggacagagttgatgacatatcaggaacattttttacttccggagcaggtctgagtcccagcggaagactgag

SEQ ID NO: 985446 - DNA, 120 bp, Artificial Sequence
  ENSG00000236289_8 (sequence is synthesized)
gccgactgagccagaggcaccacttcaataggtcactggtctctgcagggaaaggaaaaggtgtaagagttctccctgcatagatgctatttgtgacttggatgttttctttctaataca

SEQ ID NO: 985447 - DNA, 120 bp, Artificial Sequence
  ENSG00000236289_9 (sequence is synthesized)
aatgcatcaaagtgttcacaggaatctagctatatgcaagaagtctggattatctgcctgagagaactggccagtatctcacccatgagcaccagaacccatttctagattactaagaaa

SEQ ID NO: 985448 - DNA, 120 bp, Artificial Sequence
  ENSG00000236289_10 (sequence is synthesized)
ggagcacaagaacactgtgtataaggctctgtgttcctagaactttctaaattttacttaatgcaggttaacttcatcaaccctggtgaaaatgccacctcctcatgaggaagccttccc

SEQ ID NO: 985449 - DNA, 120 bp, Artificial Sequence
  ENSG00000236289_11 (sequence is synthesized)
tttcttttctggagagccggccaatgaggcacaggctgggtactgcaggaggcgcggctgagggaacagcaggcctcggtctaatttggggccagctcctgtgtaaggaagtcaagattt

SEQ ID NO: 985450 - DNA, 120 bp, Artificial Sequence
  ENSG00000236289_12 (sequence is synthesized)
ggactgcctagtgcctagccttcttgtgatgttccttgcttatgtcttgtctccccatttgatttggagggtcctgggcagggaccactgggctgggctctagtaggccccctgtaaaga

SEQ ID NO: 985451 - DNA, 120 bp, Artificial Sequence
  ENSG00000236289_13 (sequence is synthesized)
cctgttgagtaattagaagagacagtggccccatctgggtgaatcctgaatttaatcaatttcctggatccttgtttattttgcaagtaggataagaatgtcattgaaatcctatcatgt

SEQ ID NO: 985452 - DNA, 120 bp, Artificial Sequence
  ENSG00000236289_14 (sequence is synthesized)
agtcatggaagggctaatacagtcagtgtactgctactcactaagcatgctgtttagctcagcggttttttgttttgttttgataacaagactgtctcgatgaaagaagcagggcgttgt

SEQ ID NO: 985453 - DNA, 120 bp, Artificial Sequence
  ENSG00000236289_15 (sequence is synthesized)
tccttactctaatggctccatcctcttccagcccataagcattttgtcactgtgaccccagaggttattcaggccttttgatcttgcctacctccagcccagtttcccagctgccctgcg

SEQ ID NO: 985454 - DNA, 120 bp, Artificial Sequence
  ENSG00000236289_16 (sequence is synthesized)
gacccaccacccagagggaaatttgggctcgcccatcggcagccagccagcactgcctgtgctccgtgccagcccttcaggaatctacctagagtcccctctccagcagggtggagtcta

SEQ ID NO: 985455 - DNA, 120 bp, Artificial Sequence
  ENSG00000236289_17 (sequence is synthesized)
ttatgggtcgattagctgctccttttcagcgcagatttaacactgtccaaaaggttgtttctctggagaatcctgattaatacatgaagggtcaagataagtctactccaggtgaagtgc

SEQ ID NO: 985456 - DNA, 120 bp, Artificial Sequence
  ENSG00000236289_18 (sequence is synthesized)
ccccctttctccatgacagcctcgccatgggatgtttgacttagctgtcacagtgccccatgtggacggccagggaaggaatgaggaatgtgcttctcagtgggccgggccaggttgttt

SEQ ID NO: 985457 - DNA, 120 bp, Artificial Sequence
  ENSG00000236289_19 (sequence is synthesized)
gggcgttgtttaatattctaatgcaggctccttatttcacgacatactggtagttacacttggagtcgcagtgaaataaaacatctaggccagcgccgtggctcacgtctgtaatcccag

SEQ ID NO: 985458 - DNA, 120 bp, Artificial Sequence
  ENSG00000236289_20 (sequence is synthesized)
aataaaacatatagcctcaccctcttcatttgacagatgtgggctttgaggctgatagagaggtaacttgtccatgattagacagcaagaaatagagctgcagttggtaccagggcctca

SEQ ID NO: 985459 - DNA, 120 bp, Artificial Sequence
  ENSG00000236289_21 (sequence is synthesized)
taacactgggtctataatcacaatgaagcaccaccagtgtcaatgcatgtaaatttcacaccccttatcacactgcatctacaaagtagtgctgagaactgggcatggcaggcattagtc

SEQ ID NO: 985460 - DNA, 120 bp, Artificial Sequence
  ENSG00000236289_22 (sequence is synthesized)
tctccacgaggaaacaggctcagagactctgaagatccgtccaaatgcatagagtggggaagcagtgaaaagacgacgttaggacatcccagccctgcccacgttcagagtttgttccaa

SEQ ID NO: 985461 - DNA, 120 bp, Artificial Sequence
  ENSG00000236289_23 (sequence is synthesized)
cacattagtcttcagatgagctcactattttagtcctgcgtgctccagcaatggcctgagaggtgtgggtacgtgctgaatgtccaggccttgttaaagataactgcagtacgggccagg

SEQ ID NO: 985462 - DNA, 120 bp, Artificial Sequence
  ENSG00000236289_24 (sequence is synthesized)
ctgaccacaggctttggtttcaggacaatgcagactgggcagcagatcaaataaagccatcaccagcgcataggacagtctcaagggggttaactgtccctgtcctctacaattgttgct

SEQ ID NO: 985463 - DNA, 120 bp, Artificial Sequence
  ENSG00000236289_25 (sequence is synthesized)
ggggagcaatttgcccttgaatcttccatactgtccctaaattgacaatttcatttccttccaatcccgccccctgccctgaagatctgctgaggctgcgagttccatgtgagaaggcag

SEQ ID NO: 985464 - DNA, 120 bp, Artificial Sequence
  ENSG00000233672_0 (sequence is synthesized)
gcaggcctgtccctttgctttcttaaaactgcgcaccgtctgaggccacttcgagcctactggatccctggttccaacccagtaggatcacagaagcagggccagctgccaggagaaaaa

SEQ ID NO: 985465 - DNA, 120 bp, Artificial Sequence
  ENSG00000233672_1 (sequence is synthesized)
gttgttctcttctaccaaattttcctgccatcaaatgctcattgagtgacaatagagaaagcaccatcatcctgaagcatcagattgggagaaaagtccgctctcgagagcatcaactat

SEQ ID NO: 985466 - DNA, 120 bp, Artificial Sequence
  ENSG00000233672_2 (sequence is synthesized)
acttgagacagctcacaatgaagtactctgtattaggcagggtaatattgattgcaagtgacagaaacccaatcagaaactcactggagtcatgaggaacacttattggctcagtaaagg

SEQ ID NO: 985467 - DNA, 120 bp, Artificial Sequence
  ENSG00000233672_3 (sequence is synthesized)
caaaatagaccttcagagaaataaagtctgggaaattgactagatcctcactgaaagaactactaaaggatgtacttatggaagaagaaaattacaaagtgaaagaactgggatgcaaga

SEQ ID NO: 985468 - DNA, 120 bp, Artificial Sequence
  ENSG00000233672_4 (sequence is synthesized)
agtaatggtgagcatggaatttggcaaagattcaagtaaaacaaagcaaggactgagtatataaaatcataatcataacaaattttgactattatatgtaacagccaatctcttaactgg

SEQ ID NO: 985469 - DNA, 120 bp, Artificial Sequence
  ENSG00000233672_5 (sequence is synthesized)
aagcacctaaaataggcaaattcattttgaaaaagaagaacaaagttggagggctaagacgacctgatttcaaagtgcaaggcttcaataatcaagacagtttgatattggcacgaagat

SEQ ID NO: 985470 - DNA, 120 bp, Artificial Sequence
  ENSG00000233672_6 (sequence is synthesized)
acacaaagagataatgacacagacattaggtccagaagacagtccagtaatagactttcacatatatggacaacaaatttttgacagtgccaaggcaattcagtagagaaaggatagttt

SEQ ID NO: 985471 - DNA, 120 bp, Artificial Sequence
  ENSG00000233672_7 (sequence is synthesized)
ggctgtccactgtcccaagccctcgcatgtcctggatggccggtcatcatccacacgggggctgaaaggcccggctccagcactcctgtggtcatcatcctgctgaatcgctttgaacta

SEQ ID NO: 985472 - DNA, 120 bp, Artificial Sequence
  ENSG00000233672_8 (sequence is synthesized)
ggcacttttctctttttctatactgttaacataattaatgaaaaaataataattcatacttcaaaaaatttaagaagttgcacatattttcatttgaaatagtataagcattttacaaat

SEQ ID NO: 985473 - DNA, 120 bp, Artificial Sequence
  ENSG00000233672_9 (sequence is synthesized)
gttattttaagctttaaaaagtgagtaaaattaataaccaaatggtggaagcaacccaagtatccatcaatagatgaatgaataaacgaaaggtagtatgtttatacaatggaatattat

SEQ ID NO: 985474 - DNA, 120 bp, Artificial Sequence
  ENSG00000233672_10 (sequence is synthesized)
ccaatctttcagcttccctgggctacactggaagaagaataattttcttgcaccacatataaaatacactaacactactgatagctgatgagctaaaaaaaaaaaatcgcaaaaaaatct

SEQ ID NO: 985475 - DNA, 120 bp, Artificial Sequence
  ENSG00000233672_11 (sequence is synthesized)
aagtttatgaatttgtgttgggccacatccaaagccatcctgggctgcatgcagcctgcaggccatgggttggacaagcttgactacagctttaaagtgatcttaatctaatcaattctt

SEQ ID NO: 985476 - DNA, 120 bp, Artificial Sequence
  ENSG00000233672_12 (sequence is synthesized)
ttcttccccattcagaagaaacctactacatcagagtctattgagaatctatctccctaatcaccctcaggcacagggttattatgtattgatatcatacacactaaaaaattccatcat

SEQ ID NO: 985477 - DNA, 120 bp, Artificial Sequence
  ENSG00000233672_13 (sequence is synthesized)
acaggtctagaaatacttccataatacagtaatattttaatagagtcataacacacagacagccacccattctgcctgtagccagtcatggagcaatacattttgtacataacctgtaat

SEQ ID NO: 985478 - DNA, 120 bp, Artificial Sequence
  ENSG00000233672_14 (sequence is synthesized)
gtacataacctgtaatttcttctggagagtgtaattacaatgccaatatgacattttatttttattattattatttagttagttagttagttactttttgagacagagtctcactctgtc

SEQ ID NO: 985479 - DNA, 88 bp, Artificial Sequence
  ENSG00000233672_15 (sequence is synthesized)
gtttcaccatgttagccaggatggtctaggggttgataaactacagtgcacaggccaaatctggtttactgcctgattgcccatttat

SEQ ID NO: 985480 - DNA, 120 bp, Artificial Sequence
  ENSG00000233672_16 (sequence is synthesized)
agccttgcccatttatttacttattgtctctgactgctttcatgctacaatagagtagttgcaacagaaactatagtctgcaaagcctaaactatttacaacctggacctttagagaaag

SEQ ID NO: 985481 - DNA, 120 bp, Artificial Sequence
  ENSG00000233672_17 (sequence is synthesized)
tttgctgactctttttttaatggataaactaaaagtatgtaagtaaacatgatttcatgtcttatgatatgtcaggtgaatggtacaatcctttggtttaagttcttagtattataccta

SEQ ID NO: 985482 - DNA, 66 bp, Artificial Sequence
  ENSG00000233672_18 (sequence is synthesized)
tcaacctcccaggctcaagcaatctttccacctcacctttaaatttttttgtagagagagggtctc

SEQ ID NO: 985483 - DNA, 120 bp, Artificial Sequence
  ENSG00000233672_19 (sequence is synthesized)
ctaattttttctttaaatttttttgtagagagagggtctccctatgttgcccaggctcaagatggccttctaatggagccaatatctatctattcattcaacatattgcaaataaacttt

SEQ ID NO: 985484 - DNA, 120 bp, Artificial Sequence
  ENSG00000233672_20 (sequence is synthesized)
ttctatggcataattcaggatgttaccatttttgctttttagatcagctcttcacccactgttttcctgtcatacacatggtgttcttaaaattgtaaatgaaaactcatttgaacttac

SEQ ID NO: 985485 - DNA, 120 bp, Artificial Sequence
  ENSG00000233672_21 (sequence is synthesized)
attagtaacttctgttaaattatactggattgcttattaagtaagcattattatccacattaaatctgtcacagatgaaaaaattacacataaaggagactgcttgaggccccagggcat

SEQ ID NO: 985486 - DNA, 120 bp, Artificial Sequence
  ENSG00000233672_22 (sequence is synthesized)
gctgtaatatacatagaggctcctgaatacttggttttccatgtggatctctgattttgctgaaagaagtctgtaaactgatgtagtcagacagctccccactggctacacatctctata

SEQ ID NO: 985487 - DNA, 120 bp, Artificial Sequence
  ENSG00000233672_23 (sequence is synthesized)
gaatttagaagcattgtttatttcagcagaggtctggaatgaattttccttataatttaactcctgaaatgactgtttcaaaaggtcaactgtggtgaacttgcatatgtgacttgcagt

SEQ ID NO: 985488 - DNA, 120 bp, Artificial Sequence
  ENSG00000233672_24 (sequence is synthesized)
cacagctaagtcacgatcccttagtttttccagaagtccactagaacgttagctccatggcactgttatcttgcatctccaggtcctgaaacagcccttagtgcatactaggtattcaat

SEQ ID NO: 985489 - DNA, 120 bp, Artificial Sequence
  ENSG00000233672_25 (sequence is synthesized)
aacttttttttgaataaatgttttatgtaaattccatcacaaatatggaagatcttagaggggatttttgaaaaccaaagaaagttgaaactccttcacatggagtttggatgttgaact

SEQ ID NO: 985490 - DNA, 120 bp, Artificial Sequence
  ENSG00000233672_26 (sequence is synthesized)
tagaggcttgacttagccatttttaaaaaacgaaatgtgtgtgtatgtttatttaaggtaccttagtgacaggtacaacctacagcccaaagacaatgtacaaaacccaatgaggggaca

SEQ ID NO: 985491 - DNA, 120 bp, Artificial Sequence
  ENSG00000233672_27 (sequence is synthesized)
agcctccactcttttataagatgcagaaatttgcaggagtctatcactcttactctaaccatgagaacagaccagaagcactacaaatgacagttttatttgttgttgctttcatttgca

SEQ ID NO: 985492 - DNA, 120 bp, Artificial Sequence
  ENSG00000233672_28 (sequence is synthesized)
gcaacttaacacctcttgagtagaaaatttgagactcttctaaatgctggaaacaatagatgtttggtttttagtaaaaagagaaaaaagaaaaaaaaaactgggtggggcacgggagaa

SEQ ID NO: 985493 - DNA, 120 bp, Artificial Sequence
  ENSG00000233672_29 (sequence is synthesized)
gaattcagtgccaaataaccttcagcaatgcttagtggtaattagagcagacagacattgtattaaaggtagtggaagaatattttctcctctatattattaaaaatctgtaagattgct

SEQ ID NO: 985494 - DNA, 120 bp, Artificial Sequence
  ENSG00000233672_30 (sequence is synthesized)
tttttttctagttacttagatttgtggagctctaatttgattgtgggcatcctttataaggcttgttccaccttctcctgtggagctataccagctgtgactcctgttttaagagctatg

SEQ ID NO: 985495 - DNA, 120 bp, Artificial Sequence
  ENSG00000233672_31 (sequence is synthesized)
ttctcttctctgttgcagacctatgttatatctgccttagtgcatgggctgctggtcaatgctaacagctggctctcagggaaaaaagaaaaaccatctgtggcatctgccaatttctgt

SEQ ID NO: 985496 - DNA, 120 bp, Artificial Sequence
  ENSG00000233672_32 (sequence is synthesized)
gagcctctccaggcagcgcagagtcaaggcaggaaccagccctggacaggacaccatcccattgcaggatgcactgtcatacacccatactcacccagaccgggacacttcagacacgcc

SEQ ID NO: 985497 - DNA, 120 bp, Artificial Sequence
  ENSG00000233672_33 (sequence is synthesized)
aactcacctaatgcgcggctctctgggagggctgctcctgtgccatgaggagtaagggagatggctcacagctggtctctacacatgttagctatttgccttattacactcacagatagg

SEQ ID NO: 985498 - DNA, 120 bp, Artificial Sequence
  ENSG00000233672_34 (sequence is synthesized)
gcagcttagagtgcagtaagtttctctattctacatcatttctttgccacatacacctatgtctttttcttcttttagcaatgactattacttttctctgatacctctttaagctatata

SEQ ID NO: 985499 - DNA, 120 bp, Artificial Sequence
  ENSG00000233672_35 (sequence is synthesized)
atgccgaacattctatcttaagcaaaatacttagccacacatctttaaaaccgcaaagacctactaaaattttaagctgtcactaaaattttgtaactaaatgcacctcatatccctaca

SEQ ID NO: 985500 - DNA, 120 bp, Artificial Sequence
  ENSG00000233672_36 (sequence is synthesized)
gatccaacatgccataatatcaacatccctgaagctgaaatttgtgccatactcccatggtgctttcaaagttcctggggcggttaaaaggccctgcagctgttgttttcattagcacct

SEQ ID NO: 985501 - DNA, 120 bp, Artificial Sequence
  ENSG00000233672_37 (sequence is synthesized)
gaagtgcataggaggtgctctgacagtatttgtcaatcatcatctactgcctcaaaatgatgccaaacacaaactttcccacaaaggaaattgtgtcaaagttaattcttcaacagtagc

SEQ ID NO: 985502 - DNA, 120 bp, Artificial Sequence
  ENSG00000233672_38 (sequence is synthesized)
tcttaatgcaccaaagaaaatttacttgtattcagcttatcttcttttgaatgtcatgagtgatatataatttgatttaaaaaattgcttctccccattctactttttctttttgttttt

SEQ ID NO: 985503 - DNA, 120 bp, Artificial Sequence
  ENSG00000233672_39 (sequence is synthesized)
ctttttgtttttttgaggggaggttttattattattattattattgtgaaaaaacacataacataaaatttaacatcttaacctttttttttgtttttttgagacggagtctcactgtgt

SEQ ID NO: 985504 - DNA, 120 bp, Artificial Sequence
  ENSG00000233672_40 (sequence is synthesized)
ttaaccatttttaagtggcattaagtacattcacattgtcgtgaaacagatctccagaacttttttatctcgcaaaactgaaactctatgcccatttaaaaaatcctcattttcttttgc

SEQ ID NO: 985505 - DNA, 120 bp, Artificial Sequence
  ENSG00000233672_41 (sequence is synthesized)
ttccagccccaggtaatcaccattctgctttctgtctctatgaatttgactactttagatacctcatgtaagcagaatcacagtatttgtctttttgttaactggcttattttacttagc

SEQ ID NO: 985506 - DNA, 120 bp, Artificial Sequence
  ENSG00000233672_42 (sequence is synthesized)
ataatgtcctcatggttcatctatgttgcagtatgtgacagaactttcttactttttaaggctgaataatattccattttatgaatttactacattttgtttatccattcatgtcaatgg

SEQ ID NO: 985507 - DNA, 120 bp, Artificial Sequence
  ENSG00000233672_43 (sequence is synthesized)
acatttgtgttgcttgtagctcttgactatagagaatcatgctgctctgaacatgaatgtacaaatatcttttcaatatactgacttcaaattatttggatatatatccagaagtggaat

SEQ ID NO: 985508 - DNA, 120 bp, Artificial Sequence
  ENSG00000233672_44 (sequence is synthesized)
tgctggatcatatggtagttctatttttaatattttgaggaacctctatactgttttccatagcagttgcacaattttacagtcccaccaattgtgcataagggttccaatttctccacc

SEQ ID NO: 985509 - DNA, 90 bp, Artificial Sequence
  ENSG00000233672_45 (sequence is synthesized)
agtcccaccaattgtgcataagggttccaatttctccacctcctcatcaacactcggagagtaaccatcctaagagtgtgagataatatc

SEQ ID NO: 985510 - DNA, 120 bp, Artificial Sequence
  ENSG00000233672_46 (sequence is synthesized)
cattgagcagcttttcatacgcttgttgaccatttgtatctctttggagaaaggcttatttaattcatttgcctattttttaattggttcatttgattttttgtggttgagttgtagaag

SEQ ID NO: 985511 - DNA, 120 bp, Artificial Sequence
  ENSG00000233672_47 (sequence is synthesized)
tttttatgtattctggatattaaccccttatcacatatatgatttgcaaatattttcttccattctgtaggttgccttgtcactttgttgattgcttcctttgatgaacaagaattgttt

SEQ ID NO: 985512 - DNA, 120 bp, Artificial Sequence
  ENSG00000233672_48 (sequence is synthesized)
aaatttgatataatcccattcgtctattttatctttttttgcctgtgctattggtgttgtattcaagaaatcattgccaagtccaatgtcatggagattttcccctaggttttcttctag

SEQ ID NO: 985513 - DNA, 120 bp, Artificial Sequence
  ENSG00000233672_49 (sequence is synthesized)
gggttttatagttttgggtttttcatttggtctttaatccattttgagctagcttttgtgtatggtataagagaagggtccaactttattcttttgcatgtggctattcaattttcccaa

SEQ ID NO: 985514 - DNA, 120 bp, Artificial Sequence
  ENSG00000233672_50 (sequence is synthesized)
cactatttgttgaagaggctgctcttctctcattaagtggtgttggtatccttgttgaagatcacttgaccatatatgtgagggtttatttctgagttctcacctctgttccattggtct

SEQ ID NO: 985515 - DNA, 120 bp, Artificial Sequence
  ENSG00000233672_51 (sequence is synthesized)
gcatatctttctttatcccagtatgacactgttttgattactgtagttttgtaatatattttgaaatcagaaagtatgtatcctccaactttgttctttttccaaatcgttttggctatt

SEQ ID NO: 985516 - DNA, 120 bp, Artificial Sequence
  ENSG00000233672_52 (sequence is synthesized)
cagggtaccttgagattccatatggattttaggataaatttttctgtttctaaaaaaaatgccattggaattttgatagaaattgcattaaatctgtaatcactttgggtggtatggaca

SEQ ID NO: 985517 - DNA, 120 bp, Artificial Sequence
  ENSG00000233672_53 (sequence is synthesized)
tattaacaatattaagtcttccagtccatgaacatgaggtatttttcaatttattcacatcttcttaatttctttcagcaatgttttataatttttagtgtatgcgtctttcacattttt

SEQ ID NO: 985518 - DNA, 120 bp, Artificial Sequence
  ENSG00000233672_54 (sequence is synthesized)
gtttaggtttattcctaaatgtgttatttattttgatgctagtataagcaaaattgtttccttaattttcttttcagattgttcattgttaatatacagaaaccactgtttcttcacagt

SEQ ID NO: 985519 - DNA, 120 bp, Artificial Sequence
  ENSG00000233672_55 (sequence is synthesized)
attaaagacatatgtgtcacataaacacagaaccatcagctcaaggttttttatagattattgtagtttttattttataagataatgttgcaatgtataacattaaaatttaaagtgtgc

SEQ ID NO: 985520 - DNA, 120 bp, Artificial Sequence
  ENSG00000233672_56 (sequence is synthesized)
gcaccgtctgaggccacttcgagcctactggatccctggttccaacccagtaggatcacagaagcagggccagctgccagtatgccagcatcactactcttgcagctactaagtgactca

SEQ ID NO: 985521 - DNA, 120 bp, Artificial Sequence
  ENSG00000233672_57 (sequence is synthesized)
cactgtacaatttaaaacttacgaattgtttctggaatttttcgtgtaatatttttggaccaagttcgactgggggtaactgacaccttggaaagcgaaacttcgaatagggggagctac

SEQ ID NO: 985522 - DNA, 120 bp, Artificial Sequence
  ENSG00000233672_58 (sequence is synthesized)
tgtacatgagaaatgttacccatgattcccttgctcagacatacatacctgtttcatttttctctgatcctttctagcccttggctgtattaatgtatatttttgtggttgttgtcacaa

SEQ ID NO: 985523 - DNA, 120 bp, Artificial Sequence
  ENSG00000232104_0 (sequence is synthesized)
gagacaatggttacttcttttcatggattctaaattctatctgccagtcactttttgtgtgtgcattcattgagggtgtacagaatggaattacagaggcagaaaaaaatgaggtctctg

SEQ ID NO: 985524 - DNA, 120 bp, Artificial Sequence
  ENSG00000232104_1 (sequence is synthesized)
ccaaattgatagtttaaaaaacattttagtggcctacttaactgtaatttgttttagttttaaacaagaaaaacctcagcatgtaagcaaagcagactggacttgaacagatatggaatg

SEQ ID NO: 985525 - DNA, 120 bp, Artificial Sequence
  ENSG00000232104_2 (sequence is synthesized)
gtcatggggatcctgaagggggattagaagttggacaactttttatgcaatgaacaacactgcattggaggcagtggattaaacagtagtgcatatcacttggctgaagtgacaggaata

SEQ ID NO: 985526 - DNA, 120 bp, Artificial Sequence
  ENSG00000232104_3 (sequence is synthesized)
aagaacagaatgcatccactcctccagtctcattaagctgcctctttctcctgaaattggattgggattccaggacacctctcaacctacaggaaacactggatctaaagctgaaacagg

SEQ ID NO: 985527 - DNA, 120 bp, Artificial Sequence
  ENSG00000232104_4 (sequence is synthesized)
tgtgcgtgggcgcgagtcggcctcccgcggtgccgccgcagcgtggcgcggagaggcaggggcatccagtggttcaaggttacaataagctgtgatcgtgccactgcattctacctggga

SEQ ID NO: 985528 - DNA, 120 bp, Artificial Sequence
  ENSG00000232104_5 (sequence is synthesized)
tgagaccctgtctcaaaaaaaaaaaaactatgtaaatccaagaaaaaaagaaaacagctcctgttgccttttgcctctcatccagaaaggtatccatttgcctttctaatatctcttcat

SEQ ID NO: 985529 - DNA, 120 bp, Artificial Sequence
  ENSG00000232104_6 (sequence is synthesized)
tccaagttctggaaagtcgatggagggtttactcagaacttcaatctatccagaactgagttttgtttatggtgtgtgccaggcagtggattaaacagtagtgcatatcacttggctgaa

SEQ ID NO: 985530 - DNA, 120 bp, Artificial Sequence
  ENSG00000232104_7 (sequence is synthesized)
aaaaaagaaagctgtgtaacaagagcatcagatgttactttgctcactgttgaaggcggtgaagaacagaagaaaactaggaagaaaaccaagctgggaagggcaatgaaggaacaggtt

SEQ ID NO: 985531 - DNA, 120 bp, Artificial Sequence
  ENSG00000232104_8 (sequence is synthesized)
aaaaccaagctgggaagggcaatgaaggaacaggttagagttcaaaagtaaaagtacgttccacacaaaggaaagatttcagagagaaggctttgctctgttgcccaggctggaatgcag

SEQ ID NO: 985532 - DNA, 120 bp, Artificial Sequence
  ENSG00000232104_9 (sequence is synthesized)
gcctcttgagtagctggaattacaggttgctggggcagctctgatccacatacgacttagggacccaggatgcagctgcttcaacatcttgtagccgtactatctggaatacatgggctg

SEQ ID NO: 985533 - DNA, 120 bp, Artificial Sequence
  ENSG00000232104_10 (sequence is synthesized)
gtactatctggaatacatgggctgccagttgtcatgactactctcctatgttcagcccaaaagctaagcactttatttcttcatatagcccattggccagaattattcatatgtctcact

SEQ ID NO: 985534 - DNA, 120 bp, Artificial Sequence
  ENSG00000232104_11 (sequence is synthesized)
acaggatgggccgggagtgtaccttcattatgtaggaaaaaataaaacataatcgtgagaattatccaaatgtgacatagaggctcgaaatgagcacatggtgttggaaaaatggcaccc

SEQ ID NO: 985535 - DNA, 120 bp, Artificial Sequence
  ENSG00000203601_0 (sequence is synthesized)
acatttcacagatggcacagagtggggaagtcagtgacccaaggtggcaagccagctcttgctgatggtgaggagcctcattatcttaagacaacacacagtggagatgtgctttacgta

SEQ ID NO: 985536 - DNA, 120 bp, Artificial Sequence
  ENSG00000203601_1 (sequence is synthesized)
attggcctgccctgtgaaaacccctggctgttttttcagataaggagactgaagcatctagagttggagtaatttccacaagatcacagagctgaaaccacaggaagaggccaatatgga

SEQ ID NO: 985537 - DNA, 120 bp, Artificial Sequence
  ENSG00000203601_2 (sequence is synthesized)
cttctctactactttatttcccctgagcctggtcagcttcttccaaggagattactgggaggaagcttctaggatttctggacattggattccctgctggtttccccacctgattattga

SEQ ID NO: 985538 - DNA, 120 bp, Artificial Sequence
  ENSG00000203601_3 (sequence is synthesized)
aattgatttctggagttcaggaaaaagcaagtcatcatatatcaacctattatgtgtgttaggctgtttgcattatcacatttaatccatttgacgctgtgaaggagcaggtagtgttat

SEQ ID NO: 985539 - DNA, 120 bp, Artificial Sequence
  ENSG00000203601_4 (sequence is synthesized)
tatgctctttgtcaagaactctggtagagcaaagaaaatggggatagtttgtcacgttcaaaaatcgtattgaccaagactatcctctctctctctctcttttttttgagacagagtctc

SEQ ID NO: 985540 - DNA, 120 bp, Artificial Sequence
  ENSG00000203601_5 (sequence is synthesized)
acaggcatgagccactgtgcctggctgataatcctcttttaagaagaaggggtatatatttacctagggaattccctagaggagaagaggcagaaaggcataaaaggagtatagtaaact

SEQ ID NO: 985541 - DNA, 120 bp, Artificial Sequence
  ENSG00000203601_6 (sequence is synthesized)
gaaatcaagacatctaaatctaagacctggctccattactgtacccctttggaactttgggtaaattcttaattctttctgggtctcaattttctcttttaataaaacaaagatttggag

SEQ ID NO: 985542 - DNA, 120 bp, Artificial Sequence
  ENSG00000235731_0 (sequence is synthesized)
aggttctagaggctgggaacaccaagggcatggcagcagcatctggtggggttctgtgctacattaccccatggtggaagggcagagggcagagggcagaagaggaaaggcagaagagaa

SEQ ID NO: 985543 - DNA, 120 bp, Artificial Sequence
  ENSG00000235731_1 (sequence is synthesized)
agacagcatgggagacagcaagaaaatggaggccaaaacttatccttttatcaggaatccactcccacacatgtttgtaaacaatgccatcaggaataaaagtgtttgaagctgaagctg

SEQ ID NO: 985544 - DNA, 120 bp, Artificial Sequence
  ENSG00000235731_2 (sequence is synthesized)
ggtcttccatccaaatgtggaaagcgtgccagaggactgtctttcccattcccgccccacctgcacagccatagacaaagctcagctccgggataaggtaaatgtcaagagccacacagc

SEQ ID NO: 985545 - DNA, 120 bp, Artificial Sequence
  ENSG00000235731_3 (sequence is synthesized)
agcatgccttcccttcaagacagaacaaagggtggttttcttggccaacctactgcacaggaggaagccaagcaacaccattgatttaagccccaaggaaaacctaaaatctttggccac

SEQ ID NO: 985546 - DNA, 120 bp, Artificial Sequence
  ENSG00000235731_4 (sequence is synthesized)
ttcaggttgtaaatctggcatcagatgtcagaaacttgtgtgaaaacagagactactaggttttactatggcttgaaaggaataacccaaagaaaagcctgaccccaaaaaaggactgtc

SEQ ID NO: 985547 - DNA, 120 bp, Artificial Sequence
  ENSG00000235731_5 (sequence is synthesized)
ccaggctcagggccccacagcgaccacatgcctgggcagggaactgccgggaaggtagcccagaatggtcacatctcactctgcagccccctcaccggacaaggacacctcctgtcaggt

SEQ ID NO: 985548 - DNA, 120 bp, Artificial Sequence
  ENSG00000235731_6 (sequence is synthesized)
ccgagttctagtcattcttccttgtctctgagagctgtccatcttttcataccatttctattgccacccgtggttcagcctgaggtgcctcggaggactcactggccaggccccatgggc

SEQ ID NO: 985549 - DNA, 120 bp, Artificial Sequence
  ENSG00000235731_7 (sequence is synthesized)
actctacacacatgattgagcaagacctctaaatgagaccacaaagcaggcccatttccttcaggtgactgacatgggaactcaggctgagagcaactgaccaagcagacacagctaaaa

SEQ ID NO: 985550 - DNA, 120 bp, Artificial Sequence
  ENSG00000235731_8 (sequence is synthesized)
agatggagccaggattccagccaggatctgcctgactttaagtaatatgtgtttcccactaaacccatgtcatggctttccccagctctcgaagctttgatggccccactgcctactgaa

SEQ ID NO: 985551 - DNA, 120 bp, Artificial Sequence
  ENSG00000235731_9 (sequence is synthesized)
ttcagtcttagctgccaatccaggggccaagccctccgtgccctgccctgccctactcttcagccttgcccagcttttcccctccatgaacatcctcaagtcccccccacactcaagact

SEQ ID NO: 985552 - DNA, 120 bp, Artificial Sequence
  ENSG00000235731_10 (sequence is synthesized)
ccccaggagtgtccctttgctcatctgcaatgtccttactaccagcccatctgccctttccaagtcctgctcactcatcaatacttctgtgaccccctgccgtgagaacacattctctgc

SEQ ID NO: 985553 - DNA, 120 bp, Artificial Sequence
  ENSG00000235731_11 (sequence is synthesized)
taaacccctgctcttccagcgcactttcctcagagttatgtacagagagggtctccccctgctagactgagccacctcggaggaagagcctgtgcctggattttcacatctttgtatgtc

SEQ ID NO: 985554 - DNA, 120 bp, Artificial Sequence
  ENSG00000235731_12 (sequence is synthesized)
cttccatccttagcaaaggcacctggaatgtaatcaaaatcaccaaatatgtgttggatagatgaataggtggatggattataaataaataaagtatttatctaggttgttacctctcag

SEQ ID NO: 985555 - DNA, 120 bp, Artificial Sequence
  ENSG00000235731_13 (sequence is synthesized)
actcagggagaaaaactcaccgactgtgcgattggcagcagctacaaaccagcacagtctgcaggtcacagtgacaagtttcaaatagaaacctggcatccaaaaatatacagctttggc

SEQ ID NO: 985556 - DNA, 120 bp, Artificial Sequence
  ENSG00000235731_14 (sequence is synthesized)
atataagctggttcctctcatcagtcactgactgtctctccgaatgttgtcgaatctggatgttctcagcagttcaattgttcttcacattgtcctttgtgcgagccaaggaactgaact

SEQ ID NO: 985557 - DNA, 120 bp, Artificial Sequence
  ENSG00000235731_15 (sequence is synthesized)
ttctaagtaaagatttaaaaagcatccttgcaatgaaggtagaaggtctactggctgggttgagcctctctgctgtcttcaatggcatctggaactcaaaaggcacctggaagcattttc

SEQ ID NO: 985558 - DNA, 120 bp, Artificial Sequence
  ENSG00000235731_16 (sequence is synthesized)
caccttccatacatgggtgccagtgttcaggcctgtgccagggtcccagggtcagggtcgccaggctctgccttctcctgggataactgttggctccacccacgatactatcagtgcagt

SEQ ID NO: 985559 - DNA, 120 bp, Artificial Sequence
  ENSG00000235731_17 (sequence is synthesized)
gttcctgagcaaacgttcaatgggcagcatgcagaagccacttttggaattcccccatatgtcttttctttccatctagcttcagaaatatatgtaaacatgtggaaaccttgcttaaaa

SEQ ID NO: 985560 - DNA, 120 bp, Artificial Sequence
  ENSG00000235731_18 (sequence is synthesized)
ctttgcataaacaggcagaggggcaggcacctcaagggactcgcagaagtgcctgggtatttttaaatacttgaggagaacacaaggatgcctgtcggacatctcaggaactgctagctc

SEQ ID NO: 985561 - DNA, 120 bp, Artificial Sequence
  ENSG00000235731_19 (sequence is synthesized)
cagcaaaattcactgcaggataggccaggtgatgctgtggtgacaaacaacttcccaaattgctgcaattcacatacaaagtttcctgctcactcacgtaatatgccgtccaagatctgc

SEQ ID NO: 985562 - DNA, 120 bp, Artificial Sequence
  ENSG00000235731_20 (sequence is synthesized)
agggattctgcttcaagctgtctgcattcttactctgggactctgagatgtgggttgatggaacagctaccatctgaaacattgtcagtgatgatgacacaggaaagagtgtgaagcaaa

SEQ ID NO: 985563 - DNA, 120 bp, Artificial Sequence
  ENSG00000235731_21 (sequence is synthesized)
ggttctcctggccctcaaagccttcacctataagtgatactctttcctgcttgcatttcgttacccatatgagatatatgaataagccaaattgcaaagaggtcttgggtgttggagaac

SEQ ID NO: 985564 - DNA, 120 bp, Artificial Sequence
  ENSG00000235731_22 (sequence is synthesized)
aatagcacagccagcccagcacacacaccctgttacacattgtattctgtgcttcacactggagctagagccagacttggtcttacctccacaggtctacagtctagtgaaaatacaaac

SEQ ID NO: 985565 - DNA, 120 bp, Artificial Sequence
  ENSG00000235731_23 (sequence is synthesized)
aagagacccctctgtgctgagattccctgcctgcctggtgggtgggcagagccagcagaaggatgtcactatgacaagtagcccagcccaggaaacctctttgtccccactggcctgaga

SEQ ID NO: 985566 - DNA, 120 bp, Artificial Sequence
  ENSG00000235731_24 (sequence is synthesized)
ttcccatcctactccaagagacactccatagcccaacctgggagaacctgttccgtccctcaaacagcaccagcagggagtgggattcccagccctcatagataaacaaagaccaaagtc

SEQ ID NO: 985567 - DNA, 120 bp, Artificial Sequence
  ENSG00000235731_25 (sequence is synthesized)
aaaaaaagaaattaaaaaaaattaacagactccagagtttcttaatataatagacaaaatgttccggatacaataaaatatcacccattttgccaagaaccaagaaaatcacaatttgga

SEQ ID NO: 985568 - DNA, 120 bp, Artificial Sequence
  ENSG00000235731_26 (sequence is synthesized)
taagaaaagacagtcaactgacagcaacactgagatgagcaagatttggaattatctgatgaagattttaaaacagttgtaataaaaatgcttcaacaatcaattataaattcggttaaa

SEQ ID NO: 985569 - DNA, 120 bp, Artificial Sequence
  ENSG00000235731_27 (sequence is synthesized)
caaataaaaacaattttaaaaatctcagcaaagaaacagaagttacacaaaaggaccaaatggaaattagagaactaagaaatacaataacagaaacttaaaaaaaagacaacttcctag

SEQ ID NO: 985570 - DNA, 120 bp, Artificial Sequence
  ENSG00000235731_28 (sequence is synthesized)
atgggtttaattgtagaatggagatgacagaggatagaatcgctgaacttgaggatataatttgcctaatttgagtaaccaatctgaacaatcagaaaatatccttaataaatattaagg

SEQ ID NO: 985571 - DNA, 120 bp, Artificial Sequence
  ENSG00000235731_29 (sequence is synthesized)
atattctcagggacctatggaactgtaaaatagatctaacatttctgtcatcagagtctcagatgaagaggagaaaagagagtggggctgaaagaaggagtagactgaaaacttctgaag

SEQ ID NO: 985572 - DNA, 120 bp, Artificial Sequence
  ENSG00000235731_30 (sequence is synthesized)
tttggcaacacacacaatcctatggattcaagaatctgagtgaatcccaaatatgataagcccaagaaatccataccaaagacaaagaaaaaacattttgaaagaaactagagaaaaatg

SEQ ID NO: 985573 - DNA, 120 bp, Artificial Sequence
  ENSG00000235731_31 (sequence is synthesized)
acaaatcacccataggggaagaatgatggaaatgacagtagatttcttatctgaaacagtggaacccagaagaaaatggcacaacatttttcgtgtatttgaagtgaaaagaaaattcaa

SEQ ID NO: 985574 - DNA, 120 bp, Artificial Sequence
  ENSG00000235731_32 (sequence is synthesized)
ccacagattttatgtctgggaacactatccttcaggaatgaagagaaaataaagacattctcaaatgaaagaaaaatttgtgcctaggagacttatccttaaagattggataatttatca

SEQ ID NO: 985575 - DNA, 120 bp, Artificial Sequence
  ENSG00000235731_33 (sequence is synthesized)
aacagcaaggaactgtaagagggaatcctgaagcatcagaaaagaagaagaaacaacagaaatgaaaatatggaagccgggcatggtggcacacgcctgtggtctcagctactcacaagg

SEQ ID NO: 985576 - DNA, 120 bp, Artificial Sequence
  ENSG00000235731_34 (sequence is synthesized)
ctgaggcaggtcaaggctgcggtgagctatgattgcaccactggactccagcctgggtgacagaacaggactgtgtctaaaaaaatttttttaaagaaataaaaatatgagtacatgcaa

SEQ ID NO: 985577 - DNA, 120 bp, Artificial Sequence
  ENSG00000235731_35 (sequence is synthesized)
ccccataaaacccttccagcttgtgttacaatcagatgcctctaagatggacaaaaaaggcacacagagatattccctactcaggctctggtcaaatctctctccacttaatggagcatg

SEQ ID NO: 985578 - DNA, 120 bp, Artificial Sequence
  ENSG00000235731_36 (sequence is synthesized)
atcatgactgtcacctgctggagcagggcagagccatccacgagaggcagaaaattgtgtgcaggcaccgagctccagtaccacgatggcacatggggaaagcctcagtgagggagggga

SEQ ID NO: 985579 - DNA, 120 bp, Artificial Sequence
  ENSG00000235731_37 (sequence is synthesized)
gcagaacccttggtcccctcggatcccctcggagggaccggatacacaggaagcaaacggggtgcatgaggaaggcacacagggaggatgctggctagagtacctagtcgatctggattc

SEQ ID NO: 985580 - DNA, 120 bp, Artificial Sequence
  ENSG00000235731_38 (sequence is synthesized)
cacacattccaagacaggtttcgtccactcttacaggaacaaagatgcattttgacaacatgctagcattaataagctaataagcacccagtggtgtcccttgattgtttaacaagaagc

SEQ ID NO: 985581 - DNA, 120 bp, Artificial Sequence
  ENSG00000235731_39 (sequence is synthesized)
tcactgagtagactccaagctcaggccctgagctttgacaaaggtgggaatttgaaggtggactgagagtcaacttcctctattgtcatctacggctctgaataaaatatttactgcaga

SEQ ID NO: 985582 - DNA, 120 bp, Artificial Sequence
  ENSG00000235731_40 (sequence is synthesized)
tggggggcataagctccagacagctgcagtgcaaaggcctgaggcagaaaagggctctgcacatcaggaagctatacggaagccgggaccctaaggcagcagacagcaaggaacaggaca

SEQ ID NO: 985583 - DNA, 120 bp, Artificial Sequence
  ENSG00000235731_41 (sequence is synthesized)
gggctgcacgtgaccagggggcaggaacggggctctgcaggctttgttggagggtctggattggagctgactgaaatagtgtaatggcaaatttacactcttcaagtctgtctgaaaata

SEQ ID NO: 985584 - DNA, 120 bp, Artificial Sequence
  ENSG00000235731_42 (sequence is synthesized)
gcactctctcagtaaaagtgaactttgtcagaaaggggtccttatgctgattttgaaattgacattagcatctgtcctgaaggaagtggaagagaaacctcataagtccgtggccatatg

SEQ ID NO: 985585 - DNA, 120 bp, Artificial Sequence
  ENSG00000235731_43 (sequence is synthesized)
agaagaacgcaggacccctcagagcgctcatcaaatctgagctacagcagatgactgtggtcgtgtctttcacagggaggtgtggctccctaacgctcatggccataaaagtcccatggg

SEQ ID NO: 985586 - DNA, 120 bp, Artificial Sequence
  ENSG00000235731_44 (sequence is synthesized)
ggccggtaggtgtatgtcagtcagcacatctgccaccttccttcatagggaccctagcagtctccagctgctttgtatactctggtgcttatcagaaccataaaaccaaccaaaaactgt

SEQ ID NO: 985587 - DNA, 120 bp, Artificial Sequence
  ENSG00000235731_45 (sequence is synthesized)
gccataaagtaggagctctcagtcaccataggaggaaatcactacctcaggctgctcactagaacctctgggaagaaacagagctccccaccataagtcacggctttggggtcagagtct

SEQ ID NO: 985588 - DNA, 120 bp, Artificial Sequence
  ENSG00000235731_46 (sequence is synthesized)
ctggatccaagcctggttctgctacttgagcctctcttgagtctcaatttcctccctgaatatagggatgataatccctgtcccatgagttgcactggggaataaatgtgatcatctata

SEQ ID NO: 985589 - DNA, 120 bp, Artificial Sequence
  ENSG00000235731_47 (sequence is synthesized)
gggaggtgaacatgcccagagaggaggaccctgaatgctacaaactacaatcactgcccacagtcagagagctttatccctgtccccaggaagaaccacaattggttttcttgtaatctt

SEQ ID NO: 985590 - DNA, 120 bp, Artificial Sequence
  ENSG00000235736_0 (sequence is synthesized)
agagaaggtgtgggtggacaaagcaaagcagagccctgacctcacaccagctggctgagctgtcttggcttgcatttgctgttccagcatttgtggagtttgaaatctgcatgcttggag

SEQ ID NO: 985591 - DNA, 120 bp, Artificial Sequence
  ENSG00000235736_1 (sequence is synthesized)
ggggaagcagaggtaagaacctgttcaagaaggcacatctcagatgtggaagaaccatgattcaactcgagtctgtctgcttcccaagactgtggtatttaaacagcttataatgaaaat

SEQ ID NO: 985592 - DNA, 120 bp, Artificial Sequence
  ENSG00000235736_2 (sequence is synthesized)
tccttctatagctccccataaaagggcacacagttctttcttaacgtattatttcaggcattcattcaccattgatgtatttgtgaaggtgttctctctaaataaactattgggacctta

SEQ ID NO: 985593 - DNA, 120 bp, Artificial Sequence
  ENSG00000203605_0 (sequence is synthesized)
tacaggcatgagccactatgcccagccaagacctgatttttcaaaaactgtcatgaacattgtcaagaagaaatacaggatgcactgggagatgaactagatcttcaagagaaagagaat

SEQ ID NO: 985594 - DNA, 120 bp, Artificial Sequence
  ENSG00000203605_1 (sequence is synthesized)
atcttcaagagaaagagaatgttaaatggaatgatgaaggagaggaacagctaaatgaatactttgaatcagtatttattgaagaagacaatggggaaattcttgttccaaggacacatt

SEQ ID NO: 985595 - DNA, 120 bp, Artificial Sequence
  ENSG00000203605_2 (sequence is synthesized)
agggagtcaagtcggagaagcaagcatgaaaacagaaactaaccttaagccaaagcacaggcccttagcaatattactatatgcccaccagtcacctgcctgtggaaatgaaatcataac

SEQ ID NO: 985596 - DNA, 120 bp, Artificial Sequence
  ENSG00000203605_3 (sequence is synthesized)
cattcccctttgccccgcttcctctgtcacccatcacagactgtgagtactgtcacaggggtatgaaacagcaaataatgacgctgatacttttcttactgcctcttaaagacaaccact

SEQ ID NO: 985597 - DNA, 120 bp, Artificial Sequence
  ENSG00000203605_4 (sequence is synthesized)
attcatggaacaacagtttgtaagctcaaagtaatgatggacaaattgattaagagatgcttaatctaaggattagcattcagccaaatgctgcttaacatagccaacaaggattcaaaa

SEQ ID NO: 985598 - DNA, 120 bp, Artificial Sequence
  ENSG00000287147_0 (sequence is synthesized)
agggtaactgctgccttctacctgtaggggaagcgcttcctctggagcgggggatgcagcacccggaagcagtcatgccaggcctgcctgattcccatcttcttgccagagatctttgaa

SEQ ID NO: 985599 - DNA, 120 bp, Artificial Sequence
  ENSG00000287147_1 (sequence is synthesized)
agtgcaggtggaacagagttcttgccccatggctccactaccgttgcagtcatagtgaacgtgagaccagatggcagggatctgatgaaaattattgatttaaaggatgcagatgagaac

SEQ ID NO: 985600 - DNA, 120 bp, Artificial Sequence
  ENSG00000287147_2 (sequence is synthesized)
ttcatggcccactgtgaaataagaatgctaggaaacctccaggcttttagttaggactcctgaaacatgatagtaaggaatgtgaatataaacataggagaaaaccaaaaatatgccaga

SEQ ID NO: 985601 - DNA, 120 bp, Artificial Sequence
  ENSG00000287147_3 (sequence is synthesized)
cctcacaaagaatgaagcctgaatttgaattagctcagtggttgattgaattaggtcatattccttctttaaactgcctcattggaataaaaagtaaatcctttctggaggaaaataaca

SEQ ID NO: 985602 - DNA, 120 bp, Artificial Sequence
  ENSG00000268326_0 (sequence is synthesized)
ccaaacaggggactttaatatacctgggccccacacctaggtgatgtgactcttctgctgggcctcgaccataagagagattgcgatatatacatgggcccagccttcaggtgatgtagc

SEQ ID NO: 985603 - DNA, 120 bp, Artificial Sequence
  ENSG00000268326_1 (sequence is synthesized)
tcttctgcctgagccaggctcacagggggaattgtaagatttagctggacccagctcacaggcaatgatgactctcatacctggacccagtgaagaggagacattctgactctcatagct

SEQ ID NO: 985604 - DNA, 120 bp, Artificial Sequence
  ENSG00000268326_2 (sequence is synthesized)
tgtcccacagcccctgaaccaaataaggacaagcagaacctgaaaccaaggaaggcttgggaactgcagactccaggactctttactaagactaacaggaggaatgaaggcaaagatcag

SEQ ID NO: 985605 - DNA, 120 bp, Artificial Sequence
  ENSG00000268326_3 (sequence is synthesized)
atacctgcagggttgaaaccgtacccagactttggaattttagtgtctccttctttactctgtgtccacagccctctttaagagtggagagagaaacataatagaaatacatgaagagtc

SEQ ID NO: 985606 - DNA, 120 bp, Artificial Sequence
  ENSG00000223675_0 (sequence is synthesized)
gagcttctcagaactgaaggcgaaagaggtgagttagagcacgctaaattacagtggcattgcagtgccctgggaggtcggaatttctggactgttcccagtgagctgactgctctggcc

SEQ ID NO: 985607 - DNA, 120 bp, Artificial Sequence
  ENSG00000223675_1 (sequence is synthesized)
tcccaaagatgtatgggctcccgcactctctggaggggacacactgcttatttcttcagcctacagcctagattccaattgcttttgcaggtggaaagcaccgagcagtgaggccttgat

SEQ ID NO: 985608 - DNA, 120 bp, Artificial Sequence
  ENSG00000223675_2 (sequence is synthesized)
ggtcagattttccattcaaagatggaaaggcatgagctatgacattttaagaaaatattatttcctcactcagcagtttcacatgcttttcaagatggaaaacaatgaaagaagcagagc

SEQ ID NO: 985609 - DNA, 120 bp, Artificial Sequence
  ENSG00000223675_3 (sequence is synthesized)
tagtcacaggagtctgctcctttcaaattcatctcacagcacaggtttccagtaagaggagaactctttttaagattgatggacagaagaaatcaactttccatgaactcattaaaaaac

SEQ ID NO: 985610 - DNA, 120 bp, Artificial Sequence
  ENSG00000223675_4 (sequence is synthesized)
aacaacaaccataaattgtttagactgggtgcgggtggctcacgcctgtaatcacagcacttggtgaggccaaggcgggcaaattgcttgagcccagggattcaagaccagcccagccaa

SEQ ID NO: 985611 - DNA, 120 bp, Artificial Sequence
  ENSG00000223675_5 (sequence is synthesized)
tgcttgagcccagggattcaagaccagcccagccaacatggcgaaacccatctctacaaaaaattcaaaacttagccaggcttagtggctcatgcctgaagtcccagctacttgggaggc

SEQ ID NO: 985612 - DNA, 120 bp, Artificial Sequence
  ENSG00000223675_6 (sequence is synthesized)
actgcactccagcctgggcaacagaatgaaaagcattcaattgtgcagtgaaatcctgctttgaagatagatggaaagagcactgggagatgttccagcggtggtcctggccacaacagt

SEQ ID NO: 985613 - DNA, 120 bp, Artificial Sequence
  ENSG00000223675_7 (sequence is synthesized)
agcggtggtcctggccacaacagtgctgccctccagcaagcctgggtcgggcacctctgtctcctcccatacaggaacagaatttacactcagccctggtaaccagtctatccgtcagta

SEQ ID NO: 985614 - DNA, 120 bp, Artificial Sequence
  ENSG00000223675_8 (sequence is synthesized)
ccagcctcaggaaaactttagagttatgcttgcgagagcactaactgttacaaggagggtgagatctggagttccagaaaaataagagagaatcttgcatctggagcataaatgatcttc

SEQ ID NO: 985615 - DNA, 120 bp, Artificial Sequence
  ENSG00000223675_9 (sequence is synthesized)
acaggaagttgaacaggtgtataaacttcagagaagctctctggtctctcaaaaatccctgtgaatatctcagagcagctgagatgcctcattatccccggatgcctaattcattctcat

SEQ ID NO: 985616 - DNA, 120 bp, Artificial Sequence
  ENSG00000223675_10 (sequence is synthesized)
tattgtgacttcaatctttactatctcaacaaatatggatatccagccacttctcaaccccaaattctcaagaaaaagtgggatcatgagctgcatatttgatccaatgaagctttgtca

SEQ ID NO: 985617 - DNA, 120 bp, Artificial Sequence
  ENSG00000223675_11 (sequence is synthesized)
agtcctgggagtgtcatcttcttattttagatataactgtggccaaaatatttatctaccacatagctcatattttccttctccaagaacataacagttgccctgattaatatctctttt

SEQ ID NO: 985618 - DNA, 120 bp, Artificial Sequence
  ENSG00000223675_12 (sequence is synthesized)
gaaaaactctaaaatgccaactactcactgtttccaattattcgaaggaaagctaacttccagagagtctatctgcatgtaattatttcaaatatttctaagtacttgggaggaagagct

SEQ ID NO: 985619 - DNA, 120 bp, Artificial Sequence
  ENSG00000223675_13 (sequence is synthesized)
cttgaaattttagtctctgatcaccagtatatgaattcaagtgcctttgggacctaaagaaaacaagagtgttcatttgaaggagggagggtgggaaaaatagaaggaagtgtagtgttt

SEQ ID NO: 985620 - DNA, 120 bp, Artificial Sequence
  ENSG00000223675_14 (sequence is synthesized)
agattcactggtttggaaagactttaaaaatatttatatcagtattgaggatttgtgtatgttttatttcttgtcatggctttgaagaagttatgtgtatatcctcaaagattttaagta

SEQ ID NO: 985621 - DNA, 120 bp, Artificial Sequence
  ENSG00000223675_15 (sequence is synthesized)
ttatttcatagagaatatggtactatttataaatacaaatgtatgagattacttttaattttgttttatttttgctgcatctctttgactgcatttttttaacttgatttcttctaaacc

SEQ ID NO: 985622 - DNA, 120 bp, Artificial Sequence
  ENSG00000223675_16 (sequence is synthesized)
ttgtgagcactctaataatacaggacagtggtttatgggacttctctgaaatgacatctggaaaaccaattaatgacatctcaggttgagcaagtatccatgctatggttcagatgtatc

SEQ ID NO: 985623 - DNA, 120 bp, Artificial Sequence
  ENSG00000223675_17 (sequence is synthesized)
ctagtctcctgataaagttaatatacaggtttaaagtacaatgataataattaataataataatatagctatgctatgtggatcctgaaaaaataaaagaaatagaaagttctccttcct

SEQ ID NO: 985624 - DNA, 120 bp, Artificial Sequence
  ENSG00000268324_0 (sequence is synthesized)
ttttcggactcagcctgcctacacccagggctgagggagcacatccaaggaagggccaacttggaaggggttcagcccatcagatagcagctcaggagtatctaacctgcaaagatctta

SEQ ID NO: 985625 - DNA, 120 bp, Artificial Sequence
  ENSG00000268324_1 (sequence is synthesized)
attaaggctttggctttcgacttaaaagtctccataaaggaacgctacgcatcatcctgaaaataaagatcaaagtccacagccagtggtgaagaaacattaataagagaatcagtcagc

SEQ ID NO: 985626 - DNA, 120 bp, Artificial Sequence
  ENSG00000268324_2 (sequence is synthesized)
caagtctacacataaaccaaaaagccaaagtaaagttaactgtatttgagcagtgtgggcagcccagccagccacagtaactgaagctggaagaattactccctacacacagggctcgtg

SEQ ID NO: 985627 - DNA, 120 bp, Artificial Sequence
  ENSG00000268324_3 (sequence is synthesized)
ttctctagatcaaccagacacatcacagactctgttgttgaggttctttcatttcctcaggccagttagcccttggctagtagccagagctgtacattaactgcccctacatttttaaaa

SEQ ID NO: 985628 - DNA, 120 bp, Artificial Sequence
  ENSG00000268324_4 (sequence is synthesized)
tcattgcttatgaatttctatgtattaacttagagaaatgtaattctagttcccatcttagaggaatggtctcttcttaatgtctttgtgttctaaatatttgatcatgtcaacaaaaaa

SEQ ID NO: 985629 - DNA, 64 bp, Artificial Sequence
  ENSG00000268324_5 (sequence is synthesized)
tgaaacccagtaatctacttcaagtttcctagctcttccctatgccatctccattacgtttgtg

SEQ ID NO: 985630 - DNA, 120 bp, Artificial Sequence
  ENSG00000268324_6 (sequence is synthesized)
tttcctagctcttccctatgccatctccattacgtttgtgagcctatccagtattttatttcaattattgtctttttatttctaaaatttccaattagttctttatatcttctgtttctt

SEQ ID NO: 985631 - DNA, 120 bp, Artificial Sequence
  ENSG00000268324_7 (sequence is synthesized)
tgttgatatttttctatctttccattcataccccagggctgagggagcacatccaaggaagggccaacttggaaggggttcagcccatcagatagcaggtaagtcctctggtttgggcag

SEQ ID NO: 985632 - DNA, 120 bp, Artificial Sequence
  ENSG00000268324_8 (sequence is synthesized)
gctagtctggagttgctgggtaactaataggagaacccctcaagtgcaggtagggatggccaatcagcaactggtggcatgggcatgtgatggaagtccagatggccttcagagtgtgtg

SEQ ID NO: 985633 - DNA, 120 bp, Artificial Sequence
  ENSG00000268324_9 (sequence is synthesized)
gaccacacaggcacttgcagaaggcatcgcaggttggcatgtgaccctcaggggcacaggcagctgtgtgcaggtaatatgcaggcttgtgaagaaagtcgaaatacaagcacaggcagg

SEQ ID NO: 985634 - DNA, 120 bp, Artificial Sequence
  ENSG00000268324_10 (sequence is synthesized)
agttcttcagagcacgtgggctgcacaagggctctgtgttctggctcaagagagctgtagaaaggtgactgcaaggccaaggatgcaaagtcgcaaagggactgttctgagcccatgctt

SEQ ID NO: 985635 - DNA, 120 bp, Artificial Sequence
  ENSG00000268324_11 (sequence is synthesized)
ggggcagattccgatggatattctcacatgcacactgctgatccccagcccacgccaaaaaaaaggcaggaagcctcttcctactaccttgcccctccagtgccttctactgagaaagca

SEQ ID NO: 985636 - DNA, 120 bp, Artificial Sequence
  ENSG00000268324_12 (sequence is synthesized)
cagcactgcgctcactttaaagggccaatatttaaaggaatgccattgtataacacagggtatatttattgagtggcgcattcaaagctgagaagcagtaagttgataactgacaccgtg

SEQ ID NO: 985637 - DNA, 120 bp, Artificial Sequence
  ENSG00000268324_13 (sequence is synthesized)
ggtaaccaatttggttgagttctgacctcaaattccaacctgccttctgtggggtgtgatccccatgtcaggtctgttttcagtcttcgtggtgctattcagctatgttccgtgtgcacc

SEQ ID NO: 985638 - DNA, 120 bp, Artificial Sequence
  ENSG00000268324_14 (sequence is synthesized)
cgtctacggcgtggctgaaggtctattccagtgtccaggtctaacttctttggagtgctggttagggtcagatccacgcatgcgcagctaggggaggagcccaggaacaaacttacggag

SEQ ID NO: 985639 - DNA, 120 bp, Artificial Sequence
  ENSG00000268324_15 (sequence is synthesized)
ctgtttcctccaaattcctccctctctgtgatctccctggtcctttcctgatcgctgggctccctttttcgggcctctggccaaaaacttggtgttgtagttaccctgctctgccgtgca

SEQ ID NO: 985640 - DNA, 120 bp, Artificial Sequence
  ENSG00000268324_16 (sequence is synthesized)
cttcctacaactgcacccacagtcgcggccaagcagcgaagatttaagaaagtaagaaagcgtgacggtttgctccactcttttgggctatagctcctccaatcagaaaaggaaggttct

SEQ ID NO: 985641 - DNA, 120 bp, Artificial Sequence
  ENSG00000268324_17 (sequence is synthesized)
ctgcatgtcccactttatgtgaaatctaacaaagttgaactcgtagaagtagagtgtagaaagagattggggccggggaggaagggaatgggcagttactggtcaaagggtacaaagttt

SEQ ID NO: 985642 - DNA, 120 bp, Artificial Sequence
  ENSG00000268324_18 (sequence is synthesized)
cagataggtaggaggaatgttttgaaatctattgcatagcagggcgactatagtcaataataaagtattgcatatttcaaaatcactgaaagggtaaatttcaaatgtctaccataaaaa

SEQ ID NO: 985643 - DNA, 120 bp, Artificial Sequence
  ENSG00000266114_0 (sequence is synthesized)
ttgcctctagagggaatgaacaggaggaggggccatgagatttattctatagtcattctaccaagcaacatggcctctaattgggtcgaacaaatgctctatatggagaaccaccatata

SEQ ID NO: 985644 - DNA, 120 bp, Artificial Sequence
  ENSG00000266114_1 (sequence is synthesized)
tgcatttaacttgcagactaacagcccaagtgtgagagaggacgatgtaaatagtgtgggaaattccctagagtgagtgtgacatgtaaggtcggaatctgctgctcagccactctcagc

SEQ ID NO: 985645 - DNA, 120 bp, Artificial Sequence
  ENSG00000266114_2 (sequence is synthesized)
aagtgagagccaacgattacatttggtacccagccaaagaaaacagaaaatgattccacttctagaattaaaacaaaacaaaacaactatgctggtctcattaagagaagtcatgtggcc

SEQ ID NO: 985646 - DNA, 120 bp, Artificial Sequence
  ENSG00000266114_3 (sequence is synthesized)
tccaacacaatgtcttcccaaggaatttttcagagtgattttgattacatgcaacttttccttccctgtgaactttagaaccccaggtaaccacctcataccatgaaagatcggaggcag

SEQ ID NO: 985647 - DNA, 120 bp, Artificial Sequence
  ENSG00000266111_0 (sequence is synthesized)
ggcctagattctttactttgacatgtcgttattagtgataatgattttttaattctctagaaaagtacaaataatttgaaaatggagtaattaaaagatcattttatcttcagcttaggt

SEQ ID NO: 985648 - DNA, 120 bp, Artificial Sequence
  ENSG00000266111_1 (sequence is synthesized)
agtgaaaaagtatttttgtgttttatgtgtgaatgtctagttctataaaataatgccattaatctttaatcaagaataaaaaagttggctgggcatgtaaaaaataaaacagtgttgaga

SEQ ID NO: 985649 - DNA, 120 bp, Artificial Sequence
  ENSG00000269321_0 (sequence is synthesized)
tgggattcctagccagtcctcaatactgtcccacctccccgctttacttttctcacccaggaaaccaggataacaacagaatctactcccagcagtgttgtgaggatttggagcattgcg

SEQ ID NO: 985650 - DNA, 120 bp, Artificial Sequence
  ENSG00000269321_1 (sequence is synthesized)
gatgaagtccacgctgctaacaccatcacattgtatttgaaaacacaatctttagaggaaaaaaataacttcagatggatatatgattatgtaagaaatcaggctggccgtggtggctca

SEQ ID NO: 985651 - DNA, 120 bp, Artificial Sequence
  ENSG00000250375_0 (sequence is synthesized)
tcttctccttagcatactcaatgtgacaatgatgaggatgaagacctttatgatgatctacctccacttaataaacaatgaaaacagcaactgtacctgacttacctaaagacctggatg

SEQ ID NO: 985652 - DNA, 120 bp, Artificial Sequence
  ENSG00000250375_1 (sequence is synthesized)
agagaacctacaagtatattttaagaaacacttttgagaaataatagctctttgagaaataataaaaaatgggagggagtgtttcagaaataaatcacattgcagtagatcctttggagc

SEQ ID NO: 985653 - DNA, 120 bp, Artificial Sequence
  ENSG00000236828_0 (sequence is synthesized)
cagcttctctgcctgcaacatccttttcatctggctcctttacatgtcagaagaaagaattatctcaccattccggctcaacaagaaattcagtcctgaacagacaaaaaagtttaaaaa

SEQ ID NO: 985654 - DNA, 120 bp, Artificial Sequence
  ENSG00000236828_1 (sequence is synthesized)
tcatatttcagcagcttcaatacttgttttctgattgaatcataaatttcattactttatacttgcttctacaatgacaaagtacccaaagctaaatgtgaatgtctagtaggtcagaaa

SEQ ID NO: 985655 - DNA, 120 bp, Artificial Sequence
  ENSG00000236827_0 (sequence is synthesized)
gtcccaccttacctggaagaaccatgaagatcaaatagaaggtccttgtgcatgaagctcagcggaaaaaagctcggatgtaggggttggagacagttgtcgctcaaggtgcaaactccg

SEQ ID NO: 985656 - DNA, 120 bp, Artificial Sequence
  ENSG00000236827_1 (sequence is synthesized)
gctggcgctgtgtgtgaacagataacaacaaaatgtatgtggctgagtccactaggaagacgcttctgtaccacatggagttctctgaattaacttccagatatattaaaattattaatg

SEQ ID NO: 985657 - DNA, 120 bp, Artificial Sequence
  ENSG00000236823_0 (sequence is synthesized)
acatctctttcgtgagaagaaagagaggagggaagatgctctgtgatgctgccagtaatgctgaccagtcgtggtgctgtcacctccttggctgtctttgcaatctgttcccaactgagg

SEQ ID NO: 985658 - DNA, 120 bp, Artificial Sequence
  ENSG00000236823_1 (sequence is synthesized)
tttccattgcagtgtaactgaccactccaggggccactgagggctgtcaggatgagctatccctccaccccaggctgtcactgccagcaagaagttgcagctgaaggatgtggtccatga

SEQ ID NO: 985659 - DNA, 120 bp, Artificial Sequence
  ENSG00000236823_2 (sequence is synthesized)
atgaaagcacttggcttccttgcataagcgactttggttttgccatggctgtctacctgtgttggccaacatggcagccccgagtcacatgaggctcctgagcatagggaaccaggctca

SEQ ID NO: 985660 - DNA, 120 bp, Artificial Sequence
  ENSG00000236823_3 (sequence is synthesized)
tctgaagcgagatgcactgcaagagtgaagtacccgctgcatctgggggacttaatgcatgcaaaagaacatgaaatacctcatccatatttttggtattgatgacgtgttgaaataata

SEQ ID NO: 985661 - DNA, 120 bp, Artificial Sequence
  ENSG00000236822_0 (sequence is synthesized)
ctcgtcgaagaagtagcgcgaggcgtccaccgggacgcagctttgctcttgtttgtgaagttcctgttgtattgtgtggaactggaggggaggtcagtcctccatgcatgtgtgtgtgcc

SEQ ID NO: 985662 - DNA, 120 bp, Artificial Sequence
  ENSG00000270589_0 (sequence is synthesized)
gaggagaagatatgaggtaattaagggtacaagaagttgagattcaaacatcctccaccttcccaccccccactgccagtgggtgataaggaaatgatcacagacgactgaagtgagcta

SEQ ID NO: 985663 - DNA, 120 bp, Artificial Sequence
  ENSG00000270589_1 (sequence is synthesized)
acatgattgtggatatacccatattaattcataccggaaacacagatgagaaggttgagaaggaatagtaaagaccatgagttcggtttagattcacagagtgtggaagtccaagaggaa

SEQ ID NO: 985664 - DNA, 120 bp, Artificial Sequence
  ENSG00000270589_2 (sequence is synthesized)
ggtaaaaaggactgaaggcccagagtcaactgtacagtagtacaagctacggaggtggatataatcactcaagaaagatatggcaaaatggtaagtggtggggtgatggtaaaaagagac

SEQ ID NO: 985665 - DNA, 120 bp, Artificial Sequence
  ENSG00000270589_3 (sequence is synthesized)
aagggtctagtgtggtggttgaaagaagcagctgaagtcagattagtcacttaaattacttgattttctgagccttcgtttcaactgcaagataaagcttacaatggcatcaacttgaga

SEQ ID NO: 985666 - DNA, 120 bp, Artificial Sequence
  ENSG00000270589_4 (sequence is synthesized)
tggctggtgcattaaagatataattcatataaagccattagaccaaaccctgcatgagagctcaatgaatgtcagcaattcttaccatagtgtaccattataatgttggcataaaattag

SEQ ID NO: 985667 - DNA, 120 bp, Artificial Sequence
  ENSG00000270589_5 (sequence is synthesized)
attttcagaaaaaataagcttattaacatgtattagttatagaggcttattactaaaaatgcatgatgaaaaacctatgggcaagcaaaaatattttagaattctccacctcttctctca

SEQ ID NO: 985668 - DNA, 120 bp, Artificial Sequence
  ENSG00000270589_6 (sequence is synthesized)
ggctcttaaattttagtttgcttaagaataacaatagcaacacagtgtttagtacgaagtcatgcatgtatttcaactaagtagatattttaaggaattttctgcagtaattttgaaaaa

SEQ ID NO: 985669 - DNA, 120 bp, Artificial Sequence
  ENSG00000270589_7 (sequence is synthesized)
acttttatcaccataactggtgattttggaattgaattacccatgtgcccatccacctcccactgcatctcccagttgcagcgggaggtgaacgggcacatgggtaaaattatatattgg

SEQ ID NO: 985670 - DNA, 120 bp, Artificial Sequence
  ENSG00000270589_8 (sequence is synthesized)
gtacacatatatatatgatgaaatttaacagactaaaacaaggtttaagaagagttatcttgtccaacatcatatagtcgataagaaacaggatttgaactcgggtctgccttactcaaa

SEQ ID NO: 985671 - DNA, 120 bp, Artificial Sequence
  ENSG00000270589_9 (sequence is synthesized)
ggcaaggtctcttttcagttttctctatgctacatctgtaggatagggagatcccaagcaggtttagtacggtgcttcactgaaggaatatcaacatttaagaagatggtggagagataa

SEQ ID NO: 985672 - DNA, 120 bp, Artificial Sequence
  ENSG00000270589_10 (sequence is synthesized)
tcgtagactatggtgtgcagaagccaacaaaggctgaagtaacatacaatcttcaatttctactgaaatgggaaattttgaagacactaataacccttacaaaggagggtgaaaataaaa

SEQ ID NO: 985673 - DNA, 120 bp, Artificial Sequence
  ENSG00000270589_11 (sequence is synthesized)
tatgaggcaaacagtaaatctcaggaatgaggtagacgaaaaaataagcgcagcatattgactaaagcacatttcttcctctatagtttgggaactgtgtcacagtcggaccaatatatg

SEQ ID NO: 985674 - DNA, 82 bp, Artificial Sequence
  ENSG00000270589_12 (sequence is synthesized)
gctctaaccaacatgtacttaatttgaggatttagcattccagttgtcatgtttgatgccattctgaaataaatctcttagg

SEQ ID NO: 985675 - DNA, 120 bp, Artificial Sequence
  ENSG00000228109_0 (sequence is synthesized)
ttccagaaaggcagcacacgcatgtctctgccgtggccccagatcctccccgcgccgccgttttgagcgttcacactcattacccaggtccgtctgggagacccgccgggctcccgccct

SEQ ID NO: 985676 - DNA, 120 bp, Artificial Sequence
  ENSG00000228109_1 (sequence is synthesized)
acctggactgctgcgaacgggcctccacccgcctccccggacccgcagcgccccccgctccctcagggttctggggtgaaggggtctgaatagcaccaggggaggcggcagggcgggcct

SEQ ID NO: 985677 - DNA, 120 bp, Artificial Sequence
  ENSG00000228109_2 (sequence is synthesized)
tcactgggctcaggcagggtcacccgcccagtgccgctagctgcaaattgctttacatacagtgacccaaagagcaagtcatttcagggccccaccactctgattggaagtcataagctt

SEQ ID NO: 985678 - DNA, 120 bp, Artificial Sequence
  ENSG00000228109_3 (sequence is synthesized)
gacaactgattggcctctgtcacccaagcgggtgtggggacactaggcccgcaggtgccactggaagaggcgttcagaagcactgcggtgctccagctcctggatgcagatatctcccca

SEQ ID NO: 985679 - DNA, 120 bp, Artificial Sequence
  ENSG00000228109_4 (sequence is synthesized)
caaacctaaacaatttcgagagggacttgtgttctgcaaccagtcacagaatatcaggtgagctgggcgtgtcttcactgacccacccgcccagggatgctgcactcctctccaccctgc

SEQ ID NO: 985680 - DNA, 120 bp, Artificial Sequence
  ENSG00000228109_5 (sequence is synthesized)
tcagaatcactagaatgaccgttctgtggctacagccctaaaagagctactaaaaagaccagaagtagtatgagaacttatgaatacgaatataaataaaggacatctggagaacatgca

SEQ ID NO: 985681 - DNA, 120 bp, Artificial Sequence
  ENSG00000228109_6 (sequence is synthesized)
ctgcaacccacgcttcgagggccttgcgcattgcagaggacacggcagcctgctcatcacgctcaactacacctcctgcgagagctttggccaccttgggaggcaggatctagatatctc

SEQ ID NO: 985682 - DNA, 120 bp, Artificial Sequence
  ENSG00000228108_0 (sequence is synthesized)
cagagaataacacaggcaaactgcaggccaaccttggggagatagtttctttagagatgccctctactgagtgcccctgatatccaaggaacatggaaggcagtccccaaatgaagagca

SEQ ID NO: 985683 - DNA, 120 bp, Artificial Sequence
  ENSG00000228108_1 (sequence is synthesized)
attgtattcctttaattcagtcataaatcaactctcaattctatgagatttttcacagaagaacggagcgcctcaaaagtggatcaaggcagaaatggatgtggaaattatcatcctgta

SEQ ID NO: 985684 - DNA, 120 bp, Artificial Sequence
  ENSG00000228108_2 (sequence is synthesized)
attaggaaagaaactggaatgttaccatgccaggctttgtgaataaactaaagttttgctggtggtggcacaggaaaaaaatgaagaaaccaagaggacttgaaccaagtgggtatgact

SEQ ID NO: 985685 - DNA, 120 bp, Artificial Sequence
  ENSG00000228108_3 (sequence is synthesized)
ccaaagcccatgctttaaatgaacaaattggcctaccctctaaggcaagaaccctttaatagtggtctatgtcagaaaaatatcaaaaagactcaaggctcttaaataaataaggaaatg

SEQ ID NO: 985686 - DNA, 120 bp, Artificial Sequence
  ENSG00000250893_0 (sequence is synthesized)
tgtatactggagttattgggcggccctgaggagaagagacaaaaaggagccttcctgaacacgtccacggttggttgaatccagatgcagaaactgcggataaggaggaccttctctgta

SEQ ID NO: 985687 - DNA, 120 bp, Artificial Sequence
  ENSG00000250893_1 (sequence is synthesized)
ctgtattccggaatcttctacttaccattccactcaatcagtctatgccccagagtgagctagagaaggcagcggagaatctaccatccacacaattgatttcacagtaattaaaaatca

SEQ ID NO: 985688 - DNA, 120 bp, Artificial Sequence
  ENSG00000250893_2 (sequence is synthesized)
gtgtttttccttaaacatggcctctagatacatgccagctgcctcaactcatacttaactgatggaatatgatctgtctcagagacagagagaggaacagactgtgtcaacttagagaaa

SEQ ID NO: 985689 - DNA, 120 bp, Artificial Sequence
  ENSG00000250893_3 (sequence is synthesized)
ggacagcttcttaagctgtgaccttaaaaaattgtgaccatacacaattttcagccaatgtgatggtttccatcacctcccacctaagagatgacaccattaatgtatacaaattgttgt

SEQ ID NO: 985690 - DNA, 120 bp, Artificial Sequence
  ENSG00000250893_4 (sequence is synthesized)
agaagcttagagaaagaaccaactaatggggaagttggagaaaatgtctcagcagcggggatattcgagctgagttttgaaggataaagagcagtttccaaatgaggaagaagtgggcaa

SEQ ID NO: 985691 - DNA, 120 bp, Artificial Sequence
  ENSG00000250893_5 (sequence is synthesized)
ggacaagctaagtaaagttgcctgaactgttgacggccaccactggctctagaaaagcccctgctacttccttctgtctacttgaaagtgcaacataagatgttttcagaacaaacagga

SEQ ID NO: 985692 - DNA, 120 bp, Artificial Sequence
  ENSG00000250893_6 (sequence is synthesized)
gtatgaatgggaagactgtggttcagtatttcccaaagtgtttgccatggaactagttctgtgagatgcttcattgaaaagagattctgaataaaataaaacattcatttaacaaaatat

SEQ ID NO: 985693 - DNA, 120 bp, Artificial Sequence
  ENSG00000228100_0 (sequence is synthesized)
actgtgactgtctctactttctgactgtgagtactgctacaagtccacccccacctctgcttgtagaaataaaaagtgcagatttatgagaggggatgggtctacctggagtgacttgag

SEQ ID NO: 985694 - DNA, 120 bp, Artificial Sequence
  ENSG00000228100_1 (sequence is synthesized)
gaatacccagaagaccccgtccacctcctcctgcttagaatatgccttttgctagcctgctgtgatgcctggaatttcatccttcacccattgctgggcccacccacatagtttaaagcc

SEQ ID NO: 985695 - DNA, 120 bp, Artificial Sequence
  ENSG00000228100_2 (sequence is synthesized)
caccctgatacctgctgttggaaatcaacaaacaaacacaaacccactttgcgttctgtgagtgtgcatgtatgttggtccctaggtgctgcaggacaagaggagggccagaaagctctg

SEQ ID NO: 985696 - DNA, 120 bp, Artificial Sequence
  ENSG00000228100_3 (sequence is synthesized)
cccatgcctggggagcatgctggatctcccttccagctacagaagaggtctatggtttcttagacacgcgtggattctcacagccaccaccacagacagtacaagcaacagttccaatac

SEQ ID NO: 985697 - DNA, 120 bp, Artificial Sequence
  ENSG00000228100_4 (sequence is synthesized)
tccagagaacgccctcatctctcctcacccctgccttctggcaagcaatgagctgttctctgttcctgtatttttgccttttctagaatgccatataaatggaattatatagaatgtgcc

SEQ ID NO: 985698 - DNA, 120 bp, Artificial Sequence
  ENSG00000228100_5 (sequence is synthesized)
cagctacagaagaggtcagcaccctgcccccgctggcggtcttgctcgaacctctgagagacctcttggcaacatgctgtccctcctaattgtcttcctcggtcaccactgcagaccaag

SEQ ID NO: 985699 - DNA, 120 bp, Artificial Sequence
  ENSG00000228100_6 (sequence is synthesized)
gtctcctagagcctcccctcctctgaaggggcctttaccttctttcactgaagcctggctgtcctcaagctccctgctccttgcagccactcaggttgaggctggtttctgtcgcctaca

SEQ ID NO: 985700 - DNA, 120 bp, Artificial Sequence
  ENSG00000228100_7 (sequence is synthesized)
ggcaggtgtcaggcagggcctggacgtagaggggttactcatttctccctctcagtcctcagactctttttttcttcccccagtgacttcagtccccagctcctctctccatccaccttt

SEQ ID NO: 985701 - DNA, 120 bp, Artificial Sequence
  ENSG00000228100_8 (sequence is synthesized)
actttcacggacgctgacacccacctggaccactctgacaacatcctggctccccaacttcatcagacccttgccttctttgatttcagccacctctgagatctgaaaatttgcttttat

SEQ ID NO: 985702 - DNA, 90 bp, Artificial Sequence
  ENSG00000234464_0 (sequence is synthesized)
gaatgtcataatttgtatggagtgcagatattttcatccagaagttcttagatgatgtgttccaatcactttatagagtggcttcttctt

SEQ ID NO: 985703 - DNA, 120 bp, Artificial Sequence
  ENSG00000234464_1 (sequence is synthesized)
attgagtggggagcaagagagagagcaagggactacaactttattgggatcccgggcattatccaagcagactcatttcagtggcaatgtaaatttgggagaacgaaattatcatctcac

SEQ ID NO: 985704 - DNA, 120 bp, Artificial Sequence
  ENSG00000234464_2 (sequence is synthesized)
gtccatgtgaagagaccaccaaacaggatttgtgatattgccacggtttctacgggactgaacaaagggggacccacacaggaatgaaaacttaaaacaaaacagccactaaggaaggcg

SEQ ID NO: 985705 - DNA, 120 bp, Artificial Sequence
  ENSG00000234464_3 (sequence is synthesized)
ggaatgaaaacttaaaacaaaacagccactaaggaaggcgcagagggacttcctttcggcccgaaacagtatctgtgctgccaaatttatcaacacaactgtcagagagatcctttaaaa

SEQ ID NO: 985706 - DNA, 120 bp, Artificial Sequence
  ENSG00000234464_4 (sequence is synthesized)
agatatcctctgctggcattcatctcagggaaggaaaatgcaaatctttacaggagcttccaaggacttatgaagccaacatgagttccccagtggttctgctgcagcaacactgtcttc

SEQ ID NO: 985707 - DNA, 120 bp, Artificial Sequence
  ENSG00000234464_5 (sequence is synthesized)
ctgctctcactgaacacaggaggctcattcccaagtcaaggcatttgcattttctgtttcctttgcctgggattttctcccatcagatatcagcatgacttattctttatctttttccat

SEQ ID NO: 985708 - DNA, 120 bp, Artificial Sequence
  ENSG00000234464_6 (sequence is synthesized)
ctgtggtgaaatatcatttcaccctctttctttcacccactttaaatgtgcaaacctccctaacctcagtgtttgttatcccctttccctgttttaaaaatagaggctaataccgtctga

SEQ ID NO: 985709 - DNA, 120 bp, Artificial Sequence
  ENSG00000228105_0 (sequence is synthesized)
gctgccgcctcccctcgcccacctcgacggccatgttcgtgggtggggagaggccagcccgaccctcggacggcgggactcgcgggctactttaggaggaagagcaagctccataacaga

SEQ ID NO: 985710 - DNA, 120 bp, Artificial Sequence
  ENSG00000228105_1 (sequence is synthesized)
cagaagtttaaattgtcattcccaactgctaatcaggaagcggaagttaaactcttagcaaaatggcagcacctggaaagacaaatggagccaaactacctgggttcaaatcctgactcc

SEQ ID NO: 985711 - DNA, 120 bp, Artificial Sequence
  ENSG00000228105_2 (sequence is synthesized)
tgatcctgatctgcccaaggctgaggagtttcccaggatatgggactttcactgctaaaaccaggatagtcccatgcaaagcagcatggctgatcaccctacttgctgccatgagactac

SEQ ID NO: 985712 - DNA, 120 bp, Artificial Sequence
  ENSG00000228105_3 (sequence is synthesized)
caccatcctcgaggatgatagatcccaaggagagagtgacccagtcaacatccagccccatcagcatgtgacttatccagccccagtccagtcaccagataatagcaaatgcatgagtta

SEQ ID NO: 985713 - DNA, 120 bp, Artificial Sequence
  ENSG00000228105_4 (sequence is synthesized)
attcaggtgagaccatcagaacgatctagctgaacttgtctcaaattgctgtcctctgttggagtttttctgcacataaaaaataaaattgctgtcctacataactgtaaacaagcaaaa

SEQ ID NO: 985714 - DNA, 120 bp, Artificial Sequence
  ENSG00000228105_5 (sequence is synthesized)
ccgccctgccccgtgaaccctctccgctgccgcctcccctcgcccacctcgacggccatgttcgtgggtggggagaggccagcccgaccctcggacggcgggactcgcgggctactttag

SEQ ID NO: 985715 - DNA, 120 bp, Artificial Sequence
  ENSG00000281026_0 (sequence is synthesized)
agtacccctatctgaaatgcttgagaccagaagtgttttggagttcagattttcttttggattttggaatatttgcagaatacctactgattgagcatatctaacctggaaatccaaagt

SEQ ID NO: 985716 - DNA, 120 bp, Artificial Sequence
  ENSG00000281026_1 (sequence is synthesized)
gctccggtgaacattttctttgagcatcatgtcaatcaatgctcaaaaagttcaggattttggagcttcttggattatgggtgctcaacctgtataggaaacgtggagatggagcatgaa

SEQ ID NO: 985717 - DNA, 120 bp, Artificial Sequence
  ENSG00000281026_2 (sequence is synthesized)
tcagttgtatttgatacttgctggggaaaggatttccagaccaccagagaagaaggatcacccatttaacttggtgtatccagtgccatatcagagccttttcttccattttaacctcac

SEQ ID NO: 985718 - DNA, 120 bp, Artificial Sequence
  ENSG00000281026_3 (sequence is synthesized)
cagtagtctttagatttgtggtttatgatcaagaaattaaatcctagaatacagattagtagagcaaagttgaggcttttgattatctatttcttttaaggtttttcgctttaacacttt

SEQ ID NO: 985719 - DNA, 120 bp, Artificial Sequence
  ENSG00000281026_4 (sequence is synthesized)
acagaagaatttctagactgtctgagaagaatactccaggtatttgtcccagtcttaaaatggttcaacaaaaagttcataatcactttttagaacccttttcccaaagaactgtgatcc

SEQ ID NO: 985720 - DNA, 120 bp, Artificial Sequence
  ENSG00000281026_5 (sequence is synthesized)
tacgtgtaacttaaaaaaagaaaacacacaaatgcttgcatcttttttcacatatttatctgtattcagcaatcaagaatagctggtactgatggatatctttacatgatttttcgttat

SEQ ID NO: 985721 - DNA, 120 bp, Artificial Sequence
  ENSG00000281026_6 (sequence is synthesized)
ttatctgaaaataatatatattgggtcattatttggcttttcaacctcagtaattcagtaactttctttcagttaattttgttgacctgttttggacacttttcaaaatattcttagcat

SEQ ID NO: 985722 - DNA, 120 bp, Artificial Sequence
  ENSG00000281026_7 (sequence is synthesized)
gattttactgggaagaacacattattacaagagttaggcagtctgagttccacctccatttgtgtccatcctctctcgtttgtttattgaatgccttcacctgtgctctgaattgcatct

SEQ ID NO: 985723 - DNA, 120 bp, Artificial Sequence
  ENSG00000281026_8 (sequence is synthesized)
ctttccttctcaggaaattttatacattgtcaattattccttctctctaacttcaacctcgccttctttgctgagtctgacccatcaacagttaaacatgatcaagtcttccgatttaaa

SEQ ID NO: 985724 - DNA, 120 bp, Artificial Sequence
  ENSG00000281026_9 (sequence is synthesized)
agtccctctttcttgacacagctcatttatagccaaacttctttctgaagagtagtctacattcattttctttttctccctcacttctgataatattgaaccaactccattttagtttct

SEQ ID NO: 985725 - DNA, 120 bp, Artificial Sequence
  ENSG00000281026_10 (sequence is synthesized)
gtccctatcattcctctaaattgattaaggtctccagaatattcctctgtatttacgggcattattcactgctcttcttatttgactactcagcaagcatttaacttttgatcagttttt

SEQ ID NO: 985726 - DNA, 120 bp, Artificial Sequence
  ENSG00000281026_11 (sequence is synthesized)
ccttaaaatactttacttggcttccttgacatcatggtttttgttcagatctctgtggttatttctgtctcctttgctgccttctcctcttggtccttgaattttagaattcttcaaatt

SEQ ID NO: 985727 - DNA, 120 bp, Artificial Sequence
  ENSG00000281026_12 (sequence is synthesized)
tcagttctagacaatcttctgttcttactcttagctttccctatgtggtctcatcatttctcatgtggacatagtagtctccccacttttatttttgccaccttacaattttatccacag

SEQ ID NO: 985728 - DNA, 120 bp, Artificial Sequence
  ENSG00000281026_13 (sequence is synthesized)
agcagctagagtagtctataaattctttttaaaatacgtaaaatcactcactgcttagacactacataatctagtccttggctgcttctctgaccctgtcttataccagtctgcatttac

SEQ ID NO: 985729 - DNA, 120 bp, Artificial Sequence
  ENSG00000281026_14 (sequence is synthesized)
tacagtccatctatactggcctctttgaactgttcttcagatatgataagcttgtccttgctaaaagctctaactgttatttctgcttggaatgctcttctcgtctactcttcctatgcc

SEQ ID NO: 985730 - DNA, 120 bp, Artificial Sequence
  ENSG00000281026_15 (sequence is synthesized)
tagcattttcttaatgtttaggtctcacctgagatgtcactttcactgtagtactagtagttgatgttactactgattcgttggcagtattcctgaaatagaatataggataaatgagga

SEQ ID NO: 985731 - DNA, 120 bp, Artificial Sequence
  ENSG00000281026_16 (sequence is synthesized)
catgtttattttgttcacagctgtgtccacaaaatctaaacagtgcctgtagtactgtaggagctcattaagtagtcggctgattgatttttgtacctaatggttctattaacaatattg

SEQ ID NO: 985732 - DNA, 120 bp, Artificial Sequence
  ENSG00000281026_17 (sequence is synthesized)
acccccaaatgtattttcttcataaccttctcctctgaactccagtctgtatatttaactgtctacctgacatttccacttctaagcttaaaagctcctccaattgaacctgtgatctct

SEQ ID NO: 985733 - DNA, 120 bp, Artificial Sequence
  ENSG00000281026_18 (sequence is synthesized)
ttaaatctgggactccaggatttcctgccacagtgaatggatttaccttttatctatctctgtaagctagaaagttgagagtcttcttcaatgccttctttccccctcatattcaatcca

SEQ ID NO: 985734 - DNA, 120 bp, Artificial Sequence
  ENSG00000281026_19 (sequence is synthesized)
tcaaatggattctatggactttgccacctgaatatctcttgaatctgttcctacattttaaactaccatcatttgatggattttcacacagtgagtgtatctatataattaatacccagg

SEQ ID NO: 985735 - DNA, 120 bp, Artificial Sequence
  ENSG00000281026_20 (sequence is synthesized)
ttaatgcctttcagttgcttcccattgctcttagaataaagaccagaaatcataatgtgatatttaagatcctggatgatgttactgtttttcctatgcaacttcatgttttttaaatta

SEQ ID NO: 985736 - DNA, 120 bp, Artificial Sequence
  ENSG00000281026_21 (sequence is synthesized)
tttttctcactttctgtattccagccctgataaccacctctcaattccttgaatgtggtatgctgttccctcttgctaaaaaattctatgtacacataccccttccgttcttgtccttca

SEQ ID NO: 985737 - DNA, 120 bp, Artificial Sequence
  ENSG00000281026_22 (sequence is synthesized)
gatttgagctcttcaaagttttcttggacatagcaagcttgatgaggtcccaaatacatcttatgtgctctcatatgctttattcatttgtatattattatttcccttatttttaagcta

SEQ ID NO: 985738 - DNA, 120 bp, Artificial Sequence
  ENSG00000281026_23 (sequence is synthesized)
atgagtcaggtattacacctgttttgctcactgttgcttggtcatcagctagcatggtggctgggaaagattagtattcaatattcatacaataagtgaatatgagtagtttgggtttgt

SEQ ID NO: 985739 - DNA, 120 bp, Artificial Sequence
  ENSG00000281026_24 (sequence is synthesized)
tatgggatgaattatccatccccaccccccactcccacacacagacacccaactgatacactgaagattgaaattctaactgtagaacctagaatgtaactgtatttggagatggggcct

SEQ ID NO: 985740 - DNA, 120 bp, Artificial Sequence
  ENSG00000281026_25 (sequence is synthesized)
ttaaaaaggtaatgaagataaaatgaagtcatatgggtggactccaattccatatgagtggtttccattaagaagagattaggacacagacacacagaaaggtaagaccatgtgaagaca

SEQ ID NO: 985741 - DNA, 120 bp, Artificial Sequence
  ENSG00000281026_26 (sequence is synthesized)
ctggaggaagatggccatctacaagccaaagagatctacaggctttagaagaaaccaacactgctgacaccttgatcttggacttctagaagtgtgagaaaataaatttctgttctttaa

SEQ ID NO: 985742 - DNA, 120 bp, Artificial Sequence
  ENSG00000281026_27 (sequence is synthesized)
actacccaatctgtgatactttgctatggaagccctagtaaacttatatggattttggtattgggaaagtggggtgctggtgtaattaatacctaaaaatgtggaattggctttagaact

SEQ ID NO: 985743 - DNA, 120 bp, Artificial Sequence
  ENSG00000281026_28 (sequence is synthesized)
agataatgggtagaggccagaagaagtatttgttagaaaaagcatagactgccttgaagagattgttggtagacatatggatgttgaaggtgattctggtgaagcttagaaaataggaga

SEQ ID NO: 985744 - DNA, 120 bp, Artificial Sequence
  ENSG00000281026_29 (sequence is synthesized)
gctgttgagaaagcttctgtcatcttagaggtatacatatgtcaccttgaataaatattggtagaaatatgaatgttaaaggtgtttctggtaggaactcaaacaaatgaggaatatatt

SEQ ID NO: 985745 - DNA, 120 bp, Artificial Sequence
  ENSG00000281026_30 (sequence is synthesized)
gttggaaactgagggaaaggcaatgcttattataatgtggcaaatagccaaattgtgttttgtggaaagtggatgaacttacaaagtgatgaacttgaatgtttagctgagatttctaag

SEQ ID NO: 985746 - DNA, 120 bp, Artificial Sequence
  ENSG00000281026_31 (sequence is synthesized)
caatgcattaaagatatggcctggtttcttcttgctgcttaaagtaagatgcaagaggagagagagaaatttaagaaggaattattaagccaaaagcaaccagagcctgaagattcggaa

SEQ ID NO: 985747 - DNA, 120 bp, Artificial Sequence
  ENSG00000281026_32 (sequence is synthesized)
aattctcagtctatccatattgcaaaaatttagcatgttctggagggaacatcaaagttgttgcaagacaaccatttcctaaagcaattagggatatgtgacttgtggatccaatcagcc

SEQ ID NO: 985748 - DNA, 120 bp, Artificial Sequence
  ENSG00000281026_33 (sequence is synthesized)
atcttggcagcaactagcagaagccaggatagagatggggttatacctatggaaatgctgctggctggtaccgaagggaacagagggataaaaatgaaggaagtctgttggatttcttga

SEQ ID NO: 985749 - DNA, 120 bp, Artificial Sequence
  ENSG00000281026_34 (sequence is synthesized)
gattctataaaatgggtcagtagagctatctggctgtgaacatgtgttcttcaagaagagggaagaatgaccctgaagatgattgagaaggcaaaggggctactattgctaccacaggac

SEQ ID NO: 985750 - DNA, 120 bp, Artificial Sequence
  ENSG00000281026_35 (sequence is synthesized)
cagagggctcaggcctgaggagtcaaggtaggctacttcttagggctgagggaggtgggctaccacactggtgggctcagaagacagggctgccacccctgttaggtgggaagatggaga

SEQ ID NO: 985751 - DNA, 120 bp, Artificial Sequence
  ENSG00000281026_36 (sequence is synthesized)
atgaagctgaagaagattattcttgagccttaaaatctaatgggatttgcctttatacgtttcagacctgcttaggatccatcaccccttctttctgatttttttggaataggaatgttt

SEQ ID NO: 985752 - DNA, 120 bp, Artificial Sequence
  ENSG00000281026_37 (sequence is synthesized)
atcctatgcctgtctcaccagtggtgtattttggaagcaaataacttgtctagtttcacaggttcatgctggagaagaattttgcctcagggtgaaaccttgagtatgcctgtacctgat

SEQ ID NO: 985753 - DNA, 120 bp, Artificial Sequence
  ENSG00000281026_38 (sequence is synthesized)
ctaaatgatatttagatgagatttggggcttagagttgatactgaaatgggtcaagactttggggctgttgggatggagtggatgtgttttgtgtctgagaaggacatgaattttgaggg

SEQ ID NO: 985754 - DNA, 120 bp, Artificial Sequence
  ENSG00000281026_39 (sequence is synthesized)
gccagatggcagaattttagaggttgaattgtatgctctccaaatgtatataagttaaagtcctaactcctagtacctagaatgtgaccatatttggagatggggcctttaaaaaggtaa

SEQ ID NO: 985755 - DNA, 120 bp, Artificial Sequence
  ENSG00000281021_0 (sequence is synthesized)
cggagtccatgatatgagatggcgttttaaatacatgttttatcttcaaggttttcagctcttttctctggaccatctggatataagttgatagctgtcacaggtgctttgcttgcttca

SEQ ID NO: 985756 - DNA, 120 bp, Artificial Sequence
  ENSG00000281021_1 (sequence is synthesized)
tgactttgactttcaacaatccttcaagggaggcattagttcatcattacacctgaagaagtcggaggttcaaagacctcacaacaagcaagtggaaaagttggccatgaggaaccaaca

SEQ ID NO: 985757 - DNA, 120 bp, Artificial Sequence
  ENSG00000281021_2 (sequence is synthesized)
tggcacaactataaagccagccagaagatacagccaatcccacgttttaacataataagcacatacattcatccatccacaaaatcctgtgagagaagatgcccaagcatccacagcctc

SEQ ID NO: 985758 - DNA, 120 bp, Artificial Sequence
  ENSG00000281021_3 (sequence is synthesized)
ttctgtgaagttcccggtcctctcactggtcctcctcaggctcctcatctggcccctcgctgctcctctctctagtgtgcctaatccttcatgccctttgaaaagcaccactgtcaaagc

SEQ ID NO: 985759 - DNA, 120 bp, Artificial Sequence
  ENSG00000281021_4 (sequence is synthesized)
tagttgccatgttgtgagatgctctatggggagcttcgtgtgacaaggaactgaggaagaccttcaaccaacatctggtgaggaactgaggcctcagttcaagagctcagaaggaactga

SEQ ID NO: 985760 - DNA, 120 bp, Artificial Sequence
  ENSG00000281021_5 (sequence is synthesized)
ctcctgccaacaaccacatgagtgagctgggaagcagatttttcccagctgagccctgacgtgatggcagccttttgagaaccacaggaccctgctaagccaagctcagattctcgacct

SEQ ID NO: 985761 - DNA, 90 bp, Artificial Sequence
  ENSG00000254177_0 (sequence is synthesized)
ggagttggaggctgcgctgaggtatgattacaccattacactccaacctgggcaccagagcaagatcttttaaagctggtgttagaaatt

SEQ ID NO: 985762 - DNA, 120 bp, Artificial Sequence
  ENSG00000254177_1 (sequence is synthesized)
tttcagggcataagcaggctgctattaaaattgactgatttaaaaaataaagctaacagcttatgctgaaattaacctcgtctttgtgagccaaagatcaaatgcgagacaaaagctggc

SEQ ID NO: 985763 - DNA, 120 bp, Artificial Sequence
  ENSG00000254177_2 (sequence is synthesized)
tagagtcatcatttcctcagctctgcaatcaccttacaacttaagaccattttcacagtggagacagttgttaaaagttctgacaagccctgcggtaacctttgattacaaagccactcc

SEQ ID NO: 985764 - DNA, 120 bp, Artificial Sequence
  ENSG00000187904_0 (sequence is synthesized)
tagggtgccctgcctcaagaattaggtgttgacagttattagtgtattgcagtcaaatcaaagtttctttggagtgtggggtgaaaatataccaaaagattaagtgtttatcactgttgc

SEQ ID NO: 985765 - DNA, 120 bp, Artificial Sequence
  ENSG00000187904_1 (sequence is synthesized)
gtgaaaatataccaaaagattaagtgtttatcactgttgcagttatggataattgttattttcttcctgctaatctttatcattcatttttcctttctttttttttttttgagatggagt

SEQ ID NO: 985766 - DNA, 120 bp, Artificial Sequence
  ENSG00000187904_2 (sequence is synthesized)
aactgaatcgtattcttctttgtgtactttcctgtctagatgttagactttgcaagcttactaaagggtggataatgcctgagccttctggagtccgtcaggtgtgaagtgagcgctgga

SEQ ID NO: 985767 - DNA, 120 bp, Artificial Sequence
  ENSG00000239739_0 (sequence is synthesized)
gttgcctaatagttttaaaagcccctattttatagtcagtgcatctttctgtgggtccccagagaagggaagactgtgagagaaaagtgaacacagagccgtgcagaggaaagatgatac

SEQ ID NO: 985768 - DNA, 120 bp, Artificial Sequence
  ENSG00000239739_1 (sequence is synthesized)
ccatcaacaagccaaggagtgagtctctcacagccctcaggaggagctagctctgccaacaccttgatcttggacttctagcctctagaactgtaagaaaataaatgtctgttgtttaaa

SEQ ID NO: 985769 - DNA, 120 bp, Artificial Sequence
  ENSG00000215808_0 (sequence is synthesized)
ggaggagcctggcctctcttctttctgtgtggaacctggaattcaagctgtgggtgagaagctctctagcagggactctgaccttatggaggatcgctgtttcccccatttttccttttc

SEQ ID NO: 985770 - DNA, 120 bp, Artificial Sequence
  ENSG00000215808_1 (sequence is synthesized)
acccaaaaaagtcctgcttctctcacccttcaaacagcctgtgagcctaaatttttgtggccatgggacagacaaggaccccgtcttcagctgaactaaggaaaagtcctgcgacatctt

SEQ ID NO: 985771 - DNA, 120 bp, Artificial Sequence
  ENSG00000215808_2 (sequence is synthesized)
tggtacgcactgtggaggctctacaaacagccatcaaactccaaccagtcacccaaccagagcctctgaggatggccccttctgcggggaacccttacatgggcctctgactgatgcttc

SEQ ID NO: 985772 - DNA, 120 bp, Artificial Sequence
  ENSG00000215808_3 (sequence is synthesized)
cccaaaacagtgccccctgtcatcaggaagcagttaacactggtcttcattcttacgcttatccttattctaacagcagttatatgtacttctttagacgggggaataagacagccaggt

SEQ ID NO: 985773 - DNA, 120 bp, Artificial Sequence
  ENSG00000215808_4 (sequence is synthesized)
gggagggggtctctggaaaactccatctggcctgtgcactagggtggaacctcaggaagttgatgacatttgtagctgggagcagcctggcccctcctcttcctgtgtggaacctgaaat

SEQ ID NO: 985774 - DNA, 120 bp, Artificial Sequence
  ENSG00000215808_5 (sequence is synthesized)
tccaccggcttggcaggaagcgctctagcagggactccggctttgcagagcatccctgtttccccgtttttcccttttcacccaataaaaccctgcttcactcacccttcaaaccatctg

SEQ ID NO: 985775 - DNA, 120 bp, Artificial Sequence
  ENSG00000215808_6 (sequence is synthesized)
ctgtgggacggacaaagatgcctttagctgactgaggaaaagtcctgcaacacaggtatcactgcacatttataatattgtttctctgttttaaaccttgtataaataggaaaatattgt

SEQ ID NO: 985776 - DNA, 120 bp, Artificial Sequence
  ENSG00000215808_7 (sequence is synthesized)
atataatctcaagcagattgttttcttttgaaaagtattcatatatgttaaagatgtagttctagttcattcattttctctgttttgactcttttatacatatactacagctcatttatc

SEQ ID NO: 985777 - DNA, 120 bp, Artificial Sequence
  ENSG00000215808_8 (sequence is synthesized)
cattttcctactgttgcaacatagattgcttataattcttctaattactaacaatgctggtatgaaattgttgtgtatatctctggtagatatgtgttatttcttttttgcaatgctaga

SEQ ID NO: 985778 - DNA, 120 bp, Artificial Sequence
  ENSG00000215808_9 (sequence is synthesized)
ttataattatttgtctaaggtggagattaccagggtagactcgctctggccgtatgtaatgatgtctgtggctacataacctgccaacacttagtcttatcacacattttattttaaaat

SEQ ID NO: 985779 - DNA, 120 bp, Artificial Sequence
  ENSG00000215808_10 (sequence is synthesized)
atgtaaaaaatactaatttacttggtagtaatttaaatttttctgattattactgaggttgaatatgttttcatatgtttactgaatattcctgttaattttctcatgaatttcagttaa

SEQ ID NO: 985780 - DNA, 120 bp, Artificial Sequence
  ENSG00000215808_11 (sequence is synthesized)
ttaatgtttctgttgattttattaatttgtagtggttttgaaacatattctagaaaccaatattttgtctgttgtatgtgttacaaatatatttattttgtatagcttcttcatatttag

SEQ ID NO: 985781 - DNA, 120 bp, Artificial Sequence
  ENSG00000215808_12 (sequence is synthesized)
tgagtgaaatgcatgccaataattctttcccttccctctctctcctgagccctctcatcctccggcttctgagggtagaggaaaccatgccaccaccccctattactcctagggttaggg

SEQ ID NO: 985782 - DNA, 120 bp, Artificial Sequence
  ENSG00000215808_13 (sequence is synthesized)
gccttttcacagccttttctcccttttttggaaggaacgggtgagcagcggctccccaccgccctcccttccctgccggggctgggatacctggctcaaggcgtcatgagtggctggcgt

SEQ ID NO: 985783 - DNA, 120 bp, Artificial Sequence
  ENSG00000215808_14 (sequence is synthesized)
tttctgccacgcactcatgggatctcctcctccctgcaccggggaggccagctctgacccacagcaattaaacttgtctccctggtggaggaaccacttgggtaagagtaagaggttctt

SEQ ID NO: 985784 - DNA, 120 bp, Artificial Sequence
  ENSG00000215808_15 (sequence is synthesized)
ccccaggcatttttaaacccctttttttttctcctcttcacacccagtcagcagtgaacttagtctctgtaaagcttcaattgtggaaaaggatttgtagggctagtcttgggccgtggc

SEQ ID NO: 985785 - DNA, 120 bp, Artificial Sequence
  ENSG00000215808_16 (sequence is synthesized)
caatcctggtgtgctttgcatgtctgtatggtgtgtgctgcaagcctccatcttgttttacatcctgggggcgtgaccagtaactgcttggcaaggtttgttgagcaatcctgcctcaga

SEQ ID NO: 985786 - DNA, 120 bp, Artificial Sequence
  ENSG00000215808_17 (sequence is synthesized)
ggatgagccctctctggtttgatatctgcatgttttcctagccctgtctcttaaagggcctcacccagcaactggattttctaatgcctgtgtgtgtgtgtgtatactgtgtgtgctgtc

SEQ ID NO: 985787 - DNA, 120 bp, Artificial Sequence
  ENSG00000215808_18 (sequence is synthesized)
tttaaaaagatctctaattaatttgtcctaaagaagacaagcacttggatcaagtattttttaagggaagttaaaagctgtggtacctttcagttcgcatgactttaatctttgagaaat

SEQ ID NO: 985788 - DNA, 120 bp, Artificial Sequence
  ENSG00000215808_19 (sequence is synthesized)
caaaacagcccctaaagattattggtaaaatgtaggtaagatgcaaggtttgctaagtgtttcaaggttacaaactgctttttgggttttgaaaactgtctgtctcctctgcttcacggc

SEQ ID NO: 985789 - DNA, 120 bp, Artificial Sequence
  ENSG00000215808_20 (sequence is synthesized)
tggtagggcctggggacatatggaactaatcacctccttaactaagaaggcaaaccttggctacagttagcacacaattaaaacaatttaccaggttttaaattattgttaaaaattact

SEQ ID NO: 985790 - DNA, 120 bp, Artificial Sequence
  ENSG00000215808_21 (sequence is synthesized)
ttaaaaattactaggagttaccattataacatgtaattgagactactggaaatagatttgcatgcaaggagtgtaagaacagtgaagtatgttttttagtaaaaggttataagaaggcat

SEQ ID NO: 985791 - DNA, 120 bp, Artificial Sequence
  ENSG00000215808_22 (sequence is synthesized)
ttttgcctagggttaaaggattgttttgaattaaattattaaaaagctgagggttcaaagaagtgatggaagaattgtgaaaattaaccttgccgaagaggttctctgtgtgaacatatt

SEQ ID NO: 985792 - DNA, 120 bp, Artificial Sequence
  ENSG00000215808_23 (sequence is synthesized)
gactaaattcaaaaaaccgtattatatggtttttctgtaaattgagcattgaaataaaagcctaacaaaggtttcctatggcattagctgctctttggcaaaatctgtaaagggttataa

SEQ ID NO: 985793 - DNA, 120 bp, Artificial Sequence
  ENSG00000215808_24 (sequence is synthesized)
aaggtttttgcttctttacgttttctgagtcatcatttttgcaaaacaaataatttgtggtaatctggaattctgtttcataatatcaagtgttttaaaccttgaacatttaacagcctt

SEQ ID NO: 985794 - DNA, 120 bp, Artificial Sequence
  ENSG00000215808_25 (sequence is synthesized)
cccaaaatcaaacttgagcttcaaaattgtcttccccggcacctggctttttgagtagtttgacagggcccctgaagtgtccagagaagagaggtaaacagaattatttgacatgtttag

SEQ ID NO: 985795 - DNA, 120 bp, Artificial Sequence
  ENSG00000215808_26 (sequence is synthesized)
gtacatgggattgccaaaatgatgttcagtcttctttaggttatatcttggtaaataatgctaatatatgttccaacattgtatgagatttctaaaattctaatgtctaagtatatgcta

SEQ ID NO: 985796 - DNA, 120 bp, Artificial Sequence
  ENSG00000215808_27 (sequence is synthesized)
ccaatcataattaaggttaagttattgcaaaccacagagatacccaaacatttttgtcagttgtgtttctaactgtcactaccctgggcattttgctattcacagacaattgttgtcttg

SEQ ID NO: 985797 - DNA, 120 bp, Artificial Sequence
  ENSG00000215808_28 (sequence is synthesized)
ctttaatccttttcaaaagatggtttataataagctatagaactttaggtggtgctctcaaatacaggcttctgaaagcttttgagattgtaacattgaaataaaggaaaatttatgggg

SEQ ID NO: 985798 - DNA, 120 bp, Artificial Sequence
  ENSG00000215808_29 (sequence is synthesized)
aaatttatggggctcataaagagctgaaatattcacaaataccaagcaaaacgagttaactagatggactgaactcaggaagctgaagcaaatctttttgacttttgcttggaatattgc

SEQ ID NO: 985799 - DNA, 88 bp, Artificial Sequence
  ENSG00000215808_30 (sequence is synthesized)
ccttgttttgtttttcactcattaataaggaaagtatacactcctgtgatcaaaatttgtagcatgtttgtttctctctgcctggttc

SEQ ID NO: 985800 - DNA, 120 bp, Artificial Sequence
  ENSG00000215808_31 (sequence is synthesized)
tgactggaagggcatacttccctttacggagtcaatcttgacttgcagagccaataaaagccccatgcggaagctgtcctcatactcagtccctgtatagggttcctgacctgtgatcag

SEQ ID NO: 985801 - DNA, 120 bp, Artificial Sequence
  ENSG00000215808_32 (sequence is synthesized)
aggatgacccaactcacatgtatttgagaataaacccatggctaggatggctttaaaaggtcttatctgagatcccttgaggaacagagttccatcaaagccaatctaaaaggcctgtgt

SEQ ID NO: 985802 - DNA, 120 bp, Artificial Sequence
  ENSG00000215808_33 (sequence is synthesized)
agaaataattattatgcaaataatcaggccaagtataaggctaaagtctattttgcaaaacactcggtcttatcatggtttttttttcttaacaaaagtgaggactggagagaaattatg

SEQ ID NO: 985803 - DNA, 90 bp, Artificial Sequence
  ENSG00000215808_34 (sequence is synthesized)
tagttgtttttaagtttttgcctacatccaaccagcaatccccagctgcagctcagaaagaacaagaggggtgttatctggtaatgtaga

SEQ ID NO: 985804 - DNA, 78 bp, Artificial Sequence
  ENSG00000215808_35 (sequence is synthesized)
ctgcttattcctgtgaaccaaccagcaatccccagctgcagctcagaaagaacaagaggggtgttatctggtaatgta

SEQ ID NO: 985805 - DNA, 120 bp, Artificial Sequence
  ENSG00000215808_36 (sequence is synthesized)
tagcaagtttcctttttgggagagtaagaccaagagccctaaccaaagccaagcaccacgcaccgaaaccctagcaggcataaccatagccaccagttatctgggtgtgtcacaagacat

SEQ ID NO: 985806 - DNA, 120 bp, Artificial Sequence
  ENSG00000215808_37 (sequence is synthesized)
ccttttctctcccttgttggaagaggactcacttccacagctttaccttagcattcagcttatcataaggagtccatgcaatcccaagctttgggtcaaactggatctgagggatccgga

SEQ ID NO: 985807 - DNA, 120 bp, Artificial Sequence
  ENSG00000215808_38 (sequence is synthesized)
ggcagacaataatggaagttaaaaggcacagcacaagtgagtgtagctgattcctgcccattaagccaacccaggcttcttgtttcatggataaaggccacgttaatatccatggcatga

SEQ ID NO: 985808 - DNA, 120 bp, Artificial Sequence
  ENSG00000215808_39 (sequence is synthesized)
aagaggtctagggaactccaaggctacttacagtaggggtgatagaggtataggtgaaagcagataattcctattctctaggccccccagcttcatgggtgcaagccgctttggtactca

SEQ ID NO: 985809 - DNA, 120 bp, Artificial Sequence
  ENSG00000215808_40 (sequence is synthesized)
tggtggcacttgccaagttctccagaacttggggatgcaaggacagcagatggaaaaaggacgctcttccatcactccctgaagtaccccgggtatctgttaggaagtgaagggaaccat

SEQ ID NO: 985810 - DNA, 120 bp, Artificial Sequence
  ENSG00000215808_41 (sequence is synthesized)
ggatgcctgctcacctttctagatgggtagccattcatcttcactctgtacccctttcaaatgcatcctgaatccctgggactcctttaaaaaatgccttctcttttcctttccccttct

SEQ ID NO: 985811 - DNA, 120 bp, Artificial Sequence
  ENSG00000215808_42 (sequence is synthesized)
actcctttaaaaaatgccttctcttttcctttccccttctctgtcttttcttcacagataggtaattgtgtccctgtactatgggacactcatctcagatgcatcctccaaactggaaag

SEQ ID NO: 985812 - DNA, 120 bp, Artificial Sequence
  ENSG00000215808_43 (sequence is synthesized)
ggctcaggggaagggaacacagaagcccagtgtgccggcaaaagggtgaagtttttttttaccggtcaagcttttggcctccttctccctttgcaaactggtaaaaggcctcgggatttt

SEQ ID NO: 985813 - DNA, 120 bp, Artificial Sequence
  ENSG00000215808_44 (sequence is synthesized)
caaaaactcttgcaaaattgctaatggcaatacagtaacaatatgtggtagtaatagaatccttacatatgaaatgcttctagccggttgtacctggtctacacaggctaatgaaatgtt

SEQ ID NO: 985814 - DNA, 120 bp, Artificial Sequence
  ENSG00000215808_45 (sequence is synthesized)
aataggaaataatccttaacaaaagggttacctttgtgcaagtaatgtcctgatgcatgtattagccccttacatgttaattttgaaataaaaaatgtgttaatagaagaagaaagggca

SEQ ID NO: 985815 - DNA, 120 bp, Artificial Sequence
  ENSG00000261669_0 (sequence is synthesized)
caaaagagccccaactcaggagctgccaaaggagatcttcacggggtgcctgcctctctgtgctgagcattggctgctgggcacctggcatgtgctgtctgtggtcctgacacagtctac

SEQ ID NO: 985816 - DNA, 69 bp, Artificial Sequence
  ENSG00000261669_1 (sequence is synthesized)
gcacctggcatgtgctgtctgtggtcctgacacagtctactgaagacagagtggacagtctcgctttgt

SEQ ID NO: 985817 - DNA, 120 bp, Artificial Sequence
  ENSG00000261669_2 (sequence is synthesized)
tgacctcaagtgatccggccgcttcggcctcccaatgtgctaggattacaggtatgagccaccaggcccggcctcgttttaaaaggactcttaggttacataacttaaggcacctttagc

SEQ ID NO: 985818 - DNA, 120 bp, Artificial Sequence
  ENSG00000261669_3 (sequence is synthesized)
catctctaatctgctgagttttataatacaggtaagtttccattaacaagtaataaaaacaatcaacacccactgtgataaaccaccatttaataaatgcctggtttatgtcagtcgcca

SEQ ID NO: 985819 - DNA, 120 bp, Artificial Sequence
  ENSG00000261668_0 (sequence is synthesized)
cttgcaaggctgtctctggtttcgtttcaccacccaggataaacctcagcttcagtaactctcctgccgctgcagtcctccagtcttgcggtggtagggaacccaattccaacgcctagt

SEQ ID NO: 985820 - DNA, 120 bp, Artificial Sequence
  ENSG00000261668_1 (sequence is synthesized)
gctggggcactcgccacactcactgctcaattctggctttgtgggccatttcctgctcagagcatgtgctccaatctccagccagcgactaaaatgcctgcagtggcccctgctgccagg

SEQ ID NO: 985821 - DNA, 120 bp, Artificial Sequence
  ENSG00000261668_2 (sequence is synthesized)
tggccagtgactgactttgtataagccagggttaaagattgcgtcctcatctcagtcccaagtccgggaaaatggctgcagcttttcctggtgtctctctgtctcttcgcctctctccaa

SEQ ID NO: 985822 - DNA, 120 bp, Artificial Sequence
  ENSG00000261668_3 (sequence is synthesized)
gttatctccagggtttgagagaaacaagttattctccctcggcctggattgcacggatccctagtggaaaggtgagtcacggaaactggctctctgccccctcacgtactggagtgtcag

SEQ ID NO: 985823 - DNA, 120 bp, Artificial Sequence
  ENSG00000261668_4 (sequence is synthesized)
ttttatcagccagagactatcatgggggccacctgtccacctcctcctcctcgggatctggggtgtcttttgctattcccgtgaatttccgtgattttttattttttttctcacggagtg

SEQ ID NO: 985824 - DNA, 120 bp, Artificial Sequence
  ENSG00000261668_5 (sequence is synthesized)
gatctttatgcattattttgctatttccaagtggctgaggcacaccatgttgggaaaattccattatcaatttatgccattaattccttccaagttcttttggtgtattttgtcgtctat

SEQ ID NO: 985825 - DNA, 120 bp, Artificial Sequence
  ENSG00000261668_6 (sequence is synthesized)
ctctacttggatgagtttgtcattaaatcatcattttcagtatatgattaaagcatataaactaacactttagttgcatcctaccaagtcttacatgcagcttccatttatttaaaaatt

SEQ ID NO: 985826 - DNA, 120 bp, Artificial Sequence
  ENSG00000261668_7 (sequence is synthesized)
gttgatctcttactgtgccaggcatccttgtagttgtatgggaaagataaaaattgctgcccttatggagtgggaagatacattttacagttaacatgtgtacatacatgcacacataca

SEQ ID NO: 985827 - DNA, 120 bp, Artificial Sequence
  ENSG00000261668_8 (sequence is synthesized)
tatatagggatagatgcaatgggaaaaagtatattaaaaagcagttggagtttaaggggtacagttgctaaagtaacaatattcactgtcatttgaagtattttctaattttcaacatga

SEQ ID NO: 985828 - DNA, 120 bp, Artificial Sequence
  ENSG00000261668_9 (sequence is synthesized)
tttgacatttctagaagttaatactttcaatccaagcatatggacatttggcatgtcttggattatctacataattttttaaaattaaaaacatctaaaaactgatatttgtacatatta

SEQ ID NO: 985829 - DNA, 120 bp, Artificial Sequence
  ENSG00000261668_10 (sequence is synthesized)
gtggggtagatgtggtattttgttacatgcgtagaacgtgtaatgataaagtcaggatacttacggtatccatcacctcgagtatttatcatttgtgttgggtacatgaccagttctctc

SEQ ID NO: 985830 - DNA, 120 bp, Artificial Sequence
  ENSG00000261668_11 (sequence is synthesized)
ttctagttactttgaaatacattgtaaagcaaatgtatacactgttaactacagtcaccatctctatttcataggtgatttctaatcttgtcttataaggtgatttctcttgtctgaaaa

SEQ ID NO: 985831 - DNA, 120 bp, Artificial Sequence
  ENSG00000261668_12 (sequence is synthesized)
actattacggtcttcagtattaagttttgctttgtggtctactataatgaatttttgtgaatatgttattccatgtgtatttggaaaagttttacctaatagtccagtgacaatttatta

SEQ ID NO: 985832 - DNA, 120 bp, Artificial Sequence
  ENSG00000261668_13 (sequence is synthesized)
attatataatttcattagatccagcttttaaattttgctccattcttttatatatgtattcaccatgcccggctaatttttagatttttttgtgacagggtttcaccatgttgcccaggc

SEQ ID NO: 985833 - DNA, 120 bp, Artificial Sequence
  ENSG00000261668_14 (sequence is synthesized)
cccaaagtgctgggattacagacatgagacaccgcacatggcctattactattcttatgggtttcagcttctcattgtgaattgcttcatatattttgaggctgtttcagagctgttata

SEQ ID NO: 985834 - DNA, 120 bp, Artificial Sequence
  ENSG00000261668_15 (sequence is synthesized)
attgcttcatatattttgaggctgtttcagagctgttataatcctgaattgctccatttatcattgttaaaagcttactctttattcccacactccctttattattttaccttaaaatca

SEQ ID NO: 985835 - DNA, 120 bp, Artificial Sequence
  ENSG00000261668_16 (sequence is synthesized)
ttaaggtaattccaaagcaaaatcaattttatctgattgtcacttctcttttgatagatttttagtatatcttttccaatctatttgtaactattacatcattatgtttaagaagtctct

SEQ ID NO: 985836 - DNA, 64 bp, Artificial Sequence
  ENSG00000261668_17 (sequence is synthesized)
aactattacatcattatgtttaagaagtctctgtaacctttttttttttttttttttcgcctgg

SEQ ID NO: 985837 - DNA, 120 bp, Artificial Sequence
  ENSG00000261668_18 (sequence is synthesized)
ggattacaggcataagccacggcaccccatgcctggcccacatgtggtctttaaacttgcaagtttatggtacttattgtaactacttagatatttggatttgttattttgtgatttttt

SEQ ID NO: 985838 - DNA, 120 bp, Artificial Sequence
  ENSG00000261668_19 (sequence is synthesized)
tcttcgcttctctgttgcctttaacagggttcattttattacatgttgtttcttccttatttatctaaatttaacctgatttttgcctaatacacaaatactttcaggtttatactgctt

SEQ ID NO: 985839 - DNA, 120 bp, Artificial Sequence
  ENSG00000261668_20 (sequence is synthesized)
tatcaccacagctggacacaactggtttcatactgccttctagcaattgcaggatgtctgaactcccttgaacctatttccttaccttttaaaatggtaaaattttgtggataaaatatt

SEQ ID NO: 985840 - DNA, 120 bp, Artificial Sequence
  ENSG00000261668_21 (sequence is synthesized)
gggtacaatcagacaatcacctctgaaaggttacaactcttacctcattaatcagtaggaacagggttttgatttaaagcaaaactctatctcattcttccaaactcaggagttagcaaa

SEQ ID NO: 985841 - DNA, 120 bp, Artificial Sequence
  ENSG00000261668_22 (sequence is synthesized)
atgggaatgaactgccagttattcagccttctagactttattcgcatttgtttaaagtgcataggcgtataaacacttttctggattgaggatccaaatccttcaaatttcccaagttgt

SEQ ID NO: 985842 - DNA, 120 bp, Artificial Sequence
  ENSG00000261668_23 (sequence is synthesized)
ccaaccacaaaaaaattattaagcaccaaatgctccagtctagaccggggacctcaaccattttcttttcccaacatgctaagctatttgacacatttttattaggaacagcaattctca

SEQ ID NO: 985843 - DNA, 120 bp, Artificial Sequence
  ENSG00000261668_24 (sequence is synthesized)
aaactgaggagctattatcagaatcactggggcaggaagcgtccatttgcctgttgagaatttctaaagtcttaaaattcatttattcctgggttgttctctaacaacaatacttccaac

SEQ ID NO: 985844 - DNA, 120 bp, Artificial Sequence
  ENSG00000261668_25 (sequence is synthesized)
attagcaaagtactattttagttttcagaatcaatagtatctgaaggtttgaaaaatttcccaggttacttaaaaaccctcattgccaagtaaatttttataaatgaacttgatgatctg

SEQ ID NO: 985845 - DNA, 120 bp, Artificial Sequence
  ENSG00000261668_26 (sequence is synthesized)
tccacagaccatcatcaaatcaataaagttcaataggtgaaaattaaacctcaggtgtgcaaaattcatggttcaaggagtaggtagacatatttattataattacacgattgttaacaa

SEQ ID NO: 985846 - DNA, 120 bp, Artificial Sequence
  ENSG00000261668_27 (sequence is synthesized)
tgtgtactgccatccaaaaatgaacatttattgctactttgttcactagcataaagatgcaatttacttacatagaaaatattttatatgctttgatactgccatgtgtaaacattctta

SEQ ID NO: 985847 - DNA, 120 bp, Artificial Sequence
  ENSG00000261668_28 (sequence is synthesized)
tggatatgtttgtgaactaaaattgacaaatacatattcctatgttaccaacttaagatcataaaccattctcatgtctgctcattaaagctaaagggtctattacatgtgaatctcaat

SEQ ID NO: 985848 - DNA, 120 bp, Artificial Sequence
  ENSG00000261668_29 (sequence is synthesized)
tatttttatagaaacatcacacttgattaccattttctgcatttcagtggttgctgtttgtattgaaaacaaactgagaaattgagaaatcaaatgtagtacctctcttaaaaagaggaa

SEQ ID NO: 985849 - DNA, 120 bp, Artificial Sequence
  ENSG00000261668_30 (sequence is synthesized)
ggaattgttaacattaggaactaaactgccaaaagttattttccataatgactagagtcagtcatcacatacacaaattattatttatttatttttttcttgagatggagtcttgctctg

SEQ ID NO: 985850 - DNA, 120 bp, Artificial Sequence
  ENSG00000261664_0 (sequence is synthesized)
agagagttgctgaaggtctcccggcagtagcggctgtcactgctacggggggtgatctaggagtgaacgccacgaggcaggtggggaaggctgctctgaacgtgtctgtgactacagctc

SEQ ID NO: 985851 - DNA, 120 bp, Artificial Sequence
  ENSG00000261664_1 (sequence is synthesized)
cgtgagaaagttgggacccagaagcttccgccccgaagcggcccccacctgagccgtcaccatcctcccgcattaatgggggcattcgtgcagacaaagacagcccccagagtcaggcct

SEQ ID NO: 985852 - DNA, 120 bp, Artificial Sequence
  ENSG00000261664_2 (sequence is synthesized)
tcactgctagctggcagttcacactgccttctcaaatgatccccataattgctattttacagatggggaaactgaggcatggggttcatttgattcacgcatggtcactcacctaataag

SEQ ID NO: 985853 - DNA, 120 bp, Artificial Sequence
  ENSG00000261664_3 (sequence is synthesized)
tggcaagctaggactggaatccatccctcctgaatccaaagccaacactctggcccctttcccccttggccccctctcccctgcattcccagtgcctgtgtgggggtcacccacaacgct

SEQ ID NO: 985854 - DNA, 120 bp, Artificial Sequence
  ENSG00000261664_4 (sequence is synthesized)
atgaaaaatgagctcagtaagggaagcagaagagccgcctttagagctggaactctccccacaccatcacagcgaacagtgatgctagagccagtcacctggtgagtcagcgcatcagag

SEQ ID NO: 985855 - DNA, 120 bp, Artificial Sequence
  ENSG00000261664_5 (sequence is synthesized)
tcatcatttctgcctccccaactcaagtgaccttacttggatcacctgtgtgtccccaccttgaggtgacagctgggccctggcgatgggacagcatcctgagtcctggatgccttcctc

SEQ ID NO: 985856 - DNA, 120 bp, Artificial Sequence
  ENSG00000261664_6 (sequence is synthesized)
ctgtcaggagacctgtttcctggtgcgttacatctgggagatgccaggcctgctttcctccctcatttcctccccagcgtgcaagaacaaatcaccagtgtcaccacacctctcaatggc

SEQ ID NO: 985857 - DNA, 120 bp, Artificial Sequence
  ENSG00000261664_7 (sequence is synthesized)
gaacaaatcaccagtgtcaccacacctctcaatggccctgagaacttcatggactgctttcacctgtgccattgtcaacttaagaaggcccttaatatggccgggcgcggtggctcatgc

SEQ ID NO: 985858 - DNA, 120 bp, Artificial Sequence
  ENSG00000261666_0 (sequence is synthesized)
taacacaactctttacaaacaatgatgacaacttttttatattttaattgtgtctgcatctatcagagctctgaatccaacttaagtctccttttcttgactcattattacacaatttat

SEQ ID NO: 985859 - DNA, 120 bp, Artificial Sequence
  ENSG00000261666_1 (sequence is synthesized)
tgttttgttctaaagagttgcagataacactttgtttggaccataagatactaatatataaaaggaggaacatttatacatagctgttcaaattgcatgtctagatttgatatcctgaga

SEQ ID NO: 985860 - DNA, 120 bp, Artificial Sequence
  ENSG00000261666_2 (sequence is synthesized)
aaaatgtacaactttaattaaaaatgtgtgaaatttcacattcaaagaaatcattaagagacgtgatagctaagtgcaatactccatcataggctggatactttcagagtgactaactgt

SEQ ID NO: 985861 - DNA, 120 bp, Artificial Sequence
  ENSG00000261666_3 (sequence is synthesized)
tatgttttatcttggactgataggtttccagggacacgggactttcagtgctaaaacatggacagtcaatcagactgctcatactggttctggaacacacacacacacacacgcacacac

SEQ ID NO: 985862 - DNA, 120 bp, Artificial Sequence
  ENSG00000261666_4 (sequence is synthesized)
acacactcacaggagaaagaggaagggagagagaaaatgaataaattataaagcaaacagggcaagttatgacaagtgaattggtaaagtgtataaggctcttccttgaactattttatt

SEQ ID NO: 985863 - DNA, 120 bp, Artificial Sequence
  ENSG00000261666_5 (sequence is synthesized)
tgtgcagctttttgggagtttgaaattaatttcaaattttaaaaaaatgttaggaggtaaacaaaacaaaaactctatttagataacaaatttttgaactaagtacaaagttctatttgg

SEQ ID NO: 985864 - DNA, 120 bp, Artificial Sequence
  ENSG00000261666_6 (sequence is synthesized)
tttctttttgccatcactccacactttgtctcagtcctttccacataacacattcttcagccttcattccgttccagagacagtctatgcactctcatcctagtgagaattgcacatatt

SEQ ID NO: 985865 - DNA, 120 bp, Artificial Sequence
  ENSG00000261666_7 (sequence is synthesized)
gaccaggctgattgaaataccctttctaatccctttactctgtctcccattatctagttaattttgattcaatatttagatcacagttaacttttttgcttcctttagagcctgtgagag

SEQ ID NO: 985866 - DNA, 120 bp, Artificial Sequence
  ENSG00000261666_8 (sequence is synthesized)
acaatactcccagattaaatagaatcttcttgttaccatctctttatgtgtcatataacacttataacattgttagcatttattttttgtgattacttgatggatgtctgcctcctccac

SEQ ID NO: 985867 - DNA, 120 bp, Artificial Sequence
  ENSG00000261666_9 (sequence is synthesized)
tagaccctatgattttaagtgtcagaaatatgccagtatccattcaccattttatcctctctgtccagaacagcaccagacacatggaaaggactccacaaatacttgttaaatgaatga

SEQ ID NO: 985868 - DNA, 120 bp, Artificial Sequence
  ENSG00000261666_10 (sequence is synthesized)
attctgattcacctggctcgaaatttcttaaggaataatcatatcatgcttttgctcagggagtgtggccacaatatctggaaatactgctaaagaagtaagaacacaagtgaagattga

SEQ ID NO: 985869 - DNA, 120 bp, Artificial Sequence
  ENSG00000261666_11 (sequence is synthesized)
acttgaagattagggataccctttttgtaaacagtagatgaaaaaggaatgtatagtcagggaatggagacaccattgaaatagaagagatttcaacatgcttcaatataaaaagaagag

SEQ ID NO: 985870 - DNA, 120 bp, Artificial Sequence
  ENSG00000261666_12 (sequence is synthesized)
ttttctagaaaggtgtggctctagatcagaaatatgaggtcaagggaaatttatttctcatctcacatggagaatactaagaagtgttataggaaagagaaaataaacatatgatgcaac

SEQ ID NO: 985871 - DNA, 120 bp, Artificial Sequence
  ENSG00000261663_0 (sequence is synthesized)
aggcatgagccagcacgcccggccctaatttttttttgttttgttttgtttttaaagagacaggatattctctgtcgcccatactggagtgcactagtgatcacgactcactgcagcctt

SEQ ID NO: 985872 - DNA, 88 bp, Artificial Sequence
  ENSG00000261663_1 (sequence is synthesized)
gagtagctgggactacaggcgtgcacacacatcctggctaattttgtagtctctgccacccaggctggactacagtggcgtgaccttg

SEQ ID NO: 985873 - DNA, 70 bp, Artificial Sequence
  ENSG00000261663_2 (sequence is synthesized)
ttatttatttatttttgagatggagtctgtctctgccacccaggctggactacttctcctgcctcagcct

SEQ ID NO: 985874 - DNA, 120 bp, Artificial Sequence
  ENSG00000261663_3 (sequence is synthesized)
tccaccctccttggcctcccaaagtgccgggattgcaggtgtgagccaccgcgcccagcgacttaacgtgtcattttcactcaactatattatgaagaatatttccacgacgcaggaggc

SEQ ID NO: 985875 - DNA, 120 bp, Artificial Sequence
  ENSG00000261663_4 (sequence is synthesized)
gagaatggcacgaacccaggaggtggaggttagtattttgtgacatgtgaaaattatgtgaaactcaaatttcagtgtccataaaattttttttgttgtttttgagacagagtctcactc

SEQ ID NO: 985876 - DNA, 120 bp, Artificial Sequence
  ENSG00000259274_0 (sequence is synthesized)
atgctgcctagaaccctgtccatttaagaagacacccaggtgatacgcaatgcacaaaaagcactggaactcccagcagaacaaaaccttttccatcagcaaagcattttagaacctcaa

SEQ ID NO: 985877 - DNA, 120 bp, Artificial Sequence
  ENSG00000259274_1 (sequence is synthesized)
caggacacagaggagtaacttctgaggcagcccccggtggtaacataaaagcttaatatgcatcagacaagtgccttcgctgtgagatgttggggaaccaagcccagtggggtggctggc

SEQ ID NO: 985878 - DNA, 120 bp, Artificial Sequence
  ENSG00000259274_2 (sequence is synthesized)
gtcagctcagtgttccagaaaagccaaactgttcaccacgacttgccctgattttgccttcactgctattcaaagaggcctgaagcagttactgaaagcaattccaagaaattgagttaa

SEQ ID NO: 985879 - DNA, 120 bp, Artificial Sequence
  ENSG00000262319_0 (sequence is synthesized)
attgtctgtcacccagtagcacatgggcacttgagggacagagagctttgccctattttgttgctggctgaatccccaggccctgggacagggctggcacacagcaggggttcagtgacc

SEQ ID NO: 985880 - DNA, 120 bp, Artificial Sequence
  ENSG00000262319_1 (sequence is synthesized)
agatgggcagggcaaacacatgtgcattgactccagggtacctctggctagaaaggaggcaaatatgtcacttggagacaaactgtcatttatggcagaagagtccacagtagcttggat

SEQ ID NO: 985881 - DNA, 120 bp, Artificial Sequence
  ENSG00000262319_2 (sequence is synthesized)
aggagtgtggggcaaaagttaggcagcccagacattgcacgccagccttggcccctggcccgctgcccgccagctcagacatgctccctggaggaggagggggacagccctttgtaaact

SEQ ID NO: 985882 - DNA, 120 bp, Artificial Sequence
  ENSG00000262319_3 (sequence is synthesized)
cataaagggcagctagctatggccacagttgctctaggaggcagcatgaggcccataaaccccacctctgacagctttacagggcttggtgtgagtatgccagagatgccatgcatagtg

SEQ ID NO: 985883 - DNA, 120 bp, Artificial Sequence
  ENSG00000262319_4 (sequence is synthesized)
ccatcagagttcccaagtaccaaccagcaagggtggaagagctcttacacacaaatctgccaggctgtcattttccgaggtggccatcaggtcacccggcttcccagcatctgggttccc

SEQ ID NO: 985884 - DNA, 120 bp, Artificial Sequence
  ENSG00000262319_5 (sequence is synthesized)
tgactccctgtgctgctgcctcttctctaagagtgctggattcatgggcagggggtggggggcagccttccaggccaggaggggctccctaattcctccccagcttggtgtgcagtcctt

SEQ ID NO: 985885 - DNA, 120 bp, Artificial Sequence
  ENSG00000262319_6 (sequence is synthesized)
ggagccttaatataattatgataactggcacttatcatgtgccagtcatcataaaaaacacgttacatagctgtccattttataaatgaggaaactgaggctcagaggggtaacttgccc

SEQ ID NO: 985886 - DNA, 120 bp, Artificial Sequence
  ENSG00000262319_7 (sequence is synthesized)
aggattatacagcgagcagctagcaggtgtcagagctgactgttgctcaaaataccatgctcttagccacatgccccatttgagtctcagcttccaactctgacccctgcttggtggttg

SEQ ID NO: 985887 - DNA, 120 bp, Artificial Sequence
  ENSG00000262319_8 (sequence is synthesized)
tccaaggaccactgagaggccccatgacagatgatggacagaatgggagcaggacccaggagcctgggcccaggcaggaagaagccaagggtcaatggctccacctgctggtgctgtgta

SEQ ID NO: 985888 - DNA, 120 bp, Artificial Sequence
  ENSG00000262319_9 (sequence is synthesized)
caacccacagccagccaagcccaggaagctcctgacagttttgacctgggcacacttggccagtatgccttggacaaaaggttcgggggcacaggccaggatttctctgagggtcgcttc

SEQ ID NO: 985889 - DNA, 120 bp, Artificial Sequence
  ENSG00000262319_10 (sequence is synthesized)
cagatcccttcccaggaaacaccggtgctggctcgcctgctcaagaactgctccctaagactgtccatcttccctcctggtcagaaaacacgttgttatccaaacacacccctcgcttcc

SEQ ID NO: 985890 - DNA, 120 bp, Artificial Sequence
  ENSG00000262319_11 (sequence is synthesized)
tgcctggcatatcatctactctccttgtgcgccaaaatcctactcatgctttagagcccaactcagatgtcacttcctccctggtgccttcactatgtggaatgtatccactgtcattga

SEQ ID NO: 985891 - DNA, 120 bp, Artificial Sequence
  ENSG00000262319_12 (sequence is synthesized)
atttcatttattcatttgctcatcatagagacccctgggccaggctgtgaccatttccccttcacatgcctctggtttgtctcctgtttcagtcctgccttgtggttttcacacagctga

SEQ ID NO: 985892 - DNA, 120 bp, Artificial Sequence
  ENSG00000262319_13 (sequence is synthesized)
tgctcaataaatgcgtgctgagcaaactcacaaggctggggtgttcaggtctgatcatgtgcgtgtgcgcaggtggctgcacttacagagagacgcctgaagagggcagcacactggggc

SEQ ID NO: 985893 - DNA, 120 bp, Artificial Sequence
  ENSG00000262319_14 (sequence is synthesized)
gctaacttggagagtgaggccgcgtgatttgttagaggaggaagccggagggcggagggagggccagcccctccccctcaactcgggctccagacgtagtttgagtcccctgtgccccca

SEQ ID NO: 985894 - DNA, 120 bp, Artificial Sequence
  ENSG00000262319_15 (sequence is synthesized)
ctttgctgggtgaccttgggctttggggttggttccaggagccactcagccaggccagcccgcctggcggacgccattcccaggagatgaccaggccctggacagccgacacttggaaga

SEQ ID NO: 985895 - DNA, 120 bp, Artificial Sequence
  ENSG00000262319_16 (sequence is synthesized)
ctgccacgtcctgcctccgcaggagccgcagctccccggggctgcagggaagtggtggctgggctgggggggtggggggtgagcccgcggggactccaggctccaggtgcccacaccatc

SEQ ID NO: 985896 - DNA, 120 bp, Artificial Sequence
  ENSG00000262319_17 (sequence is synthesized)
ccgggggtgggcagtcagggccaagaacgcacagtaaacccccagcacacacaagcgcacacacgcacatgctgacagcactcgcatttttaagatggggaaatagaggctcagaggggg

SEQ ID NO: 985897 - DNA, 120 bp, Artificial Sequence
  ENSG00000262319_18 (sequence is synthesized)
catgcgcgttcctgcccctcaggatcaccagcctgcccccaggagaaaagggaagggaacaaggctgatggctggttccaccaactgggcgcccgggctcagggtgaatgtggggggctg

SEQ ID NO: 985898 - DNA, 120 bp, Artificial Sequence
  ENSG00000262319_19 (sequence is synthesized)
tgacccctgagacgttggatctgcctccctggtatggtttggatgtttgtcctctccgaatctctcactgaaacgtgactcccagtgttagaagtggggcctggtggggggtgtttgggt

SEQ ID NO: 985899 - DNA, 120 bp, Artificial Sequence
  ENSG00000262319_20 (sequence is synthesized)
catgggacagaccctcatcagtggctctttgcagtaatgactgaggtctggttgttgaaaagagcctggcacctccctccccgacttgcccccgtctcgccatgtgatgcgccggatccc

SEQ ID NO: 985900 - DNA, 120 bp, Artificial Sequence
  ENSG00000262319_21 (sequence is synthesized)
cttccccgtttaccatgcgtaaaagcttcctgaggcctcaccagaggcacatgccggtgccatgcttcctacacagcctgtagaacaccaagtcaaataaacgccttttctttataaatt

SEQ ID NO: 985901 - DNA, 120 bp, Artificial Sequence
  ENSG00000262312_0 (sequence is synthesized)
ccatagacactcccagggtttcctggggataactgcccttcctccacaggccctgcagcccgccgcctcatactaagcacacagaggcgtctggggcctgcatgagtctgaaccgccaga

SEQ ID NO: 985902 - DNA, 120 bp, Artificial Sequence
  ENSG00000262312_1 (sequence is synthesized)
ggcaagcaggaaatgggacatatagagtgactgtcagcaggggcttgggacccaaaaggggatgcttttcacagccaaccagaaaatgaacttaaagccctcaatccctgagccattctt

SEQ ID NO: 985903 - DNA, 120 bp, Artificial Sequence
  ENSG00000262312_2 (sequence is synthesized)
agggtctcactctgccacccaggctggaatgcagtggtgggaagacatgattaaatgagcaggtacaacaggccaagtgcaggctgcagggaaaagcaagcagcatctcccaccccaggg

SEQ ID NO: 985904 - DNA, 120 bp, Artificial Sequence
  ENSG00000262312_3 (sequence is synthesized)
caagcagcatctcccaccccagggtgtcaacagaaggctcccagaagaaataggtcaaaacccgaacccaaagtggggagtgtgcctggctcagctaaggaacccaaacgaattgaattc

SEQ ID NO: 985905 - DNA, 120 bp, Artificial Sequence
  ENSG00000262312_4 (sequence is synthesized)
tttggctccagccaccccaatggcatttcctcttaagctgttgggaaagacaggaagcctaaggcatgggtacaggctgagaggtgatactgacccctctgcgggtgggcttggggctgc

SEQ ID NO: 985906 - DNA, 120 bp, Artificial Sequence
  ENSG00000262312_5 (sequence is synthesized)
ttggtagaggaaacaaggacttcagcagtcacaggaggccagggctgtgccttcctcactccagggcaacagggcagagctggctctgggaagcagggcacacaggggcatggctggcct

SEQ ID NO: 985907 - DNA, 120 bp, Artificial Sequence
  ENSG00000262312_6 (sequence is synthesized)
agccaggagggttgttggagccttcctcctcttccatttcaaacagaaaagcggggctgagacaggagaggcagccctccatctgggcaggtccccagtgctcccagcaagggcaggaat

SEQ ID NO: 985908 - DNA, 120 bp, Artificial Sequence
  ENSG00000262312_7 (sequence is synthesized)
tctgaggacatgcctgagcctcagagctgtaacctcaccccaggactttggatctgcccagagaacaagatcagcccccctgggacccataaaccaggcctctagacgtgttcagcctgg

SEQ ID NO: 985909 - DNA, 120 bp, Artificial Sequence
  ENSG00000262312_8 (sequence is synthesized)
caaggccaacccggagaggagggcaaatgatagcgactcccagggaaaggcatgaagtggggctgggaaactggtatacttgcactgaaatgaagatcaccaggatgatttgtgagttgt

SEQ ID NO: 985910 - DNA, 120 bp, Artificial Sequence
  ENSG00000262312_9 (sequence is synthesized)
ctgtaaactttgtccccatatctattcattgagaattcattgatttctttgggctaaagaccatagatggagactggaatacttactcgagaatctccaaggttctgttcacagccaagg

SEQ ID NO: 985911 - DNA, 120 bp, Artificial Sequence
  ENSG00000262312_10 (sequence is synthesized)
cttcccctagcacctgggcgcctgaagcaccaattgaggccacctggagactggggcggagagggtgccgtcagtgtgagccggctgggcccacctccctccgcatactccgttcccttt

SEQ ID NO: 985912 - DNA, 120 bp, Artificial Sequence
  ENSG00000262312_11 (sequence is synthesized)
caccaccccttgactcaggatggaaagtggagaaacagcactgagaatggttggccagcgctgtgtctaggcactccatctcctacctacactgtctgttgcctaagacagagatctgga

SEQ ID NO: 985913 - DNA, 120 bp, Artificial Sequence
  ENSG00000262312_12 (sequence is synthesized)
tgctaaggagatgagaaatagaggctgtccctggaagggctcggggagaatgctccctgtacctcctcattactactctctaggtgtttgagcccccaactgctaatatcatatttccta

SEQ ID NO: 985914 - DNA, 89 bp, Artificial Sequence
  ENSG00000262312_13 (sequence is synthesized)
taggtgtttgagcccccaactgctaatatcatatttcctatattaggaaaatcaaacacaccttccttgacttgtaaacaaaaataacg

SEQ ID NO: 985915 - DNA, 68 bp, Artificial Sequence
  ENSG00000262312_14 (sequence is synthesized)
tgcacgcctgttatcccaactactgtatgggaggctgaggcttgagaatcacttgaacccaggaggtg

SEQ ID NO: 985916 - DNA, 84 bp, Artificial Sequence
  ENSG00000262312_15 (sequence is synthesized)
tgttgtctcgaggaaaaaaaaaaaaaaaaagacctctaacgtgaaaggatggcgaagggaccggtttcctgactgctgcgcaca

SEQ ID NO: 985917 - DNA, 120 bp, Artificial Sequence
  ENSG00000262312_16 (sequence is synthesized)
aaggatggcgaagggaccggtttcctgactgctgcgcacatctaggacttactagagagcagtgagggctgtgttgaccttcagtgcacgggccaccgcacacgctccgtcatccccgat

SEQ ID NO: 985918 - DNA, 120 bp, Artificial Sequence
  ENSG00000262312_17 (sequence is synthesized)
ccacctcagcctcccgaggagactaaagtacttaactagagacggggactacaggcacatgcccccatgcccggctaatgtttttattcttttatagagatggggtctcactatgttgct

SEQ ID NO: 985919 - DNA, 120 bp, Artificial Sequence
  ENSG00000262312_18 (sequence is synthesized)
gggctcaagcagtcctcccaccttggcatcccaaattgctggcattacaggcaggagccaccacgcccaacctccttggccattcttgctaattagggctttgtgtcattttttcccctt

SEQ ID NO: 985920 - DNA, 120 bp, Artificial Sequence
  ENSG00000262312_19 (sequence is synthesized)
ttccccttctaagttggagggaactagcaggccctggtgcagtgagtgactgagtttagctcaagcgcacactggtatgttcaaggccaagagctgtttgcattcattattttaacagac

SEQ ID NO: 985921 - DNA, 120 bp, Artificial Sequence
  ENSG00000262312_20 (sequence is synthesized)
accccgtctccactaaaaatacgaaaattaggctgggtgggtgtatttttagtagagacagggttctctgtctctactaaattagctgggagtggtggagggcacctgtagtcccagcta

SEQ ID NO: 985922 - DNA, 120 bp, Artificial Sequence
  ENSG00000262313_0 (sequence is synthesized)
aacctggtctgccgccagctcttcagatgcacagagggctacaaacaaccacaattagctttcagcacaacagccaccgtctgcgttaatgcgagatgaaccgcagtctttcacagagag

SEQ ID NO: 985923 - DNA, 120 bp, Artificial Sequence
  ENSG00000262313_1 (sequence is synthesized)
agctgcgtgggaatgcgcttcagaaacgttgctggtaccagaagtcagcagtgttttcggtgatcagcagagcagagggcctccctgctccccacacagtctctgtgaccggggccgcct

SEQ ID NO: 985924 - DNA, 120 bp, Artificial Sequence
  ENSG00000262313_2 (sequence is synthesized)
ttccgcaaggagctccctccgctgtctgcggcaacagacaccgccccctccagggctgctccctgcccctccaccccgggtgcagctgggagagcaaacaacaaggaaccgccactcccg

SEQ ID NO: 985925 - DNA, 120 bp, Artificial Sequence
  ENSG00000262313_3 (sequence is synthesized)
ctccttgcggatctgactctccaggtcgtgctcttctgggatcttcaacaacagaaaacacccagttaagcccagcgatgaaacagggttgtctcttggtatcaatggggtatgggttct

SEQ ID NO: 985926 - DNA, 120 bp, Artificial Sequence
  ENSG00000267791_0 (sequence is synthesized)
caccaacatgtcaggtttatttctccttcgctctcaactgagagcggggcatccaaatcataacaaaaccagggcccaagagtgggaagcggccccctgggtgggcctgaaccccaattt

SEQ ID NO: 985927 - DNA, 120 bp, Artificial Sequence
  ENSG00000267791_1 (sequence is synthesized)
cggggcggaggcagcaccaacattggggatggtcccccaagaacagaggaggaagcccagcctccggcaggcagtatccacatccacgcccacctgctcaggcctgcagcctccagacct

SEQ ID NO: 985928 - DNA, 120 bp, Artificial Sequence
  ENSG00000267790_0 (sequence is synthesized)
cagcacgctgtgtaccactcttgatgggtaggcccactctgcccgcaccttgaaacctgaccaggtcttctcccaccccatgaatgtaaacattttaacaactagcctgactgtgaaaag

SEQ ID NO: 985929 - DNA, 120 bp, Artificial Sequence
  ENSG00000267790_1 (sequence is synthesized)
cctggagaatccttcctacaggggacagtggtgcaaagagaagctggacaggcgcccacacctggctggcacgcacacctgtgtgcaccgagggggaactgacgagcacctgaattgccg

SEQ ID NO: 985930 - DNA, 120 bp, Artificial Sequence
  ENSG00000267790_2 (sequence is synthesized)
agccaggctgcagtaagtcattaggatcggggtgagatgcccccacagggacaagggaggggtgagaatcagaggggtttcttttctcagctaagaaaggccccaggggcagcctctgcc

SEQ ID NO: 985931 - DNA, 120 bp, Artificial Sequence
  ENSG00000267790_3 (sequence is synthesized)
ccacatggctctcagtaccagcgatgggcagggtcccttcgttctcattgcggtttccccagggctcccacaccaccagctgcctcttctagaaactccccatcaggccttctcccccgc

SEQ ID NO: 985932 - DNA, 120 bp, Artificial Sequence
  ENSG00000267790_4 (sequence is synthesized)
gaatcttggtaacgtccttgctgcctctctcacaccctcctgtcctcctcttcctacaaacatgctcctgtctccatcccaccttgaagaaacccttggccgatacggcacccacccatg

SEQ ID NO: 985933 - DNA, 120 bp, Artificial Sequence
  ENSG00000267790_5 (sequence is synthesized)
gtcccaggataaccccttttcttccctaggctaataaaacagagaaagtaagtgcatcgggcactccagaccaaagccatttgcagaatggagtcacaggctgacatccaagactttagc

SEQ ID NO: 985934 - DNA, 120 bp, Artificial Sequence
  ENSG00000267790_6 (sequence is synthesized)
cagctggcttcaggcagcagatgcaaaggagaggtcatgagcaggccaggccctggctaggcaggtgagaggtgacggcgaccttgtctaggatgagggccccaggaagcccttgggaac

SEQ ID NO: 985935 - DNA, 120 bp, Artificial Sequence
  ENSG00000267790_7 (sequence is synthesized)
ccagggtggttaggccaggccagttggtgagagcctgaactctggaaggaaagaacaggctgtagtgtggacgagaccatccctcctgcatcgtagctgccttgtaatcccatcctcctg

SEQ ID NO: 985936 - DNA, 120 bp, Artificial Sequence
  ENSG00000267790_8 (sequence is synthesized)
actcaggctgggctctgcatcaggcaccccagagtccaggcaccccagtttgtcaggcctgtgtgggacagcgcctgagccgggagggctcccttccctcctccgggatgctctggcctt

SEQ ID NO: 985937 - DNA, 120 bp, Artificial Sequence
  ENSG00000267790_9 (sequence is synthesized)
tctctgtcatggccatttattgcaaccacggtcaataaaggaggcaggagagggcacagtggctgtgaaaacgtttggctcacgaggaacaggtatcctaactgcgtgggacaaggaggc

SEQ ID NO: 985938 - DNA, 120 bp, Artificial Sequence
  ENSG00000267790_10 (sequence is synthesized)
gggtggtgtcgtgattaaagcacaggcctgggatcacactgcaggggctcagatcccagatctgcaacaatgtggctgcgatgaccctggctgggcgcggtggctcaagccccccagtct

SEQ ID NO: 985939 - DNA, 120 bp, Artificial Sequence
  ENSG00000267790_11 (sequence is synthesized)
ccgatttgccagcctggctgttcacacacaggggatgcactggcttcccaggcatcctgggcaccccctccaggtggcataggggctccccagcactgaagggtgttcagcagcctgcaa

SEQ ID NO: 985940 - DNA, 120 bp, Artificial Sequence
  ENSG00000267790_12 (sequence is synthesized)
accaactgactcacagagcccagatagtgacgccaagaccagccgctccggggccaacatcagagctggagagctgagccagtggcacgccagtcactgaggaaggcctcttgttgataa

SEQ ID NO: 985941 - DNA, 120 bp, Artificial Sequence
  ENSG00000267790_13 (sequence is synthesized)
agacagggcatgaattcttggggggctgttacgtaccttcccaaagggagaaagaaaccccttgttcagtcaccgcacagctgtctctggagacaggagcacaaagctgccttctgccca

SEQ ID NO: 985942 - DNA, 120 bp, Artificial Sequence
  ENSG00000267790_14 (sequence is synthesized)
gggcactgcttccttggcaagtgaccagcagctgggaccgcacgtgccaaaggcagcagctgccatgtttgacaaactggaacggagctatgtccaaattaaatccccccaaccagcctc

SEQ ID NO: 985943 - DNA, 120 bp, Artificial Sequence
  ENSG00000267790_15 (sequence is synthesized)
tgccatactccctttggggacaggggtggtcggtcgttacgcttgcaaaattccaacagcacctagagtcccaggaaatggggctgctggccaatagaggtgggacccagggtgacaggc

SEQ ID NO: 985944 - DNA, 120 bp, Artificial Sequence
  ENSG00000267790_16 (sequence is synthesized)
cacatgctccttagagagccaacagtgtttcctgaattccatgggagtttgccgaggggacatggaagctaggattccggaacacccgctgggagcctagtcctgggctaggggctgcat

SEQ ID NO: 985945 - DNA, 120 bp, Artificial Sequence
  ENSG00000267790_17 (sequence is synthesized)
ttatcatttcatcctcacaactactgttgcagtttcgcctaacagagaaggagacaaaactaacccggtggccacgtggccgaaggcacagagccgttgagtggcagcgtggcatttgaa

SEQ ID NO: 985946 - DNA, 120 bp, Artificial Sequence
  ENSG00000267790_18 (sequence is synthesized)
ttcaggccggtgatgctgaagtccccaggtctttttttttttgatgcccacaacaatgtaactactaatagcctgttattgatgcaggccttaccaataacataaatagttgatgaacac

SEQ ID NO: 985947 - DNA, 120 bp, Artificial Sequence
  ENSG00000286554_0 (sequence is synthesized)
attgggacatatctctgagcccgtgacctaagtgatatgactctcttcccctgcctgggcctttaaaatggtgggattgtgacatactgctgagcccagcatttagaagacatggcacca

SEQ ID NO: 985948 - DNA, 120 bp, Artificial Sequence
  ENSG00000286554_1 (sequence is synthesized)
tgtttcttgaggctataccaaggtgatgtgactcttctgacctggccctgcctgcgaaggagattataatacatcccgaattcagaatccaggtgatattgtgccatatacctgagacca

SEQ ID NO: 985949 - DNA, 120 bp, Artificial Sequence
  ENSG00000286554_2 (sequence is synthesized)
ctataccttcacccagctcctgagtgatttaataatccggcccaggtgtagcccacaaatgagatttggacatttgcctcagctgagcgccttggtgatttgactctcctgtcttaacaa

SEQ ID NO: 985950 - DNA, 120 bp, Artificial Sequence
  ENSG00000286554_3 (sequence is synthesized)
tatcctcaggaaggattgtaacatgtatctggacccatcatctagttgcctgactctcctctcctgcctggaccctgcttccactggggattgtaacatttctaagcactttatccaaaa

SEQ ID NO: 985951 - DNA, 120 bp, Artificial Sequence
  ENSG00000286555_0 (sequence is synthesized)
gggggtgtggcttaggagggccttagtaaggacttttcactctgcttttaccccgatacctgctgattggaaagcctcatgtcttctacagacagcacctaacctgatgatggccatgtg

SEQ ID NO: 985952 - DNA, 120 bp, Artificial Sequence
  ENSG00000286555_1 (sequence is synthesized)
cccaggagggcctggaaccaactgggctgcaggcatggaacaatcagggctgcagacagggaggaaattaggcaggcgggaggaaatcaggcttcggacatggaagaaacaagatgtggg

SEQ ID NO: 985953 - DNA, 120 bp, Artificial Sequence
  ENSG00000286555_2 (sequence is synthesized)
ggaatataaggaagaaacctgtaggcacacacagaagaagcaaggctgggagcactagagcaatcggcctgcaaactggaagacagctgatggcagaaatggaaagactgagacagaggc

SEQ ID NO: 985954 - DNA, 120 bp, Artificial Sequence
  ENSG00000286555_3 (sequence is synthesized)
ggagacagggctcagctgggggcctaggaaatgggtgcaggtggcaggtccaagccccccacccaggctccagccttcacctgggtcccactggcagtgccagccacgcgcatcttcaca

SEQ ID NO: 985955 - DNA, 120 bp, Artificial Sequence
  ENSG00000286555_4 (sequence is synthesized)
atggcagtgatctcctcccgctgcttcctgagctcttcctcatccacctgggaaggggcgagaggcagggacaggtggtcaccgtcatctgcaaggatcacccctgccctccactgccca

SEQ ID NO: 985956 - DNA, 120 bp, Artificial Sequence
  ENSG00000286555_5 (sequence is synthesized)
ctggccagggacgcacactaaacaccaccacatagtggttaatgaggtcttccaccacacggccagccttgtagtcctgcccatctgtctggaagagcgtgggcccaaacacaattgcca

SEQ ID NO: 985957 - DNA, 120 bp, Artificial Sequence
  ENSG00000286556_0 (sequence is synthesized)
gagtaggcaggagagcttggtggaaatggtgaaatagtggtgactgagcagcagggcctgtcctttgtgcattgcatgtgagaggagcatacttcacatcctgataatgttgtgcctgac

SEQ ID NO: 985958 - DNA, 120 bp, Artificial Sequence
  ENSG00000286556_1 (sequence is synthesized)
catgtgatttctttggcaaagaacatgagcagagtgatatatgtttcttctgggcagaggccttaggagccatcacactcttctgcagttcctcttggccttctgccatgaggatggcat

SEQ ID NO: 985959 - DNA, 120 bp, Artificial Sequence
  ENSG00000286556_2 (sequence is synthesized)
gtccccagtaggggctgttcttttattctggactgcaggacttacgaagcagaaccacagccaatatacttgttgcaatatacttgttgctgtaaatccctgggatttggatggtgtttg

SEQ ID NO: 985960 - DNA, 120 bp, Artificial Sequence
  ENSG00000286556_3 (sequence is synthesized)
gtaggtggacacaaatgactactgagatgtgtggagaagaattgcctagcacacaaccaccaatgctgctgaaggcaggagaaattgccagatccacacagcaggataaagacatttaaa

SEQ ID NO: 985961 - DNA, 120 bp, Artificial Sequence
  ENSG00000286556_4 (sequence is synthesized)
ctaaggagagactggtgtgatcgattcatgcatctggtacacaggctgtcatggagggatcctgctataccttaattcacacattttttctcagtcatttgaaaaatgaaaatctgcctt

SEQ ID NO: 985962 - DNA, 120 bp, Artificial Sequence
  ENSG00000286556_5 (sequence is synthesized)
acaattggtgatgtcttagaatctatgcaacgttgtaattggctccacgttgaagttccatgttttattggagaagatcctatcccgtttcacatgccaaattatttgtgcccatttttc

SEQ ID NO: 985963 - DNA, 120 bp, Artificial Sequence
  ENSG00000286556_6 (sequence is synthesized)
aagcatgttgatttaaatctgtcgaaggatctgcgcacgtcaaggcagcttaatgaagaaaatgactctgtatgtatatccttcaaataaagattaaattgtgccaggtttaaagcaaaa

SEQ ID NO: 985964 - DNA, 120 bp, Artificial Sequence
  ENSG00000286557_0 (sequence is synthesized)
tgccagttgccctgtggagcggccagggaaggcctgccctagtttcacccaccccatccatctccctgggcacacctgctcctgccatcggcactcctactatcatggctgcatctgggg

SEQ ID NO: 985965 - DNA, 120 bp, Artificial Sequence
  ENSG00000286557_1 (sequence is synthesized)
tttggagttcacagaaacctcttaaaaaggcacccaattgctcaactttgctaagcagatgaagagtgaaataaatgttgcttcaccagctgggctggaaaccaaatgaaaatgcagcat

SEQ ID NO: 985966 - DNA, 120 bp, Artificial Sequence
  ENSG00000286557_2 (sequence is synthesized)
ctccaggcaatttccttaaaatggatcaacttgaaacattctctatcacaggaccagtagacaggagaggagccaaagaaggaaggactgtgcgtgtcggagcagacaaagaattaataa

SEQ ID NO: 985967 - DNA, 120 bp, Artificial Sequence
  ENSG00000286557_3 (sequence is synthesized)
aagggtcactgaacctgctctgaatctcagatgcatccttcgtgaagtgaaaaaagattcccctgagctgctaagagcaaggaaacacaatccgggctgagctggaaactctagatctgc

SEQ ID NO: 985968 - DNA, 120 bp, Artificial Sequence
  ENSG00000286557_4 (sequence is synthesized)
tacaacctggttaattgctactgggcagagaggcaaagaatagataaaaatttgcagctgtaaaaaaaaaaaaagaaatctgaaagggatagagcagcttagtaaaaagaaagctggaat

SEQ ID NO: 985969 - DNA, 120 bp, Artificial Sequence
  ENSG00000286557_5 (sequence is synthesized)
aagccacctccattcattcatggaacacctatgaggcgcctattcccatagtgtcacaagcactgactgtcgtaggtccagggagacacaggtccctcaaagagcttactcctagagtag

SEQ ID NO: 985970 - DNA, 120 bp, Artificial Sequence
  ENSG00000286557_6 (sequence is synthesized)
caggtttatatttgtaattataaacaaataactacagtaaaatgtggcaagtggcaagaaagagaaaggcacaaagcactatgggtgcacccagggcaggaaggtcctggcgggtgatgg

SEQ ID NO: 985971 - DNA, 120 bp, Artificial Sequence
  ENSG00000286557_7 (sequence is synthesized)
gcagctccctgggggcagcatggggaacagcagagggaacagcatatgtgaaggccgaggggccaatcatcttgacctggaaggtgaatcacaagcattcctacctcgctgaagcacagt

SEQ ID NO: 985972 - DNA, 120 bp, Artificial Sequence
  ENSG00000286557_8 (sequence is synthesized)
gtgaaggaagggagaggcgagagacagggcttggaaggcaggctgaagccagttgtaagggacctctgaatcatgtgcagaagtatctgggatttctccatgaggaatcatcgaagcctt

SEQ ID NO: 985973 - DNA, 120 bp, Artificial Sequence
  ENSG00000286557_9 (sequence is synthesized)
cttcaagtaagggagtaactgagatcaaacctgtggtttaaacaaaacaaaacaaaacaaacctgtcatttttcgtttgctttccttttgtttatttaaataaactagttttgaaaagca

SEQ ID NO: 985974 - DNA, 120 bp, Artificial Sequence
  ENSG00000226431_0 (sequence is synthesized)
ggcatggatggtgatccttctgtccagtctacgctggccatgctggccctgaggcctggaactggggagcacgagcaggatgacatctccagtgtctgtctgggtcacctgttagcggat

SEQ ID NO: 985975 - DNA, 120 bp, Artificial Sequence
  ENSG00000226431_1 (sequence is synthesized)
gagaagtccagccttactgcctgttctccacctgcatttaggcttcatccctggaatgtcaccttctgtcttctggaaaacgtctaggctctgctgccatacagaacccttctgcttcct

SEQ ID NO: 985976 - DNA, 120 bp, Artificial Sequence
  ENSG00000226431_2 (sequence is synthesized)
agaggggcccctgcccgttgccctttcctggatggagcatgagttttgatgtcaggcaggtctgggtttgaagcctcgtttgtcttgccttcagaataacctctctaagcctcagtttta

SEQ ID NO: 985977 - DNA, 120 bp, Artificial Sequence
  ENSG00000226431_3 (sequence is synthesized)
tagcccgaaaatgggggtgattataactcctgaagggaagttttgggattggctgatacataagatacttagcacagtgcctggcacacagtaagcgatcaataaatggtagcatttata

SEQ ID NO: 985978 - DNA, 120 bp, Artificial Sequence
  ENSG00000226433_0 (sequence is synthesized)
gccgctccatgctgggggaccagatgcctctgtttacgccgctctcctcccagccttctgccggccggtcggcagcaagacagagcccgggagcccgtcactgggcttcagctgtctccc

SEQ ID NO: 985979 - DNA, 120 bp, Artificial Sequence
  ENSG00000226433_1 (sequence is synthesized)
cagtcttgtctttcaatatattctctcctctacccctttttgtctccacacccccttccccaaatggccagaaggggtatccctctttttcaagtttgacccaatagaacaaagcggaga

SEQ ID NO: 985980 - DNA, 120 bp, Artificial Sequence
  ENSG00000226433_2 (sequence is synthesized)
aagactaaccagggcgactttgattcctgccatcctcgaaacaacacagtgttcaaagatcaggccggcccggcgcggtggctcaagcctatctgagaagtttcttgaagaccatcagca

SEQ ID NO: 985981 - DNA, 120 bp, Artificial Sequence
  ENSG00000226433_3 (sequence is synthesized)
ggcgactggaagatacactgtggttacctgggaggcagcccagcctggaccagcaacccaacctgcttcttcagagcaaaacaagaactaggaatcatcttttcacctgggaaggaatca

SEQ ID NO: 985982 - DNA, 120 bp, Artificial Sequence
  ENSG00000226433_4 (sequence is synthesized)
agtaaaaagcaaaattgaactaaaggttgtttacctttcaaacttggtggccatgttgtgaggaagcccaagtgacatgaggagttcccgtggaggtgtgctgctgacagccccaggtga

SEQ ID NO: 985983 - DNA, 120 bp, Artificial Sequence
  ENSG00000226433_5 (sequence is synthesized)
gagctcagccaagaatcagcacaacactgtgagtgcaaacatgtgagtgagtgagcttgcagaggatgtgatcccacctaggatgtcagcattcaagacaccctagctgacactgagtga

SEQ ID NO: 985984 - DNA, 120 bp, Artificial Sequence
  ENSG00000226433_6 (sequence is synthesized)
gtataggtgaagaacatttacaacagtgataatagaaaacttgtcataagtttttaatttgtgctgtaattacactctgatattcccaaatcttcaataaaaatccattgtacagtaaaa

SEQ ID NO: 985985 - DNA, 120 bp, Artificial Sequence
  ENSG00000286553_0 (sequence is synthesized)
gtccttatgacggaagagaggcagcgaacacacaaacccagaacagggcaggcggtaagtgcttggaagaaggctaaggcaggcaccggggctgcagaatggcacttatccaagaagtcc

SEQ ID NO: 985986 - DNA, 120 bp, Artificial Sequence
  ENSG00000286553_1 (sequence is synthesized)
tctcaagaaagcatcacccacacacctatctggtctggccaactcctcctgatcctccaaggctccccagaagcttctcctcctttttgaggccttctctggacaccaaccacgcaccag

SEQ ID NO: 985987 - DNA, 120 bp, Artificial Sequence
  ENSG00000286553_2 (sequence is synthesized)
cttcctcaccagcaagattcatcacttctcccttctgcccctctggactgcaccgtgtttattcatgtgtctgacgcctgagcaaagtggagttccttaaagtcccggagctgtgacact

SEQ ID NO: 985988 - DNA, 120 bp, Artificial Sequence
  ENSG00000286553_3 (sequence is synthesized)
catctccatagcagcagccccaggtccttcaagacagccgtgcctctagggcctctgttaataaaggaatgaaatgcacatcctctttttacaatgccatctttgaaaaggtctgcccat

SEQ ID NO: 985989 - DNA, 120 bp, Artificial Sequence
  ENSG00000286553_4 (sequence is synthesized)
gaagaaagcacaaacaaatgcctttttatttaaaactccctttgtaaaaatcactctccttttttcctgaaacctgcatcttttaaaagtccttttgggttcttccccctgtaaaactat

SEQ ID NO: 985990 - DNA, 120 bp, Artificial Sequence
  ENSG00000286553_5 (sequence is synthesized)
gccaagacacttaaaggcttgctacagatatcatgagaatgccatgctggccacaatgaaagcagcttggacactcctttacagcctgtgatcattttcacaaacatttcctaaattcta

SEQ ID NO: 985991 - DNA, 120 bp, Artificial Sequence
  ENSG00000286553_6 (sequence is synthesized)
catagtaaaactttctttccaaggaggacaaattgtttaaaaagggggaggaacatattcttttctggttttgtttttctgtagttaaactctgagctttaaaaacacagcctatacccc

SEQ ID NO: 985992 - DNA, 120 bp, Artificial Sequence
  ENSG00000286553_7 (sequence is synthesized)
cccatccttagaacacccaaacagaaagtcatttggaagtaaaaaggaaaaaagtggccaggactcaagacaaatggctcccaataaaggagatggattcagagaaaaaaaaaaaaaata

SEQ ID NO: 985993 - DNA, 120 bp, Artificial Sequence
  ENSG00000286553_8 (sequence is synthesized)
ttctttcagtgcagattccactactgttacttgagtttccattctgttttcaatgtgaggcaaataaaattgtagaagtgagagcctcccatgtcggtggaagggagttggattcagaat

SEQ ID NO: 985994 - DNA, 120 bp, Artificial Sequence
  ENSG00000286553_9 (sequence is synthesized)
caggttctaactgcagaaacacaggccagatctcataaagaccagcccaagccacgctgacagctggccctcctcaagcctaaactagagctccaaaactgaagaccccctaaaaataac

SEQ ID NO: 985995 - DNA, 120 bp, Artificial Sequence
  ENSG00000286553_10 (sequence is synthesized)
aaagaaagagcattcagctgctccatccaaactcaagcacaaaagaaagcgggggtaaaaatcgtttccatatttcacataaacacagatctcactgcgacagctaggaatgcatgagtc

SEQ ID NO: 985996 - DNA, 84 bp, Artificial Sequence
  ENSG00000262879_0 (sequence is synthesized)
aggcagccgttagacagcacaaccgaacccaacaccggggcccaacggcaggggcttgggcaggagcaaggtccgagggctgcc

SEQ ID NO: 985997 - DNA, 69 bp, Artificial Sequence
  ENSG00000262879_1 (sequence is synthesized)
ccagaaggaagaaactccgaacacatctcaacatcagaactccgcggcttcattcttgaagtcagtaag

SEQ ID NO: 985998 - DNA, 120 bp, Artificial Sequence
  ENSG00000262879_2 (sequence is synthesized)
agaacccaccaattccggacacagtagcatttgggaataataagaattgtagctgggcatggtggtacacgcctgtagacccctagcagctgccatcatcctcaccatccgcatattatt

SEQ ID NO: 985999 - DNA, 120 bp, Artificial Sequence
  ENSG00000262879_3 (sequence is synthesized)
gatatattaactctttgatggcaaccatagcttatcccccttatctccctatgccctacagcagggcagtggaatggttaagaggctttgaagtctaagagtgctggcttaaaaccctaa

SEQ ID NO: 986000 - DNA, 120 bp, Artificial Sequence
  ENSG00000262879_4 (sequence is synthesized)
tcgtgagccacacatctccccacaccaagctcctccatacaagacctcggactgcatcacgtaaatgctttttcaggggcaaaatctagagaatctgaaacgagctatcagcttcccagt

SEQ ID NO: 986001 - DNA, 120 bp, Artificial Sequence
  ENSG00000262879_5 (sequence is synthesized)
ttgcacaattcatcaagaaattatgcggggtcactggcacaaatgatgaggcatctcctggaagcttaacttcttatccatcccatctcttggacagatgatgccagttaattactttga

SEQ ID NO: 986002 - DNA, 120 bp, Artificial Sequence
  ENSG00000262879_6 (sequence is synthesized)
atgggtctgtcacacgcagcccaactcaactggagtcctgagaaggtgaacagaccaggatggatggccagggaactcaccagaagtccccaggcatcagaacaaggtcgaagcatcctg

SEQ ID NO: 986003 - DNA, 120 bp, Artificial Sequence
  ENSG00000262879_7 (sequence is synthesized)
tggaggcttcacagagacactgggtgaatctaaatgatgagtttgatggtgacctggaggtgaaactgtgacttcatgatgttctagaggctgacctggggtctcctgctgggtcagaga

SEQ ID NO: 986004 - DNA, 120 bp, Artificial Sequence
  ENSG00000262879_8 (sequence is synthesized)
agattcgacctccccagaagactcagaaggctgaactggctgctgctgctcactgatggaaagttcatgctccataggaggaactggaggctcaattggggcctcctgttgggttgcaga

SEQ ID NO: 986005 - DNA, 120 bp, Artificial Sequence
  ENSG00000262879_9 (sequence is synthesized)
aggttccacctcctctggaaactgaattggggtctcctgctgggtttgggaagattctgtctcattggtaggctctgaagttatggtaacctccacatctgcaggtttaactgtaatgtt

SEQ ID NO: 986006 - DNA, 120 bp, Artificial Sequence
  ENSG00000262879_10 (sequence is synthesized)
gggcaagtgataataagcttgatcctcacctggaggttgaactgacacctcatgattcggtagagttagactctccatagaggactctggaggcagagctggggcctcctgctgcattga

SEQ ID NO: 986007 - DNA, 120 bp, Artificial Sequence
  ENSG00000262879_11 (sequence is synthesized)
agaaggttcttcctcaaggagctgtggaagctgtgctggggcttcttgttggagtgaagaggactggatgtcttcaagggtctctggattttgagtttcgggctctagatggaattgaga

SEQ ID NO: 986008 - DNA, 120 bp, Artificial Sequence
  ENSG00000262879_12 (sequence is synthesized)
aggtccaacttgctcagagggccctggaggctcatctgacttcacccggagttctggaggcaggctaccgggatacggtgtatctgtactggaatattcattctgcaaattctgtttctg

SEQ ID NO: 986009 - DNA, 120 bp, Artificial Sequence
  ENSG00000262879_13 (sequence is synthesized)
ttgtcccctcccggcgaaggccacaacatcccaacaccattagtcaccaaggaagtctgggagaagtttctaccaactgtagcgaaaaaggtgcaagggaggaaacattttgttactgct

SEQ ID NO: 986010 - DNA, 120 bp, Artificial Sequence
  ENSG00000262879_14 (sequence is synthesized)
ggcccactcttccctccgaaacagcgcggcagcatctggcagaaagaaagtacaagggacttctaagtgggcaatgctgccccgtgccctccagacttctcatcccagcagggcagcagc

SEQ ID NO: 986011 - DNA, 120 bp, Artificial Sequence
  ENSG00000262879_15 (sequence is synthesized)
acatggcgccctgggacaggaggcctgccggggcgtgggggcggaggctgagctcctgggggcaccactttatgaggaaccatttatggccaaaactctacaggggcttcagggacctga

SEQ ID NO: 986012 - DNA, 120 bp, Artificial Sequence
  ENSG00000262879_16 (sequence is synthesized)
atgaatgcgtctctgtagagtgagagtcctgggcaggaggagaagtttccatagctcaggaccacatgctggaaatttggtctctgcagcttaaaatctgagagaagatggtgtctgcag

SEQ ID NO: 986013 - DNA, 120 bp, Artificial Sequence
  ENSG00000262879_17 (sequence is synthesized)
cattcaaagggggaccagagggaccctccacccccagctccccagctatgacaaacatgagctctgggtagattcctatccattcaaagaactggaaaagccaagctggggcccatgagt

SEQ ID NO: 986014 - DNA, 120 bp, Artificial Sequence
  ENSG00000262879_18 (sequence is synthesized)
caagtctggatgtgcggctcagggcaagaggacagatggatgccacaggccgtctgtctaaatatttgcaagttataaattaaactaacagggtgttaaataaagtatattctagcctca

SEQ ID NO: 986015 - DNA, 120 bp, Artificial Sequence
  ENSG00000262879_19 (sequence is synthesized)
aggataaaattttttagatgtgtatgaagctatgatttgtagataacagaaagttagcaaaatgtcaaagatcatacaatttctttgcttttttttttttgagatggaatatcactctgt

SEQ ID NO: 986016 - DNA, 84 bp, Artificial Sequence
  ENSG00000262879_20 (sequence is synthesized)
ttctttgcttttttttttttgagatggaatatcactctgttgccccagttggagtgcagtgatgtgatctcagtctcatattga

SEQ ID NO: 986017 - DNA, 120 bp, Artificial Sequence
  ENSG00000262879_21 (sequence is synthesized)
tggacacttggggcaggtcacctatgttcttcaagccctgtatccttatctgtcagatgatgatttttttttttttagacgaagtctcactctcttgcccgggctggagtgcagtggcat

SEQ ID NO: 986018 - DNA, 120 bp, Artificial Sequence
  ENSG00000262879_22 (sequence is synthesized)
atctcctgacctcgtgatctgcccgccccagcctcccaaagtatcagatgattttaacaactatgcttccatgacttgctgggctagatgatatgactgtaaaatgcctaacccatggtt

SEQ ID NO: 986019 - DNA, 120 bp, Artificial Sequence
  ENSG00000262879_23 (sequence is synthesized)
taacccatggtttagcatcaagtaagcaaattgtaaatggtagcactgctctgcctatgactatttagtcttgtgctttaaactcaaatatttgttggcctactgaagtcaccacacaga

SEQ ID NO: 986020 - DNA, 120 bp, Artificial Sequence
  ENSG00000262879_24 (sequence is synthesized)
gaaagatgcttttcattctcagtaaagaactttgggagataactggggcaggcagcaagagaacagatgtcatatgtctagcatcagcaaactcatcagaactgatgggcagctcacttt

SEQ ID NO: 986021 - DNA, 120 bp, Artificial Sequence
  ENSG00000262879_25 (sequence is synthesized)
gcttagaacctgcaccagcatacacacggggctgcttcccagtcacactgctcctgggaaggtaggggggctgctgttctgcaattagcgcggttctttacctcctattaccgaactgcc

SEQ ID NO: 986022 - DNA, 120 bp, Artificial Sequence
  ENSG00000262879_26 (sequence is synthesized)
agagttcatttgtgttcagttaggtagatgaccaattcttgttcattcctattttcttttgctcactaatgtgtttaacgttcactaacctaccaaatgtgatttattagcgactttttc

SEQ ID NO: 986023 - DNA, 120 bp, Artificial Sequence
  ENSG00000262879_27 (sequence is synthesized)
tttgaagatggagtggaggaatcctagcgctttctgcaacatgctactgctgttatggaacagtgcagatatggaagtgcatcagccggggatggggagaggctagggcagtacatgtga

SEQ ID NO: 986024 - DNA, 120 bp, Artificial Sequence
  ENSG00000262879_28 (sequence is synthesized)
atggagaggtagccccaccagtgtgttttctgaaatacagtcccgcagagggcagtcttgggaaattactgttctcacacactcttcttgaccctacccctccagcacctcccttgctat

SEQ ID NO: 986025 - DNA, 120 bp, Artificial Sequence
  ENSG00000262879_29 (sequence is synthesized)
ccaagggttgggatttttaaaaagaaaaacaaattttaaaaaaagcagtgtgaatcttttgccatcttgtaagggtgaaaagccccctaccaagtcgggatgaacattcatgcgtgtgct

SEQ ID NO: 986026 - DNA, 120 bp, Artificial Sequence
  ENSG00000262879_30 (sequence is synthesized)
tgagggcttgggaaaaagacagggcttggccccacagtgcaggtaggcccagtgatcctataataggggccaggagatgggaggtcccctgtgggcaggagttcaagtatgtggtattat

SEQ ID NO: 986027 - DNA, 120 bp, Artificial Sequence
  ENSG00000262879_31 (sequence is synthesized)
atgactggtgcttgatgaacccagggagagggcaccaaaaacaatggtatttaattgtaaaatctccaccccctgaggatatgttttcaggtctgggtgactaattagactgggaaacaa

SEQ ID NO: 986028 - DNA, 120 bp, Artificial Sequence
  ENSG00000262879_32 (sequence is synthesized)
gggcaggaacgatggccctgtgcttgctctgcccgctgcctctgtggatgtgtgggctgctggcttcagtcctgcttttctttctgatggtattgtttatgctatgtgtttttgcaggag

SEQ ID NO: 986029 - DNA, 120 bp, Artificial Sequence
  ENSG00000262879_33 (sequence is synthesized)
gcctgaggtgggctgggttctcctcctatggcagggcttcactctcctcctccttctctgttggggcttcactgtccctgggataagaataacaatgccaaggttttcattcttgaaagg

SEQ ID NO: 986030 - DNA, 120 bp, Artificial Sequence
  ENSG00000262879_34 (sequence is synthesized)
agcaattaagcgtctcaccccctcctcattttagatgggaactgtgagggtcccgtcatttacccagggtccctgttgaggatcttgtcctcattagatgacttcttgtgcagcttccat

SEQ ID NO: 986031 - DNA, 120 bp, Artificial Sequence
  ENSG00000262879_35 (sequence is synthesized)
gcgtgattctttactcttgtggcactgagaggtttgtacatgtctttaagccagagcggctttctgaatgaaaaaagtccatcctagaagatagaaagggaaatattaattttgcatgtc

SEQ ID NO: 986032 - DNA, 120 bp, Artificial Sequence
  ENSG00000262879_36 (sequence is synthesized)
ctctgctttccctggtcacagcaatgaatcctccaatgtacctgactctccctttgcgaagagcatctccgtggcagaaatctgaaaatgcccctggggagacacatgcacaagacagtg

SEQ ID NO: 986033 - DNA, 120 bp, Artificial Sequence
  ENSG00000262879_37 (sequence is synthesized)
agtgatgcagccgtttcccacgtatctcacaatgtacttctctggtcttattagaactaaatgagtatctcagtccataatcacagggagaagaaccaccacagaccacatacctggggt

SEQ ID NO: 986034 - DNA, 120 bp, Artificial Sequence
  ENSG00000262879_38 (sequence is synthesized)
cttgaaaataattccatgcatgtgggactttcagaagctctccatgtctgtccagaagggccccacaatatactggggggactttgtatgtggctcagcatggagcaggggcaggatgtt

SEQ ID NO: 986035 - DNA, 120 bp, Artificial Sequence
  ENSG00000262879_39 (sequence is synthesized)
cattcccactcatccccttggccaagtgcccttgtgcagtgaacaaactgcacaaccatgctgggcagaagcattttatatcagtccccttcggacttagtctcacaggcatcatttgat

SEQ ID NO: 986036 - DNA, 120 bp, Artificial Sequence
  ENSG00000262879_40 (sequence is synthesized)
ggggggtgggagatgaagtggttcttccttttctagatactttattctataagttggatcacctcaagcaaatgcctgagtgcagctagccaagttctctatctcacagtcttcatacag

SEQ ID NO: 986037 - DNA, 120 bp, Artificial Sequence
  ENSG00000262879_41 (sequence is synthesized)
ctggctgtcgctgatgagtgagtgagctgcgaaatcagcttaaaccacaacatgttatttttgaatttgaataaaataggaaaaggcagagtgcattgtgtgaccatggggtaagacact

SEQ ID NO: 986038 - DNA, 120 bp, Artificial Sequence
  ENSG00000262879_42 (sequence is synthesized)
ctccctttctccttctcagttttcctgtcataaaaggacaaactactatctaagttctccgtagttaaaattcttttttgttgtttttttttatttgagacagtttggctcgttccccag

SEQ ID NO: 986039 - DNA, 90 bp, Artificial Sequence
  ENSG00000262879_43 (sequence is synthesized)
ttgtttttttttatttgagacagtttggctcgttccccaggctggagtgcaatggtgctatcttggctccctgcaacctgcgcctcctgg

SEQ ID NO: 986040 - DNA, 88 bp, Artificial Sequence
  ENSG00000262879_44 (sequence is synthesized)
gtcaggttggtcacgagctcctaacctcaagtgatcctgcctggcctttctggttaaaattctgtgaggtttgtgtaaaaggaataga

SEQ ID NO: 986041 - DNA, 120 bp, Artificial Sequence
  ENSG00000262879_45 (sequence is synthesized)
tctggttaaaattctgtgaggtttgtgtaaaaggaatagagtgggggcgcaaaaaccagtaagatgagaaaatagtgtttcctcagttctagtatccaggggaaaaaaagaaaagagaaa

SEQ ID NO: 986042 - DNA, 120 bp, Artificial Sequence
  ENSG00000262879_46 (sequence is synthesized)
atactgtttcctgccacttaagaggaaggactcacatatcctaccttccatcagccttgaaggagacaagtgccctctctctcacacccggtggccttcccttcccctttcccagagcct

SEQ ID NO: 986043 - DNA, 120 bp, Artificial Sequence
  ENSG00000262879_47 (sequence is synthesized)
ccaagaaggcccctggcctggcctgatgcccaccatcagcagcaataggcaccaaaacctttctccttcctatccctccccacctcccaaaagggctggggacagcaggtgtatccttgt

SEQ ID NO: 986044 - DNA, 120 bp, Artificial Sequence
  ENSG00000262879_48 (sequence is synthesized)
tagttccatcatgagacagcacattcctacaatgtcgtacagatgtaaattctcaaattaatctacaaatttaacgtaatcctattcaaatcccaagatagtttttggtggtggctgttt

SEQ ID NO: 986045 - DNA, 120 bp, Artificial Sequence
  ENSG00000262879_49 (sequence is synthesized)
ccaagatagtttttggtggtggctgtttttaagacagggcctcgctgtgttgcccaggctagagtgcagtggtacgaccacagctcactgcatcctcgacctcccaggctcaagcgatcc

SEQ ID NO: 986046 - DNA, 120 bp, Artificial Sequence
  ENSG00000262879_50 (sequence is synthesized)
tgtcaagaagaaagatgaacttgtgttggcttttgagagatgcataggactcccacaggcagagtgaaataagggcattttagatggacaaacacacagacagaagcagaaatgtgggtg

SEQ ID NO: 986047 - DNA, 120 bp, Artificial Sequence
  ENSG00000262879_51 (sequence is synthesized)
gtgtgactggggtatagtgaggggctgctgtggctggaatggagggctgccacaataatggaaatggtaaatgaggcaaataaggttggactggtggcatagcgtcaaggttgccagctt

SEQ ID NO: 986048 - DNA, 120 bp, Artificial Sequence
  ENSG00000262879_52 (sequence is synthesized)
tattaaatcactcttccaatatgctagcactggcctgttgggaaaagtaatatatcatgtaatcgaacaaaagacaaacagaggcaagctccaggaatgggcactgtaaacaggacttgc

SEQ ID NO: 986049 - DNA, 120 bp, Artificial Sequence
  ENSG00000262879_53 (sequence is synthesized)
cccagagtagccagatgtaggctttagataagttgatgcaggctgagcatctctaatctgagggggaatgtctcacatggtgtccaagaaatggtgacacatctcacagagggtctaggc

SEQ ID NO: 986050 - DNA, 120 bp, Artificial Sequence
  ENSG00000262879_54 (sequence is synthesized)
tcaggagggctagagtatgagacgttccccctcgcctgtgaacttaaaaatgtggccaacaatttttgtaaaagatggctactctgtagtgctttaactggacctatttagacaatgcct

SEQ ID NO: 986051 - DNA, 120 bp, Artificial Sequence
  ENSG00000262879_55 (sequence is synthesized)
tacacactggaggacgatactgtgtaaatctaataagtctacaagacaatacttctgtcttttggctctctccttcctctccagggtgatgacaaatccgtgagggtggagattatacct

SEQ ID NO: 986052 - DNA, 120 bp, Artificial Sequence
  ENSG00000262879_56 (sequence is synthesized)
ctctcatcatttcagcaccaaggaaataaattagtggcagagtaagggtgacttgatgagtacatccaattgttgacatagttttgggtggagaaattttgctattatatcgacttctta

SEQ ID NO: 986053 - DNA, 120 bp, Artificial Sequence
  ENSG00000262879_57 (sequence is synthesized)
aaatagtctagtgggattaacttggtttcaattcacagagatctggaagcgaggatcttttaaaaatcctgaaatatacactgcaataaaagaacaaagcatacacctcagccttaaatg

SEQ ID NO: 986054 - DNA, 120 bp, Artificial Sequence
  ENSG00000262879_58 (sequence is synthesized)
actgaagaagtatgtcaagtagcagcaggtgggaaagtggctttggttttcagtttgtgagctctgaatccacacagaaacaggactgcattctgacaacctgaattaattattgtcctt

SEQ ID NO: 986055 - DNA, 120 bp, Artificial Sequence
  ENSG00000262879_59 (sequence is synthesized)
accacaatgaggcagaaaagtataataaaaatcattagtatttcagtcacaattaatgccaagatgagtttgtcagtatagccatatcctggaacttattttgtgagctaaaaaaaacaa

SEQ ID NO: 986056 - DNA, 120 bp, Artificial Sequence
  ENSG00000262879_60 (sequence is synthesized)
aaaaacaaaacaaaaaaaaacacaccagaatgagagctaactattcaaaaccccagtattccaggtgagtagcttacaggttcttttttatttttttgaaagagggtctcactctgttac

SEQ ID NO: 986057 - DNA, 120 bp, Artificial Sequence
  ENSG00000262879_61 (sequence is synthesized)
tttttatttttttgaaagagggtctcactctgttacccaggctggggtacagtggtgcaatcaccgttcactagactcgacctccctgggctcaggtgaccctcccacctcagcctccca

SEQ ID NO: 986058 - DNA, 77 bp, Artificial Sequence
  ENSG00000262879_62 (sequence is synthesized)
agtagctgggactacaggcacgtgtcatcaacccagctaatttttttattttttgtggagacaggagtaatccaccc

SEQ ID NO: 986059 - DNA, 120 bp, Artificial Sequence
  ENSG00000262879_63 (sequence is synthesized)
agctaccacccctggcctacagttcatcttgtgccctaatctatatttcactctctacatgagcaaagtgggagatcactgtcatgaccaaagttacatggccaagataagctatggcct

SEQ ID NO: 986060 - DNA, 120 bp, Artificial Sequence
  ENSG00000262879_64 (sequence is synthesized)
gggagtcccagattcttctgtgtgggcactttcctgggatatgctaaatgatgggaaatctgggtctcatgtttctgtgtggtcctcacctcaagcgacttctctttctgttcactctgg

SEQ ID NO: 986061 - DNA, 120 bp, Artificial Sequence
  ENSG00000262879_65 (sequence is synthesized)
gcttccgtgctctcattaatgtagttctgagtcttccattggtccgtatcccattctatctcagatgcctttacttcctgctgcccactgagaagcttcatcaggtggcctgtcctggag

SEQ ID NO: 986062 - DNA, 120 bp, Artificial Sequence
  ENSG00000262879_66 (sequence is synthesized)
atgagcttggcacaggtcacttgcacatgggccccagagcagtccatcttcaaggtccggataacatgagaaatgagccttctcacattgttggggataagggactgtagctgctgggtt

SEQ ID NO: 986063 - DNA, 120 bp, Artificial Sequence
  ENSG00000262879_67 (sequence is synthesized)
agctgaatttcaaactgagcaatgggtaattgaagcttttgggctcgggggacaggtcagtgcccacgttgttgtattcccattttgtctcagtttgtttaacagttggccctaagttga

SEQ ID NO: 986064 - DNA, 120 bp, Artificial Sequence
  ENSG00000262879_68 (sequence is synthesized)
atgcagtcccagcggaatctgcctcaggaggatgattgtagtttgtgttttcagagatggtgacttctggcatgttagtgttttccataaaaacattttcttccaaggcatttcttgcag

SEQ ID NO: 986065 - DNA, 120 bp, Artificial Sequence
  ENSG00000262879_69 (sequence is synthesized)
ttgtgtcttttatattagtggtttctataaaatgttctgaaggagcagatacttccagaaaagggttttcttgaggactcaggtctcctaaggatgaaaaagccccttgtgaaggggaat

SEQ ID NO: 986066 - DNA, 120 bp, Artificial Sequence
  ENSG00000262879_70 (sequence is synthesized)
ttatgaggctcttcgctgcagagaacggaggcctgtttgcgagcatcagtctactcagataacttttctttctgaactttggactctttttgaccttgggtgttctgtgggtcatgcggg

SEQ ID NO: 986067 - DNA, 120 bp, Artificial Sequence
  ENSG00000262879_71 (sequence is synthesized)
agcgagttttgtgaaagcggtatttttttctggaatgtgaaattggtttagaagccttcatatttgtaactctagcctttgcactttctaaaatggaaatagtgtgtgtgttgtctttcc

SEQ ID NO: 986068 - DNA, 120 bp, Artificial Sequence
  ENSG00000262879_72 (sequence is synthesized)
atctgtctctcacctgtggtagggcttttgcagggctggaggtagaaggcgcgcccttggagaagggtgtcagcacagagactgctgccttatgctcttgggtgaacgaaggcttggtgt

SEQ ID NO: 986069 - DNA, 120 bp, Artificial Sequence
  ENSG00000262879_73 (sequence is synthesized)
agatggcgtttcccgctaacttctcaggcccctgctgtgtgtgaggctgttccagctcccttggggctggactcccgagccttttttcttcggcagcgttctccacagatgcctgggcac

SEQ ID NO: 986070 - DNA, 120 bp, Artificial Sequence
  ENSG00000262879_74 (sequence is synthesized)
cctgttccctcctgatgctctgccttcccacctctttgaagtgccttttctggatgctccttgggcccatgaggactctattcactttttgctggttttggcctacagtttgaatctttg

SEQ ID NO: 986071 - DNA, 120 bp, Artificial Sequence
  ENSG00000262879_75 (sequence is synthesized)
ccaggctgtttcctgtggttggcagtttaatgaacggtagtaacattgattccacatctaggtttactgctgagaaatatggcaaatgtaacttagtgcactgataacctcactctcgtc

SEQ ID NO: 986072 - DNA, 120 bp, Artificial Sequence
  ENSG00000262879_76 (sequence is synthesized)
attggtgtctagctgctcactcccaaagcctgacaagttgatgccactgctgtctgagggctcctccggctcaacagtcagctcagtgcttgtgtaattcttccgggcttgtaacgtctt

SEQ ID NO: 986073 - DNA, 120 bp, Artificial Sequence
  ENSG00000262879_77 (sequence is synthesized)
catgaatgctccttctggattccctacagattcttcttcagctgtcaaaaaagagactgctttgctcatgaaagatgatgggatgggatgcatcagtccatagctgtacaccccagtcac

SEQ ID NO: 986074 - DNA, 120 bp, Artificial Sequence
  ENSG00000262879_78 (sequence is synthesized)
acagagtaggagtcagcaaacatttgagtgccattcagagaggagacacacacacccaatcctaaacctatgaaatggcaacaacaaaaggagaaaatatatcttttgaaaacacggcca

SEQ ID NO: 986075 - DNA, 120 bp, Artificial Sequence
  ENSG00000262879_79 (sequence is synthesized)
tctacttggaacattccatagtgtgacatagagtaactctgcttaggattatttcattgatccccagggtccaattgcccagtgctcagtcaaagcccaaggtggaagacaagtgcttcc

SEQ ID NO: 986076 - DNA, 120 bp, Artificial Sequence
  ENSG00000262879_80 (sequence is synthesized)
ctgatgagctgatgagctggcctctctgcagactgctccataccctgtgctgtcctgcctcagatgcagagagagcacaaggctcccgctctcctcgtcctcggtgcgcctgtgttcttg

SEQ ID NO: 986077 - DNA, 120 bp, Artificial Sequence
  ENSG00000262879_81 (sequence is synthesized)
ctaccatcacagctgaatgcaatgaaaggcggtcctctgagaggagcagggtggagatgctaaagtggaggccccctcccattgctgatagatcctcatctggcatgcgctccaccctcc

SEQ ID NO: 986078 - DNA, 120 bp, Artificial Sequence
  ENSG00000262879_82 (sequence is synthesized)
ccattctctgctcccacatatcgtagccccatcacagaagatgcgacatggaaaaaagcactgtgtccaccctagttcttaaatttgggcagggatttggggtgtatgttaagagttttt

SEQ ID NO: 986079 - DNA, 120 bp, Artificial Sequence
  ENSG00000262879_83 (sequence is synthesized)
caaatttgccagattgcatgcctatgttgttaaatacacagtgaatctctggtatgataacagtttctggataaacattacttgaggtcctaaaatgcagaagggaaaaagcaacttttg

SEQ ID NO: 986080 - DNA, 120 bp, Artificial Sequence
  ENSG00000262879_84 (sequence is synthesized)
tcagatgcctactttgctttcatttcatctctaatattttggatggggaatcagccaaagcttctgactgcatgaaggtcaagtgtgccagtgtgcagctgggtttcttttccagaatta

SEQ ID NO: 986081 - DNA, 120 bp, Artificial Sequence
  ENSG00000262879_85 (sequence is synthesized)
aaagtattttgggtggtggtgagggtcagaggaagaagtaaagattgtgagaaagtggaagaagcatgggcttggggagaacccagaattggggccagaagacctggcactaggctacag

SEQ ID NO: 986082 - DNA, 120 bp, Artificial Sequence
  ENSG00000262879_86 (sequence is synthesized)
agcagccgttggctctggtgcccctgggggtgggagcacgagtgggcaaggatgatggtgaggcagaggaggcggccccgagggagcgcccggctgagaggcggggggccgaggggcccg

SEQ ID NO: 986083 - DNA, 120 bp, Artificial Sequence
  ENSG00000262879_87 (sequence is synthesized)
gggagcgggcgtcaccgagggccctggaagcggcagggctgggggagaggagacgcgtgtgtggagcatggggaccccagcccagctcccacttgcagacctgggccgcgggctgccggc

SEQ ID NO: 986084 - DNA, 120 bp, Artificial Sequence
  ENSG00000262879_88 (sequence is synthesized)
ctggctgcccaggaggcgggccggggccgcggccgggggcgcggagcggagttagggtcgccaggccgagccgaggtgggacggaccgacgcagagaggaagggaagccacctggcctga

SEQ ID NO: 986085 - DNA, 88 bp, Artificial Sequence
  ENSG00000262879_89 (sequence is synthesized)
ctgtgtagctgggattacaggcatgctccaccacgaccgactaattttgcttcatgttggtttcgaactcccaacctcaggtgatctg

SEQ ID NO: 986086 - DNA, 120 bp, Artificial Sequence
  ENSG00000262879_90 (sequence is synthesized)
cgcctcccaaagtgctgggattacaggttgtgagccactatgcccggcctctcttaatctatttctgagagttctgttacatattctgatgtttaatcttcagttatatgtattagatat

SEQ ID NO: 986087 - DNA, 120 bp, Artificial Sequence
  ENSG00000262879_91 (sequence is synthesized)
tctgatgtttaatcttcagttatatgtattagatatcttccaccaaagtacagtttgccttttaattttattagattttctattgcatgttgaaaagtaggtgatatttttgtgtcttat

SEQ ID NO: 986088 - DNA, 120 bp, Artificial Sequence
  ENSG00000262879_92 (sequence is synthesized)
ccgccatgtcatgaggacactcaagcagcaccatggagaggtccgatggcgaggaacagaggatccccctgccgacagccaatgaggaacaggcctcctgccaacagccgtgtaaggggt

SEQ ID NO: 986089 - DNA, 120 bp, Artificial Sequence
  ENSG00000262879_93 (sequence is synthesized)
caccttggaagccaatggcccctccctggtcaggcttttacatgactgcagtcctggccaacatcctgacggcaacctcatgagagaccttgagccagagccacccacctaagctgctta

SEQ ID NO: 986090 - DNA, 120 bp, Artificial Sequence
  ENSG00000262879_94 (sequence is synthesized)
taggttcctggccctcagaaatcacatgagatcataaatgtttgctcaatttgagatatttgtgatgtagcaataaataacaaacacacttacctttcagggttattatgagaattaaga

SEQ ID NO: 986091 - DNA, 120 bp, Artificial Sequence
  ENSG00000262879_95 (sequence is synthesized)
cttacctttcagggttattatgagaattaagagttaatacacatcaaactacaaccaaacttgctgggaccagaggctcaagaaagggcagacagggccgggtgcagtggctcatgcctg

SEQ ID NO: 986092 - DNA, 120 bp, Artificial Sequence
  ENSG00000262879_96 (sequence is synthesized)
attttaatagctattctatgctatgtccccgtcttattcctggcaacttacctctcagctcgtgcactgtgacattacagcaagaagtactaatataaatgacacaaaagaaaaaagaaa

SEQ ID NO: 986093 - DNA, 120 bp, Artificial Sequence
  ENSG00000262879_97 (sequence is synthesized)
gccacctaagcttcagccctgcccaactaacagctctccatgttctaaagaaggtgggagtgctggaccaccccagccttctggaaccccagttctgtgacattatccatctcctggaaa

SEQ ID NO: 986094 - DNA, 120 bp, Artificial Sequence
  ENSG00000262879_98 (sequence is synthesized)
tatgctggttttaaccatgcaaactggccaagcatcaggcagaaatagcagctgtgcctggaaggacaggtgacatctgtgaagaaaatggccaagcaggacagggtggagagcacgggc

SEQ ID NO: 986095 - DNA, 120 bp, Artificial Sequence
  ENSG00000262879_99 (sequence is synthesized)
tgttcccttcctttctgggaacagcaccacctttgggggaactccttctctcatggggttttaggcaggggctgccagtcccagggccctgcctcctgtcaccccccatatgcataggaa

SEQ ID NO: 986096 - DNA, 120 bp, Artificial Sequence
  ENSG00000262879_100 (sequence is synthesized)
cacttgtgcaccagtcgctacatttgcaagtggaagctggtggagctgctcagctcccaacaggaagcccatgtgtgcggggccagaggacacagcccatctgaggcgctaagcttctgt

SEQ ID NO: 986097 - DNA, 120 bp, Artificial Sequence
  ENSG00000262879_101 (sequence is synthesized)
gaagagggagtggagtctggatgggattccaatcccacggtccaccccttctgggacccagactcacccttccccttccttcaattctgagaaacaataaatgtccctacttgcgaacaa

SEQ ID NO: 986098 - DNA, 74 bp, Artificial Sequence
  ENSG00000262879_102 (sequence is synthesized)
cccagctactcgggaggctgaggcaggcctcacttgaacctgagagctggaggctgaagtgagcagtctcaaaa

SEQ ID NO: 986099 - DNA, 120 bp, Artificial Sequence
  ENSG00000262879_103 (sequence is synthesized)
acagacagggacgtgtctaaccgggatgaccatgaggtctcatcgcagtttgccactaaccaggaccctaggagtgctgttttattgtctccacctgacagataaggaaatggcagctga

SEQ ID NO: 986100 - DNA, 120 bp, Artificial Sequence
  ENSG00000262879_104 (sequence is synthesized)
cccaggtcaaggaagttcctgaggtcccagggctaataagtggcctgactccaccaccagcccccaggaggaagccaaccccagccctagaaaaacccaattcctgagtgagtgctgtaa

SEQ ID NO: 986101 - DNA, 120 bp, Artificial Sequence
  ENSG00000262879_105 (sequence is synthesized)
ggactggagcatgtcatcactgtcttaaatgtactgaaattctaacagctctagctgaaaaaatgtccaaagcaggccgtgaaaataaatttaaatgacaaactccaaaatgatctatgc

SEQ ID NO: 986102 - DNA, 120 bp, Artificial Sequence
  ENSG00000262879_106 (sequence is synthesized)
tagaatcccaaggctgtcagggaaaactggttccatggaagaaggtagtcaaagaaataagcagatcagatgacctagaccctcacccaatatgcgcgatgtacttggggagaaagtaac

SEQ ID NO: 986103 - DNA, 120 bp, Artificial Sequence
  ENSG00000262879_107 (sequence is synthesized)
ccgacagctctgggcttgtgcccatcaagcactcttctgcccattttatactcttgtggacgcatggtggtgttgatacaggccccgagttaaaggatccatggctgcacgtgacaagac

SEQ ID NO: 986104 - DNA, 120 bp, Artificial Sequence
  ENSG00000262879_108 (sequence is synthesized)
aaagcaaaagcaggccagagttaaacacgccccttgggtcccctccttcacttcataaatgggaaaaccaaggtctaggcagggaaaggggctcagccaaggctacatacacagcacact

SEQ ID NO: 986105 - DNA, 120 bp, Artificial Sequence
  ENSG00000262879_109 (sequence is synthesized)
cacggccgagccgggattaggactcccagcataccccgtagccttctctaataagagataggctgctgggttcttctttatcaagtgttggtcactcattatttctctctgtgtttctta

SEQ ID NO: 986106 - DNA, 120 bp, Artificial Sequence
  ENSG00000262879_110 (sequence is synthesized)
aaacaattattctttaatatcgttatatattcagtaagtgttcaaatttccaactgttttatgtcagaaagcattttctaacattttgattaaatcaagatccaaataagatgcacacaa

SEQ ID NO: 986107 - DNA, 120 bp, Artificial Sequence
  ENSG00000262879_111 (sequence is synthesized)
taaacagacttctacaaatcagtaccaaaatggtaaataattccacagaaatatgggcaaaagcttatcattatcaacaaatgagaagaaagaaaccctatgccaggtaacaccaaagct

SEQ ID NO: 986108 - DNA, 120 bp, Artificial Sequence; identical to SEQ ID NO: 767853
  ENSG00000262879_112 (sequence is synthesized)

SEQ ID NO: 986109 - DNA, 120 bp, Artificial Sequence; identical to SEQ ID NO: 673247
  ENSG00000262879_113 (sequence is synthesized)

SEQ ID NO: 986110 - DNA, 120 bp, Artificial Sequence
  ENSG00000262879_114 (sequence is synthesized)
atcctgctgtgaagccaagaactgctctggctccaggggcagctctccagctgaatcccaggtgtccaggaatggaaccaaattttcagtcgattcctggggtggggctggcatctctga

SEQ ID NO: 986111 - DNA, 120 bp, Artificial Sequence
  ENSG00000262879_115 (sequence is synthesized)
ggaagcagagggccccaggtgatcaaagtcccacgggtctgctgggagagtaggcgcatggggagattcccgtgggaaatgggaggagtgggaagaccagggctcaggcggccccagggg

SEQ ID NO: 986112 - DNA, 120 bp, Artificial Sequence
  ENSG00000262879_116 (sequence is synthesized)
gttagaggtcagctggagcgggtccttgacccactccagaggctgagcctccttgactagtagccacaatagttgccacataaggaggggccatgggccccagaaacgcagccgggacat

SEQ ID NO: 986113 - DNA, 120 bp, Artificial Sequence
  ENSG00000262879_117 (sequence is synthesized)
gacacacgctagtgccgggcactgagcggaagtcattctggcagctccgagacactcgtgccccttgtaagcgtgagtcccgccctgtctttatgacacctgtatttatgccacagatct

SEQ ID NO: 986114 - DNA, 120 bp, Artificial Sequence
  ENSG00000262879_118 (sequence is synthesized)
gctccatgtcaccagggcactcttatgtcacaatcccgcccaagcacgccttcccatcctgccctgccggaacacccctctcctccccttagtgaggaaggatttgggcctcagaccctg

SEQ ID NO: 986115 - DNA, 120 bp, Artificial Sequence
  ENSG00000262879_119 (sequence is synthesized)
gtggtcccaggactccagcgcctgctgtggtggggtagggtggggtagggtgggatgggggcgcggcagagcttcccaaggaagtcaccggacctcgcctcaggatattcagaagtgcta

SEQ ID NO: 986116 - DNA, 120 bp, Artificial Sequence
  ENSG00000262879_120 (sequence is synthesized)
gttcagttctggcagccttcctcctttaaggtgaaatccgagaacactcttccttccagggagagcaactgacctgcaaaatgggcgccaggatgcacattacagtcatttattccaaag

SEQ ID NO: 986117 - DNA, 120 bp, Artificial Sequence
  ENSG00000262879_121 (sequence is synthesized)
tgttgccattttcgctaaactgtcgcatgtttgataattaattcaccaccctattaggtaggggctgccagggaataagcgaggactccaaattttctgtaggaggggtgttgggagttg

SEQ ID NO: 986118 - DNA, 120 bp, Artificial Sequence
  ENSG00000262879_122 (sequence is synthesized)
gcaattcggtctgggagagaaggttttaatccgagtgaagagccctttgcactagcctgggaggaggctgaactgtcatcctgccttgactcaacacagccattcccctagaagttacag

SEQ ID NO: 986119 - DNA, 120 bp, Artificial Sequence
  ENSG00000262879_123 (sequence is synthesized)
cacttctagggtcacctgtgttcagagatctaccctgtgtgcacacatggagaagaggcttaggttgttaaagtcagcatgttaaatcatttcctgaaatgcgactgtaactagaaccca

SEQ ID NO: 986120 - DNA, 120 bp, Artificial Sequence
  ENSG00000262879_124 (sequence is synthesized)
gctgacttcccccacagccgttcttacctattttattactgtctggcataattaccagcatgtaaactccaagaaggtgcttcatcttattccagtgcctggcataggcatagggtgcat

SEQ ID NO: 986121 - DNA, 90 bp, Artificial Sequence
  ENSG00000262879_125 (sequence is synthesized)
ttcatcttattccagtgcctggcataggcatagggtgcatagtgatggctttaaaattgaaggggggccgggtgtggtggctcacaccca

SEQ ID NO: 986122 - DNA, 120 bp, Artificial Sequence
  ENSG00000286558_0 (sequence is synthesized)
gtgtaattttttgtgctaagatcatacagttataaatattctgtctctttctctctttttttaagaggcgtcttgctctgtcaccccaatctaaagtacagtggcattaccatagctcac

SEQ ID NO: 986123 - DNA, 120 bp, Artificial Sequence
  ENSG00000286558_1 (sequence is synthesized)
ctcctgggctcaagtgatcctcctgctctacctcccaagtaactgggactgtaggcacacaccaccacatatgcctaatttttattttaagagattagggtctctctttgttgccaaggc

SEQ ID NO: 986124 - DNA, 120 bp, Artificial Sequence
  ENSG00000286558_2 (sequence is synthesized)
tgttgccaaggctgctcttgaacttctggcctcaagcaatcacctcagcgttctgagtagctaggattacaggtgcaagccactgtattcggctcctactgtgtcttaatactgtcttaa

SEQ ID NO: 986125 - DNA, 120 bp, Artificial Sequence
  ENSG00000286558_3 (sequence is synthesized)
aattgtttacctcttccactatcattattcttctatttcaggttattctaggctattacttgtttgcttttccagatgaatttaaaataagacaattaaaatttcaaacagacaaacata

SEQ ID NO: 986126 - DNA, 120 bp, Artificial Sequence
  ENSG00000286558_4 (sequence is synthesized)
agagcaactgaacatctgttggttttttgataggacaacatctgaatttgcaaatttaacttagggacagctgacatctttcaactgctgagtcttcctattcaaaagtacgcaatatcg

SEQ ID NO: 986127 - DNA, 120 bp, Artificial Sequence
  ENSG00000286558_5 (sequence is synthesized)
ttccacatttttgttaattttttcattatactaccacagggttttctattatattattactattattttaaaataccagttcttgatttcatttgtcagtgctactgtttatctaatttt

SEQ ID NO: 986128 - DNA, 120 bp, Artificial Sequence
  ENSG00000286558_6 (sequence is synthesized)
ttttactgcatgcgaaaggttttatttaactccttagctaatgaggaaaccaggaagatccagttgaaggtgagaattcgaagaattaacatatataggcaaaggaaaactgatataaat

SEQ ID NO: 986129 - DNA, 120 bp, Artificial Sequence
  ENSG00000286558_7 (sequence is synthesized)
ttataaataccttaccagcaaaactgatcaataatcatcgggcaataatcaactacatctccaccagatgcactttatttgcatctctaaagataagtatcatttgtgttaatatcagtt

SEQ ID NO: 986130 - DNA, 120 bp, Artificial Sequence
  ENSG00000286558_8 (sequence is synthesized)
ttctgcaacttacagagctataaaacagctaaagaccatgaaaggcacaggccccaacagaatcagataaactgcagagtgcactagaaaagacacccaacatcatctctttttctttcc

SEQ ID NO: 986131 - DNA, 120 bp, Artificial Sequence
  ENSG00000286558_9 (sequence is synthesized)
atttcaaagtcgtatacaaatttttctaacagaaatatggggttattttctaaggtaatatatttaaaatagtcatcgcagttcttggcacatcgtggttgatgctaaaaaatcctcttc

SEQ ID NO: 986132 - DNA, 120 bp, Artificial Sequence
  ENSG00000286558_10 (sequence is synthesized)
cctgtctttcagtataatgatgtcacaggaagagagatgtctttcatgcaaatgagttggaaaagtgtgtaaaataggctgtagggctcagagaggtgttcgccgtgaccgttacaatga

SEQ ID NO: 986133 - DNA, 120 bp, Artificial Sequence
  ENSG00000286558_11 (sequence is synthesized)
agaggaaagagatcatcccctttctactcctacatccccaagtgaagaggacatggagtacagccacagccacacttaaagggcatgtaacatgaacaaaaataaatgtttgttgtaagc

SEQ ID NO: 986134 - DNA, 120 bp, Artificial Sequence
  ENSG00000286559_0 (sequence is synthesized)
ttttttgctaatttttttcccaacttgatgggtatgaaatgacatctcattgctgtttcagttttcattatctgattactgacagggttaagcagtttttcataggtttattggtgattc

SEQ ID NO: 986135 - DNA, 120 bp, Artificial Sequence
  ENSG00000286559_1 (sequence is synthesized)
cagttttctcctctgggggttgttgataggcttttgtcatttttctgtttttcttaattgtatctaggaattctttacacagagatgccacaaagtttaactttggcctcagtactcagg

SEQ ID NO: 986136 - DNA, 120 bp, Artificial Sequence
  ENSG00000286559_2 (sequence is synthesized)
aaaagatatacttggtttcagccttggcttcaggctttgaaagacagagtaacaaatagctacttcttttctggccccttcatcatctgcttgttcaatggagcttaggccagagtcttt

SEQ ID NO: 986137 - DNA, 120 bp, Artificial Sequence
  ENSG00000286559_3 (sequence is synthesized)
caagaaaaaaagtcttattagagaagtcttcatatctcgtgaggatgaattaaaagcagaatctcaactttgctacctttaaatgtcacggagagaaaaaactgcaaaaccatgtgcaac

SEQ ID NO: 986138 - DNA, 120 bp, Artificial Sequence
  ENSG00000286559_4 (sequence is synthesized)
aatatccatgataaatcatctttgatctcaacataacggagactataaggagtataaagactagaagaaagagtagaaggtgatccacaatcaattcagaacctggtcttctatggtggc

SEQ ID NO: 986139 - DNA, 120 bp, Artificial Sequence
  ENSG00000286559_5 (sequence is synthesized)
tcacagttcctgcaccctacaatatcgtgaattttcttcctcttcatctaatgacatgaatatgctccagtggatcctaggatatctttcacatgaggttacccttgccctttggatgtc

SEQ ID NO: 986140 - DNA, 120 bp, Artificial Sequence
  ENSG00000286559_6 (sequence is synthesized)
aggtggaacaaagggatggaagattttttgtactgggacattcagtaaacccctaggcctacctattgtctagtcagagttagagaagcaaatgatgtctgtgagggcctacaaggcaca

SEQ ID NO: 986141 - DNA, 120 bp, Artificial Sequence
  ENSG00000286559_7 (sequence is synthesized)
agaggatgaaagtttaacttaaagtttagatgctgatattctagctagtaataatgtatgattgcctcatgtactactctttttttatatttctctcctaatgtataaagatggatttca

SEQ ID NO: 986142 - DNA, 120 bp, Artificial Sequence
  ENSG00000286559_8 (sequence is synthesized)
aaagataggcagcctgggattcaaattctgatcatcttttcactttgtaaactaatggatatatttttttaaaacattgtgtttaatacacgccaatgccaaaggctttctacagactca

SEQ ID NO: 986143 - DNA, 120 bp, Artificial Sequence
  ENSG00000286559_9 (sequence is synthesized)
tgtggagtgggatgatgcccagaatgtcgataaattgacagaataatatgaagaacccaacagtcatgtgccatgaattctgcaggcacatttggacatgagtgtgagccagaagatcat

SEQ ID NO: 986144 - DNA, 120 bp, Artificial Sequence
  ENSG00000286559_10 (sequence is synthesized)
tctatttgggaaaatttaaattgggtgcaagaagcattagctaacagtctgaaccgaggtatgatccaaactgataaaacttgatgaagttggaagaagcaaaagggagttggtatggat

SEQ ID NO: 986145 - DNA, 120 bp, Artificial Sequence
  ENSG00000286559_11 (sequence is synthesized)
aacatgaagtgccagctatattagggcacagcagaaaaaaaatgttttctggacagacttaatttctgaagtgccttctcctcttatactaccatggaaattacagtgttcttctgctgt

SEQ ID NO: 986146 - DNA, 120 bp, Artificial Sequence
  ENSG00000286559_12 (sequence is synthesized)
ctcagcaccttccacatttaaaaaaaaatcatgcctttccttatctgtctacctaattagacatccatggatgagaaatgtgtctatgtatcttcagtttctatatgtccactacaatcc

SEQ ID NO: 986147 - DNA, 120 bp, Artificial Sequence
  ENSG00000286559_13 (sequence is synthesized)
tcatgcctggaacagagaggtgttcaataaatccatgaacaaaaagaaactgaagttctaaggtccaaacaatgttgattctttatgagccagtagggatttgcctctttctaattcctc

SEQ ID NO: 986148 - DNA, 120 bp, Artificial Sequence
  ENSG00000286559_14 (sequence is synthesized)
ctggagcacaagtgttcccggaatctggagcagggttaaaagcagagatgaataatgatccccattgtaaagtcccagggatccagataagataatatgccccactccagggagaatata

SEQ ID NO: 986149 - DNA, 120 bp, Artificial Sequence
  ENSG00000286559_15 (sequence is synthesized)
tatacttttttattaagaagacacaagaaatggaatgcagcctatgtttgtaagcggactttaatattaagccctcaataaatatttgataaatgaatgaatgattctgtccaaagaggt

SEQ ID NO: 986150 - DNA, 120 bp, Artificial Sequence
  ENSG00000286559_16 (sequence is synthesized)
taatcattaaaatgctcagaggagacctcagcaggcccttgaagaacacagcaatttaagaagtaaaaaggaggatgtaggggaatgttagtcagggtcaagccaaacattgaattcagc

SEQ ID NO: 986151 - DNA, 120 bp, Artificial Sequence
  ENSG00000286559_17 (sequence is synthesized)
atggcaaatgaaatttactgtaagtggtctctgtgctgagatacatattactgtttgtgcaaatttagttccgttaacttttcccaaaacttcttcaccaccttatcttggagcttaatt

SEQ ID NO: 986152 - DNA, 120 bp, Artificial Sequence
  ENSG00000286559_18 (sequence is synthesized)
ctaactctctctactatgtccatactatgggaatgtcttcaagataatattgtcttgttaaaattcggcttcagacttcaggacttttacattcttggatggggatctaaacaagacatg

SEQ ID NO: 986153 - DNA, 120 bp, Artificial Sequence
  ENSG00000286559_19 (sequence is synthesized)
aaccaatcataaggaaatatggctccttctccattattttaaacaagaaaatattattgttattgtagctgtttgagagacaaggagattaaacttgctacggttaagaaatttgaaagc

SEQ ID NO: 986154 - DNA, 120 bp, Artificial Sequence
  ENSG00000286559_20 (sequence is synthesized)
agatttttttagaggcagacaataaggaagagtgtttttggacatactttgctcaaacctttcctgtgtttgagtattccacccaaacagaactttctccattgagccatttgctgtcct

SEQ ID NO: 986155 - DNA, 120 bp, Artificial Sequence
  ENSG00000286559_21 (sequence is synthesized)
aaaaacaataaaacaaaacaaaacaaagagcaaaaaccattttatcttcttgatactgtggcacttgatgtgcaacagagagactacattcttgcaatcggtcagaagcagaacttgacc

SEQ ID NO: 986156 - DNA, 120 bp, Artificial Sequence
  ENSG00000286559_22 (sequence is synthesized)
atcggtcagaagcagaacttgaccaatatgaaacaatacatatcctaagaaaacaacatgcacagataatttgcagaaagtttagaacaacaacaataaaatattttaatttgctctgta

SEQ ID NO: 986157 - DNA, 120 bp, Artificial Sequence
  ENSG00000227744_0 (sequence is synthesized)
attccaagctgtcaccccgaagctgagtgaactccgcaaagcgtcttctgtgtacctgggaggagcatggtgccatttcccttcctccttcagactttcttctacatggaaggccccgtc

SEQ ID NO: 986158 - DNA, 120 bp, Artificial Sequence
  ENSG00000227744_1 (sequence is synthesized)
ctccacaggtcccagcctcagctgacactcgggtcccaggaggctctgcgaaggtttgctgggcggttcccccgcacgccgggctacaacaaaggaacacagcatgacacgtgctgtgaa

SEQ ID NO: 986159 - DNA, 120 bp, Artificial Sequence
  ENSG00000227744_2 (sequence is synthesized)
cctcagctgtgagacaaccgaaggagagacaacattcagcaaaaacagagcccaaactgtccccgtttctctcagccccaactgctccatggcttggagtgcagcaaatgtttcagccgc

SEQ ID NO: 986160 - DNA, 120 bp, Artificial Sequence
  ENSG00000227744_3 (sequence is synthesized)
gctcaaagggaaggctttgctctggagtcagcatgcagagctcgcctcgactcccctccatgccgctcctcaccagcactggctgggtttgaatctcagctccctggctcctcgctgtaa

SEQ ID NO: 986161 - DNA, 120 bp, Artificial Sequence
  ENSG00000227744_4 (sequence is synthesized)
gccctggaatgcaaaccccaagggccaaacaccccgaggctctcaggtcccaggcgcggacaccttcctggccttggctgtcatggcccagatggaagcaaagacaactcccctctccac

SEQ ID NO: 986162 - DNA, 120 bp, Artificial Sequence
  ENSG00000227744_5 (sequence is synthesized)
aggtcggctggtcctcctgccccgagagcaggagcccaggcacaggctctgtacagagttctccatctacttctcccagggtggctatgcaaaggccgtctgcctctcgctctctgggtc

SEQ ID NO: 986163 - DNA, 120 bp, Artificial Sequence
  ENSG00000227744_6 (sequence is synthesized)
ccacctgcagcctgtcccagtggattctgtaggctccacagtgatgctgggaaaagacccaaacacccggacaaagcacgtggacagctgccaatgccaaaacggcaggaagcaagggaa

SEQ ID NO: 986164 - DNA, 120 bp, Artificial Sequence
  ENSG00000227744_7 (sequence is synthesized)
aggcagctggctccgaccctttgccaaccgtgtgcaacgctgcaggcacctagagccagcgaggagctaccaaactggttcccatctatgcttgcagcggctgctgtcgcagaggcagga

SEQ ID NO: 986165 - DNA, 120 bp, Artificial Sequence
  ENSG00000227744_8 (sequence is synthesized)
caggggtgcatggctatgccaagtatccttctgggatgagccgattctcttgtcccaggtcgggcatgatggagaggccagaaggtagaagaccgggatcacggaacaggatcaggaccc

SEQ ID NO: 986166 - DNA, 120 bp, Artificial Sequence
  ENSG00000227744_9 (sequence is synthesized)
cagaacaggaccgagaccatgaaacaggaagcaagctacatccagcacccagttcagagagagggctggggacgccgacactccacctccttcccagcaaactcggaaggctccagggca

SEQ ID NO: 986167 - DNA, 120 bp, Artificial Sequence
  ENSG00000227744_10 (sequence is synthesized)
tccctggagctgctctggcagagaagaatcagtgtccacacgtgcagctctcgctcgaggaagggcaggggcgacatcagaggcatgctttgcacagcacacgcttctagaatggctggg

SEQ ID NO: 986168 - DNA, 120 bp, Artificial Sequence
  ENSG00000227744_11 (sequence is synthesized)
atttcaaccttgaaagtctcaactccttcttcctcctcagatcttgggattttgaaagtgattcctaaatgcctttcgatctcatttttgccgaaggagatggtcctaatttactgcatt

SEQ ID NO: 986169 - DNA, 120 bp, Artificial Sequence
  ENSG00000227744_12 (sequence is synthesized)
ccaattggaaacatttttgagagtaaaaatacctgaagacatgttgggcctggaggtagcagactcaaaattaaagcaggggcccctctatccaccgccccccagattgcattaaacaca

SEQ ID NO: 986170 - DNA, 120 bp, Artificial Sequence
  ENSG00000227744_13 (sequence is synthesized)
gcatgttggggatcagtgagttgccatggccctgcaatcagacattttgccctctgaaatttagccttgattttgaagccctgagtttagtatatttagatgagctgacgggcccaggga

SEQ ID NO: 986171 - DNA, 120 bp, Artificial Sequence
  ENSG00000227744_14 (sequence is synthesized)
aaagggtagaggtccttcagagctgcgttaagatacagtgggagggggtcaaattgctaatttcatctgccactgaaaactcccaaacagcagagaacttcccagaagacttgtgaagtt

SEQ ID NO: 986172 - DNA, 120 bp, Artificial Sequence
  ENSG00000227744_15 (sequence is synthesized)
gggagtctgcaggtggcgggggttgggtggggaggtgatggcattctacccctaagagagcattttgaagttgaagctcaacttaaaatatttgtgcctatttttgagacagggtcttgc

SEQ ID NO: 986173 - DNA, 120 bp, Artificial Sequence
  ENSG00000227744_16 (sequence is synthesized)
ccacacttggctaatgtgtgtatgtgtgtgtgtgtttgtagaaatggggttttgccctgttgcccaggctggtctcaaactcccgaactcaagccacctgctctcctcggcctcccaaag

SEQ ID NO: 986174 - DNA, 120 bp, Artificial Sequence
  ENSG00000227744_17 (sequence is synthesized)
tgttgggattacagatgtgcatcatcgtgcccagccacattatgctttttagagggacatcaccaatcagacagtggcctgggctggacacagcatccctggaagacggcccctctctaa

SEQ ID NO: 986175 - DNA, 120 bp, Artificial Sequence
  ENSG00000227744_18 (sequence is synthesized)
ggtgtcatctgccattagccaaggaccctcttgtctctctagctccaagtctccacagaggatgtgctcaaaatgacctctgtggagaccctctctccagataaagcctccttcagataa

SEQ ID NO: 986176 - DNA, 120 bp, Artificial Sequence
  ENSG00000227744_19 (sequence is synthesized)
agcctcttgcggataaagcctaaagcactggtggtcaggacttcaacgtgtgaattccaggaggacacacttcagcccattacagacctgatggcttctgccagacacccagccgatccc

SEQ ID NO: 986177 - DNA, 120 bp, Artificial Sequence
  ENSG00000227744_20 (sequence is synthesized)
catggcttatggaggaagaagacaagtggagacggggaggtggtcgggcgaccctttccacggccagcagcaactgcacccgtgtctgggcacctcctgagtgctgtaagcccccatgca

SEQ ID NO: 986178 - DNA, 120 bp, Artificial Sequence
  ENSG00000227744_21 (sequence is synthesized)
tcatcaagacggaggcccaggcaagggcaggtgggagctgaaacccgtctcaggagatccccaagccaccttcccttggtcccagcccagattgtggctcccctgtgtgcctcccaggcc

SEQ ID NO: 986179 - DNA, 120 bp, Artificial Sequence
  ENSG00000227744_22 (sequence is synthesized)
ccaggatagacgtcaaccgtgtccccttgtgggtgccttgagcttagcacctgcctgtcccttccaggggcccctctaatacaggacttacatcttcatgaagacactaactgtactagt

SEQ ID NO: 986180 - DNA, 120 bp, Artificial Sequence
  ENSG00000227744_23 (sequence is synthesized)
gcgtgttctccagaggagcagagccactcaaggtgtgcacatcagaagagagctattttaaggaactggctgacgctgtcaggccttcaactgattgggtgaggcccaccccttttgacg

SEQ ID NO: 986181 - DNA, 120 bp, Artificial Sequence
  ENSG00000227744_24 (sequence is synthesized)
agagccacctgctttactcgaaggctaatctcatctagaaacacctttacagcaccaccgtccaaagtggagatgatgtcagcaaaggggatattgaagcagatggagtggtacagatgg

SEQ ID NO: 986182 - DNA, 120 bp, Artificial Sequence
  ENSG00000227744_25 (sequence is synthesized)
tgggtcactaaaacgcaggttgaaggcttttcacatcaagtcatgcctgtgcccacagacaggggaggaggtggcatgaggctccaagctctggagccttggaagtcaggcaggccccac

SEQ ID NO: 986183 - DNA, 120 bp, Artificial Sequence
  ENSG00000227744_26 (sequence is synthesized)
tggaatcacagccccctactcccaggcacacctaaggagtcagtctctcctgaccgatggatccaacttcacagctgcgactgagcaccagggggacgtggcgctgggaaattgtcccgg

SEQ ID NO: 986184 - DNA, 120 bp, Artificial Sequence
  ENSG00000227744_27 (sequence is synthesized)
cagacgagactgaaccctagaagggccccatggtaaaactgataaagcctgaaatgtgtgtgcagacatgggcctctttattaccacacaacgaccattaaaatctctctgctatggtgt

SEQ ID NO: 986185 - DNA, 120 bp, Artificial Sequence
  ENSG00000227740_0 (sequence is synthesized)
atcatcgcaggttcaatgaaaagctagtttaggaaaatgctcaaattaagatttctgaaatatcccctttcctaccacatgtccagtgcattctctcaccggagagtaggacttaggtgg

SEQ ID NO: 986186 - DNA, 120 bp, Artificial Sequence
  ENSG00000227740_1 (sequence is synthesized)
caggggctgaaccagcatcacctctactagtcttcttatatgcaggcaacaagactgaagaagggaaagtgaattgagattgcaggcaagagataaggttgtttgtcaagaaaaaccccg

SEQ ID NO: 986187 - DNA, 120 bp, Artificial Sequence
  ENSG00000227740_2 (sequence is synthesized)
atattgatcatatctatggagccacaagtggaagccaaaagtggtcttcccagtgtgttaatctctgggaggtgttcttatcttccagcatctactcccttctagttatctaattgcatt

SEQ ID NO: 986188 - DNA, 120 bp, Artificial Sequence
  ENSG00000227740_3 (sequence is synthesized)
gtaacaaatctttatgacagaagtggaatgcctctttctccctccctttccccacctccccttggtatgtgatggtagacagtatagtgacttcgagtgtttatttaactgtgcatgctt

SEQ ID NO: 986189 - DNA, 120 bp, Artificial Sequence
  ENSG00000227740_4 (sequence is synthesized)
tttctccatcgtctaaacatccgccaggaaccttgacattagtttcacctctcctctggggctgagagatgggaaagaagcgtcaagaacttgaacagaaatccagctctcagtacattg

SEQ ID NO: 986190 - DNA, 73 bp, Artificial Sequence
  ENSG00000227740_5 (sequence is synthesized)
aacagaaatccagctctcagtacattgcatcaagagatccacccatctcagcctcccaaagcgctgggattac

SEQ ID NO: 986191 - DNA, 120 bp, Artificial Sequence
  ENSG00000227740_6 (sequence is synthesized)
tgcattttctgaaagctcttcagaagcaagtaaattgctaaagtattgtgtctcctaaaacgttcatggaaaggatagaaaggaccctgacatcatttgcgctggaaaccctgagacaaa

SEQ ID NO: 986192 - DNA, 120 bp, Artificial Sequence
  ENSG00000227740_7 (sequence is synthesized)
gtcagaaagatctggaaagacctgccagaggaaatctgccacccctctggactaggagacttcatctacataaaagtgggctgtcaccatgctgggagggaccctttaaagtgctgtcga

SEQ ID NO: 986193 - DNA, 120 bp, Artificial Sequence
  ENSG00000227740_8 (sequence is synthesized)
tgacccataaggctatcagtgcaaaaggcaaactgctgaatccaggcttcctatgtgaagctagcaccacaggacaggtggactgtgctttctacaaaggacctaaaactgaagttttct

SEQ ID NO: 986194 - DNA, 120 bp, Artificial Sequence
  ENSG00000227740_9 (sequence is synthesized)
actcaactgaaaagaagtattctagaaaatgtattactattcctataggctgcctggctgttctgttcatgacggtggttattccaattactttgagaattatatttattagaaaacaaa

SEQ ID NO: 986195 - DNA, 120 bp, Artificial Sequence
  ENSG00000227741_0 (sequence is synthesized)
actagatgggaggagtgtagggaatgctttctgtgctaggctcaccgcttcctcacaccttccttccttcctgcctccctctccttccaagctggccccaggcacagccctgacaaaggt

SEQ ID NO: 986196 - DNA, 120 bp, Artificial Sequence
  ENSG00000227741_1 (sequence is synthesized)
caaaccaactgaggatgctggggaagaggggcaggagttttaaagaggaacaatctgaaaccatggggctgggaaaagctgccagaaaatcaggatggatttggggacagtggccctttc

SEQ ID NO: 986197 - DNA, 120 bp, Artificial Sequence
  ENSG00000227741_2 (sequence is synthesized)
tgtccactcagctgtcctgtcggactgatgacttggagcccgcagttcagaagactcctcatgggatgccccaccccacagagtgggggtgtggtgggcggccggatgcgtagtccaggg

SEQ ID NO: 986198 - DNA, 120 bp, Artificial Sequence
  ENSG00000227741_3 (sequence is synthesized)
acgtttgtgatttggagtgtgctagactatgtgtataagtcacatgggtgtgtgtcactgtgtgtgctggcgtgccttataggtgtgcgtgtttccctgtcagttttgacacggattata

SEQ ID NO: 986199 - DNA, 120 bp, Artificial Sequence
  ENSG00000227741_4 (sequence is synthesized)
tgaaattaataagggtttttacgttagatatacatcacttctctacacccccagctcctccttccctctggacaagctttccgccaagcccacctcttccccaggtgcagtgagctgggg

SEQ ID NO: 986200 - DNA, 120 bp, Artificial Sequence
  ENSG00000227741_5 (sequence is synthesized)
gtgagggcacatggtaccagccgcccgcggaaccgagacagggctgggccgggagaccgccagcggaggcgagtccgaagcctgagcggggagggaggggcgggcgctggcctggccgag

SEQ ID NO: 986201 - DNA, 120 bp, Artificial Sequence
  ENSG00000227741_6 (sequence is synthesized)
ggctgcatcctaatccacaggccccggtccgactcccaaactgccgttcagcgtggaacgggctggccggagccacgccgcctccagcacacgctcggcgctcgggacgcaccgaccgag

SEQ ID NO: 986202 - DNA, 120 bp, Artificial Sequence
  ENSG00000227741_7 (sequence is synthesized)
ggacggaccccgtgaggcctgacacaaagtggactcgtccggggtccccacactccccgtctggcccccggtgtcccagatcgttgcccctccaagcctagaccccgaaatctgcccctt

SEQ ID NO: 986203 - DNA, 120 bp, Artificial Sequence
  ENSG00000227741_8 (sequence is synthesized)
ccccgcgacatgtctcctctccgcccctctcaccgcctctggagctgagcgctcagggcgcgggcactcctgagtccccggttcctaagcagcgtccggaacctcctcctcggctcccgc

SEQ ID NO: 986204 - DNA, 120 bp, Artificial Sequence
  ENSG00000227741_9 (sequence is synthesized)
gccgccgccgcttctgccgccgccgccgcctcttccgcccgcggagccggagcccgagcccagcgccgctcactccacccggctggccggtgatggcaccctcctccccttttgaccttt

SEQ ID NO: 986205 - DNA, 120 bp, Artificial Sequence
  ENSG00000227741_10 (sequence is synthesized)
ctttggatgaccacggtgcctaggacccctgggaggcacagagaaacatttactagggacaacttttgagtgtcagaccctgtggacacaaagaaaaagcttgggttcctgccttcaagg

SEQ ID NO: 986206 - DNA, 120 bp, Artificial Sequence
  ENSG00000227741_11 (sequence is synthesized)
ggctcacagttgagtggggaagacagacacgtaaatgaagaacaataacagactgtgctgagtactggaatggaagtgcagcaggaactcagaagaggtcatcactggaggggccacctc

SEQ ID NO: 986207 - DNA, 120 bp, Artificial Sequence
  ENSG00000227741_12 (sequence is synthesized)
tgggaaggcttcaccaaggaagtataattggagctctgtcttgatgttcaaataagagctgcagagagggtgctatcgagcagcacataatcacttaattacatattgctttgtattctt

SEQ ID NO: 986208 - DNA, 120 bp, Artificial Sequence
  ENSG00000227743_0 (sequence is synthesized)
tctctctctctctctctctgtctctgtgcgtgtgagagcgcaatctctttatctctctctctctttctcccccatctatccttgcaggtactgaggaaaggccatgtgggcaggcagcaa

SEQ ID NO: 986209 - DNA, 120 bp, Artificial Sequence
  ENSG00000227743_1 (sequence is synthesized)
ggcaggcagcaagaaggcagccatctggaagctaggaagaaaatccttaccagaacccaaccattttggcaccctaatctcagacttccagcctcctcgaagaaaataaactgctgaaca

SEQ ID NO: 986210 - DNA, 120 bp, Artificial Sequence
  ENSG00000227743_2 (sequence is synthesized)
gcttatggcttacattctttgaggcagtgacctgacatgtaactggatcccgtttagccatggttgaagttggatactccttgctcctcagattgcagacggcctattgtgggaccttgt

SEQ ID NO: 986211 - DNA, 120 bp, Artificial Sequence
  ENSG00000227743_3 (sequence is synthesized)
gctctaacctcctgccaagtagtgtgcaaggttcaagagatggaaaattggaagcgaaagtccttggagaagctctcattcaactgaaagcaaatatggaacagataagaaggcaagaaa

SEQ ID NO: 986212 - DNA, 120 bp, Artificial Sequence
  ENSG00000227743_4 (sequence is synthesized)
aggatcatcacaaatatagcctgactggatgctgtttagagcagtagctattctatatcctcacattctcaggttctataatctgaaaatagctaaataaaaataatagctgagcccaaa

SEQ ID NO: 986213 - DNA, 90 bp, Artificial Sequence
  ENSG00000227748_0 (sequence is synthesized)
cttcagcttttggactcttaaaggcctttggccacatactgaaggctgcactgcaggcttccctgcttttgaggttttgggactcggact

SEQ ID NO: 986214 - DNA, 120 bp, Artificial Sequence
  ENSG00000227748_1 (sequence is synthesized)
tttccaaaggtcttcaattttgatataagcaacaaagaataagagtactcatgatgtgtgacaaatggcatgcctcctgcaagagttatgagttatgtgcctaaacaggaaggatcatct

SEQ ID NO: 986215 - DNA, 120 bp, Artificial Sequence
  ENSG00000227748_2 (sequence is synthesized)
cattgcagaattagggcatcatccagtgggaagggagtttcaaggtcatttagtccagcctccgagtgatacagaaattctctttgcagcatccctatcacgtggccatcaaacttctac

SEQ ID NO: 986216 - DNA, 120 bp, Artificial Sequence
  ENSG00000227748_3 (sequence is synthesized)
tagtgtattcatccacacctggtctgtctaaaaccttgagaacagccccttgtatagttcaatagccccagctgaaggaaaagtttttgttattttcagtaaacatattctgttgtgtaa

SEQ ID NO: 986217 - DNA, 120 bp, Artificial Sequence
  ENSG00000227748_4 (sequence is synthesized)
ggatgctgacgcaggcctgagtccggaaaagacccgcacatctggggcccaagtggcccatttccccagaggcgagcaaggactctcaggaatcgtcatccttcccatgaaatcctggaa

SEQ ID NO: 986218 - DNA, 120 bp, Artificial Sequence
  ENSG00000227748_5 (sequence is synthesized)
ctttagcgacccagaaaacactgagctccctctgacacccatgccctttgactgaaagtcagccataaaatagagcaccagagtaactttccagagtcccagatttgccccttcgctcca

SEQ ID NO: 986219 - DNA, 120 bp, Artificial Sequence
  ENSG00000227748_6 (sequence is synthesized)
ctgcaaatcaaatgtgtgacctgtgtttcaattcaattagccttttcctaagggtttcactgtttctgttcctgtgagtttcttttttaaagatctgtatttgtatatttcaagtggaat

SEQ ID NO: 986220 - DNA, 120 bp, Artificial Sequence
  ENSG00000227748_7 (sequence is synthesized)
tttttttttttttagcaaaccacaacattttattttaaattgagagatatggtttgatttttatttttattgtggaaaatttcaaacatacaagagtagatataatatagtaatgaatgc

SEQ ID NO: 986221 - DNA, 120 bp, Artificial Sequence
  ENSG00000286089_0 (sequence is synthesized)
atttgccaataggtcaactataaaatttctcttgaagtaaggaaaacttaaggagtgtgctgtgttctggtacttggctctggttatagttctctctccatggcagtctgtgatggaaaa

SEQ ID NO: 986222 - DNA, 120 bp, Artificial Sequence
  ENSG00000286089_1 (sequence is synthesized)
gagcagtgaagtggaggaatggggctgagagatgagcaccaacttggcccccgagtaaagctgcgtgatcagcttctcccgctcgcagggcatttgtaacggggcaaccagatggcttca

SEQ ID NO: 986223 - DNA, 120 bp, Artificial Sequence
  ENSG00000286089_2 (sequence is synthesized)
ggaggcacctctgaagattctgcattgctcagattatgcataaggaataaaatgtcattaacaatttgattttaaattttctgtgtccttttaactcattgtgacaataaacacatgaca

SEQ ID NO: 986224 - DNA, 120 bp, Artificial Sequence
  ENSG00000286086_0 (sequence is synthesized)
gactccgccctctctgtccttcggtggagactccgggaaaaacctgcctcccagtctgccctctctccgtctgtctgtgcttgtttttctacgtttatccctgtcgctttccccacttat

SEQ ID NO: 986225 - DNA, 120 bp, Artificial Sequence
  ENSG00000286086_1 (sequence is synthesized)
tctgcaggcatggcgcgcccccagtgccggcttggtgccagggctgggagatccgggggtgaatcgtgagcccggcccacagcgagcttgcagtctagagatcaaggcagtcttgtccac

SEQ ID NO: 986226 - DNA, 120 bp, Artificial Sequence
  ENSG00000286086_2 (sequence is synthesized)
aacctgctgtcacataaagcaaatgtagctggtgtagcaccaggggctgcaatcaagtgcggtggggcggcaatagtgaccacggaaataatcagaattgcttttaattcagctcctact

SEQ ID NO: 986227 - DNA, 120 bp, Artificial Sequence
  ENSG00000286086_3 (sequence is synthesized)
atattcccgcatccctgagcctcacaatcatcctccaaggatgttcgctttggcagatgattagaatacgtgctgacttgatagccacaactgtcctgataagaaagtacgccggcctgg

SEQ ID NO: 986228 - DNA, 87 bp, Artificial Sequence
  ENSG00000286086_4 (sequence is synthesized)
ccacaactgtcctgataagaaagtacgccggcgaggattttgggaggcccaggcgggcggatcacttgatgtcaggagttcgagacc

SEQ ID NO: 986229 - DNA, 120 bp, Artificial Sequence
  ENSG00000286086_5 (sequence is synthesized)
ctgcactccagccttggcgacaagagcgaaattttgtctcaaaaaagaaagaaagaaagcactcaggcctgacccaggaccacagcagtggacatggagggaggaggctgggggtagttg

SEQ ID NO: 986230 - DNA, 120 bp, Artificial Sequence
  ENSG00000286086_6 (sequence is synthesized)
gattggtatgatatgtcactgagtaaacgaaggaagggacagaaagagaactccaaagtgtcaaaagcctggacaacagagagaaagcatccttgtcctatcatttaaagcacctgttgg

SEQ ID NO: 986231 - DNA, 120 bp, Artificial Sequence
  ENSG00000286086_7 (sequence is synthesized)
gccaaatagggagcacctttcagaatccatgtgcacaagatctcagcaattctacgtccaagaatgtaacctacatccaagaatgtactggaatttaattccacatccaagaatccccat

SEQ ID NO: 986232 - DNA, 120 bp, Artificial Sequence
  ENSG00000286086_8 (sequence is synthesized)
aggtagcaaagatgtatatttaagggtattctctcagctttgtttttatgttaggagattgggaacaacctaaatgcccatcagctggtgactggctaggttaactattcacaaatggaa

SEQ ID NO: 986233 - DNA, 120 bp, Artificial Sequence
  ENSG00000286086_9 (sequence is synthesized)
tactaggtagcctcctaaaagaggaaagcaattctacatatcctgatacagtgtggtcaccagatagatggctaagatacaaataaaacaaacaagttgcagtgttagagtatgctatgt

SEQ ID NO: 986234 - DNA, 120 bp, Artificial Sequence
  ENSG00000286086_10 (sequence is synthesized)
atcactcctttttaaggacaaaaagaggatatactttaactttttaagataccaaagtatttatttatttaaaatttttttcacagaattgttatagcatgtagaaccaaaaattattta

SEQ ID NO: 986235 - DNA, 120 bp, Artificial Sequence
  ENSG00000286086_11 (sequence is synthesized)
caaatgaaattattcaatgtctgagatttgtgtcaaaataatggtatgggggtttagtgagtaagcatgtaggtagaacaagattgtccatgagctgatagttgttgaagctgggtgatc

SEQ ID NO: 986236 - DNA, 120 bp, Artificial Sequence
  ENSG00000286087_0 (sequence is synthesized)
gttcaccccactcctgatcttgttggctgctcaggggctgacagcccagatgtgcagctgtgatgagcagaaacagggaggaatggagcccccagccattgtcatcacttcctcaagctg

SEQ ID NO: 986237 - DNA, 120 bp, Artificial Sequence
  ENSG00000286087_1 (sequence is synthesized)
tctaaattctgcccagcagtctgtgaaaatgttgtgctgatgacatattaagtcatgtatccgttaaaagaatatctggaaacctccaaaaggaagccaagcatagactatttggaagaa

SEQ ID NO: 986238 - DNA, 120 bp, Artificial Sequence
  ENSG00000286087_2 (sequence is synthesized)
cttgaaggagcgagagctgaccccatctttgtacactggcagcacaaggacaacaatcaacacggaagacttctgtgaccaaatgtgtgcacgtttctctccatacaccaagcaagcaat

SEQ ID NO: 986239 - DNA, 120 bp, Artificial Sequence
  ENSG00000286087_3 (sequence is synthesized)
ttgagagctcagtcccacaagaacacctcctccttccaaccagttgaaactccacacctccagaacttctcactgactggcttcgagttgagaaaaacatcaaaatgttgtacaaatttg

SEQ ID NO: 986240 - DNA, 120 bp, Artificial Sequence
  ENSG00000286087_4 (sequence is synthesized)
taaggatttgataataaattttggcagatgtccaatatcaagatcaccaaccacttcattaataattgttgttaagtcatggaacttgtctgcagaaattgtattcttccaagcttctaa

SEQ ID NO: 986241 - DNA, 120 bp, Artificial Sequence
  ENSG00000286087_5 (sequence is synthesized)
ctgaggattttgcccttcaaccttatctgctgtgaaaagacatgtttttttttgcaaagcaatattaagataattgaaatatccaaaatactagacaaatgagaaagattcgttgtccaa

SEQ ID NO: 986242 - DNA, 120 bp, Artificial Sequence
  ENSG00000286087_6 (sequence is synthesized)
tttcatcttaaagtcaatatcaaattggttgcttaccttggaaacactgagattgttctatagttcaacagttctccaccaaacttttaccctcaataaagatgtacttccacatacatt

SEQ ID NO: 986243 - DNA, 120 bp, Artificial Sequence
  ENSG00000286084_0 (sequence is synthesized)
gcgccggggacaagtccttccaccgaggccgggtccccgcgccttccctagcgccctgcctctctttggccgcgctcgcaggaccgcctgtaggagagtgaagccccagggtttccttgc

SEQ ID NO: 986244 - DNA, 120 bp, Artificial Sequence
  ENSG00000286084_1 (sequence is synthesized)
tgatggagtcccccaccttccccagccttcctgttcccgggctggttacggcggcgaagggagaccttgcctctccccagccttggaagcagagggctggaggtggccttatgtccactg

SEQ ID NO: 986245 - DNA, 120 bp, Artificial Sequence
  ENSG00000286084_2 (sequence is synthesized)
cctgcgactctggacttgaagggaagaagtaatcgatcatgatgaccgtgaaagaaacacgtctcccttcatcccaggacccctggtggacactgggtggtttagcatccggactatgga

SEQ ID NO: 986246 - DNA, 120 bp, Artificial Sequence
  ENSG00000286084_3 (sequence is synthesized)
gatgctttggaggtgttggcaggactacggttgagcccttatttgatatttaccgattgagaaagaaccaagattaagaggcctggaactcatcaggggtattttatttatcctgccttt

SEQ ID NO: 986247 - DNA, 120 bp, Artificial Sequence
  ENSG00000286084_4 (sequence is synthesized)
tcctcatttcctctcctgctgtcatgcttgtttattgagcacctactgtttatgggaagaaaagataatagacaagatacttgacctcaaacccatgaaaatttaatagttacatgtcat

SEQ ID NO: 986248 - DNA, 120 bp, Artificial Sequence
  ENSG00000286084_5 (sequence is synthesized)
catcctcgggccagcagcggtatgtgttctggtcttgcttcctggaccacccagaagagactttatagccccagccatcaggggtatagtgtgtgcccagtgtgttttctatccctggct

SEQ ID NO: 986249 - DNA, 120 bp, Artificial Sequence
  ENSG00000286084_6 (sequence is synthesized)
tccaaaaagtcctggaagaaagaataggtgtgaccagaaagtccttcacctccggaatctaagtggatatgggagaaatgtggacatgagaggggcacagaggaagactacctgaagaca

SEQ ID NO: 986250 - DNA, 120 bp, Artificial Sequence
  ENSG00000286084_7 (sequence is synthesized)
cacagagagaaggtgaccacgtggttggagtggagcatctacaaaccaacacacataccaaggattgctggcaagtatcaccagaagctagaagaggcaagaaaggattctccccaaagc

SEQ ID NO: 986251 - DNA, 120 bp, Artificial Sequence
  ENSG00000286084_8 (sequence is synthesized)
acattctgatacttctatctgctgtggacgtgacacagagacttaccaaagccaagatacatttattcaaggaggagcaacttgcctttatacttatacctttgttaataacttgtttaa

SEQ ID NO: 986252 - DNA, 120 bp, Artificial Sequence
  ENSG00000286084_9 (sequence is synthesized)
agcaatcctttgttttctttgcatatttgaattgatttgctaaaagttatctactgttaaataagcaaaactcaaaattttcaagcatatgggacttgttcagaatcagtttttagtttc

SEQ ID NO: 986253 - DNA, 120 bp, Artificial Sequence
  ENSG00000286084_10 (sequence is synthesized)
tttttcaggattttgtacaagttgcaagagaagagacacaaaattatcttattaattctattgcaatatggagatacattttaaacaaatggaaataatcaatattagtattatctgtat

SEQ ID NO: 986254 - DNA, 120 bp, Artificial Sequence
  ENSG00000286084_11 (sequence is synthesized)
atttgtgtgtgtgtgtgttgatctgactatatttttcttcaaagggaaatcacaaaggccaagtgtgtttatcaggtaactcaccttaagaaaacttgtactatgtgaaaagtcaatttc

SEQ ID NO: 986255 - DNA, 120 bp, Artificial Sequence
  ENSG00000286084_12 (sequence is synthesized)
tttaaaaactgtcaccaactcaaccctggtttgtaagtagaaaaaactatcaattattttttaacaatagtaatactcccaaggtatatacttctgccacaaaaaattaagaatagttta

SEQ ID NO: 986256 - DNA, 120 bp, Artificial Sequence
  ENSG00000286084_13 (sequence is synthesized)
cttagcacgttttgtcattgtggaaatcattgagaaaaatcacagtggaaagttatttgaaaaggcataactgtcattagaaagaaattaagaataaagaaggcaggcctggcgtggtgg

SEQ ID NO: 986257 - DNA, 120 bp, Artificial Sequence
  ENSG00000286084_14 (sequence is synthesized)
cctcagcctcctgagtaattgggattacaggcaaggaatcaaggcttctagacaccaccggatgagtcaaggtaccgtggcccagacaaactaagcactggttctgtcaccacatagaca

SEQ ID NO: 986258 - DNA, 120 bp, Artificial Sequence
  ENSG00000286084_15 (sequence is synthesized)
gacaaactaagcactggttctgtcaccacatagacacaaaggcattcaagaaaccacagccctctggctttgttgctccttccttcataatcaaatcaacagagtgtgtttgtagaattc

SEQ ID NO: 986259 - DNA, 120 bp, Artificial Sequence
  ENSG00000286084_16 (sequence is synthesized)
ctgtgattcactcgggaggaggaaggcctcggagggcagccaatcgaagacggacccagggaaaagtcgctgggttcttacaggaagcgatctaattatgttactgtaatcctcaagctc

SEQ ID NO: 986260 - DNA, 120 bp, Artificial Sequence
  ENSG00000286084_17 (sequence is synthesized)
gcatttttcagccacctcaacacgaactcacagacttcaacgattatgtaattacggaaaacttcacaacaaacatgaagattccttctggaggccacattgaagaccgggatgtgcatt

SEQ ID NO: 986261 - DNA, 120 bp, Artificial Sequence
  ENSG00000286084_18 (sequence is synthesized)
agagcgtgggagggaagcacgcagctcacaaaaggaagagcaaagagatgtattgaacttaaaaggttacatttgaaaaggggcccctaccagacctccccttttgtgtgcacatttttt

SEQ ID NO: 986262 - DNA, 120 bp, Artificial Sequence
  ENSG00000286084_19 (sequence is synthesized)
gcacctgcaactgtttgcgggctcgaaagcaatagccctcccccttctcccaagaggccacgctttcatgccttggccccaaatgtgtcattttcctgccagggggagaaatcaaaagaa

SEQ ID NO: 986263 - DNA, 120 bp, Artificial Sequence
  ENSG00000286084_20 (sequence is synthesized)
accaagtttttagaactttgctgtaaagaaaataatagttttgaaaaggattggagccacattttcaggttagacacagttgttagagaaatgtcagaaggaaaacgttcctcttcactt

SEQ ID NO: 986264 - DNA, 120 bp, Artificial Sequence
  ENSG00000286084_21 (sequence is synthesized)
tctttcctagctcgttgaagttcttcatttcactgggttctgggtgacatctgtagcatccatttcagcgcagtctgcagcaggcttttgactccacagcatgtaactgtcctcagacca

SEQ ID NO: 986265 - DNA, 120 bp, Artificial Sequence
  ENSG00000286084_22 (sequence is synthesized)
ccgtgttcaaagtcgagattccaaatggaccttcctgactcttcacagagaagatgccatataaatcatttccattaaaacaaacctttgataccaccagcgaattgtggaattttgata

SEQ ID NO: 986266 - DNA, 120 bp, Artificial Sequence
  ENSG00000286084_23 (sequence is synthesized)
atgatgcttgtgaatgaagtgctgacaaatggtcttgctttagatggtgtttgtgggtggggcttgggttagagccaggatcaaccttgattttggccactgatccatttcctctctccc

SEQ ID NO: 986267 - DNA, 120 bp, Artificial Sequence
  ENSG00000286084_24 (sequence is synthesized)
caccacccacctcatatgttgagatgaaagttacagcagaaagcctcttttgaaccattatgaacaattctattcaaagcagcatctgtgaatttttataagactggccaagattggctc

SEQ ID NO: 986268 - DNA, 120 bp, Artificial Sequence
  ENSG00000286084_25 (sequence is synthesized)
aattatttctccattctctccaggggatagaaagtttccaatcaagggttacaatggaagcaaaaatgttatgttcatgggaggtagaatgcattgctaaatagatggaagacaaaataa

SEQ ID NO: 986269 - DNA, 120 bp, Artificial Sequence
  ENSG00000286084_26 (sequence is synthesized)
aggatctgcctcactatccttccacctttggctctgcttgcagtggctctggttctatccatgcttttactaagcctgcaaattctgtaaagcaggaaactacaaaaacgttacaaaagg

SEQ ID NO: 986270 - DNA, 120 bp, Artificial Sequence
  ENSG00000286084_27 (sequence is synthesized)
ctctgtcaaaagattcttcaagtgattaaggatagcacactctgcataggaaatgaagccctcggagagatttgaagaagcccttggagagatttgagatatccctaacggagaaagaat

SEQ ID NO: 986271 - DNA, 120 bp, Artificial Sequence
  ENSG00000286084_28 (sequence is synthesized)
tgaccttcattatctcaggaaggcttttgacataaaagagaaagagaagaaactgattacttaaagaggagagagagctgtaaagagaactacgaggatgagcatcaggcttaaagtggc

SEQ ID NO: 986272 - DNA, 120 bp, Artificial Sequence
  ENSG00000286084_29 (sequence is synthesized)
ttaatttataaacggataatttaaaaatagaattggaacattaagccttaatatgacctatactcctcgcaatccagaagtgaagggagaaatgtggacatgagaggggcacagaggaag

SEQ ID NO: 986273 - DNA, 120 bp, Artificial Sequence
  ENSG00000286084_30 (sequence is synthesized)
tgttatgtcaactgtaggaaatggatattgtacaacgattggggcatgactttgcaatggtttacctgctctcagatgaaaattttttttttttgttttttttttagatggagtcttgct

SEQ ID NO: 986274 - DNA, 120 bp, Artificial Sequence
  ENSG00000286084_31 (sequence is synthesized)
tacaggtgtgggccaccacaccctgtctcagatgaaaggttaatataattaaggaacatcttttttgttttttttttcagaaattggaatgggggagtagctgaacagaaaagtccatct

SEQ ID NO: 986275 - DNA, 120 bp, Artificial Sequence
  ENSG00000286084_32 (sequence is synthesized)
tgttcaattcccacaagaacatttctttgcaatattattggcaggaatatgcagtaaagttctaataactatttactcctttctttgaaactctattcagttataatgtgtcctgtaaaa

SEQ ID NO: 986276 - DNA, 120 bp, Artificial Sequence
  ENSG00000286084_33 (sequence is synthesized)
agtatgacactgatttcatagtaccaattttagcctaatacatatttaaatgattcccaatgtataaagatattttagtaataagaaattatttaaggatcccaaacatcacaataaaca

SEQ ID NO: 986277 - DNA, 120 bp, Artificial Sequence
  ENSG00000286084_34 (sequence is synthesized)
taaagcctagttttaggttgcaaaaaagtatcaaactttataagttttagtgcaaattaagagaaattacattctaactacactaataactgaaaacttcatattaggcaaataatgtct

SEQ ID NO: 986278 - DNA, 120 bp, Artificial Sequence
  ENSG00000286084_35 (sequence is synthesized)
tcaactactcaaattataggagcccacttcaagaacctcagtaagaagaaattttgaatggtttaaaaataataaatgccatgacattttaaatggaaatttggcatatttttgagataa

SEQ ID NO: 986279 - DNA, 120 bp, Artificial Sequence
  ENSG00000286084_36 (sequence is synthesized)
atatgattggatacatgtgtgtgccattcttttatctcttcttacttttactgtatctctactttaatgatgacaataatatggctacagacatgaaatggtttatctttcttcttttct

SEQ ID NO: 986280 - DNA, 120 bp, Artificial Sequence
  ENSG00000286084_37 (sequence is synthesized)
ttcactctttcatttaaagcatttatattattttttattgatgtcaatgttaacattttggcatccttcccaagtatattgcaagaaatacatcaataaaaacttaaatttaaaaaatat

SEQ ID NO: 986281 - DNA, 120 bp, Artificial Sequence
  ENSG00000286085_0 (sequence is synthesized)
ggggagctaggagaaaagaggaagctggtgcaggaagactggctcctgagaaagagaggagatggaaaaggaatcctggcctgagaccgagcttacctgggttctgatctggctctgttg

SEQ ID NO: 986282 - DNA, 120 bp, Artificial Sequence
  ENSG00000286085_1 (sequence is synthesized)
ctagatgtgccactagcttctggatcttcctgtgtccatctgcaaaaggcagattaaaggccaggactcatcctactctgaaatttggccaagtgaccaccttgtcccacactcaagtat

SEQ ID NO: 986283 - DNA, 120 bp, Artificial Sequence
  ENSG00000286085_2 (sequence is synthesized)
agactctcaagaccttaaccttatgatgacaagaagaggcaaataaaggaaaagagtctcacttcatcacccaggctagagtgcagtggctcaatctcagctcacagcaacttctgcatc

SEQ ID NO: 986284 - DNA, 120 bp, Artificial Sequence
  ENSG00000286085_3 (sequence is synthesized)
gttcaagcaattcttgtgcctcagtctcccaaagtagctggaattacagctgtgcaccaccacacccagttaattttcttttcttgtatttttagtagagatagggtttagccaagttgg

SEQ ID NO: 986285 - DNA, 120 bp, Artificial Sequence
  ENSG00000286085_4 (sequence is synthesized)
atccacccgcctcggcctcccaaattggtgggattccaggcatgagccaccgcaccaggaccaatattacttttcttcaggacccatccttcacccccaccagaacacattataaatgaa

SEQ ID NO: 986286 - DNA, 120 bp, Artificial Sequence
  ENSG00000286085_5 (sequence is synthesized)
catccttcacccccaccagaacacattataaatgaataattattccattatgttaattgaaacacatatataaagaggtaaggccctgttttgggttcttgtttaggacagtaaacatac

SEQ ID NO: 986287 - DNA, 120 bp, Artificial Sequence
  ENSG00000286085_6 (sequence is synthesized)
actaattggcctccccagcaattgtgtttagcatgaggaacaggtaataaacataaataaataaatgacatagtgtatcagcaggtggtaaatgctatagatgaacagaagtagatatga

SEQ ID NO: 986288 - DNA, 120 bp, Artificial Sequence
  ENSG00000286085_7 (sequence is synthesized)
catttaaagaacttggaaattatcattcctgtcatcgtagtaaaattacttctgaatacactgaaaatcaccttttcttggatcaatcaaataactgaggttacagggcaaataccatcc

SEQ ID NO: 986289 - DNA, 120 bp, Artificial Sequence
  ENSG00000286085_8 (sequence is synthesized)
tgaaaactgcagaggcaggcaaatataatggattctagccaatatcttcttgctttaagtagaagccacagaaaccatatactggtagaaacagacatgagaattatgaagaacttttgg

SEQ ID NO: 986290 - DNA, 120 bp, Artificial Sequence
  ENSG00000286085_9 (sequence is synthesized)
aggctaagtgtggtctggcttgagggtgagaaactgatagggtggcatttttaagtagggccccatccctttttggggaaccccctatcagataatcacaaagaagagccaacaaatacc

SEQ ID NO: 986291 - DNA, 120 bp, Artificial Sequence
  ENSG00000286085_10 (sequence is synthesized)
tcctcctgattctggcacagagagggaaagaataacctttgtgaaataatcccagaatattctctgtaaataagtttactcttcaagggaaagactttgccagaagcttagttcatctgt

SEQ ID NO: 986292 - DNA, 120 bp, Artificial Sequence
  ENSG00000286085_11 (sequence is synthesized)
tacctacagggaggaaaaaaaaaaggtaaaaaacaattgtgaaggtcacagtccagaagaaactaaagcaactagaagaagagggaacatgatgtttaacttacccttaggctttcttat

SEQ ID NO: 986293 - DNA, 120 bp, Artificial Sequence
  ENSG00000286085_12 (sequence is synthesized)
gtagtgagaagaaagcatcaaaaaaaaaaaaaatcaaagtggaggcctgttttctgactcatcctgttgcaagagacaggaaccagaagagagagctgtgcatgtgagtttgatctttca

SEQ ID NO: 986294 - DNA, 120 bp, Artificial Sequence
  ENSG00000286085_13 (sequence is synthesized)
atgcccagtgaccccatcaaatggtaaacatggacagacagatatcatgggaattaacttattcgggtaagtattctctgctcttcaggaggtgtagaaaggtgatgaagagagcaacag

SEQ ID NO: 986295 - DNA, 120 bp, Artificial Sequence
  ENSG00000286085_14 (sequence is synthesized)
aatcttatacttacaatcagtgtcatggtatgggtaatctcaatgtttggggaaaggggatgggtagttcaagaaagactatcaagaaggaatgccttagcctagtcttcaagggtgaga

SEQ ID NO: 986296 - DNA, 120 bp, Artificial Sequence
  ENSG00000286085_15 (sequence is synthesized)
ggaacttgataaagaatgggaaggaggacagaagggcattctggacagagcaaggctcatgaaaacagacttggagggaagagagaaaaagtcctgtttagtagattgtaaggaactcaa

SEQ ID NO: 986297 - DNA, 120 bp, Artificial Sequence
  ENSG00000286085_16 (sequence is synthesized)
tgcaactggaatattgaatgtcatgaagggagtggaggagatcagaaaatgaagttgaggcaggaggcatgggccaaataatatagtatattgtatgtatgggagaaggactcagacttt

SEQ ID NO: 986298 - DNA, 120 bp, Artificial Sequence
  ENSG00000286085_17 (sequence is synthesized)
accagcagcaatgaaaaaaccattgaaagggaatagcatcatcagatttctattttaagaagatgatttaagttaatgtacagagaatggattgtaggagatggtagtgggtgtcatgat

SEQ ID NO: 986299 - DNA, 120 bp, Artificial Sequence
  ENSG00000286085_18 (sequence is synthesized)
gatatcccagttaccctgatttgatcattacacagtctatacgtgtatcgaatatcacatgtaccccagaaatatggacaaccatgaagtatcaacaacagcaacaacaaatatcaggaa

SEQ ID NO: 986300 - DNA, 120 bp, Artificial Sequence
  ENSG00000286085_19 (sequence is synthesized)
caccaaatagaagttccagtgccttgcatgaatctaaatgaggaaggataatggtctgaacatcattatagcaatggcgtgtacaagactgggtgaatctgggaaagaaccaagaggtag

SEQ ID NO: 986301 - DNA, 120 bp, Artificial Sequence
  ENSG00000286085_20 (sequence is synthesized)
aatctgttggtattgattagatgaggcagatggaggggagaagagggattcaatgatgatcccaggaatatatatccccagccagatatatatctccaataccaacagtgcctttgtaaa

SEQ ID NO: 986302 - DNA, 76 bp, Artificial Sequence
  ENSG00000286085_21 (sequence is synthesized)
gccagatatatatctccaataccaacagtgcctttgtaaaatggtgtcttggccgggcgcggtggctcgtgcctat

SEQ ID NO: 986303 - DNA, 120 bp, Artificial Sequence
  ENSG00000286082_0 (sequence is synthesized)
agctgggaccacaggtgtgcaccaccgcacccagctaaggatactggcaaggtcaagaccctgaagggccatctcatccatgaaaaaaagactagtctctggtgcctggaaggaagcaaa

SEQ ID NO: 986304 - DNA, 120 bp, Artificial Sequence
  ENSG00000286082_1 (sequence is synthesized)
caaatacatgtctccctggaaggaaactcctgcaacctgaaagacgggcttgttctaacgatgtccaagctccgcgagggagagaaacacgtgagaaagcatcacaggttgaggaattgt

SEQ ID NO: 986305 - DNA, 120 bp, Artificial Sequence
  ENSG00000286082_2 (sequence is synthesized)
tacatacagagaagtgcacagagcagaaggggatggctagcaagttaccacaacgcctggcagagaagcagaactctggacatcaacgagccctcctggcgccccgccctgcccccccgg

SEQ ID NO: 986306 - DNA, 120 bp, Artificial Sequence
  ENSG00000286082_3 (sequence is synthesized)
aagggcagccacagtgtcccggagcccatgcagtgtgacagccccaggtaactctccagccagcactccacccgtggaattacagccgactgaagcacctctgctacattcgtcagcttg

SEQ ID NO: 986307 - DNA, 120 bp, Artificial Sequence
  ENSG00000286082_4 (sequence is synthesized)
ataaatgtccaaggaatgaaccaagcacagggaccatctcttccggtagcttctcaccatcacacacactttgcagggccgagggctcttcctggcccatatctagcacctagatatttt

SEQ ID NO: 986308 - DNA, 120 bp, Artificial Sequence
  ENSG00000286082_5 (sequence is synthesized)
attcacttatgttttgaatatttcatgggtccttctcccccagaggcctcagagcactcccagaattggaatggaaatacacagtgtgtccttgtcagctgtccgggccgccgcgttcaa

SEQ ID NO: 986309 - DNA, 120 bp, Artificial Sequence
  ENSG00000286082_6 (sequence is synthesized)
agggcaggacatagtagcttctgctcaaattagaatgatctgtctcgtcaagcggaagatggttgttgagactttgtgtctttaaagtattgcctaaaaaagcaagattaaatgaacgca

SEQ ID NO: 986310 - DNA, 120 bp, Artificial Sequence
  ENSG00000286083_0 (sequence is synthesized)
gaagccatcttgatttatctagggagacattattgcgtagtgctgaagaaaatggcatttcatgtctgatatgagtttaaagccaagtaccaacaccctaattgttgtgtggcattaaaa

SEQ ID NO: 986311 - DNA, 120 bp, Artificial Sequence
  ENSG00000286083_1 (sequence is synthesized)
gttgactctaaatccgtcctggaatttggcacatgtatgggatatggatagaaaataagagcaaagaggaattcaagataatgaggcaatataaacaaaagttgaaaagagaaaatgagc

SEQ ID NO: 986312 - DNA, 120 bp, Artificial Sequence
  ENSG00000286083_2 (sequence is synthesized)
gatccttgaataccaggcaagggagttcatctctccacctgtaagcatgaaggagccacgggagattttgcaaagggaatgaccaaaacgaaaatggcatttaggaaatgagtttgccag

SEQ ID NO: 986313 - DNA, 120 bp, Artificial Sequence
  ENSG00000286083_3 (sequence is synthesized)
aagtacctgggagaaatggggactaggcactgagaatgtaattcatagcacagcagaacagatactaaaagatcgttctggaagcagaagggctggtttccagcttttctgaggttgttt

SEQ ID NO: 986314 - DNA, 120 bp, Artificial Sequence
  ENSG00000286083_4 (sequence is synthesized)
cactgtgggtaactgctaaggccttcacccttgatgccagaggtgctgaaacacattgccacacggcgaaagaagtgccctattggcccaaacacattgaataaacatctacctcaaacc

SEQ ID NO: 986315 - DNA, 120 bp, Artificial Sequence
  ENSG00000286080_0 (sequence is synthesized)
gggacctcatcagtgaaggaagtggtcagttggaatcttgtcagttgggcgcagtcagcctggcagcaaaagcctcatccgtgggttctggatagtgaggcctggtcactggaggcctgg

SEQ ID NO: 986316 - DNA, 120 bp, Artificial Sequence
  ENSG00000286080_1 (sequence is synthesized)
ccgtggaacctggcccaggacatggagatgcccgatgctgggaggaggcacagacagcaggaaggagagaaggaaggaacttccatagtatggatgcctacgaagttacaacacgtggtt

SEQ ID NO: 986317 - DNA, 120 bp, Artificial Sequence
  ENSG00000286080_2 (sequence is synthesized)
ccatcgccatgttctctgtttatttcccacataattctctattctaaactggcctcagttgagcacaaaaccatccttgtactaccacaaatagttggccatggctctttgatagcagtt

SEQ ID NO: 986318 - DNA, 120 bp, Artificial Sequence
  ENSG00000286080_3 (sequence is synthesized)
tttattctgctgtggaaattatccttgaactggaaaaagtccccaatccaacatccagtcactcaacactctcatctttataaagagctgctttcaaattctacatcgatttttggaaaa

SEQ ID NO: 986319 - DNA, 120 bp, Artificial Sequence
  ENSG00000286080_4 (sequence is synthesized)
atatgtattgctctggtaaaaagtgctgcatctatgatctcaaacctctccctcgaattggatggagatggtgaatttcagccaaagtggccaaagaactcgtgtcccacgctcctgaac

SEQ ID NO: 986320 - DNA, 120 bp, Artificial Sequence
  ENSG00000286080_5 (sequence is synthesized)
gccatcagcccccgcacctccatcattcctcctcccacgagtctcctgctccccgtgactttggccttctctcggtgctgctgaggcacatcaggaagtgctggaggacgtggcactgcg

SEQ ID NO: 986321 - DNA, 120 bp, Artificial Sequence
  ENSG00000286080_6 (sequence is synthesized)
ccagcactgggcggccggccgtgtagctcatcccgcagatcgtgctctacctgtgcttggagatgaagtcctcctggaagcagctcgtggcccacttctcaggcatcatcacttcatcac

SEQ ID NO: 986322 - DNA, 120 bp, Artificial Sequence
  ENSG00000286080_7 (sequence is synthesized)
tgccctgactgtcctggttgccacgaaagagctgctgaggccacggctgtcgggcacgcctgccgtctgaagcctgcaccggctgctgaaaggtattcagtggtggcacgtgctgcggct

SEQ ID NO: 986323 - DNA, 120 bp, Artificial Sequence
  ENSG00000286080_8 (sequence is synthesized)
gtagcaccggctggaaagtgtcaggaaggggtctcaaggaggtgggcagcataccgggcatggcctcgaagcctcctgacagcatgttggcagcgtggctgagatgctggggccaccatc

SEQ ID NO: 986324 - DNA, 120 bp, Artificial Sequence
  ENSG00000286080_9 (sequence is synthesized)
tcctgctcccgcacaggctcagcacctcgtgttcctgcagcaagttcttgccggggttctctgacctgaaatggtacaacaaccgggtgaggtgtgccatgtcccctgcgtggccatcgg

SEQ ID NO: 986325 - DNA, 120 bp, Artificial Sequence
  ENSG00000286080_10 (sequence is synthesized)
tgctgcagctaaaggcccatggcaccccggtgccctcccctaccaagcagggctggggttgaggccgggcccctctggacctaggacttgtgccctgggaggggactctgtccaacaagt

SEQ ID NO: 986326 - DNA, 120 bp, Artificial Sequence
  ENSG00000286080_11 (sequence is synthesized)
caaatcagaggccacagggcatgctcctggctggccagggctgggaggacaccacgttcacccctccctctggcagcctgaaagggaccagcttccctgttgagagggacttcataaggc

SEQ ID NO: 986327 - DNA, 120 bp, Artificial Sequence
  ENSG00000286080_12 (sequence is synthesized)
ccaggagccatctggggctgcagagcaactggctgggagctgccctggctccttccatgccatgctagtcattgcccaccaagaggggtccgatgcaagtgcccccatgcaagggactta

SEQ ID NO: 986328 - DNA, 120 bp, Artificial Sequence
  ENSG00000286080_13 (sequence is synthesized)
tctctggacctgcctctcagttctcacggggcccagcagggcctggtgttgtggccaagatggggttgcagggctgggccccactgatggtcctggggctgtgtagggtggatgtggaag

SEQ ID NO: 986329 - DNA, 120 bp, Artificial Sequence
  ENSG00000286080_14 (sequence is synthesized)
ggacggagcacagcatccctgttcaaaattgcacaatgggaaccacgggcctctgacagccaagtctctgggcagcttcgggagggagttcagaaaatgcatgggtccattctgaaccct

SEQ ID NO: 986330 - DNA, 120 bp, Artificial Sequence
  ENSG00000286080_15 (sequence is synthesized)
caggatccccagagagcaacctgctgccctgagctttctggaagctccttcgtgcccctgggcctcagtcttggagactgccagccaggtcagggtgggagaggaccagggttgcattcc

SEQ ID NO: 986331 - DNA, 120 bp, Artificial Sequence
  ENSG00000286080_16 (sequence is synthesized)
ggggtagggggctggctgcatggacccctggagctaagctggtaggcaggggcgggccagcccatctcccttgcagaggggctcaatgccagggtatgctcacagaggcctgggtgccaa

SEQ ID NO: 986332 - DNA, 120 bp, Artificial Sequence
  ENSG00000286080_17 (sequence is synthesized)
ggaccctcgattgggtttggctgaaaaaatagcagatgcgagcggtcagcttctcctccaagtccattaagtcctcacaaggctgggccccacagacctgggtctctggtgtcctcagca

SEQ ID NO: 986333 - DNA, 120 bp, Artificial Sequence
  ENSG00000286081_0 (sequence is synthesized)
aggtgacatcttagaaactgtgataaaatgatctcaggacccaaaaagaaaatggacaagcctggcaatgagagtttgcaatgtgatgcaatcacgggcaataccagggtggaaattgga

SEQ ID NO: 986334 - DNA, 120 bp, Artificial Sequence
  ENSG00000286081_1 (sequence is synthesized)
tgggcagctttcttctctctagaagattttctttccaagtccattctttcttttcatattttcatcagctttgttcgtaattgtcaaaacttggaagcaaccatgatgccgatatccttc

SEQ ID NO: 986335 - DNA, 89 bp, Artificial Sequence
  ENSG00000286081_2 (sequence is synthesized)
tgctatcaagccatgaaaagccatggaggaaacttaaatgcatattactaagtgatagaagccaatctgaagaggttacatactctgta

SEQ ID NO: 986336 - DNA, 120 bp, Artificial Sequence
  ENSG00000286081_3 (sequence is synthesized)
aagtgatagaagccaatctgaagaggttacatactctgtattccaagtatatgacatctggaaatgacaaaactatggacaccataaaaagatcagtggttaccaggggttggggattgg

SEQ ID NO: 986337 - DNA, 120 bp, Artificial Sequence
  ENSG00000286081_4 (sequence is synthesized)
gggatggatacctggagcacagaggatttttaaggcagtgaaactagtctatatgacactataaaaatggatacgtgtcattatacatttgtcaaagctcataggatgtacaacagcaat

SEQ ID NO: 986338 - DNA, 120 bp, Artificial Sequence
  ENSG00000286081_5 (sequence is synthesized)
agcaaactctaatgtaaactgtggactttgagtgattatgatgtgtcaacataggttcatcggctgttaacaaatggacccctctgatggagctataaatatgtgacaacttgaattctg

SEQ ID NO: 986339 - DNA, 80 bp, Artificial Sequence
  ENSG00000286081_6 (sequence is synthesized)
gcatcttatgttatctctatggtaagtttagctaaatgaaaaattcccaggattgtaaactgattgattagaaattattt

SEQ ID NO: 986340 - DNA, 120 bp, Artificial Sequence
  ENSG00000286081_7 (sequence is synthesized)
aaattcccaggattgtaaactgattgattagaaattatttgatttttctttatttcattttatgttactttttaagacccagtcaaggaacatttccatatgatgtgcgtgtatccatag

SEQ ID NO: 986341 - DNA, 120 bp, Artificial Sequence
  ENSG00000286081_8 (sequence is synthesized)
aattatatcatggctgcatatgcagttttagcctatgctataaaatgcctgctttttaaaaaaagacgttattttcttagaacagttttaggttcacagcaaaactgaaaggaagttaca

SEQ ID NO: 986342 - DNA, 120 bp, Artificial Sequence
  ENSG00000286081_9 (sequence is synthesized)
atatctttatgtattctgaataaagtccttcgtcagatctacatattacgaataactcctctcacttcgtggcttgctttttaatgttcataatgttgtcttacaaagagaaaaaggttt

SEQ ID NO: 986343 - DNA, 120 bp, Artificial Sequence
  ENSG00000286081_10 (sequence is synthesized)
tcatttgataaaatacaatttttttatttttaaaatttatgattttgtgttttctgtgttctgtgtaaaaatctttgcctatcccagggatacaaagatttttattctttttttataaga

SEQ ID NO: 986344 - DNA, 120 bp, Artificial Sequence
  ENSG00000286081_11 (sequence is synthesized)
agttttatagttaagttttaccttcaggtctgtgatgtattttaagttaattttttcatatgccatgatgtaagagataatgatcctttttatacagatacctgtgtgctttcactccag

SEQ ID NO: 986345 - DNA, 120 bp, Artificial Sequence
  ENSG00000286081_12 (sequence is synthesized)
cactccagcagtatataatcgataaatatttctacatataatctatctctatatctacattaatctaacatgaattcatattaatgtctcctactctaatcaattaccatatagatcatt

SEQ ID NO: 986346 - DNA, 120 bp, Artificial Sequence
  ENSG00000286081_13 (sequence is synthesized)
tgtcaggttttagattttagtatatataatagtacactagttgttactgggttttacttagtaattccatttgtttaatagctataaaactattcagaatttctctttcatgttgtagtt

SEQ ID NO: 986347 - DNA, 120 bp, Artificial Sequence
  ENSG00000286081_14 (sequence is synthesized)
ttgctaatttttacctttaaaggaatttgtccattttatttaagttctcaggtttattttacttctgtttttttggtcctttctgtgtttcggtatctgtcctgaagacgcctgacttgg

SEQ ID NO: 986348 - DNA, 120 bp, Artificial Sequence
  ENSG00000286081_15 (sequence is synthesized)
tgcctttgcctgacaactctttagtgtttaactaaaggcagcgaaaccatccccagacatgaattggcatgagcagaagaatcacattaaaagattggctagaaaacctattgctgttta

SEQ ID NO: 986349 - DNA, 120 bp, Artificial Sequence
  ENSG00000286081_16 (sequence is synthesized)
aagaaaaggatttattaaaagtaagagcatcagtggtgcatccttatgtcctccctttcttagaaaatcagttttcataatttctctttgaatctgacaggctttaattatataactggt

SEQ ID NO: 986350 - DNA, 120 bp, Artificial Sequence
  ENSG00000286081_17 (sequence is synthesized)
agagaaatttaactttgattttcaacatgcaagaaaaagagccaggaaactatatgtatatattaatgtattagctaatatttagtgcagagaagtacaaaggagaaaacaagagttgga

SEQ ID NO: 986351 - DNA, 120 bp, Artificial Sequence
  ENSG00000286081_18 (sequence is synthesized)
taattttccttgtcagataactttttggtatttttataaaattagcaatgtatgaggctaaaaatatacaaaaatgtacaagtcaaaaaaataaaattcttttcctttgtgcccacccca

SEQ ID NO: 986352 - DNA, 120 bp, Artificial Sequence
  ENSG00000242816_0 (sequence is synthesized)
ggtattctaataaaaaataacaatgctaattttatctgaaaaatacatgtacctcaataattttatcaagggcatgttttgtgctagatactactctttatgttaggaatataagcaatt

SEQ ID NO: 986353 - DNA, 120 bp, Artificial Sequence
  ENSG00000242816_1 (sequence is synthesized)
gtataagatacttacagattgcagtaagtggtaaaaaatataacatgaagagggaatagtgatgagaaggtaactatataggggagtggtcagggagtgcttcactgaagatgtaaaata

SEQ ID NO: 986354 - DNA, 120 bp, Artificial Sequence
  ENSG00000242816_2 (sequence is synthesized)
tgaactgaaacctatatcctgatttaaaatagctttgcagatgttttaggtaaatagcagcaagcgaacaataccaaagtagaatgactcctgcctgctacatttccccagatacccagg

SEQ ID NO: 986355 - DNA, 120 bp, Artificial Sequence
  ENSG00000242816_3 (sequence is synthesized)
accttcatgctgtcactctccatgacctgaccaacatctattttgagaaattattttatatactcattcaaacagtcatcttttgtgtccagagttggttccttctggtgggttcgtggt

SEQ ID NO: 986356 - DNA, 120 bp, Artificial Sequence
  ENSG00000242816_4 (sequence is synthesized)
cttctatttaaacttcttggaaggatatctcaataacattcctttgctgaggaccataagatagaagatgagaatccatctgccctcttctctgcacccaggcttcaatcctgtttgatc

SEQ ID NO: 986357 - DNA, 120 bp, Artificial Sequence
  ENSG00000242816_5 (sequence is synthesized)
atgcaggggctacaaggccttcgacacaaagaacttgtcttagattctaatcagtttaacaaataggacagacagctgctgagcactgtctgagtgacactgatttacatacaaatgaac

SEQ ID NO: 986358 - DNA, 120 bp, Artificial Sequence
  ENSG00000242816_6 (sequence is synthesized)
caccaatgtccccttctatcaactcagaataaaatctggttttagcatatgcagtcctacgagacatggttaaaggatatgaatgatagatagagataaaagaaatcaaggaccattcct

SEQ ID NO: 986359 - DNA, 120 bp, Artificial Sequence
  ENSG00000242816_7 (sequence is synthesized)
ccacaagtctccaaagaggaaaacaacaatcgaagaaaaaagagtgagagaacagatgggctggcagagttttgctttctatgtgacattgtgtacttattattcgcatgaggactaatt

SEQ ID NO: 986360 - DNA, 120 bp, Artificial Sequence
  ENSG00000242816_8 (sequence is synthesized)
tataaacccggatagtgtttataaactatactgtcctaatggaaatgaaagcattaatacaactagaagattctttactttccaagctttaattaaaatcacaggcgttaagaagcaaaa

SEQ ID NO: 986361 - DNA, 120 bp, Artificial Sequence
  ENSG00000242816_9 (sequence is synthesized)
gggggagtcaaaaagcccatctccttaagctgactgaatattggcctctaacagattcagcaatgtcagagaattccagggagcttagcaagctatcaggggaaagtacctcctcctccc

SEQ ID NO: 986362 - DNA, 120 bp, Artificial Sequence
  ENSG00000242816_10 (sequence is synthesized)
tgctaattctgacagctcctgcctctgactgagatgcattcttctgaataaaagtgccagcttgcctctcccacaggggctgcaggcagcaggaaactgagacccctgtgtgggtctcac

SEQ ID NO: 986363 - DNA, 120 bp, Artificial Sequence
  ENSG00000242816_11 (sequence is synthesized)
ccgacccccgtgtaaccaaaagagctctctctgaaaattagaaaagcaaatcataccacacattttttttttcaaataaatatagttgccaagtcagatccaggaaaaacaatagcacgt

SEQ ID NO: 986364 - DNA, 120 bp, Artificial Sequence
  ENSG00000242816_12 (sequence is synthesized)
acagacacagacacacacacacacacacagccttagaacatgctatgttaattagctacctggaagaccagaggcaaatgtgtttgttctatgcgctgaacacttaaaagggagagggaa

SEQ ID NO: 986365 - DNA, 120 bp, Artificial Sequence
  ENSG00000242816_13 (sequence is synthesized)
ctatgcgctgaacacttaaaagggagagggaaaggtgtcagcttgggaaagaggaatgtggaaatatggcaaagacaatctaagaggagagagagaaaggaaacaagaggaaaggattcg

SEQ ID NO: 986366 - DNA, 120 bp, Artificial Sequence
  ENSG00000242816_14 (sequence is synthesized)
acagaggaatttcacaacagcatagaagaatagatcaggagttttgctaccaaataatggagaaaaaatacacagaagcctaggaagtgaccttgattaaaacgcccaccatgtgaatgc

SEQ ID NO: 986367 - DNA, 120 bp, Artificial Sequence
  ENSG00000227139_0 (sequence is synthesized)
agaaaaacatcgctaacaatgttggcagccatctttggagaccacttgccgtaactgcatggaatgccaacccccaaaggatgcttttgtgaggacaaaagtgagcaggtggtgacggta

SEQ ID NO: 986368 - DNA, 120 bp, Artificial Sequence
  ENSG00000227139_1 (sequence is synthesized)
atgtactagttgaatccatgtatttccaacatggtgcgacgtgtatgtggtagcagtggacccaaacaccacagaaaacttggggcagccacacaatggtgttatttcagtctataacaa

SEQ ID NO: 986369 - DNA, 120 bp, Artificial Sequence
  ENSG00000227139_2 (sequence is synthesized)
tgttccataaccacctttttttttacttaatatgtcatacattttccatgttattaaatgtctatgtgtgatttaaatcatttatattatgttaaataaagcatatagattctgagataa

SEQ ID NO: 986370 - DNA, 120 bp, Artificial Sequence
  ENSG00000254548_0 (sequence is synthesized)
gcacaacgtgccccgagtggaggaaccgggtggcccgcaggagctggtagaagatggagcgcacgtggacgtcctgcagcaggccgcccttccggatgactgcgttcagggtacatggtg

SEQ ID NO: 986371 - DNA, 120 bp, Artificial Sequence
  ENSG00000254548_1 (sequence is synthesized)
cccgcagacggcgtcaggacagaacagaggtggggctggggcgctggccggggcctcactcacccataaactcaaacaccaggtaaatgtccctgtcgttctctgcccggatcacgtcaa

SEQ ID NO: 986372 - DNA, 120 bp, Artificial Sequence
  ENSG00000260223_0 (sequence is synthesized)
gcttagaagcaagtcacgggtcctaactcacactcaagaggagggagccacacaaagcaatgaccatcaggggaagagattaggggtgccaccttagagtttgccacacggtcttcctaa

SEQ ID NO: 986373 - DNA, 120 bp, Artificial Sequence
  ENSG00000260223_1 (sequence is synthesized)
gaaaaccaagatctagaatttctagtagaattttcttttgttcgtctaagaatcaattgattcttaattctaagcttgaagtgtaactgcatttttatgggcaaaacaatcctggacctg

SEQ ID NO: 986374 - DNA, 120 bp, Artificial Sequence
  ENSG00000260223_2 (sequence is synthesized)
gagacatattcacgccacagaaagaaaacaataaaaagtcatctgatttcctcatactgagtagctccccatgtgattcgggtgttgtgggtactcatgtcctggtgactgtacctccca

SEQ ID NO: 986375 - DNA, 120 bp, Artificial Sequence
  ENSG00000260223_3 (sequence is synthesized)
gctcaagctgccaatcacggtattttccctaaaatgttcccttcccaaaatggaaacctcatgttcgttgtcaagataataaaagttgcacattagcggcacatttataatcttgctaaa

SEQ ID NO: 986376 - DNA, 120 bp, Artificial Sequence
  ENSG00000260223_4 (sequence is synthesized)
tgatttgtcttctaataatactgacaaaaacaactggatttaaagatgaaagtgtctgccatgaggagtacggggacagcaggaatgaaaaggaatatttaagaatgcaaaaaccagtca

SEQ ID NO: 986377 - DNA, 120 bp, Artificial Sequence
  ENSG00000260223_5 (sequence is synthesized)
gacagcacagctctgagcctggcagtgcccctgcaggggcactggttcacatgctgattgtgagcaaggaaaatctcatttaaaccaagtgggaaattatagttaccaagttgacgatta

SEQ ID NO: 986378 - DNA, 120 bp, Artificial Sequence
  ENSG00000260223_6 (sequence is synthesized)
ttttgaccttagggctctttacaattcttgatttcattagtataaaaaatatgaactctgaacactgtcgggcgtgacttccaggcagaaagatcaaccgtgtgaaccaagctgagtatc

SEQ ID NO: 986379 - DNA, 120 bp, Artificial Sequence
  ENSG00000260223_7 (sequence is synthesized)
ttcaccagcccctgagttgctgcactgtgaactgggtatacagactgctaatgctttgttaggagttctttcaacatggaaactacttgatacatcagctttgaagcaatgcggcatacg

SEQ ID NO: 986380 - DNA, 120 bp, Artificial Sequence
  ENSG00000260223_8 (sequence is synthesized)
catgctctagaaaggtaaaatgctaaggtctgtcctgctgaagagtccagtggccacaccagtttcacattacacagaacacagcttcttcacaacctctgaccatctccatcctctgaa

SEQ ID NO: 986381 - DNA, 120 bp, Artificial Sequence
  ENSG00000260223_9 (sequence is synthesized)
gtggtccactggatctaatgtcccaacatgctgtgctatttgtaacatgctgagggctctgccccacttacattctttacctcttctatatgatgcattaaaatattttgtgatccataa

SEQ ID NO: 986382 - DNA, 120 bp, Artificial Sequence
  ENSG00000254540_0 (sequence is synthesized)
aaagcatggccagaagatgtcatcaaggtataataaaaagaaaatactgaggttctcaaaaaaatggactgcagtataagagtattataaaaaccacccatgaatatatttgaaatccta

SEQ ID NO: 986383 - DNA, 120 bp, Artificial Sequence
  ENSG00000254542_0 (sequence is synthesized)
agcccagctacacccgggtgcaacgtggatgtatcagaaaacgacaaccccagaaaagcgggaaagcctctgagaaatgggactgaaatggaactgaacatatttttcagaacacaccat

SEQ ID NO: 986384 - DNA, 120 bp, Artificial Sequence
  ENSG00000254542_1 (sequence is synthesized)
ttcctagtcctgtctgagtcatcccagacctctgggagctggccagacttgaagggtagtcctcaccatccctccagtcaagacagacctgtgaaggcaacatgccttttacaaaaggaa

SEQ ID NO: 986385 - DNA, 120 bp, Artificial Sequence
  ENSG00000254542_2 (sequence is synthesized)
ttccctttctttaaatgtaatgatgcaacaatgtggaaccaagtgaaactggctttgtgagtcaccttcagaagcggcgaaaggtggcttctcatttccaaagttcacagttcaacatgg

SEQ ID NO: 986386 - DNA, 120 bp, Artificial Sequence
  ENSG00000254542_3 (sequence is synthesized)
cctgcataagtaatacaaactgactgccactaatctcaccagaaatcacctctgtcaagaactgtgtgaggagagaggggacagagaaggaaagaaatacgtaccgacttgctctagtcg

SEQ ID NO: 986387 - DNA, 120 bp, Artificial Sequence
  ENSG00000254545_0 (sequence is synthesized)
tttgcatagagcgcggaggctgcggcgctcccaggccatttcgagccggaaaagttcccgaaggagccccgctccctctcccggttcaactgtccagccccctctccctacccctcaccc

SEQ ID NO: 986388 - DNA, 120 bp, Artificial Sequence
  ENSG00000254545_1 (sequence is synthesized)
gcaccccacccgcatcctaccccgcccccgcttccaactccttgcgctaagttcccgcacctcgccccaccccccgctttgactccggtcctgccagccccgacctccatcccaaggccg

SEQ ID NO: 986389 - DNA, 120 bp, Artificial Sequence
  ENSG00000254545_2 (sequence is synthesized)
aagaagggctcccccaaccgaccatcgccccaccccttccagtccagcaggggccagggagaccatcttttgaaccttccccaaccaggggctggaccctgctgtgtctggaagcccttc

SEQ ID NO: 986390 - DNA, 120 bp, Artificial Sequence
  ENSG00000254545_3 (sequence is synthesized)
cttggggagcagcacagccagcaacagacttgagtgagtgacctccagacctggggaaaggagaggggagacaggaagagcccaaaggcctgcggggaagaactgtgttcagcttagctg

SEQ ID NO: 986391 - DNA, 120 bp, Artificial Sequence
  ENSG00000260228_0 (sequence is synthesized)
tcgtaaaagacttttcataaaacttcagaactccttaaaaactagtgaatagccaaggtgaagaaagccctcaggcttctgactttagaccccaatccctgggactcccacactcagcaa

SEQ ID NO: 986392 - DNA, 120 bp, Artificial Sequence
  ENSG00000260228_1 (sequence is synthesized)
agaaagctgggtgcctgcaccctggatctctgagcaaacctgtcttatggctgtgggcaactcaggaacatgaattagcacgagaatctggagtttttctttccttttctggtaagacac

SEQ ID NO: 986393 - DNA, 120 bp, Artificial Sequence
  ENSG00000260228_2 (sequence is synthesized)
ttgtggtttttttttttcaaattccaattggaaatttgctttacatgaacaacaaacaaacttgatactcttttagtggaggcattatttgttcctttattttttgcacttaaacagaca

SEQ ID NO: 986394 - DNA, 120 bp, Artificial Sequence
  ENSG00000260228_3 (sequence is synthesized)
ggcagtatgctttctctgtgtggagaccaaggtctgttaaagggctgcttttcacggaagcttcactaatttatactcatggctgacatactcaccttgtggggctgacacaccgaacct

SEQ ID NO: 986395 - DNA, 120 bp, Artificial Sequence
  ENSG00000260228_4 (sequence is synthesized)
aactgaatattgtcccattaacaaaactaatgtattacgtgtaaggcaccagtaattaacctttaaacttcggttttgaacaactctcatttttaacctttatttaagtgtcatagttgt

SEQ ID NO: 986396 - DNA, 120 bp, Artificial Sequence
  ENSG00000260228_5 (sequence is synthesized)
cttacctcctcttggcattttttttttaaagctcttcctagattaattgcatgttgtaactccctttttccattcaagacagttttgttttacgtgcgcttattatggtacttttataat

SEQ ID NO: 986397 - DNA, 120 bp, Artificial Sequence
  ENSG00000260228_6 (sequence is synthesized)
tttacgtgcgcttattatggtacttttataattgctttttggttctctgggccattcttttgacatgcctcctttcttggatctgtactatgataggtggctgggcatggtggctcatgc

SEQ ID NO: 986398 - DNA, 72 bp, Artificial Sequence
  ENSG00000260228_7 (sequence is synthesized)
acttgagaccaggagttcaagaccagcctcgccaaggtggcgtgcacctgtaatcccaactattcaggaggc

SEQ ID NO: 986399 - DNA, 120 bp, Artificial Sequence
  ENSG00000260228_8 (sequence is synthesized)
aggcagaggttgcagtgagccgagatctatcccctgcactccatcctgggcaacagattgtgactctgtctcaaaaaacagtaataataaaatacactatggaaggtgttggtctgtcca

SEQ ID NO: 986400 - DNA, 120 bp, Artificial Sequence
  ENSG00000260228_9 (sequence is synthesized)
taataaaatacactatggaaggtgttggtctgtccatgtgaccacatgcaatgaggtgctttgtgcgtttgccttgtgtgagcagcgatggaatgatcctagcggggccttggaggaact

SEQ ID NO: 986401 - DNA, 120 bp, Artificial Sequence
  ENSG00000260228_10 (sequence is synthesized)
agcagctgctcccctggtttgctttcctcccaggttgcctcatgctgctgctgagcaaccttcacctgatgggcggtgccacagcaggagagtttcatacgcagaccttaagtagacata

SEQ ID NO: 986402 - DNA, 120 bp, Artificial Sequence
  ENSG00000260228_11 (sequence is synthesized)
ctggagtgcagtggcgcagtcatggctccctgtaacctcaacctctcagactccagcaatcctcctgcgacagcgaagttaatcttctggttcggttcacaaagtgcaggagagcctacc

SEQ ID NO: 986403 - DNA, 120 bp, Artificial Sequence
  ENSG00000260228_12 (sequence is synthesized)
ttctggttcggttcacaaagtgcaggagagcctaccagcttgagagaaaaggagtcatgctgtatttgtttccttgagtgaatggccactcagctgctgtgtttctccctgcatgtggct

SEQ ID NO: 986404 - DNA, 120 bp, Artificial Sequence
  ENSG00000260228_13 (sequence is synthesized)
gaagtttacattggagggtgacttcctgattgccagttagcatatgtgtccggctaccagccgcctgactggctgaggatgctctttgtttgttcaaggatgaacgttctccccctgcct

SEQ ID NO: 986405 - DNA, 120 bp, Artificial Sequence
  ENSG00000260228_14 (sequence is synthesized)
tgcaggaagaggggagcaaggtgcgcccgggagacgcgtgacagtgccctgtaaagccagtagaggaaatcttgtggagtgtgaatgcacaggcttagattcccctgtccctgagtcggg

SEQ ID NO: 986406 - DNA, 120 bp, Artificial Sequence
  ENSG00000260228_15 (sequence is synthesized)
ggcatgtgctcgtggagaatgaccctatcaagttcaaggtgtggcatctcctgatccagcaacaggatttgttccagagaaaaatccccaggtcttgggactgttgacagatggccatga

SEQ ID NO: 986407 - DNA, 120 bp, Artificial Sequence
  ENSG00000260228_16 (sequence is synthesized)
ctatgcttaatgtggtcatcaactgagaatggtccgtctcatctttgagtatgcaattacctttatagctgattatgacaccctcagatcatatcatgaggtggacaagatgagtccatg

SEQ ID NO: 986408 - DNA, 120 bp, Artificial Sequence
  ENSG00000260228_17 (sequence is synthesized)
gcccatgctgagaactggtacttctgtcttcatagactcactcaccaaccagagatgtacgacggaccccaaatggtctgtcaaaaatgtgaacttgcactaagacaagacccaacatca

SEQ ID NO: 986409 - DNA, 120 bp, Artificial Sequence
  ENSG00000260228_18 (sequence is synthesized)
gtgacattggacacaagatagaaatcagagaacagttactgtccagcagttttaaccaccaatacccatttattttaatggaaaaaaaaatctctgcattctatatgttccaaaaggatt

SEQ ID NO: 986410 - DNA, 120 bp, Artificial Sequence
  ENSG00000260228_19 (sequence is synthesized)
taccattgaaacaaatacaatatatggaactctatctgtataatttcactacaacaaagacaacatatgacttctacttcctacagaaggctaactgaaagcacaagtgcaaacatagat

SEQ ID NO: 986411 - DNA, 120 bp, Artificial Sequence
  ENSG00000260228_20 (sequence is synthesized)
tgcataagaaagcgtgtgtgtgtgcatgtgcggttaaaacctttagtaagcaactgcattaaaatatgctaagacactcaccttaccctagttcgtggcgagctctaataaaaagccaca

SEQ ID NO: 986412 - DNA, 120 bp, Artificial Sequence
  ENSG00000260228_21 (sequence is synthesized)
agaaaggaaggacttattgtcttagttacttgatccacttccttacctcctgttcatgcaactttgcttgttttgcttctactaaaatggttctaggtgctgtgtggacaggtgatacaa

SEQ ID NO: 986413 - DNA, 120 bp, Artificial Sequence
  ENSG00000260228_22 (sequence is synthesized)
aagcctgactcacacggttgacattcattcattccattttcatttctctttgagtgatcctgacaagcagagggtctcaggtggatattactgtgtctttgagacctctctaatccttat

SEQ ID NO: 986414 - DNA, 120 bp, Artificial Sequence
  ENSG00000260228_23 (sequence is synthesized)
gctggagtgcagtggcgcagtcatggctccctgtaacctcaacctctcagactccagcaatcctcctgcgacagggaggcagtcaatggtgaatgctggcctcgctgattactcacctgg

SEQ ID NO: 986415 - DNA, 120 bp, Artificial Sequence
  ENSG00000260228_24 (sequence is synthesized)
aacagccccacacatcagcatgtttggttgctgccagtctacttggatctgagtattttttcttgccatgaatgtgacgtgattatcttctcctacatcacactgaagttttatgaatga

SEQ ID NO: 986416 - DNA, 120 bp, Artificial Sequence
  ENSG00000260228_25 (sequence is synthesized)
atgccccgcccctcacgcagcgcgccgtcagtggggtggaaagtgagaccaactcagaaatggagcaatagaggcagggagtggtcttggcctctcttccaggctgtagtcagtcgaaag

SEQ ID NO: 986417 - DNA, 120 bp, Artificial Sequence
  ENSG00000260228_26 (sequence is synthesized)
acggctctggggtttctttggcctgtcgggacgaacttacagaacttttgcccttcaacaagccccactgtacccttgtaactgcccccaagccaaggaacatgacccacccctacccgc

SEQ ID NO: 986418 - DNA, 120 bp, Artificial Sequence
  ENSG00000260228_27 (sequence is synthesized)
cccgggagccccatggctcctgtcctgttctgtcatctccaccctatgaaggtggccagcgtctggagtttagcccaatggagtcttgctgtgttgcctaggctggagtgcagtggcacc

SEQ ID NO: 986419 - DNA, 120 bp, Artificial Sequence
  ENSG00000260228_28 (sequence is synthesized)
gatgattcatttatggtttatcaacaagaaggtaatcttagaacaagcactaactttccgcttttacatgctcacagaatacaaatcagttacttttcatacataatgaacgtcttttat

SEQ ID NO: 986420 - DNA, 120 bp, Artificial Sequence
  ENSG00000260228_29 (sequence is synthesized)
tttcgggtttgcaaacaacggtagtcaattcacacaaaagggtacttttaaaactacctgtatttactctattttatgcctgtatatatgaaacaaacagcgtgaatgtgcataaatgta

SEQ ID NO: 986421 - DNA, 120 bp, Artificial Sequence
  ENSG00000260228_30 (sequence is synthesized)
tgtctgtacatgtgggtatatatgtgtatacaagatggtacctgtacacctctttgtatgcatgtatgacctccatgatgacaggtgcagttgtacatttactgaggagggagagattct

SEQ ID NO: 986422 - DNA, 120 bp, Artificial Sequence
  ENSG00000260228_31 (sequence is synthesized)
ctaccatgatctgtgtccccattagaatcagtacgactgtggattcgggacacatacaaatgcaggttggtgcccatgaaagaaaatgtcagcccttttcttggcatttggtggtgaaat

SEQ ID NO: 986423 - DNA, 120 bp, Artificial Sequence
  ENSG00000260228_32 (sequence is synthesized)
tgcctgctctgctcctcacctccttggctcaggatcacggcatcagatggcagtgtaaattggttgtagtcctcgaactcaataaagagaaaggacttctttctctgctctccctctctg

SEQ ID NO: 986424 - DNA, 120 bp, Artificial Sequence
  ENSG00000260228_33 (sequence is synthesized)
tggacctgcctggctggttgtggcagcattcagactgaacgggacagtggagaagtagcttcggagcaaaagtgacagctctgtggtctgtcctcatgctgaccttgatgcgggaggccc

SEQ ID NO: 986425 - DNA, 120 bp, Artificial Sequence
  ENSG00000260228_34 (sequence is synthesized)
tggagggttcaggtgtcttagtttccacccaccttgcttaaccttgcaaggaagaatggcatcaaaacgaggcttctccaggatagtctctctctataaataccgtgtatatatacatac

SEQ ID NO: 986426 - DNA, 120 bp, Artificial Sequence
  ENSG00000260228_35 (sequence is synthesized)
agatactcatacatacaccaatactaacccacagacaaagctgggtgcctggagcactggctagcgacatgttaacacaccagaaaaagtagtcattgttcctgctcccagaagatcaag

SEQ ID NO: 986427 - DNA, 120 bp, Artificial Sequence
  ENSG00000260228_36 (sequence is synthesized)
tcatatgtcatgatctttaaacattcagggaaaattcagaagattccattaattaaaggagggaggaagatgctgtcaaaatgatgaagtacagactaagtgaaattgtaaagaaaataa

SEQ ID NO: 986428 - DNA, 120 bp, Artificial Sequence
  ENSG00000260228_37 (sequence is synthesized)
aaaaccggaacaattgaggcctagttgtgaagttcgatagctgtaaaccgcaatcttcagatttggatagatttttttttttcctgttgctatggaaacttgggagtcaagcttcagacg

SEQ ID NO: 986429 - DNA, 120 bp, Artificial Sequence
  ENSG00000260228_38 (sequence is synthesized)
tcaggagttctcacagacctgaatagagagggttcagagttaagtcgggaatatcaccactcaattcaaaacattttagctaaaagccagaaaaatgacaggcaaggtataataaacaca

SEQ ID NO: 986430 - DNA, 120 bp, Artificial Sequence
  ENSG00000260228_39 (sequence is synthesized)
attgttggtggtggagggggcaccctgtatattgtaggacgttgggcagcatctctgacttctacctactagatgccagtatctcagttttcttaaaagacttttttttttttttttttt

SEQ ID NO: 986431 - DNA, 120 bp, Artificial Sequence
  ENSG00000226296_0 (sequence is synthesized)
tcagattaaatggaaccctatggcaatgttttattctgagcataaatatgtgtgcaacctgttgaaaggaggagttaattctctgaagatatacagactgctgagaagtgaacaaaatgt

SEQ ID NO: 986432 - DNA, 120 bp, Artificial Sequence
  ENSG00000226296_1 (sequence is synthesized)
atcaaggctgcagataaaaatataattgtgaataagaaaacaagcagcttatatcctggatattttaaatgaagccaatgagaatataaatttaaaattacacatctctagactgcctaa

SEQ ID NO: 986433 - DNA, 120 bp, Artificial Sequence
  ENSG00000226296_2 (sequence is synthesized)
cctgtgttcgatcgatagaaaatcattttttatctcttttttattttgttttactctagtctgtgtatttttaatttacaatatatatacatttataaatttataatttcacccatgagg

SEQ ID NO: 986434 - DNA, 120 bp, Artificial Sequence
  ENSG00000226296_3 (sequence is synthesized)
gagggggaaaatactgtaactagctatgtcctttaagtggtgttgatttttcaagtggacacatcatctcgtttccaaaaatagtgatttccatctaataaaaattctaattctctccta

SEQ ID NO: 986435 - DNA, 120 bp, Artificial Sequence
  ENSG00000258675_0 (sequence is synthesized)
agacgggctctgccatcaacctgcagctcctcctgagctgcggctcttcccgctctgcccccaacacaaggagagccccgacttgggaggagggcttttcagatcgcagcttggcctgag

SEQ ID NO: 986436 - DNA, 120 bp, Artificial Sequence
  ENSG00000258675_1 (sequence is synthesized)
gcagagccagagcgatgaggtcacccagcacagctgctaactatttcaaggaaacagaaccgtggtctcagccctggctgcatattccttcaacgggagggctttagaaatgctgtgcca

SEQ ID NO: 986437 - DNA, 120 bp, Artificial Sequence
  ENSG00000258675_2 (sequence is synthesized)
agctttcaggaaaactgagcaaaatgaaagccaattcaaagaagaaggaattaagtacataattgtgcagatgatacatggaaatggtaagaatggtgacaatgggacgtaagtgactga

SEQ ID NO: 986438 - DNA, 120 bp, Artificial Sequence
  ENSG00000258675_3 (sequence is synthesized)
aatttgggatacattggattagaagaaaataagcccccaagaaaccggaataagtctggagggcagcaagagtgactgtccagctaagaacctcatcagcaatacaaaacattgtcacag

SEQ ID NO: 986439 - DNA, 120 bp, Artificial Sequence
  ENSG00000258675_4 (sequence is synthesized)
atgttgaaacagaccctgaggttaatgcattctttccaacattaggtcctaaaacttctcctgaaaagctaccttaaatctaacttttgaaagtgcacaataaaggtgaattaaataaaa

SEQ ID NO: 986440 - DNA, 120 bp, Artificial Sequence
  ENSG00000258675_5 (sequence is synthesized)
gcgtccttgaagcccagccatggatgtccctgtggttgggaaaggggagctcagggtaatggagtatcctcaagaacctgcagatattacctccctccagaaccgtggtctcagccctgg

SEQ ID NO: 986441 - DNA, 120 bp, Artificial Sequence
  ENSG00000258672_0 (sequence is synthesized)
aagttaccacttcccaacttatcctatgagagtcaccacagccaccctccattgcagagaattgccccacacatctgctgcgcacccatggactcgtgacgatgactgaggttttgtgga

SEQ ID NO: 986442 - DNA, 120 bp, Artificial Sequence
  ENSG00000258672_1 (sequence is synthesized)
agacgttgacccgcacaacaggtccatacttcttagccctggaaaccaaagtgacccgaaggaaactgtcaaccacctgaggtatgaccatcaccaaccccgcccagctgagaaaccgat

SEQ ID NO: 986443 - DNA, 120 bp, Artificial Sequence
  ENSG00000258672_2 (sequence is synthesized)
gaaggtgctcaatgcatgctaccaaaagagtgctgtcctggggcccaggagccctgggggcaaggctctgccctgttgctcacttgccgagtcatgtcccccagcaggcctcagtttcca

SEQ ID NO: 986444 - DNA, 120 bp, Artificial Sequence
  ENSG00000258672_3 (sequence is synthesized)
cagccatggaatagggttggaaacactccttctttgattgtcccaaaaggttgtcctgggaatcaaatgattcgcatctttgaaagtactttgaaaaatgtaaaaaagtgacacaccaaa

SEQ ID NO: 986445 - DNA, 120 bp, Artificial Sequence
  ENSG00000258670_0 (sequence is synthesized)
gacgggaaggcagcggcggggaggccccctggaggcctgctgggaaatggcggctggagcggcgggcgcgtgggtcccctcggggaggcgccccaagccacggtccgctcccaaagagaa

SEQ ID NO: 986446 - DNA, 120 bp, Artificial Sequence
  ENSG00000258670_1 (sequence is synthesized)
gaggcgccccaagccacggtccgctcccaaagagaagcccagactgggcccacagtacccgggaagggcaggaaccagacagaaatggatggccgcttgttggtgaaggactcacagtga

SEQ ID NO: 986447 - DNA, 120 bp, Artificial Sequence
  ENSG00000258670_2 (sequence is synthesized)
ggcaaggaagatctcttcttcatcatgttccccgtcactgacttcatcatgttcaccgtcactgatttcccttaactctatgcctgatcagaacccacaaaccaaggagacacacctggt

SEQ ID NO: 986448 - DNA, 120 bp, Artificial Sequence
  ENSG00000258670_3 (sequence is synthesized)
tgaatttcacctcagcattctatatagaagatttgtatttttttcaatcacatgccctaatgtaaatttcatgcattcaagacagttgattggtttccaaaaaattaaatacagaattgc

SEQ ID NO: 986449 - DNA, 120 bp, Artificial Sequence
  ENSG00000258670_4 (sequence is synthesized)
caaatacataatataacaattccacttaaagaagagaatttaacagatctttgaacactaatgttcacagcaacattcatggcagctaaaaggtagaaacaacccaagtatcatcaatag

SEQ ID NO: 986450 - DNA, 120 bp, Artificial Sequence
  ENSG00000258670_5 (sequence is synthesized)
atgaatagacaaataaaacatggtgtagaggatatggagaaaagggaacccctgtacactgttggggggaatgtaaattagtacaaccactatgaaaaacagtttggaggttcctcaaaa

SEQ ID NO: 986451 - DNA, 120 bp, Artificial Sequence
  ENSG00000258678_0 (sequence is synthesized)
gggttcgaatcctgactgtccccctcaccaggctctggggaggaaagggagcccatggcagaccagacccctggccggccagggtccccggggtctgcgaggaggacgttcatgggcgag

SEQ ID NO: 986452 - DNA, 120 bp, Artificial Sequence
  ENSG00000258678_1 (sequence is synthesized)
tgtgtggtggtgggtgaactgcggcagaacccgagattaacagctggaaccctctcctcttgcaggtctgggtgaaaagcgtgggaccctcagcccagagccgcacaagacttggatttg

SEQ ID NO: 986453 - DNA, 120 bp, Artificial Sequence
  ENSG00000258678_2 (sequence is synthesized)
ctttggaaaccactgtgcttttcaacaagatcgttcaaatggcctgggtggagacggggagctggagagttggggatggaagccgattttaagcctggaggaatccaaactgcacacagt

SEQ ID NO: 986454 - DNA, 120 bp, Artificial Sequence
  ENSG00000258678_3 (sequence is synthesized)
agtccaaggccctgccccgcctccgtccaccaccatcctccccccgcacccccgccatgaggtccatgactgtatcctcatttcacagatgaggagacaggcacagagcagcagccatgg

SEQ ID NO: 986455 - DNA, 120 bp, Artificial Sequence
  ENSG00000258678_4 (sequence is synthesized)
ggcgcgcatggctgagaagcaggttccaggagtttctgggagttcttgctcaacatcaagaaacttccaccaggatccacggggggaagtggaagcagccttgtgatagcagtttcaaag

SEQ ID NO: 986456 - DNA, 120 bp, Artificial Sequence
  ENSG00000258678_5 (sequence is synthesized)
gcctgggctctggcaaataggaaaaaacaggctgagaaaacatatcaggcaggcctgcttgtgagggaacctggcagacatccaaccagcagtctggtggccaattcggtacatcagaca

SEQ ID NO: 986457 - DNA, 120 bp, Artificial Sequence
  ENSG00000258678_6 (sequence is synthesized)
tgcgcttaatccatcattcggcagcgggcaggtcactggccacacaggcttcagacctcctggcttgagggaacttggggttgccatcaggcccgtatgaatcagaaattctgggcttct

SEQ ID NO: 986458 - DNA, 120 bp, Artificial Sequence
  ENSG00000258678_7 (sequence is synthesized)
catcccccaccaggcactcccacactgtccctcctctgcatgtttgcctctccattctctctaccttcactgtctcggttgcctatggtcacagtgatactcaataaaccaccaaatcca

SEQ ID NO: 986459 - DNA, 120 bp, Artificial Sequence
  ENSG00000258678_8 (sequence is synthesized)
agggaaatcaagggtgtttgagtgactgaccgaaagtcacacagctaggaagtaaaggagccaggatacaggcccagagctctggttttatctgaaaccaaaaccagaagttcctcttcc

SEQ ID NO: 986460 - DNA, 120 bp, Artificial Sequence
  ENSG00000258678_9 (sequence is synthesized)
agctgcccaccacctctctgagtatcagccctgctaatgacaatgataacatcagctctgcagcatcgttctaagcactgtacgttaatgcgatcagttaataaaagcatcttgccttaa

SEQ ID NO: 986461 - DNA, 120 bp, Artificial Sequence
  ENSG00000256943_0 (sequence is synthesized)
agccagcaagaccaagaggagcacggagagctggcaagacgctggcccgatgatatcgcctgagccgtgaatcctcctggccaacgccagggcttcctcaggctttgtcattgcagggac

SEQ ID NO: 986462 - DNA, 120 bp, Artificial Sequence
  ENSG00000256943_1 (sequence is synthesized)
acttccctccctccctccttctctgtctctctccccactgcctctctttctagcttaagccaatttgagatggattttctgtcacttgctgttgaaggagtcctggtccagcccaggtgg

SEQ ID NO: 986463 - DNA, 120 bp, Artificial Sequence
  ENSG00000256943_2 (sequence is synthesized)
atttcgtgcaaatgaaacccacataatgcaagtctgtgtggaagtgatcgtctgcgatcggcgcgtgcccttcgccttatgaacaggagccatgggtgacacgagcgcctcggctgggcc

SEQ ID NO: 986464 - DNA, 120 bp, Artificial Sequence
  ENSG00000256943_3 (sequence is synthesized)
gccggggtccgtctgaggtccatctgtctccagggcacagaccccaggcctggacagagccgggcacgtgtgaaacgggaagatgtcagctggggaaccggccgcagctcccaaccttga

SEQ ID NO: 986465 - DNA, 120 bp, Artificial Sequence
  ENSG00000256943_4 (sequence is synthesized)
tgaggaaagaaacctggtagctgttcctgcagaaaagccacatggctcgccgcctatctccacgatggtacctggcttctcccatcctcaccgtccacgtctactcccttcccatcccag

SEQ ID NO: 986466 - DNA, 120 bp, Artificial Sequence
  ENSG00000256943_5 (sequence is synthesized)
acccgagacgcagaaggctttagacagagcagcttcatcaggaatctggactgggctgaggtacctgctcccagctcctcaaagtgccatccggcacatccacccacgtgggacaagatg

SEQ ID NO: 986467 - DNA, 120 bp, Artificial Sequence
  ENSG00000256943_6 (sequence is synthesized)
cagcttccgtggctgcttgcaggggatggaagactcccacagacgcctgctaacatcacatgcccaagtgtcaccgcgatgccacgtccagtctgagccattcctcgcccatgtccctgt

SEQ ID NO: 986468 - DNA, 120 bp, Artificial Sequence
  ENSG00000256943_7 (sequence is synthesized)
cactggggcagacctgctggggggttctgggttgcagctggagcgctgggactggcaggacgcctctcttcgtgctgccccagggcccatccacgtcgactcccggcgtgaagcgtgtgg

SEQ ID NO: 986469 - DNA, 120 bp, Artificial Sequence
  ENSG00000256943_8 (sequence is synthesized)
gctgcctcacagcctggcagctccaggactgctgggggctccccccgcggccccggctctgctggcagcactgggccagaagcaactcaccttcacacagccgccctgaaggcacgtagg

SEQ ID NO: 986470 - DNA, 120 bp, Artificial Sequence
  ENSG00000256943_9 (sequence is synthesized)
ttccggaagggaaccttgggaaatgggattcgtgccatactcatgggagtcccaagctccctcgcccatttcactccatgaggataggaggggacagctgctgacgacctggcagagacc

SEQ ID NO: 986471 - DNA, 120 bp, Artificial Sequence
  ENSG00000256943_10 (sequence is synthesized)
ctgcgccaggccccaccccaccggcaccctgatcttgcacttccggcctcgagaatggtgagaaactcctcgtgttgtttataagccacccggtcagtggccctctgaccagggccagca

SEQ ID NO: 986472 - DNA, 120 bp, Artificial Sequence
  ENSG00000256943_11 (sequence is synthesized)
gctctgaggccctccccccgccccggccccctccccctcactcccacacccaccctctctggtttttctaaactcctcctccccattctaacccctctctctggcccctgcgggctctgg

SEQ ID NO: 986473 - DNA, 120 bp, Artificial Sequence
  ENSG00000256943_12 (sequence is synthesized)
ggaagccccggggacagtaggcaggggccaggctgctgggctccccgaggcccccgggggctgggagtgggttaaagccgtccagggcttcgctagggaggggctccagcaagaccctgt

SEQ ID NO: 986474 - DNA, 120 bp, Artificial Sequence
  ENSG00000256943_13 (sequence is synthesized)
ttaaacctccttcccaccacagcgtgggcgccacgtcgcactctctgggtatgtctcaaggtgtggataatgcagacttctgagtttaaaaaaataccaaaaataaaataatcaggcatc

SEQ ID NO: 986475 - DNA, 120 bp, Artificial Sequence
  ENSG00000256940_0 (sequence is synthesized)
cacacccccttaaagggccagcccctctacaggcccctctcccctactccgcccccgggcaggggtaggggagggtctattcggcagggggtggcctagctgtccgtactccccaaacgc

SEQ ID NO: 986476 - DNA, 120 bp, Artificial Sequence
  ENSG00000256940_1 (sequence is synthesized)
aaccttccagtcccaaacccaggcgttctaagcgctcaggacgacgatttgcgctcacgccaggaccctagtcttcattggacccttcctcattctgtcctcattgaggccatctgagaa

SEQ ID NO: 986477 - DNA, 120 bp, Artificial Sequence
  ENSG00000256940_2 (sequence is synthesized)
tgcgccgacctggtctgctggtgctaccaggcttgaacagtcttcaaatccactgctattaggcaaattacctggctcccgctgaactccagcacctagaactatgtcacactcgtagta

SEQ ID NO: 986478 - DNA, 120 bp, Artificial Sequence
  ENSG00000256940_3 (sequence is synthesized)
ggccgctgcattggttgaacaaatgattttgaaagaatgaatgtcttcctctgtgcctgcatttcctcagaaggctgtaacaaagattaaataggaaaattcgtggaaagttcaattact

SEQ ID NO: 986479 - DNA, 120 bp, Artificial Sequence
  ENSG00000256940_4 (sequence is synthesized)
gaaagcgggctagcctgcacgcacgccaagatggagctccaggctagcccacagaacagcccagccgcagccgtcctaccagaccagcaccttgtaaccacagtctaacccagcgggcac

SEQ ID NO: 986480 - DNA, 120 bp, Artificial Sequence
  ENSG00000256947_0 (sequence is synthesized)
ccaggctggagtgcagagtgagactccatctttaaaacaaaacaaaaaaaaaatcaacatatcatctgaatagttaaatctccaagacagccagaaactaggctagtttcagaggagaaa

SEQ ID NO: 986481 - DNA, 120 bp, Artificial Sequence
  ENSG00000256947_1 (sequence is synthesized)
ggagaaagagtttttacatccaactcacaaattttgaaccccactgtggtataagattctcatctctgtcctttaacccaccttagaccccaagagccctggcagtgaacaccaggcctg

SEQ ID NO: 986482 - DNA, 120 bp, Artificial Sequence
  ENSG00000256947_2 (sequence is synthesized)
ggatgtctctaaggtaatgatggccttccaaaattttgctcttgctctgggaagtttaccaagattctaaactagccccggcaaacagggaagtgggggtgaggagaagaagacagacgc

SEQ ID NO: 986483 - DNA, 120 bp, Artificial Sequence
  ENSG00000256944_0 (sequence is synthesized)
ccgagagaagaatgggatcggaagttccagcagggaacggaagtctctggctggaaaggggaaataagtgactatatctgggctgtagagtggttgaatgttgccttttcctaagccacc

SEQ ID NO: 986484 - DNA, 120 bp, Artificial Sequence
  ENSG00000256944_1 (sequence is synthesized)
tcatctggcagagaggagaagcagctggatgaggggacgaccatggctggatgtcagagagaagcagcttgtcttcagagggacagcttaaggcgtaacttctgagacgaatctggctgg

SEQ ID NO: 986485 - DNA, 120 bp, Artificial Sequence
  ENSG00000256944_2 (sequence is synthesized)
agatagctggacttcaagggaagactacataccggcctgtcccacccccctcttttcagctcaccttccctctgaaatccactttgatcagcaataaaatcccaggcatttgtcctttaa

SEQ ID NO: 986486 - DNA, 120 bp, Artificial Sequence
  ENSG00000256948_0 (sequence is synthesized)
tgagtctgtttctcacaacctggtggcccatatggggatttccatgcctgcatggagtgagactccagctgacaggggagatgtgtcccactcgatttgtgtggcccactctgtccaggt

SEQ ID NO: 986487 - DNA, 120 bp, Artificial Sequence
  ENSG00000256948_1 (sequence is synthesized)
gtctcagctccccgaagaagccatagacaaacctgaaactgttattcaggagacaactaaagtgacacagggagaaaagcaggcaaccaggcaacctcacgcatgagccaagatacaaaa

SEQ ID NO: 986488 - DNA, 120 bp, Artificial Sequence
  ENSG00000256948_2 (sequence is synthesized)
ctacgcctacaaaggttactcttcctggaagtgagaaaagaagatacaaaagattccaacaagaagcttccagtaaatgaaacaagaacatatttcccagaaaactggataaaactgcat

SEQ ID NO: 986489 - DNA, 120 bp, Artificial Sequence
  ENSG00000256948_3 (sequence is synthesized)
taccgaataccctggactagagaaagcttagatgttcctcgtggcatctctcacttgttctggaagtattatctttagttaggggtatttccttaactaataaagcctagcattgctgtt

SEQ ID NO: 986490 - DNA, 120 bp, Artificial Sequence
  ENSG00000266947_0 (sequence is synthesized)
acgtggagccggaagcccactcttgcaactacaacagtcttggtaaaccttgggtggactggggagaactgaggaggggaagcgcttttttgttgcttctctgtgttttctattttattt

SEQ ID NO: 986491 - DNA, 120 bp, Artificial Sequence
  ENSG00000266947_1 (sequence is synthesized)
tatttattttatttttagattttcagttcttatttcacccagggaaggagacctgggtatccaccccatgtcctccagagaacttccctggccccgctcggagtcttcctgggacgccac

SEQ ID NO: 986492 - DNA, 120 bp, Artificial Sequence
  ENSG00000266947_2 (sequence is synthesized)
aggctcggagagcgctccgcaggtttctcccccggcgcctccaaatctttcgattcctactcgaattactccgtcagctgctggaagaggggcaaggggtatggcgagacgcgttggtac

SEQ ID NO: 986493 - DNA, 120 bp, Artificial Sequence
  ENSG00000266947_3 (sequence is synthesized)
atggggcactggggggaagggaaagcctccctccttctcctagtaattcgagaatgttgcgtccgcctcctttcttttgctggcgctaggggctcggaccagcacctgccaggcataggt

SEQ ID NO: 986494 - DNA, 120 bp, Artificial Sequence
  ENSG00000266947_4 (sequence is synthesized)
gtggccactggggcgaaacctggcaggctctggaaacagcgttttactgacaggaaagagaaactgttctttgtattcatcacccaccgcagacttcctcacgcccgggtcttaggcggg

SEQ ID NO: 986495 - DNA, 120 bp, Artificial Sequence
  ENSG00000266947_5 (sequence is synthesized)
gctgtcagatttcagtgtgtttctcttaattctagtactaaatttgtactgggcgctggcgaagggcctggctccgccacgcgcggccctctcgaactgcccgtgggtacggcgcgcgct

SEQ ID NO: 986496 - DNA, 120 bp, Artificial Sequence
  ENSG00000266947_6 (sequence is synthesized)
gctgccctgtgtggcctgtgcggggaacccgagggccgaagtgggccccgccgcagcacagggggacaagagaaccaggagcgggctgcctgggggcagattcgaacccgtgctcccagc

SEQ ID NO: 986497 - DNA, 120 bp, Artificial Sequence
  ENSG00000266947_7 (sequence is synthesized)
ggatagaagtagcacttggggactcctaaaatattcagcccaatcctgattccagctgccctctctaggcacctttcctctacccttcttccagtttacaattctggtgagtagatgttt

SEQ ID NO: 986498 - DNA, 120 bp, Artificial Sequence
  ENSG00000266947_8 (sequence is synthesized)
ctctatctcttctcttccaactcctgcgcccagagccaggaggacttctggagcccgcccagcaagaccctctctctcccatcttctgctcaagggctcgaggtctcagtggacagagct

SEQ ID NO: 986499 - DNA, 120 bp, Artificial Sequence
  ENSG00000266947_9 (sequence is synthesized)
gaagaaaagccgtctatggagcctgcgccaggcgcagactgggtcgtcgcagtctgggtcgtcgcagtctgggccggggcgctggaagtcttactcacttctcaagaacccgcaagggat

SEQ ID NO: 986500 - DNA, 120 bp, Artificial Sequence
  ENSG00000266947_10 (sequence is synthesized)
caggcctgaccctttgcaagtgacagaatccaaagctttgagctcatgggaaagtggctggaaagaaggtcactgtagggccgcacaggtctctggcgaggctacccaagaacatttaaa

SEQ ID NO: 986501 - DNA, 120 bp, Artificial Sequence
  ENSG00000266947_11 (sequence is synthesized)
gaggctccagctgtcctgcaccttcctgggaactggcagtccctccgcgcaggggttctgcagcgaccggcagcgcgaggagacaaggatggtggccagttaacagaaaatcaaggcagc

SEQ ID NO: 986502 - DNA, 120 bp, Artificial Sequence
  ENSG00000266947_12 (sequence is synthesized)
agaaaatcaaggcagcgggaaagggaggaatggcctacaggggccatgcaggggctgcatggaggaattggtcagtacacacagaagtggatggcactgggccaggcacagtggctcaca

SEQ ID NO: 986503 - DNA, 80 bp, Artificial Sequence
  ENSG00000266947_13 (sequence is synthesized)
gcactttgggaagctgaggtgggtggatcgcctgagcccaggagttcgagaccagtcaagacaacatgacaaaactccac

SEQ ID NO: 986504 - DNA, 120 bp, Artificial Sequence
  ENSG00000266947_14 (sequence is synthesized)
taaataaataaataagaagtggactgctgtggtgtgagaatgcacctgacagacctccaattatggagagcttacacagccaagggccccaactgctgctctctgaaactcatcctgctt

SEQ ID NO: 986505 - DNA, 120 bp, Artificial Sequence
  ENSG00000266947_15 (sequence is synthesized)
ttgtgctgaggccacacttcccacaggctgctccagccagtgaccaagcacagcatggacactaagacaggcccattctgggagacgtgggactcctctgatggccaactttgacttggg

SEQ ID NO: 986506 - DNA, 120 bp, Artificial Sequence
  ENSG00000266947_16 (sequence is synthesized)
gactccctgatggccttgccaaacctttttgataaagcactttggtctaggaagcttctacccgaccttccttcctctctccttcactcagggtcagacttataatgtgatctgacagtt

SEQ ID NO: 986507 - DNA, 120 bp, Artificial Sequence
  ENSG00000266947_17 (sequence is synthesized)
cccccagcatttcctggctctttctcctttcctttcacaggtgtttctcctgagaaaattcttgcatgtttaaacccaatttgagggattattgggaaaattattgggaccactattgga

SEQ ID NO: 986508 - DNA, 120 bp, Artificial Sequence
  ENSG00000266947_18 (sequence is synthesized)
acagttgacaaactgtcactgggggtgtgtagattaaatgtcagtatcgtataaatccatgttaatttcctggtagtgatgacagcactgtgattatataggagtgtgtccttggtgttt

SEQ ID NO: 986509 - DNA, 120 bp, Artificial Sequence
  ENSG00000266947_19 (sequence is synthesized)
tataggagtgtgtccttggtgtttgggaattacatggtgaaatgtttaggataatggggcaacttactttcaaacggttccccaaaaattctagatagatagatagatagatagacagac

SEQ ID NO: 986510 - DNA, 120 bp, Artificial Sequence
  ENSG00000266947_20 (sequence is synthesized)
tgagaatggtaaaacaaatatatataatgttttgtggggagaatgaataggagttttttgtagtattcttacgacttttccataagtttgaaattatcaaaaataaaaaatgtttaaaac

SEQ ID NO: 986511 - DNA, 120 bp, Artificial Sequence
  ENSG00000266947_21 (sequence is synthesized)
cacaggatcagacttgcatcattgtctgacagctctctcatctttcattgactcccaactctcagcaacatggaaatgcccaaattcccctgacatatggtagaggaagaaataaagagt

SEQ ID NO: 986512 - DNA, 120 bp, Artificial Sequence
  ENSG00000244464_0 (sequence is synthesized)
ggggaagttgaacgtcagtgtgcaattctaacaggtcttagccagtccttcaagagcccaggagctagaatggctcttccaagttttccagaattgagacaaaaaggccaggtcttcgta

SEQ ID NO: 986513 - DNA, 120 bp, Artificial Sequence
  ENSG00000244464_1 (sequence is synthesized)
catctgcatagaccagttctttgatgtgagctaactccagtaagagggtataaccttgagcaaagcagctccctttattctagagcaatctccaaagtggtactcagccatgaaatgtct

SEQ ID NO: 986514 - DNA, 120 bp, Artificial Sequence
  ENSG00000244464_2 (sequence is synthesized)
acagccaatacttctcgcaggtgtggaaatgcacgcttcagacctgaaggggcaacgcagaaggcataccacagcatccaccacatgcttccacaacaataaaaaatagtttggatatta

SEQ ID NO: 986515 - DNA, 120 bp, Artificial Sequence
  ENSG00000244464_3 (sequence is synthesized)
gtcctcagttgacccacatggatatattgttgtttctgtttctacagcaaaacctagccttccctgacatccaaatctccaaaggacaagttgtatgtgaaaatgcttctccttctgtcc

SEQ ID NO: 986516 - DNA, 120 bp, Artificial Sequence
  ENSG00000244464_4 (sequence is synthesized)
ttggacatcaaactccaggttcttcagcctttggactctgggagttgcaccagcatccccctaggggctctcgggccttcggcctcagactgagtgagggctgcactgtcagcttccctg

SEQ ID NO: 986517 - DNA, 120 bp, Artificial Sequence
  ENSG00000244464_5 (sequence is synthesized)
gttttgaggctttcagactttgactgagccattacctgcttctctctttccccagcttgcaggggacttcgccttgtaatcatgtgattcaattatccctaataaactcatatatatcct

SEQ ID NO: 986518 - DNA, 120 bp, Artificial Sequence
  ENSG00000244464_6 (sequence is synthesized)
ttaactagaacatgctaggccatgaggagctagaggagataaaatcagaaagagaactggaggtcagataatacaaacccttgaaatccagactagtctagaagatatattgcaggagga

SEQ ID NO: 986519 - DNA, 120 bp, Artificial Sequence
  ENSG00000244464_7 (sequence is synthesized)
aggtactacagatggaaaaaaacaattaggttggtaagcccaaagaaatgtgtcaggaaagaaacaaaaaacaaaaaaattctcagttaatatcagatattgaggcatggatgatgtctt

SEQ ID NO: 986520 - DNA, 120 bp, Artificial Sequence
  ENSG00000244464_8 (sequence is synthesized)
cattttgagatccaagcgacagggttgaaagtagataatgaggtcaaaacagagaggccactaggcaggaaatgccataaccaatcaggaagctgcttaaagcccatggctaggaggaaa

SEQ ID NO: 986521 - DNA, 120 bp, Artificial Sequence
  ENSG00000244464_9 (sequence is synthesized)
gttgtattagttttctcttgctgctatatcaaattattacaagcttggtggcttaaaacaacataaacattatcttacagggctgtaaattagcagtctgacatgcatctcactggctaa

SEQ ID NO: 986522 - DNA, 120 bp, Artificial Sequence
  ENSG00000244464_10 (sequence is synthesized)
ttctcaagactctagggagtaatccatttccttgcctcttctagtttcttaaggccacctgcattacttggctcatggaaccttttctccatctttaaagtcagcaaggcggaatctctc

SEQ ID NO: 986523 - DNA, 120 bp, Artificial Sequence
  ENSG00000244464_11 (sequence is synthesized)
tgaccgtcttcatttttgacaacttctttgactacagctaagaatggggtggagtggaaatattttgaagggataatggtgatgagattgtgtccatctggagaatcccagataaactcc

SEQ ID NO: 986524 - DNA, 120 bp, Artificial Sequence
  ENSG00000244464_12 (sequence is synthesized)
cactttaagacttataactcaatctcatctgcaaaggtaacatatgtatcaagggatctaagggttaggatgtggccacccttaggaggccattattctgcctgccatcatagccaagca

SEQ ID NO: 986525 - DNA, 120 bp, Artificial Sequence
  ENSG00000244464_13 (sequence is synthesized)
ttaggaatgaggaacacactcaaaatatcaagaaacaaaagtatggtactggacaggggaatgctcagttctaatgtattctgaactactgtgggtcagacctgtgtacaatggctcttg

SEQ ID NO: 986526 - DNA, 120 bp, Artificial Sequence
  ENSG00000244464_14 (sequence is synthesized)
tcttaaggcccgtaaagggcaagttcagtggtctaaatgagaagtgattcactggcctgaactctgccagtaatggggaatggaatattatagacagcagtgcccatggtgccctgagac

SEQ ID NO: 986527 - DNA, 120 bp, Artificial Sequence
  ENSG00000244464_15 (sequence is synthesized)
tgactattcctttgcctcaataagtgcaagctgaatgaatgaattgatgagtgagatgtcaatcaaataaacaggactgaacaacagtctggatacagaaggcagaaaaggggaaaggat

SEQ ID NO: 986528 - DNA, 120 bp, Artificial Sequence
  ENSG00000244464_16 (sequence is synthesized)
ttttagaaactttaacagtcaatgaagcagctaggagaggtacaaggctagatactaaaaaaaacatggaagagcgaaggatggaatttcttaactgagttctgaaagtggcacttcttt

SEQ ID NO: 986529 - DNA, 120 bp, Artificial Sequence
  ENSG00000244464_17 (sequence is synthesized)
cagaatttaatttattttacatagatgaagggaatacactgtcaaatagatataagctagagaaatgtaaaataattgtatgaattatacacttagaaaaggatcatcggccagatgttt

SEQ ID NO: 986530 - DNA, 120 bp, Artificial Sequence
  ENSG00000244464_18 (sequence is synthesized)
tgcaggaaaccaaaaactagacatagggaaactagacataaaaaaggattgagggaacttttaattaggagagtaagatcatttttaaatgcatttttatctgtgaataaatctgaatgg

SEQ ID NO: 986531 - DNA, 120 bp, Artificial Sequence
  ENSG00000244464_19 (sequence is synthesized)
ataagaccatgttttaattatgaaacaggagacttgggatggagcaagacagtggaatagaaggcactacaaattgctcccatccccacccaggacaccaatttaacaactatctacacc

SEQ ID NO: 986532 - DNA, 120 bp, Artificial Sequence
  ENSG00000244464_20 (sequence is synthesized)
ttcctggtgattaagagaatcctcccggatcatgcccaataccatcagggtaagtacgtttatgagtctgaaagaaccagtgtcactgaacatggggtggccactaaagcagatacagct

SEQ ID NO: 986533 - DNA, 120 bp, Artificial Sequence
  ENSG00000244464_21 (sequence is synthesized)
tagatcacaacatccaagttcctttgaatatctggaaagccttcccaagaaggacaggtacaaacaaatccagactgacaagactacaataaacacccaagtcttcaatgcccagacaca

SEQ ID NO: 986534 - DNA, 120 bp, Artificial Sequence
  ENSG00000244464_22 (sequence is synthesized)
gatgaaccatctacaagtatcagggccatccagggaaacatgacttcatcaaatgaactaagtaaggcaccagggatcactcctggagaaacagagataatgtgacctttcaaacagaga

SEQ ID NO: 986535 - DNA, 120 bp, Artificial Sequence
  ENSG00000244464_23 (sequence is synthesized)
aaattcaagataacacagagaaggaattcggaattctgtcagacaaacttaacaaagagactgaaataattttaaagaattatgaaacaatcgttttgaaagtgcctgccttagacctct

SEQ ID NO: 986536 - DNA, 120 bp, Artificial Sequence
  ENSG00000244464_24 (sequence is synthesized)
aatcgttttgaaagtgcctgccttagacctctgcagtggaggtatgctgcctttggattcattgactcagtaagatgtagtgaaaactgaaaactataataaatctcaactcctatgagc

SEQ ID NO: 986537 - DNA, 120 bp, Artificial Sequence
  ENSG00000244464_25 (sequence is synthesized)
agagattctaggaagggcacactaagagtcagcaaagagacgacattcctggattcctgacttgttgtccagatctgctactgaatcagattcagctgggtggcgagtgcggagtgggta

SEQ ID NO: 986538 - DNA, 120 bp, Artificial Sequence
  ENSG00000244464_26 (sequence is synthesized)
ctgctactggcatctggtgggtagaggccacggacactgcttaacattctacagtgcacaggagaggtccctacaacagagaaatattctcccgaaagtttcagtagtgctaagtttgag

SEQ ID NO: 986539 - DNA, 120 bp, Artificial Sequence
  ENSG00000244464_27 (sequence is synthesized)
taattctgctcttcaccatcaagtttccttctcttggagcctgctaccagccaatgacatcaggatctaacctgagacgaacctaggtgttctatacggcagcctggtgtactgaagagt

SEQ ID NO: 986540 - DNA, 120 bp, Artificial Sequence
  ENSG00000244464_28 (sequence is synthesized)
gcctaaggtttgcaagctcgctagctgtggctccccctctcgctagcttgagctagttatttaaacccttagagatgcctttctttaaattaaaaaaaaaataaataaatctgcacaata

SEQ ID NO: 986541 - DNA, 120 bp, Artificial Sequence
  ENSG00000228925_0 (sequence is synthesized)
agatctgaagatggggaggagagcagagcgtggtggcacggctggaattcagtggcaacatcgcagcttgccacagcctcaacctctcaggttcaagtgatcctcctacttcagcatcat

SEQ ID NO: 986542 - DNA, 120 bp, Artificial Sequence
  ENSG00000228925_1 (sequence is synthesized)
agctgggactacaggcatgcaccactgaaaatggaagtattaacaatgcctgccactgcctactcaagatgttgcaaagatccaacgagatctctaacctacttgaaagggcttcagaaa

SEQ ID NO: 986543 - DNA, 120 bp, Artificial Sequence
  ENSG00000228925_2 (sequence is synthesized)
gaaactttggagcaccatacagtatcacacaagccctcaattactgccacgtccctgaatcccttggtgtcaattcaccattaaacaacttctcccttgctctgcagtttgaatacggtc

SEQ ID NO: 986544 - DNA, 120 bp, Artificial Sequence
  ENSG00000228925_3 (sequence is synthesized)
tgtcttttaggcactgattctcatactctggtgtgtaacagaaatgcctgtagcacttaaagatacaaatgcccagccctgggacttctgcctcagcaagttatcctttgcgggaaggat

SEQ ID NO: 986545 - DNA, 88 bp, Artificial Sequence
  ENSG00000228925_4 (sequence is synthesized)
gggacttctgcctcagcaagttatcctttgcgggaaggatcgttggacagaaagaggcagaacacagaagagaaagaagcagcagcac

SEQ ID NO: 986546 - DNA, 89 bp, Artificial Sequence
  ENSG00000228925_5 (sequence is synthesized)
cgtagaactacgggcatgcactaccaggcctggctaattttttaatttttgttttgtttgttttgtagagacagggtctcactatattg

SEQ ID NO: 986547 - DNA, 120 bp, Artificial Sequence
  ENSG00000228925_6 (sequence is synthesized)
ctaattttttaatttttgttttgtttgttttgtagagacagggtctcactatattgccaaggctggtcttgaactcctggctcaagtgatccttccactttggcctcccaaagtgctggg

SEQ ID NO: 986548 - DNA, 120 bp, Artificial Sequence
  ENSG00000228925_7 (sequence is synthesized)
taaggacaacacaagtcaacaagactggggaccaaattaacaaagggaagcctttctgtgatacagtcccccaagccactgccagacctacctccttatggacatgagtgatggctgtgg

SEQ ID NO: 986549 - DNA, 120 bp, Artificial Sequence
  ENSG00000228925_8 (sequence is synthesized)
agagttctaagccatcaagcaaattattgccatcataatcatgcattttgaagtaatggagctgcaattcttgtggcgacatctccgcctctggtttgttgatgacaccttctagatgct

SEQ ID NO: 986550 - DNA, 120 bp, Artificial Sequence
  ENSG00000228925_9 (sequence is synthesized)
ccatgatatgcctaaaaatcaacagtcaggttcaggccaattgacagatactgggatcatgctgaaatcttaaggactctgaaaagttcaagatcttaaacttcctccagctcagaaaaa

SEQ ID NO: 986551 - DNA, 120 bp, Artificial Sequence
  ENSG00000228925_10 (sequence is synthesized)
caaacaccagcagtggcagaccacactcaaggattacacagagatagacaaggccttgagaggagcaggaaaagtcaaatagaccatctgttatgctggcaggattagggtattctttcc

SEQ ID NO: 986552 - DNA, 120 bp, Artificial Sequence
  ENSG00000228925_11 (sequence is synthesized)
atgctggcaggattagggtattctttcctctttattattagaattttgttataacattttcaggccatcaatttaaaaatatgtcctttaaaacttttttttttttttgagacagggtct

SEQ ID NO: 986553 - DNA, 120 bp, Artificial Sequence
  ENSG00000228925_12 (sequence is synthesized)
agcgtgatcttggctcattgtagcctcaacttcccaagctcagttgattctcccacttcagccccccaagtagctgggaccataggcatgtactgccacatccagctaattttttgcaat

SEQ ID NO: 986554 - DNA, 120 bp, Artificial Sequence
  ENSG00000228925_13 (sequence is synthesized)
cataggcatgtactgccacatccagctaattttttgcaattttttagtagagacaggttttccctatattgcctaggctggtctcgaattcctgggctcaagtaatccacctgcctcagc

SEQ ID NO: 986555 - DNA, 120 bp, Artificial Sequence
  ENSG00000228925_14 (sequence is synthesized)
cagccttaaaaacaaaggataaccgagtataatgcgtgaggctaactggcccaagacaaaagctgcaacaaatgattcaatgtttgaatgtgttgatttaaaaaaggtcttgttatagtc

SEQ ID NO: 986556 - DNA, 120 bp, Artificial Sequence
  ENSG00000228923_0 (sequence is synthesized)
aactcacttctttccaagcaggattcctgcagcaggaggtgctggctttcactttctgtggtcttggctgccagtgtccccagcaggacaggggtgtgccctgtcctgccatgggtgggg

SEQ ID NO: 986557 - DNA, 120 bp, Artificial Sequence
  ENSG00000228923_1 (sequence is synthesized)
agcagggggagttctggtgggtgtgcagctttagtctctgtcagcctgcacttgtctctcttgtcctcattcttgactaaatttcagttgaatttcttcttttttttttttctttgagac

SEQ ID NO: 986558 - DNA, 120 bp, Artificial Sequence
  ENSG00000228923_2 (sequence is synthesized)
ggagtaagacagaaaaaaaaaacagggaaaggcaatgcatgtgaaggtgctcacaacagcttacttacaataagggaaaagctgacagcgggggaagtgtctgagctaagcacattacag

SEQ ID NO: 986559 - DNA, 120 bp, Artificial Sequence
  ENSG00000228923_3 (sequence is synthesized)
cccacctcttccacaggttattgtacagccactataaagagtcatgatgaaggtaatgcaaagtgatgaaagcctgtgagcaagaaaaagacgtgttcaggctgtggtcagaactcttgg

SEQ ID NO: 986560 - DNA, 120 bp, Artificial Sequence
  ENSG00000283075_0 (sequence is synthesized)
gtgaattcacccttcctcagccttttgttctattcaagccctccatggattaagtgatgcttgctcactttgaggagggcaggtctgtactcagtctactgactcaaatgttaatctctt

SEQ ID NO: 986561 - DNA, 120 bp, Artificial Sequence
  ENSG00000283075_1 (sequence is synthesized)
gggaagatggtgtgggaggtgaggtgtgtctgtgagcagaagctgggtgggtctctgcatgaacatgtaggtacgggtgcaagcatgtgggagctgttggtggcaaaactcaacagaatc

SEQ ID NO: 986562 - DNA, 120 bp, Artificial Sequence
  ENSG00000283075_2 (sequence is synthesized)
aactcatatttaggaagtgaatcagatgtcccatcctctgagccctgtgacatttcatgatctggagcaataaaaaactctcagagcaagatgtataataaaaagctaaattttcaagta

SEQ ID NO: 986563 - DNA, 120 bp, Artificial Sequence
  ENSG00000283072_0 (sequence is synthesized)
agaccaggcttagtttgcttagtaagaaaggcaatatttttgttgaatttcacattttctaccaagtaacgaattaacctttttgaaatcgcagaggagatcacagcaggaaatgaagcc

SEQ ID NO: 986564 - DNA, 120 bp, Artificial Sequence
  ENSG00000283072_1 (sequence is synthesized)
atatcctgtacacgctggctaccacatatgaaccatcagagagatggagggcaatgtctggaagaaggacgggaagagggaatataagaacattcagtattaatggattccaaactccgt

SEQ ID NO: 986565 - DNA, 120 bp, Artificial Sequence
  ENSG00000283072_2 (sequence is synthesized)
gtgataaccagccggtcctggaccagtttatcatcgcagtgtggactgattctcttttgcaggaagttagttttgacttcaccagctggattggagggcacctgtggcataccttgtcct

SEQ ID NO: 986566 - DNA, 120 bp, Artificial Sequence
  ENSG00000283072_3 (sequence is synthesized)
attgctgtgggggacttcgtccagcttttagacatgcaagactaaatgtgaataccatctataccacagcctcaagccctggccgtcacagcaagttcctgattctcctgctgtgaagct

SEQ ID NO: 986567 - DNA, 120 bp, Artificial Sequence
  ENSG00000283072_4 (sequence is synthesized)
gctgtgagagtgaaaaggctgtggggcatctccaggctgagtgtgagacgatgctcccacagacttacttcctgccagccacaccttggggagaaacaaaaggatgcaatgccaagatga

SEQ ID NO: 986568 - DNA, 120 bp, Artificial Sequence
  ENSG00000283072_5 (sequence is synthesized)
gattttgcaacattgctaaactagcagactggagagatgctcacaattctcagatgatatgagtgtttctctgcatgggcatcagagctgccactgcttgacattccaagaacttcccag

SEQ ID NO: 986569 - DNA, 120 bp, Artificial Sequence
  ENSG00000283072_6 (sequence is synthesized)
ctacaggttcatcaccttctcctcccaggaaagacatgtgagattctgcacagagacaggaatgtcgtgccaaagagcctgaagtcatgccagtggtggagtgctgattggaacagactg

SEQ ID NO: 986570 - DNA, 120 bp, Artificial Sequence
  ENSG00000283072_7 (sequence is synthesized)
ggtttggatgacatctctactcatctgtaatggaagctgtgtcaaaataggaaaaattttgaaaaactctggtggcctttgggtgatgaagttaatgataattgccaccttttttcatga

SEQ ID NO: 986571 - DNA, 120 bp, Artificial Sequence
  ENSG00000283072_8 (sequence is synthesized)
agtttcttgaactttgacaactttaggaacaataatactgatattgataatatgtcatcttgttctcatgttctgtgattctgaagaagcaagaactgaccaccatgtacatcagctgga

SEQ ID NO: 986572 - DNA, 120 bp, Artificial Sequence
  ENSG00000283072_9 (sequence is synthesized)
acctttctggaatccacacagtgtaataatccttaggaaaagctacctgggattcagctgttacaatcagaaggccacgaacactcaactggaacctttcataatcccagtaaaaggaaa

SEQ ID NO: 986573 - DNA, 120 bp, Artificial Sequence
  ENSG00000283072_10 (sequence is synthesized)
cctggcatgtagcagggctgcagtgtgtctttgtggatggaacaagccctgatatttgggccaagcaaccaaatgccaggctggtggtcccacataagtgtggtggagtgggtctgccta

SEQ ID NO: 986574 - DNA, 120 bp, Artificial Sequence
  ENSG00000283072_11 (sequence is synthesized)
gccacccaccagctgttaaggaggaagcggtggtgcctgtggtccatagagcctgaagccttagttggtggttgatctgctttctgggaggatcagaaattcccaaactttaatcaagta

SEQ ID NO: 986575 - DNA, 120 bp, Artificial Sequence
  ENSG00000283072_12 (sequence is synthesized)
gcgttccagatgagtccagcgactctgcacaaaaaaactggaagccctcgaaggagacctaagttcagatcagggctcacacgttttctggctactggatgtgtttttctattgcacaga

SEQ ID NO: 986576 - DNA, 120 bp, Artificial Sequence
  ENSG00000283072_13 (sequence is synthesized)
tttgcaggcgctttaaatgagaatgtgtgccccggcacttactaagcacatcagcgaaagcttcacagcgcaccatcagccaggcctgctgctgctagaccctctgccagacactgagaa

SEQ ID NO: 986577 - DNA, 120 bp, Artificial Sequence
  ENSG00000283072_14 (sequence is synthesized)
ggaagacgtttgtgccctaggtcaaaggcaaaccctgggtcctagggaatgtcattgaggtttgcttaagtaaaatgttttcatttaggttatctatgccaataaaatgatgcaaaattc

SEQ ID NO: 986578 - DNA, 120 bp, Artificial Sequence
  ENSG00000283072_15 (sequence is synthesized)
ggtgagttgatgggcagccattgctgtgagcagccgaggtgtggtctctgaaggaggggggcgggggcatgaggactcagaactgtcccctccaggagaatgaagccaaagtgtttatcc

SEQ ID NO: 986579 - DNA, 120 bp, Artificial Sequence
  ENSG00000283072_16 (sequence is synthesized)
ttcagctccctggctgttcctgcacactagccacttacattgcagctacctgtgcactgataaaggaactgatgtctgtccggtctgcacacatctctccattgtgaagggcattcaagt

SEQ ID NO: 986580 - DNA, 120 bp, Artificial Sequence
  ENSG00000283072_17 (sequence is synthesized)
ttgccctctctcaccctggtcctcagaagctaatgggtcactttcccaaattgaagctccagagaccaggaacagaggactggtatagttgatgagtctacacaacaggaggctggcccc

SEQ ID NO: 986581 - DNA, 120 bp, Artificial Sequence
  ENSG00000283072_18 (sequence is synthesized)
acctagtgcaaggatttgggaattgtgacatcaccctggaggcaatgctagctcccccatgatccacggccacattgttagggctatggaaacctgacggtttgagggcagaccaccaag

SEQ ID NO: 986582 - DNA, 120 bp, Artificial Sequence
  ENSG00000283072_19 (sequence is synthesized)
gatgacatctctactcatctgtaatggaagctgtgtcaaagctgggggatgccagctgccatattgtgaagaccctcaagcatccctgtggagaggtccccatggcacagaaatggactc

SEQ ID NO: 986583 - DNA, 120 bp, Artificial Sequence
  ENSG00000283072_20 (sequence is synthesized)
tcagcccaaaagccaacaaagaaccaaggcctcaagccagcagccatgggaatgggaatgtgccatcttggaagccaatcctgcagccccagtcaagccttcagatgacagtagccccag

SEQ ID NO: 986584 - DNA, 120 bp, Artificial Sequence
  ENSG00000283072_21 (sequence is synthesized)
ccaatatcttcactggatcttactgagagactatgtgccagcatgaccctactaaacaactctcaaatttctgaccctcagaaattgtgtgagataataattgttttttgttttaatatg

SEQ ID NO: 986585 - DNA, 120 bp, Artificial Sequence
  ENSG00000283072_22 (sequence is synthesized)
ctaagctttaggtttgtttgttactccaaattagacaactaattcagaatgcaatatatacactcagccaggtcaactcctctgcttcttgatgcctggggagagtggagagagtgatgg

SEQ ID NO: 986586 - DNA, 120 bp, Artificial Sequence
  ENSG00000283072_23 (sequence is synthesized)
atccccattattattgcacccagggtacactggtctgggtttagaatgtcttgtgctttttcaaccttctgttcccacatttctcagtagtatgtatattaaactctcttcagtaaccca

SEQ ID NO: 986587 - DNA, 120 bp, Artificial Sequence
  ENSG00000283078_0 (sequence is synthesized)
aatacttcagtaaaagttccagtcccctctttctgcgtgttttattttccaaccaaaagatggtgttattggacatttctagtggttttcctttctctcatttcttcctaagagcccaga

SEQ ID NO: 986588 - DNA, 120 bp, Artificial Sequence
  ENSG00000283078_1 (sequence is synthesized)
ataggtttcagagagacgcttccttgcctcggacctcactggggccaagaggccacagggtcagtcttcgcagctgaagacagcgccgcaataagcagagacctcgggacgatgaatgac

SEQ ID NO: 986589 - DNA, 120 bp, Artificial Sequence
  ENSG00000283078_2 (sequence is synthesized)
gttgctgacaaagaaaatgatttttttaattgctttaacaaaggagactgctagtctcgaaagcagacccgaactggacccttgtgcctgttcgaactgtagccttgcaaaggaatggac

SEQ ID NO: 986590 - DNA, 120 bp, Artificial Sequence
  ENSG00000283078_3 (sequence is synthesized)
ttactgataactggaatacgggacttcaccccaggcttgtttctcgacagcagcagcagccaatgagcattgaggacggagcctaggagaggtgcctcccctataggggaacagtgtttg

SEQ ID NO: 986591 - DNA, 120 bp, Artificial Sequence
  ENSG00000283078_4 (sequence is synthesized)
ggggaaatcactgcaaacgtacagctggagttttgtacctgaactttggctcccagaaggcaggaaaggaaatgaatgaagcaagctgagtatggcggggagggcccctgtgggtacacc

SEQ ID NO: 986592 - DNA, 120 bp, Artificial Sequence
  ENSG00000283078_5 (sequence is synthesized)
tacggagcaccttgagctcagtagggggacagtctgagttttccagaaagaacagaaatataaagtgatgattaaatctcgggatttttaatttttgagtgttgacaactaattagaaca

SEQ ID NO: 986593 - DNA, 120 bp, Artificial Sequence
  ENSG00000283078_6 (sequence is synthesized)
acttgcaaggtggggcgcaccaggctcactgcacagcccatacccacagacccctcagattggagtcggggcagaagcagaacgcaggactcgcaggaaacagaccaggttccaaggccc

SEQ ID NO: 986594 - DNA, 120 bp, Artificial Sequence
  ENSG00000283078_7 (sequence is synthesized)
ccagggtcccaaaggctggggtaactgaaggttcccacgctcaggcctccactcttcaagtccgctgctactccactgagatctgtaatgagtctcctgccatctacgcacagtggtgac

SEQ ID NO: 986595 - DNA, 120 bp, Artificial Sequence
  ENSG00000283078_8 (sequence is synthesized)
tcctcttctccaaggccccgccaggagtctttcattccaacgtgttcgcaggatcttctggggaaccgtccagcctggcagctgcaggaactgcgagaagttaagggtctgtgcccacct

SEQ ID NO: 986596 - DNA, 120 bp, Artificial Sequence
  ENSG00000283078_9 (sequence is synthesized)
attccagcttcccttgcaaggagggtgttgggcaccagaaggccctggggaaagtgggagccgcagacagccaggcagctcttctatgtctggggtttgcaggagcactgccttccgggg

SEQ ID NO: 986597 - DNA, 120 bp, Artificial Sequence
  ENSG00000283078_10 (sequence is synthesized)
ggggggggaggggaggcgggtgaggacagcacgtgacttcccctcctaatgttcatgtggtggggagtcaccctgggggcctcccgccaaattttagtatctctgtgattttagttgttg

SEQ ID NO: 986598 - DNA, 120 bp, Artificial Sequence
  ENSG00000283078_11 (sequence is synthesized)
ccccaagcagttaggacttgtgtagtttgaaagaaaaatctcacccagcataaaaagagaaaagggggaattgtaacaaatgttaatcataagcactgtttcaacccggaaaaatgtttg

SEQ ID NO: 986599 - DNA, 120 bp, Artificial Sequence
  ENSG00000283078_12 (sequence is synthesized)
ctgccaggctgtgggcaaagaggtggcctcggcggctggcagctcagtgggccttccaagtttactaagcagggtcttgtatttttaaataaaatagagcatcagacacgctcacttaaa

SEQ ID NO: 986600 - DNA, 120 bp, Artificial Sequence
  ENSG00000250049_0 (sequence is synthesized)
agaagtgttcaatagtaatcaaccctgcagtctttttctttctggttttaggtttttgttcttgcctaggaagaccttcttcaccacaaatgccagaaaacatactctgtgtgttttaat

SEQ ID NO: 986601 - DNA, 120 bp, Artificial Sequence
  ENSG00000250049_1 (sequence is synthesized)
tccttggacttgattgagacttgtttcatgattcagcatatggtctgccttggctagtccagcaattcaggagcagttccatctttctaagtttttgtgattgttgaatgagaccaaagg

SEQ ID NO: 986602 - DNA, 120 bp, Artificial Sequence
  ENSG00000250049_2 (sequence is synthesized)
agataacagaagaacttgagaaactctagccccagcatcttgaaatgaatgacaagatacagaagtctacagccaaaggtaaagaagagagtctaaaaactcaaacgtatctaaaagcca

SEQ ID NO: 986603 - DNA, 120 bp, Artificial Sequence
  ENSG00000250049_3 (sequence is synthesized)
tgacacagaaggcctggagactgcatggaatgatgaggactgcagtgaactctgaagtgcctacccatgtgaaacgaacaagtgctattcggaagaagcaggttgtgttaatgtggaagt

SEQ ID NO: 986604 - DNA, 120 bp, Artificial Sequence
  ENSG00000250049_4 (sequence is synthesized)
agctggatgccagttttctgagatttgcccaaacatggatgacttgcatgttacgaaaggattttgccgtgtcaaatgttttcatttcgtttattagttaagacatataattcaaaactc

SEQ ID NO: 986605 - DNA, 120 bp, Artificial Sequence
  ENSG00000250049_5 (sequence is synthesized)
tttggccacctctaggagtatgtatttcattaagattatgtaaaaactactaatagtttcacaattgaatacataagtatgtgcctatttggggaggaaggggcattcaaatgacaatta

SEQ ID NO: 986606 - DNA, 120 bp, Artificial Sequence
  ENSG00000250049_6 (sequence is synthesized)
acagtaacagagtaacagaaactgaaatctccggcctacctctaggtccgttcccaagaataacattgttagtctcaccccaattctatttagaatttagtgctattcatctgtatcctg

SEQ ID NO: 986607 - DNA, 120 bp, Artificial Sequence
  ENSG00000250049_7 (sequence is synthesized)
atataatcattgttaaaacaattaattttgctctcattacgaaaaaataaagaatttacctaaaacctatctcttttcctcttgtacatcgaaggtttgttataattttccattctgcta

SEQ ID NO: 986608 - DNA, 120 bp, Artificial Sequence
  ENSG00000250049_8 (sequence is synthesized)
atgattctcattttaaagcattcaaattgatgttaattgcataaggaatacagtaatatttcctcctgataaaaatctaaaatgttacaaataaggctgttacccctttgattctcattt

SEQ ID NO: 986609 - DNA, 120 bp, Artificial Sequence
  ENSG00000250049_9 (sequence is synthesized)
ctgttacccctttgattctcattttgatctacacaaataattgaatatttgtaaggctgtgatacaataatcacaaataagtgatacaataatcactttggcctcccaaagtgctgggat

SEQ ID NO: 986610 - DNA, 120 bp, Artificial Sequence
  ENSG00000250049_10 (sequence is synthesized)
gccaacatttacttttaacgtgttactgaaactactattcaggttgagtatgtacataatggaagctgactcaaaatttaactgctcctataagaaaaaaaactatgcattttcatatta

SEQ ID NO: 986611 - DNA, 120 bp, Artificial Sequence
  ENSG00000250049_11 (sequence is synthesized)
ttgtccatccattcatttattcattcattaaattgtgtatttattaatgcagagccagatattatgaatactcagatgattaagaaccatatattactctcaagaatacactgtgaagtg

SEQ ID NO: 986612 - DNA, 120 bp, Artificial Sequence
  ENSG00000250049_12 (sequence is synthesized)
gaccaagcctctttccctttggattcctatccagctgttgcctctgtgagcaatgcagcttcctaatttctttggtatacaagcttttctactgttttctttacatttctaaggcctctg

SEQ ID NO: 986613 - DNA, 120 bp, Artificial Sequence
  ENSG00000250049_13 (sequence is synthesized)
gccaccacttttaacatctagtttattaattgtcactacttaagttaatctttgttctaagaaacatattttctcaaaaagatctagaaagagataagtttcattaatggagacttttca

SEQ ID NO: 986614 - DNA, 120 bp, Artificial Sequence
  ENSG00000250049_14 (sequence is synthesized)
tattaaaaagttgctggaaaccgttttctcatgcttttaaaaaataattattttaagaataaggtggtattccaataaaggtcataattaacataaacttaataaaatttgacctaggga

SEQ ID NO: 986615 - DNA, 120 bp, Artificial Sequence
  ENSG00000250049_15 (sequence is synthesized)
gggtttacttaatgtaagcttcattagaaatctcttttattctaaaatattaaacctaatcaacccaaacaaaattactcagcatgctgaatatgatactgaatgtagttctgtacagtg

SEQ ID NO: 986616 - DNA, 120 bp, Artificial Sequence
  ENSG00000250049_16 (sequence is synthesized)
ttttctttaaatttgaaaggtcaatccagactatcaacccatgaccagcaattacccattacagaatcgtcaataattttaactttgaaaatagtagacagaaaatgggagttcataatt

SEQ ID NO: 986617 - DNA, 120 bp, Artificial Sequence
  ENSG00000250049_17 (sequence is synthesized)
atttgctgaatgagtgaatgggagctggaacaggactcaggcaacctagtgtaattacaactagtttgtattccctggccctagttacctcatctgcagagtgagatgcgtggatactgt

SEQ ID NO: 986618 - DNA, 120 bp, Artificial Sequence
  ENSG00000250049_18 (sequence is synthesized)
tcgattgtaacatattttatatgtattaggttggtgcaaaagtaattgtaatttttggccttactttcattggcaaaaactacaattacttttgcaccaatctaaatactttctatatac

SEQ ID NO: 986619 - DNA, 120 bp, Artificial Sequence
  ENSG00000250049_19 (sequence is synthesized)
tggtgaagacagaaattcaatgattcaaaaatacaataggaatgtttttcccttccaagtactttcagtttagaaaaatggccaaaatttctgtctgtgatagttctaatattgaaaaag

SEQ ID NO: 986620 - DNA, 120 bp, Artificial Sequence
  ENSG00000250049_20 (sequence is synthesized)
taaaggtaatataaaccataataaacagcataagtatattttatgtgattattttgatcatttattccccaatactatatgactatttcctgtgtgacatgcaccccaccaagtgcttag

SEQ ID NO: 986621 - DNA, 120 bp, Artificial Sequence
  ENSG00000250049_21 (sequence is synthesized)
tatgtaatataaaaatatagacatacctcattttattgcactttattttattgtactttgtattatgttttttacaaattgaaggtttatagaaattctgcatccagcaagtctatcagt

SEQ ID NO: 986622 - DNA, 120 bp, Artificial Sequence
  ENSG00000250049_22 (sequence is synthesized)
gctctttttctaatagcatgtcctcactttctgtctctgtgtcacattttggtaattcccacagtacttcaaacttttttattattaatatatctgttactgttatctgtcatcagtgat

SEQ ID NO: 986623 - DNA, 120 bp, Artificial Sequence
  ENSG00000250049_23 (sequence is synthesized)
cttgcatgttatttttgtaattgtattgtaattgtactggggcacctgaactgtgcccacaggacaaataagatggcaaacttaatcaataaatgttctgtgtattctgactgctccacc

SEQ ID NO: 986624 - DNA, 120 bp, Artificial Sequence
  ENSG00000250049_24 (sequence is synthesized)
ggaagtttacattttaaagatgcaagaaggcactaaacaagggcagtgaggtacaacaagctctgtggttttatttctcctaaatgggaggaaacatagagaggaagaaaagtatgcaat

SEQ ID NO: 986625 - DNA, 120 bp, Artificial Sequence
  ENSG00000250049_25 (sequence is synthesized)
ctcagttgcaaatggaggcaggggctcaccatgttctctgatacgattgtaccgcccattggtaagaatcagaggctgaaaagattctgttactgaaactcaacacttagttgatacctg

SEQ ID NO: 986626 - DNA, 120 bp, Artificial Sequence
  ENSG00000250049_26 (sequence is synthesized)
ctatatgaactgctccaacattctgaagagaaggtctggatcatttaagtaggacttgcaaagaaagtggcctagatccttagctgagctgatcacttacctcaaacctataaagaagtg

SEQ ID NO: 986627 - DNA, 120 bp, Artificial Sequence
  ENSG00000250049_27 (sequence is synthesized)
gaggggccaagaataggtgttggatatcagcgggagagtttcatcaaagagctgtcagtttcatctcaaccttaccctccaggagaggtaagatgtcctctgtctcacaataaatgagtt

SEQ ID NO: 986628 - DNA, 120 bp, Artificial Sequence
  ENSG00000250049_28 (sequence is synthesized)
tgacttttggtcctgggcatctgtggtactgagagcttagggctggctccatgctttaaaatatgtatatgtgagaactgcatgaactcgccagtgcggagatgaaaaagaaagaaaaaa

SEQ ID NO: 986629 - DNA, 120 bp, Artificial Sequence
  ENSG00000250049_29 (sequence is synthesized)
aggtgccattttgcgtgcatggcacaagccactaggagaaagaaccaaaaggaaaaaaataaaaaaaaaaacaggaaggaagattttatttgctatcccaaatctttgcagatagtgcta

SEQ ID NO: 986630 - DNA, 120 bp, Artificial Sequence
  ENSG00000250049_30 (sequence is synthesized)
aattaggtgatgaaactcctgtgaaaaataaaagacaagtagcctgcgggaaaatgccatatgcttttagctttggcaaatgactggatgttggcagcctgtggccagaaaacatactct

SEQ ID NO: 986631 - DNA, 120 bp, Artificial Sequence
  ENSG00000250049_31 (sequence is synthesized)
acaaacacacaaaattatttgatcttcctgttgagctctagctaagggttcttcatatattctggatattagaccttcatcagatatgtgatttacaaatattttttcccatttgtttgt

SEQ ID NO: 986632 - DNA, 120 bp, Artificial Sequence
  ENSG00000250049_32 (sequence is synthesized)
taccttttcactatcttgatactctactttgaggtgaaaatgcttttaaattcgatgaagtccaatttatctattttttctttgatttcttgtgcttttggtattatgtttaaatattgc

SEQ ID NO: 986633 - DNA, 120 bp, Artificial Sequence
  ENSG00000250049_33 (sequence is synthesized)
aataaatgtcatgaataattatactgatgatttcttctaagagttttatagttttaatgcttatttttagttatttgatttatttggggtctatttttacatataatgtgaggaaggatt

SEQ ID NO: 986634 - DNA, 120 bp, Artificial Sequence
  ENSG00000250049_34 (sequence is synthesized)
gaaggattacaacttccttctttttcatgtagatatgcagatgtttgcagcaccatatgtcaaaaaaatctcttctttcctcataaaattttcttgacactcttgttaaaattcaattga

SEQ ID NO: 986635 - DNA, 120 bp, Artificial Sequence
  ENSG00000250049_35 (sequence is synthesized)
ccataaatgtatgggtttattacagtacttatatttctatttcattgatttatacatctatcctatgcaagtaccacaaagtcttgattacagcagttttatagtaagctttggaattgg

SEQ ID NO: 986636 - DNA, 120 bp, Artificial Sequence
  ENSG00000250049_36 (sequence is synthesized)
cgagtatatgttttcaaacttattactttccaagattgtttagataattctcagttcttttgtatttaaatttttgcatcagtatgttaatttatgcaaaaaatgcatttgggacttgac

SEQ ID NO: 986637 - DNA, 120 bp, Artificial Sequence
  ENSG00000250049_37 (sequence is synthesized)
aagattttgttaaatatgtggatgaagttttagagtattacatcttaacaagtctttaatccatgaacatggaattcctttctatttatttaggatttctttattttattttaatgatat

SEQ ID NO: 986638 - DNA, 120 bp, Artificial Sequence
  ENSG00000250049_38 (sequence is synthesized)
ttgcagtgtacaagtcttatacttcttttgtttatttatacctaagaattttatttttgataatattataaatgttatggtttccttaatttaaatttttgtattgttcatgggtatgta

SEQ ID NO: 986639 - DNA, 120 bp, Artificial Sequence
  ENSG00000250049_39 (sequence is synthesized)
tagaaaaaatactttgtacaatgatcttatatcctgaaactttgctcagttcatttatttaatattagatttaactgttagggtgcatcgcatgtgaatgtcttatggtaagcaattagt

SEQ ID NO: 986640 - DNA, 120 bp, Artificial Sequence
  ENSG00000250049_40 (sequence is synthesized)
ttcatatgcaattcagttacactcaaaaacagattctgggcttgattttcaacacattcttttctgtggctgtgagatgacagctttaggaaaacactgctagaggagccctttgctttt

SEQ ID NO: 986641 - DNA, 120 bp, Artificial Sequence
  ENSG00000250049_41 (sequence is synthesized)
cagattatgtattaagataagaatttttagctttctgtttcttcttctttttccccaaagcatctagcattatttaaaaaaaaaaagtcatgccatttctggtactaattgttttagctt

SEQ ID NO: 986642 - DNA, 120 bp, Artificial Sequence
  ENSG00000250049_42 (sequence is synthesized)
gcatttcctagaaaataagcatgaagcaaaatttaagcgttaatgcttttgtgggaagtataatcccaaggcaatgaaagttggtggaaagcatccagaagctgaatgaaaataaaaggt

SEQ ID NO: 986643 - DNA, 120 bp, Artificial Sequence
  ENSG00000250049_43 (sequence is synthesized)
tatgggttttttatttgagcactacttcacaagctaataaagagacaaagcaggttgataggccttgcagcaaatcttggataggtgatacatatacaaggacaaatcacaagtgtgata

SEQ ID NO: 986644 - DNA, 120 bp, Artificial Sequence
  ENSG00000250049_44 (sequence is synthesized)
aatttcaaaattacttatattccatatcttccctgcttcttattccccatttaccagcatttgtttgatggatattctctactgatagaactctttttctgcccaatcaaaacattttag

SEQ ID NO: 986645 - DNA, 120 bp, Artificial Sequence
  ENSG00000250049_45 (sequence is synthesized)
cagcatagtttgggaaatggagagcaggatagctatgtgaacaaatacaatatctcatatatctattgaccattttaataagaaatatcacataattatttttattaacttgtgcactag

SEQ ID NO: 986646 - DNA, 120 bp, Artificial Sequence
  ENSG00000250049_46 (sequence is synthesized)
agtgtatggcttttaataaatatttcagagaactatgaccttaatgtagttttgtatgttctaaagtctgaagcagccttgtaaattacatagtatgctggattatgagcatataatagt

SEQ ID NO: 986647 - DNA, 120 bp, Artificial Sequence
  ENSG00000250049_47 (sequence is synthesized)
gctggattatgagcatataatagtgccctattttttaaagtcttctaaattaattctattcatagtaatgttatattgtataattaatctggtacaactagttctacatttcattccttt

SEQ ID NO: 986648 - DNA, 120 bp, Artificial Sequence
  ENSG00000250049_48 (sequence is synthesized)
caaatggaggcaggggctcaccatgttctctgatacgattgtaccgcccattgaggctgaaaagattctgttactgaaactcaacacttagttgatacctgctacaactttaactactcg

SEQ ID NO: 986649 - DNA, 120 bp, Artificial Sequence
  ENSG00000250049_49 (sequence is synthesized)
tacctgagacacaatattatggaaattgggttaattaataaccctacagtaacctctaaacattcaaatggaaggaagaatctcatctctctcactttaaagcaaaagctatgaatgatt

SEQ ID NO: 986650 - DNA, 120 bp, Artificial Sequence
  ENSG00000250049_50 (sequence is synthesized)
aagcttagtgaggagggcatatcaaaagccaagataggccgaaagctaggtcccttgtgccaaacagccaattcgtgaatgcaaaggaaaagttattgaagaaaactaaaagtgctcctc

SEQ ID NO: 986651 - DNA, 120 bp, Artificial Sequence
  ENSG00000250049_51 (sequence is synthesized)
cagaataagactctaactctcttcaattctatgaatgctgaaagaaagagatgaggaagctgatgaagaaaaatttgaagccagcagaggttggttcatgaggcttaaagaaagaagcca

SEQ ID NO: 986652 - DNA, 120 bp, Artificial Sequence
  ENSG00000250049_52 (sequence is synthesized)
tctccaaaacacgaaagtgcaaagtgaagaagcaagtgctgatacagaaattgcagcaacctatccagaagatccagctaagacctttgatgagtgtagctacattaaacaatatatttt

SEQ ID NO: 986653 - DNA, 120 bp, Artificial Sequence
  ENSG00000250049_53 (sequence is synthesized)
acaatatattttctatgtagacaaaacagccttcaattagaagataatgccatcaagaactttcacagaaaagagaggtcaatgactggcctcaaagcttcaaaggacaggctgactctc

SEQ ID NO: 986654 - DNA, 78 bp, Artificial Sequence
  ENSG00000250049_54 (sequence is synthesized)
agaagggatgattgtattttgcaatatgagaaggacatgagatgtgggaggggccagggctgaaatgatatggtttgg

SEQ ID NO: 986655 - DNA, 120 bp, Artificial Sequence
  ENSG00000250049_55 (sequence is synthesized)
gagatgtgggaggggccagggctgaaatgatatggtttggatttgcgtccctgcccaaatctcatgtagaattgtaatccccagtgttggagaaggggcctggtgggaggtgattggatc

SEQ ID NO: 986656 - DNA, 120 bp, Artificial Sequence
  ENSG00000250049_56 (sequence is synthesized)
atgggggaggattgcccccttgctgttcttgtgatattgagtgagttctcaggagatctggctgattaaaagtgtgtagcacctccccctgtgctgtcttcctcccactccagccatgta

SEQ ID NO: 986657 - DNA, 77 bp, Artificial Sequence
  ENSG00000250049_57 (sequence is synthesized)
acctccccctgtgctgtcttcctcccactccagccatgtaagacgtgcttgcttttccctcaccctcatgtacagcc

SEQ ID NO: 986658 - DNA, 120 bp, Artificial Sequence
  ENSG00000250049_58 (sequence is synthesized)
catgaagtattatgagcgagtaatagcaagggctttgctgtcctctctctccactgttgtttcaaacaaacacaaaatcaacagcatatgcaatctcaataaaataacatagagatgtga

SEQ ID NO: 986659 - DNA, 120 bp, Artificial Sequence
  ENSG00000250048_0 (sequence is synthesized)
gtgaggtagaaccactatggaaatttcacttgggagcagggtgaacaaacaaggtctatggaagacaaactgtagcaactagatggtgaggttggtgagagaaaatctgagatgctctgc

SEQ ID NO: 986660 - DNA, 120 bp, Artificial Sequence
  ENSG00000250048_1 (sequence is synthesized)
tgtaatttgcaacattgttttgctacctaaatgtcagacacagcacataggcacttgctaaaacgaatagaaaaaaatgaggaccaccatcaattccaacattgagaactcgtattttag

SEQ ID NO: 986661 - DNA, 120 bp, Artificial Sequence
  ENSG00000250048_2 (sequence is synthesized)
ttggaaagaaatgcacacagtttggaatcctatgtaatcaagataagagaacaacaattttccaaatgctttccgtgggccagcgtggaaacttaactctctcacacagacaacgagatt

SEQ ID NO: 986662 - DNA, 120 bp, Artificial Sequence
  ENSG00000250048_3 (sequence is synthesized)
aagccctgcccttgtgggaagtatgataagcctcaaggcaaacaattcttccttcgcgattgcagtctgggcacctgatgatatagaatgactcattggactcctgcctcttctacttca

SEQ ID NO: 986663 - DNA, 120 bp, Artificial Sequence
  ENSG00000250048_4 (sequence is synthesized)
ttcttaccatgagctcccctagaagatgtagtcttccaccgttaccaaaatctgcaaccagaaagatcaagctctaggaagcagtacacactatactcctgtgtggaaacaaagtaatcc

SEQ ID NO: 986664 - DNA, 120 bp, Artificial Sequence
  ENSG00000250048_5 (sequence is synthesized)
tcatcagatcatctaacttgctgttgctgtaaggactgtgaattggtagcaataaataagccatgggaaataggagggaaaacaccatcaatgacaataaaaactgaatgtgaaatttga

SEQ ID NO: 986665 - DNA, 120 bp, Artificial Sequence
  ENSG00000250048_6 (sequence is synthesized)
ggagaagacatttttgagatgcagtcttagagattagtgaagatttaactaaaacattgatactacatggtctaaatgaggcagagagagcattttagatgtgattccgggccaccacat

SEQ ID NO: 986666 - DNA, 120 bp, Artificial Sequence
  ENSG00000259182_0 (sequence is synthesized)
agaggaggaagctgagctctggcacatggaacttgtccaaggtcacacagctgcaggcacactggcacagggcctggccaaccgtctgtggagttgatccaaaccaatgctgtgctggaa

SEQ ID NO: 986667 - DNA, 120 bp, Artificial Sequence
  ENSG00000259182_1 (sequence is synthesized)
ggtgcctctggtcatgtccacatctcgtccagcgcttctgctgcctcaccaagtctggaaagagctgctcttatctcaggctacccacttccactccgcgcccctgcctgtcccatctct

SEQ ID NO: 986668 - DNA, 120 bp, Artificial Sequence
  ENSG00000259182_2 (sequence is synthesized)
tggaatgagcgccagcttcctgggagtggagtgtacctctttcccaaacaggccctctgtctggaacgcgcctcttctcactccctgagtcatcaataaatctgtctcactttgtcctga

SEQ ID NO: 986669 - DNA, 120 bp, Artificial Sequence
  ENSG00000259182_3 (sequence is synthesized)
acagggcaccggggcaaaacggagccattctgtgacaaactcacctcccaaagccactcagggtggttggctgcaacagcagcgactcagagggaaaggccactgcaccagccctcagct

SEQ ID NO: 986670 - DNA, 120 bp, Artificial Sequence
  ENSG00000259182_4 (sequence is synthesized)
cagggggaaggcggtgagatgacaccacagggcattaagccagggccccagatcaggtgtgacgtggaaaccaagcatgcttcagggaaggcctggcagcagagacccgacttctgggca

SEQ ID NO: 986671 - DNA, 120 bp, Artificial Sequence
  ENSG00000259182_5 (sequence is synthesized)
aaaccagctggggctgcacagggccatcctctcccgctgagctgatggaacacgtatgtcacctcctcctgaggatgcggcccagatggaaatcactcctggctgcccaaacggaggccc

SEQ ID NO: 986672 - DNA, 120 bp, Artificial Sequence
  ENSG00000250041_0 (sequence is synthesized)
tcaacttgcttctgccatgccagcgtcacccctggtctcaggtgatttcttaggctaattctcagagatggggttattgggccaaaaaagcaaactatggctttccgaagctctcattgt

SEQ ID NO: 986673 - DNA, 120 bp, Artificial Sequence
  ENSG00000250041_1 (sequence is synthesized)
tcccattatgtcatgcatccctgagatgcagtcagcagaggattctatttgagggactaaacactcccggggaaagcaggaagaaggagacgggaactaacatttgctattgagcgccag

SEQ ID NO: 986674 - DNA, 120 bp, Artificial Sequence
  ENSG00000250041_2 (sequence is synthesized)
tgtcttggcctcttatgaagacgttcacccagcaggacttcagaagctttgttcactcgatctcatttaatcctcacaatagtgccctaaggaagatattagtatccccattttacaaag

SEQ ID NO: 986675 - DNA, 120 bp, Artificial Sequence
  ENSG00000250041_3 (sequence is synthesized)
gaggaaacgggaacctggggagattaagcgaaggcctcacagatcatgaatagaagaggctggaaacctagtctggttcaagggtgtgctctttctgctctgccatgctgtgcttcagcc

SEQ ID NO: 986676 - DNA, 120 bp, Artificial Sequence
  ENSG00000250041_4 (sequence is synthesized)
accagagtgagccacaggcaacacatgttctaaaccaaccctgttcaccctggacctactatttttgcactcacctccctggttctcagatttctggctccggttcccagctgccatagc

SEQ ID NO: 986677 - DNA, 120 bp, Artificial Sequence
  ENSG00000250041_5 (sequence is synthesized)
ggcaccccgaatggagagaccagctgaagccgcggcagaagaacaaaaattgtgaagatttaatggacatttatcagttcccaaaattaatatttttataatttcttacgcctgtcttta

SEQ ID NO: 986678 - DNA, 88 bp, Artificial Sequence
  ENSG00000250041_6 (sequence is synthesized)
actgtacaccagtgcaccctgaaaaaggacagaataacagtgattttcagggaacaaaagagataatcataaggcctgactgcctgcg

SEQ ID NO: 986679 - DNA, 120 bp, Artificial Sequence
  ENSG00000250041_7 (sequence is synthesized)
agggaacaaaagagataatcataaggcctgactgcctgcggggttgggcagaacacagccatatttttcttctcgcagaaagcctatagatggatgtgtgagtaggagaaatattgctga

SEQ ID NO: 986680 - DNA, 85 bp, Artificial Sequence
  ENSG00000250041_8 (sequence is synthesized)
gccctggggaaggaatgcattcctggggggaggtctatgaacgcctgctctgggattgtctgtcttatgtggttgagataaggac

SEQ ID NO: 986681 - DNA, 70 bp, Artificial Sequence
  ENSG00000250041_9 (sequence is synthesized)
tatgtggttgagataaggactgaaatacaccctggtctcccgcagtgccctggttgtctgctctcaaact

SEQ ID NO: 986682 - DNA, 120 bp, Artificial Sequence
  ENSG00000250041_10 (sequence is synthesized)
cgtacatctactctccttctaaaatcctaataaaaacttgctggttttgcagctcagggtcgccatcacggtcctaccaatatgtgatggcacccccagaggcccagctgtaaaacttct

SEQ ID NO: 986683 - DNA, 120 bp, Artificial Sequence
  ENSG00000250041_11 (sequence is synthesized)
atagggattttcactctttgccctgtatgaaaggagggaaggtaagacacatgagcctagggggaaggtccatctgcaggactaccctgaaggggatgggacattcctggccctcagcct

SEQ ID NO: 986684 - DNA, 120 bp, Artificial Sequence
  ENSG00000250041_12 (sequence is synthesized)
ggccctcagcctacaaactctttccttttatttcctgctggtgaaaagcataatttaaagatgactttgttttatacatacacatacatacaatcacacacacacacacacacactcact

SEQ ID NO: 986685 - DNA, 120 bp, Artificial Sequence
  ENSG00000250041_13 (sequence is synthesized)
agggctctctgtaaataaaagacctgtcacctatcaaagatgctaaccaaggacttaccaaatgtcctttgatgctaagtatctttcagaaaagttattactcaacctgagtccacggac

SEQ ID NO: 986686 - DNA, 120 bp, Artificial Sequence
  ENSG00000250041_14 (sequence is synthesized)
taggcctatccttatgttaaaataattctctcatggaattatttgatttggcccaacatctaccagctttgcacatatttcaatatttcaattaaaccaccaaacctcagtctatattaa

SEQ ID NO: 986687 - DNA, 120 bp, Artificial Sequence
  ENSG00000250043_0 (sequence is synthesized)
attacagattccacattgcagctaatcttcattaaactaccacgtggtgaattttaatgtagtatccaagaagcatactgacaccttctccattgtcctactatgtatctgtgtaaggcc

SEQ ID NO: 986688 - DNA, 120 bp, Artificial Sequence
  ENSG00000250043_1 (sequence is synthesized)
agattttcttcatatacattaaccaaagcaacatatggcaacagactgaatgaagaggcaggtttcctgggactctgttgcatcaaattctactgctaggcatcaattttaaagtatttc

SEQ ID NO: 986689 - DNA, 120 bp, Artificial Sequence
  ENSG00000250043_2 (sequence is synthesized)
gactctatcctcaaagaaaagaaaacagtctttcatcaattatggttaaggatccccaaactgaaacacatgtggctaaacgccattcatatcaccagcccacaccagtctggtggtggg

SEQ ID NO: 986690 - DNA, 120 bp, Artificial Sequence
  ENSG00000250043_3 (sequence is synthesized)
ggagagaaggaaaaagaggagataaatggcctacatgattgatttcaactaagacccaaatcttggagaacaattattggatttaccactgtttgtttttgcaacatttcggaaatcggc

SEQ ID NO: 986691 - DNA, 120 bp, Artificial Sequence
  ENSG00000250043_4 (sequence is synthesized)
ttaaagtatttcatcagttggacctaccaaatatcaagtcaggatttggccatctctgctcttgccattccacctctcacgactctatcctcaaaacctgggcttggctgggaacaagag

SEQ ID NO: 986692 - DNA, 120 bp, Artificial Sequence
  ENSG00000250043_5 (sequence is synthesized)
atttaaatcagactcttttaggttttcctaataagactgctgcaaataaggattgagccctagctgaaggcctcatccttccatgccctttgcttgtccacccatcaacaagccaggatg

SEQ ID NO: 986693 - DNA, 120 bp, Artificial Sequence
  ENSG00000250043_6 (sequence is synthesized)
aggagaagcaaagacagcagcatttacccacagaaccctttgttggcagaagcaaaaattgatagtggaacacatgagggcagttccacaagatccgtccatgaagagtcggatttatca

SEQ ID NO: 986694 - DNA, 120 bp, Artificial Sequence
  ENSG00000250043_7 (sequence is synthesized)
agattaaagatgagcatgtcaatttcaggtgtaagtggcctcgcaggaatgaaaggctgtgctgtctgtataccactgcactgttgcctccctggagaactttatgccttaccctggaag

SEQ ID NO: 986695 - DNA, 120 bp, Artificial Sequence
  ENSG00000250043_8 (sequence is synthesized)
caccctatcttcaaagcaggggtgtttgaaaattcattcccataacagtgtggagcacatcgagaaagactgtactgaaacttccagatagaacttatgaggacccagacccagcagtgg

SEQ ID NO: 986696 - DNA, 120 bp, Artificial Sequence
  ENSG00000250043_9 (sequence is synthesized)
ctgtgaggatgaagaggcaatgggatctgggacctcagatagatccaagaaatatgcagcagtggggatcaacggccttgtatagatccttgatgttagaaggaaaagtgagatgaatga

SEQ ID NO: 986697 - DNA, 120 bp, Artificial Sequence
  ENSG00000250042_0 (sequence is synthesized)
aataatgattcacttcagctctagagaaatgtatgaaggaagggaggaaaagagttgaaattcagaataagagtgtgattccattacctgaagaggcaaaagagcaggaggaaattggac

SEQ ID NO: 986698 - DNA, 120 bp, Artificial Sequence
  ENSG00000250042_1 (sequence is synthesized)
aatctaggctacataatgttgaagtgtacagaaaaggaagctgagattgaaatactggagtgtgatgaatgaaacccagagaccaatgtcccaaacatagcccagtctgcatctcccaca

SEQ ID NO: 986699 - DNA, 120 bp, Artificial Sequence
  ENSG00000250042_2 (sequence is synthesized)
ggtcacgtttccatatatccccacttaagtgacatgagatggatgggtttccacaaggatcagctggaggagtttcacatccatctggcaaagctgcatgaagataagcctcgtgttttc

SEQ ID NO: 986700 - DNA, 120 bp, Artificial Sequence
  ENSG00000250042_3 (sequence is synthesized)
cagggaactgcattgctctacagaggcaatgccgaattattcaattgctttatgaatatttcctcccattaacctctctctgaaaatttgctgatacgcattaagtgtctcttaaccaaa

SEQ ID NO: 986701 - DNA, 120 bp, Artificial Sequence
  ENSG00000250046_0 (sequence is synthesized)
acgtggagagaacaggaacacatgttttctgtactacatggctaatgcaggatacagggctgcagttgttgggtgaagctttgcccgaaagttgagaaatgggtgcagcgcaaggatgca

SEQ ID NO: 986702 - DNA, 120 bp, Artificial Sequence
  ENSG00000250046_1 (sequence is synthesized)
gaacaggagtcgcagaccaaagcagagatccaggatatgaagcaagagttatccgcggtcaatatgatggacaagtttgccagatctgccaggctggaaagaaagatcaacaagatgatg

SEQ ID NO: 986703 - DNA, 120 bp, Artificial Sequence
  ENSG00000250046_2 (sequence is synthesized)
aataagctcaaaactcatgtgaaagtacagacagctcaatcaggaatgctaaaatgggttataagtgttgctttctacaaattgccaggtaccgtgatcaggctataaggcagtcttgtg

SEQ ID NO: 986704 - DNA, 120 bp, Artificial Sequence
  ENSG00000250046_3 (sequence is synthesized)
ctctgttgcccaggctggagtgcagtgggccatctaggctcactgtagcctctgccacccgggttcaagtgaccttcccacttcagcctcacaagtagctggcactaaaagtgcttgcca

SEQ ID NO: 986705 - DNA, 120 bp, Artificial Sequence
  ENSG00000250046_4 (sequence is synthesized)
gcttgccaccatacccggataattttcatattttttgtaaagacagggtctcaccatgttgcccagactggtcgcgttttcttcctctgtttaaaatggcatttgttggacaagcatttg

SEQ ID NO: 986706 - DNA, 120 bp, Artificial Sequence
  ENSG00000250046_5 (sequence is synthesized)
tatagtactatgtacttacttgaagctgttaatttttcattacaatgttttgtaaatttcttcatgaggccataatgcattgttttgtgctcaaattttgcattgtatttaaagcattca

SEQ ID NO: 986707 - DNA, 120 bp, Artificial Sequence
  ENSG00000179447_0 (sequence is synthesized)
acacacactgcaccccaaacactcaagtccctgtgtaaatcttcactcctccaagcacagagggaagcctgctccgtaggctctgttaagtgtactgctgccgctgacatcatcataaat

SEQ ID NO: 986708 - DNA, 120 bp, Artificial Sequence
  ENSG00000179447_1 (sequence is synthesized)
aggaagggagagagtccaggaaccacagggctcacttcctagcctctctatttaagattttcgagggcagatggcactatatttaaccagcacaagtagtattcattgtgcccagggcct

SEQ ID NO: 986709 - DNA, 120 bp, Artificial Sequence
  ENSG00000179447_2 (sequence is synthesized)
cttaaggaaaactgaacaaagttttagaatgaacctgccctcacctcactcctgctcaaccatttcacccaacaacaagttagaggcagagaagatgaatattattaaaatgatgcttct

SEQ ID NO: 986710 - DNA, 120 bp, Artificial Sequence
  ENSG00000179447_3 (sequence is synthesized)
aaatcaggaccttatgggtgctttggctctcaacttttttcataaaatatctgtccagtccagaccgaggagccagcttcgacagcattctggcatgatcatcttccttgtggaatttgg

SEQ ID NO: 986711 - DNA, 120 bp, Artificial Sequence
  ENSG00000179447_4 (sequence is synthesized)
ttctgaatcaagggcctcagaaaccaagcccggttcttttggtctgcaggagagacccctccctcctgccaagtctacctgttctgggaggaagctccacccacccactgcaccaccagc

SEQ ID NO: 986712 - DNA, 120 bp, Artificial Sequence
  ENSG00000179447_5 (sequence is synthesized)
aaagatgctgcctgaactaaaggccaaagtcccacatcctgtaggccataatgattggttctgagaggtgcctgtaactgagccaggccaatcaaagcagagctcccagaaagagactca

SEQ ID NO: 986713 - DNA, 120 bp, Artificial Sequence
  ENSG00000179447_6 (sequence is synthesized)
cccactctgtcccagtgaccttgaacctggaagtaggagagcctggaggctgagagtccgcagatggcacataaagggtcttgctttgtcactcaggctggagtgtagtggtggaaatta

SEQ ID NO: 986714 - DNA, 120 bp, Artificial Sequence
  ENSG00000179447_7 (sequence is synthesized)
ctttggtttaagttactgctctgcaactttcggacctacgtggccttacgaatgcataaacttcttcctggaagctggcgctacacaggagtcaagctgctctgaaaagagatataagtg

SEQ ID NO: 986715 - DNA, 120 bp, Artificial Sequence
  ENSG00000179447_8 (sequence is synthesized)
agacttctgaatttccctccagcacccagaaaaagcctctcggcattgtagccctaccaggcacgtcagcacctggttcacggtatctactcataaggcactaaaggaatgctcattgaa

SEQ ID NO: 986716 - DNA, 120 bp, Artificial Sequence
  ENSG00000179447_9 (sequence is synthesized)
ttaagatgaatgcagaagctattaggatgaccccttgatgaagggataaaggcctggattatggcttgacaatggaatgagaggaaaggtcagataggagagagattgagaaaaaagaat

SEQ ID NO: 986717 - DNA, 120 bp, Artificial Sequence
  ENSG00000179447_10 (sequence is synthesized)
tgacaatgcttggtaattgtcaaacaattggatgacagaatacgtttaaaagggagctatatttcactggaagatatttgattatctacatttcagccactctgagtaacgagtgtaaga

SEQ ID NO: 986718 - DNA, 120 bp, Artificial Sequence
  ENSG00000179447_11 (sequence is synthesized)
acattcaggtggaaacctccagtggtcgtggggaatactggaatcatgctcaggagatgaatgaagatcatagtcatctgaatcaagggatgcaaacttgccccgtgaatttagagacga

SEQ ID NO: 986719 - DNA, 120 bp, Artificial Sequence
  ENSG00000179447_12 (sequence is synthesized)
ccgacaactgccctgtactttcagattacagccacgtgtggaaaacatcagatgcaatcccagctgctttcagtacagtcttgggaaaagagtaaagaattgcttcctcccacaacccaa

SEQ ID NO: 986720 - DNA, 120 bp, Artificial Sequence
  ENSG00000179447_13 (sequence is synthesized)
acctctatcgcccaaacctcaatctatatgggacatctcaaatgcaatacgagcaaaactgacctaatcccacacctgcccattgacttaatgaataaaggaatgaggtgaaacacctac

SEQ ID NO: 986721 - DNA, 120 bp, Artificial Sequence
  ENSG00000246223_0 (sequence is synthesized)
gcactgcaccgagcttgcacagggcgaggcgggggcaggacctgggacccagccaccccggaggaaaccggagaggaaaccagcttggtcttgctctctgcctcgtcccaatccccggct

SEQ ID NO: 986722 - DNA, 120 bp, Artificial Sequence
  ENSG00000246223_1 (sequence is synthesized)
cttaccaaatgcagatccgttggctgaatgccttttagtctgcatacatgcatctcataccgcacagcccaaatttctacaacttgtccaggtgcagtctcctcagaactacaaagcaag

SEQ ID NO: 986723 - DNA, 120 bp, Artificial Sequence
  ENSG00000246223_2 (sequence is synthesized)
aaaagatcacctttgggctcaggaactcacagtcgttctccctctcccggaaggcacaatgaccaggacagtaccgagctttacagccatattgaactcaccatcaactcagcacattca

SEQ ID NO: 986724 - DNA, 120 bp, Artificial Sequence
  ENSG00000246223_3 (sequence is synthesized)
actcaatcagtcaaaatcgtcttttcctgctggtaaataacactgaaattgtgggaagatgggatggtaagaacaaagtctgtctctggaagcacgggcgctgtctctgaagacaaattg

SEQ ID NO: 986725 - DNA, 120 bp, Artificial Sequence
  ENSG00000246223_4 (sequence is synthesized)
atcgtaacacaagcagacccggtggaacgacctccatgctgaaccctcagctccccctgcatttggaccatggcctgatggaagataaagagactgatctcagagtggtacagatctaca

SEQ ID NO: 986726 - DNA, 120 bp, Artificial Sequence
  ENSG00000246223_5 (sequence is synthesized)
accacgtgaagaattggatttatattcatctgactccagaaagttcctgagattcctctgcttcatcatctttcccatgccctttaaaacacgttatcaaatagcaacaggtggtgcaat

SEQ ID NO: 986727 - DNA, 120 bp, Artificial Sequence
  ENSG00000246223_6 (sequence is synthesized)
aactagacaaatgattctcagcctttttctttgccattagcactcccggaaggagacgtgttggacacttttccttgtcaccaccccatgaaccttccataccacaggtatactgtgtat

SEQ ID NO: 986728 - DNA, 120 bp, Artificial Sequence
  ENSG00000246223_7 (sequence is synthesized)
tcggttatgtatcatctgtacatctgtttctaaaacacagaaacagtaagagccccccatccaagaatccattttaatcctcttgggtgtgatgtcaccccccaaaaatgcatatgctct

SEQ ID NO: 986729 - DNA, 120 bp, Artificial Sequence
  ENSG00000246223_8 (sequence is synthesized)
ggagtcagtcacaaacacattacgaatgcatgatcacttaagaatgttaccaaagtttataaatttgagatgataattctatgttatttagttcattttagagataagtaagaaccagag

SEQ ID NO: 986730 - DNA, 120 bp, Artificial Sequence
  ENSG00000246223_9 (sequence is synthesized)
attccagagaggtagaccaagctgacagagcaaggaaaggcagagccagacatgcagctgaagcatctgaattcccactctagtgctccagcttaacctggatgatcagtaaatggttgc

SEQ ID NO: 986731 - DNA, 120 bp, Artificial Sequence
  ENSG00000246223_10 (sequence is synthesized)
gtattttgggagaaaccagaatctgccctggggcaatagaaaggcagcaaagcaacctgcattcaagtctttgggggattttttggaaagcagagtgtattagtctgctattgctgctgt

SEQ ID NO: 986732 - DNA, 120 bp, Artificial Sequence
  ENSG00000246223_11 (sequence is synthesized)
aacaaattaccataaatttagtggcttaaaacaacacacatttgttgtcttaaagttctggaggtcagagcccaaaatgggtctcatggagctcaaatcaagatgtcagaagggctgtgt

SEQ ID NO: 986733 - DNA, 120 bp, Artificial Sequence
  ENSG00000246223_12 (sequence is synthesized)
tcctttggaaggcccttggggagaatctgttccatgccttctccagttcctggaagtcacctgcttgctttggctgtggggcacttccagcaactgcatcactctaacctctgcaaccat

SEQ ID NO: 986734 - DNA, 120 bp, Artificial Sequence
  ENSG00000246223_13 (sequence is synthesized)
agcacgtctcccttttctgactctcaccctcttctttctttcccttataaggacaattgtagtacaggataatctccccatttcaaaatcctttacttaatcacatctgcaaagtccgtc

SEQ ID NO: 986735 - DNA, 120 bp, Artificial Sequence
  ENSG00000246223_14 (sequence is synthesized)
ttggcctataaggtgacatacttgcagattccagaaattagaatttggacgtctttgggtggctgttattatgcctgccacacagaccaatgcatacacaatgtgaccaatccatcatga

SEQ ID NO: 986736 - DNA, 120 bp, Artificial Sequence
  ENSG00000246223_15 (sequence is synthesized)
tttgtctgagactatattggctttaaagctgaaagttctgcatcccaggaatcgcctcagtcccaggcaattcaggacaattcgtcgtcaccctatgtgcacctcctatgtgctccttca

SEQ ID NO: 986737 - DNA, 120 bp, Artificial Sequence
  ENSG00000246223_16 (sequence is synthesized)
acttagagagttggtgttttctctcctcttcaaaggactaactccttttcacctaaagagtacacagaggctgggtgtagtggtttaggcctgtactctgtgcatttgggacactgaggc

SEQ ID NO: 986738 - DNA, 120 bp, Artificial Sequence
  ENSG00000246223_17 (sequence is synthesized)
tttgggacactgaggcaggaggttcacttgagcccaggagtttgagaccattcacggcaacatagtgagatcctttctctacaaattttttaaaaaattagttgggcatggtggcacatg

SEQ ID NO: 986739 - DNA, 120 bp, Artificial Sequence
  ENSG00000246223_18 (sequence is synthesized)
cttggcaggctaaggaggaaggatcccctgagcccgggattcaaggctgcagtgagctatgatagtgccactgtactgcagctgaggcaataaaacgaggccctgtctctaaaaataaaa

SEQ ID NO: 986740 - DNA, 120 bp, Artificial Sequence
  ENSG00000246223_19 (sequence is synthesized)
aaaaaaaaaaaaaagaaaaaaaggctgcacagaatagactgatggactgaaggctctgcccttatcaaacatttactaagtaataattataagtttgcctcctacactgggtgacttctc

SEQ ID NO: 986741 - DNA, 120 bp, Artificial Sequence
  ENSG00000246223_20 (sequence is synthesized)
gcagctctgtaggacagacatcagacatgggtctcactggactcacatcaagatgccagcaggttgcattcctttctggaagctctaggtggaaaaatgtgtcccctttttaaggtcaca

SEQ ID NO: 986742 - DNA, 120 bp, Artificial Sequence
  ENSG00000246223_21 (sequence is synthesized)
gatgcctcccacatcccttggctcatggaccccttcctctttcttcaaagtcagcaacatcatttctctctgacccttcttcatggtcctctctccctctgactctgaactcagccagga

SEQ ID NO: 986743 - DNA, 120 bp, Artificial Sequence
  ENSG00000246223_22 (sequence is synthesized)
atggttcgtggatttcaaggacccttgtgactatatttagtgtcctcccaggtgtactaggatcatcttcccatttcaaggtttttaactttattacatctgcacagtccctttatccac

SEQ ID NO: 986744 - DNA, 120 bp, Artificial Sequence
  ENSG00000246223_23 (sequence is synthesized)
ataaggggacatattcatgggtcctggggactaacgtggggcatctttagggtgccttgattctgcctattgcaatatctcatcacagagactcagtggctccccacacagctgcagcca

SEQ ID NO: 986745 - DNA, 120 bp, Artificial Sequence
  ENSG00000246223_24 (sequence is synthesized)
ccaagcccagcacctctctctctcctcttcattgcacagctgaacagaatgcacagtgaacaacgtcttactccttgtgcgaagagctgctgcatgatgatttgaatgcaggataaaaac

SEQ ID NO: 986746 - DNA, 120 bp, Artificial Sequence
  ENSG00000246223_25 (sequence is synthesized)
cacacactcccagcaaacaccgtgccttccccttggttcaaggatgacactattgttcccatcacattcaaacatgtgcatttggaagatgtctccatttctagatcctttattgtcagg

SEQ ID NO: 986747 - DNA, 120 bp, Artificial Sequence
  ENSG00000246223_26 (sequence is synthesized)
aggacactgctcaaaatggcccctccaactgggcacagctctgtaccaggaacagtgccaatgagcatgtgtatttgtgtgtttttatacccaagtgctgtaaaagaaggcggtctgctt

SEQ ID NO: 986748 - DNA, 120 bp, Artificial Sequence
  ENSG00000246223_27 (sequence is synthesized)
aaagacttacagttccaaagaaggcaaatgtaagggcaaaattcatgatgctctgtcaccttgagcttcagcttcctgccttgttgatgaggaaaatgatccctactaagccgggtgttg

SEQ ID NO: 986749 - DNA, 120 bp, Artificial Sequence
  ENSG00000246223_28 (sequence is synthesized)
taaatagtaggcaatatcataaaacccctagcaagatgcactacatacaaggcaatgaagaaaaagtggctactttttcttcacttttgtttgttctctgatctgtgcaattatttgtac

SEQ ID NO: 986750 - DNA, 120 bp, Artificial Sequence
  ENSG00000246223_29 (sequence is synthesized)
caaatatacttgaagtatgaagttggtggctattgtcacaaaggtaacaaaacctgcttttaagagacttggagtttatcaaaggttacatgtagacagaatgaggcccagtagactttt

SEQ ID NO: 986751 - DNA, 120 bp, Artificial Sequence
  ENSG00000246223_30 (sequence is synthesized)
caccaggaaggcagactttgtcctgggccttggaagattgcaaagagaggaagaaagaaaaagtttctccttacactgggaaaagttcatgcaaaggcagagaggaagagcagagcccga

SEQ ID NO: 986752 - DNA, 120 bp, Artificial Sequence
  ENSG00000246223_31 (sequence is synthesized)
gatgttcaagacagggctagtgtgtagcaagtaagtgatgtggacacacacagccagttttcctgctggtttaccaggtaaaatcaaaagaccctcatgccagccaggcgcagtggctca

SEQ ID NO: 986753 - DNA, 120 bp, Artificial Sequence
  ENSG00000246223_32 (sequence is synthesized)
cttgggcctaatttttctccctggccaaaggggtcagactattccagtgctgtctgctccctggcctccagagtaatcaaacacacatgtttggcgctccactaatcagggaatgaaata

SEQ ID NO: 986754 - DNA, 120 bp, Artificial Sequence
  ENSG00000246223_33 (sequence is synthesized)
aagctagatgtttccatatgttgattcaatttacaagcaaaagtaagtgtcaggtagggggcacaacagtaaggggtgagcagtgaagaaatgattccacaatgacgtttcgtaaggagc

SEQ ID NO: 986755 - DNA, 120 bp, Artificial Sequence
  ENSG00000246223_34 (sequence is synthesized)
aaaaagatgaggaagaaaaggggagacacatcattgaaggccaggctctgtgacaatttatatttgcctatatatctgtatctctctctgtcttatctaatgaaataccaacaacaacct

SEQ ID NO: 986756 - DNA, 62 bp, Artificial Sequence
  ENSG00000246223_35 (sequence is synthesized)
cggctcgctgcaacctcaaacgcaccaccacatccagctaattcttgtatttttagtagaga

SEQ ID NO: 986757 - DNA, 81 bp, Artificial Sequence
  ENSG00000246223_36 (sequence is synthesized)
cttgcagtgagcagagatccagccactacactccagcctggccgacagagggactccgtctgaaaaaaaaaaaaaaaagag

SEQ ID NO: 986758 - DNA, 120 bp, Artificial Sequence
  ENSG00000246223_37 (sequence is synthesized)
aagtggttcaagctggatttgaacaaatgtagtcagactctgcagcctatgcatgtacccactgtgctatgctgtcgcattgaataaaatgcagtgccctcaatacgaagtcaatgtgag

SEQ ID NO: 986759 - DNA, 120 bp, Artificial Sequence
  ENSG00000246223_38 (sequence is synthesized)
cacataccaagaatcatattgggaaggagaagtcctcagtaggcaaaacactttccagcaatgttaacctggatgtggatagaaaggagacttgggaatttctctgacttaattcatctc

SEQ ID NO: 986760 - DNA, 120 bp, Artificial Sequence
  ENSG00000246223_39 (sequence is synthesized)
tgggtccatttgaagcacagcagaagagaggggaagaggtgctaggagtggtgggctctgaggttcaagccccgccaatggccaggcctaataaagatctagacctccttgcagaatgag

SEQ ID NO: 986761 - DNA, 120 bp, Artificial Sequence
  ENSG00000246223_40 (sequence is synthesized)
gctttctccaaaacccttcagctgtggtttggtggaagaggcctcactacatctagctaattttgttcattcattcattcattcactcatttattcaaccagacttcatggacacttctc

SEQ ID NO: 986762 - DNA, 120 bp, Artificial Sequence
  ENSG00000246223_41 (sequence is synthesized)
catgtcagggcctgggcgttgtgtcagggttgcaaggatgagtcagggattatccgtcatctcccggaattcatgagcacatggggaagacagcttggagaaaatcacagtaatagggga

SEQ ID NO: 986763 - DNA, 120 bp, Artificial Sequence
  ENSG00000246223_42 (sequence is synthesized)
tcacagtaataggggaaaataagggctgagaaaaaagtccatgcactgcagcggacaggacagcagatcagctcctgtgggttaaaagtgggctgtgggctgggtgcggtggctcacacc

SEQ ID NO: 986764 - DNA, 87 bp, Artificial Sequence
  ENSG00000246223_43 (sequence is synthesized)
tctctactaaaaatacaaatattagctggccgtgtactgaggcaagagaatggcttgagcctgtgaggcggaggttgcagtgagccg

SEQ ID NO: 986765 - DNA, 120 bp, Artificial Sequence
  ENSG00000246223_44 (sequence is synthesized)
gtgagccgagatcacagcactgcactctagccttgtgacagagtctcaaaaaaaaaaataaaaacaaaaaaggtggcctgtggtgaggagtgtgacattgtcagagggatccttgagttg

SEQ ID NO: 986766 - DNA, 120 bp, Artificial Sequence
  ENSG00000246223_45 (sequence is synthesized)
agtgtgacattgtcagagggatccttgagttggttggtcttgaagatgatgagaagatgacattctaggcagaatgaacagatgggtaatggcatggaagcctataaccagcatgactca

SEQ ID NO: 986767 - DNA, 120 bp, Artificial Sequence
  ENSG00000246223_46 (sequence is synthesized)
attagggaattgtaagcaaaaccatacttcttcaagaaaagatggtgaggagtggcgagaagatgaggccaaaagataaatagggctagaccgcagtggtttttatcactacttaagtga

SEQ ID NO: 986768 - DNA, 120 bp, Artificial Sequence
  ENSG00000246223_47 (sequence is synthesized)
atttgaaggaggcgactctgtgcagagctatcaccttataaacatttcatcatggaggagcctggcttccggcagcaatgccttgacccagtgtacatgcctgactgtgttcttgaaaaa

SEQ ID NO: 986769 - DNA, 120 bp, Artificial Sequence
  ENSG00000246223_48 (sequence is synthesized)
cgtatcttggctaataacggtataacaaaagacaggggcatgaagccaagtcacaccagtgccctaaaaactctgtgtttgatcatctctctacagtgagtaatgcggggagatctttat

SEQ ID NO: 986770 - DNA, 120 bp, Artificial Sequence
  ENSG00000246223_49 (sequence is synthesized)
gaaaccagaccctgggttctgcaatagtaagataactggggaagttttgggtaactagaggatgacatactaaaatagcagcatcacgaagggtgcaatgaagtaagatcaagctaacac

SEQ ID NO: 986771 - DNA, 120 bp, Artificial Sequence
  ENSG00000246223_50 (sequence is synthesized)
gtcgaactattctgtcaacacctctgtgtcgtccatgtctataggttgacaatggtaaatggatgttccagcccagatactctctgaaatgacctgcagctttacagaagtaattcttaa

SEQ ID NO: 986772 - DNA, 120 bp, Artificial Sequence
  ENSG00000246223_51 (sequence is synthesized)
ttcatgcactcatctttcccccagaccccaaaggtggccattccaaagtagtgctgtccagtgagactagcatgtgctacaggccctgagtggagacccagcttcgcctcttttgctgag

SEQ ID NO: 986773 - DNA, 120 bp, Artificial Sequence
  ENSG00000246223_52 (sequence is synthesized)
caagtttggcatggtgctaacttctgcatctgtcatgcagccacactaacaatttccaccttgcctacctgaagatgttgatgagaatatcgaaaattgtgtgtgtgtgtgtcgtgtgtg

SEQ ID NO: 986774 - DNA, 120 bp, Artificial Sequence
  ENSG00000246225_0 (sequence is synthesized)
atgaagatccggcgcagctaaagtcagtggaaggtagaaagacgccacagccgcctttcgacaactttttgttacaaaagtggagatctacacggaggcgacggcctaggtcgctctgac

SEQ ID NO: 986775 - DNA, 120 bp, Artificial Sequence
  ENSG00000246225_1 (sequence is synthesized)
aggacccaacgaccctcctgacgcgtccacccgtcctcgctagcagggtcccccagcgggctctcgacctgcgccaccagagttccactctttttgtcgacaataatatggcgcccaaac

SEQ ID NO: 986776 - DNA, 120 bp, Artificial Sequence
  ENSG00000246225_2 (sequence is synthesized)
acgtggggcctcagagaagactctggatccggaaggagtatcccaaaaccagagctaaggtaccagctggagcccactgaagcctcaccgagtttgggcttctcctcctgtggaactgga

SEQ ID NO: 986777 - DNA, 120 bp, Artificial Sequence
  ENSG00000246225_3 (sequence is synthesized)
aaccaaaatcatggtattttgaaaaccagaggtatgaatctccctcgtttggcatcccactgggcctggacctgtttcactgctaatgttctgctgccaaaactatacaagctgcctgga

SEQ ID NO: 986778 - DNA, 120 bp, Artificial Sequence
  ENSG00000246225_4 (sequence is synthesized)
aagctgcctggactattgcagaagagagacagagtcttgctctgttgcccagaatggaatgcagtagcacaatcctaactaatcgtaaccttgaactcctgggttcaagcgatcctcctg

SEQ ID NO: 986779 - DNA, 120 bp, Artificial Sequence
  ENSG00000246225_5 (sequence is synthesized)
cagtataggactacaggcgtgcccaggtaaggctggcttcttttactctattacgtttttttttttagttttgtctgctcatcatttgtctgtttcccctttctattttcctttgggtta

SEQ ID NO: 986780 - DNA, 120 bp, Artificial Sequence
  ENSG00000246225_6 (sequence is synthesized)
tttgaacacctttaatatttcatttaatttattattactacttttgacatatatttttatataattttatggcatgtctgttggcaacaacttcttcattttctttcatttagcaatgtt

SEQ ID NO: 986781 - DNA, 120 bp, Artificial Sequence
  ENSG00000246225_7 (sequence is synthesized)
tttatttcatcttcattcttgatggatattttcactggataaagaattctggactgatagcttttttatttcagtgctttaaaaatgtttttccacttcactctggtttctacaatctct

SEQ ID NO: 986782 - DNA, 120 bp, Artificial Sequence
  ENSG00000246225_8 (sequence is synthesized)
gatgagaaattctcagtcatttgaatagttgttttcctacaagcagggtttttcagccttagcagcactgatatttggggccagaaattcttgtgggaggctttcttgtacaatgcagga

SEQ ID NO: 986783 - DNA, 120 bp, Artificial Sequence
  ENSG00000246225_9 (sequence is synthesized)
aacttagaggcattcattgcttctgcccactagatgtcagtagcacctatccccggccatcacaataaaacatgtctctagactttgctagatgtccctgggttgtttcagaagacaaaa

SEQ ID NO: 986784 - DNA, 120 bp, Artificial Sequence
  ENSG00000246225_10 (sequence is synthesized)
tcagacccgttgagaatcactgctacagaggtaatgtgtccattttctttggctactttaaacattattttttctttttagtttttagcagtttgattgtgatgtgtctgtatatagatt

SEQ ID NO: 986785 - DNA, 120 bp, Artificial Sequence
  ENSG00000246225_11 (sequence is synthesized)
atttttcttgtttcctgtcaaacttagaaaatattcgcacattatttaaaagaaaaattttttgcacatcgtattttcttttctcattctgagacctcaatgcgtgttaaaagttttgtt

SEQ ID NO: 986786 - DNA, 120 bp, Artificial Sequence
  ENSG00000246225_12 (sequence is synthesized)
actatcttgcaagttcctgaatctctttttattctcacttttttttttttctgttgttcagattggataatttctattcatctgtcttcaagctcataggttttttgctctgaaatctgc

SEQ ID NO: 986787 - DNA, 120 bp, Artificial Sequence
  ENSG00000246225_13 (sequence is synthesized)
attctgccttcaaggccattcagtgagtttttacatttcagttattgtatttactgttttaaaattttcatttagttctttatatctaaaatttattactgatatttttaatgtatccat

SEQ ID NO: 986788 - DNA, 120 bp, Artificial Sequence
  ENSG00000246225_14 (sequence is synthesized)
aaatttattactgatatttttaatgtatccatttatttcaagggtttgaaatccttaattccatttatttatttatttatttagagatggaatatcgctctgtcccccaggctggagtgc

SEQ ID NO: 986789 - DNA, 120 bp, Artificial Sequence
  ENSG00000246225_15 (sequence is synthesized)
gtctcaaactcctcacctcaagtgatatgcctccctcagcctcccaaagtgctggaattatgggcatgagccactgctcctggcccttgaagtccttcattcttagagcatttttctaaa

SEQ ID NO: 986790 - DNA, 120 bp, Artificial Sequence
  ENSG00000246225_16 (sequence is synthesized)
tttctaaagcaaatttgaagtctttttcctgataattctaacattttgtcacctagacattggtttctgttaattgcctttttcatgcgagtcgtgattttcctggctgtgggtatgcta

SEQ ID NO: 986791 - DNA, 120 bp, Artificial Sequence
  ENSG00000246225_17 (sequence is synthesized)
agtgatcttggcttgtttcttggaaattttaaacatgatatgaaacttgttttttttgtgatttgtatgtatttttttttttcaattttttcatagaaatgggatctccctttgttgccc

SEQ ID NO: 986792 - DNA, 120 bp, Artificial Sequence
  ENSG00000246225_18 (sequence is synthesized)
aggctgccctcaagcccctgggctcaagggatcctccttttgcagcctctcaaagtgctagtattatatgcatgagccactgtgcttagcttggtatttttgttttagtatacaatttac

SEQ ID NO: 986793 - DNA, 120 bp, Artificial Sequence
  ENSG00000246225_19 (sequence is synthesized)
ccagttgtattcaggtcatacattttaacctgctttttgtgagttttggtttcagtgtcagttatgttttcaaagcatttgtagtgctactcctatgtgttccatgtgtgcaccagtaaa

SEQ ID NO: 986794 - DNA, 120 bp, Artificial Sequence
  ENSG00000246225_20 (sequence is synthesized)
tggctagatgggactttggcacttatctattctttagtttagatcttaatgtctttgatatgctatttagtgtcagatctatacatgcacagcttactactttatgaggttgctttcctg

SEQ ID NO: 986795 - DNA, 120 bp, Artificial Sequence
  ENSG00000246225_21 (sequence is synthesized)
agctctttcctctctatgatctctccagccctttctggttcccttaggtttctcttatctgtcctctggccagaaagccaggttttatttatcttcctttagcttcacacttcccatgag

SEQ ID NO: 986796 - DNA, 120 bp, Artificial Sequence
  ENSG00000246225_22 (sequence is synthesized)
ctacaggcgtgcccaggcttttttggatttttcagttaagaagatgaacaaagacgtctgccctttggagattgagggtggcatgagtcaacaaccacctgtgactcttgctggattgct

SEQ ID NO: 986797 - DNA, 120 bp, Artificial Sequence
  ENSG00000246225_23 (sequence is synthesized)
catcttcataatagcaacacttcttatttggtcaaagaatacaataggtccctgttgatgcaatcacctttgtgttacctgaaagtcttaagagggggtcaaacaaattcactgtcttac

SEQ ID NO: 986798 - DNA, 120 bp, Artificial Sequence
  ENSG00000246225_24 (sequence is synthesized)
tacctgcacatggatgctcggtgggtatttcaaaatagagtccaataagttaaataatagtaactgtatctcctttgtatcaaataggaaactattcagagaggttgattagcccaagtt

SEQ ID NO: 986799 - DNA, 120 bp, Artificial Sequence
  ENSG00000246225_25 (sequence is synthesized)
ttagctatttagctttatcattctaaatatattataagcctgccaatgtcagggatcatgtctcatatttttatattattcatagacactttcccgaaggatgagaatataatagctgct

SEQ ID NO: 986800 - DNA, 120 bp, Artificial Sequence
  ENSG00000246225_26 (sequence is synthesized)
tatgaatgcacatgattatattttttctcattttttaaaaacaggagacttttagagcatgtgtattaagtataaaaaggtaaatcttctaaagacaggtgttaacatttctccaatatc

SEQ ID NO: 986801 - DNA, 120 bp, Artificial Sequence
  ENSG00000246225_27 (sequence is synthesized)
tccctttccattaaccagcacattggatctgtaaacagatgttcactagaacaaaatagctacttacatgtacaattaccaattctgtatgcaccagtgaatgcaccaaatttagaaaaa

SEQ ID NO: 986802 - DNA, 120 bp, Artificial Sequence
  ENSG00000246225_28 (sequence is synthesized)
gttgctaaatatgtttcattttactgaactctatcttccctaagggctggaagtcttgatcttgctagcatgcattaggaagataaagtgcttccaattcatctcttggattgccctgct

SEQ ID NO: 986803 - DNA, 120 bp, Artificial Sequence
  ENSG00000246225_29 (sequence is synthesized)
gctgtagcctatttgctgaaatgggggatggatctgctgaagactcttgcacatgtgttccctacatttcacagttaaagactccaaattttctctcaatcctaggatcagagtacaatg

SEQ ID NO: 986804 - DNA, 120 bp, Artificial Sequence
  ENSG00000246225_30 (sequence is synthesized)
gcagccaggaataattacatttgcatgtcttatctactgtgatgttttcctcaaggaaaagagaacagctttaggatactgaatgcagaaaatgcaaagcatttaattcacctatacatt

SEQ ID NO: 986805 - DNA, 120 bp, Artificial Sequence
  ENSG00000246225_31 (sequence is synthesized)
ctgagtctaatctatccaaagattctttggaaacaaaacattctttagtaatcatttcatagcatctgtgtaagacctaagtttcaatataaattataatttttaaattatgtatttcaa

SEQ ID NO: 986806 - DNA, 120 bp, Artificial Sequence
  ENSG00000246225_32 (sequence is synthesized)
aaagttgcttattaacaatttagagaaaatgtggttacaataatgtgcaacagaggctttagggaagaactgagactaagggcaatatttttaaatacatggatttgaagacatggattt

SEQ ID NO: 986807 - DNA, 120 bp, Artificial Sequence
  ENSG00000246225_33 (sequence is synthesized)
attctcctaggaatttgttgctttaggatcccaattcgagttcaaagatgcatttctaaagggtctcctcaattgcttttctctcagaattaatctcaatttggcttgtttgtgcatatt

SEQ ID NO: 986808 - DNA, 120 bp, Artificial Sequence
  ENSG00000246225_34 (sequence is synthesized)
cttgtttgtgcatatttgagtgaggaactgaactgtcattttcatccacgactcatcagttcctcctttaaaaaaaaaaaaaaaaaaaaaagtaggggccgggcgcggtggctcacgcct

SEQ ID NO: 986809 - DNA, 120 bp, Artificial Sequence
  ENSG00000246225_35 (sequence is synthesized)
caaagaatcaagaaaggagcagcctagcatgaaacaaacttgtaagcaatggaaaagaaaattaccaaaaacagagaaggatattacatgataataaaagtgtcaatccaacaaagagag

SEQ ID NO: 986810 - DNA, 120 bp, Artificial Sequence
  ENSG00000246225_36 (sequence is synthesized)
aacattcctaaacgtgcatgcgccaaacaatgatgctgcaaaaaaatgagaatcaaaaactgacagaagtgaaagaagaagtcaacaaatcagcacttatagtttgatacttcaacaacc

SEQ ID NO: 986811 - DNA, 120 bp, Artificial Sequence
  ENSG00000246225_37 (sequence is synthesized)
ttgcagaagaggaagatgaaacactgaattaggagatctgggaaactgcagacacactttctgacatgttcaaatcaggaaaaaaagggtttgaaatctttcttctataatacttcatga

SEQ ID NO: 986812 - DNA, 120 bp, Artificial Sequence
  ENSG00000246225_38 (sequence is synthesized)
atttttctaaaatactgttcaattttaatgtatttgtttattctgttgccaatgtttaagtctttaatcactttaaacaataggaagtaaaaattaaacagcttcataactttaagcttt

SEQ ID NO: 986813 - DNA, 120 bp, Artificial Sequence
  ENSG00000246225_39 (sequence is synthesized)
catattagcagaaactctattttctaaaaattgttgccagatcattgaattctaaatacttgcctattaaatgtctgtgaaatgaatcaatttctcacataccacattacttccttctat

SEQ ID NO: 986814 - DNA, 120 bp, Artificial Sequence
  ENSG00000246228_0 (sequence is synthesized)
tgtttcccatcttacactttttcagaatagatattcccatggtagaatcatgggctgacactatcacattataaaattttctctggttctgtctcttcccctcaggaacacacatggatg

SEQ ID NO: 986815 - DNA, 120 bp, Artificial Sequence
  ENSG00000246228_1 (sequence is synthesized)
attcttattactttatgcccacattaaataattgtatacaccatgaactggaggccttgtgttttgagtgaaaagctttggatttgagtttgtgtttccaaacacacttctgaggtagaa

SEQ ID NO: 986816 - DNA, 120 bp, Artificial Sequence
  ENSG00000246228_2 (sequence is synthesized)
attgtcaagagctttcccaaactctttttttaatcctcctgagctcaccatctctgggactgtcttgcaattggacagccatgcaattgagcttcagccaatgaaacatgagtggagggc

SEQ ID NO: 986817 - DNA, 120 bp, Artificial Sequence
  ENSG00000246228_3 (sequence is synthesized)
gaatatggcagagccagaaaatgcaaggagcttcttctctggatcaccacttgaagaagagccacttgctcctcaggaaccctattttggactgacgtttaatacaacatggaagccacc

SEQ ID NO: 986818 - DNA, 120 bp, Artificial Sequence
  ENSG00000246228_4 (sequence is synthesized)
aaggcttacagaatgtgctttccagagctgtgacctgaactgtacctggggccttttgagtgaggctggaactggagtggcctggatgcagagagcagtgtcctaaggctgtgcaggttg

SEQ ID NO: 986819 - DNA, 120 bp, Artificial Sequence
  ENSG00000246228_5 (sequence is synthesized)
caagaaagctcaagtagcctatggagaggatgcaaggcttccagctgatgccctcagccaggctcagtagcagccagaactagcctaccaacgaacctgctgatcatgtgcataagccac

SEQ ID NO: 986820 - DNA, 120 bp, Artificial Sequence
  ENSG00000246228_6 (sequence is synthesized)
cttgaacgtcgatcctcctgcctggtggagccatcccagctgatgccacatgaagcagacacaagctgtccctactaagctctgctcaagttggatattcatgagtgaaataaatgactg

SEQ ID NO: 986821 - DNA, 120 bp, Artificial Sequence
  ENSG00000246228_7 (sequence is synthesized)
tgaaccaccccaggccctttgcacctgctattccctctcctcagcatgctctgccccagacaattgcaatgctaacttcttacttccttcaggtttcactcagaaatgactttctcagtg

SEQ ID NO: 986822 - DNA, 120 bp, Artificial Sequence
  ENSG00000246228_8 (sequence is synthesized)
gggtctcccatgaccattttatttaagatttcaactactttgccagtatttcacttctcctcccttgatcttttcttccaagcactcactgccctcttgcacactgtatcttttacttat

SEQ ID NO: 986823 - DNA, 120 bp, Artificial Sequence
  ENSG00000246228_9 (sequence is synthesized)
ttatcttgttcagtttctgcctgcctcacctgcctcaccacagtgtacatttcacgagggcagggattttgtctgttttgttgattgctgtagccctggcatcttgggcagtgccagcac

SEQ ID NO: 986824 - DNA, 120 bp, Artificial Sequence
  ENSG00000246228_10 (sequence is synthesized)
ctgttagcattaaatacatatttactgaatgaatgagtggcttcatgcttaaaagcaagaagagagaccttcatagagaagtaggaaaatgaattgttgcacaaataaagggccatgtaa

SEQ ID NO: 986825 - DNA, 120 bp, Artificial Sequence
  ENSG00000246228_11 (sequence is synthesized)
tgagagagagagagcaagagaaagagcaaacaattaaggagcagcagtggcttcctgcaggggagaccaatgccttctgtcctcagcggaaacagcttggcattcttccaattgatgaat

SEQ ID NO: 986826 - DNA, 120 bp, Artificial Sequence
  ENSG00000246228_12 (sequence is synthesized)
aaccaatctaggttaccggcaagtcctatgacttgatgtggaggcctggaagtgcatccttgaatcttgcaatgcagtgagccaaggagcaatgagaggccacatgaataaccgggccag

SEQ ID NO: 986827 - DNA, 120 bp, Artificial Sequence
  ENSG00000246228_13 (sequence is synthesized)
tgacaagacacatgtcctcctccttgctggtatacaccagaatgccccgcatgcagcgaatgctcaaaaagtgttggtggaagtgacagaattccatcaccattaaacacaaccagtgtt

SEQ ID NO: 986828 - DNA, 120 bp, Artificial Sequence
  ENSG00000246228_14 (sequence is synthesized)
gcggttgacaatggcactgaagcaggtgaaaaatccgtacagcagcttctgtctttgaagagtttgcagcctcttgaagagggtttagaggttaaaaaaagctttgtgctgatgaacatg

SEQ ID NO: 986829 - DNA, 120 bp, Artificial Sequence
  ENSG00000246228_15 (sequence is synthesized)
atagggccgctaccatttggaaagtgacaagaggaagagagagaatgaaacaacagtaagcactggctctcagcttctacctgaagagacaaacattgctttcacttacatttcactggc

SEQ ID NO: 986830 - DNA, 120 bp, Artificial Sequence
  ENSG00000246228_16 (sequence is synthesized)
caaatcaagcccatggcaacaattgagttcaaaagcataaggaggtatctggaaggaagagaatcagaaaatttctgatgagcctcactgactaccttcagggcaaaaaggaagagaggc

SEQ ID NO: 986831 - DNA, 120 bp, Artificial Sequence
  ENSG00000246228_17 (sequence is synthesized)
actccagatcagagatctgcattggaaactccttgagaaccagaagggtatgctgtatttttgtaactgtgaggagcccagaaagactgaagcccaaataaaattcctttattcaatatt

SEQ ID NO: 986832 - DNA, 120 bp, Artificial Sequence
  ENSG00000256050_0 (sequence is synthesized)
caccaggctgtgaaggatccacagactggcatatgcaggaggaaatggggcgggcgaggagtaaggaccccaaaaagcaggggtagggaagggccctcccagcgccccactgtaataggg

SEQ ID NO: 986833 - DNA, 120 bp, Artificial Sequence
  ENSG00000256050_1 (sequence is synthesized)
gcctcatcaatgccccatgctcactgaataaagcactgccagcgaaaggtgaaaagaggaacaaagaacattctcctggacgccacccacagaaagccacgtgcaggcttggccctcacc

SEQ ID NO: 986834 - DNA, 120 bp, Artificial Sequence
  ENSG00000256050_2 (sequence is synthesized)
ttggggaccttggacacggagctggttatgtcacatctggctctcagagctggggcagcgtctaggaggcctgatgtagaaagcactcagctaagccctagttaccggcacacgggcacc

SEQ ID NO: 986835 - DNA, 120 bp, Artificial Sequence
  ENSG00000256050_3 (sequence is synthesized)
agcgccccctctcagcaaactccacgtcttatgaaattagcactggatttccacttcaattggaaaatatggccaaggtggagaaccccttctttaagcaaaagatggcacggacccccg

SEQ ID NO: 986836 - DNA, 120 bp, Artificial Sequence
  ENSG00000256050_4 (sequence is synthesized)
acataagacagttcaaagctgagcggctctccccatcatgcaagtaacctgcgtgccgccacgggaaacagcacgcatcccatctggactcccaccagacaactgaggcaaccgagaagg

SEQ ID NO: 986837 - DNA, 120 bp, Artificial Sequence
  ENSG00000256050_5 (sequence is synthesized)
aggcccaccagctctgccagcacccggcctctgcacctcagctttcagcggataggtttgtgcaacgaaatatttcatagaaatcaagaaacatgagtgaacgatgcacaccaccgcgtg

SEQ ID NO: 986838 - DNA, 120 bp, Artificial Sequence
  ENSG00000256050_6 (sequence is synthesized)
gatgagtctcagagactgtggagcgaaagaagccagacacaaaggttgacatttacacgcaatcctagaatgacggctctatggtggcagagaggagaaaagcagttagctttggcaggt

SEQ ID NO: 986839 - DNA, 120 bp, Artificial Sequence
  ENSG00000256050_7 (sequence is synthesized)
gcccacggagggggctatgcaatggaactttctgggccctggaggtgttgcagagtttgctatgggtggtggtagttacgtgggtttctatgaatgtaaaaactcttggtgtggtagacc

SEQ ID NO: 986840 - DNA, 120 bp, Artificial Sequence
  ENSG00000256050_8 (sequence is synthesized)
caagctctgggcacctcacgcatgccatgcagcagctcgatctgtgacagcgagtcctgtgttccatgatatggctgcaaacacttgacagagtgaatgccgaacctctgctcctaaggg

SEQ ID NO: 986841 - DNA, 120 bp, Artificial Sequence
  ENSG00000256050_9 (sequence is synthesized)
aaatagagggccaggttcctacgagcctctgctccagccttttcagcaaccaatcagtacacaatagagttatttatgtgtttctgttaatatatgtcactaaactcccggccaagagca

SEQ ID NO: 986842 - DNA, 120 bp, Artificial Sequence
  ENSG00000231606_0 (sequence is synthesized)
agaggctgaacagcacacagagatgcagagccatcctgtgaatattttggtctaagctgggggctccccttctgacattagcatctattatcttcctggctgaattcttccctaaagggc

SEQ ID NO: 986843 - DNA, 120 bp, Artificial Sequence
  ENSG00000231606_1 (sequence is synthesized)
gctcggcatccctaggtggttgccagtgtcaaggcaacctcaccaactgtgaaggtatcctgagctcctggaacaggcagaaaagaaacctggcaggaagatttggaggtggctgcaagc

SEQ ID NO: 986844 - DNA, 120 bp, Artificial Sequence
  ENSG00000231606_2 (sequence is synthesized)
tgtcctgtgactgtggaccacctcttccctgggcaatccagagagctcttccaccatccaacagctgcaaccacactggctccaaaaaagtctgaacccaacttttgaagagggatgcac

SEQ ID NO: 986845 - DNA, 120 bp, Artificial Sequence
  ENSG00000231606_3 (sequence is synthesized)
cttccatgtctgcctctccttgggagagaagatgaaatatttccatcttcactgacaaggacttctggcaatttggatgaatgatgccaagagaagaaagcaaccagcttataaacttcc

SEQ ID NO: 986846 - DNA, 120 bp, Artificial Sequence
  ENSG00000231606_4 (sequence is synthesized)
taaggaagcaaatttcaaaagaaaccccaaacatcacgaatcacaagctgctttgttttcttattcatgaccttcatctaccttccctttcatcaagtaaatggaaatgtgtcattctga

SEQ ID NO: 986847 - DNA, 120 bp, Artificial Sequence
  ENSG00000231606_5 (sequence is synthesized)
agacaggaggatgcatcaaaggaagcagtttgtctcatgtccggggttactagcatctcctctggaaatggtgatgaacctcaggctaacacaacgaatgtgcctctttcagatgattcc

SEQ ID NO: 986848 - DNA, 120 bp, Artificial Sequence
  ENSG00000231606_6 (sequence is synthesized)
tgaaccacagccaggccaatgtgatggacggaggtcttgccaggccacttggggggtgaggctgggatgttcctaagactgaaaggcaaaggcgtgcctcagagggttggactgttaaaa

SEQ ID NO: 986849 - DNA, 120 bp, Artificial Sequence
  ENSG00000231606_7 (sequence is synthesized)
aggaggtcttggtgctgatgtttggagcgcctgggtacatcacgtgcttgtctctgtgccatggccgccgtcccagctcggcacagcaggagcttgtgcaagcctccgtcagctccattg

SEQ ID NO: 986850 - DNA, 120 bp, Artificial Sequence
  ENSG00000231606_8 (sequence is synthesized)
gggaagggaaaggagcacaatatacttcctacagaaagccctggccctcagccctcagaggctcgcagctgtgcacatctggaacaaactgtcccagtggagttgcacacgtgctcccag

SEQ ID NO: 986851 - DNA, 120 bp, Artificial Sequence
  ENSG00000231606_9 (sequence is synthesized)
catactctctgaatccgacaccaagtgcggagccaggagggcccggcatgcatgctgcctagccacgtgagccacctttcactcatctccaagcagaaaccatcggcctttgtgacttca

SEQ ID NO: 986852 - DNA, 120 bp, Artificial Sequence
  ENSG00000231606_10 (sequence is synthesized)
agctcgttggacatgtcaataacctgacagacctttgagtctctctacctgacgcccagccccgtgattacctctcctctttccatccctccaaatttggagctactctgcattttgctt

SEQ ID NO: 986853 - DNA, 120 bp, Artificial Sequence
  ENSG00000175772_0 (sequence is synthesized)
tcgcgggtgcagaggagcgcgtgcgataatctgcgtgcattcgtcgataactgtctatgcgaagcaccgacgcagccatgagtacctgcggggcttcactctgtgccacaacgagcgaac

SEQ ID NO: 986854 - DNA, 120 bp, Artificial Sequence
  ENSG00000175772_1 (sequence is synthesized)
cgctgtacaggagctcgactagctgtcgcaccgtctgcacaggcaccaccgaaggcacacggatctcagaggggccgagcagcagcttgtcttggaaggagggcgagccgattgccagcc

SEQ ID NO: 986855 - DNA, 120 bp, Artificial Sequence
  ENSG00000175772_2 (sequence is synthesized)
cgcagcggtgcgcacgcagcgaagcttcatgaatgcacacagtcacgtcgcagaagtgcccacccagcttctgcccattgagggtctcaagcagagagcgtgagaagttctgcagatgta

SEQ ID NO: 986856 - DNA, 120 bp, Artificial Sequence
  ENSG00000175772_3 (sequence is synthesized)
tgtggcgcacagcctctacagccgccgactccgactcctcttcaggcaccaggcctggccgtggccgccttctcaccgactccaaggcagcacttccgggcgcttctctttatttttata

SEQ ID NO: 986857 - DNA, 120 bp, Artificial Sequence
  ENSG00000175772_4 (sequence is synthesized)
cagttttattgagatataatttacatgctatccagcccatctatttcaagtgtaccatgcaaggggtttgtatatattcacagagttgtgtatccatcaccatcgttttagaacattcat

SEQ ID NO: 986858 - DNA, 120 bp, Artificial Sequence
  ENSG00000175772_5 (sequence is synthesized)
cactccagaagaaactactacccatcagcagccactgcccatttccctgatctgccccgccctaggaaatccgtaatcactttcagtctatggatttgcctattctagaccattcatata

SEQ ID NO: 986859 - DNA, 120 bp, Artificial Sequence
  ENSG00000175772_6 (sequence is synthesized)
tattctagaccattcatataaatgaagtcacacaacactgggtcttatgtgactggcttctatcaaagtttgcaaggttcatttatgttcatggtcatcactgatcagaggcctaaccca

SEQ ID NO: 986860 - DNA, 120 bp, Artificial Sequence
  ENSG00000175772_7 (sequence is synthesized)
cccagctgtggggaggaaagatgctgcagaggagacggatgcccacagaggcccctgagtggatacaatgctcactaagtgggctgaccccacattggacaccgctgcatccatgtccat

SEQ ID NO: 986861 - DNA, 88 bp, Artificial Sequence
  ENSG00000175772_8 (sequence is synthesized)
gggctgaccccacattggacaccgctgcatccatgtccatcacacaacacagctgccgttctcctccgttttcttctcttcctgccct

SEQ ID NO: 986862 - DNA, 83 bp, Artificial Sequence
  ENSG00000175772_9 (sequence is synthesized)
aatcccctctagccagcagagagagagaggaatggctgcatgttttctcccccagtccaaggcactgggtcttggctgggttg

SEQ ID NO: 986863 - DNA, 72 bp, Artificial Sequence
  ENSG00000175772_10 (sequence is synthesized)
taccttggaaggtgaatgatcctgccaggactcttagcctccctgggtctcaatttctttatctgtttcatg

SEQ ID NO: 986864 - DNA, 120 bp, Artificial Sequence
  ENSG00000175772_11 (sequence is synthesized)
cttagcctccctgggtctcaatttctttatctgtttcatgggaatgaggatctctgctgggtggttgggtgatgtgggggctgtgtgaaaacagcttgtcaatacaagccaaaatagaaa

SEQ ID NO: 986865 - DNA, 70 bp, Artificial Sequence
  ENSG00000175772_12 (sequence is synthesized)
tttaaattaaatggaaaattaaaatggtaaaaaatgcaaagctgtattgtactcgttccccctaaatata

SEQ ID NO: 986866 - DNA, 81 bp, Artificial Sequence
  ENSG00000175772_13 (sequence is synthesized)
gagctttttgactatgtaagaatcctgtactcgttccccctaaatatgatgggcaaggacttcacctgctgttgctggctt

SEQ ID NO: 986867 - DNA, 120 bp, Artificial Sequence
  ENSG00000175772_14 (sequence is synthesized)
cccctagaagctagaaaaggcagggacccgattctttccttgagcctccagaagggacacagccccgccagcaccttgactttagcctggtgagatcctcttaggacttttggcaatcag

SEQ ID NO: 986868 - DNA, 68 bp, Artificial Sequence
  ENSG00000175772_15 (sequence is synthesized)
cagaagggacacagccccgccagcaccttgactttagcctggtgagatcctcttaggacttttggcaa

SEQ ID NO: 986869 - DNA, 63 bp, Artificial Sequence
  ENSG00000175772_16 (sequence is synthesized)
agcagcaatagaaaactaatgcagggcccaagaaatcactggtgatgagatgaggtctggatc

SEQ ID NO: 986870 - DNA, 67 bp, Artificial Sequence
  ENSG00000175772_17 (sequence is synthesized)
ctcaggaggtctggatctgggattgattgaattttttatatatatatgtgaattttcacaataaaat

SEQ ID NO: 986871 - DNA, 120 bp, Artificial Sequence; identical to SEQ ID NO: 819076
  ENSG00000175772_18 (sequence is synthesized)

SEQ ID NO: 986872 - DNA, 61 bp, Artificial Sequence; identical to SEQ ID NO: 819095
  ENSG00000175772_19 (sequence is synthesized)

SEQ ID NO: 986873 - DNA, 120 bp, Artificial Sequence
  ENSG00000253669_0 (sequence is synthesized)
ggcagtagggcagggaccttgaaaaggaatgatttgaacagatcggaaaagacattccagacagaaacaaatgcctgaaacccaaaccgagaagcaggaaagagcagactgcgttctcgg

SEQ ID NO: 986874 - DNA, 120 bp, Artificial Sequence
  ENSG00000253669_1 (sequence is synthesized)
aatggcagggagtccagtttgactggaagacctgaggctcagaggcgcatcacggcccagatgcagaccacagaggcaggcacagtggcccaggaggaccgaggacctggagtcacgggg

SEQ ID NO: 986875 - DNA, 120 bp, Artificial Sequence
  ENSG00000253669_2 (sequence is synthesized)
ttccgcccgctgcccctggggaaccgagtcatgccagttcccagacagatgaattccttccaagaattccacagtcctgctcaatcctagccgccaagcctcctggccttggatggctgc

SEQ ID NO: 986876 - DNA, 120 bp, Artificial Sequence
  ENSG00000253669_3 (sequence is synthesized)
tgtctaatgcagatcctctttcatccagatttcaaatatttttcctattctgtcctttgatcactaacgtttatgtttatctacatcagcatccctcaatcctgacggcactctgaaatt

SEQ ID NO: 986877 - DNA, 120 bp, Artificial Sequence
  ENSG00000253669_4 (sequence is synthesized)
atctaggggtgctttaaaaaagaaaaatgttgatgcatggccctcctccaggaaatctgattttattggtctggggtggggcccaggcatcagcagacttttaatgagcagttagagagg

SEQ ID NO: 986878 - DNA, 120 bp, Artificial Sequence
  ENSG00000253669_5 (sequence is synthesized)
agaaccactgatggagatggtcaccagggagtgtccaggtcagaccgccacagaagagtgcagcctcctggccttcagacccaactgggacaaaccctgagaacagccttggcagacctc

SEQ ID NO: 986879 - DNA, 120 bp, Artificial Sequence
  ENSG00000253669_6 (sequence is synthesized)
caggggcagctggactccctgaggctggatgttgcagcctctcccaggcatccactctgcagctgaggccaaagtttccaacgggaagggagggagagtctccgagtctgggccttgcca

SEQ ID NO: 986880 - DNA, 120 bp, Artificial Sequence
  ENSG00000253669_7 (sequence is synthesized)
tcggttaccaaggaggtgaccagctatccttttccaagactgaaaagcagaaatacggccctgaggctagagggtctaagagaacaataggaagaatttcctgacaaaggacaatgttgc

SEQ ID NO: 986881 - DNA, 120 bp, Artificial Sequence
  ENSG00000253669_8 (sequence is synthesized)
ctaaaggactcaggaagctctgtgaaaacaggagactcccgagcagagcaccagacccttctccaccaggcagtgtttttcccatatgacaggtgagaaaactgaggctgagagacatgt

SEQ ID NO: 986882 - DNA, 120 bp, Artificial Sequence
  ENSG00000253669_9 (sequence is synthesized)
aataacttgctgaagcagcaaccagcacaccatatagctgaaatctgtagatcagcagttaaaagtggtagggcaagtcctctctgactttcagcgctaagagcctaggattctgtgttt

SEQ ID NO: 986883 - DNA, 120 bp, Artificial Sequence
  ENSG00000253669_10 (sequence is synthesized)
ttctgcttaagcctgggaatcagagtcctacaaaagccgcgcctaatcctgggggtgtgggctttaaacccagagagaaagcatgttattggaatactcctgcacttttctccctttgaa

SEQ ID NO: 986884 - DNA, 120 bp, Artificial Sequence
  ENSG00000253669_11 (sequence is synthesized)
cttttctccctttgaatcccaccacggaaagaaaattctgtgacgtgtacccagtatttattggagggtatttcctagcaagaaaatgagggcgattgaccaggcacggtggctcacgcc

SEQ ID NO: 986885 - DNA, 82 bp, Artificial Sequence
  ENSG00000253669_12 (sequence is synthesized)
gtggcgcatgcctgtaattccagctactcctgaggctgtggcagcttgagatcaagccatcgcactccagcctgggcaacag

SEQ ID NO: 986886 - DNA, 90 bp, Artificial Sequence
  ENSG00000253669_13 (sequence is synthesized)
ggcaacagagtgagactctgtcaaaaaagaaagtgtggtacatctatactaatggagtactatttagccgtcaaagaaaaaaaagaggaa

SEQ ID NO: 986887 - DNA, 120 bp, Artificial Sequence
  ENSG00000253669_14 (sequence is synthesized)
agggtgcgtcaccggagcagatgcccggggcggttggaggctcccgggctcccgctgactcatcagaaaggcctgccgcgcggcccggggggcgggggaacgtgggggaccgcggggagc

SEQ ID NO: 986888 - DNA, 120 bp, Artificial Sequence
  ENSG00000253669_15 (sequence is synthesized)
tgccgggcaggcggcagccgaggtcgtttgaggcgcgcagagccggaaaaccccacggagacggctgggcgggggcggggcgatcggcactgaccaggtcacctgcagcgcgggctgacg

SEQ ID NO: 986889 - DNA, 120 bp, Artificial Sequence
  ENSG00000253669_16 (sequence is synthesized)
gcgggcgactgaaggagggagcaagtctcccacccccagcagccggcggccgcttccgaagtctgcccccttccactgcggagcggcgccccgcgggcccccagccagcgcgcccgaggc

SEQ ID NO: 986890 - DNA, 120 bp, Artificial Sequence
  ENSG00000253669_17 (sequence is synthesized)
gcccccgccccgtgtcgctcgcgctgcgttattgggagaaggcggttcctgagcaccagcacgggcctcggtgacaccggaggtcgctggggtcttccccttccccttaagactctgggt

SEQ ID NO: 986891 - DNA, 120 bp, Artificial Sequence
  ENSG00000253669_18 (sequence is synthesized)
ctgtctgtgggaagagctttcattccccaccccactctatgccgaccctctccgggggaggctccactggcactgtagacaccacgtgctgggtaaaaaggcctggtcccagcgcttccc

SEQ ID NO: 986892 - DNA, 120 bp, Artificial Sequence
  ENSG00000253669_19 (sequence is synthesized)
tgtcactgactgctaaccacaaggcgccgtggcactcaggaaatgcggcaggggggctggagaactatcaggaaggggtgtgggcagagaagaggcttccaccctgtcttggaacacgga

SEQ ID NO: 986893 - DNA, 120 bp, Artificial Sequence
  ENSG00000253669_20 (sequence is synthesized)
cacagtccatggcattcaaaagaggtgggaggctcctctgtgcacgtgccttccgcccccgggacaggtggaggaggggatttgactggtcctcaccctctgcatttatagtctgggcac

SEQ ID NO: 986894 - DNA, 120 bp, Artificial Sequence
  ENSG00000253669_21 (sequence is synthesized)
gccgcaggagggcgctgtggagtacaggcacatgcagaaggagagtctccgagtctgggccttgccactcctcactcagcatctgaccatccccacctcctggatctacagggttcatag

SEQ ID NO: 986895 - DNA, 120 bp, Artificial Sequence
  ENSG00000253669_22 (sequence is synthesized)
tttccaacgggaagggagggtgaggcttctatttgtttcccaagagccagctgacctttgaagctagtgataaccaccacaaacctcactggtgggagaacgaggcactgcagccagttc

SEQ ID NO: 986896 - DNA, 120 bp, Artificial Sequence
  ENSG00000253669_23 (sequence is synthesized)
tcatcaaccccacatccctgcagggggccccaaggcggatgtgtcaccatcctctgcaacgctgggcctcagaggtggaggaggcccagccatggccagatgggggatctggggaacagg

SEQ ID NO: 986897 - DNA, 120 bp, Artificial Sequence
  ENSG00000280752_0 (sequence is synthesized)
aacctagcttaaaggatcctcacatagtgtggcaacaactctgtgcacagaccaaggaaggagaagctgtgggagctggtaaaatatttccttggtggtcaggaccaaggctggaggtga

SEQ ID NO: 986898 - DNA, 120 bp, Artificial Sequence
  ENSG00000280752_1 (sequence is synthesized)
acccctcaatgtaagtgtcaagggacaacattcctgcctgatatgtgagccaatcaggagttcactacaatccgtgaagccataaccagggacattcaaactgcaaaccaggctgcagtg

SEQ ID NO: 986899 - DNA, 120 bp, Artificial Sequence
  ENSG00000280752_2 (sequence is synthesized)
atatgaccatcaagaaaattcaaaggaagagacacatggaacattcaaatgaataagagacttcagaagacagcatacaaagaccactgcagcgaatacaagagacttgtcacagatgag

SEQ ID NO: 986900 - DNA, 120 bp, Artificial Sequence
  ENSG00000280752_3 (sequence is synthesized)
caacttagaacataaaatgaaaaatataccatccccaacagcatttaaatccaaaatataaagaagaagaagcctaaccaaaatatgcaagacatttacagaagcaactgtacaagtttg

SEQ ID NO: 986901 - DNA, 120 bp, Artificial Sequence
  ENSG00000280752_4 (sequence is synthesized)
ctgacagattcagagaaaaaattcccaaataaatggagtagtatatgatgttcactgatgaggaatagaatacagcaaaggtgtaaatcttacttaaattaaataaacagttaatgccta

SEQ ID NO: 986902 - DNA, 120 bp, Artificial Sequence
  ENSG00000253660_0 (sequence is synthesized)
gtgaaaaaaggacagaagcaaaggctacacaaaacaaagccagacctggagatcattttcaaactcttccctcctcacccaaaatacatgaaaagcccttctgtaaagcaactgatgtct

SEQ ID NO: 986903 - DNA, 120 bp, Artificial Sequence
  ENSG00000253660_1 (sequence is synthesized)
tcaacttactatgaaacggagatgaataactcagcttgatgaaggaaccctcatgtccactcaattaatgattgggcacctaccctgggtcagagggcttttggaggtacagagttcctg

SEQ ID NO: 986904 - DNA, 120 bp, Artificial Sequence
  ENSG00000253660_2 (sequence is synthesized)
aaattggagtcttcaattaagcacacggaatacatgtgctgaattgctttctttgcaaggttcagagtcagaattcctgccctgggttctgagttgctgagtggagacgatgatggagag

SEQ ID NO: 986905 - DNA, 120 bp, Artificial Sequence
  ENSG00000253660_3 (sequence is synthesized)
cagtggagacacgtgattttcagggtgctctttgcatgcatgaaatggagcaagacttatgaagggaaaatgaaagaggaggataggaagatacgtcacctcctgggtttcctccaatca

SEQ ID NO: 986906 - DNA, 120 bp, Artificial Sequence
  ENSG00000253660_4 (sequence is synthesized)
tccagtcctcatctctctatatgtctttgaacactctgagcgccatcatgccaattccatggatgaaacaaatacccatgactcagcatttttctaatgaaaacacgtgcggtctgaccc

SEQ ID NO: 986907 - DNA, 120 bp, Artificial Sequence
  ENSG00000253661_0 (sequence is synthesized)
tgagtgtgtctctgtgtgtgtaggggtcgaggtggggggggtccgtgtttgcgatctgaacctttggtacctacaaggagggtgtctcaccgaacggtagctaaaacctcaccagaaccg

SEQ ID NO: 986908 - DNA, 120 bp, Artificial Sequence
  ENSG00000253661_1 (sequence is synthesized)
cgcggaagtgagaagtcgcggccaaaggcgcccgcagaagcctcctctctgggccggaccccagcccgagcggccgaaaggagccccccgcccggatcacagaagtttacaaggaaaggg

SEQ ID NO: 986909 - DNA, 120 bp, Artificial Sequence
  ENSG00000253661_2 (sequence is synthesized)
gaaatgtctgaaatggagattgcacaatcctgtcttgaagcagaagactcagctagagcacatctggaaacacctggcactcctcaatagaattcaaatgctattttaaaagatgtaaaa

SEQ ID NO: 986910 - DNA, 120 bp, Artificial Sequence
  ENSG00000253661_3 (sequence is synthesized)
tctgagctgcaacactgaacaaaagctgtacttgccagccagcaaagatgctaccactctgcacaacagataaaacccatacatatagggaagtcaaaagagtctttaagctacagtgtt

SEQ ID NO: 986911 - DNA, 120 bp, Artificial Sequence
  ENSG00000253661_4 (sequence is synthesized)
tgagaggctgtttgtctctgatggaaaattaagaaaatgagtccatttctaagaagatgtggttcgaacatacagagctacataatatgagtaaaataggacctaacagtagtgttctcc

SEQ ID NO: 986912 - DNA, 120 bp, Artificial Sequence
  ENSG00000253661_5 (sequence is synthesized)
agcattgctctgcctttccttttctggatgtaacaacattactaagaaaggaagaaaaagcaaaaatctgctctcggggagattccagaatgttggaaagccccaaatggaagtctctgc

SEQ ID NO: 986913 - DNA, 120 bp, Artificial Sequence
  ENSG00000253661_6 (sequence is synthesized)
gtttaataaataaaaagatgctcatctgggatgctgcaccaattatcatgtactaaataaggttacctacttcactctccaggtagaaatgtctatcataagcatgtgccacagaaggtc

SEQ ID NO: 986914 - DNA, 120 bp, Artificial Sequence
  ENSG00000253661_7 (sequence is synthesized)
tctcaagtatcattattggctgtgttgaattttgtttttagttctcttttataaggtctgtagtcttactttcagtgaggaagtgttttctcaggttctcaagaaagtaacaaaatgcca

SEQ ID NO: 986915 - DNA, 120 bp, Artificial Sequence
  ENSG00000253661_8 (sequence is synthesized)
gcattgtcaaggtcaccattgccactgaattatcttactgtctgattattccatcttcctctgcatcatattagcctgatgactacattctaattatttaaagcgttatgtaaatcaaag

SEQ ID NO: 986916 - DNA, 120 bp, Artificial Sequence
  ENSG00000253661_9 (sequence is synthesized)
cagtaaatgtaatttctagtcttactagatatcatgtacattaggtcgaataactctagaaatgtcgtcataatcatgtcatgcctaatgatgacctactcagcccctgccaacatcatt

SEQ ID NO: 986917 - DNA, 120 bp, Artificial Sequence
  ENSG00000253661_10 (sequence is synthesized)
caattactcatttcagtattgatttttctcatgcctctcttcgtggcatttaaacagccctcacatctccccttttactgaggtgtaatgttgtataatgacagagatgctttgcttccc

SEQ ID NO: 986918 - DNA, 120 bp, Artificial Sequence
  ENSG00000253661_11 (sequence is synthesized)
agattcataatgttacactctgtttcaaatccttttggagacaaattggggaatcaatatataaataatgacacacttatttttaattaaaatcactgctttcacagaaatggtatatta

SEQ ID NO: 986919 - DNA, 120 bp, Artificial Sequence
  ENSG00000253661_12 (sequence is synthesized)
aaattatttttgctaaaaaaattttaaatacctatgtacgataaaaagactgccaatccttgggatcaagaatataatttgccccaaataacttttctgtaaaagtagaattcttaatgg

SEQ ID NO: 986920 - DNA, 120 bp, Artificial Sequence
  ENSG00000253661_13 (sequence is synthesized)
cgctgaaattcgctgtggccgctgcctcttcccgctttaatcccagacctccagtcattgggcagctcctcagaggcaagaagtcaacaccatggcaacccgacaagcctatcaaatcac

SEQ ID NO: 986921 - DNA, 120 bp, Artificial Sequence
  ENSG00000253661_14 (sequence is synthesized)
cggctggcgtgacagcagcaacactgcaggcaggagtgggctgggcggaagagcagagtggccactgcgctcaggtacacagtctgggagtggacagcagctgctggtctccacgttctg

SEQ ID NO: 986922 - DNA, 120 bp, Artificial Sequence
  ENSG00000253661_15 (sequence is synthesized)
gctacacatatgtgcaccacccagtccatacccctaccttatgtgccctagtaggttctggaggagaaaggggaggaggagaaggagagaagcatataggcttggaggaacaggaaccgc

SEQ ID NO: 986923 - DNA, 120 bp, Artificial Sequence
  ENSG00000253661_16 (sequence is synthesized)
agaaaagagttttaaactaaaaggaatccaagtcttagaattgtaaactaaagatgtcttgtgccccagcagtctatgaaaacaagtcacaataggctcaaaactaaatggaatgagttt

SEQ ID NO: 986924 - DNA, 120 bp, Artificial Sequence
  ENSG00000253661_17 (sequence is synthesized)
tgtgtgtgtgtgtgtgtgtgtttgccagttctgttatttgtttgaacattaatgcaacattctgttctggagctccaaaaggataaaggaagatgttgctctggagttccaaaaggataa

SEQ ID NO: 986925 - DNA, 120 bp, Artificial Sequence
  ENSG00000253661_18 (sequence is synthesized)
aaaggaagatgttgctctggagttccaaaaggataaaggaagatgttgcattttaaaattttcttgtctgccactgttggagtctgctcaactttaatttcagctatggtaatggtaatt

SEQ ID NO: 986926 - DNA, 120 bp, Artificial Sequence
  ENSG00000253661_19 (sequence is synthesized)
ggcttccttgaagatgacctaaactttacctgaaaccgtctttgccttgttctttcataaaaggtgtgttgcgtgtaatgtgtgttctagatcttgattccataaagggaagaaagagag

SEQ ID NO: 986927 - DNA, 120 bp, Artificial Sequence
  ENSG00000253661_20 (sequence is synthesized)
gacaccaggaaatgtgtgtattcctctaaggcctacctggcctttgtatttcctcattttccttaagaaatgttgaattaggcagatgaaggaagatgggcatttcactaacatttcaga

SEQ ID NO: 986928 - DNA, 120 bp, Artificial Sequence
  ENSG00000253661_21 (sequence is synthesized)
gcattgtgtaaattaccatgagatagattggaattgcattgttcttttttattttaaaagcaaacaatatttttgagaaacacccaacatatttcttaacttacaatttcattgtgaaac

SEQ ID NO: 986929 - DNA, 120 bp, Artificial Sequence
  ENSG00000253661_22 (sequence is synthesized)
ctttgacaaatatttgtacaagaatatagaatgctatcattgaccaaacgtcccccctaggtcacttatctcatcatgatttctaaattttggaatgcaagtttgcctgttgaagttgta

SEQ ID NO: 986930 - DNA, 120 bp, Artificial Sequence
  ENSG00000253661_23 (sequence is synthesized)
taggacagaaaggaaaatttatttaataacaaaggtaatgtgtcttattgaggaaatcttgtatgaattacaaaatctacacttaaatccactccacataaacacgattcactaaataaa

SEQ ID NO: 986931 - DNA, 120 bp, Artificial Sequence
  ENSG00000253661_24 (sequence is synthesized)
caatttttatattgatctaacatttttatgaagaggctttcaatgtgtaagtatttaaattatacttggcatccataaaatgttagagaactagaaaggcttttaaaagcagcaattgca

SEQ ID NO: 986932 - DNA, 120 bp, Artificial Sequence
  ENSG00000253661_25 (sequence is synthesized)
atattaagcagagtaggatggagagccaatgtttgaggctataaagaaaaattcgatgaaatcttgaacttcatttccttactttctctgtgtttcattgttgatagatcccaatattaa

SEQ ID NO: 986933 - DNA, 120 bp, Artificial Sequence
  ENSG00000253661_26 (sequence is synthesized)
aacagtatattttcaaaatataatttattatagaaccaaaatgggcataattactggcactagagaaacaggtcatgatatcctagaaaaaacttttggacataatatgatttttcctgc

SEQ ID NO: 986934 - DNA, 120 bp, Artificial Sequence
  ENSG00000253661_27 (sequence is synthesized)
attgaaactctaatgtcatactggtaatattttcttattctgcgctactgtgcagagttgcttaatgaagaaccgccaagcacacagagctgatatttggttattgcttaaatggctacc

SEQ ID NO: 986935 - DNA, 120 bp, Artificial Sequence
  ENSG00000253661_28 (sequence is synthesized)
tcaatgccaaggtattgatatccttaaatatttttggctaattcacattacatttaacatgtgctgagcgtttacagtggaaaacatatgaagaaacataatactgtaatttaaaactaa

SEQ ID NO: 986936 - DNA, 120 bp, Artificial Sequence
  ENSG00000253661_29 (sequence is synthesized)
ttgttatctcctgaaactacatttgtaaatttaaaatatttttaaagataagtttaataaaatgttcaaaaatatttcagtatactttggcttttgtaataataaatgagcacaggaaat

SEQ ID NO: 986937 - DNA, 120 bp, Artificial Sequence
  ENSG00000253661_30 (sequence is synthesized)
aatgagcacaggaaatatggtgacatttaatattttactatttcttttaatggcatgtcctcagttaatggaaaactttcagtacttcgggatctataatactattcgtgtgcgtgtgtg

SEQ ID NO: 986938 - DNA, 120 bp, Artificial Sequence
  ENSG00000253661_31 (sequence is synthesized)
ttaaaaaattaaaatgagatgaagttaatatattaaagaatttaaaccaaaacaaatgcctaggtattttaagaaatcctttgaatttttcttaagtttttctttatcatgaacttgcca

SEQ ID NO: 986939 - DNA, 120 bp, Artificial Sequence
  ENSG00000253661_32 (sequence is synthesized)
acttgccatttatgggtgattgaaaattgaaacaatttttttgcatttataacacaaatatttattttttaattataaatcaattttagtgtctaccattaaaaataccttcataggttg

SEQ ID NO: 986940 - DNA, 120 bp, Artificial Sequence
  ENSG00000253661_33 (sequence is synthesized)
tataatatatgaccatctgtttaaatatagattcatgtatatgccacacacatgttgctagttagctttacattcaaatctttacatttaaagctattttttacacttttagtactttcc

SEQ ID NO: 986941 - DNA, 120 bp, Artificial Sequence
  ENSG00000253661_34 (sequence is synthesized)
atatggatgctgttagaaggaggaaatttctctcctttagctgatgaataagatagtagaattaaacatagtttaaatactacattaaaaaaaatcaatgcaaggatgcctcactcattt

SEQ ID NO: 986942 - DNA, 120 bp, Artificial Sequence
  ENSG00000253661_35 (sequence is synthesized)
tcaacaggatggataccatctccatagagttcattcttgaccttacctgagtaagtactttaacttaaagtatgagatgcacctagaggggtaatacattgagcttaataggaagacagt

SEQ ID NO: 986943 - DNA, 120 bp, Artificial Sequence
  ENSG00000253661_36 (sequence is synthesized)
taataaccttttttcatcctcgtgcactatcaatcatggctgtcaccagtctgctgaatcaaagcaaaagtgttcttcacagatgactgattagaaacgcaaaatcacaagatccatctt

SEQ ID NO: 986944 - DNA, 120 bp, Artificial Sequence
  ENSG00000253661_37 (sequence is synthesized)
catggtcacttttattatagtcatttttaaactgacagcaacctgctcagcttcagcacactgggcatcacaaatagtgtcactcagtgcagctaggcatgagaagaggttggttggatt

SEQ ID NO: 986945 - DNA, 120 bp, Artificial Sequence
  ENSG00000253661_38 (sequence is synthesized)
atactgagaaataattaggccctcaaccctttgtggttcctagaaaaaggtatttggctctcaatctcccctcccccactcctaatatattttgattccgttgtatcattagtttagcat

SEQ ID NO: 986946 - DNA, 120 bp, Artificial Sequence
  ENSG00000253661_39 (sequence is synthesized)
tagaagggaggagtcttagggtatagttttatccctgttaattgtctgggaattaggaaatgaatatgtctacttgaaaattacatacaactttttgtgtaccgtcttttgtcaacttca

SEQ ID NO: 986947 - DNA, 120 bp, Artificial Sequence
  ENSG00000253661_40 (sequence is synthesized)
tgacaaccagaaatattgctaccctcacaggggtaaatagtttaaataaggtggtttttatacaaatatgtgcgtgtgtgttcacgcttcagaaatctaagtagtcaggtcatagtaaat

SEQ ID NO: 986948 - DNA, 120 bp, Artificial Sequence
  ENSG00000253661_41 (sequence is synthesized)
gatgcccacttactaataaggtgtcctttttctgtggaaagcatttaataccatcacttgagtgctgtaacactggaattactgaggctctaactaaatgcatagtcttaaagaaggcca

SEQ ID NO: 986949 - DNA, 120 bp, Artificial Sequence
  ENSG00000253661_42 (sequence is synthesized)
aaatattaactcttaggtagctgtgtaaattcttgacatgtagtgtcatatttttttcagccctagaatattgaaaaaaggacaaatttggaagaccaacaaatagatatacgtaaaaag

SEQ ID NO: 986950 - DNA, 120 bp, Artificial Sequence
  ENSG00000253661_43 (sequence is synthesized)
cattacagtaggaggtttgaaacagttatagcagaatcaaatgataaggaactttgtctttactaagactcttcatctttgtgatacaagatgaaacttttgggtttatttcatgatatt

SEQ ID NO: 986951 - DNA, 120 bp, Artificial Sequence
  ENSG00000253661_44 (sequence is synthesized)
gtcatacatgccttaagaatattttatagtactatatgacagtattgataagaacatttacatggggaaagttttcaatagaaaatcttcaaaatatattgtaattctaatgcccatttt

SEQ ID NO: 986952 - DNA, 120 bp, Artificial Sequence
  ENSG00000253661_45 (sequence is synthesized)
ataggttcattatttcatattttgggaaagtaaaccccaatagatttaagttttagtttagtaattttaaccaaagtgccttattttaggtctccatacagttatcttttcccctcatct

SEQ ID NO: 986953 - DNA, 120 bp, Artificial Sequence
  ENSG00000253661_46 (sequence is synthesized)
caaatatccactttcttgttagtgtgcgcacacacacacacccccccaaacactaagagaaagagagataagtcattaataatgtttatataacataataaccttagattaactttcaga

SEQ ID NO: 986954 - DNA, 120 bp, Artificial Sequence
  ENSG00000253661_47 (sequence is synthesized)
catgtgaatatcctacctttaacttttctgtaaggtaccaatttttttctccatctctctataaaccgcccccccacacacaaacacacacatatgcacacacagacatacacacacatc

SEQ ID NO: 986955 - DNA, 120 bp, Artificial Sequence
  ENSG00000253661_48 (sequence is synthesized)
tttattatttattctaggttatgacaatgtttttctcttctgtgcaaaatacataaacagcatacatatacacatagtcatatatatgcatgtacgatatatctgtgttttctacagatg

SEQ ID NO: 986956 - DNA, 120 bp, Artificial Sequence
  ENSG00000253661_49 (sequence is synthesized)
tatgcatgtacgatatatctgtgttttctacagatggtaatagatgtctaaaagtactctataaaaaggctaaaattaatttctttaatattgtactttgttatacatatttttgtatat

SEQ ID NO: 986957 - DNA, 120 bp, Artificial Sequence
  ENSG00000253661_50 (sequence is synthesized)
attaaatatgtaaaattagggctaactgaaatgtttatgtatttttaagctacataattacataaataacaatgcaataatcatcttaatgtgttcattttcagttcactttaacaataa

SEQ ID NO: 986958 - DNA, 120 bp, Artificial Sequence
  ENSG00000253661_51 (sequence is synthesized)
ggctagtgctgcggctgtgttggtaaccttaatgggacggagcaaatcagggagtacactgaagataatgacaggcaccattcttgcaacatttatgtaaagttttacactatttcaaaa

SEQ ID NO: 986959 - DNA, 120 bp, Artificial Sequence
  ENSG00000253661_52 (sequence is synthesized)
tgaaaagtaaaataaaatttttaaaaagctgacatggtttaggataacaattttaccagaagaatatcttatgttgcatttagcccatgtagaacattatacatatatataatgttatat

SEQ ID NO: 986960 - DNA, 120 bp, Artificial Sequence
  ENSG00000253661_53 (sequence is synthesized)
atttctttatgttttctggtgtgtacatacatttatcgatatattcttattgatctagtttctctaagattctgacatatttcagaacaaaggaagaaatcttaccagtcagttcagtaa

SEQ ID NO: 986961 - DNA, 120 bp, Artificial Sequence
  ENSG00000253661_54 (sequence is synthesized)
gatatttggaaagggagacttgaatatgtgaaaaatttattttgatctatagaagatgttaatattattttccttagtttttgtctttctgattacaggcttaacgcaaccttgtatttc

SEQ ID NO: 986962 - DNA, 120 bp, Artificial Sequence
  ENSG00000253661_55 (sequence is synthesized)
tcttttaagtgatcaggagcagaatttgcaaactttttagaatatgtattttagttcaaattccccccacccaaaattaatttcatctacgtatgcagaaagtataatttatagtaaagt

SEQ ID NO: 986963 - DNA, 120 bp, Artificial Sequence
  ENSG00000253661_56 (sequence is synthesized)
gctaaatctaacctgatttctctccttaaaattaggtttaaaataaattaagcagtacctaatgtgtttcctaacaaggctcagggtacacaatgttctttggttggccacaaaacacaa

SEQ ID NO: 986964 - DNA, 120 bp, Artificial Sequence
  ENSG00000253661_57 (sequence is synthesized)
ggtccttgagctgagatgacagattcttcaaacagacatatcctgtacaaggtgccttaaaagtgaaggcattgctgccattggcttgcaggctttatattgaaaaggagaattctgaag

SEQ ID NO: 986965 - DNA, 120 bp, Artificial Sequence
  ENSG00000253661_58 (sequence is synthesized)
acaactcttcaagcaaaaacacctccagcaaacttcctccttcacttcaaacctcatcttcaattacaatgtggttcctacaaagtaaagggctgttgtcctctcttcagacctgtgctg

SEQ ID NO: 986966 - DNA, 120 bp, Artificial Sequence
  ENSG00000253661_59 (sequence is synthesized)
cttctgcgcactagccctgtagaccatcaaggcctaaaaatagctgctagattcaatgagacatgaagctgacagaaatggcatcaagctaattggcaacaaactctatgaaacctactc

SEQ ID NO: 986967 - DNA, 120 bp, Artificial Sequence
  ENSG00000253661_60 (sequence is synthesized)
aggaaatcatatttttaagctgaacaccaagtggattcttgtttgaatgtgaggctaacttatttttatatttatatttcaaataaaacaaaggggaattgttaaagaagaaccttttta

SEQ ID NO: 986968 - DNA, 120 bp, Artificial Sequence
  ENSG00000253661_61 (sequence is synthesized)
tttcccttattatatatttatttaatccttttaaaagttttgttaacaaaatctttggattcagtgatatttatttgaaaagattgttatccacacattatgattaagaaagtggggctt

SEQ ID NO: 986969 - DNA, 120 bp, Artificial Sequence
  ENSG00000253661_62 (sequence is synthesized)
aaagaggtgcaatgacatgtccttagtcaaaacatagacaacttgattctaatctatcaggaaagacgacgatatttataagtaaccagaacacaaagtgctaagttcaatactcatatt

SEQ ID NO: 986970 - DNA, 120 bp, Artificial Sequence
  ENSG00000253661_63 (sequence is synthesized)
ttgaataacacaagaagtaaaatcctttatttaaagaatcaaagggttatcagaagagaagttattggtggatgatcacagagctaatagccataattatacatgacctgctggaagatg

SEQ ID NO: 986971 - DNA, 120 bp, Artificial Sequence
  ENSG00000253661_64 (sequence is synthesized)
gaaaaaacataacacaaatcttaccatttcctctggtagttgattcataagaaaactcttaggtcttgattgtttacttgagagtgttgctattgttactcaacttatttaaaaaaaaaa

SEQ ID NO: 986972 - DNA, 120 bp, Artificial Sequence
  ENSG00000253661_65 (sequence is synthesized)
tggaaaagttagttttggtggctgttgttgtctggaagaaatagactatattcaaaataaaaattgcctgaataagtcaacatgattgcataatttttcaaatgttgattcctaatacac

SEQ ID NO: 986973 - DNA, 120 bp, Artificial Sequence
  ENSG00000253661_66 (sequence is synthesized)
atcaaattcttttattcacaagaattacattatctttttcagctgaatgttatgttatactcttccaaaatctattttccctgcactcaagtagcggtaaatattcttttttttttctgg

SEQ ID NO: 986974 - DNA, 120 bp, Artificial Sequence
  ENSG00000253661_67 (sequence is synthesized)
aaattgatagtctaattttctcctgcctctctttggcacaccctcattttgcatgagatatgctccttaataaaatttctactcaatattacagaaacttccagaaatggcatctaaaat

SEQ ID NO: 986975 - DNA, 120 bp, Artificial Sequence
  ENSG00000253661_68 (sequence is synthesized)
attacactggcccgtttaacttcaccttcactaattgcaatacattatacaaagagcactgtggacaaaggtggaatatttaactaactggatttggtttcacaaacagtaataagactt

SEQ ID NO: 986976 - DNA, 120 bp, Artificial Sequence
  ENSG00000253661_69 (sequence is synthesized)
ttaaaaacattattagagcatttatttcatctcctttgcaatatatttttcttccttttaaactaggctttctaaattctcatttttaatgtttcagttgaaagaactttcacaagcctt

SEQ ID NO: 986977 - DNA, 120 bp, Artificial Sequence
  ENSG00000253661_70 (sequence is synthesized)
taaaagacattatgatttgaattattcttgcctagaaaattacttctgatgtttaacttacattctcctttattcaattgtagcttcaaactatcttagaaaattaatttgtcttataat

SEQ ID NO: 986978 - DNA, 120 bp, Artificial Sequence
  ENSG00000253661_71 (sequence is synthesized)
tttccccttaaatcattgtaggtaatctcaatattttatctttccaagcacacatagtactatttaaatttccagaaaatctgaagataactaagatttcctttaacttttcatgtttga

SEQ ID NO: 986979 - DNA, 120 bp, Artificial Sequence
  ENSG00000253661_72 (sequence is synthesized)
tgaaatgatgcagatattctcatttaagtagtgaaccctaatctcataaaaaaagtaagaatatcccataggaactttaaattgttgtacatttttcctgttcatgtaatatattttcat

SEQ ID NO: 986980 - DNA, 120 bp, Artificial Sequence
  ENSG00000253661_73 (sequence is synthesized)
ttggtttctaaaactcatttcaaacactcccatcaacacactccaatcaaaaacttgtttcaaacacactcaatcaacaaaatggaggtgttgcttttcttctctaagcttgatgccaag

SEQ ID NO: 986981 - DNA, 120 bp, Artificial Sequence
  ENSG00000253661_74 (sequence is synthesized)
attctaacctggacattttccttcaagtttcctttttcctcagccacatcacacatttaatctaacactagtccaaaatgtaatctgaattcatccacatatttttatctctactgccac

SEQ ID NO: 986982 - DNA, 120 bp, Artificial Sequence
  ENSG00000253661_75 (sequence is synthesized)
cacccttgtgcaggccaccattatttcttgcctgagctttcatcattgtcttttatcaggtctctctgcttccattctcaaaccctttctaatttatttttcacaaagcagccagaatga

SEQ ID NO: 986983 - DNA, 120 bp, Artificial Sequence
  ENSG00000253661_76 (sequence is synthesized)
tcttttaaacacataagtcacatcatgtcactacccacattaaatcttcctaagattttcccattctacccagaatacagtgtaaattgctaagtttagtagctcatgcctgtctttcca

SEQ ID NO: 986984 - DNA, 120 bp, Artificial Sequence
  ENSG00000253661_77 (sequence is synthesized)
acctgatgtgatatcacacccacattctccctggccatccccaccaacattacccagtactaggctccaaccacaatgctttcctctcatctgtgagcaagctaaacccttttgacatca

SEQ ID NO: 986985 - DNA, 120 bp, Artificial Sequence
  ENSG00000253661_78 (sequence is synthesized)
gggtcttttaactttctgttccttatacctaattctcttctccacattctttgcatggcttcccctttcccttctctgagtctcagcttaaacgaaacttattcagagagtcttgcccta

SEQ ID NO: 986986 - DNA, 120 bp, Artificial Sequence
  ENSG00000253661_79 (sequence is synthesized)
accaccataacaaaagttggactctcccttaatatatcatctatattttattatagcacctctcacaatatataattgcttgcataatttaataattttttatttttttcttgcttctgg

SEQ ID NO: 986987 - DNA, 120 bp, Artificial Sequence
  ENSG00000253661_80 (sequence is synthesized)
cagaatataagctccagtgccataaacagccatttctccagagaacccagattccttttagtgggaaatggtatttagaaatcaagttctggatgtcaggtgtgcacatggctagggagg

SEQ ID NO: 986988 - DNA, 120 bp, Artificial Sequence
  ENSG00000253661_81 (sequence is synthesized)
ccgcgcggaagtgagaagtcgcggccaaaggcgcccgcagaagcctcctctctgggccggaccccagcccgagcggccgaaaggagccccccgcccggatcacaggtgtgttgctggcaa

SEQ ID NO: 986989 - DNA, 120 bp, Artificial Sequence
  ENSG00000253661_82 (sequence is synthesized)
tatgtggccccaggggagaggcaaaagtggaggttcccgagtcatctgagatttgttgcctcggaacaggatccacagctcaataatagtcactgtactgtcattgtttatttgaaatct

SEQ ID NO: 986990 - DNA, 120 bp, Artificial Sequence
  ENSG00000253664_0 (sequence is synthesized)
taaggcaactttgtaaagcacacttgagctggtagaagaatcgtcagatgtgatgacaagctacagggaaaactgcctgctgccttgttcacctgccgcaaagatagagcatatttgtca

SEQ ID NO: 986991 - DNA, 120 bp, Artificial Sequence
  ENSG00000253664_1 (sequence is synthesized)
tatgcttcaactggctggctagaagtgaaatggggagttggactggaaaactcgcagcacaaacctcacaaatgcagtgagtgcagtcttctttcatccagcgctcctcggccttccttg

SEQ ID NO: 986992 - DNA, 120 bp, Artificial Sequence
  ENSG00000253664_2 (sequence is synthesized)
gtgcctccagcttgtttatctgaaaggggaggcaaaggaaagaagagtggaaattgaagcggatagcaacaaagccaatcaataacatggtttgatgaaatgctctattctgtaagcaca

SEQ ID NO: 986993 - DNA, 120 bp, Artificial Sequence
  ENSG00000253664_3 (sequence is synthesized)
cacctagaaggcaaaagaaacttcaaagcctacataatttttcattttcccccaggacttaatgagcttgaatcatccagtatccaaacaaataaacagttctgtaggtgttaaaaaata

SEQ ID NO: 986994 - DNA, 73 bp, Artificial Sequence
  ENSG00000253665_0 (sequence is synthesized)
gtcccaaagagaggctttcttaatttcccttctcaacgacctgttaattaatcttcctcttcaaaccctgcta

SEQ ID NO: 986995 - DNA, 120 bp, Artificial Sequence
  ENSG00000253665_1 (sequence is synthesized)
caacgacctgttaattaatcttcctcttcaaaccctgctattggtgaagccagtcgggtttcttactttgctcttttgccgagtcaggagccagctggaatgggttcagcttgtctttac

SEQ ID NO: 986996 - DNA, 120 bp, Artificial Sequence
  ENSG00000253665_2 (sequence is synthesized)
tctcccctgagtcacttcgagtttggttctactgatctacaggaagcttcttcccaccactgaattcaagggacagtcttcccatatgtctttaccagctctcgcaaatgaagacagagc

SEQ ID NO: 986997 - DNA, 120 bp, Artificial Sequence
  ENSG00000253665_3 (sequence is synthesized)
tggcctcaaactccagggctcaacaaagcctcctgcctcaacttccccagtagctgggactacaggtatatgctcagcttcaattatttttgtattagtttgccagggctgttataacaa

SEQ ID NO: 986998 - DNA, 120 bp, Artificial Sequence
  ENSG00000253665_4 (sequence is synthesized)
agtgccaccaactgggtggcttagacaacagaaatttattgcttcacagttctggaggctggacgtccaaaatcaaggtgttggtagaattggttccttctgaggactgtgaggaaggaa

SEQ ID NO: 986999 - DNA, 120 bp, Artificial Sequence
  ENSG00000253665_5 (sequence is synthesized)
tctgttccaagcctctctccttggcttatggatgaccatcttctccctgttcctcttcagattgtctttcttctatgtatgtctgtgtcaaaatttcccctttttataagaatgccaggt

SEQ ID NO: 987000 - DNA, 120 bp, Artificial Sequence
  ENSG00000253666_0 (sequence is synthesized)
acatcttgttacccatgcaatgttggggtcagagagtgtagagagtggtgtggggagagtgcaggctgaagagttacctaaggtcaaaatcctgacctatgagccaagccatcgatttgg

SEQ ID NO: 987001 - DNA, 120 bp, Artificial Sequence
  ENSG00000253666_1 (sequence is synthesized)
ctgaggttcaactcctaccctgatcatctcctccaagattctgtgacctggggaagtcaacagtacatttcaacacctatgatgtcagcatgtgaatgacattccaatgctgctcatggg

SEQ ID NO: 987002 - DNA, 120 bp, Artificial Sequence
  ENSG00000253666_2 (sequence is synthesized)
gtcacccctgcaaaggtgaactcagtggaaagaccttgccaaaccggaaggaaaacaggatacttttctccaaaatactcattcaataaatatttgcttaggcattacaaagacaaataa

SEQ ID NO: 987003 - DNA, 120 bp, Artificial Sequence
  ENSG00000253666_3 (sequence is synthesized)
cccaagagaaatgtatgcttctgaaaaccacaggtgcatgaatcgtgtttagtaaatgactactaaactgaaatcaggacttgtctatatcttggcttctcaaacttgaatatgcttatc

SEQ ID NO: 987004 - DNA, 120 bp, Artificial Sequence
  ENSG00000253666_4 (sequence is synthesized)
atctggatagcaaaagcattcctacacgttgaggcctgccagcgtgggtgtcacccaggagccactcggaaaggctcatcggaaaccaccccggactgactgaggcagaatctctggggg

SEQ ID NO: 987005 - DNA, 120 bp, Artificial Sequence
  ENSG00000253666_5 (sequence is synthesized)
aggtgactgacgtagtttcccatctcacaactctacctccatgaagaaaagtcatggaaaattgagactttgggctgagtgtggctcatccctgtaatcttagtgctttgggaggctgag

SEQ ID NO: 987006 - DNA, 120 bp, Artificial Sequence
  ENSG00000253666_6 (sequence is synthesized)
gtaggaggatcgcttgaggccaggaatttgaggccagcctgagcaacatagtgtctcttcaaaaaactaagtttattctttcctcttttttagtttttattttacacggctcactgtggc

SEQ ID NO: 987007 - DNA, 120 bp, Artificial Sequence
  ENSG00000253666_7 (sequence is synthesized)
cttttttagtttttattttacacggctcactgtggctttgacctcccatgctgaagcgatcctcctatctcaacctctcaagtagctggaagcacaggcatgcaccaccacacctggcta

SEQ ID NO: 987008 - DNA, 120 bp, Artificial Sequence
  ENSG00000253666_8 (sequence is synthesized)
atgttgcccaggccctgttgaccaggaaaaaaaaaagttttttttcttttttaaagaaagaaaataaaagagactgagaaaccacagaaataaagaagcgctgatgacaatgcctgcttg

SEQ ID NO: 987009 - DNA, 120 bp, Artificial Sequence
  ENSG00000253666_9 (sequence is synthesized)
ctgatggttacgatgatcatagcagtgtgcattttgtatgcatgaagcctgcgactaaataaacgtgtggggaaatatttgtaaggaaataagctattaataaaataagctaaaatcaca

SEQ ID NO: 987010 - DNA, 120 bp, Artificial Sequence
  ENSG00000253666_10 (sequence is synthesized)
tttctactgaggacactggaagtcactaagagcatctgaatgcctggacccacgccttcatcaatctactgtcagggatagattgtgcattttctgtgtcccagtgggtgcccccccccc

SEQ ID NO: 987011 - DNA, 120 bp, Artificial Sequence
  ENSG00000253666_11 (sequence is synthesized)
aaatggcatagggcagattgccaaaatcagggttgactcggcctggagccatgaagtgggtccaacaggtctctgaactgaggcaggaggccccaggatcccgaggtgtgctgtaaagcc

SEQ ID NO: 987012 - DNA, 120 bp, Artificial Sequence
  ENSG00000253666_12 (sequence is synthesized)
tttgatgacagcatcttgtgcctaacacctgaccacatctgagccactagagacagtacctgataaggatgcagatgcctgggccctaccttccaaagttctggctcagtaggtctgggg

SEQ ID NO: 987013 - DNA, 120 bp, Artificial Sequence
  ENSG00000253666_13 (sequence is synthesized)
agaggccacaggggaggctgtcgccaccattcaaccccagatctgtggctctagagctccactagagttccaggctctcctctgaagttccgaggacctagggcaactccatttcattcc

SEQ ID NO: 987014 - DNA, 120 bp, Artificial Sequence
  ENSG00000253666_14 (sequence is synthesized)
ataaactcgagtcattcttgacttgtatagggttatcccagtttgttctttatgatccttgcccacaaatgctgctggttaagcctgaatttttgagttagaaaattaggctgttcaggt

SEQ ID NO: 987015 - DNA, 120 bp, Artificial Sequence
  ENSG00000253666_15 (sequence is synthesized)
ggatttttccagctgtagcttgtgtggccagaaagaggaacctaaataacttgtgagagcagctgggcctgggactggcaggctgaaactcggggtctatgaagtgagttcccatgtctt

SEQ ID NO: 987016 - DNA, 120 bp, Artificial Sequence
  ENSG00000253666_16 (sequence is synthesized)
tactggccccactcagatacgaatctatggctgctcaggctgtctggtttttggatcctttattcaggtgccaagggcccagccagcatgcaagttttcttgtactcttctagatgcctg

SEQ ID NO: 987017 - DNA, 120 bp, Artificial Sequence
  ENSG00000253666_17 (sequence is synthesized)
caaaagcatttaaatccaaatgttcaaaaaatatatttgaggaacccattcagctttcagccaattttgtaatcctggtgagactacacccttgtcaaaatcatccttctctcacagtct

SEQ ID NO: 987018 - DNA, 120 bp, Artificial Sequence
  ENSG00000253666_18 (sequence is synthesized)
catcaggaggcaggtattttaaaaaggaaaccccaccactgtaggttttttttttaaaaaaaaaaaagttgatttgtggtatagggatggttggagaaggagcatctggttggggcaggt

SEQ ID NO: 987019 - DNA, 120 bp, Artificial Sequence
  ENSG00000253666_19 (sequence is synthesized)
gttagcattttcctgatgtacaggccagagcattctgatatcagctctcactcctccagctgcaccagccaaggtttaggccatgtttaaaggacactttaataataagctaaaccactt

SEQ ID NO: 987020 - DNA, 120 bp, Artificial Sequence
  ENSG00000253666_20 (sequence is synthesized)
agaaatcattggttcaatacatgaacttaaggctgggatatgtgaccaaggagaaaagcatttgagaaaacaggctttttctctgaggtaatggtattgtggtagcccttcaatcattaa

SEQ ID NO: 987021 - DNA, 120 bp, Artificial Sequence
  ENSG00000253666_21 (sequence is synthesized)
taaaagacagggaaagcttcataacaggatgtccttatttaacaaaatgtctgggggtgctctcagcctagtgattggaactcatgataaaattttaggcaagctcacttacaggagtaa

SEQ ID NO: 987022 - DNA, 120 bp, Artificial Sequence
  ENSG00000253666_22 (sequence is synthesized)
gggaaataggtggtgagggaaggtgatgacaatgaagtaaattagcaaagaacgagaggcttgaagaccacaatttatggcttctgtttatagttttggcatcttcagtctggcaaaaag

SEQ ID NO: 987023 - DNA, 120 bp, Artificial Sequence
  ENSG00000253666_23 (sequence is synthesized)
tcagtagataaattaaaacgtaattttaaaagcaaaatccgttaaaactgtaaagaaagcaggaaggaagagcagggggaaaagaaaagattagacaaactaagaacaaataataaataa

SEQ ID NO: 987024 - DNA, 120 bp, Artificial Sequence
  ENSG00000242107_0 (sequence is synthesized)
gtggggctgagacttcgcgtcttaacaagctgctctcagttgatgctgatcctcatggtccaatgtatgacaatgctgttgaatgtgcctcttcatttcagcacactgccttcaggcagg

SEQ ID NO: 987025 - DNA, 120 bp, Artificial Sequence
  ENSG00000242107_1 (sequence is synthesized)
gaatgggccactcctggcaccctgcacattttagcatttgtttcctgtctctccccactagaatgcaagctgcagaggaattgtatccgtagcacctggcttcgcagaccaagagcaagt

SEQ ID NO: 987026 - DNA, 120 bp, Artificial Sequence
  ENSG00000242107_2 (sequence is synthesized)
cggcacaccaggacaggcactcgcatgggtgcccagaagtttcaagatctgaccttggagagaccaggtccgggaggctgccgggaagtctccatcacaccggcctcagccgagtcacag

SEQ ID NO: 987027 - DNA, 120 bp, Artificial Sequence
  ENSG00000242107_3 (sequence is synthesized)
ccagaagcctgagatgcaacttcaaggacaacgggagccagaacgcttgacctcacacggaaggtgactcctaaccaccaccacacttgacgtagcaccagcacacggagattaggccta

SEQ ID NO: 987028 - DNA, 120 bp, Artificial Sequence
  ENSG00000242107_4 (sequence is synthesized)
caccaatggctaattgagaccatgcatcactattaaggcatcttcagcaaaaggaactatggaagttctgcatgaaacatagacacctgttagaaaaggaactaaatttcaaaccgggaa

SEQ ID NO: 987029 - DNA, 120 bp, Artificial Sequence
  ENSG00000242107_5 (sequence is synthesized)
tgtggtgttgaatcacagcaaagtgtccagaaggaactcccaaagtactgttttccaaaatatagaatgatatagaagattgttttaggtggaattcctggaaataaatttttaaatgtt

SEQ ID NO: 987030 - DNA, 120 bp, Artificial Sequence
  ENSG00000227704_0 (sequence is synthesized)
ccatccgttcttgcctctgtcccaccacgtgcaggtgagcctcctacatggtgctgcttctagtcggccgtcttggccccacccctagttttgcatggctgggaggcctcaggaaactta

SEQ ID NO: 987031 - DNA, 120 bp, Artificial Sequence
  ENSG00000227704_1 (sequence is synthesized)
ctttcatgcactcccgcagccaaactccatttggatctattcaggcaggaatcatatttcagctccttaactctcataagtggaaactgacaccaactcattataaaacctaagtggaaa

SEQ ID NO: 987032 - DNA, 120 bp, Artificial Sequence
  ENSG00000230759_0 (sequence is synthesized)
agctctttgcatttgaagtgctttgccaagaggatcatttcccacaaactgaacaaggaccccagacgccttccattcttctagcagtgaatcttctccaaatggacttctcaatcaacc

SEQ ID NO: 987033 - DNA, 120 bp, Artificial Sequence
  ENSG00000230759_1 (sequence is synthesized)
gcagttttcccttgtcttaaaatttcagcccatatttaaatgatatttaagctaggaggaatatggaagtttccataaaataaaacagaggtctccaactcatttgatctgaatttctgt

SEQ ID NO: 987034 - DNA, 120 bp, Artificial Sequence
  ENSG00000230759_2 (sequence is synthesized)
ctgaatttctgtcagaaataatggttttcattatgactctttatacaaacttttatgtgtttataagtgtatataggtatataaaaatatatgtaacaaaaataaaacagtacagagtct

SEQ ID NO: 987035 - DNA, 120 bp, Artificial Sequence
  ENSG00000230753_0 (sequence is synthesized)
tctgtaggagtggcagaacagtaagagaaatgacaaagcaagaggaacctaatactcttcctcattggccttcctgtctccatctttattccttccagctcattctctacatgacactgt

SEQ ID NO: 987036 - DNA, 120 bp, Artificial Sequence
  ENSG00000230753_1 (sequence is synthesized)
tccgtgaattgtgacatcaacctcgccagatcttcctgctgttaaacccgtcctggggcagctcttgcctgatgggctacctgaggaacccacaggaaatcaagggaggtgcctgcaaag

SEQ ID NO: 987037 - DNA, 120 bp, Artificial Sequence
  ENSG00000230753_2 (sequence is synthesized)
ttgccgtggggtcacagcctgccctttggaaggggctgtttctgggctgctgtgacttcctgccattatttcctctctgttctccctctggaatgaataaagtacttctgaaaaaccatc

SEQ ID NO: 987038 - DNA, 120 bp, Artificial Sequence
  ENSG00000230753_3 (sequence is synthesized)
gatttctgatcttgtttacaacggatttggaggtggctaactatcctgaattcccacaaataagaaagaagactgaagttcagagaggtgaagggactggctcaggggctacccctatgg

SEQ ID NO: 987039 - DNA, 120 bp, Artificial Sequence
  ENSG00000230751_0 (sequence is synthesized)
aaatctttagattccccctgtaaatataattattttctgtgacttacaaatgaatacacgaggctccggttaaacattgcgcacagagtgtagttgaaagggtgcacactcctccgttga

SEQ ID NO: 987040 - DNA, 120 bp, Artificial Sequence
  ENSG00000230751_1 (sequence is synthesized)
ccctgagcctcaatttcctcactggtaaaatgggtcagtggctgacacacagatcgggctagtcctaggtatggccagctgtgctcttcccaccatgtgcagtggctcacacctgtaatc

SEQ ID NO: 987041 - DNA, 120 bp, Artificial Sequence
  ENSG00000284930_0 (sequence is synthesized)
cctctctcttgctcttgcttgcttgcactgatgaagtaagctgccacgttgtgagatgctcaacgaagaggcccatgaggcagggcaccgagggaggcttctggccaacagctcctgggg

SEQ ID NO: 987042 - DNA, 120 bp, Artificial Sequence
  ENSG00000284930_1 (sequence is synthesized)
aaccaaggccttaggaagtgagtcctgccaacaataacgagagccttgaactttgaaaccacagtaccttgttccagcgtggaaagcagcgtggcacttcccggtggtgaaagcacccca

SEQ ID NO: 987043 - DNA, 120 bp, Artificial Sequence
  ENSG00000284930_2 (sequence is synthesized)
gcttgaaagggtgaaaacaccttctcccagatagtctccctttgtttagccagtgcttttgccttaaggaaatcaaatgaaggggtcagccaggagtggatctggaagctggagaactct

SEQ ID NO: 987044 - DNA, 120 bp, Artificial Sequence
  ENSG00000284930_3 (sequence is synthesized)
tctgctaaatgaaagtttgcgctttgccctttagcattgaggctcctggaaagaacttcaatgaaattggatgcattgagaccaaagaaaagaaggggacatttttatctctctgatacc

SEQ ID NO: 987045 - DNA, 120 bp, Artificial Sequence
  ENSG00000284930_4 (sequence is synthesized)
tttctccccagggcttggaaacacttcttaaacacaacctctaatgttggtgttttgtaagtactacccctatgaataaagctagcagagataagcttctccttgcaggaagtgagctgg

SEQ ID NO: 987046 - DNA, 120 bp, Artificial Sequence
  ENSG00000284930_5 (sequence is synthesized)
agaagtggaaaagtttacagagaaaactctacaacaaagacttaacccttcccgggtaaccacgaatgtgagcgtctgcccctcctttgctttctactgcgcaaccaaactgtgcacaag

SEQ ID NO: 987047 - DNA, 120 bp, Artificial Sequence
  ENSG00000284930_6 (sequence is synthesized)
gtgcttttgccttaaggaaatcaaatgaagtgtatgaaatagcggctgacttttgtgacaattttccacccagttttgtgatagtaatttcgctgcattcttcaacttagatggcaagtc

SEQ ID NO: 987048 - DNA, 120 bp, Artificial Sequence
  ENSG00000284930_7 (sequence is synthesized)
ctcttagcaaggctggcctaattctatgttttctatggcacctagtcactatggctgtgcaagagccattattacccaaagtaccataataatggtcatgtcctcctatgacgttattgt

SEQ ID NO: 987049 - DNA, 120 bp, Artificial Sequence
  ENSG00000284930_8 (sequence is synthesized)
ttcctatctgtcaggacattaattgtcttctaacttgctctaaaattggtagcatggcacactgccaagactagagagaagcaagctgctggtgatatattaaaaggctgtgtaaaagga

SEQ ID NO: 987050 - DNA, 120 bp, Artificial Sequence
  ENSG00000284930_9 (sequence is synthesized)
ctttgcccagagcagcaggctttgagctctgggaggatttccaggtggcagcagaacaacggtcccataggctggagcctggcacgctttcccttttaaccagtggcagaggctgcactt

SEQ ID NO: 987051 - DNA, 120 bp, Artificial Sequence
  ENSG00000284930_10 (sequence is synthesized)
tgctggtgtaattatgcaacctagtgtaaagtccacatgggtggggatagggggtaggcaaggcaggactgtaagctggctcagcactctgattgggttttttgactgtttttctagctt

SEQ ID NO: 987052 - DNA, 120 bp, Artificial Sequence
  ENSG00000243479_0 (sequence is synthesized)
cccgcgccgcgaggtcctaagcagcccgggctgttgcgcggcgctggcgggcggggacaccaacggggagtggatactccgaggctcaacctggggcctctgcccgccctcccctgggtg

SEQ ID NO: 987053 - DNA, 120 bp, Artificial Sequence
  ENSG00000243479_1 (sequence is synthesized)
cggagccggacggcgggcactggcaacccccgggcccctggagagccccgcggcggcccaagacccgctcccgagacacgtgggcccctccggacttggttggtccctggagccagctgc

SEQ ID NO: 987054 - DNA, 120 bp, Artificial Sequence
  ENSG00000243479_2 (sequence is synthesized)
gcgcgtcctctccggcctccttgtcggcgctggagtgggtccacgtctgccttgcggagcgcggtggttccacgctcctgagcgcccacgctgcgcagacctggccgctctgcgaggcga

SEQ ID NO: 987055 - DNA, 120 bp, Artificial Sequence
  ENSG00000243479_3 (sequence is synthesized)
cggcagcgcactgaagaccgtggtgtttcccaagccctccctgctctcgggcctccagggcgcagcaggggagggttttgtccccgtggccaaagctctgcaggtcgaaccttatctgct

SEQ ID NO: 987056 - DNA, 120 bp, Artificial Sequence
  ENSG00000243479_4 (sequence is synthesized)
cataagctggacttttcccagaatgctgcagcagaactaccctccagatagacactagcctgcgggccacagtgctacgtgagtcttgcaaagaggagatctttatggcgaggctgagag

SEQ ID NO: 987057 - DNA, 120 bp, Artificial Sequence
  ENSG00000243479_5 (sequence is synthesized)
cactgcctgcatgctttaccagagcccagcctccagcctccacggaaaatgtgttttggaatcaacactctttgcaaaggctccacactgctttctggtagcattggcctgggcgcccag

SEQ ID NO: 987058 - DNA, 120 bp, Artificial Sequence
  ENSG00000243479_6 (sequence is synthesized)
gcactcctttagaacccacctgttccccccacccaccctagtgggaggaggagagggttacactgacagataccggcagctctgcaacccgggaacaacgcagacaacatacaactcgac

SEQ ID NO: 987059 - DNA, 120 bp, Artificial Sequence
  ENSG00000243479_7 (sequence is synthesized)
agagtcacagaaggtggcgtccatcgcgcctggatggtgactactgccctgcgggctgctgggtgggtgaaacacacagggaagaagcacaaatacacacacagatgtggctcagggaca

SEQ ID NO: 987060 - DNA, 120 bp, Artificial Sequence
  ENSG00000285042_0 (sequence is synthesized)
tgaaggcagagaaggaagggaggagggaatgattcaaggccaaaatggccacatttagaagatacctcagatgataaccattgttatgtgtgtgcaattttatttaacagtgatgtgtat

SEQ ID NO: 987061 - DNA, 120 bp, Artificial Sequence
  ENSG00000285042_1 (sequence is synthesized)
gtggtggacaagttatatgaaatatctagtctttctagatatttggaagtgcttgatgtatttaaaagtggtagtagaataacactttgtaagtagcttttaaaaactgatgggaaatgc

SEQ ID NO: 987062 - DNA, 120 bp, Artificial Sequence
  ENSG00000285042_2 (sequence is synthesized)
tgtttggaagtggaattgttgaaccacctgggaggtgggagggaagaaattgcaaatggtgttttgccattgcaattattagaaaatttcagcttaaaaaaaaatggtctggtctcaagg

SEQ ID NO: 987063 - DNA, 120 bp, Artificial Sequence
  ENSG00000285042_3 (sequence is synthesized)
atagttgtttgcaacttagctcttttataataatgtaaaaaaagatttgtctgtctttattttcaaaagctgactttatatagattctagcttctgacctaaatcatttccttgatataa

SEQ ID NO: 987064 - DNA, 120 bp, Artificial Sequence
  ENSG00000285042_4 (sequence is synthesized)
taaacttttacatgaaataatactttcattcagtcgattaaaataattttcctgccagctagtagagtgcaacatgtgtaaaaatcttacagttaaatgggatcaaatcagacagtatag

SEQ ID NO: 987065 - DNA, 120 bp, Artificial Sequence
  ENSG00000285042_5 (sequence is synthesized)
atttcctagaccataaaatctataaaaatcagaagcaatggatttaactcccaaattgttcatttaaagatctaattatttgtgtttgacattaaaataaatcttaaacataagaaagca

SEQ ID NO: 987066 - DNA, 120 bp, Artificial Sequence
  ENSG00000285041_0 (sequence is synthesized)
aggatgatctcattctaagtggactgaatggggtactgattctgttttggatcggtaggcctgtgtggcattcacaatgcaagcatcctgtccttgaagaagtccagagaaaacatagat

SEQ ID NO: 987067 - DNA, 120 bp, Artificial Sequence
  ENSG00000285041_1 (sequence is synthesized)
gtgaaagcccacaacatgaaaggaacgaggacatatgtccttggaatcatgagctgctgtgaaaaaagcctatgaccctgaagccactatgttggagagacttaatggaaaggcccattt

SEQ ID NO: 987068 - DNA, 120 bp, Artificial Sequence
  ENSG00000285041_2 (sequence is synthesized)
ggagaggagaggccatcagtcagaagcaggcatcaactacctgacataggagggtagctgtctttagatgattgcacttcctcatctttgagtcttccatctgagaccgcagacgttata

SEQ ID NO: 987069 - DNA, 120 bp, Artificial Sequence
  ENSG00000285041_3 (sequence is synthesized)
aggcatagaaaagccacctctgttgtaccctgttggacttcttaatccataaaacctaagagcaaaataaatggctgctttatattatacatgtttattagtgtgagagcaatctgttat

SEQ ID NO: 987070 - DNA, 120 bp, Artificial Sequence
  ENSG00000285041_4 (sequence is synthesized)
gtgaccatagtaactgaagcaacaatgaagaaaataatttaaaactagctgatctactatacataatggttcccagactcatatactaagactctccataagaagtcttctactggccat

SEQ ID NO: 987071 - DNA, 120 bp, Artificial Sequence
  ENSG00000285041_5 (sequence is synthesized)
ctgtctccttagggtctggctttctaccatgttgtaaagactgctctactgctcagttggaatatcttgaagagatcttgccacttcctatttgaattcaggccctcagaaaggaaaaac

SEQ ID NO: 987072 - DNA, 120 bp, Artificial Sequence
  ENSG00000285041_6 (sequence is synthesized)
agcatcctaaagaagaaaaaaattctagatatttgaaacatcactggcaatgaatacttagccaatgacagtccatggaaagtgcctgagcaccttaataattcacagcttttcatgcca

SEQ ID NO: 987073 - DNA, 120 bp, Artificial Sequence
  ENSG00000285041_7 (sequence is synthesized)
tatgggttccttgcttatttttacctagccaaactatgttttaaattgtcttatcctaaagtgaaaatgtggtcttctcctagagatgagtagaatctttaatgtttagagaaatagaaa

SEQ ID NO: 987074 - DNA, 120 bp, Artificial Sequence
  ENSG00000285041_8 (sequence is synthesized)
agctattgactgctttaaaaatggcatgttttttcatttttcaaaaatattaaggtcaatactcaaacataaaacctaatgatttctattctattcaagaaggtggatttggaagaggtc

SEQ ID NO: 987075 - DNA, 120 bp, Artificial Sequence
  ENSG00000285041_9 (sequence is synthesized)
aagagaccatttcactttaaggcacattgcttttcttgctatcaatctaagggtgggtgacaggaagagatgagatgttcaaaagagacttaccctattctatattaaagaaagtaagag

SEQ ID NO: 987076 - DNA, 120 bp, Artificial Sequence
  ENSG00000285041_10 (sequence is synthesized)
ggcatttgctttttaaagctttaaacatcaaatatagttttctgggagtttttcttcatttttttagtaatggattgtcaccttgtcatctgtctctcagaccactcttctttagtagtt

SEQ ID NO: 987077 - DNA, 120 bp, Artificial Sequence
  ENSG00000285041_11 (sequence is synthesized)
tgtgaaaccagagaaagtatcacttaaattatttgtccttgtgtatcttattttcaaaagcaggattccaggggcagttgggagataaaagaaaaaaatctatatctcttatgttctatt

SEQ ID NO: 987078 - DNA, 120 bp, Artificial Sequence
  ENSG00000285041_12 (sequence is synthesized)
aaatcactggatcacttgtttttgtcaacaataacaccatctggtctgttaaaaattgatttaataaatatgctatgtgacatcaactgcccagacagatttgctcaagggactaatgcc

SEQ ID NO: 987079 - DNA, 120 bp, Artificial Sequence
  ENSG00000285041_13 (sequence is synthesized)
cagagtttgagaatctttgcaggactcattagtatacatttgatggaggaatgccctctgaattccaggtgcccataggggatttgcatatcatagagctgaggggttgtcctcagagaa

SEQ ID NO: 987080 - DNA, 120 bp, Artificial Sequence
  ENSG00000285041_14 (sequence is synthesized)
ttacagtctgatccttttccttaatatttgttcccctgtagggtcacttgtcagcctcctttgctcttgaagagggtgagtcatttttttttctttttttctggagacggggtcttgctt

SEQ ID NO: 987081 - DNA, 90 bp, Artificial Sequence
  ENSG00000285041_15 (sequence is synthesized)
ctgcagccttgacctctgattgagcagctgaagtcacaggtgcgtgccaccactcctggatcatttatttttattcttatttttttgtag

SEQ ID NO: 987082 - DNA, 120 bp, Artificial Sequence
  ENSG00000285041_16 (sequence is synthesized)
cactcctggatcatttatttttattcttatttttttgtagacagggtctctctatgttgcccaggctgagtcattttgattaaacatgcaggtctctgctttagagacacctttgcattt

SEQ ID NO: 987083 - DNA, 120 bp, Artificial Sequence
  ENSG00000285041_17 (sequence is synthesized)
ttttttgttaggaaaactactatcctgaagattgttgattctatcatttatccaaaaaaatgagattctgattagtccaaacacagaagtccctgcagtaacagcagggttgtgacctgc

SEQ ID NO: 987084 - DNA, 120 bp, Artificial Sequence
  ENSG00000285041_18 (sequence is synthesized)
atcacaataaaaatagcattcaatatacctgctgcagataatttctagcaaagaatttgtactttataattctattttcattttatcagttcgtctgtgaattttatcaatagcatttta

SEQ ID NO: 987085 - DNA, 120 bp, Artificial Sequence
  ENSG00000285041_19 (sequence is synthesized)
atccttcctactttctaaaggactagagttttgaccaatctgaagatctttgagggaaaggttcaagatttttgctaatacagagctgtttcagcatgttagccaggattaatcagccct

SEQ ID NO: 987086 - DNA, 120 bp, Artificial Sequence
  ENSG00000285041_20 (sequence is synthesized)
tcacaggaaatgttttcttattaaagaggaaatctcacctgttttggtcacttaccttgcaaacaaactttctttttcataggagaaaagcctggtgtgattccagggtttcattttccc

SEQ ID NO: 987087 - DNA, 120 bp, Artificial Sequence
  ENSG00000285040_0 (sequence is synthesized)
attgcagggtgaaaacgtgactaagtctgaccatgcttggagctcggagcctctgcgttcatattacggacaaaaagaaatgcgctcaaggacgttcccaaggtgaattgggacattggt

SEQ ID NO: 987088 - DNA, 120 bp, Artificial Sequence
  ENSG00000285040_1 (sequence is synthesized)
gtggcaccactggccctcaccagtgcagaatgcaaagatgtttgggagaagagtctgtgctacacaggaaacgcttgatgtgcactggcttcctcctcacggagaggccacagacccagc

SEQ ID NO: 987089 - DNA, 120 bp, Artificial Sequence
  ENSG00000285040_2 (sequence is synthesized)
aaccactttcctgaaaagggtcagtccacacgacgcaccaagaagcctggctcagaggaactgtggctccagcgtcggtacacagacaaagcagaaggcagccagttggcagggtattat

SEQ ID NO: 987090 - DNA, 120 bp, Artificial Sequence
  ENSG00000285040_3 (sequence is synthesized)
taaaagtcaagagaagctgagccagttaacgtgaaggaggagcggagcccactctcaagctgctgctgggcgcccagagacacagaatcccgtgccaagaaccgggagccttcccaggac

SEQ ID NO: 987091 - DNA, 120 bp, Artificial Sequence
  ENSG00000285040_4 (sequence is synthesized)
gtatgacctaagggggaaaaaaatcactttgagagatgtaagtggggacagagaagagaatacggaaggcttctggctgggacaactgcgtgtgtttgtcagtgtattttttggtcattt

SEQ ID NO: 987092 - DNA, 120 bp, Artificial Sequence
  ENSG00000285040_5 (sequence is synthesized)
tagagcaaccttattaacccctcagaggctgcaagaaattaactttcttttcagattcaaatgaatcccaatgatgggtgtatcactgggggattttcacagggactggatattaaagat

SEQ ID NO: 987093 - DNA, 120 bp, Artificial Sequence
  ENSG00000285040_6 (sequence is synthesized)
gatattacatttctctggtgtgataataccattgggattttggagaaagcttttattcttagcagacgctgctaaggtctgtaagtggtctgttgacatgcctgccatttaccttcaaat

SEQ ID NO: 987094 - DNA, 120 bp, Artificial Sequence
  ENSG00000285040_7 (sequence is synthesized)
cctgccatttaccttcaaatgagacagcaaatgttttttatgtatgtatttatttattttttcagagacgggatttcactctatcccccaggttggagtgcagtggcaggatcatggctc

SEQ ID NO: 987095 - DNA, 120 bp, Artificial Sequence
  ENSG00000247572_0 (sequence is synthesized)
ggcgtcacagacggtctttacaagcgactcgtgggcgtcaatactgggctgagtttgtggcgcgcttagtgatgggatggccctgtgcaggacgccgacacgaaaagatgaagagttcaa

SEQ ID NO: 987096 - DNA, 120 bp, Artificial Sequence
  ENSG00000247572_1 (sequence is synthesized)
tccgtgctgtctgaactcacagtgtagcaggcgagatagacgggaagatcggtagggtgggagatgccggaaaggcttcccgtgagactggataagaaatcaaaaatctggtgaaattgc

SEQ ID NO: 987097 - DNA, 120 bp, Artificial Sequence
  ENSG00000247572_2 (sequence is synthesized)
cggcaagagggagttaaggacattccaggcagaggcaagtccagattcctaagatgaggacacagcatcctgggccactgtcactaatacaaatttgcctctggagggactctacggaag

SEQ ID NO: 987098 - DNA, 120 bp, Artificial Sequence
  ENSG00000247572_3 (sequence is synthesized)
ataattcccctgaaatttggagagttgaattaagctaggactgattctggctggaatttgtggtggctacgtaccctagagggcctcaaggaaacccacggttcaagacagccctgacag

SEQ ID NO: 987099 - DNA, 120 bp, Artificial Sequence
  ENSG00000247572_4 (sequence is synthesized)
attctggagtctagaacagaaatggatttgaacatgggcaaggccaaccacccagttcacggcctgtgtacagcaaagattacgttacagcctgagagctaagcctggaagctctttcat

SEQ ID NO: 987100 - DNA, 120 bp, Artificial Sequence
  ENSG00000247572_5 (sequence is synthesized)
ccatccgtttgtccatctatccatccatctgctcatccatccctccatctgctcaacaaacgttagagaatcaatccttgtgtcagatactggggctgccctcaaggagcttttatagag

SEQ ID NO: 987101 - DNA, 120 bp, Artificial Sequence
  ENSG00000247572_6 (sequence is synthesized)
ttcagggtacagccaggtgggggagacagatcactataaaaacctaccactataatccaaaggacaagagcaaaaatagtaaagaggagagaagacccaaatttgcctggtgggtcagag

SEQ ID NO: 987102 - DNA, 120 bp, Artificial Sequence
  ENSG00000247572_7 (sequence is synthesized)
agggctttctagaagaggtaaaaaatcttcggggctatcacttcaccttgcctggtggataaagggaggactttccagatacagtggacagaatgtgcagaggcaggagccatgagtggc

SEQ ID NO: 987103 - DNA, 120 bp, Artificial Sequence
  ENSG00000247572_8 (sequence is synthesized)
gacaggttggagccaaagcacgtggcactggagccatagccaaaggaacaaactgtgagacctgggacttgaatttggaggtggtgaaaagtgacaaggtcttcacagaagagtgatttt

SEQ ID NO: 987104 - DNA, 120 bp, Artificial Sequence
  ENSG00000247572_9 (sequence is synthesized)
ttcaacttagggaaggctgaccccagaccaatgctgccaaagtgtggtctgtgggctgttagcagttcgtgacgatgtaagtacaggaattgagattaagcatttagaacacctacagca

SEQ ID NO: 987105 - DNA, 90 bp, Artificial Sequence
  ENSG00000247572_10 (sequence is synthesized)
gtacaggaattgagattaagcatttagaacacctacagcactttgatagtcattttactttttaaattttgagctggcattttatatgcc

SEQ ID NO: 987106 - DNA, 120 bp, Artificial Sequence
  ENSG00000247572_11 (sequence is synthesized)
agccttattctctttttctaatagttgcactttatcatattttacaaatgtgtgagtctgctatggattagaaattaataagagattttgccacagatagtttgagaagcccagcactgc

SEQ ID NO: 987107 - DNA, 120 bp, Artificial Sequence
  ENSG00000247572_12 (sequence is synthesized)
cactcaacaaatgctggtgcattcagatggtgaaatattctgcagctattaaaggagttaaaactgcctccacttacctggaggcccatctgtgacacctttttaggttaaaaggaaaag

SEQ ID NO: 987108 - DNA, 120 bp, Artificial Sequence
  ENSG00000247572_13 (sequence is synthesized)
aaaaacttgcttaggactgaatatgagcggttgcaatttgtaacaatgatgtatatatacatatacattttcatgtatttgtatgaacataaaagtattgaaggatattcatcaaactgc

SEQ ID NO: 987109 - DNA, 120 bp, Artificial Sequence
  ENSG00000247572_14 (sequence is synthesized)
taaaagggttgcttcagagtaacggactcggagaaggcagattaattttctcttaatggaactctgtattgtatcacttgtaaaaataagcatgtgttatctttatgataaaaaagtaaa

SEQ ID NO: 987110 - DNA, 120 bp, Artificial Sequence
  ENSG00000247572_15 (sequence is synthesized)
aacaggattcatcttaagaaccaactccaactgactgacgtctgaggtcacctcttggtgcagagagaaagctctcagaattgatgggtaaagtctggcatgggcgtcttgaggggattg

SEQ ID NO: 987111 - DNA, 120 bp, Artificial Sequence
  ENSG00000247572_16 (sequence is synthesized)
gcaacaaaaggccctcatactggttgatcctgacagtttttcccagcctgaacaccctcacttccctgatagctatttagtcaaatatccctaggggcacaaacttcctgaatctagttt

SEQ ID NO: 987112 - DNA, 120 bp, Artificial Sequence
  ENSG00000247572_17 (sequence is synthesized)
ttaaatattagtgttttaaatgcaaagagcataacaaactagttatgaagagaaaagaaacagtaatcactcagagtccctcatgcactgaaatcaggcttcacctcaatatgtacttac

SEQ ID NO: 987113 - DNA, 120 bp, Artificial Sequence
  ENSG00000247572_18 (sequence is synthesized)
aattttaaaatctgaaaacagacacagtagtggaatccctgggcttacttagatgttttcatagaatggaaaaagtgaagaaggcccctaactgtttcctagggctgccttaataaaatc

SEQ ID NO: 987114 - DNA, 120 bp, Artificial Sequence
  ENSG00000247572_19 (sequence is synthesized)
ccacaaactgggtggcttaaaacaacagaaatgtattgtctcaccttccagacagaggtctgtaatcgaacagtcagcagggctatgctgcctctgaatcctggaggggaaccctccctt

SEQ ID NO: 987115 - DNA, 120 bp, Artificial Sequence
  ENSG00000247572_20 (sequence is synthesized)
gcctttttagctgctggtggtttgccagcgatctttggctttctttggcttgcagctgcataactcagtctctgcctccatcttcagatggcattgtctgtgtctgtcttccatggttga

SEQ ID NO: 987116 - DNA, 120 bp, Artificial Sequence
  ENSG00000247572_21 (sequence is synthesized)
cttcttataaggacaccaatcaaagtggattggggtccaccctactccaatacctccaccctactccagtacctcatcttaactgattacactggcaatggccttatttccaaatgaggt

SEQ ID NO: 987117 - DNA, 120 bp, Artificial Sequence
  ENSG00000247572_22 (sequence is synthesized)
ggtctggctatgggatcttcagctaatgggggctaagaaagacttacaggccagttgctaacacatcacaaaccaacatctggtgttgctgcatcagggaaggacttgcaaaaacatgga

SEQ ID NO: 987118 - DNA, 120 bp, Artificial Sequence
  ENSG00000247572_23 (sequence is synthesized)
ctgagctaaaatagactgcctgtggatgacacaaacattctggataacatgtaacaaggagacaatgcagccaagcttcgaggaaaggaagggtcatttctagaggttgtaaatgaagag

SEQ ID NO: 987119 - DNA, 120 bp, Artificial Sequence
  ENSG00000247572_24 (sequence is synthesized)
ggaactagaaatgagagtggtaaagaagtaccagaccctggcagagagatgctgggcttcccatccccaagcacggacagaggacgtacttatgagtgagctgggaagctgcaactgaaa

SEQ ID NO: 987120 - DNA, 120 bp, Artificial Sequence
  ENSG00000247572_25 (sequence is synthesized)
tgtctgcacaaagctagcaatggctgccctttccacatagagtggacaaaaaaaaaatccacccaccagttcaagaagctataagaaagcttgttacccacttggatactgggtgcaaca

SEQ ID NO: 987121 - DNA, 120 bp, Artificial Sequence
  ENSG00000247572_26 (sequence is synthesized)
actatggacacaatctctagcagtacacccaaagttgaagcctttatcacatagaagtgtggagtcataccttatacaatcccccatagtcataccacctacgtgatgtggaaatcctaa

SEQ ID NO: 987122 - DNA, 120 bp, Artificial Sequence
  ENSG00000247572_27 (sequence is synthesized)
actgacaagctgtagaaaagctggtcgaggaccagtgaaatgagccaaagaaaattcctaactactctgtgatgtcacatccacattttaggtgcacgagactcccacagacacaaccac

SEQ ID NO: 987123 - DNA, 120 bp, Artificial Sequence
  ENSG00000247572_28 (sequence is synthesized)
actcacaaacatgagcttacaataaacaattacaacccacaggaggaaacatcatctctctttgatgcctgccggacttgcaggagaggctcctcaagggttcctttctttaactgttgg

SEQ ID NO: 987124 - DNA, 120 bp, Artificial Sequence
  ENSG00000247572_29 (sequence is synthesized)
ttctatagtaaaccgctgtctgcctccataaataacagcaactgcactccacacgagttataccaccccgtcccgagtcttcctgagacagcagaccccaaattgcccccaggaaagaga

SEQ ID NO: 987125 - DNA, 120 bp, Artificial Sequence
  ENSG00000247572_30 (sequence is synthesized)
agataatacataacactttactgctgagaacatagtccccactgtccccaggattctaagatttattggctcttattttctatgaacatagcaggaatcaaccaatgtcatccagtcggc

SEQ ID NO: 987126 - DNA, 120 bp, Artificial Sequence
  ENSG00000247572_31 (sequence is synthesized)
atcttcagctgccttcacctgaggatattcgcggcggctttcctttcttggggaagaaggtctgggtctcgcaaaacttcttctagcaaatttaggacattcatctttagttcattgttg

SEQ ID NO: 987127 - DNA, 120 bp, Artificial Sequence
  ENSG00000247572_32 (sequence is synthesized)
attccaggcagaggcaagctatttgacagaccatatgctctattgaactttgccactgcatcacaactagaccctgaacaggatggatttctggacttctgaaagttggtccttgctggc

SEQ ID NO: 987128 - DNA, 120 bp, Artificial Sequence
  ENSG00000247572_33 (sequence is synthesized)
gagttaaggacattccaggcagaggcaagatgaagccagatactcctctatgaagttaaatgactggttcagtgttaacactgctagtgagcgacagagatggaatttgaacgcacacct

SEQ ID NO: 987129 - DNA, 120 bp, Artificial Sequence
  ENSG00000247572_34 (sequence is synthesized)
gtctgactccacctcgtgttccttccacatggccagcaagctctgctgtcccacctcgcacttctgggaggtggctactccctctttccacccccttttctggatcttgacaagggattc

SEQ ID NO: 987130 - DNA, 120 bp, Artificial Sequence
  ENSG00000247572_35 (sequence is synthesized)
taccctgccccagctgtcaaagcctgcagcagctgccaaaaaacctcaacacaggcatactttggacctacatcatgtgttgatgtcacagatgctgtaccaggcatttgactccttgat

SEQ ID NO: 987131 - DNA, 63 bp, Artificial Sequence
  ENSG00000247572_36 (sequence is synthesized)
tgatgtcacagatgctgtaccaggcatttgactccttgatctaaagccaggatatggtgatag

SEQ ID NO: 987132 - DNA, 82 bp, Artificial Sequence
  ENSG00000247572_37 (sequence is synthesized)
agcgaaggctgcagtgagcagagattgtgcctctgcactacagcctgggctatggagtaagactctgtctcaaaaaaaaaaa

SEQ ID NO: 987133 - DNA, 120 bp, Artificial Sequence
  ENSG00000247572_38 (sequence is synthesized)
ggatgcatgcccacacaaaggaatcctgatagaggaacaatggcttggtccgtttcccctcctgtgtagcactgtgataaaggaaagcctttcagattcctaagatgaggacacagcatc

SEQ ID NO: 987134 - DNA, 120 bp, Artificial Sequence
  ENSG00000247572_39 (sequence is synthesized)
tcatagcctgtgttttctagagggcatggttcagaattctttcccttcagatgtggaggcctctgcacttctggttcagttccaatagagaaaagatttgcttctagtcttctggcgatg

SEQ ID NO: 987135 - DNA, 120 bp, Artificial Sequence
  ENSG00000247572_40 (sequence is synthesized)
cttgggcattgatgaacattccaggatcctgggttccccaccaccatcactaccacgtctatcagcagtatcaccagtttaataattgtgcatttataatgacacaccaaataaaaggaa

SEQ ID NO: 987136 - DNA, 120 bp, Artificial Sequence
  ENSG00000247572_41 (sequence is synthesized)
ggggttacaggatataggttacaggatagcccaggaaatcagattattagttcttcttccgtgctaatatctgcaaacaattctttcaattctaaagccagtaagttactaagagcagac

SEQ ID NO: 987137 - DNA, 120 bp, Artificial Sequence
  ENSG00000247572_42 (sequence is synthesized)
aagatataaattggtcatttcttgaagttgtcctggggacttgtaaagaccaacattcattctcatcatggaaacttctttgctcccctgctagatttcaggtcatcatgtcagtatccc

SEQ ID NO: 987138 - DNA, 120 bp, Artificial Sequence
  ENSG00000247572_43 (sequence is synthesized)
tccaagaatagataacggctcttcagtgagctgcaccagtgcttcctggtccttgcttgcagcaggcaacgctagcatacatcctttgggccatcttatttgccatcacaccctcaaacc

SEQ ID NO: 987139 - DNA, 120 bp, Artificial Sequence
  ENSG00000247572_44 (sequence is synthesized)
cactttctaactagagagaggcaatgctgtcactctagaggtttactgtagaactcactaaagtgaaagaagctttgcccagattctttccaggcagtatgggcctaaacataagccaga

SEQ ID NO: 987140 - DNA, 120 bp, Artificial Sequence
  ENSG00000247572_45 (sequence is synthesized)
catggtcttcctaagctaacaggaagtatgttcctttctgggattgaccagggatgacccaaatgtcctggtccctatttttcattccttaaattgcctatgcactgatatgtgcccaag

SEQ ID NO: 987141 - DNA, 120 bp, Artificial Sequence
  ENSG00000247572_46 (sequence is synthesized)
tcagtgtctgagatgataaatcttaggaagcagagccaagaggaaggggagtgaatggtctccatgtatagtcctgtgaccactggaggtcttcctccctgtaagggtgatgtgtgagtg

SEQ ID NO: 987142 - DNA, 120 bp, Artificial Sequence
  ENSG00000247572_47 (sequence is synthesized)
ggtatctggctcagaatattaatgtttgaagtgtcatatccatattttagttcctggaaggaactaatttaattaatttataattattattttattccaagttccaatactgcccttgtg

SEQ ID NO: 987143 - DNA, 120 bp, Artificial Sequence
  ENSG00000247572_48 (sequence is synthesized)
tctgagcaacaaaggatgactcatgcagataatcctggggaagctttgattgtggctagcaaagcaatcttggaactgaaattcctcagtatccttgctttgattccttgaagagaattg

SEQ ID NO: 987144 - DNA, 120 bp, Artificial Sequence
  ENSG00000247572_49 (sequence is synthesized)
acacagactccaggttttggtgaagcaaagaattcctgcttccttgactctgtttttgtctcgccagaacacaaagaggcattgaatttcactattaaggccttaattagtaaccttgtt

SEQ ID NO: 987145 - DNA, 120 bp, Artificial Sequence
  ENSG00000247572_50 (sequence is synthesized)
ctctccaaagacccagaatcaaggcttgcaatgaaatcacttttcctcatgactaaactaaatctctcttgcatgttaaaagttagtctttaaaacgctgcgcagtcagaacattgcttt

SEQ ID NO: 987146 - DNA, 120 bp, Artificial Sequence
  ENSG00000247572_51 (sequence is synthesized)
gtcttacacatttccctgttacctggcaggccccaaatgttacataagcattctctgcagctgtaacccctactcagaagaggcttgatttgttatttgcacacatgataacatgtggca

SEQ ID NO: 987147 - DNA, 120 bp, Artificial Sequence
  ENSG00000247572_52 (sequence is synthesized)
taagtaaagctgggaagatgtttgtttgtaaggggtaatctgtgtctatcaaagcagatagtattggttttgcctagtttccaaacatggttttataagtcagtatatcttgtgaaacca

SEQ ID NO: 987148 - DNA, 120 bp, Artificial Sequence
  ENSG00000247572_53 (sequence is synthesized)
ttaggacaaaagtttggaacaaaaagaaatctcaggctcattgcaaagcttttttaacgttttcagttccctccatgttctgagcattatcataacgtactgaactgttctgttcagaga

SEQ ID NO: 987149 - DNA, 120 bp, Artificial Sequence
  ENSG00000247572_54 (sequence is synthesized)
ccactagggagaggagatgaggaaccagagcagccaggatgtttctccctgggataaaatctcaagcattcagacaccctcactgtgggctccacttctgtagctagaggggactggaaa

SEQ ID NO: 987150 - DNA, 120 bp, Artificial Sequence
  ENSG00000247572_55 (sequence is synthesized)
cagcaggagcatctcacagcttgtaggaagcacacatctttttcccaaatgtttctttttgcagttggtccttgctggctgatccagcttccccgtcagcatatggtgagcagttcggtg

SEQ ID NO: 987151 - DNA, 120 bp, Artificial Sequence
  ENSG00000247572_56 (sequence is synthesized)
ggcgcggtgggagtgggtcactgtgataaaagtctgaaaaggacatttgggggctctcttgggtgagaggcagtgcctcatgtccccccttcagtgctcgttgagcattcaattaaaatg

SEQ ID NO: 987152 - DNA, 120 bp, Artificial Sequence
  ENSG00000247572_57 (sequence is synthesized)
ttaacactttgtagccaaacaagttctctttttaagaggaaaaccctggatttccaaacggctcattttctgtagcttcttgcaaatggataccaccaccagctgtgcctagtgaaaaaa

SEQ ID NO: 987153 - DNA, 120 bp, Artificial Sequence
  ENSG00000247572_58 (sequence is synthesized)
tctcactttaggatgtggccataactgccacataatattacctttggctgatgatctattctgtaggaagtctgctggaactggcgtatctctctgatgatgtgtgatatctaacagaga

SEQ ID NO: 987154 - DNA, 120 bp, Artificial Sequence
  ENSG00000247572_59 (sequence is synthesized)
aaaaaacaaaacaaaatgacaacaacaaaagcaaagaaaggcatccacccactcccctcagacctcagcatgggctggaacctgactctgaacctaacagatggattggagggcagtgag

SEQ ID NO: 987155 - DNA, 120 bp, Artificial Sequence
  ENSG00000247572_60 (sequence is synthesized)
ccgctgaagtaacccagacgccagggatatctctgcccgctccactctgactctagtgctcaatgtgcctgccaggccttgctagggatgctgtgccagtgtgaagaggaaggtggtctc

SEQ ID NO: 987156 - DNA, 120 bp, Artificial Sequence
  ENSG00000247572_61 (sequence is synthesized)
cagctctcaccccatagaagctttctgcctcagtttccctaacctggaacaccacaatgactcctgaattgaaaaacactgcttacagcatctaggctaaaattggcagaatacctgggc

SEQ ID NO: 987157 - DNA, 120 bp, Artificial Sequence
  ENSG00000247572_62 (sequence is synthesized)
tccaagccagggagatttggagcgatggggaggtgcaagagcacagccagacagagccaaaagcaataatatcctgtttgttcctacactgccctccgcattaaaaaaacaacgacagct

SEQ ID NO: 987158 - DNA, 120 bp, Artificial Sequence
  ENSG00000231160_0 (sequence is synthesized)
gccacacgcggagagcacggagatttctggggctttggagggaatcgtgagcgggcgggaggaggccggggaccacacagagaataacttgtctgactaccagtattcttggatgcagaa

SEQ ID NO: 987159 - DNA, 120 bp, Artificial Sequence
  ENSG00000231160_1 (sequence is synthesized)
gtgctgaagatgagcacacacacgtacggagaatttctggagaattcagctgctcagaacaagaactgagatccagagagatgatgactttgcccatagaccaaacaaagaaatacatgt

SEQ ID NO: 987160 - DNA, 70 bp, Artificial Sequence
  ENSG00000231160_2 (sequence is synthesized)
accgtgtgtgaatgcctgctctgtgagccctcagaatctactggctgaatgagtgcgtggaggaaatgtg

SEQ ID NO: 987161 - DNA, 120 bp, Artificial Sequence
  ENSG00000231160_3 (sequence is synthesized)
tcagaatctactggctgaatgagtgcgtggaggaaatgtgctcagagctgctgtgtgtcatcctgtgtttgaagtgctcctgcagctatcattcatccagttaagaatttgaagaagtgt

SEQ ID NO: 987162 - DNA, 120 bp, Artificial Sequence
  ENSG00000231160_4 (sequence is synthesized)
gtgcacaaaggcaccggaaaatatgcacattatgctggagcattagaatgcaacagaaagagccctgggcttggagtatgcagaactggttcttgttacaactcctcttactagtgggct

SEQ ID NO: 987163 - DNA, 120 bp, Artificial Sequence
  ENSG00000231160_5 (sequence is synthesized)
ctggaagaaaacacattgaattcatgatcatggttaacctttggagagagagaggagaccaggatgaaggagccagtcgaagatcctgttcaagtgtacactgagccagcaggttcacca

SEQ ID NO: 987164 - DNA, 120 bp, Artificial Sequence
  ENSG00000231160_6 (sequence is synthesized)
gaaagctattgagcgtttgctggaacacattatgcagggtgaatttcttctggaatgttgccaaggattttttatgcttctgtggcaggcatttcttgaacattgtcatttagccaagca

SEQ ID NO: 987165 - DNA, 120 bp, Artificial Sequence
  ENSG00000231160_7 (sequence is synthesized)
aagaagattttcttaaaggatagaaaatgtttaaaaatttttgtttgtttgaagataggttaaatggctatatgatctcaggataagacagagaaaatcacttatttctctaagtgatct

SEQ ID NO: 987166 - DNA, 120 bp, Artificial Sequence
  ENSG00000231160_8 (sequence is synthesized)
atatcattagctgtttttcgaaactgaatttgctcttcagagatttctcatatgtttgcgtataaggaactactggtaatagccaagaaaatttggaggtgcagagaacatgctgaaaca

SEQ ID NO: 987167 - DNA, 120 bp, Artificial Sequence
  ENSG00000231160_9 (sequence is synthesized)
gaatttttcactttcaattctagaactatgccataaaaaaaaaggaaaatgtaaaaatgtctttatattagagcagatattttaaaagtattgcaaattcaatgataaattctaaggtta

SEQ ID NO: 987168 - DNA, 120 bp, Artificial Sequence
  ENSG00000231160_10 (sequence is synthesized)
aaattggacacataaaaaatacaatatataaatatctccccagaaattattatctaatgaatagtaaaagctgactacaaaccatgtcattttaacaagggtttaaatagtaccaagatt

SEQ ID NO: 987169 - DNA, 120 bp, Artificial Sequence
  ENSG00000231160_11 (sequence is synthesized)
ctcatcatatgctctgggatacccagtgatgtacaagggttctctctaaacatggggaggaaaaatttcaaatataaagatttgaatcttgtctttgccattcactagctgtgtgatctt

SEQ ID NO: 987170 - DNA, 120 bp, Artificial Sequence
  ENSG00000231160_12 (sequence is synthesized)
ttcactagctgtgtgatcttgggtaagttacctggtttctctgagcttcagtgtcatctgtaaaacaggaataataatacctagctcagaggcgggtgtggtggctcacgcctgtaatcc

SEQ ID NO: 987171 - DNA, 120 bp, Artificial Sequence
  ENSG00000231160_13 (sequence is synthesized)
ggtaaataaataaataaataaataaaagtaaataaataaataaataaataataatacctagcttatggggctgctgtgggtgtttgtaaagtatctcaatggtgcctacatattgtaaag

SEQ ID NO: 987172 - DNA, 120 bp, Artificial Sequence
  ENSG00000231160_14 (sequence is synthesized)
gcttatgaatatattagttcctttctcaacttcctcaattcattccaccactacaagtcaatctagagattaaaataggcaaaactgtgatctacgttaggatggggttgtttgagtggt

SEQ ID NO: 987173 - DNA, 120 bp, Artificial Sequence
  ENSG00000231160_15 (sequence is synthesized)
attcaagcggttttcctgcctcagcctccagagtaacagggattacaggcatactccaccttgccctgctgattttgtatttttagtagagacaagagtttcaccatgttggccaggctg

SEQ ID NO: 987174 - DNA, 90 bp, Artificial Sequence
  ENSG00000231160_16 (sequence is synthesized)
atgctctactttttaatcaatgttttccaaaatagggatttttgctatgtgctttagaaattagagaacaaacggtgataatatatgcta

SEQ ID NO: 987175 - DNA, 120 bp, Artificial Sequence
  ENSG00000231160_17 (sequence is synthesized)
gctttagaaattagagaacaaacggtgataatatatgctaaacttaaaattagtatgcctccttttatagacaacaagaactttgtcacttcccagtttgtcttgtcattcaggaggctc

SEQ ID NO: 987176 - DNA, 120 bp, Artificial Sequence
  ENSG00000231160_18 (sequence is synthesized)
agagctacgatctgtgcccactcgtgctgcctcttcttaactttgatttcctgaagcagcgatttcatctccgtttcccctcatcacctgttcttttaactgtttaaaaacagcattaca

SEQ ID NO: 987177 - DNA, 120 bp, Artificial Sequence
  ENSG00000231160_19 (sequence is synthesized)
tgttgttgcaagtggcctcaaattctttttggtagaagggaaattgtaatccatgagaagaaaaaaattttcctaactattctcaggtgtgtttaagggctgcattccatgatgctatca

SEQ ID NO: 987178 - DNA, 120 bp, Artificial Sequence
  ENSG00000231160_20 (sequence is synthesized)
tctccaaacaacgttgccacacgcggagagcacggagatttctggggctttggagggaatcgtgagcgggcgggaggaggccggggaccacacagaactgagatccagagagatgatgac

SEQ ID NO: 987179 - DNA, 73 bp, Artificial Sequence
  ENSG00000231160_21 (sequence is synthesized)
ggtgagtgttacagttcttaaaggcagtgtgtccagagtttgttcctactgatgtgtggatgtgttcggagta

SEQ ID NO: 987180 - DNA, 120 bp, Artificial Sequence
  ENSG00000231160_22 (sequence is synthesized)
taaaggcagcgtggacccaaagagtgagaagtagcaagatttattgcgaagagcgaaagaacaaagcttccacgatgtggaaggagaccccagcagattgccactgctggcttgggcagc

SEQ ID NO: 987181 - DNA, 61 bp, Artificial Sequence
  ENSG00000231160_23 (sequence is synthesized)
gcccccacccacatcctgactgagccagatacaaaggttctccaggtccccactagattag

SEQ ID NO: 987182 - DNA, 72 bp, Artificial Sequence
  ENSG00000231160_24 (sequence is synthesized)
ccacgtccgcccctgcaggtggagctgcctgccagtccctcgcggtgcgcccgcactcctcagcccttgggt

SEQ ID NO: 987183 - DNA, 62 bp, Artificial Sequence
  ENSG00000231160_25 (sequence is synthesized)
gatgggactgggcgctgtggagcaggaggcggcgcttgctggggaggctcctgcggcacagg

SEQ ID NO: 987184 - DNA, 78 bp, Artificial Sequence
  ENSG00000231160_26 (sequence is synthesized)
gggctgcaggtcccgagccctgccccttgggaaggcagctagggccccgggagaaatcgagcgcagcgccggtgggtc

SEQ ID NO: 987185 - DNA, 120 bp, Artificial Sequence
  ENSG00000231160_27 (sequence is synthesized)
tcattgcctggggccggcagggcctgccggctgctccgagtgcgggccgccaagctcacacccacccagaactccagctggcctgcaagcgtcgcgtgcagccccggttcctgctcgcac

SEQ ID NO: 987186 - DNA, 120 bp, Artificial Sequence
  ENSG00000231160_28 (sequence is synthesized)
agccgccacactttcccaagcccgcaggcgccccccccaacaccagcgctgcacccccgacccattccccgcggccccctccaggagaaaaaatgaaaccagactggccgaggagggggg

SEQ ID NO: 987187 - DNA, 120 bp, Artificial Sequence
  ENSG00000231160_29 (sequence is synthesized)
cggcagggaccagggtgcggagcagaggtgagggagacgggacttactttgcgaggcgcggtgcagggcgccgccgacgagaaataaaggccccgatacgggctgcctggagccccccga

SEQ ID NO: 987188 - DNA, 120 bp, Artificial Sequence
  ENSG00000231160_30 (sequence is synthesized)
taaaggccccgatacgggctgcctggagccccccgagcgcagcaatgtcagggctccagtccgggcggcgttggcggccgcaggggacggggacgggcgcgcgtgcggcgggcgctctcg

SEQ ID NO: 987189 - DNA, 120 bp, Artificial Sequence
  ENSG00000231160_31 (sequence is synthesized)
cgctcctggctcccctctggctcctggcaccaactccgggcagtcacatgacgccggcgccgctcgctctgcgagcctcccggggctggcgggagaataacttgtctgactaccagtatt

SEQ ID NO: 987190 - DNA, 120 bp, Artificial Sequence
  ENSG00000231160_32 (sequence is synthesized)
accatgggctagggagtatgttcttgataaatttacaaaatcttctgatcaactatagactttaaaaatataacatcaattttttaataaaatactctctctctctctctctctctctct

SEQ ID NO: 987191 - DNA, 120 bp, Artificial Sequence
  ENSG00000231160_33 (sequence is synthesized)
cccaaaattacagttctaaaattttcctatacaatccttctaaattggatgacagttgtcccattttcctttgcaggatgtaccagactattaatattggtgaccatgggctagggagta

SEQ ID NO: 987192 - DNA, 120 bp, Artificial Sequence
  ENSG00000231160_34 (sequence is synthesized)
actgggaatagaagacctttgaaaatcgtgatgggcttaaagatcccagcgcaggtcccaccacttattcgctctcacctggcatctcaatctctgcatctgtaaaaatgaagaaaataa

SEQ ID NO: 987193 - DNA, 120 bp, Artificial Sequence
  ENSG00000231160_35 (sequence is synthesized)
tccatctccctggatgacttcatgagattttttgtagtcatcagtgaggtactgtacatagacgtgctgtaaggacgaaaagttcttcacaataggatgcatgggaaagcaagcagggag

SEQ ID NO: 987194 - DNA, 120 bp, Artificial Sequence
  ENSG00000231160_36 (sequence is synthesized)
cagtggaggaggctgaacccagaacgtgggctgaggatgctgggagggaacagggttgggggctgaatcctaacaggaggaagctactgagctgcttctgtaagttgggcctggatggaa

SEQ ID NO: 987195 - DNA, 120 bp, Artificial Sequence
  ENSG00000231160_37 (sequence is synthesized)
accctggaagcagtaactccaagaaagattcaaaagtgggacaagaagagcaagaaccaggaatggaaaaactccaaggaacatgagtgaagagggtgtaaccagagaccagtgtcaaca

SEQ ID NO: 987196 - DNA, 120 bp, Artificial Sequence
  ENSG00000231160_38 (sequence is synthesized)
aggaatctggcttggaacgcttttgtctgcagccctctttggagcgtgacttgctctttcagaggtctgtatttctctacctggactaccctgagagctaaccccagttattggtctgga

SEQ ID NO: 987197 - DNA, 76 bp, Artificial Sequence
  ENSG00000231160_39 (sequence is synthesized)
cagaggaggcaccgagagcggtagctatcctacttttaaataaagaattaggctgggcacggtagctcacgcctgt

SEQ ID NO: 987198 - DNA, 78 bp, Artificial Sequence
  ENSG00000231160_40 (sequence is synthesized)
atcccagctgcttgagagaggtaagccgagattgcaccacggtgcttcggcctgggcggcagagtgagactctgtttc

SEQ ID NO: 987199 - DNA, 120 bp, Artificial Sequence
  ENSG00000231160_41 (sequence is synthesized)
tagtgggctgctatggacctaaagtggagggctttgaaatttcctgcttaattgggctgcatgtcattgctgtccttagaagttgctctgggatgcaggtgctggtttcttggatctcct

SEQ ID NO: 987200 - DNA, 120 bp, Artificial Sequence
  ENSG00000231160_42 (sequence is synthesized)
ttgctggaattttgcatgtcttgttttgttgttgtaccagctttgtggatcagccaacatccttggcttgccctgtggggagtggggtgggacacatcttggattgctctattccaggga

SEQ ID NO: 987201 - DNA, 120 bp, Artificial Sequence
  ENSG00000231160_43 (sequence is synthesized)
tgtccaacattttggcttccctaggccacattggaagaagaagaattgtattgggctacacataaaatacactatcactaaaatagctgatgagctaaaaaaaaaaatcgcaaaaaaaat

SEQ ID NO: 987202 - DNA, 120 bp, Artificial Sequence
  ENSG00000231160_44 (sequence is synthesized)
ctcataatgttttaagaaagttgatgaagttgtattgggccacattcaaagctttcctgggccacatgcaggctgagggctgtggattgaataaacttgctctattccctttgcagtaga

SEQ ID NO: 987203 - DNA, 120 bp, Artificial Sequence
  ENSG00000286582_0 (sequence is synthesized)
acaagcactacctgtgattggagtggtgtcttgaaaggcaggcggatggtggtccgtgcaataaaattctggttttacattaatttatgaaatatatctcacataaccttgattgacact

SEQ ID NO: 987204 - DNA, 120 bp, Artificial Sequence
  ENSG00000286582_1 (sequence is synthesized)
aaactgcacattgctttttctaattgaacttgttagatgtacagtatacccatgaccctcattttgtatagttcacatctgccaaaaagcagtcacattaattgtaggactttttttctt

SEQ ID NO: 987205 - DNA, 120 bp, Artificial Sequence
  ENSG00000286582_2 (sequence is synthesized)
cctcctcatccttcattatcaattgcaaaggaggctctttccctgccctgagagaatatgacagttctctttttatagtctataagcacttagaattttatatgtcatactttgcatctt

SEQ ID NO: 987206 - DNA, 120 bp, Artificial Sequence
  ENSG00000286582_3 (sequence is synthesized)
ttaataagatatcattcattatatatggtatcacgtgtgtatgtatgaaggtgtgcatgagatccaatttaaattacattatctccatctactttcatcagttcatgttgttcactaaaa

SEQ ID NO: 987207 - DNA, 120 bp, Artificial Sequence
  ENSG00000286582_4 (sequence is synthesized)
gctacttacatggcatttcatactttcagatgaccattagtagatgtcaagaaataaattactatcagaggtaatctgacagttactaatgtaactatatctttgccaaatacattaata

SEQ ID NO: 987208 - DNA, 120 bp, Artificial Sequence
  ENSG00000286582_5 (sequence is synthesized)
tatggctctcacattaccactcataaaatttagaaaataataatcccccatcttgatttatggatagaaaattcacttctgaattcactacccactactaataaataaagtgattttaaa

SEQ ID NO: 987209 - DNA, 120 bp, Artificial Sequence
  ENSG00000286582_6 (sequence is synthesized)
atcccgttaattcttcactctgcctacattagtttctgatcaatttcatccatcccagaaaatacacctgcataaacatgactcataagaaatgaactattgaaattcattccttcacac

SEQ ID NO: 987210 - DNA, 120 bp, Artificial Sequence
  ENSG00000286582_7 (sequence is synthesized)
acacacacacacacacacacacaaaacccctgaacagtgatggctgatggctctgaataactacccaccattatctcccccatgtacaatttttggtttcattgtccctaagaaagctga

SEQ ID NO: 987211 - DNA, 120 bp, Artificial Sequence
  ENSG00000286582_8 (sequence is synthesized)
taagaaagctgaaaaaagccatttagaaaattgctgatggcttagaaaacagagtgtcgcaaaatacattctgaggcctaaagactgcataacaatggagagaacaaagagatgcaggta

SEQ ID NO: 987212 - DNA, 120 bp, Artificial Sequence
  ENSG00000286582_9 (sequence is synthesized)
gaaagtattcatctgtagagcttgttctcctgcttttttaagcgatataactctcttgtgtgaatttatttcacatatttatatgctaagaaaatatttatacagcaggacaacctggtg

SEQ ID NO: 987213 - DNA, 120 bp, Artificial Sequence
  ENSG00000286582_10 (sequence is synthesized)
aaataagcaatatacatgagaagtgggaacattcatgaacgcaagaagatgtcatcaggcttctccaaatacactgaagatacagaaattccagcgagacctacattctcccaggtagaa

SEQ ID NO: 987214 - DNA, 120 bp, Artificial Sequence
  ENSG00000286582_11 (sequence is synthesized)
cgaaatctcaattgttactctgatgttctttgctgcctcactctacattgctttgattgtactgatgtgaacactaagacacaataagggtaagtcactcagcagaatcctacagtgcct

SEQ ID NO: 987215 - DNA, 120 bp, Artificial Sequence
  ENSG00000286582_12 (sequence is synthesized)
taaggtaatgttgttggtcagcccatggtctctggccaccagtcctgtgaccttcccttccccagacttgtctgtctactctaattcttgttaatgcaataaatgaactctgtgcaagat

SEQ ID NO: 987216 - DNA, 120 bp, Artificial Sequence
  ENSG00000286582_13 (sequence is synthesized)
acaggcgtgagccactgcgcctggccccagcaagatttgaatgtacgctgtaaaggcccatttctgaaattcttcctttctttctttttctccaggcctagtaaaataatcttccaatct

SEQ ID NO: 987217 - DNA, 120 bp, Artificial Sequence
  ENSG00000286582_14 (sequence is synthesized)
tctccaggcctagtaaaataatcttccaatcttcaatttcatcttctgtgaaaagtagtttaactcaataggttggaaacagtgctatgagcctcttgatagaaatgacatgaaaaacat

SEQ ID NO: 987218 - DNA, 120 bp, Artificial Sequence
  ENSG00000286582_15 (sequence is synthesized)
catgagatgttctgacaaatctgctgcatgaatatgatgatttcaaataataattatgttcattaattcttataatttttatgccatggtcttatattctaatattctttctcatgccag

SEQ ID NO: 987219 - DNA, 120 bp, Artificial Sequence
  ENSG00000286582_16 (sequence is synthesized)
gcaccattcaaaaggttttatatatgccaacctatatagtcctcacaacaaccctaaaaaatagtatacttactctcccctttttaaagatgaataaatggaaaattaactaacttgctc

SEQ ID NO: 987220 - DNA, 120 bp, Artificial Sequence
  ENSG00000286582_17 (sequence is synthesized)
aggtgctgataatcccaatactacacccatctccttgtcatgaattcactaatcgttttgatatgacataagtcttcaattcccctataaatgcaattttcctgttcttgatttgattta

SEQ ID NO: 987221 - DNA, 120 bp, Artificial Sequence
  ENSG00000286582_18 (sequence is synthesized)
aaacacctctagaatcctttctatgtctaaaattacagtgttggagaagaaactatcagctgtaaacgacattcagataattcccattaactatcaactatgtaattttgtgttattttt

SEQ ID NO: 987222 - DNA, 120 bp, Artificial Sequence
  ENSG00000250378_0 (sequence is synthesized)
atggtaacagagccatctggctttcttgcctggcaccagaccttatgacttcatgatggaatcttctctcagcaggcagagggggatttgccagggtaaagaggaggctgggaggaagag

SEQ ID NO: 987223 - DNA, 120 bp, Artificial Sequence
  ENSG00000250378_1 (sequence is synthesized)
gcctgccgagggaggctttgtcttttcagccagagtttgacaattaggcttcatcatgtcacgatgcggtgctactgctgaccccaaaacacaacgccggaagtggtgctcactagagac

SEQ ID NO: 987224 - DNA, 120 bp, Artificial Sequence
  ENSG00000250378_2 (sequence is synthesized)
tatgtgtcagaactgtgacgctgaatccggagccccaacctctcctagcctcctagaggaggatgacccaggacccttgtcctcccaacagcaggccaccagttcaagggacaagaagcc

SEQ ID NO: 987225 - DNA, 120 bp, Artificial Sequence
  ENSG00000250378_3 (sequence is synthesized)
cctttcttctgcacctatgggtgcctcctggaagaggaggggttggtcctgcagcccaagacaccgctccaggaggactcagaactgctcagtgggttcttcccttactaccgctctgag

SEQ ID NO: 987226 - DNA, 120 bp, Artificial Sequence
  ENSG00000250378_4 (sequence is synthesized)
gaggagagtttgcccagcctggcccttcctggctggtcacacaggggctcccaagatctgcccactgagaaggaggcacgggctggctgcttctgcaggacaacagtcagggacgaatgc

SEQ ID NO: 987227 - DNA, 120 bp, Artificial Sequence
  ENSG00000250378_5 (sequence is synthesized)
tctcctgacccaagctcagacagaggaagcaggagccacctgaacaactgaagggtgcagacacccagaagctggttttgtaaataaatcgtgcaccttggcgctggtgcactaattgga

SEQ ID NO: 987228 - DNA, 120 bp, Artificial Sequence
  ENSG00000250378_6 (sequence is synthesized)
aacagccacaccaaaagtggctttggagagaagtgtccatcttgtccagcactctgacctcagaccattccttttgtagcctgacccaagctcagacagaggaagcaggagccacctgaa

SEQ ID NO: 987229 - DNA, 120 bp, Artificial Sequence
  ENSG00000250378_7 (sequence is synthesized)
caactgaagggtgcagacacccagaagctggttttgtaaataaatcgtgcaccttggcgctggtgcactaattggatgctttggagtaatacttgcagcttccatttattaagcatttac

SEQ ID NO: 987230 - DNA, 120 bp, Artificial Sequence
  ENSG00000250378_8 (sequence is synthesized)
tttgtactaggcactttacagagatcatctccataatcatgggttgtagacactggtgtcatctccattctacagctgagtaaacaggctaagagatgttacatagggtgcccgagctca

SEQ ID NO: 987231 - DNA, 120 bp, Artificial Sequence
  ENSG00000250378_9 (sequence is synthesized)
cacagctagcagacagccgggaactgtggagctgggattcacaccagctctgtctgacctcgggccaagtacttaagcacctcctcactacattcttcctcagtgggtctatgcatagca

SEQ ID NO: 987232 - DNA, 120 bp, Artificial Sequence
  ENSG00000250378_10 (sequence is synthesized)
cctgcccttgggtagagcaggtaaggatggtgactctgcatgtgtctgctaggccctacctccttggaccttgtggacctgttttctggtgctccagcccaacttccaaccccaggctca

SEQ ID NO: 987233 - DNA, 120 bp, Artificial Sequence
  ENSG00000250378_11 (sequence is synthesized)
cctggtgagtggctgaatcacactgggattttgagagtatatgctcatcccacctaccccgggaccagacacttagatgctgattcctgtttgaaaatcctttagtgccagccacactgg

SEQ ID NO: 987234 - DNA, 120 bp, Artificial Sequence
  ENSG00000250378_12 (sequence is synthesized)
catgtcccaagttcacagcctctctgtcccgtggcgctggttttgtgtctcctccccgggtgtaggttctttgtttgctttgacactcacacacctctgaccactggatccctgctcctc

SEQ ID NO: 987235 - DNA, 120 bp, Artificial Sequence
  ENSG00000250378_13 (sequence is synthesized)
cacccgatggctgcttgtctggaatgccctcacctgctcacatgcttcctgaggatgaggactttaagaaagagagagaaatcaatcggtcacactagagttacatcaaagaaattcttt

SEQ ID NO: 987236 - DNA, 120 bp, Artificial Sequence
  ENSG00000250378_14 (sequence is synthesized)
ttagaaaatctattttttactatttccaaggcactcctatgacttcccattgggtttggggatttgggatttggagtatgatgggagtatgaagaaataaaggtacccttgccaggaaaa

SEQ ID NO: 987237 - DNA, 120 bp, Artificial Sequence
  ENSG00000250378_15 (sequence is synthesized)
gttccaacccctttgcggggtccaagggctcctggaggaggagatgacttctggggcacagcaaaccaagatgtgtgctccccagagctgacttggaagctgtccggcccctctgcattc

SEQ ID NO: 987238 - DNA, 120 bp, Artificial Sequence
  ENSG00000250378_16 (sequence is synthesized)
acaccaggcagcaggagggacagccactgcaggctgccagcctgtcctttgctgtctgtgtctgtgtcaagagtgaatgaagtgataaaaccaggagagcagtgtgctgtgaaaaagtta

SEQ ID NO: 987239 - DNA, 120 bp, Artificial Sequence
  ENSG00000250378_17 (sequence is synthesized)
aagcctgacccaagctcagacagaggaagcaggagccacctgaacaactgaagggtgcagacacccagaagctggttttgtaaataaatcgtgcaccttggcgctggtgcactaattgga

SEQ ID NO: 987240 - DNA, 120 bp, Artificial Sequence
  ENSG00000250378_18 (sequence is synthesized)
aatccaggactcactgttgaagtggagccggggccctcgcaggaaagaatgagctgtgggagggccactggtccaccacagggagtctgtgctgtccagtgcccactggatggcaggaag

SEQ ID NO: 987241 - DNA, 120 bp, Artificial Sequence
  ENSG00000250378_19 (sequence is synthesized)
accgggatgcccctctctccagggaccatggtctttatgcctcaggatttgtgcattactacagaacccctgaggaggggttacacactagccctgggcctcctgcctttccatctggga

SEQ ID NO: 987242 - DNA, 120 bp, Artificial Sequence
  ENSG00000250378_20 (sequence is synthesized)
gccaggggccctcaggggctgcccagggctggtgcagtcacaccacggggaagccggagctgactgcaacagaaaccactggagagcaggcccccagcacccactgactgtcgagggatg

SEQ ID NO: 987243 - DNA, 120 bp, Artificial Sequence
  ENSG00000250378_21 (sequence is synthesized)
tactctaacaggcccctggacaggcccctctcagggctgctgcggcccttggagcaaggtgtcactggttgggagcacagacactgcaggaagactgtcctgttcaagcccagcttgacc

SEQ ID NO: 987244 - DNA, 120 bp, Artificial Sequence
  ENSG00000250378_22 (sequence is synthesized)
acctgctaggagagcggcctggggaacgtggtttccttataaaagagagaacagcagcagcaacaataaagccattgtgagaattacatacaaccacgtacctaaagtgctcagcaggat

SEQ ID NO: 987245 - DNA, 120 bp, Artificial Sequence
  ENSG00000286580_0 (sequence is synthesized)
tcccacgcagcccgcggcctgaaaggctggtctcactcccactgagtggcttgcatatgatcttatatatactctcactctcactcctggcttgtatatgatcttatacaagttagaaaa

SEQ ID NO: 987246 - DNA, 120 bp, Artificial Sequence
  ENSG00000286580_1 (sequence is synthesized)
tcctggcttgtatatgatcttatacaagttagaaaagcaagctgactcacagtttcttggctctcccacagagcctgcagtggctatccacctccttcaaagggtctgtggattctcttg

SEQ ID NO: 987247 - DNA, 120 bp, Artificial Sequence
  ENSG00000286580_2 (sequence is synthesized)
aggactaaaatccagaatctacaaggaactaaactcaacaagaaaaaataatctcattaacaagtggggaaaagataggaacagacatttctcaaaagaagatatacaagaggacaagaa

SEQ ID NO: 987248 - DNA, 120 bp, Artificial Sequence
  ENSG00000286580_3 (sequence is synthesized)
acataaaataaaatgctcaatatcactaaccgtcagtgaaatgcaagttaaaaccacaatgagatgccacatcacaccggtcggaatggccattattaaaaagtcaaaaaaccacagatg

SEQ ID NO: 987249 - DNA, 120 bp, Artificial Sequence
  ENSG00000286580_4 (sequence is synthesized)
acaccgttggtgcgaatatgaattagtacaacctctatggacaacagtatagagatttctcaaagaagtaaaaatagaaccaccattaggcccagcaatcccactactgggtatctaccc

SEQ ID NO: 987250 - DNA, 120 bp, Artificial Sequence
  ENSG00000286580_5 (sequence is synthesized)
atatatatatctgcactcatatgtttatcactgcactagtcgcagtaacaaagtcatggaatgaacctaagtttccatcaaaagatgattggataaagaaaatgtggaataccatgaaat

SEQ ID NO: 987251 - DNA, 120 bp, Artificial Sequence
  ENSG00000286580_6 (sequence is synthesized)
catgaaatactacacatccgtagaaaaaaaattatgtcttctgcagcaacatggatgtaactggaggtcaaaatactcagaaacacaacatcaaataccacatgttctcacttataaatg

SEQ ID NO: 987252 - DNA, 120 bp, Artificial Sequence
  ENSG00000286580_7 (sequence is synthesized)
gtacaaacagagaaaaatagtcaaggctggggactttaaaagaggggcttgggagggacttgagagttgaaaaattacctactggatacaatgttcattattcaggtaataggaacatta

SEQ ID NO: 987253 - DNA, 120 bp, Artificial Sequence
  ENSG00000286580_8 (sequence is synthesized)
gaagcccaaatctcagctttccacaatatatccatgtgacaaatctgcatatatacccactgaatctataaaaataaaatgaataaattttaaaaagcatgtttcaacacttcatagaaa

SEQ ID NO: 987254 - DNA, 120 bp, Artificial Sequence
  ENSG00000286587_0 (sequence is synthesized)
ggccagcacccaataagcaaataatgggaaattgattattgattatttcctcattcccaagtgaaaaggagaaaggtatctctattggagatgaacgcatgttcaatacacgtggcctgc

SEQ ID NO: 987255 - DNA, 120 bp, Artificial Sequence
  ENSG00000286587_1 (sequence is synthesized)
ctgagtcattagcaaagtgtccaacaactctgaggtactgaaaaatgaaatgactagttaatgtagattgagagtccacatgccagtcacatctcgtctcacttaaatctcccaccaaac

SEQ ID NO: 987256 - DNA, 120 bp, Artificial Sequence
  ENSG00000286587_2 (sequence is synthesized)
cacacagcactcagttgtgatttgaacccccggggatccctgactcctgagccatcacccttgttcacattgagactgcctgtatccctgcctttccacaaagaatattcataacttgta

SEQ ID NO: 987257 - DNA, 120 bp, Artificial Sequence
  ENSG00000286587_3 (sequence is synthesized)
gggcttaaaatgcgcgcccatgacttggatatgaaaaagaataactattttctatgactggcttcatctggctgtgtaacccctattcctgttgtgccacccttgggtaaataccttgga

SEQ ID NO: 987258 - DNA, 120 bp, Artificial Sequence
  ENSG00000286587_4 (sequence is synthesized)
gtagaatagctggctcctcttgtggttgggtgtttagctgtttaagaaactcttgagctgtttcccaatgtgattgtaccttttcacattcctaccagcagcataggaaagttctgatcc

SEQ ID NO: 987259 - DNA, 120 bp, Artificial Sequence
  ENSG00000286586_0 (sequence is synthesized)
ggcgggatcgcgttgcaacgcggcaagggcgatgagagcgcggaggaggcgctggtggccgagtttggggcggggactgtccccaatgctccgcagcaaggttggctgattgtggaggct

SEQ ID NO: 987260 - DNA, 120 bp, Artificial Sequence
  ENSG00000286586_1 (sequence is synthesized)
agttgccggaatgcctctaagatttctacgttatctactgtgaagagcaagtaattactgcaaatcctgcccttgggtcaaaacaaccttgatgacatattccttctgaagcacatatac

SEQ ID NO: 987261 - DNA, 120 bp, Artificial Sequence
  ENSG00000286586_2 (sequence is synthesized)
tctttccctaggtatataagccttgggtctgggggctaacggtgcagggatccatcatctcacagccacccaagacatggcttttgttcaaaaatccctattaaatgtttcattctgaga

SEQ ID NO: 987262 - DNA, 120 bp, Artificial Sequence
  ENSG00000272236_0 (sequence is synthesized)
ctgaatgagaccctttgctagagctggcacagggaggaaggtcgtcctggagggagggtagacactgtggagggaagggagacctgtgtcaggagagctgagaccacctctctgcccctc

SEQ ID NO: 987263 - DNA, 120 bp, Artificial Sequence
  ENSG00000272236_1 (sequence is synthesized)
actcttgtaatctttaggagtgtaaataatccccctaaggtggggacaggaccccagtccctgctgtgcgcaatagattatgatgatcaaaataaataatcagtgaatgtggatgggaaa

SEQ ID NO: 987264 - DNA, 120 bp, Artificial Sequence
  ENSG00000226442_0 (sequence is synthesized)
cttgctgcaaacacttacatccatgccactcatgagagctgagcatttgccgttgtacgttccttggtctactgttctcttctgtcatgtaagagtgggccttgggcatgaaggctgaag

SEQ ID NO: 987265 - DNA, 120 bp, Artificial Sequence
  ENSG00000226442_1 (sequence is synthesized)
gaggggaagccacagccatttggcagttctagtgcatcatcaaggagtacctggctcccctctccccctcacctgttggcaagcattctgccttccccgggacctcctccagctgctcca

SEQ ID NO: 987266 - DNA, 120 bp, Artificial Sequence
  ENSG00000272234_0 (sequence is synthesized)
gaatatgtctaggaagtagactcgtctggagttcagtcattgtgtttcagctttgtatatatgggatcatcctaatatgtgttttaattgtaatcaagggatagatgagattgctcaggt

SEQ ID NO: 987267 - DNA, 120 bp, Artificial Sequence
  ENSG00000272234_1 (sequence is synthesized)
aaaatgtgcagagtgtgaataggcagaaagctgtatagccctgaataacacaaacacatacagaataaaccaaggaagaatgtgggaggaagaaaaatcaggaggtggaagaggaggaag

SEQ ID NO: 987268 - DNA, 120 bp, Artificial Sequence
  ENSG00000272234_2 (sequence is synthesized)
gaggaggagaaagaagaggaaggatatgaggaaaaccagcagggtatagtgtcatagaaattttttaaaatgagagtatttcaaaaataaggagtgatttttacttctaaatgttaaaga

SEQ ID NO: 987269 - DNA, 120 bp, Artificial Sequence
  ENSG00000272234_3 (sequence is synthesized)
gagattatatgagatgaagactgaaatatggcattgtatttaacagtaaagaagattgttatgtgtgatgggaagtaaataaatagatacgaaacagttatttttaaatttgggatgtgt

SEQ ID NO: 987270 - DNA, 120 bp, Artificial Sequence
  ENSG00000272234_4 (sequence is synthesized)
ttgtgtgtatgtacaaacctatcatatatgaggaagtcatctttgcttccatttaaaagagtccagacatctgtttggttttcttcttgttgataaacaggaatatgctctgaaacctta

SEQ ID NO: 987271 - DNA, 120 bp, Artificial Sequence
  ENSG00000272235_0 (sequence is synthesized)
ttaaaatttggattctactggggaaaaagattacaataaagtgtctgtgctgcacccaggaaggcatgcccactgggtaaggctcggcaccaagcggcctctcactgtgggtcaggctcg

SEQ ID NO: 987272 - DNA, 120 bp, Artificial Sequence
  ENSG00000272235_1 (sequence is synthesized)
catggggcgggtgtgcctggcccctgtgtgaacctggagctggccatggggagaggctgctctggggcttttcagagaatccgtggttgattccctcaaggactccctcaagggggccac

SEQ ID NO: 987273 - DNA, 120 bp, Artificial Sequence
  ENSG00000272235_2 (sequence is synthesized)
gctcctcctccctgggtcccctccctggcccccacccttccctttctcaggtcctccctctgacagtggctgtagccctctgctcctagcccagggcagccctggcctctggagtcacag

SEQ ID NO: 987274 - DNA, 120 bp, Artificial Sequence
  ENSG00000272235_3 (sequence is synthesized)
tcatgtgttcaagtctcggcccctttcccaaggtgagctggtcctgcagggatgcgggaagtgtcagaatatgaaaacaaccaggacaaggacagctcagcttaccccgctccagcacct

SEQ ID NO: 987275 - DNA, 120 bp, Artificial Sequence
  ENSG00000272235_4 (sequence is synthesized)
tctccaggtcaagcacttggccagccctgtagcagcctcctcattccatctctctggtgttttacagatgagaaatgagcacagagaggttaggagcattgtccagtgccacagagctgg

SEQ ID NO: 987276 - DNA, 120 bp, Artificial Sequence
  ENSG00000272235_5 (sequence is synthesized)
catgtgcttgtctgggctgagaactctatgaagccttggaaatgctccccacatatggagcagtgtgttcaggccccatggcctgaccgggagcaggagggaaggacaggctcaggtctc

SEQ ID NO: 987277 - DNA, 120 bp, Artificial Sequence
  ENSG00000272235_6 (sequence is synthesized)
gcatcccgggaagaatttctcctcagtgcaccagggaatatcgcctgacgacggaatcaggtttctttccccatgacccctccaccattagtgttcccagaaagccaggggctgctgtgc

SEQ ID NO: 987278 - DNA, 120 bp, Artificial Sequence
  ENSG00000272235_7 (sequence is synthesized)
ccagaggaggtgcaccctgggagccctgcctgcaggacgggaagcagagccccctcagaacagaaactaggaacagaggagggacaagggagggagggcagaaggtccggtgccctcagt

SEQ ID NO: 987279 - DNA, 120 bp, Artificial Sequence
  ENSG00000272235_8 (sequence is synthesized)
ttctatccatccttgggtcggaaacctgggatggaatgagtgaggagctgggtccacagggacaggaactgggggataccaggggctagggctgctcatcctttcccaaggaggagccag

SEQ ID NO: 987280 - DNA, 120 bp, Artificial Sequence
  ENSG00000272235_9 (sequence is synthesized)
ggaaaaattaagctcatagggaatgtcgggttcaccgggcctggcggactccagatcccagaggcagggcacccacacatctctcaccggcacgcaccagggccccgatagccgggcacc

SEQ ID NO: 987281 - DNA, 120 bp, Artificial Sequence
  ENSG00000272235_10 (sequence is synthesized)
atcatggcgaattacattacattgcattacccggggaccactatcatgaccacgttgggagaggaaactgaggcactaagctgccaaagtcacgcagcccacaacactggaaggcaaagc

SEQ ID NO: 987282 - DNA, 120 bp, Artificial Sequence
  ENSG00000272235_11 (sequence is synthesized)
agccgtctggaccccagaactggagctgtcccctcactgggcgaaacccagaacccagtgtttgcttctttctcagagtagcaagaagacatggcagagctgccctcaggctggaggctt

SEQ ID NO: 987283 - DNA, 120 bp, Artificial Sequence
  ENSG00000272235_12 (sequence is synthesized)
gcaagccggaggcgcaccactgtctaagcaaaccaggcacgaggaaacgcattcgcaagcctgagaagatgagtggccatcactggcatcaccgaaatggcctcctcaaccggacgggaa

SEQ ID NO: 987284 - DNA, 120 bp, Artificial Sequence
  ENSG00000272235_13 (sequence is synthesized)
gaatccctcccccagctgactccccgagatgctccatgccccacgttcctgacctcctaggggaaggagcaggaggaacccaaggccatcagaggggcctggactgtgggtgctgccaag

SEQ ID NO: 987285 - DNA, 120 bp, Artificial Sequence
  ENSG00000272235_14 (sequence is synthesized)
tggcaatccaggacagtgggtcgcccccgcacggcctgacgctgtggcgtggagtctccagcggggcagcactgggttggaggagggaggatgctgccagcatcacggggaggtcacatg

SEQ ID NO: 987286 - DNA, 120 bp, Artificial Sequence
  ENSG00000272235_15 (sequence is synthesized)
ccagacactggtgtctgatttccccttgagagaggtttcatcactgccccgtccttggaaagggtcacccagtcagactacagagccaggaccatgatccaaagctgagcagtgcccacc

SEQ ID NO: 987287 - DNA, 120 bp, Artificial Sequence
  ENSG00000272235_16 (sequence is synthesized)
aaagacagtgttcccagtgctcaggagcccttgggcctttataaggtgtctaccgtgggactaaaaaaacacctgtccccaggtgacagcatgctgcctttgaaacacagctctgtgaga

SEQ ID NO: 987288 - DNA, 120 bp, Artificial Sequence
  ENSG00000272235_17 (sequence is synthesized)
acacacctggcaaaggcagtcttgggggccacgcggcagggacccctttcctttaccaactctcacaggctgagccgctcttgctgtgaatgtacgtggccttggtatgttctccagcaa

SEQ ID NO: 987289 - DNA, 120 bp, Artificial Sequence
  ENSG00000272235_18 (sequence is synthesized)
gattataagtggaggatggagtcagctgggaagcgaggctcagatcaaggagggctactaccaggatccctgcagaaacagggacacagggagagatggctgtaaaatccttgagcttta

SEQ ID NO: 987290 - DNA, 120 bp, Artificial Sequence
  ENSG00000272235_19 (sequence is synthesized)
aggggtaagctcatggagccctgaaaaatatgactgcattgcaaatgccaacttgtagacacaaatatcgtggaagcaggccacgttcagccttgcacactgtgcgctcttccatgactg

SEQ ID NO: 987291 - DNA, 120 bp, Artificial Sequence
  ENSG00000272235_20 (sequence is synthesized)
agaacgttagtcacctgcaccctgaccaacctctcatccctgaagcctgctgggaggtgtctggggacaggaacgaaaatttacaatgttctttggttgtttaattttgaattttctccc

SEQ ID NO: 987292 - DNA, 120 bp, Artificial Sequence
  ENSG00000272235_21 (sequence is synthesized)
tcattattattgaaactgaaacatctaagaggacacccagatttatctgaaaccggaagatgacacgtatgaaggatcaagcattcatcacaaacacaggcaggcgaaggagaccaaaac

SEQ ID NO: 987293 - DNA, 120 bp, Artificial Sequence
  ENSG00000272235_22 (sequence is synthesized)
acagctaggaccatgccaagcgtcggtgatgatgtggagaaatggggacctgccagacactgctggtggggaggtgacatggtgcagccactatggaaaatagtccagcagttcctcgaa

SEQ ID NO: 987294 - DNA, 120 bp, Artificial Sequence
  ENSG00000272235_23 (sequence is synthesized)
atggaaagcaggagtcccatgacccagcagttccattttcaaggaagtccccaagagaaatagaaacttacgtcttcacaaaagcttgaaaatacacattcatagcagcatgattcataa

SEQ ID NO: 987295 - DNA, 120 bp, Artificial Sequence
  ENSG00000272235_24 (sequence is synthesized)
catcaaaaagcagaaacagcccaaatgcccatcagtggatggatggataagcacaatgtggcccctccatacgacacaatattactcagccataagaacgagtgaggtagcggcacaggc

SEQ ID NO: 987296 - DNA, 120 bp, Artificial Sequence
  ENSG00000272235_25 (sequence is synthesized)
cacaaagtgggcgaacctgggaaccacgggactgagtggaaggagccagtcacaaaaggtcatgggctgtctgaatccattcatttgaatttccagactaggcaaatccacagagacaga

SEQ ID NO: 987297 - DNA, 120 bp, Artificial Sequence
  ENSG00000272235_26 (sequence is synthesized)
aagtgggttggtggttgcagtggctgggggcagggggacatggggagagtgcggagtgagtactaataggtgtgtggtttcttttttcagtgataaaaatgtactaaaatttattgtgat

SEQ ID NO: 987298 - DNA, 120 bp, Artificial Sequence
  ENSG00000272235_27 (sequence is synthesized)
ggttgcacaagtctgtggctgaaaaccactgaattgtacgttttaatggggtgcattgtttgcgtgtgaatcacatctcaataaagctgtttttaaaatgcaattattgcacaatgcaaa

SEQ ID NO: 987299 - DNA, 120 bp, Artificial Sequence
  ENSG00000205885_0 (sequence is synthesized)
gagcctcacagcaaagccctctggagccttgatgtccgtgctgctctcttggcctttgccatacggctctgggtacccgggggatgtcagctgctggggtagctcttgggccaagaggac

SEQ ID NO: 987300 - DNA, 120 bp, Artificial Sequence
  ENSG00000205885_1 (sequence is synthesized)
ggagccccgggttgggcaagcctggaggactccccagagaagcagccaccacctcctcccgcgcagcctgagctctaggattgtgggttttccatcctccgaagacatcacctttgctca

SEQ ID NO: 987301 - DNA, 120 bp, Artificial Sequence
  ENSG00000205885_2 (sequence is synthesized)
tctcccaggagagtctcgtccaaaggaggggggtgctttctgcttcagcagatcccaccccaccctgggatccgagggagcaatggtggggcgagtgagggtctgccgtaaatatccccc

SEQ ID NO: 987302 - DNA, 120 bp, Artificial Sequence
  ENSG00000205885_3 (sequence is synthesized)
gaccaccctctgggaaggtgctagaggccacaggcaaatttcagtctccccatggaatatctgctgtgctgctgctgctgctgctgctggctagagagatttaggagagccacagtctat

SEQ ID NO: 987303 - DNA, 120 bp, Artificial Sequence
  ENSG00000205885_4 (sequence is synthesized)
ggctacaaggagatgataagagagtgatggccaggacagatgcaatgtctcagaactcttagggtcacctggagcaccttgggagccagagatgcagccaaagagtgaacaatggtacca

SEQ ID NO: 987304 - DNA, 120 bp, Artificial Sequence
  ENSG00000205885_5 (sequence is synthesized)
atcccaagacccatgtgttaagaagaaaccagccaagactcagatcaggattggggagtccacccctcgtttcccttcagagcattatttccttgtttgctaagaggggcaggaactgga

SEQ ID NO: 987305 - DNA, 120 bp, Artificial Sequence
  ENSG00000205885_6 (sequence is synthesized)
aaactcaggctagcccatctgagaagactttcctggagatgagctggaggagggaggagtaaggccttggaaggaaactccaggacagcaccacctcccctacactgggacctcgtctct

SEQ ID NO: 987306 - DNA, 120 bp, Artificial Sequence
  ENSG00000205885_7 (sequence is synthesized)
aactggcagagtggtcaatgaaaaaaagggcatgccttggcacatcatggtcaaactgctaaaagccaaagacaagagaaaatcttttcttttttttaatcccatcctaaagactagaca

SEQ ID NO: 987307 - DNA, 120 bp, Artificial Sequence
  ENSG00000205885_8 (sequence is synthesized)
gaacaatattttcaatgtcactcttttctcatcaaaaccaatatagaccagaagacagtggaatatctctaaaatgctgaaggaaaaaaaaagtcaactcagaattgtttttctagtgaa

SEQ ID NO: 987308 - DNA, 120 bp, Artificial Sequence
  ENSG00000205885_9 (sequence is synthesized)
agtattcttccagaatgaagatgaaataaagctattttcagataaaagaaaacagagattcttgtcgccagcagacctccactatgagaagcgctaaagaaagttctttaggacgggcac

SEQ ID NO: 987309 - DNA, 83 bp, Artificial Sequence
  ENSG00000205885_10 (sequence is synthesized)
ccaaggtgggaggattgcttgagctcggaagatggaggctgcagtgagccatgacggctgtctcaaattggaagagcagagct

SEQ ID NO: 987310 - DNA, 120 bp, Artificial Sequence
  ENSG00000205885_11 (sequence is synthesized)
tccagcttgggtgacagagtgagacgctgtctcaaattggaagagcagagctgcagacaggaataagaagaacggtaaatttgaagatgggaccgtctagttgcaagaaaacaagctcag

SEQ ID NO: 987311 - DNA, 120 bp, Artificial Sequence
  ENSG00000205885_12 (sequence is synthesized)
acattacgggctgtgggttccttgagggaggaattttgtcctgcaggctgtggcagccctaggactcagcacatctaggtgtccacctgcgtctgtggtgagaagcctgatcattgccac

SEQ ID NO: 987312 - DNA, 120 bp, Artificial Sequence
  ENSG00000205885_13 (sequence is synthesized)
gtgaccgcctcctcactgttggtacctggttgtagagagcagctctgtgagtagaaggagaaggatcctgccctggagagggcctggctggtcctcacctggggcctatcatttagtaac

SEQ ID NO: 987313 - DNA, 120 bp, Artificial Sequence
  ENSG00000205885_14 (sequence is synthesized)
agggcttctggaagtggtagcagatctgggcctggtgggcattctgcttctcctgggtggcagcagaagtccctaggtggcaggctggggactgcccaaaggttctgactcaggaagagc

SEQ ID NO: 987314 - DNA, 120 bp, Artificial Sequence
  ENSG00000205885_15 (sequence is synthesized)
acagtggaacagaaagcccttgtaccaccttcgctgctgtattcgtccattctcacactgctgtacagaactacctgagactggggaattcatgaagagaagaagtttaattgactcaca

SEQ ID NO: 987315 - DNA, 74 bp, Artificial Sequence
  ENSG00000205885_16 (sequence is synthesized)
aggcctcaggaagcttatcagcaggagaaagagaagaagggagaagtctacacacttttaaacaaccagatctc

SEQ ID NO: 987316 - DNA, 120 bp, Artificial Sequence
  ENSG00000205885_17 (sequence is synthesized)
cttttaaacaaccagatctcatgagaattccatcgggagacagcactagggggatggcactaaaccattagaaactgcccccatgatccaatcacctctcaccaggcccctcctccaaca

SEQ ID NO: 987317 - DNA, 120 bp, Artificial Sequence
  ENSG00000205885_18 (sequence is synthesized)
cctcctccaacacgtggggattacaattccacatgagatttggttggggacatagagccaaatcctatcagctggtatcctcctttttccaggctttagatatggcacaacctgatggct

SEQ ID NO: 987318 - DNA, 120 bp, Artificial Sequence
  ENSG00000205885_19 (sequence is synthesized)
tctgcataaagcctcctctcatctgcatctctccacctcactcaccctcttttcagcaaagaaccctctggctctagtttcactgtggtggtcctgggagaggtagagaagacccagagg

SEQ ID NO: 987319 - DNA, 120 bp, Artificial Sequence
  ENSG00000205885_20 (sequence is synthesized)
ctccttaccctgggaggtcaaactgaccatccaggtttggctcttccctgctggtgtgtctagaacaccatcttccccttattgctgtggacttcagggctctgctgctctgtcctccac

SEQ ID NO: 987320 - DNA, 120 bp, Artificial Sequence
  ENSG00000205885_21 (sequence is synthesized)
tgatgtctttgtccttttgaagccacagagtaaggtcacacaactttgaaacgagcagggtaccatctgaagatgctggacattccttttaacaattacctaggggagaggcagtcctca

SEQ ID NO: 987321 - DNA, 120 bp, Artificial Sequence
  ENSG00000205885_22 (sequence is synthesized)
gacaggactcaggtgggtgggcctcaaagaggaagggaaagggggcagctgcctgcctctgaacttcactctctagactcgtggaagggtctagcttagagctaggatgggagggctgtg

SEQ ID NO: 987322 - DNA, 120 bp, Artificial Sequence
  ENSG00000205885_23 (sequence is synthesized)
agcactgaggatggagtcatgcctttttgtgactggacacatttttactgcccgaagtcatctactgcccccaccccccaaccccattcttctgcccacttagcgaatattgaggttatg

SEQ ID NO: 987323 - DNA, 120 bp, Artificial Sequence
  ENSG00000205885_24 (sequence is synthesized)
gtcaggatggggtcatttgcaatgaaattcaaggttgagactatgttgcagttatctgtctgcttgtaaaaagtcacccccacattttgtttaaaacagcaagtatgtactatttcacac

SEQ ID NO: 987324 - DNA, 120 bp, Artificial Sequence
  ENSG00000205885_25 (sequence is synthesized)
agtttctgtgggtcaggaatccagaagcggctgagatgggtagtttaggatcagggtctctcacaaggctttggtccaggtgcaggctgcagtcctccagaggcgggactggggctggag

SEQ ID NO: 987325 - DNA, 120 bp, Artificial Sequence
  ENSG00000205885_26 (sequence is synthesized)
gtctgcttccagacggtcactcacatggatgtgggcaggcggcctcagttccctgccacatggccctcctcataggacgcttgagtgtcctcgcggcatagcagctggctttccccagag

SEQ ID NO: 987326 - DNA, 120 bp, Artificial Sequence
  ENSG00000205885_27 (sequence is synthesized)
tgacccaaggtggaaagaacaaggcagaggtgacagtgtcttttataagccagccttggaagtgacgtagcatcatttctgccttattccattggtcacacagacaacccgatgtggaag

SEQ ID NO: 987327 - DNA, 120 bp, Artificial Sequence
  ENSG00000205885_28 (sequence is synthesized)
gagacatcacaaggacaggaatactgggaagcaggtattgttggtggctgtctcggacgctggttctcatagaagtagatgtattattttagtacaataagtgcagacgatcagctagca

SEQ ID NO: 987328 - DNA, 120 bp, Artificial Sequence
  ENSG00000205885_29 (sequence is synthesized)
ggatgttatttttgctgggtatggttgtatttcaggtgcatttacccaaatccagagtacctttgggggctctgaccctctcctcctccaccttgagatctgtagaggcctctcgttcat

SEQ ID NO: 987329 - DNA, 120 bp, Artificial Sequence
  ENSG00000205885_30 (sequence is synthesized)
cccaccaagagcaggactggacagatgaaagcatggcttacaggaggccaacacaataggaggtagggctttgggaagacagcataggtttcaaaagaaccaagaagctgttgaaaagga

SEQ ID NO: 987330 - DNA, 120 bp, Artificial Sequence
  ENSG00000205885_31 (sequence is synthesized)
gagcagatgggcagggaagacaagtcccagatagaatgccctttgcaacctagggggagctgaccacagtgtgcatcctgacactcgaagacaaggtctccatcagcagattgcccaaca

SEQ ID NO: 987331 - DNA, 120 bp, Artificial Sequence
  ENSG00000205885_32 (sequence is synthesized)
gaacaagttcagagcccagagatcccagttccagatctcagatctcccacaccctgtgggctctgtgtggactttcgtcctgaaacaaagtcctttagtaaaggactctttaaattcact

SEQ ID NO: 987332 - DNA, 120 bp, Artificial Sequence
  ENSG00000205885_33 (sequence is synthesized)
ccatctgtgctttgcttgccaatagcagggtgcgtctgttacatactggactatcccttccttcaatatgttcatggctgaggctgcatttgtgcctcagataatcaaggtgagtataac

SEQ ID NO: 987333 - DNA, 120 bp, Artificial Sequence
  ENSG00000205885_34 (sequence is synthesized)
tctctgttctgtttcccttttgtttcctccaagactttaataaaccctcattcaagaggcccaccttgtcccacctgtgcttctcagaaaagaaggagtggtggggagacaggctggggt

SEQ ID NO: 987334 - DNA, 120 bp, Artificial Sequence
  ENSG00000205885_35 (sequence is synthesized)
gggggctttgccacctggctgccccttcacctgtgggttcttgctccaatgaggacccagcaggataagctttagtttcattaagggtgacaatagtttccttacagctgggtcaaggat

SEQ ID NO: 987335 - DNA, 120 bp, Artificial Sequence
  ENSG00000205885_36 (sequence is synthesized)
atgagcgagcctcttccgaaaacagccgggaagggagaggaatccaagaggaggagcaggtgggaaagacaagacagaaggtggatcgggaccaggcctgggagggagcacaggcacaca

SEQ ID NO: 987336 - DNA, 120 bp, Artificial Sequence
  ENSG00000205885_37 (sequence is synthesized)
gaagtgaaagaattcgcctgaggttacacgactcctcgagcggtgcctttagctctgcattgtgccacctgcctgggtcaaggaagatgccaccgctgttgttctgtgtacagagaggga

SEQ ID NO: 987337 - DNA, 120 bp, Artificial Sequence
  ENSG00000205885_38 (sequence is synthesized)
aaggaagatgctggctctcagcagttctatagaacagaggatggagaggccacacgacaataggcacacgcaccgtacattgaagaagtgcatgcaagacagaatcgtgtgggatatgca

SEQ ID NO: 987338 - DNA, 120 bp, Artificial Sequence
  ENSG00000205885_39 (sequence is synthesized)
cacttgcgtggaagaaaaactgttccattcacattgagaagaagaagaagaagaggaggaggaggaggaggaagaagaaagatggtgagatatcctgcaggagaccagggccaggagggt

SEQ ID NO: 987339 - DNA, 120 bp, Artificial Sequence
  ENSG00000205885_40 (sequence is synthesized)
ggaggcctctcaagaagagggaagcatgaggaagctccagggcaggatggtttacctgcctggacagcaagatgatggctacactagcccccattctctgggcgcctggatttgcccacc

SEQ ID NO: 987340 - DNA, 120 bp, Artificial Sequence
  ENSG00000205885_41 (sequence is synthesized)
agatctcctcacctcttgcccttcacctcctgctgtacctacaaggtctccccgattctcatctgcccataatcatggacacagccccaggatgtgcaggactctcagggaccatctgga

SEQ ID NO: 987341 - DNA, 120 bp, Artificial Sequence
  ENSG00000205885_42 (sequence is synthesized)
gttccagctggaatctgggcctggtggagtgggagtggggcaggggcctgcattgggctgacttagagagcacagttattccatccatatggaaataaacattttggattcctgatcaca

SEQ ID NO: 987342 - DNA, 120 bp, Artificial Sequence
  ENSG00000205885_43 (sequence is synthesized)
ctgtacctacaaggtctccccgattctcatctgcccataatcatggacacagccccaggatgtgcagggtcgagctcccaccctcttggaaatgcctctgaagctgcatagtcctcccct

SEQ ID NO: 987343 - DNA, 120 bp, Artificial Sequence
  ENSG00000205885_44 (sequence is synthesized)
ctgcagtggccatgttctggacgcccacatcacggggagttttgagggattgagcccactttagcttgggtcttaaaaccaccatggtaagaagtgtcaacctttgggggaaaaataaaa

SEQ ID NO: 987344 - DNA, 120 bp, Artificial Sequence
  ENSG00000205885_45 (sequence is synthesized)
agaggcctcgcgaggcagggctagaagctgtggcctcacccttgaggcccgggcacttcccgtctcctcccttgctccccttcctcaccccaatccctacagcctcccgcgcagcctgag

SEQ ID NO: 987345 - DNA, 120 bp, Artificial Sequence
  ENSG00000205885_46 (sequence is synthesized)
tactcttatgactgagggcgttacaccagggagagggagccggggagacttcccagagagctggttgggggttatgaaagtggcctcacggctgatgcggtggctaacacctgtaatccc

SEQ ID NO: 987346 - DNA, 61 bp, Artificial Sequence
  ENSG00000205885_47 (sequence is synthesized)
ttacgtgggcctggtggcacgtgcctgtagtgccggctactcaggaggctgaggcacaaga

SEQ ID NO: 987347 - DNA, 120 bp, Artificial Sequence
  ENSG00000281344_0 (sequence is synthesized)
ggaaggagcaataactgatttttctgcagtgtcttccttctgaaagcctttccccaacctgaatgtattaaataccatgtcatcatctaaatttcttatggacttggatgctgaaagtaa

SEQ ID NO: 987348 - DNA, 120 bp, Artificial Sequence
  ENSG00000281344_1 (sequence is synthesized)
aataccttgagaaaacaaagaaaaagttagtattaatatataggaagagagattcatttttgccattcttagtttgatgtttgcatacagtcaaacaagaaagaaaatgaaaaatttctc

SEQ ID NO: 987349 - DNA, 120 bp, Artificial Sequence
  ENSG00000281344_2 (sequence is synthesized)
tgtcagcctgcttggtaaacgattctgtatctttatatattttctagcttgaatagaaagcacttcaaagaattatacttttcatcattttagaaatgactcattagattgaggctaacc

SEQ ID NO: 987350 - DNA, 120 bp, Artificial Sequence
  ENSG00000281344_3 (sequence is synthesized)
tttatgcagctgctaatacctacattgttttggttttagtgacacattgtttattttgagtgtgaattttctcagaatctgactaagatccttggtagaatgctttctgttgagtagatt

SEQ ID NO: 987351 - DNA, 120 bp, Artificial Sequence
  ENSG00000281344_4 (sequence is synthesized)
atagtctcttgaaaatgggttgttattaaggaagaccacaggacatcaggctctctctatattattgtttccttttgtgtattttctgattaagtaaagatattaaaactcaagttattt

SEQ ID NO: 987352 - DNA, 120 bp, Artificial Sequence
  ENSG00000281344_5 (sequence is synthesized)
cactcaaggatgataaggataaagttttatttccttttaatcctgattaaactgaaataatcctcaaaagagactttcttttataaatacttgatatagtttttggtgattaaagtacat

SEQ ID NO: 987353 - DNA, 120 bp, Artificial Sequence
  ENSG00000281344_6 (sequence is synthesized)
atgcctgtcagtgtgaacaaaaagccattcatgctatatcaaaaattgacctgtcaggtgtattttatctctgcatttacaaaaggataatatgtacaaatatttattaatgaatttaga

SEQ ID NO: 987354 - DNA, 120 bp, Artificial Sequence
  ENSG00000281344_7 (sequence is synthesized)
aattaatgaattagtccatgaaaagaatatttatgtgcccataaacattacttttggatgatgagtttatgttgtatgacttttaattaaacatttcagagttaatttctaattttgacc

SEQ ID NO: 987355 - DNA, 120 bp, Artificial Sequence
  ENSG00000281344_8 (sequence is synthesized)
ccaatgaataagataatacattcttttatatgtcttctggtacatatatgtaagaatttttctagagtatatttctcagtatggaattactggatcatggagtatgtatatgttcagctt

SEQ ID NO: 987356 - DNA, 120 bp, Artificial Sequence
  ENSG00000281344_9 (sequence is synthesized)
tactaatgccaaaatgttttccaacatagttgtaagcgatttgtgccctcgataagcagggtatgagaatttccattgttccatgtcctagctgactcttgtgtctcattgtccttttaa

SEQ ID NO: 987357 - DNA, 120 bp, Artificial Sequence
  ENSG00000281344_10 (sequence is synthesized)
tttgtattttcctaattaccaaagaggttaagtgtcttcccatatgtttctgagccatttatgtttcctcttatgttaaatgctttttttttttttcttttttggctttgtccatttttc

SEQ ID NO: 987358 - DNA, 120 bp, Artificial Sequence
  ENSG00000281344_11 (sequence is synthesized)
tattgggttgtctttttctaatttatttatgggagttctttatatattctggatattaattgttagttatatatgtttcaattattttcgctcagtttgtgacatattttcaacccctct

SEQ ID NO: 987359 - DNA, 120 bp, Artificial Sequence
  ENSG00000281344_12 (sequence is synthesized)
ggtgtcttttggtgaaccaaactgattaattttaatgtttaaatatttttcttttttctttatggcaactacttttaatgtgttgtttttttttagaaatccttctcaatccttagatta

SEQ ID NO: 987360 - DNA, 120 bp, Artificial Sequence
  ENSG00000281344_13 (sequence is synthesized)
cgtgttttcatatattttcttctaaaagtttaaatattttgactttcatgtttaggtttgtaattcatctgtaattttgtgtatgatataagatagagatgtaattttactttttccaat

SEQ ID NO: 987361 - DNA, 120 bp, Artificial Sequence
  ENSG00000281344_14 (sequence is synthesized)
caatgtccttatatatttcttgaagaagtcatcctgtccccactaatctgcagtgccatctctacagtatatcagatttctatatatgtgtgggctcctttcagaacgttctattccaca

SEQ ID NO: 987362 - DNA, 120 bp, Artificial Sequence
  ENSG00000281344_15 (sequence is synthesized)
gccaaatctacagtattaatataactttaaaataatttttaatatctggtcaaatttcccagccctctacttacccacatgtttttcttttacagcagttccttagctattcttagtcat

SEQ ID NO: 987363 - DNA, 120 bp, Artificial Sequence
  ENSG00000281344_16 (sequence is synthesized)
ttcttttccatataaatcttaaaatcagcttttcaagttccgtaagaacacttgacaggatattaaggttctagttaggtatcccttatctgaaatgcttaggaccagaagtatttttgg

SEQ ID NO: 987364 - DNA, 120 bp, Artificial Sequence
  ENSG00000281344_17 (sequence is synthesized)
atttgggatatttttttcagaatttggaacatttgcattatatcagttaagtatcccaaaatctgaaatctgaaatgcttcaatgaatatatattttttagcatattgttaatgcttaac

SEQ ID NO: 987365 - DNA, 120 bp, Artificial Sequence
  ENSG00000281344_18 (sequence is synthesized)
aagtttcagattttggagcatttttggattttggcttttcagatttgggatgctcaacttataatcacattggttttatagatttatagattaattttggagaagaactgatatcctgaa

SEQ ID NO: 987366 - DNA, 120 bp, Artificial Sequence
  ENSG00000281344_19 (sequence is synthesized)
ggtaatttattatctatgagcatgacatttttctgtatttgcttagatcttctttaatctttttttcttctttaatcttttaatgacattttcttttcttcataaaggtcttgcatacct

SEQ ID NO: 987367 - DNA, 120 bp, Artificial Sequence
  ENSG00000281344_20 (sequence is synthesized)
ttgttgagagaattataattctttataatttaattgaatttcttatttttggttattataaattgtattttgaaatgatctttctaacattattgctggtatgtgcatgtgcatttggct

SEQ ID NO: 987368 - DNA, 120 bp, Artificial Sequence
  ENSG00000281344_21 (sequence is synthesized)
tgtgcatagtaatttgataacagaaaaaaactttctaaactcttatttttttttctttttaattgtttataaatgtatagattctttgggattttgtatgaagacaattgatataaatga

SEQ ID NO: 987369 - DNA, 120 bp, Artificial Sequence
  ENSG00000281344_22 (sequence is synthesized)
taaaataatggcattttatctctttctcctaacttcatctatattgtgtatacatgtctttgtgtctgttcatgtgttcatacacactggccaaagcctccagtaaatactgaaaatgga

SEQ ID NO: 987370 - DNA, 120 bp, Artificial Sequence
  ENSG00000281344_23 (sequence is synthesized)
gagaagagatatctttacagtgttactgattttacagataatgattttaatgcttcaccactgagcgtaatgtttgctgtaggtttcttatagatacttgctataaagtacaggatgttc

SEQ ID NO: 987371 - DNA, 120 bp, Artificial Sequence
  ENSG00000281344_24 (sequence is synthesized)
tcttttgtttctggcttactaatagtttttatcatgaattgttgttgaatattattgaatgctttttttgcatatattgagatgaccagatcattttctccttcagtctttggaaatatt

SEQ ID NO: 987372 - DNA, 120 bp, Artificial Sequence
  ENSG00000281344_25 (sequence is synthesized)
aacagatttttctaatgttaaactaaccatgtgttcatgaagaaacctttaaattatcggattcaatttggcaatatttgatttagtacattttacatttattatgagtaagattgattt

SEQ ID NO: 987373 - DNA, 120 bp, Artificial Sequence
  ENSG00000281344_26 (sequence is synthesized)
gtaattttccttttttatattgactttggtttgatattaagtttgtaccaatttcttacattgagggcaagatttatccttctttcttttctctcttgttagactttgggtttggtgttt

SEQ ID NO: 987374 - DNA, 120 bp, Artificial Sequence
  ENSG00000281344_27 (sequence is synthesized)
tcttggtaggatttttgttgttaagaattgatgtactttcttcagtagctgtagtaacatttagcttctctgtttcttttttagtttgttttaggaatttacattattgtataatttgtc

SEQ ID NO: 987375 - DNA, 120 bp, Artificial Sequence
  ENSG00000281344_28 (sequence is synthesized)
catttcacttaagtactttttatctgaggtagacttaactgctgattttctcggggactattaagatctttctcagtaaatgttttgtgattataattataaacaaaggactctgacatc

SEQ ID NO: 987376 - DNA, 120 bp, Artificial Sequence
  ENSG00000281344_29 (sequence is synthesized)
ccttgacttctttgatcttagagcttccttatctttttaatgttgttagttgtgccctactttgtttcccttggtttgaacctggtttggatgtgcctgtttaatctataaaagtccttg

SEQ ID NO: 987377 - DNA, 84 bp, Artificial Sequence
  ENSG00000281344_30 (sequence is synthesized)
tgtgttaatggaaatcttttttcttagatgctgttgtgggagggtaataaatattaataattatgtactttgttttaaatttcc

SEQ ID NO: 987378 - DNA, 120 bp, Artificial Sequence
  ENSG00000281344_31 (sequence is synthesized)
taataaatattaataattatgtactttgttttaaatttccactggatgaattggcttggctgatcttcactcaaaattgggaccaaatccaaatgattttgacggtttagagaagttaat

SEQ ID NO: 987379 - DNA, 120 bp, Artificial Sequence
  ENSG00000281344_32 (sequence is synthesized)
gttttattttgtttaaactgtcatagcctctgagcattatgaggttttgccataaccatttaattatggagatagtttccaatttttttaatgataactttttttaaaaaaaactttggt

SEQ ID NO: 987380 - DNA, 120 bp, Artificial Sequence
  ENSG00000281344_33 (sequence is synthesized)
tactgtgatgtgcagtggagcatagtagacttctttttcattgatgctgaaaatggtatgtccccaagtagtagaagggaactttggagaagtaaaactattgccagatgggcttgggtg

SEQ ID NO: 987381 - DNA, 120 bp, Artificial Sequence
  ENSG00000281344_34 (sequence is synthesized)
gttcagtaaaccttacaaaggcaaaaggcttatataaaatatgatcttcattttctgttgaactactgctaacactgtatatttgcaagtcactttattaaatttctctttgttccaatt

SEQ ID NO: 987382 - DNA, 120 bp, Artificial Sequence
  ENSG00000281344_35 (sequence is synthesized)
aacacatctttgctatgtgtcaccagtaaattaaatggcaattggccattggcttactgagaatcatcaatttcttagtggctaattgtatgagtgtaaaaacaagattgctcacttata

SEQ ID NO: 987383 - DNA, 120 bp, Artificial Sequence
  ENSG00000281344_36 (sequence is synthesized)
taaattatcaaaagatataagaaaacttaaaattccttctcagatttctatagtaaacaacccatacactttcacctagcgtttaccattaacgttttacttctatcccttcatcccttt

SEQ ID NO: 987384 - DNA, 120 bp, Artificial Sequence
  ENSG00000281344_37 (sequence is synthesized)
attaatcatcttattcttttaatgcatttcaaaggatattgcatatatcagtatgcttttcatgaaatacttcaacatacgtatcattaactggaatttaatagttgtttacagcttttt

SEQ ID NO: 987385 - DNA, 120 bp, Artificial Sequence
  ENSG00000281344_38 (sequence is synthesized)
tttgaagtaaaatttatggaaagtaaaatgcataaactataagtgcatatttgctaatttttgacaaatgtgtttgcttatgaaacccaaagtcctttcaagatacaagacattgccatc

SEQ ID NO: 987386 - DNA, 120 bp, Artificial Sequence
  ENSG00000281344_39 (sequence is synthesized)
accccagaaagttatgtcttaccttgttagagtttacatgtaccaccattttccccactcccacccgtcattccaactctgctcttagacaatcactgttctaatttcttctgctgtgaa

SEQ ID NO: 987387 - DNA, 120 bp, Artificial Sequence
  ENSG00000281344_40 (sequence is synthesized)
ttagttttgcctattttggaaatatacagtatgacgtcttttatggaaggcctctttcactcagcatgtttgacattcatctttaatgttgtaagaagcagtagttccttccttttttat

SEQ ID NO: 987388 - DNA, 120 bp, Artificial Sequence
  ENSG00000281344_41 (sequence is synthesized)
taccgttgtataaatatactacaattgacttgtctcttttcctgttaatggactcttgaattgtatccagtttttggctattacgaataacactatctacattcttgcacaagtcttttt

SEQ ID NO: 987389 - DNA, 120 bp, Artificial Sequence
  ENSG00000281344_42 (sequence is synthesized)
gtggacatgtgtttttatttctcttgggtaaatatataggaatggaattgctaggatataagatagatgtatctttaattttgtaagaaattgttagattattttccaaagtgattgtac

SEQ ID NO: 987390 - DNA, 120 bp, Artificial Sequence
  ENSG00000281344_43 (sequence is synthesized)
cattttatacttcaacaaagactgtattagagctttggttgctccacatcctcaccagcatttgatgttgtcagtcttaatcttagccattctggtagatgagtagtgatatcgtgtttt

SEQ ID NO: 987391 - DNA, 120 bp, Artificial Sequence
  ENSG00000281344_44 (sequence is synthesized)
aattacattttcctaataactaatgatgttgagcactttttcatgtgcttgttagctattcatatattttcttttgtgaagtgtctgtttagatcttttgttcattttgttgggcgaggg

SEQ ID NO: 987392 - DNA, 120 bp, Artificial Sequence
  ENSG00000281344_45 (sequence is synthesized)
atgtttctttttattactgagttgtaagagttatatatattacatatatattcctcccaccccagaaattccccccaaccccagaattttcttctctttatctatgtttccaactggagt

SEQ ID NO: 987393 - DNA, 120 bp, Artificial Sequence
  ENSG00000281344_46 (sequence is synthesized)
gggccacatgagacattcctgtataagattggagagcagaagtgaagcagatgtcacgtacggttcacacatgatgtcgcttatctgctggctcatgtcgttggctctgcagcagtcaga

SEQ ID NO: 987394 - DNA, 120 bp, Artificial Sequence
  ENSG00000281344_47 (sequence is synthesized)
cctgcgactgctccactttcgctggatccactttcagtttctctgactcctgggacacatgtgtgcagttctgtgacaaaggagactagctgtcctgaggacatccataccattgaggtc

SEQ ID NO: 987395 - DNA, 120 bp, Artificial Sequence
  ENSG00000281344_48 (sequence is synthesized)
agatgcagcaagatatgatatgagtttcagtctatcctcatgggtttcagctcatgctggtgaattccagtatgttcttcttcttccctactttacatccatctttccttcctggcagcc

SEQ ID NO: 987396 - DNA, 120 bp, Artificial Sequence
  ENSG00000281344_49 (sequence is synthesized)
tgccctgtggactccagcattagatggaatgatctgcttaatattgcttaattagctttcacaattgcatgagacagatttatgtaacaaattgtgtatatatttctgtatatgtgaata

SEQ ID NO: 987397 - DNA, 120 bp, Artificial Sequence
  ENSG00000281344_50 (sequence is synthesized)
tgtatgtgtgttgttctgcttctgtgattgacttctgacggacacttcccaactctttttatgagtctagcataaatttggtaccaagacctgataatgctattacaagaagggaaaatt

SEQ ID NO: 987398 - DNA, 120 bp, Artificial Sequence
  ENSG00000281344_51 (sequence is synthesized)
ataggccaatatttctaatgaacatggatgtaaaaatcctaaacaaaatgttatcaaatagaatccagttatgaaaaaggtaaaatttcatgaccaggtgaggtttatttcaggaatgta

SEQ ID NO: 987399 - DNA, 120 bp, Artificial Sequence
  ENSG00000281344_52 (sequence is synthesized)
aaattgaactttcagaaaaaaattggtaaaattcaccactgtaaatgaatacaggagacaaaaacacgatcatctcaaatatagaaaagcacaatgattggctgtgctgaatgctactgg

SEQ ID NO: 987400 - DNA, 120 bp, Artificial Sequence
  ENSG00000281344_53 (sequence is synthesized)
ttgagtaagatgagaactgagaatttatctttgatttggctatgtgatagtcattgctgaccttaatgaagcagtttcaatgacactggtagagattcaaccttgataggagagaattta

SEQ ID NO: 987401 - DNA, 120 bp, Artificial Sequence
  ENSG00000281344_54 (sequence is synthesized)
ataagaatggaaagagaacaaatggaaacagtgaatataaatagtatgtcaccgatttacactgaagaatgcagaaaaattagattgtagatggaagagagttggctattgctatttaaa

SEQ ID NO: 987402 - DNA, 120 bp, Artificial Sequence
  ENSG00000281344_55 (sequence is synthesized)
gatggaagatattgtagcatgataagaagtggctatgctgaatttgtgggactcaagtaacaaaaggatttacatgctgtaaacagtatggaataaaatagacattcatcctccttccca

SEQ ID NO: 987403 - DNA, 120 bp, Artificial Sequence
  ENSG00000281344_56 (sequence is synthesized)
actcttaagtatgtgtggtggtaatgggatcagtgaagtggagaacgctataagggtatttgttattcagaaggtatagtacaaagattggagagagaagagagaagaaacacagtgctg

SEQ ID NO: 987404 - DNA, 120 bp, Artificial Sequence
  ENSG00000281344_57 (sequence is synthesized)
tttagagatgaaagtgtgggaggatagatatctagaggggctcatatctggatggagagcaagggtaagagagaacaaggtgtggtaatttggctagcaagggaattagtcctgacactc

SEQ ID NO: 987405 - DNA, 120 bp, Artificial Sequence
  ENSG00000281344_58 (sequence is synthesized)
tgtgtgtgtgtgtgtgtgtgtgtggagttgatgtagttggcagggaagggtagctcctggtaggcgtttaggccactcagaattcagcaataaaattaggaggttatccttctgagacag

SEQ ID NO: 987406 - DNA, 120 bp, Artificial Sequence
  ENSG00000281344_59 (sequence is synthesized)
taggaggttatccttctgagacagtttgaatttggttggtaagttgacctccagtttttttttctttctttgagaagagtcaacttgagtttttttgtttgtttgtttttaatttgaagg

SEQ ID NO: 987407 - DNA, 120 bp, Artificial Sequence
  ENSG00000281344_60 (sequence is synthesized)
ctcagaagagagatccaaggcttccagcatgtgggcttgtagagagtacttagagacgcgagatatgggggccagctgagagtggtgaagatggttaagctcttgttttgctccaagaat

SEQ ID NO: 987408 - DNA, 120 bp, Artificial Sequence
  ENSG00000281344_61 (sequence is synthesized)
tggagtgggtaaggtatcttctcaccatgctcaatgcagttggtttgtgagatagtggggtgggagacacagggagagtttatgatgctccactgtaattagtccagtaactgtgagacc

SEQ ID NO: 987409 - DNA, 120 bp, Artificial Sequence
  ENSG00000281344_62 (sequence is synthesized)
agttgagtaggaacgtggatatcctcaagctttgttccactgttacagctggtaaacatggatgaattgatttaaatatttattttgcaacaatgtggatttgaattatggatatagttt

SEQ ID NO: 987410 - DNA, 120 bp, Artificial Sequence
  ENSG00000281344_63 (sequence is synthesized)
cctctttttggttaattatatgcacatttgaattcatctctgtctatgagtactagtggactagctgcttccctggatctcgttactggatggtatgttgctcttagtgtcatccaaaca

SEQ ID NO: 987411 - DNA, 120 bp, Artificial Sequence
  ENSG00000281344_64 (sequence is synthesized)
gaattattttaaaagtgaaatgaagaaaccagttgtagtgaattacacatcaccaatttttagagctgtagactaatatcttgaaaattgccttaacatctttttgccacaaatcaagat

SEQ ID NO: 987412 - DNA, 61 bp, Artificial Sequence
  ENSG00000281344_65 (sequence is synthesized)
tgccttaacatctttttgccacaaatcaagatataagtaacattaagagttatatggatca

SEQ ID NO: 987413 - DNA, 72 bp, Artificial Sequence
  ENSG00000281344_66 (sequence is synthesized)
atggatcatctgaggtcaggagttaaaaaaacaaaattagccggctgtggtggcatgtgcctgtagtcccag

SEQ ID NO: 987414 - DNA, 85 bp, Artificial Sequence
  ENSG00000281344_67 (sequence is synthesized)
ttaaaaaaaaaaaaagttatgtgaacatgcttgaaatgatgttcatggctaaatttttcagttaccttgtaaagatgattcttgg

SEQ ID NO: 987415 - DNA, 120 bp, Artificial Sequence
  ENSG00000281344_68 (sequence is synthesized)
tggctaaatttttcagttaccttgtaaagatgattcttggatattgttttgattctgagtacttttggagtcatctgatagtatgcttcgagaataacaatctgatgatagctttcaaca

SEQ ID NO: 987416 - DNA, 120 bp, Artificial Sequence
  ENSG00000281344_69 (sequence is synthesized)
ttgggttaccaacaaagcttgttattttgtatacattgattcataatttcaggtttcttcaccattatggtaagtagtgtattgagtcttcattctaacacatgttaggaatttatgttt

SEQ ID NO: 987417 - DNA, 120 bp, Artificial Sequence
  ENSG00000281344_70 (sequence is synthesized)
gtactcatggatgtctttaaccctcagacatttctacttatattgagaactctagactgaaaacattttgaaatgtagtggttttactatgtaggaggaacatgtgattcatttgttctg

SEQ ID NO: 987418 - DNA, 120 bp, Artificial Sequence
  ENSG00000281344_71 (sequence is synthesized)
cttcattttcttctgtttgtgatagagattggatcagatgaaagtgtcttgataatgatatacatgccattcttttcattctatgtatttgtagtccttttttgccatcataactttgtt

SEQ ID NO: 987419 - DNA, 120 bp, Artificial Sequence
  ENSG00000281344_72 (sequence is synthesized)
tatgatattccctgctcttaaaataccctcatcttgtccctccacctatctatatctaaaatatccttcaagaccttccttttgcagctttctctgagtactacagccaaatcctcttgt

SEQ ID NO: 987420 - DNA, 120 bp, Artificial Sequence
  ENSG00000281344_73 (sequence is synthesized)
ctgaactccaacatgtgtaatacattatcatcctgtttaaatataattatttcttatatttattaatttatcaaggccctaaatatctgcataagcttgccttcatggtttcactttttc

SEQ ID NO: 987421 - DNA, 120 bp, Artificial Sequence
  ENSG00000281344_74 (sequence is synthesized)
attgttctctatattcatgccatgtaactttggcatgccttcccactgtgggtggggtaacctgcccactgtttgactctggtttcaggcatgtgatttgctttaactaatgagatatta

SEQ ID NO: 987422 - DNA, 120 bp, Artificial Sequence
  ENSG00000281344_75 (sequence is synthesized)
tcagatatcatgcaagcagaggcttgaaatggtcttgcacattgggaattccctcttgagcctctgccaccaccatgaaaacattcccatgctagcctgctggagagagccacatggagg

SEQ ID NO: 987423 - DNA, 120 bp, Artificial Sequence
  ENSG00000281344_76 (sequence is synthesized)
agagccatgctaccctaactgccatagctgaggctatcctcgatcagcacacatccattcaagcaccagacactggagaaagtccacttgaggtcagtagagctgcctagcagatgccca

SEQ ID NO: 987424 - DNA, 120 bp, Artificial Sequence
  ENSG00000281344_77 (sequence is synthesized)
actgacccaaaaagcataagacataaacatttattgttgtataccctctgaagttttgcatgtgttacaccatattactatagtaatagataattgatacaaatgtcctacatggcctgg

SEQ ID NO: 987425 - DNA, 120 bp, Artificial Sequence
  ENSG00000281344_78 (sequence is synthesized)
accatgcattccttgctaaatttatttcttgctactctgtccctctttcgtcactctctagtgatattggccttctgtttttatgatatgccaagatcatttctgacgcaagactttttc

SEQ ID NO: 987426 - DNA, 120 bp, Artificial Sequence
  ENSG00000281344_79 (sequence is synthesized)
cctgctattctctttgtcaggagcatctttctcctgttatttatctgagcatttatcactcattattgtgatgctcagctcaaatatcatggtttctgagagtgcttccttgaccctatg

SEQ ID NO: 987427 - DNA, 120 bp, Artificial Sequence
  ENSG00000281344_80 (sequence is synthesized)
agctaaaggagcccccttcccactcattctttccctattcctttcactcctttattttcttcactgtgcttctgtctaaaattatcttacttgtttacatgcttattgtccatttcctct

SEQ ID NO: 987428 - DNA, 120 bp, Artificial Sequence
  ENSG00000281344_81 (sequence is synthesized)
aatgccagtgagggagatggtatcaagaacagagtatcaagaacagagtctggcacatagtagcctttcaataaacatgtaataaatgtatgaattattttttcattaagagaacagatg

SEQ ID NO: 987429 - DNA, 120 bp, Artificial Sequence
  ENSG00000281344_82 (sequence is synthesized)
gtagaaactatgataggttctagaatatgatagagtatttacttattacctaggtctgctgtgacaaattaccacaaacttgatggcttaaggcaacaaaagcccaaaatcaatgcgtgg

SEQ ID NO: 987430 - DNA, 120 bp, Artificial Sequence
  ENSG00000281344_83 (sequence is synthesized)
acaggactgtgtttcctccagagactctaggggagagcccttccttgcctcttccagcttctggtgactgttggcattcactgccttgtggtagcatcctctgctctgtcttcaatgacc

SEQ ID NO: 987431 - DNA, 120 bp, Artificial Sequence
  ENSG00000281344_84 (sequence is synthesized)
ttctcctctttgtgtctgttcctaatattcctctgcctctctcttataaggattcatgtgatggcatttagggcccaccaggattatctcctcatctcaagattcttagtcacatctgcc

SEQ ID NO: 987432 - DNA, 120 bp, Artificial Sequence
  ENSG00000281344_85 (sequence is synthesized)
aagactcttttaggggtaacattcaaaatgaataaagaaaactacaggacaatatgcctgatgaacacagatgcaaacctcctcaacgtaatactagcaaaccaaatacagcagcacata

SEQ ID NO: 987433 - DNA, 120 bp, Artificial Sequence
  ENSG00000281344_86 (sequence is synthesized)
aaaaattgcttcaccatgatcaagtaagtttcatttctgagatgcaggttggctcaacatatgaaaatcaataaatatgattcaccacatatgcagaattaagaagaaaaaccatatgat

SEQ ID NO: 987434 - DNA, 120 bp, Artificial Sequence
  ENSG00000281344_87 (sequence is synthesized)
catcccttcatgataaaaaccctcaaaaaactaggcattgaagatacatacctcaaaaaataagcgccatctctgacaaacctacagacaacatcatactgaatggacaataactggaat

SEQ ID NO: 987435 - DNA, 120 bp, Artificial Sequence
  ENSG00000281344_88 (sequence is synthesized)
tacctcaaaaaataagcgccatctctgacaaacctacagacaacatcatactgaatggacaataactggaatcattccccttgagattggaataagacaaggatgcccactctcaccact

SEQ ID NO: 987436 - DNA, 120 bp, Artificial Sequence
  ENSG00000281344_89 (sequence is synthesized)
gagcaatcaggcaagagaaagaaataaaaggcatgcgaataggagaaaaagtcgaactatcttcactgatgatataactcgatacttaggaaactaaagactctgccaaaaggctcctga

SEQ ID NO: 987437 - DNA, 120 bp, Artificial Sequence
  ENSG00000281344_90 (sequence is synthesized)
cttaggaaactaaagactctgccaaaaggctcctgaaactcataagcgcttcagtaaagtatgaggatacaaaattaacatacagaagtttgtagcatttctatacaccaataacattca

SEQ ID NO: 987438 - DNA, 120 bp, Artificial Sequence
  ENSG00000281344_91 (sequence is synthesized)
gaaagctaaatcaagaatgcaattccatttacaatacacatggacacacacacacgcctaggatacaaataaccaaagaggtaaaagatctccccaaggagaactacaaaacactgctga

SEQ ID NO: 987439 - DNA, 120 bp, Artificial Sequence
  ENSG00000281344_92 (sequence is synthesized)
aactattctacgctcacagattggaagaatcaatatcattaaaatagtcatactgtccaaagcgatctacaagtccaatgctattcctatcaagctatcaatatcatttttcacaaaact

SEQ ID NO: 987440 - DNA, 120 bp, Artificial Sequence
  ENSG00000281344_93 (sequence is synthesized)
ggaaaagactattctaaaatttatatggaacaacaacaacagaaagcccaaatagccaaagcaatcctaaacaaaaaaacaaagctggaagcatcaaattacctgacttcaaactatact

SEQ ID NO: 987441 - DNA, 120 bp, Artificial Sequence
  ENSG00000281344_94 (sequence is synthesized)
ataaggctacagtaaacaaaacagcatggcactggtgcaaaaacagaaacacatagaccagtggaacagaacagagaacccagaaataaagctgcacacctacagccacctgaccttcat

SEQ ID NO: 987442 - DNA, 120 bp, Artificial Sequence
  ENSG00000281344_95 (sequence is synthesized)
caaagttgacaaaaatagtcaatggggaaatgactccctattctataaatggttctgggatagctggctagtcacattgcaaaagaatgaaaccagacctctatatttcaccatatacaa

SEQ ID NO: 987443 - DNA, 120 bp, Artificial Sequence
  ENSG00000281344_96 (sequence is synthesized)
aaattaacccaagagggattaaagtgtaagaccacaaattataagaattctagaagaaaacctaggaaacatctttctggagattggtcataggagagaacgtattactaagtcctcaaa

SEQ ID NO: 987444 - DNA, 76 bp, Artificial Sequence
  ENSG00000281344_97 (sequence is synthesized)
cataaaaagacaacctacagaatgagagaaaatattcacaaactatgcatccaacaaaggtctaacatctagaata

SEQ ID NO: 987445 - DNA, 120 bp, Artificial Sequence
  ENSG00000281344_98 (sequence is synthesized)
cacaaactatgcatccaacaaaggtctaacatctagaatatataagaaacaaacagttgaacaagcaaaaaacaaatagccccattaaaaaatggagaaaatacatgaagagacacttct

SEQ ID NO: 987446 - DNA, 85 bp, Artificial Sequence
  ENSG00000281344_99 (sequence is synthesized)
gttcagcatcacttcttataccagttaaaatgggtattattaaaaagtcaaaaatcaacagatgccggcaaggctgtagagaaaa

SEQ ID NO: 987447 - DNA, 120 bp, Artificial Sequence
  ENSG00000281344_100 (sequence is synthesized)
agtcaaaaatcaacagatgccggcaaggctgtagagaaaagggaatgcttatacaccgttggtgggaatgtaaattagtttagcccctgtggaaagcagtttgcagatttctcaaagaac

SEQ ID NO: 987448 - DNA, 120 bp, Artificial Sequence
  ENSG00000281344_101 (sequence is synthesized)
ttgaaacagaactaccatttgacctagcaatcctattactggtatgcatccaaaagaaagtaagttgctctactaaaaagacatatgtactcatatgttcatcacaatgctattcataat

SEQ ID NO: 987449 - DNA, 120 bp, Artificial Sequence
  ENSG00000281344_102 (sequence is synthesized)
agtaaagacatggagtcatctaggtgcccatcaaaagcagattagaaaaagagaatggggtattatacaccatggaatactatgcacccatagaaaaaaaattatgtcctttttagcaac

SEQ ID NO: 987450 - DNA, 120 bp, Artificial Sequence
  ENSG00000281344_103 (sequence is synthesized)
tatgcacccatagaaaaaaaattatgtcctttttagcaacatggaaacagctggaagccattatcctaagcaaattaacacaggaacaaaacaaaataccacatgttctcacttataagt

SEQ ID NO: 987451 - DNA, 120 bp, Artificial Sequence
  ENSG00000281344_104 (sequence is synthesized)
gtagactcgggactactaggggagggagcaaggaaggcagggggtaggggctgaaaaattgttgggtactatgctcagtacttgggtgactcaagtaatctgcacatgtacaccctgaat

SEQ ID NO: 987452 - DNA, 120 bp, Artificial Sequence
  ENSG00000281344_105 (sequence is synthesized)
ctaaaaagttgaaattataaaaataataaaatatttttttaaaagatagcattcacagcttccagggattcagtgtgaatacttttgggggccattttttggcctgccagaagtataaac

SEQ ID NO: 987453 - DNA, 120 bp, Artificial Sequence
  ENSG00000281344_106 (sequence is synthesized)
actatcaactctagtatataagaggcaaaacagtattatctgcacatgaccatgctgtttaagctctgtgcctacttgctctcctgcaaagcacagatatcaatagtacctatttccaaa

SEQ ID NO: 987454 - DNA, 120 bp, Artificial Sequence
  ENSG00000281344_107 (sequence is synthesized)
gattgttgtgaggattgatatgtaagtacccagtagtttctatgacataagtattcaataaatatcattacactgttaaacaatgcctactgaacatttcctatgtgccaagcttcgtcc

SEQ ID NO: 987455 - DNA, 120 bp, Artificial Sequence
  ENSG00000281344_108 (sequence is synthesized)
caagtacatgtcatgccttagccaatttagtcctcacaacaatcctatgagtagagactgtctcttgctgaaggtcatatacctagtaagcggtggtgagattgaaacccagacactctg

SEQ ID NO: 987456 - DNA, 120 bp, Artificial Sequence
  ENSG00000281344_109 (sequence is synthesized)
ctccagaagtctgtgctcttaaccgctccagatgtggcctttctgaatgatgctactgttgttttaaaataattgctctaggctcggtgtggtggctcacacctgtaatcccaagacttt

SEQ ID NO: 987457 - DNA, 88 bp, Artificial Sequence
  ENSG00000281344_110 (sequence is synthesized)
ttgagcccaggagtttgagaccagcttcagcaacatggtgagaccctatctctaccaaaaaaaaaaaaaaagaaaaaagccagatagg

SEQ ID NO: 987458 - DNA, 120 bp, Artificial Sequence
  ENSG00000281344_111 (sequence is synthesized)
cacatgcctgtggtcccagctacttaggaagctgaggcagaaggatcgcttgagctcaggaggtcaagactgcggtaagacatgattgtgtcactgcactccagcctgtgcaacagagca

SEQ ID NO: 987459 - DNA, 85 bp, Artificial Sequence
  ENSG00000281344_112 (sequence is synthesized)
caattagtaataatagtaattgcttcagggccaggtgcaggggctcatgtttatagtcccagcactttgggaggctgaggctgga

SEQ ID NO: 987460 - DNA, 120 bp, Artificial Sequence
  ENSG00000281344_113 (sequence is synthesized)
tcagtccaggagttcaaggacagcctgggcaataaagtgaggccccatctttacaaaaaattgaaaaaaaaaaaaaaaaaggcaggcctcttggtgtgcacctgtggtcccagctacttg

SEQ ID NO: 987461 - DNA, 120 bp, Artificial Sequence
  ENSG00000281344_114 (sequence is synthesized)
cccaggaggttgaggctgtagtgagccatgattacactaatgcattccagccttggcagcagatcaagaccctgtctcaaaaaaataaataaaaataaaataattgctgtgaaatttcta

SEQ ID NO: 987462 - DNA, 120 bp, Artificial Sequence
  ENSG00000281344_115 (sequence is synthesized)
aatttctattaacgtttttgggaaaaccagaggcttctgtgtgacatgtgaatcacagaggagaaatcatgaatctttatagccttgtgttaacatgacttccttttgttgatagagtgg

SEQ ID NO: 987463 - DNA, 120 bp, Artificial Sequence
  ENSG00000281344_116 (sequence is synthesized)
tttattagtctcaagacctttgaaatggcacatgaattgcttggacagattatggagacatccacccttctttagagatttaagtaagtagaaccagttagtgtgcctcttctgtttctc

SEQ ID NO: 987464 - DNA, 120 bp, Artificial Sequence
  ENSG00000281344_117 (sequence is synthesized)
accttgctcaatgcagaatgaacttggtgtatatccaccagaagcacctgcttatctactgtttgctgtcgttgcaggtatctgttgagattagctgtaacgagttgtatgtaattttat

SEQ ID NO: 987465 - DNA, 120 bp, Artificial Sequence
  ENSG00000281344_118 (sequence is synthesized)
aactaactgaattaagaaaagcctttgtaagattcagtatctgcttcaggtcattgaaatgtaaaattagaaagtaagctgagggcaggggatttttttctgttttattccatttattcc

SEQ ID NO: 987466 - DNA, 120 bp, Artificial Sequence
  ENSG00000281344_119 (sequence is synthesized)
ctcaccacctttgccatccaccaccaacagtttcttttaaatttagcatccagagtagacctttgacaacgcaaatcagatcacttcatttgttcattaaaaaccttcaacaggtttcac

SEQ ID NO: 987467 - DNA, 120 bp, Artificial Sequence
  ENSG00000281344_120 (sequence is synthesized)
attattcttaggattatatttaacatccttatacagtaatctccaagcctctccttgatctggtaccctctttccatctctaatctcttctttaacactcctatacttacttactcagcc

SEQ ID NO: 987468 - DNA, 120 bp, Artificial Sequence
  ENSG00000281344_121 (sequence is synthesized)
ccaggcacattggcatatttgctgttgcctgaacatgcaaattccttgaacttgctgtttccttgcctgaaactctctttcctcagatatctgcctggccttcctcttaacctccaagtc

SEQ ID NO: 987469 - DNA, 120 bp, Artificial Sequence
  ENSG00000281344_122 (sequence is synthesized)
ttgtctcaaatatcattttttcagtgaggccttgcttggccagccctttccctcactatatcctgctccccaacaattgatttttacttatccatataacttttatccccctgtgtgcta

SEQ ID NO: 987470 - DNA, 120 bp, Artificial Sequence
  ENSG00000281344_123 (sequence is synthesized)
tatattttacttatttcttggttcattggctgtctccaccaaaatgtaagtgccatgaggacaggaattttattaatatcagtttgttcatttctatacctttagtgctttaaacagtat

SEQ ID NO: 987471 - DNA, 73 bp, Artificial Sequence
  ENSG00000281344_124 (sequence is synthesized)
agtttgttcatttctatacctttagtgctttaaacagtatttagcacacagtaagcattcaataaatatgtat

SEQ ID NO: 987472 - DNA, 73 bp, Artificial Sequence
  ENSG00000281344_125 (sequence is synthesized)
gtcaggagttcaagaccagtctggccagcagggtgaaaccccatttctactaaagagaccaaaatcagccagt

SEQ ID NO: 987473 - DNA, 83 bp, Artificial Sequence
  ENSG00000281344_126 (sequence is synthesized)
caaaaaaaaaaaaaaaaagtattgaataattgaatgaatgttctgcaatgtaacagtccagttagctatatagcactgcttgg

SEQ ID NO: 987474 - DNA, 120 bp, Artificial Sequence
  ENSG00000281344_127 (sequence is synthesized)
tgcaatgtaacagtccagttagctatatagcactgcttgggatgcagtgtggcctgcttgtctaacactattatggagatatttctatggatttatttgtattattaatgattgagttta

SEQ ID NO: 987475 - DNA, 120 bp, Artificial Sequence
  ENSG00000281344_128 (sequence is synthesized)
taatcctatcttttaatgttgtgtacttcaaatgctattagttttctagatagccaaagatggctaaactctcttctgcccttctttaactacaatttagagaagtggaatttccatgta

SEQ ID NO: 987476 - DNA, 120 bp, Artificial Sequence
  ENSG00000281344_129 (sequence is synthesized)
agcaacctattgagcatctttactgaatatcttttatttgtgtatattttgggggtagtggggaaaagggacattttaatggcaaaacctaagttagggccccattctctacttgaaact

SEQ ID NO: 987477 - DNA, 120 bp, Artificial Sequence
  ENSG00000281344_130 (sequence is synthesized)
ctagacatttttaactgaatttttaataaaaaattactgaggctttgtagaaaaagatgagaatggggtagcatagagtagttgcgctagccacatttcaagtgctccagtgctgcatgt

SEQ ID NO: 987478 - DNA, 120 bp, Artificial Sequence
  ENSG00000281344_131 (sequence is synthesized)
ggctagtagctaccatattgaacagtgtagatatagaacattttcatcattacagaaagttctattatacagcactgctccaaacagtaggaactctgaacattgagctagataataaga

SEQ ID NO: 987479 - DNA, 120 bp, Artificial Sequence
  ENSG00000281344_132 (sequence is synthesized)
tataatcattttatgttttgtatccacagtggggaaatgtaaggaattgtgtcttgtaattctcttatactgtacctttatttgctcaacagatgtttgttttgcctctaataatatata

SEQ ID NO: 987480 - DNA, 120 bp, Artificial Sequence
  ENSG00000281344_133 (sequence is synthesized)
ccaggcactctactaggcactgggaattcaggggtagacacaatagcctcaggcctttctgtatggagcttgtattctcatggaagagcagtcattaagtagataatcatacaaataact

SEQ ID NO: 987481 - DNA, 120 bp, Artificial Sequence
  ENSG00000281344_134 (sequence is synthesized)
atagtctctatagtgctggttgtatagtagatgtttaaatgactgttgattaattgactaatgtgtacagtcccatcatcttcttagatactgacaaatcataggaacaaaaagctagct

SEQ ID NO: 987482 - DNA, 120 bp, Artificial Sequence
  ENSG00000281344_135 (sequence is synthesized)
agtaatttatagttaaggtctgcaagtaacattaaaatttcagtgcagtcaataaatttagttctgttcagactgtttttgttatttttcttatttttgacatagagcaaagattatgtc

SEQ ID NO: 987483 - DNA, 120 bp, Artificial Sequence
  ENSG00000281344_136 (sequence is synthesized)
agttgccctgtggtttaaagccacagttattctagaagcacagttgccatcattgagtagtagctgatccaaaagaattccagccaaggtcttgccaatgatggaaagaaatgatgtgtc

SEQ ID NO: 987484 - DNA, 120 bp, Artificial Sequence
  ENSG00000281344_137 (sequence is synthesized)
ctggaagttgccaaaaattatgtttttcttgttgaagacaatctttgtatctttaagcccttcatatgttgtgacatgagcacatatgaatgttccctaaaaggcaacaattatgctgtc

SEQ ID NO: 987485 - DNA, 120 bp, Artificial Sequence
  ENSG00000281344_138 (sequence is synthesized)
aaattcattcaagcagtagttatccctgtataatttgaagttatacagatgcctaataagtgttttgatgctgttgctactgatgttgctgatgacattacatagaaagttgcagaagat

SEQ ID NO: 987486 - DNA, 120 bp, Artificial Sequence
  ENSG00000281344_139 (sequence is synthesized)
aaaccatgaagattgacactttaccattattattttgattttgtttctctcttcacatcatcaagtcttgcttatgctgttaagccctagcagttctttaatatggaagggggtatgaca

SEQ ID NO: 987487 - DNA, 120 bp, Artificial Sequence
  ENSG00000281344_140 (sequence is synthesized)
tataatttccacctctgagaattattttctttttgttgatttttgcaacttcatccagacttctctaaaatggtgtatctgtgtgctttgtattgttggacactgacactgttgatgtaa

SEQ ID NO: 987488 - DNA, 77 bp, Artificial Sequence
  ENSG00000281344_141 (sequence is synthesized)
gtgtgctttgtattgttggacactgacactgttgatgtaataatcaggggcttattgtaccagttaataattagcca

SEQ ID NO: 987489 - DNA, 120 bp, Artificial Sequence
  ENSG00000281344_142 (sequence is synthesized)
gcctgggcagcagcaagaccctgcctcaaaaacaataataacaataattataataattagcttagtaatagaaattcaaagtatgggtgtttaaataaatcagaattcagtttttctatg

SEQ ID NO: 987490 - DNA, 120 bp, Artificial Sequence
  ENSG00000281344_143 (sequence is synthesized)
caaagagaagtgtggaaataaattttttaacttcccaaatttttaaacacaagattttttaaaaacttgatcatctgataaaatagcctatacatttttagggaaataattctgcatagg

SEQ ID NO: 987491 - DNA, 120 bp, Artificial Sequence
  ENSG00000281344_144 (sequence is synthesized)
gtcttacctccagatagcaaaacatttttttaaagctatagtaattaaaatatggtacatatggaaccaggaataggtagataaatgaattgagtggaaagctcagaaatatacccaact

SEQ ID NO: 987492 - DNA, 120 bp, Artificial Sequence
  ENSG00000281344_145 (sequence is synthesized)
gtttgttataatttattataagctaaaaattacactcaaatcaatgaggaaaagttattttgtacaatgactagtttaacataatggtctaatcgcttgggaaaaagtaaagttagaact

SEQ ID NO: 987493 - DNA, 120 bp, Artificial Sequence
  ENSG00000281344_146 (sequence is synthesized)
ctataagtccttatcagaaaatgcagtccaaacataattacaatcatatgccacttaatagggacatgctctgagaaatgctttgttaggtgattttgttctgaggactttatagattgt

SEQ ID NO: 987494 - DNA, 120 bp, Artificial Sequence
  ENSG00000281344_147 (sequence is synthesized)
ctgaggactttatagattgtacttacccagatctagataatatagcctactacccacctagactatatggtatagactatttcacctaggctataaacctgtacagcatgttactgtact

SEQ ID NO: 987495 - DNA, 120 bp, Artificial Sequence
  ENSG00000281344_148 (sequence is synthesized)
caattgcaacatgatggtattgtgattgtgtatctagccatatctaaacatagacaaggtacagtaaaaatacagtttatatatatataaacagaataatgtatatataaacaaaatata

SEQ ID NO: 987496 - DNA, 120 bp, Artificial Sequence
  ENSG00000281344_149 (sequence is synthesized)
tatatatttaaaatggtatgcctgtataggacacttcccatgaatggagcttgcaggactggacgttgctctcagtgtcattgagtgagtggtgagtaaatatgaaggcctaggacatta

SEQ ID NO: 987497 - DNA, 120 bp, Artificial Sequence
  ENSG00000281344_150 (sequence is synthesized)
aaggcctaggacattatactactgtagacttaagaagtctacatttaggttatactaaatttattttaaaaaattttctttcttcaataataaattaaccctagcttactttttttattt

SEQ ID NO: 987498 - DNA, 80 bp, Artificial Sequence
  ENSG00000281344_151 (sequence is synthesized)
cagcttaaaacacaaacacatagttcagctatacaaaaaatattttctttataaccttattctgtaagcttttttctatt

SEQ ID NO: 987499 - DNA, 84 bp, Artificial Sequence
  ENSG00000281344_152 (sequence is synthesized)
gttaatatcactggcttctacctccacatcttgtctcactgcaggatcgtcaggggcaacaatactcgtggagctgtcatttcc

SEQ ID NO: 987500 - DNA, 120 bp, Artificial Sequence
  ENSG00000281344_153 (sequence is synthesized)
gatcgtcaggggcaacaatactcgtggagctgtcatttcctataatatcaatgccttctgtaatacctcttgatggacctgcctgagactatttacagttaacttttttttggaggtaga

SEQ ID NO: 987501 - DNA, 120 bp, Artificial Sequence
  ENSG00000281344_154 (sequence is synthesized)
aggagtatactctaaaataatgattaaaagtatagtaaacacatacatcagtaagataatcatttattatgatcaaatatgtagtgtacataatcatatgcactgtacttttatatgact

SEQ ID NO: 987502 - DNA, 120 bp, Artificial Sequence
  ENSG00000281344_155 (sequence is synthesized)
gggactgcagtggatttgtttataccagcatcaccacaaacatgtgagtcatgcattgcacgatgacatcactaggcaataggaattttccagcttcattataatcttatgggaccacct

SEQ ID NO: 987503 - DNA, 120 bp, Artificial Sequence
  ENSG00000281344_156 (sequence is synthesized)
ccatatctgcagtttgtcattgactgaaatgtcattatgcaacacatgactatatatttgtacacggaaaaaagcttttaatatattatttaaataattatttactatattatttaaaga

SEQ ID NO: 987504 - DNA, 120 bp, Artificial Sequence
  ENSG00000281344_157 (sequence is synthesized)
aaaatacaaaaccattgtaagatacatttaaaaaacatcaagcatatatttctttctggtcgtgtatatgtttgtgtgtctcaaagactatacaatcattcctacctatcacaggacatt

SEQ ID NO: 987505 - DNA, 120 bp, Artificial Sequence
  ENSG00000281344_158 (sequence is synthesized)
ggttccaggacaccaaaccaaaatccagggatgctcatgtcccttatataaaatggtgtaatatttgcatataacctatgcacattctctgagatactttaaatcaattctagatgactt

SEQ ID NO: 987506 - DNA, 120 bp, Artificial Sequence
  ENSG00000281344_159 (sequence is synthesized)
acaatataaatgctatgtcaatagttgttatatgtaatttttaaaatgtttattattattgtgttttttaaattgttttgttttagagtattttccattcacagttggttgaatctgtgg

SEQ ID NO: 987507 - DNA, 120 bp, Artificial Sequence
  ENSG00000281344_160 (sequence is synthesized)
ttgaatctgtggatgcagacacacagggagaaccaagtatatggtaaaatatcagtagtgttatttctgggtagtgggattataggtagttaaaatacatgtatttacttttctttgtgc

SEQ ID NO: 987508 - DNA, 120 bp, Artificial Sequence
  ENSG00000281344_161 (sequence is synthesized)
ctatctgtattctgagttttctaaattaagccttgttataaaaaaagaactaaaaataagtgatctctattattgattatatcacaatgcatataggaaatatgctttgatgcaggaata

SEQ ID NO: 987509 - DNA, 120 bp, Artificial Sequence
  ENSG00000281344_162 (sequence is synthesized)
atcacaatgcatataggaaatatgctttgatgcaggaatagttgttaaaagttgatttataactcattttgttttcttatttaattatttttaagagatggggtctcactgtgttgccca

SEQ ID NO: 987510 - DNA, 120 bp, Artificial Sequence
  ENSG00000281344_163 (sequence is synthesized)
tcagaacgggagtttcgatctgcttcatttccaacctgagtggttcactcctccttaggcaacctggtggtctcccactcctgggaggtcaccatgttgatgcctaacttagtgtgggca

SEQ ID NO: 987511 - DNA, 120 bp, Artificial Sequence
  ENSG00000281344_164 (sequence is synthesized)
ccccatttgtatatagcacattacagcccagaactcccaggctcaagcgatcctcctgcctcggtcttcctagtagatgaaactacagttgtgtgccaatgtacctggcttacataactt

SEQ ID NO: 987512 - DNA, 120 bp, Artificial Sequence
  ENSG00000281344_165 (sequence is synthesized)
attttatccccggctatccagtactgactcccggtgattccacagctccagattggcacttcttccccctgtaccaatgcgtaatttgatcagttttcttgattttcagtattcctgttg

SEQ ID NO: 987513 - DNA, 86 bp, Artificial Sequence
  ENSG00000281344_166 (sequence is synthesized)
gtaatttgatcagttttcttgattttcagtattcctgttgtgtgtgactagcagtttcccttttgccatgactttaaaactcccca

SEQ ID NO: 987514 - DNA, 120 bp, Artificial Sequence
  ENSG00000281344_167 (sequence is synthesized)
aaaaactccccacacgtgatgatcaccctgtggtcagttttgtttgaatatgttccaacctacagagtagttgtgggtagttttgactgttcacgataatatttacaaagaattgaataa

SEQ ID NO: 987515 - DNA, 120 bp, Artificial Sequence
  ENSG00000281344_168 (sequence is synthesized)
atattttttatttccaaatattggtggtggtcgtggtgattaagaatctgaatcggatgaaccagccttgcctttagagaaatgtccaagttacgtttggtttatgggggctctatattg

SEQ ID NO: 987516 - DNA, 120 bp, Artificial Sequence
  ENSG00000281344_169 (sequence is synthesized)
ggagaagtgaagaggcctaggacccaggatttccaagataaggttgttcagcagggctcatagagaacatcatttagaatttggcttgttcccaaatgattccctttataattcttaaca

SEQ ID NO: 987517 - DNA, 120 bp, Artificial Sequence
  ENSG00000281344_170 (sequence is synthesized)
gagaggctctgactgtatcagtatggtgtttctttattaagcaaaagctcatgccaagtgacttcaggtgcatttgacttcatatttagtcacagtgtgaatttctgtatgattaactta

SEQ ID NO: 987518 - DNA, 120 bp, Artificial Sequence
  ENSG00000281344_171 (sequence is synthesized)
cccatcaccgtgatgaagaatgagatggtggtagtgatgctgtgattatattacctctttcatccttgatttttggtgattagtcttccttgaaactttctcttgacatggaccatcaat

SEQ ID NO: 987519 - DNA, 120 bp, Artificial Sequence
  ENSG00000281344_172 (sequence is synthesized)
atggaaatctgaagcttccattgatggaggtggtctctgaactagcatccatccaagccaggaatagactgcaataaacttattgagaataacacaatccttaattgtatgtgtaatcca

SEQ ID NO: 987520 - DNA, 120 bp, Artificial Sequence
  ENSG00000281344_173 (sequence is synthesized)
tggctttcactgtctttaccacaccaaatggcattgccaagtcttatttttcctccttcctctgcttctcacacaacctcttttcttcatgcaattccattttccattccatttccattc

SEQ ID NO: 987521 - DNA, 120 bp, Artificial Sequence
  ENSG00000281344_174 (sequence is synthesized)
aatgaatcttccaagcctaaaggtttaaatctggtcatccccctctcttccatgcagtttcatttctaagatggcattgaggatattgccatggttgtttcatacttagttgttattgtt

SEQ ID NO: 987522 - DNA, 120 bp, Artificial Sequence
  ENSG00000281344_175 (sequence is synthesized)
atgataggtaatatataattctgaactaaaattgctggctattttttgtcattgtgacaacaggttttagaaacatagcactccaattttgctactgaatgttttgattaaatgggaggg

SEQ ID NO: 987523 - DNA, 120 bp, Artificial Sequence
  ENSG00000281344_176 (sequence is synthesized)
actagaagactacaatttaagagcaggcttcagcaataatttttaaaaatagattcagagtcgatcatcttactatatttctatctaggcttatctcccttcatgcagttagttacaaca

SEQ ID NO: 987524 - DNA, 120 bp, Artificial Sequence
  ENSG00000281344_177 (sequence is synthesized)
cttggagggctgtttccaagactggcactaaagaggtcactttttccactctctctcccagaaaatatcaggaagtgcagtaaggttcatgaaaatttaagcttgaagtttagaaaactc

SEQ ID NO: 987525 - DNA, 120 bp, Artificial Sequence
  ENSG00000281344_178 (sequence is synthesized)
aaaacaacccaaaccctcaaacattcagtttggtttgaatcttggacaaaggttttctatgcagctagtggagttatttcagtttaacggctgtagtaacttcatttcagggctagggga

SEQ ID NO: 987526 - DNA, 120 bp, Artificial Sequence
  ENSG00000281344_179 (sequence is synthesized)
aattatgaaaccataacttggatcttattttaacaaaaccaagaaataaaaacactggggaatctgcatgggaaaggggacctacctaaccccaattgctgctattttactgtggcagct

SEQ ID NO: 987527 - DNA, 120 bp, Artificial Sequence
  ENSG00000281344_180 (sequence is synthesized)
cctcttactataggaattatgaaaccattctttccaattccttcagagagagctgacttttgaaaccgattgagtggcctgcatccaattaataaccctcctgatgtgcgcaacagggaa

SEQ ID NO: 987528 - DNA, 120 bp, Artificial Sequence
  ENSG00000281344_181 (sequence is synthesized)
gatctttcataggtgattaaatccaatagagttaaggtctgtcatcgtgatttccctcctggtcaactttcatttcaaaagtcatcccaggagaaccactgtagttctttacctagttga

SEQ ID NO: 987529 - DNA, 120 bp, Artificial Sequence
  ENSG00000281344_182 (sequence is synthesized)
cttctgaaacaaaattttccacttcaaagagagcccaataatttagaccctatcctccttggatacaatttattttttccaagaataagaatttaatttaatgactatttattgagtggc

SEQ ID NO: 987530 - DNA, 120 bp, Artificial Sequence
  ENSG00000281344_183 (sequence is synthesized)
ttcattatatctggcataggataatatattccaggcagaggtatacaacatagggggaaaaatgtcctcaaagatcttttggaccagttcaataatcaacaatgaaacatcttagaacaa

SEQ ID NO: 987531 - DNA, 120 bp, Artificial Sequence
  ENSG00000281344_184 (sequence is synthesized)
aaacaaattcaaaaaggatttattttgaaataatctagaaaacctcagttgatttttaaacatacccaatagagtatgtcacctcatttacagttgatcacttatcaaatactgcagagc

SEQ ID NO: 987532 - DNA, 120 bp, Artificial Sequence
  ENSG00000281344_185 (sequence is synthesized)
aaaatgaggtcgagcctcaggctctgcagatgtggagcacagcctaaaggggcaaagcatcagcagcctgctgaatttctgaagcacacaatctcagaggatttccggactatttggggc

SEQ ID NO: 987533 - DNA, 120 bp, Artificial Sequence
  ENSG00000281344_186 (sequence is synthesized)
ttcagagcatccagaaatactgaaaatttaataaagttcgtgttttcttatttaggtagagacagatttgccagataatagaagtgacttaactaacaaggttccagttaataagtgcca

SEQ ID NO: 987534 - DNA, 120 bp, Artificial Sequence
  ENSG00000281344_187 (sequence is synthesized)
taaatattcccccaaagtatctatattcttatcaaactagcttgttctcttaattgaggatatacgtagtgattttagttggattatattaagcattcaccacccttttaagtgattatt

SEQ ID NO: 987535 - DNA, 120 bp, Artificial Sequence
  ENSG00000281344_188 (sequence is synthesized)
tctgctattatatggaatcatgttactatgaaatttgaattaactcacatgaaatctgaatcacagccagtgaaatgtggttaatggtatttgttgtaacttgaaattttcctttttttt

SEQ ID NO: 987536 - DNA, 120 bp, Artificial Sequence
  ENSG00000281344_189 (sequence is synthesized)
tttgcatttcttttaaaatattgttttaatattatgctttgatgatgtcagtatctaatttctttccttctttatgtactttagaactacagggagcaaatctgtttcttagaatataaa

SEQ ID NO: 987537 - DNA, 120 bp, Artificial Sequence
  ENSG00000281344_190 (sequence is synthesized)
tccatctagtaaacttttcaaaatttggagatctcctagaactattttctgaactaataatgatgcaataatgattacagttaatagtggaactgtaggaatatcatattctttaataac

SEQ ID NO: 987538 - DNA, 120 bp, Artificial Sequence
  ENSG00000281344_191 (sequence is synthesized)
ttgaaattttaaaatttgattctgaatatttatcaaaactattattgggcaaccaatacatactgtgtaaagttctgtacttagggattgaaccagtggttgaggaaatgaaacaaatct

SEQ ID NO: 987539 - DNA, 120 bp, Artificial Sequence
  ENSG00000281344_192 (sequence is synthesized)
gaatgttaaatgcctattaagtggcagggacagtcaattccaaacaaggaagtaatcatttccagatggggatggtctgagtcctcatggaggaggtgaaattagtgttctcctttgaaa

SEQ ID NO: 987540 - DNA, 120 bp, Artificial Sequence
  ENSG00000281344_193 (sequence is synthesized)
ggtatatgcatttagagactagtgagcacgtgtttcagaggtgagaaattgatgcatcagaggctggaaaatgcatgctgtgtgtgtgaaggacaatgagaagacctctttgctgggctt

SEQ ID NO: 987541 - DNA, 120 bp, Artificial Sequence
  ENSG00000281344_194 (sequence is synthesized)
aaacacagagttgatgtaggagagtagtgggtattagagcttaaaaggtaggataaagccggattttggaaggctgtgggctttttgtcatagatgcaaggagctgttttaagtttttga

SEQ ID NO: 987542 - DNA, 120 bp, Artificial Sequence
  ENSG00000281344_195 (sequence is synthesized)
gatgaggattgaaatggtgaagtagtgttttaggaagataacgcaggtagtaacagggtaagtgggaaagaaaatggttgaagatacgacaattgattagaaaatttgcacttgcctaag

SEQ ID NO: 987543 - DNA, 120 bp, Artificial Sequence
  ENSG00000281344_196 (sequence is synthesized)
aaaagatgataaaaaatctagtgtgtagtagtggctacagtgctggaaggagaaacattaggaagagaacaaggaatcaatataattttgagattgctagacatgggaagtgagggacaa

SEQ ID NO: 987544 - DNA, 120 bp, Artificial Sequence
  ENSG00000281344_197 (sequence is synthesized)
cttaaaaatgacaccttttggcttaatgtatgattttgaacctgcgtatcagggataatgattatcataaatgagaaatctggaaaataggtcaggttggggttaagggtagaaaatagg

SEQ ID NO: 987545 - DNA, 120 bp, Artificial Sequence
  ENSG00000281344_198 (sequence is synthesized)
ctttgttttaagtgaattgctcttgagatagtggcatgtcttctaataagcaggtggaaatgcaggactcaattttatgagagagatcaggactagtaacaaaaaatggtgaccatttat

SEQ ID NO: 987546 - DNA, 120 bp, Artificial Sequence
  ENSG00000281344_199 (sequence is synthesized)
atataagtaacaaccaaagttggagaggtaaatatcacctgaaggcttagaaatgctaaaaatggaaaagcaaatatctgagctgtgagatgtaggacacacgagatttaggtgatgaaa

SEQ ID NO: 987547 - DNA, 120 bp, Artificial Sequence
  ENSG00000281344_200 (sequence is synthesized)
ggtggaaaaaagacagtaaaagagacagaaaacaaagcaattgaaaggtaaagaaaagaaccagaatatgatagagtcatagaagtcaaacaagttatgagttttcaaaataatagtagt

SEQ ID NO: 987548 - DNA, 120 bp, Artificial Sequence
  ENSG00000281344_201 (sequence is synthesized)
gattggcagtatctcatactttagacaggctatgcagaatggggaatggaaaacaccattgattatgtcaactaggagtctttgaagccaattaagtataattttcatagagtaggaaga

SEQ ID NO: 987549 - DNA, 120 bp, Artificial Sequence
  ENSG00000281344_202 (sequence is synthesized)
gcagagccaaattgtgtgagaaataaggaggcagtcgtggtaagcaggtatattcaaccctttgggaagaaaggagaaaaaagaacagtggcaagatgagtaccaggccctctccttttc

SEQ ID NO: 987550 - DNA, 120 bp, Artificial Sequence
  ENSG00000281344_203 (sequence is synthesized)
tccctccccaggcagattcaatctctttcatgtagaatcaccatttgtatgtcaataccttctggaattatatcacaaatatagaacatcgtccctaacaccctagctcccatatatcaa

SEQ ID NO: 987551 - DNA, 120 bp, Artificial Sequence
  ENSG00000281344_204 (sequence is synthesized)
cagctcttactttggtatcaatagatgccacttcaacttcaacatccgaaactaaatttataatttccccgtgctcctactaaaaaacaaaacaaaatacaaataagcataaataaacaa

SEQ ID NO: 987552 - DNA, 120 bp, Artificial Sequence
  ENSG00000281344_205 (sequence is synthesized)
caaccaggtcttcttttagtgttttccatttcagtaagtaacatgacactctccccacttgctcacgctagaaagctcggggtcatttttgatacccccctttgctcttcatttctgtca

SEQ ID NO: 987553 - DNA, 120 bp, Artificial Sequence
  ENSG00000281344_206 (sequence is synthesized)
tctaattcatcaccaaatcttgtaaacacacttctctccacatccactgccccactagttgaagactcggtcatctgaacaaactcagtaatatttcacgtgtctcctctgcatctcctc

SEQ ID NO: 987554 - DNA, 120 bp, Artificial Sequence
  ENSG00000281344_207 (sequence is synthesized)
ttgctcctcacagaagccagtgtaatcctttaaatccacaaacctgattactattaccctcctatttaataccttctagtggcctcttttttccttcaagccaagtgatgttatgaaaac

SEQ ID NO: 987555 - DNA, 120 bp, Artificial Sequence
  ENSG00000281344_208 (sequence is synthesized)
aactattttagaatgaagcaactaactctgtatggaggaattagaaaaaccttcattaagatattggcatatggactggccttcagtgtcttcaggtggagaattctattagtgtgaagt

SEQ ID NO: 987556 - DNA, 120 bp, Artificial Sequence
  ENSG00000281344_209 (sequence is synthesized)
atgggatgagagtgacagaagatcattccggcttgaggaacgtcatgtgccaaggtaggaagtaggtgttcagaaaagcgtgacaagttcagagggtgatgtcaagggatggggagtagc

SEQ ID NO: 987557 - DNA, 120 bp, Artificial Sequence
  ENSG00000281344_210 (sequence is synthesized)
tgtagaagccagtttttgaaagccctttgatgttggattttatggaggttttaaagcaagggataatataaagaaccaagctttttgtggcaaaggggaaagttgactgcaatgtttgag

SEQ ID NO: 987558 - DNA, 120 bp, Artificial Sequence
  ENSG00000281344_211 (sequence is synthesized)
agtcttagagaagagagagcagtttagtgcctgttgtagggacccaagaaaggtgatagaggccaagacaaaggctgtggggctggggagaagattccaggcatatttagagtaggacct

SEQ ID NO: 987559 - DNA, 120 bp, Artificial Sequence
  ENSG00000281344_212 (sequence is synthesized)
acagaagtaatgcaacatttgaggctagatgtccttgaataatgttattgtgagtgggtttatgtgcaaagcctatgatctgaccctaaattgacatgttattctgtggtctcatactct

SEQ ID NO: 987560 - DNA, 120 bp, Artificial Sequence
  ENSG00000281344_213 (sequence is synthesized)
gtagaatgtattatttttgccacatgtaaaatgtactagagataaattacaattagtttgtttcctagtcaaagctacactaaaattacaacccagtaaaaatatttttaagaatccaaa

SEQ ID NO: 987561 - DNA, 120 bp, Artificial Sequence
  ENSG00000281344_214 (sequence is synthesized)
tatctggatttttcacagttctgtctctgataagttttagaaacttggtcaagtcatatactcagccggaggcttaaatttctcatttgcaaaaggaaggagttgactagactcactgaa

SEQ ID NO: 987562 - DNA, 120 bp, Artificial Sequence
  ENSG00000281344_215 (sequence is synthesized)
tgacctctaaggttccttcaagttccttggaaccagtgtcaacctctagggtatttttctgctttagttgattgacttgattctaactagcaggaagcagacggcttcagagtttcttga

SEQ ID NO: 987563 - DNA, 120 bp, Artificial Sequence
  ENSG00000281344_216 (sequence is synthesized)
aaacatagttatctccttgaagaactgtggtctagggagtgttctgagtagcattcgtagacccaccttgtcttataaaatgcattacatttataatccttctagaggatctttccaatc

SEQ ID NO: 987564 - DNA, 120 bp, Artificial Sequence
  ENSG00000281344_217 (sequence is synthesized)
tcccgtagctgggtaccaagcaaaaatcattccagttaataagagccatttgttggtaatagttctattatatttggtgtggcatattttcttttctccccaaggcttctcttaactagg

SEQ ID NO: 987565 - DNA, 120 bp, Artificial Sequence
  ENSG00000281344_218 (sequence is synthesized)
agaaacttaaaagtacattcattgtcaagtcttcctaggcttttgatttcaagaacttgtgtagaattatgtgtttttttccttcaagtacaatttgcagaagggtagagacatatataa

SEQ ID NO: 987566 - DNA, 120 bp, Artificial Sequence
  ENSG00000281344_219 (sequence is synthesized)
tttaattgaacaaatttaaacttccactgtgtatgaagcattgtggagaaaaagcaggatgggtaaaggaatgtgccaagagggataaggcgcaatttctgtcttcaagtaagtatatta

SEQ ID NO: 987567 - DNA, 120 bp, Artificial Sequence
  ENSG00000281344_220 (sequence is synthesized)
tttaacaggagagcctacaatgttaatacatacttcaagtaggtatatgaaaatggtagtacagtagaagagagtgctacatgtaggatgagtatgattactccagccttgggcttgcaa

SEQ ID NO: 987568 - DNA, 120 bp, Artificial Sequence
  ENSG00000281344_221 (sequence is synthesized)
attggaataactgtcttctggtaagcgctattcctaaattctgtctgagctggtgaatattggtatgaataacccaggtataggtctaaaataattgatcaacttgtctttggcaagtgt

SEQ ID NO: 987569 - DNA, 120 bp, Artificial Sequence
  ENSG00000281344_222 (sequence is synthesized)
atataaagttttaagcaatctcttaaccacttcagattacagcgtattgctcatgtgagagataaaaatgaccaactgcttgaaaatggttgattggttataaatagacacagtctaaat

SEQ ID NO: 987570 - DNA, 120 bp, Artificial Sequence
  ENSG00000281344_223 (sequence is synthesized)
ttttggcaagagcatgataaaagcttttatgaagttatgaaattgtggcaacatattgtcaactgtggcacttgaagtcaagtcattagagaatcacatgaacagatttagtatactact

SEQ ID NO: 987571 - DNA, 120 bp, Artificial Sequence
  ENSG00000281344_224 (sequence is synthesized)
aagctgacagacatactggcataaacagttattaagctgcagactaaactgaagatcaattttttaaaaatgatgctttgcagcatgttgtatgggtattacattttttatgtacatcat

SEQ ID NO: 987572 - DNA, 120 bp, Artificial Sequence
  ENSG00000281344_225 (sequence is synthesized)
attcaactcctggatgagtgttatcttaaggttttctgggttgaatttaacataaagataacaggattccatttctaaagatggggcatttgtctcattcaatgtgagtgctaaaatatt

SEQ ID NO: 987573 - DNA, 120 bp, Artificial Sequence
  ENSG00000281344_226 (sequence is synthesized)
cttgttctataattcattcttctgagagataactatgatttctggtagtgtaaaggtgttcttccctgttttgtctttgtaccctgagaataaacaatcataggtaaaataaacttaaaa

SEQ ID NO: 987574 - DNA, 120 bp, Artificial Sequence
  ENSG00000281344_227 (sequence is synthesized)
taaattgtaggtgaaataaacttgcaggtttaaaaagcataagaaagctagtaagccaggaaactggtatgtatatatattttataaacctggtattatattttatgtcttcatctaatt

SEQ ID NO: 987575 - DNA, 120 bp, Artificial Sequence
  ENSG00000281344_228 (sequence is synthesized)
atctaattatgaaagtgattaaaaagtttaatatagtgaaaaatgtgtctaaattgtgacaaaagttctgatcccagatttatgtctgtatttgttctcacgctgctaataaagacatac

SEQ ID NO: 987576 - DNA, 74 bp, Artificial Sequence
  ENSG00000281344_229 (sequence is synthesized)
ggagcaaagtcacatcttaggtagcggtggacaagagagcttgtgtagggaaactcccatttataaaaccatca

SEQ ID NO: 987577 - DNA, 120 bp, Artificial Sequence
  ENSG00000281344_230 (sequence is synthesized)
gagagcttgtgtagggaaactcccatttataaaaccatcagacctcgtgagacttattcaccatcatgaggacagcaccatcatgagaagagcatcattaaaacccgcccccaagtttta

SEQ ID NO: 987578 - DNA, 120 bp, Artificial Sequence
  ENSG00000281344_231 (sequence is synthesized)
tcccatgacacatgggaattatgggagctccaattcaagataagatttgggtggggacatagccaagccatatcagtgtcactaggcctttaagttggagcagtcctataagagggcatg

SEQ ID NO: 987579 - DNA, 120 bp, Artificial Sequence
  ENSG00000281344_232 (sequence is synthesized)
cagtcctataagagggcatggaaaagtctaagtcaccttaaggtatgtttccaccagctctaagcctctattctccatcagtatgttaaggcatactgtttaaagaaatttttgttaaaa

SEQ ID NO: 987580 - DNA, 120 bp, Artificial Sequence
  ENSG00000281344_233 (sequence is synthesized)
tgaagtctgttgtctggcaggagtaagatcttaatattagctgacaattaagcacttaatttgtgcctaacattatgctaaggactgtacattggctctcttaatgcttattaaatatag

SEQ ID NO: 987581 - DNA, 120 bp, Artificial Sequence
  ENSG00000281344_234 (sequence is synthesized)
atatatataatatataatacttatgaaattggtactattgtatttaatcatttttaagacacttttcacattttagcactctaaaattgggatgttttacaatcagtgactttttttgtt

SEQ ID NO: 987582 - DNA, 120 bp, Artificial Sequence
  ENSG00000281344_235 (sequence is synthesized)
ttagcactctaaaattgggatgttttacaatcagtgactttttttgttgttgttattgttttgagacaaagtcttcctctgtcgcccagactccaggctggagtgcagtggcactatctt

SEQ ID NO: 987583 - DNA, 79 bp, Artificial Sequence
  ENSG00000281344_236 (sequence is synthesized)
cagtgacatcttacaaacataatttagagtattcttgttctgtaagtggcacataaaatcatggtgagagtgacaataa

SEQ ID NO: 987584 - DNA, 120 bp, Artificial Sequence
  ENSG00000281344_237 (sequence is synthesized)
ctgtaagtggcacataaaatcatggtgagagtgacaataagaaagcatcatagattagatgaaatatgatattagccaccatccccctttacccaatctgacctaaaaggaaccgaaaca

SEQ ID NO: 987585 - DNA, 120 bp, Artificial Sequence
  ENSG00000281344_238 (sequence is synthesized)
tgaagaagttaagtaatctgttcaatatcacagaactggtaaatgcttgagccaggattccacacaattgtttaactcaacccaggaacaatgcttccacacagcataccatgctgcctg

SEQ ID NO: 987586 - DNA, 120 bp, Artificial Sequence
  ENSG00000281344_239 (sequence is synthesized)
ctggtaatctaccagcacttcttaagctttggcgaaattggtgtatctgagtagccatcttcagagagctgcacactggagttgcagtggcacagtggagttgggaggagagagaatttg

SEQ ID NO: 987587 - DNA, 120 bp, Artificial Sequence
  ENSG00000281344_240 (sequence is synthesized)
caaggtccagaatggactgctgagtgaagaggcatggtggaagacccttggcagtcggggtaatcatgagtgaaatagaccctgaaaggacagaaaagttacaggaatgtagggaagcca

SEQ ID NO: 987588 - DNA, 120 bp, Artificial Sequence
  ENSG00000281344_241 (sequence is synthesized)
taaaggtggaggccacccattttactattttatccaggtccagacctgcgtgtgcaaatacatctatatgggacacagaaagaaaattcttatgtatcagggagagttatttatctatag

SEQ ID NO: 987589 - DNA, 120 bp, Artificial Sequence
  ENSG00000281344_242 (sequence is synthesized)
tatctatttttatatatttatccatatacgtatatctaaatccatatattttgagagacagaaaaaaaaagaaaaaagaaagttgtgcttttttttttttttttttatgatggaggctta

SEQ ID NO: 987590 - DNA, 88 bp, Artificial Sequence
  ENSG00000281344_243 (sequence is synthesized)
aaaaagaaagttgtgcttttttttttttttttttatgatggaggcttactctgttgtcaagctggagagcagtggcatgatctctgct

SEQ ID NO: 987591 - DNA, 69 bp, Artificial Sequence
  ENSG00000281344_244 (sequence is synthesized)
agctgggactacaggtacacgccaccactctcagctaattttcgtatttttactagagataacccgcct

SEQ ID NO: 987592 - DNA, 120 bp, Artificial Sequence
  ENSG00000281344_245 (sequence is synthesized)
gtgcttttttaaagggaatattacattatgaataaatattttcttatcctacaattagaatttaagatttgatgtgttctgcatgtttcttttttatttgctttcccccccatagtgcca

SEQ ID NO: 987593 - DNA, 120 bp, Artificial Sequence
  ENSG00000281344_246 (sequence is synthesized)
tagcacaatttagtgtaaatattaggaagggcaagcatttattgaatacataaataataagaactctctctttacctcaaataccatacagaatcttggaagcttatttgagtttaacaa

SEQ ID NO: 987594 - DNA, 120 bp, Artificial Sequence
  ENSG00000281344_247 (sequence is synthesized)
aaagatgctttaagtgggggtggggaacctcctaaagagttgtatcagttactgaaataacacagactagtgtaatttctattcctgcttgtcaagaaacaaggtaggcaaattaaagtc

SEQ ID NO: 987595 - DNA, 120 bp, Artificial Sequence
  ENSG00000281344_248 (sequence is synthesized)
atcaggatctagcactgctgctctgcctccaacagaaaagatgagccaatgaaaagacaagccagtgaaaatacactgttactccctgtcagccccagtggccatatgcacaaacactat

SEQ ID NO: 987596 - DNA, 120 bp, Artificial Sequence
  ENSG00000281344_249 (sequence is synthesized)
acacacacacacacacacacatataaatttatgtattttcttttgcctatgtgtctagtcagcttaaatgggtcgactcgtgttttggctcctataaccaaaccagactctttggctcag

SEQ ID NO: 987597 - DNA, 120 bp, Artificial Sequence
  ENSG00000281344_250 (sequence is synthesized)
accaaaccagactctttggctcagctctacctgcaaactttctggcctgcttcagtatagtgaagtggtttaagtttctgagaacaaataattaggctctaggagaaggccaggattata

SEQ ID NO: 987598 - DNA, 120 bp, Artificial Sequence
  ENSG00000281344_251 (sequence is synthesized)
caaaacccattcgtttttgcttctgtgggttctgtgtctccgtaaaaaaggaaaacaaagttaggtaagaacagtgttcagctatgtgagcttcatgatatttctcctattatgttatca

SEQ ID NO: 987599 - DNA, 120 bp, Artificial Sequence
  ENSG00000281344_252 (sequence is synthesized)
gaacacttatttaatttttgttgttctgaacctgagatacttagggattagtattttaagttacatctccttttaaccaacaatataaatcttagactcagaattagtgttggcatggac

SEQ ID NO: 987600 - DNA, 120 bp, Artificial Sequence
  ENSG00000281344_253 (sequence is synthesized)
cggaatctgcccttatctttgttccctcaccttatctttgttacttatcttcactctttggacttaaaaggtaatgaagtttcaaactaggtttaggagcatcttcagctacagaaggcg

SEQ ID NO: 987601 - DNA, 120 bp, Artificial Sequence
  ENSG00000281344_254 (sequence is synthesized)
agatataaggtatttatttatttatttatttaaacttactccactatctttctatggtactttctccatatcataaaaactttggagacctgtattattgggaagattgctcagctacaa

SEQ ID NO: 987602 - DNA, 120 bp, Artificial Sequence
  ENSG00000281344_255 (sequence is synthesized)
cagagactaagtgaggcactgacttcatcaagtgatttttggtgatcaagcagcaataaatgtgcccaatataaaccttctcttcctccagttcacaggcacaggatttaaatcaatttt

SEQ ID NO: 987603 - DNA, 120 bp, Artificial Sequence
  ENSG00000281344_256 (sequence is synthesized)
aagtggttttaaaatgtagcagagatttcactttttaggtattttttctttatcagagatataacttccaagagatttttctttattactccatttaggtgtttttccaaattatgaatc

SEQ ID NO: 987604 - DNA, 120 bp, Artificial Sequence
  ENSG00000281344_257 (sequence is synthesized)
atctactatacttatttattaattgatactttagtgagttagagtgaactgcttgcgtcttcatttacccagaggtgaccactagtattatttttatagaagttacagatatttaatttc

SEQ ID NO: 987605 - DNA, 120 bp, Artificial Sequence
  ENSG00000281344_258 (sequence is synthesized)
ctaagaaaaccacaaccttgtctgttaagcttggagtgaggtagacagaggagagggcaggaagcacttttctcacattcaagctcaacatcatgtccagaggaaataggacagaaacct

SEQ ID NO: 987606 - DNA, 120 bp, Artificial Sequence
  ENSG00000281344_259 (sequence is synthesized)
tctttcccagtcggggggctatttcctaagggaaagcagggaagtgagtgttcctttcctaagggaaagcagggaagggagtgttcccctcgatggctttattttctgtttttaatctag

SEQ ID NO: 987607 - DNA, 120 bp, Artificial Sequence
  ENSG00000281344_260 (sequence is synthesized)
ttcgtcagatggaattttatgattcaggaattatcagtgtcacctatgagttattaatagaatagcaagttattttgaccagtgaggtggaggaaaaggaaatgataataagagtaactg

SEQ ID NO: 987608 - DNA, 120 bp, Artificial Sequence
  ENSG00000281344_261 (sequence is synthesized)
ctcactttatgggacaaggagatgaggtcagaggagagtaaaaataatccatgtgaaagattatgtaaaagttagctagataggaattattctactcctttccccaaataacttttgtag

SEQ ID NO: 987609 - DNA, 120 bp, Artificial Sequence
  ENSG00000281344_262 (sequence is synthesized)
ggtaatcctaattccttaacttaaaaataaggacaaaattatgatagaaaactagtttaagccttagagaaccagagaagtgtgctttatctttcatttccatatttatcttcacccttt

SEQ ID NO: 987610 - DNA, 120 bp, Artificial Sequence
  ENSG00000281344_263 (sequence is synthesized)
gctttttcaagctgtggacaaaaactccaccacctttagaggttctggcttatcctaataatttgaatctttccttattttggtttctaagctatcaattcattttcagcttaacctatt

SEQ ID NO: 987611 - DNA, 120 bp, Artificial Sequence
  ENSG00000281344_264 (sequence is synthesized)
ctggagcttggtactgagactgcagagaagggaggtaagaaaacctcaacatttctaaagtttggaagtgaacattggacatattcctttatggttcaagtgcaatgttataactcttca

SEQ ID NO: 987612 - DNA, 120 bp, Artificial Sequence
  ENSG00000281344_265 (sequence is synthesized)
atggtgatttagtaacttgtcacatctgtgattttcatgtgtttattctgcttttttatttggagtgccagagagttttgcttgggtccttcaacaattgtcttggtctgatacctggca

SEQ ID NO: 987613 - DNA, 120 bp, Artificial Sequence
  ENSG00000281344_266 (sequence is synthesized)
acacaacataataatcaatctgggtttgtacttttcattggaatgctgaaaatgtacagtttggcaaagattggaagggcagttctatggaactacaccaactgaggtcattggccacat

SEQ ID NO: 987614 - DNA, 120 bp, Artificial Sequence
  ENSG00000281344_267 (sequence is synthesized)
gaagatggccagatcttccaccagaaacagacaaatgatgagttttgaggtccaatgaagtggtcactctcataattatggcaaatttatgaactctgaaaacagttcaattgcatggcc

SEQ ID NO: 987615 - DNA, 120 bp, Artificial Sequence
  ENSG00000281344_268 (sequence is synthesized)
ttcttggatttttgtacagcttgaatgacagacttgtagactctgaagctgatggtgacagagaagagagccatggtgaaataagaagccacagtgatgatgctgaaatctccagggaaa

SEQ ID NO: 987616 - DNA, 120 bp, Artificial Sequence
  ENSG00000281344_269 (sequence is synthesized)
gtagcatgatccatgtggggtgaagacaaactcagatttcttcactttttgtcaggaaaccagatggtgtattatacagaaagctgaagaacaggctcccaggcagcccctttatcacac

SEQ ID NO: 987617 - DNA, 120 bp, Artificial Sequence
  ENSG00000281344_270 (sequence is synthesized)
ctccttctcctgttgctgggcatggagtgtttgtccctcaaggacaaagaggaattagatggaattgagtggcctccaatagctttgccatgggctttttcagcaaggacaataggaaaa

SEQ ID NO: 987618 - DNA, 120 bp, Artificial Sequence
  ENSG00000281344_271 (sequence is synthesized)
gaaacaataaaataattacgccatgggttctcccaagtcccttcactctttccctccatgcttagacgccaactactagtaatgtcttgatagctgaccttctagattttattattttac

SEQ ID NO: 987619 - DNA, 120 bp, Artificial Sequence
  ENSG00000281344_272 (sequence is synthesized)
ataccattttgaacctttcttgcttaatatttcatttaaaaatctcttcggccattgtatttttcctcatcaaaaatattctccaaatgttttatttccaattgtctctctacccttgct

SEQ ID NO: 987620 - DNA, 120 bp, Artificial Sequence
  ENSG00000281344_273 (sequence is synthesized)
ccaatcccattccacacaggtagctaccagtaatattttgacttcaattattttatatgctaactggaattatagactgtgataactggaagagaccttggagatcatctttccatcttt

SEQ ID NO: 987621 - DNA, 120 bp, Artificial Sequence
  ENSG00000281344_274 (sequence is synthesized)
ccctaccttctttcactgtcctaccactgcaggcttccagaagatatatagacaggctaaatgccccaccctaaatcccacctcagctaggaattgacatgggactagaacccaggtctt

SEQ ID NO: 987622 - DNA, 120 bp, Artificial Sequence
  ENSG00000281344_275 (sequence is synthesized)
ttcattgctagttaagggacctcaccaacctcatcccacaattttatatttttagtttgctggatgtcctaaagaagtagtttctgtaagacggatttgagtggtttatggccagattga

SEQ ID NO: 987623 - DNA, 120 bp, Artificial Sequence
  ENSG00000281344_276 (sequence is synthesized)
atttacaaggtgaccatccgtttttgaaggaaaaacaaacacacttctaaccaaatagaaatgactgtagttcatctattctgtccctcctttggcctccatgactggtcccacaggacc

SEQ ID NO: 987624 - DNA, 120 bp, Artificial Sequence
  ENSG00000281344_277 (sequence is synthesized)
agcgttctgctttcctggagcagctttgttgtactgagattgtccttagatccatctatcacatggtaacgttggccttcttttctctttttttggtcacttgctttgggcataggcaca

SEQ ID NO: 987625 - DNA, 120 bp, Artificial Sequence
  ENSG00000281344_278 (sequence is synthesized)
gctctccatgcttttgcttcaaatgtttctagaaagatggaacttaaaccagctggctattggagttgctgatcttctgggtatcttctaaatattccacataaaaccaggattttctcc

SEQ ID NO: 987626 - DNA, 120 bp, Artificial Sequence
  ENSG00000281344_279 (sequence is synthesized)
tgatagagacattgtgtttttttattcatgtgccctcaactgagatttataatttgatcagtaaattcttacttaccttaaactctaggctggcctttttctttatatttatatatctat

SEQ ID NO: 987627 - DNA, 120 bp, Artificial Sequence
  ENSG00000281344_280 (sequence is synthesized)
atctatatctatctatatatatatttatagattttttctttatatttttaagcagacccctccctagactttcactctaagttcaatttgaacacttctcacaccttcttttatagacat

SEQ ID NO: 987628 - DNA, 120 bp, Artificial Sequence
  ENSG00000281344_281 (sequence is synthesized)
aaaatgcacactttcacaaaataacactaataaaaaccttcagatctcattctacctccaccccctaaccattctcagaacttctcacttacctggcccacctagaagtcctaagatcac

SEQ ID NO: 987629 - DNA, 120 bp, Artificial Sequence
  ENSG00000281344_282 (sequence is synthesized)
tcttttccacactggcccagatctttggtctttgttcagggtccataatgtcttttgagttatattaagcatgcttactttaactatagtcagttctctgacacagacagaattcatagt

SEQ ID NO: 987630 - DNA, 120 bp, Artificial Sequence
  ENSG00000281344_283 (sequence is synthesized)
gagttttggataaggtcttttgttttgttttgtttttttgtcaaggatccaaattgacccaacttgaatttttaaagaagaacatgtcaggggtggatgccaaagaggcccactctgcaa

SEQ ID NO: 987631 - DNA, 120 bp, Artificial Sequence
  ENSG00000281344_284 (sequence is synthesized)
atatattttgcaattaacagagttcaagtgagctcttctgagtttggtggtggctgttgttgcttggggatctctttctttcacataagtctctgtctattgtttccctttgtgtgtgct

SEQ ID NO: 987632 - DNA, 120 bp, Artificial Sequence
  ENSG00000281344_285 (sequence is synthesized)
tgtgtgtgtgctgtgggacatgataaacaagtatcattttgtttcatgtaattacagaatcatgcttttatgtttacctttcatatccactttaaggatagaatctgttttacaattggg

SEQ ID NO: 987633 - DNA, 120 bp, Artificial Sequence
  ENSG00000281344_286 (sequence is synthesized)
actgcttctatgaccaattctgtagtgttgccttcagttcaggcacatgcctctgaaaccttaatcgcaaacagatgctgttctgaatcaagagtttccctctttggctactcagcctga

SEQ ID NO: 987634 - DNA, 120 bp, Artificial Sequence
  ENSG00000281344_287 (sequence is synthesized)
gcaatgagctgcctgacttggatcctacaggcttcttgaaaaactccacaggctgccttactagcacactggtaacatgcagaagattgatattttccaggcccaagcaagactttgaaa

SEQ ID NO: 987635 - DNA, 120 bp, Artificial Sequence
  ENSG00000281344_288 (sequence is synthesized)
tagtacctagcagttgcagagagctatttattttcccctcctcccagaagtgttttcacatacatgatctcattttatccttcaaatagtccttggagttaagtaggaaaagcagtattt

SEQ ID NO: 987636 - DNA, 120 bp, Artificial Sequence
  ENSG00000281344_289 (sequence is synthesized)
tcccctaggaacctgaggtccagagatgttaagtaactcgctcaaggtcacacaattagccttgacttgtagtctgttattctttccaccaaaatgacactagcatttactttgtcttgt

SEQ ID NO: 987637 - DNA, 120 bp, Artificial Sequence
  ENSG00000281344_290 (sequence is synthesized)
ttcaaagttgttcaaagtcttttaggtgctggttggatccaagctgtcattcttatagctcagatttaaataaaatttgtaacatcttttagtgtttcatgtgtttttttttttccccta

SEQ ID NO: 987638 - DNA, 120 bp, Artificial Sequence
  ENSG00000281344_291 (sequence is synthesized)
ggccttaagatgtgtctaaagtggtaattttgtggggccttaaaaattatgtgggagagagaacctttataaataaaagttgaaggaaaaaaattatttggggagcttgttcagtagatc

SEQ ID NO: 987639 - DNA, 120 bp, Artificial Sequence
  ENSG00000281344_292 (sequence is synthesized)
atggttcaatagagcaaagatgcagtcgtaaatttggcattctataacaaaaaccacccatgtgattctgaattaggaggtctgtgtaatcactgttctcagagctaaagtaagcaaggc

SEQ ID NO: 987640 - DNA, 120 bp, Artificial Sequence
  ENSG00000281344_293 (sequence is synthesized)
atgtaagacgtctgaggctcactttccttatttaaaaaacaaaggcaagactagaatcaattagtaaattgtctccagaaattaacatagattctaatctcctgtaaacttaacagctcg

SEQ ID NO: 987641 - DNA, 120 bp, Artificial Sequence
  ENSG00000281344_294 (sequence is synthesized)
catcagcattcttatgatggaagaaacagtatttgtctgaaaaaataccttggagttagaaagtcccccacaagggactgggttttctggagagggagggaggaagaatagaggagaatt

SEQ ID NO: 987642 - DNA, 120 bp, Artificial Sequence
  ENSG00000281344_295 (sequence is synthesized)
tattgaaagacatgaagttgggaactctgtaggttaaggaccaacagagaaatccctaggagtggatggccagaaaggactctggagaaagagggatgattggtatagagtttttaaatg

SEQ ID NO: 987643 - DNA, 120 bp, Artificial Sequence
  ENSG00000281344_296 (sequence is synthesized)
tttgctctgtgatcttcatatagtcagtaaaatctatattttgtgtgactggtaactttcctataggaattcatgaagaggccgagctttgctttcagaatgacataatgcagaactgag

SEQ ID NO: 987644 - DNA, 120 bp, Artificial Sequence
  ENSG00000281344_297 (sequence is synthesized)
cagaagagatactgagaatataagtcttgggaatttgcagaagtcttggggacagctttggatttctgcaaactagaactgaaggcttaaatcaacttcacttaactatccatgggatca

SEQ ID NO: 987645 - DNA, 120 bp, Artificial Sequence
  ENSG00000281344_298 (sequence is synthesized)
atgtgatccaggtgatgtctggggtaatatatgacaataagcatgaagatctagaaaatattatttaaaaaatactcttatggctttagaacaggggtctctggtaccccacagaggtac

SEQ ID NO: 987646 - DNA, 120 bp, Artificial Sequence
  ENSG00000281344_299 (sequence is synthesized)
cggtctgtggtctcttaagaaccaggatgcacagcagaaggtgagctataagcaagtgagtgaagcttcatctctgctccccatcactcatagtacagcctgagatctgcctcctgtcag

SEQ ID NO: 987647 - DNA, 120 bp, Artificial Sequence
  ENSG00000281344_300 (sequence is synthesized)
tgcacaataaatgcaatgcatttgagtcatcctaaaactgtcttcctcccactggaccatggaaaaattgtcctccatgaaaccagtccctggtgcccaaatggttggaaactgctgctt

SEQ ID NO: 987648 - DNA, 120 bp, Artificial Sequence
  ENSG00000281344_301 (sequence is synthesized)
tagaaaaactaggataagattagatatctcataataaaggtgcacatcaagaaagtgaatgtgaacaaagatgtttgcaaacagagtacatgaagatcaagaaccttgagatgcagttcc

SEQ ID NO: 987649 - DNA, 120 bp, Artificial Sequence
  ENSG00000281344_302 (sequence is synthesized)
agctttggccagtttgcagaatgattttaactcagttttaatgtgtttgttccctttcccatgtaatttataatggtagttcacatggactgttgatgcttgtactctagcagccagaac

SEQ ID NO: 987650 - DNA, 120 bp, Artificial Sequence
  ENSG00000281344_303 (sequence is synthesized)
cagaaaactgggaattttctacatctggaaatatttacctcgggatcttgagaaagagttcttggtctgaagaagcagaggatggggaggagcaaggcagagaacaacagaaccaaagtg

SEQ ID NO: 987651 - DNA, 120 bp, Artificial Sequence
  ENSG00000281344_304 (sequence is synthesized)
ttaatttccagtttagtaaagaacggacattttacatgaatgcaaggaacagaaatgtcctctttacagagaaataggcatccagatatgttgtcttaacgatactgggatactagacta

SEQ ID NO: 987652 - DNA, 120 bp, Artificial Sequence
  ENSG00000281344_305 (sequence is synthesized)
gtatactagagagtcgcaaatttagaggacaacaagattctactggaatgcttatgtcagatggtttcaatcctttcagtaaaaaaagggaattagcattatctgctgaaaagtaagggt

SEQ ID NO: 987653 - DNA, 120 bp, Artificial Sequence
  ENSG00000281344_306 (sequence is synthesized)
tgggattgtagaagtttgtggccttcaaaagaggtctgaactagttttggaagaatgaagctagggaggcagtgataaattaatgacaggacctgcccatgagtggctagggccaaagag

SEQ ID NO: 987654 - DNA, 120 bp, Artificial Sequence
  ENSG00000281344_307 (sequence is synthesized)
ttcctgtactgtcttatataaactgctaaaataaaaactccttctaccttcttactgtcaatgaaattcaattccctttgagaatactgcttacatggtttcttattctcaccaccctcc

SEQ ID NO: 987655 - DNA, 120 bp, Artificial Sequence
  ENSG00000281344_308 (sequence is synthesized)
ctgcccagccccactccaccacagtgatggaaccaggagagaaaagcagagaaaataccaatattcctctggtgttctctttcaattattcttgcaattagcaaatatttgttgagtagc

SEQ ID NO: 987656 - DNA, 120 bp, Artificial Sequence
  ENSG00000281344_309 (sequence is synthesized)
tactagtctaggtgttctggtctaggtgctggaagaagcttattttaactcttttgataagaatacctcttttgaagcctatgctgtataaaaataccacctcttctttttgccatcttt

SEQ ID NO: 987657 - DNA, 120 bp, Artificial Sequence
  ENSG00000281344_310 (sequence is synthesized)
taccaaattgcacatttgttgaaggtattgatgcttgtctttcaagtctggattatgggtatgagttgagtggagcattctttgagctgtccctctgctcttcagatgattgagaccata

SEQ ID NO: 987658 - DNA, 120 bp, Artificial Sequence
  ENSG00000281344_311 (sequence is synthesized)
ccctaaatctcttttcattaagccattgcatacaactgaaaagatttattggatatcacaatcttgctctgggacactttaacctattcagcaaatttaactatgagtgtaatggccata

SEQ ID NO: 987659 - DNA, 120 bp, Artificial Sequence
  ENSG00000281344_312 (sequence is synthesized)
cccttgttttgatctttgcctcaaggttgagtcttgatcagcgtttgttgctcagttgtttattttaccttatgggattgaaaagcagttgctttctctaaccctgttaagtccccaaat

SEQ ID NO: 987660 - DNA, 120 bp, Artificial Sequence
  ENSG00000281344_313 (sequence is synthesized)
tcctggactttttcccttttattactgattgcatattggtcgatccttttctaagtacatttcttccttctaataccttgctatattcgttttctggagctgatgttacaaagtcacaga

SEQ ID NO: 987661 - DNA, 120 bp, Artificial Sequence
  ENSG00000281344_314 (sequence is synthesized)
aactgggtggcctaaacactagaaatttattgtctcccatttctggaaactagaagtctgagattaaggcatcagcagagtgggtttcttctgagggctatgagggataatctatctgtt

SEQ ID NO: 987662 - DNA, 120 bp, Artificial Sequence
  ENSG00000281344_315 (sequence is synthesized)
taagcctcttttctagcttttggtggtttactgacaatctttgctgtctcttgaccggtggatgaatctccctatttctgccttcaacttcacatggcactctccctgtatgcatgcctc

SEQ ID NO: 987663 - DNA, 120 bp, Artificial Sequence
  ENSG00000281344_316 (sequence is synthesized)
tgggtccaaatttcccctttgtataatgataccgattatattaggacttcctttaaataattatccgtatgtccaattctggtgtactggggattaaggatgacagtatatcttttttga

SEQ ID NO: 987664 - DNA, 120 bp, Artificial Sequence
  ENSG00000281344_317 (sequence is synthesized)
ggagctaggaggacacagtttaatccgtgatacttaccaaatacagccaacagcaactacgacatgctactgacattctgttttctaacctttctttcctagggttacaagttagttaag

SEQ ID NO: 987665 - DNA, 120 bp, Artificial Sequence
  ENSG00000281344_318 (sequence is synthesized)
tatatgatttgccttccaagttacctcaagcaaaagttttaacaaatgttaccagttttagcccgttctaaattttataaccaccaaaatacaggctcctaagccaatgccacgtattct

SEQ ID NO: 987666 - DNA, 120 bp, Artificial Sequence
  ENSG00000281344_319 (sequence is synthesized)
ttcacattccaatttgtggttctggagacaccaaaaaattaacataatattcacaatagttgccgatggaggctggaaaacatttgcaatattagactactaatattactcttaaattta

SEQ ID NO: 987667 - DNA, 120 bp, Artificial Sequence
  ENSG00000281344_320 (sequence is synthesized)
taaatagtccatttgtactcttgctatctccctgcaaatgttagaggaggtgtttctgactccagatacttttttgcctgcaccagttattttagtttctttctttcttgctttctttct

SEQ ID NO: 987668 - DNA, 120 bp, Artificial Sequence
  ENSG00000281344_321 (sequence is synthesized)
ctttttttgtttttgtagttttgtacctgtactgtacttgtaggatcattttgaagagagaggaagtattacaattagtcctatgttcaaagaggtaaaagcaactagaaaagagaagtg

SEQ ID NO: 987669 - DNA, 120 bp, Artificial Sequence
  ENSG00000281344_322 (sequence is synthesized)
gcagcacagaaaagcagtagaaatatagaaccaattttctgagcatacagagaaagaacaaatgacttgtttaaaagggtccttttttaaaattatactttaagttctgggatgtatgtg

SEQ ID NO: 987670 - DNA, 83 bp, Artificial Sequence
  ENSG00000281344_323 (sequence is synthesized)
gtctcccattattattatttgggagtcgtaagtctctttgtaggtctctaaggacgtgctttatgaatctgggtgctcctgta

SEQ ID NO: 987671 - DNA, 60 bp, Artificial Sequence
  ENSG00000281344_324 (sequence is synthesized)
ttagatcttcctccatccgtttattttgagtttagcaagactaataaagaaaaaaaagag

SEQ ID NO: 987672 - DNA, 70 bp, Artificial Sequence
  ENSG00000281344_325 (sequence is synthesized)
aactaaagagcttctgcacagcaaaagtactgccatcagagtgaacaggcaatttatccagaatctacaa

SEQ ID NO: 987673 - DNA, 74 bp, Artificial Sequence
  ENSG00000281344_326 (sequence is synthesized)
gtgggcaaaggatatgaacagccacttttcaaaagaagacttttatgcagccaacaaacacatgaaaaagtgct

SEQ ID NO: 987674 - DNA, 65 bp, Artificial Sequence
  ENSG00000281344_327 (sequence is synthesized)
atcccattactgtatatatactcaaaggattataatcatgctactatacagacacatgcacacct

SEQ ID NO: 987675 - DNA, 120 bp, Artificial Sequence
  ENSG00000281344_328 (sequence is synthesized)
atatatactcaaaggattataatcatgctactatacagacacatgcacacctatgtttattgtgggactatacacaatagcaaagatttggatccaacccacatgtccatcaatgataga

SEQ ID NO: 987676 - DNA, 120 bp, Artificial Sequence
  ENSG00000281344_329 (sequence is synthesized)
tgaacaatgagaacacttggacatagggcagggtacatgacacactggggcctgtcatggggtggagggatggtggagggatagcattaggagaagtacgtaatgtaaatgacgagttaa

SEQ ID NO: 987677 - DNA, 84 bp, Artificial Sequence
  ENSG00000281344_330 (sequence is synthesized)
cacactggggcctgtcatggggtggagggatggtggagggatagcattaggagaagtacgagatggcacatgtatacatatgca

SEQ ID NO: 987678 - DNA, 120 bp, Artificial Sequence
  ENSG00000281344_331 (sequence is synthesized)
ataaaaaataaaaattacaaaaacttaaaaaaagaaaataaaaataagaaaccatatgtttgcatgtgtcattatagtagactgatttatatttcagttactttctaatgcattgtgtcc

SEQ ID NO: 987679 - DNA, 120 bp, Artificial Sequence
  ENSG00000281344_332 (sequence is synthesized)
ttgtgtcccagtagattagttcacatttgcctctttttttcctctatttattctgggccccataatctattacttgagcttgtccttcttcatcacccttaatactctcactttctgttt

SEQ ID NO: 987680 - DNA, 120 bp, Artificial Sequence
  ENSG00000281344_333 (sequence is synthesized)
ctctgctctgcttggcctgaaaaatgtcagcagcaaactatatctgatcattgtcatcctcctctgacatgcaacactattaaggatttatgaaggaaatacatagtaagctcctacacc

SEQ ID NO: 987681 - DNA, 120 bp, Artificial Sequence
  ENSG00000281344_334 (sequence is synthesized)
tttatgatgtttagttcaactgtgttctcaacactgctagggagtcttgcaagagttacctcactctctctcttttctctttatggatatgctgtataagcataagacacctcttaaaga

SEQ ID NO: 987682 - DNA, 120 bp, Artificial Sequence
  ENSG00000281344_335 (sequence is synthesized)
ataaccttgtttttgttatttattccactatgggaaacctgatctagtcagtaatttttcagtggttacttttagcttctgtaacattcttactacctgcatccatttgttccattttcc

SEQ ID NO: 987683 - DNA, 120 bp, Artificial Sequence
  ENSG00000281344_336 (sequence is synthesized)
tttctgtttcaatatccctcctcttgttcaattcagtcctttgccaaggtgttctatcctaccttctccacctctttaggagccttactccagcaaatgcctcctcttatccttcatttt

SEQ ID NO: 987684 - DNA, 120 bp, Artificial Sequence
  ENSG00000281344_337 (sequence is synthesized)
aaactctgactcttgattggctctttcacctgagcatactcattgctcagtttgtctctatctaaaaaatcatttttagactttatacctttattttctttgtaaatgtctttatatata

SEQ ID NO: 987685 - DNA, 120 bp, Artificial Sequence
  ENSG00000281344_338 (sequence is synthesized)
ttttcttataacctcccgtccctccttctttcttcccctctcccattgaaaatcaacaggatagtatttggagacttttgtttccctgggattgacacatctcacagctaagaatgaaag

SEQ ID NO: 987686 - DNA, 120 bp, Artificial Sequence
  ENSG00000281344_339 (sequence is synthesized)
ccatgaaatatctaatattctaagttcggagaaccactaggtcacctcctggacagtaaaatttcaatgtatgagcaacaaacaatcatgctaggatgtaaaatgattaaaatgtcactt

SEQ ID NO: 987687 - DNA, 120 bp, Artificial Sequence
  ENSG00000281344_340 (sequence is synthesized)
tctgagtattagacaattcatatggtttttaacaaacagtggctttatatccattgtaatgcctcttttagcatcaacattcagaaattcacattccatttttttggacacttcatgaga

SEQ ID NO: 987688 - DNA, 120 bp, Artificial Sequence
  ENSG00000281344_341 (sequence is synthesized)
ttttgaaactactctttattctgagattctgttaattgtatttagaatggaccttgatagttttcctgctcataattttggtaaaactgtattgcattttgaggaagttaatatcaaatg

SEQ ID NO: 987689 - DNA, 120 bp, Artificial Sequence
  ENSG00000281344_342 (sequence is synthesized)
ttcctatataaactttgactagaaaatgatgtatggagatattcacacatctataaagtttggttatttaaatccaagagatgttttgtcatgaatatcttaactacagagacatggagc

SEQ ID NO: 987690 - DNA, 120 bp, Artificial Sequence
  ENSG00000281344_343 (sequence is synthesized)
tgcttggatagaacaaactctgtgctttaatggttgtatagtattcttttcatatgtatatctgtaattttacttctgtttagccattttcttctttttattatgtatacattttttatt

SEQ ID NO: 987691 - DNA, 120 bp, Artificial Sequence
  ENSG00000281344_344 (sequence is synthesized)
tctgtagcttttggggtacaagattttatttcatggatgaattgtatagcggtgaagtctgagattttagtgcacctgtcacccaagtagtgtacattgtatccaatatgtagctttcta

SEQ ID NO: 987692 - DNA, 120 bp, Artificial Sequence
  ENSG00000281344_345 (sequence is synthesized)
tcccttactcttggccccttctgagtttctaaagtccattataccacttggtatgccattacatacccatagcttagatcctacttataagtgaaaacatatggtattttgttttccaat

SEQ ID NO: 987693 - DNA, 120 bp, Artificial Sequence
  ENSG00000281344_346 (sequence is synthesized)
cctgagtcactttacttagaataatggccctaagttccatccaagttgctgcaaaaaaaccccattatttcattcttttttaatggctgagtagtattccatggtgtatacatactgtat

SEQ ID NO: 987694 - DNA, 120 bp, Artificial Sequence
  ENSG00000281344_347 (sequence is synthesized)
tttcttaatccacacatcagttcgtggacacagattggttccatatctttgcaattgtgaatgaattgtgttgtgataaacaggcatgtgcacatctctttttgagataatgacttattt

SEQ ID NO: 987695 - DNA, 120 bp, Artificial Sequence
  ENSG00000281344_348 (sequence is synthesized)
tggattgaatggtagatctacttttagttgtttaagaaatcttcatactgttttccatggagcttgtactagcttacattcccaacagcagtttaaacgttcccttttcaccacatttat

SEQ ID NO: 987696 - DNA, 120 bp, Artificial Sequence
  ENSG00000281344_349 (sequence is synthesized)
cagtttaaacgttcccttttcaccacatttatgccaacatttgttgttttttgactttttaataatggtcactctggctgggttagatggtatctcattatggttttaatttgcatttct

SEQ ID NO: 987697 - DNA, 120 bp, Artificial Sequence
  ENSG00000281344_350 (sequence is synthesized)
ttctctaatcattagtgatgttaagcatttttcatttctttattggtcatttgtatatcttcttttgagaagtgtctattcatgtcatttttccactttttgatgggattatttgttttt

SEQ ID NO: 987698 - DNA, 120 bp, Artificial Sequence
  ENSG00000281344_351 (sequence is synthesized)
tgctgatttgcttgaattccttgtagattctggatattagtccttggtcagatgcatagcttgcaaatattttctcccattatgtgggttgtctatttactctgatgattatttctttcg

SEQ ID NO: 987699 - DNA, 120 bp, Artificial Sequence
  ENSG00000281344_352 (sequence is synthesized)
ctatgcagaacattttagttcaattaggtcccatttttatttatttatttatttgcttttttgttcatttacttttggggtcttagtcataaattctttgtcgaggccaatgtccagaag

SEQ ID NO: 987700 - DNA, 120 bp, Artificial Sequence
  ENSG00000281344_353 (sequence is synthesized)
agtttttccctaggctttcttctagaatttttaaggtttcatgtcttagattatgtctttaatcttgatttgattattgtatgtggtgagagatagggatccagtttcatccttctacat

SEQ ID NO: 987701 - DNA, 120 bp, Artificial Sequence
  ENSG00000281344_354 (sequence is synthesized)
gtggctatccagtttcccagcacaatttactgaatagtgtgttctttctccaatttatgtttttgcacactttgtccaagattagttgcttgaaagtatttggctttatttgtgagttct

SEQ ID NO: 987702 - DNA, 78 bp, Artificial Sequence
  ENSG00000281344_355 (sequence is synthesized)
attagttgcttgaaagtatttggctttatttgtgagttctttacactggtcccatggtttgtatctctccttttatat

SEQ ID NO: 987703 - DNA, 120 bp, Artificial Sequence
  ENSG00000281344_356 (sequence is synthesized)
aatgtgatgcctcctaatttgttctttttgtttaggattgctttggctatctgggctcttttatggttccatatgaattctaggattgtttcttctaattctgtgaaaaatgatgttggt

SEQ ID NO: 987704 - DNA, 120 bp, Artificial Sequence
  ENSG00000281344_357 (sequence is synthesized)
agactgctttgggcagtttggtcattttcatgatattgattcttctaatccatgggcatggggtgtagttccattcatttgtgtcatctatgatttatttcagcagtgttttctagttct

SEQ ID NO: 987705 - DNA, 120 bp, Artificial Sequence
  ENSG00000281344_358 (sequence is synthesized)
ccttgtagaggtctttcacctccaaggttaagtatattcctatgtgttttatttatttatttttgcagcgattgtaaaagggattgagttcttgatttgattttcagcttggtcataaga

SEQ ID NO: 987706 - DNA, 120 bp, Artificial Sequence
  ENSG00000281344_359 (sequence is synthesized)
agcaacagtatgcttccagtcgcctctgctcctttatgttattattgtcacacattttagttctacatatgttagaaattccacactacattattattatttttgctttacatagacaac

SEQ ID NO: 987707 - DNA, 120 bp, Artificial Sequence
  ENSG00000281344_360 (sequence is synthesized)
aaataaatgtttaaaaaaagaaaaagttatgtatttatatatatctttaccatttatggtgctcttattctttgacattgatacaattttcatctggtattatttttttctgtctgaaaa

SEQ ID NO: 987708 - DNA, 120 bp, Artificial Sequence
  ENSG00000281344_361 (sequence is synthesized)
tctggtattatttttttctgtctgaaaaactttaatattctttaatactaatcttctgtgatgaatctctcaacatttatatgtctaagtgaaatatgttaatttttaattgtttttgaa

SEQ ID NO: 987709 - DNA, 120 bp, Artificial Sequence
  ENSG00000281344_362 (sequence is synthesized)
aaattttagattgacaatttttttttcttttagcaatttaaagatgttatttgattgtcttctagcttgcatagtttacaatgagaagtcttcaggtactcttgttttttgtttctctgt

SEQ ID NO: 987710 - DNA, 120 bp, Artificial Sequence
  ENSG00000281344_363 (sequence is synthesized)
tcattatgtgtctttttcccctctttggttgttttaagattttctttttatcatcagtttttggtaatttatttatgatatgctcagtttgctcctggatttgacattgcttgcttctag

SEQ ID NO: 987711 - DNA, 120 bp, Artificial Sequence
  ENSG00000281344_364 (sequence is synthesized)
acctcagacagtttcttttcttgctatgtgtgtgagccaccacacctgaccgagtgtctttattttattgtcttccttcaataattgttgggctttgtttcagcaggtggttaattcact

SEQ ID NO: 987712 - DNA, 120 bp, Artificial Sequence
  ENSG00000281344_365 (sequence is synthesized)
tggagatctggttgacatttttgaggaccattttaaaaacagatatagtgcatctagaatagtaactctggatcactagcatttctattgtttcttttcctgttggtttcagttgtttct

SEQ ID NO: 987713 - DNA, 120 bp, Artificial Sequence
  ENSG00000281344_366 (sequence is synthesized)
atttccttttacactttataatttttaattgaatgataaacatcacatatgagaaaatcgtagagataatttgaccgtcttatagacacccctttttgctaaattttcagactctagacc

SEQ ID NO: 987714 - DNA, 120 bp, Artificial Sequence
  ENSG00000281344_367 (sequence is synthesized)
ctgtgacactaacgaatcagcaaatgtattcagagaaaaagagggacagaattttgtgttttatctcagttcacttcctggtttttgaagagctttatctttcatgtcctgactgccttg

SEQ ID NO: 987715 - DNA, 120 bp, Artificial Sequence
  ENSG00000281344_368 (sequence is synthesized)
atagttttgaatgctttcaaacagatgttttaattttatcgaacttttctagcttttcttatagggaggtttgattcaatacaagcttttccatggaaatagaaattttttatattaatt

SEQ ID NO: 987716 - DNA, 120 bp, Artificial Sequence
  ENSG00000281344_369 (sequence is synthesized)
ttgaacctaggcattttattaaattatcttatctataattactttttgtgtgttttccaactgtacaaattatttgcaaatgcttctcattttagaattttgcatttcttatttcaccag

SEQ ID NO: 987717 - DNA, 120 bp, Artificial Sequence
  ENSG00000281344_370 (sequence is synthesized)
actagtccaattgaataggttagtactttcagaaaaattttagataatagttgtaaacaggaaaaactatattacatttatgtcacaaggttgttgtgatgactaaattaaaacatgtaa

SEQ ID NO: 987718 - DNA, 120 bp, Artificial Sequence
  ENSG00000281344_371 (sequence is synthesized)
agtacctagaaaagaatgacggtaatgatagtgatgatgatgatggtgatgatgatgatggatatccttgtgttgtttctgactgtaacaggggtgttcctacggtttccccactaagaa

SEQ ID NO: 987719 - DNA, 120 bp, Artificial Sequence
  ENSG00000281344_372 (sequence is synthesized)
ttatgttaaacatacaaggatacatttacctattctttttttaattaagaattttcatctcaaatcaatattgaattttatcaaatgtctttgtaggacatatggagaagaccatatgat

SEQ ID NO: 987720 - DNA, 120 bp, Artificial Sequence
  ENSG00000281344_373 (sequence is synthesized)
ttttcattttgattcattaatatggtgaattatatttattttctcatattgaatcagaactgtcttggtaggagccccatttaatcattttgtggtattctgtaaatatgctgctagatt

SEQ ID NO: 987721 - DNA, 120 bp, Artificial Sequence
  ENSG00000281344_374 (sequence is synthesized)
ttaattttaataatttatttaaactgttttgtattactactcatatgtgaaattgatctatagtttttctttttgggctgctcatttcaggttttggttctattatgtttttataacaaa

SEQ ID NO: 987722 - DNA, 120 bp, Artificial Sequence
  ENSG00000281344_375 (sequence is synthesized)
tatttgataagttgttctttttcaatgctttgacacttttaattagcactcatgtcactggtttgtaaaagcttgggagaatttagttaattaaacccactgggcctggtacttttcttt

SEQ ID NO: 987723 - DNA, 120 bp, Artificial Sequence
  ENSG00000281344_376 (sequence is synthesized)
ctctttctctctctcttttttttttttttttgtagggtgatcttaatttttttttttttattacatagtctatctcttttgggtcagttttggcagtctgttttcccagaaaacaatcta

SEQ ID NO: 987724 - DNA, 120 bp, Artificial Sequence
  ENSG00000281344_377 (sequence is synthesized)
tgtctttcaagatcccaagtttatttacatagaattgactcagttgattttctgtgtagacatgatgtgcaaaatgttgaaaacttagttggcatgggcattaataactcatagcagatg

SEQ ID NO: 987725 - DNA, 120 bp, Artificial Sequence
  ENSG00000281344_378 (sequence is synthesized)
ctacaaccaaccacaatatatatcaaacacaaatatctgatatggtcataatagtgcctattggctaagtattagccattgtatctgtatttattctctgtattattttcccattctcac

SEQ ID NO: 987726 - DNA, 120 bp, Artificial Sequence
  ENSG00000281344_379 (sequence is synthesized)
ttcttattttatgattttattctgtcctttttttgattaggtaagctaataatttatctatttcattattttaaacagtatgctcttggctttatttgttattttatcttttttcttgtt

SEQ ID NO: 987727 - DNA, 120 bp, Artificial Sequence
  ENSG00000281344_380 (sequence is synthesized)
ttctaatgaatgaattgtttgtgccttatttaactcattttattttcatcaggtttacttcatttctctctttatgtcttgtgtgattttattttgttttatgaatatatgttttatgaa

SEQ ID NO: 987728 - DNA, 120 bp, Artificial Sequence
  ENSG00000281344_381 (sequence is synthesized)
ttaataatctttttatataatttgttttttattgcttttgtgtgtatgcatgtatgtattcacaggcacatctatgcatgcacatgcttccttgtaattcaaagatttattttaaattct

SEQ ID NO: 987729 - DNA, 120 bp, Artificial Sequence
  ENSG00000281344_382 (sequence is synthesized)
gttagtggtcatcttaaaaccttgcaatttaatatgctttagcatttattccagccagtgtctgttgattcaccattagagcaatgacatttggtagtactcttctactttagtggttct

SEQ ID NO: 987730 - DNA, 120 bp, Artificial Sequence
  ENSG00000281344_383 (sequence is synthesized)
cagcactggtccacattagtatcatctgggagcttttaaaaaataccagtgcctctaagattaagagataattattttcaaaaagtcccccatatgactttaaagagcagctatagttga

SEQ ID NO: 987731 - DNA, 120 bp, Artificial Sequence
  ENSG00000281344_384 (sequence is synthesized)
gagccactgttttaccctctctcccctccaccaacaattttaatcaattatatattatttaaaaatttttttctagtctttatgtttttgaaagatgattggccgtatgtaggagaaaat

SEQ ID NO: 987732 - DNA, 120 bp, Artificial Sequence
  ENSG00000281344_385 (sequence is synthesized)
acgcatacttgcacatcttctgtcttctctctttctcaccttcatctaatattatcattcattcttataatttgtaacctatgcattctgttttgctgccatctttatccgtgattaaat

SEQ ID NO: 987733 - DNA, 120 bp, Artificial Sequence
  ENSG00000281344_386 (sequence is synthesized)
agattccatagtcactgtgagtaatttttctccattcattttttgattgactgaagtttattgtctagtaggttcttcagaagtgttcatggaagtcacatctatctgtttcctttatat

SEQ ID NO: 987734 - DNA, 120 bp, Artificial Sequence
  ENSG00000281344_387 (sequence is synthesized)
ttaaatgacagtttggctggatatagaaatcatggatcacatattattttcctgggttctttgtatcatatttctgtcttccagcatcaaatattgttgtgaactataaggtcagtctaa

SEQ ID NO: 987735 - DNA, 120 bp, Artificial Sequence
  ENSG00000281344_388 (sequence is synthesized)
tttttcttctttgtattaagtatgggaaagaaactaatactgtaacaaagtacaaaaatacagtgagttaactaagattcaaccttgtatcactctcatgtatcagtctggctggtctaa

SEQ ID NO: 987736 - DNA, 120 bp, Artificial Sequence
  ENSG00000281344_389 (sequence is synthesized)
gttatcagagcaactgctgcgcaaggtcacccagagagccatttcttccatgttgttgctccactatccctttttgggcattttgtcaccctcaaaatcaaaagtgggatgttggcaaat

SEQ ID NO: 987737 - DNA, 120 bp, Artificial Sequence
  ENSG00000281344_390 (sequence is synthesized)
ctaccttccagcttgcaaaagaggaaaagaggcaaaatacagagaaagcagattttctttaaattgcaaatgactttacatacttttgtacatattcaatattcagaacttgctcatggc

SEQ ID NO: 987738 - DNA, 120 bp, Artificial Sequence
  ENSG00000281344_391 (sequence is synthesized)
caccgtagctaactgaaaaaaaaagctagaaaatgcagtatctagctgggtggccttagagttagaaatagaaaatttaggaagaacaaatatgagtccacttcaaacttgtaggttact

SEQ ID NO: 987739 - DNA, 120 bp, Artificial Sequence
  ENSG00000281344_392 (sequence is synthesized)
taataatcttagcctgaatgcccaaagtttttgttgttgttgttttgacatttgaagacctatactatcactaggaaatgtttcagcattgataaaattgcatgaggttttctgcttttt

SEQ ID NO: 987740 - DNA, 120 bp, Artificial Sequence
  ENSG00000281344_393 (sequence is synthesized)
taattttggtaaggattttcggtttaagctataggttcttcaaaattatgtgttaaattttattttatgttttatttattgtgtgttccccccaccaccctattttttttttttttggtc

SEQ ID NO: 987741 - DNA, 120 bp, Artificial Sequence
  ENSG00000281344_394 (sequence is synthesized)
tgttttccatgtctattattttgcttgctttcctcaatcctgctcttttgtgccttagtatgaattcagtgatggctctttgtgctgcttaatgtagccttgatttcttggatggcttta

SEQ ID NO: 987742 - DNA, 120 bp, Artificial Sequence
  ENSG00000281344_395 (sequence is synthesized)
tttatttatttttctatttatttttcaagtctgccagctcatgtttcatctcctccagctgtctgctttgagctttttgattcattaggtgcctagtattcacggccatatttatttggt

SEQ ID NO: 987743 - DNA, 120 bp, Artificial Sequence
  ENSG00000281344_396 (sequence is synthesized)
catgatttttatctgggcagtgacaatattgttctggtgtgtattcatcacctgccacttgtttttcccacatttttcttccttttcctgaaagtaactttgtatagatccttggctggt

SEQ ID NO: 987744 - DNA, 120 bp, Artificial Sequence
  ENSG00000281344_397 (sequence is synthesized)
tctttttgtgttatttcttttgtgaatgaggttaattcctccagttattttcaagaggttccttcaggggagagaatagagtagtgttccaggcaagcagtaactcctccacagtaaagc

SEQ ID NO: 987745 - DNA, 120 bp, Artificial Sequence
  ENSG00000281344_398 (sequence is synthesized)
tccttatgactcaggggtgtgtgtgtgtgtatgtacactattttaaccttcgtttttctctagttcaaagaaatcagcaattgctggattactcataattcagatccatttccttcaccc

SEQ ID NO: 987746 - DNA, 120 bp, Artificial Sequence
  ENSG00000281344_399 (sequence is synthesized)
ttcctcaaggatacactgcttctcagaaatgtgtgtgtttccttgttcagcctcaccttccctgcctgttctctgggctcagagaaggtccagataagctccctctaaagaccaggcatc

SEQ ID NO: 987747 - DNA, 120 bp, Artificial Sequence
  ENSG00000281344_400 (sequence is synthesized)
ctgttctcattgttctagacaaggtttgtggttttgcctctcatattgtgtcacatactttgaactgtactctacctggtttagttgagacttttttttttttcgagacggagtctcgcc

SEQ ID NO: 987748 - DNA, 63 bp, Artificial Sequence
  ENSG00000281344_401 (sequence is synthesized)
ttgagactttttttttttttctgcaagctccgcctgccgggtccacgccattctcctgcctca

SEQ ID NO: 987749 - DNA, 88 bp, Artificial Sequence
  ENSG00000281344_402 (sequence is synthesized)
atttcaccgcgtgatctgcccaccttggcctcccagttagctgagattctcagccacagatgtctataggtatttccctgcactcctg

SEQ ID NO: 987750 - DNA, 120 bp, Artificial Sequence
  ENSG00000281344_403 (sequence is synthesized)
ctcagccacagatgtctataggtatttccctgcactcctgtttgaacttccctgttggcagctcttactcaaatattgtagttcgaggttacagatgtgttataactttatcaaaaatta

SEQ ID NO: 987751 - DNA, 120 bp, Artificial Sequence
  ENSG00000281344_404 (sequence is synthesized)
ttatttttttcttttttagttttcatcattggtttgagttgattttgtaaagaaaactatgtggagccatctttagtttggcatttcctaatcagctaccatgagtatttatttagagaa

SEQ ID NO: 987752 - DNA, 120 bp, Artificial Sequence
  ENSG00000281344_405 (sequence is synthesized)
atccattattattttgttaggattcatttttctaagtggtaaatttacaaaatttcaagaattccaatctgcatttcaaaaagattatacaaatctatactcttctactcatatatcaga

SEQ ID NO: 987753 - DNA, 120 bp, Artificial Sequence
  ENSG00000281344_406 (sequence is synthesized)
gttactattttcctacacacttactaatatatagagagaactttgcctatttgatattctaacaaggtgtacctcttaagttgtacttttaattattaggggacaaataattatatcttc

SEQ ID NO: 987754 - DNA, 120 bp, Artificial Sequence
  ENSG00000281344_407 (sequence is synthesized)
cccccacctccctcttggacggggtggctggccgggctatatcttcttttgggaattttccattattatcctttagtgaatattgtttccttttgatgcctttgtcaacttcatatagat

SEQ ID NO: 987755 - DNA, 120 bp, Artificial Sequence
  ENSG00000281344_408 (sequence is synthesized)
atgagctttttcttaaagatatgttgcatatatttttctgttagtaatttgcaagtttattttaatgtaatcttttaccaaatgaaaatatatttttatagcaagtttaatattttccct

SEQ ID NO: 987756 - DNA, 120 bp, Artificial Sequence
  ENSG00000281344_409 (sequence is synthesized)
cccttgtggtttctactttaggactcattttctttaccacagcaaaattatatatccacgtatatattcctttagtgtttcaatgttgttttattttttgtacctaaatctttaataagt

SEQ ID NO: 987757 - DNA, 120 bp, Artificial Sequence
  ENSG00000281344_410 (sequence is synthesized)
ctggaatttgttttgaatatagtataaagtactaatctagcttatttttcccaaaattgttagttatgtatttcattaccatttatagagtaatgtcttcttccccacttatttaagatg

SEQ ID NO: 987758 - DNA, 120 bp, Artificial Sequence
  ENSG00000281344_411 (sequence is synthesized)
ccactactaacacattaatcttaggtttatacagaaacagttctaaactttaaattttatttcattgtttgcttgtttttatggcagcactgcaacattttaaccattattttatatatt

SEQ ID NO: 987759 - DNA, 120 bp, Artificial Sequence
  ENSG00000281344_412 (sequence is synthesized)
aatgcattttattttctagcagggcaaatctctaccattactagaattttcaaaatctcttacttagtttcatgtattattcttccagatgaactgtggaatcatttgttgagtttccag

SEQ ID NO: 987760 - DNA, 120 bp, Artificial Sequence
  ENSG00000281344_413 (sequence is synthesized)
aaataaatcctcgaacccactgggattgtactgagtttatttatttatttgggaagaattaacatcttgacaatattaagtcttcttagctggtaacatgatatagttctccatttagac

SEQ ID NO: 987761 - DNA, 120 bp, Artificial Sequence
  ENSG00000281344_414 (sequence is synthesized)
aagttttcttttatgttcttcaacaacaatattgtggttttcttcacagaggttctgcacatttctcatgagtttaactcttaggtgatatatattgttttgctattatgaatgcaattt

SEQ ID NO: 987762 - DNA, 120 bp, Artificial Sequence
  ENSG00000281344_415 (sequence is synthesized)
attttccaatccattattgccaaatataagaaaagattgagctttatttattttgtaattactactctacaaatatttcttacaaatcctagttgcttttcaggttattcttttgagttt

SEQ ID NO: 987763 - DNA, 120 bp, Artificial Sequence
  ENSG00000281344_416 (sequence is synthesized)
tatatctagatagtaatgccattttcaaacttagtttttcctcgtgtccaatattcatactttttaacttgctttcttattcaattgcactggccaactttcccagaacaatgttaatta

SEQ ID NO: 987764 - DNA, 120 bp, Artificial Sequence
  ENSG00000281344_417 (sequence is synthesized)
acaatagagttagcaggcatactttacttattcttgattatagtagaataaattgattgttttactgtcgttttgatgtttaatgtaaaagtacattgtgatggttttgcagtgcttgtg

SEQ ID NO: 987765 - DNA, 85 bp, Artificial Sequence
  ENSG00000281344_418 (sequence is synthesized)
taatgtaaaagtacattgtgatggttttgcagtgcttgtgtagaccacacgaagttggatctaaaaaaattttaatttgttttgg

SEQ ID NO: 987766 - DNA, 60 bp, Artificial Sequence
  ENSG00000281344_419 (sequence is synthesized)
agttgctcatcagcttaaggagatttggggctaagacgatggggttttaaatacccttta

SEQ ID NO: 987767 - DNA, 75 bp, Artificial Sequence
  ENSG00000281344_420 (sequence is synthesized)
cagtatgatattggctgtgggtttgtcatgaacagcttttattattttgaaatacattccatcaatgagatacat

SEQ ID NO: 987768 - DNA, 86 bp, Artificial Sequence
  ENSG00000281344_421 (sequence is synthesized)
gtttatttgcgtatgttgaatcagccttgcgtcccatggatgaagccaacttgattacagtggataagctttttgatgtgctgctg

SEQ ID NO: 987769 - DNA, 120 bp, Artificial Sequence
  ENSG00000281344_422 (sequence is synthesized)
ttggcctgaaattttctttttttgttgcgtttctgccaggttttgctatcaggatgatgttggcctcgtaaaatgagttagagaggagtccctcttcttctattgtttggaatagtttca

SEQ ID NO: 987770 - DNA, 76 bp, Artificial Sequence
  ENSG00000281344_423 (sequence is synthesized)
ctccatctccttcagttctgctatgatattagttatttcctatcttgtgatagcttttgaatttgtttgctcttgc

SEQ ID NO: 987771 - DNA, 64 bp, Artificial Sequence
  ENSG00000281344_424 (sequence is synthesized)
ttgcttctctagttcttttaattgtgagcttagggtgtcaattttagatcttttctgctttctc

SEQ ID NO: 987772 - DNA, 120 bp, Artificial Sequence
  ENSG00000281344_425 (sequence is synthesized)
ctgccttaattttgttatttacccagtattcattccggagcaggttgttcagtttccatgcagttgtgcaggttcgaatgagtttcttggtcctgagttctaatatgattgcaccgtgct

SEQ ID NO: 987773 - DNA, 89 bp, Artificial Sequence
  ENSG00000281344_426 (sequence is synthesized)
tcagtttccatgcagttgtgcaggttcgaatgagtttcttggtcctgagttctaatatgattgcaccgtgctctgagagactgcttttc

SEQ ID NO: 987774 - DNA, 86 bp, Artificial Sequence
  ENSG00000281344_427 (sequence is synthesized)
gaagcaatgggtaaaggaatccctatttagtaaatggtgttgggaaaactggctagccctatgcagaaaactgaaactggacccct

SEQ ID NO: 987775 - DNA, 120 bp, Artificial Sequence
  ENSG00000281344_428 (sequence is synthesized)
tgactaaaacaccaaaagcagtggcaataaaagctaaaactgacaaatggatctaattaaactaaagagcttcttctgcacatcaaaagaaactatcagagtgaacgggcaacctacaga

SEQ ID NO: 987776 - DNA, 120 bp, Artificial Sequence
  ENSG00000281344_429 (sequence is synthesized)
cagaatgggagaaaatttttcaatctatccatctgacaaagggtaatatccaaaatctacaaggaacttaaacaaatttataagaaaaaaaatcaaccccatcaaaaattgggcaaagga

SEQ ID NO: 987777 - DNA, 61 bp, Artificial Sequence
  ENSG00000281344_430 (sequence is synthesized)
gacacttctcaaaagaagacatttaggcaacccacaaacttgtaccatctcacgccagtta

SEQ ID NO: 987778 - DNA, 80 bp, Artificial Sequence
  ENSG00000281344_431 (sequence is synthesized)
gtaggaatgcttttacactggtggtgggagggttaattagttcaaccattacggaagacagtgtggcaattcctcaagga

SEQ ID NO: 987779 - DNA, 87 bp, Artificial Sequence
  ENSG00000281344_432 (sequence is synthesized)
gcagccataaaaaagatgagttcatgttctttgcatggacatggatgaaggtggaaaccatcattcttgtgttctcactcataagtg

SEQ ID NO: 987780 - DNA, 90 bp, Artificial Sequence
  ENSG00000281344_433 (sequence is synthesized)
ctgcacatgtatcccagaacttaatgtataatgcacaaataaattcatacaattaagtgttttttaaaaagtattttaatttaaattccc

SEQ ID NO: 987781 - DNA, 120 bp, Artificial Sequence
  ENSG00000281344_434 (sequence is synthesized)
aaaagtattttaatttaaattcccatctaatcatttttttaaattggtgtgtcaattatttgcctttaaagtaactattggtttggttgcatttagatctacctttatattattactatt

SEQ ID NO: 987782 - DNA, 120 bp, Artificial Sequence
  ENSG00000281344_435 (sequence is synthesized)
attattattttacttatcctctctggttttgtcttctattctttttacctgctgtccttttctgatagtctatttttgatttctctattcacttgtgttctatatctctgtattttttag

SEQ ID NO: 987783 - DNA, 120 bp, Artificial Sequence
  ENSG00000281344_436 (sequence is synthesized)
cacttgctctagagattatacacataactaagttatctttccaattaaaatgcagagcaaaatttggagccacatgatgttttggaccaaagaatgaaattaatctgattatgtcttaac

SEQ ID NO: 987784 - DNA, 120 bp, Artificial Sequence
  ENSG00000281344_437 (sequence is synthesized)
aagataactttgttgttcttttgagaatagattttacaggtacaaaggctaaagttaggagatgaatgcaaatatacaggagtgtctttctattactctttactgagagtttttgtaaaa

SEQ ID NO: 987785 - DNA, 120 bp, Artificial Sequence
  ENSG00000281344_438 (sequence is synthesized)
tcaggaaacagtgttaattttataaactgctttctctgcttctattgaggtaattagtgaggtggccattttattctgttaatgtggtgaattatgttgatttaattttgaatgctaaat

SEQ ID NO: 987786 - DNA, 120 bp, Artificial Sequence
  ENSG00000281344_439 (sequence is synthesized)
caacgttgcatttctgagataaaccccacttgctcatgaggtactattctttgtatatattttctgatttgatatgctaattttttgtgaagatattttgagacaataagcatgagagat

SEQ ID NO: 987787 - DNA, 120 bp, Artificial Sequence
  ENSG00000281344_440 (sequence is synthesized)
gtgggtctgtaattttccatgttttgcaaggttcttatctagttttagtattacggtgtgcttgtctcatacaatgaattccctcctcttctatgttctgaaagatctcacattagacta

SEQ ID NO: 987788 - DNA, 120 bp, Artificial Sequence
  ENSG00000281344_441 (sequence is synthesized)
ggattaatttttctttcaaagtttaaaagaattccccattgaagccatctgggcctggaatttattttatgtaaagaattttaattacaaattcaatatatcttttacagatacagtagt

SEQ ID NO: 987789 - DNA, 120 bp, Artificial Sequence
  ENSG00000281344_442 (sequence is synthesized)
cctcccttacccatggtttcactttctgcagtttcagtggaacatgaacatggtcaacggtgatcagaaaatgttaaatggaaaatttcaggtataaacaattcgtaagtttcaaatcac

SEQ ID NO: 987790 - DNA, 120 bp, Artificial Sequence
  ENSG00000281344_443 (sequence is synthesized)
acaccattttgagtatcataatgagatctgttgccatcctgctgtgtcccaccaggatgtgaaacagccctttgtccagctgtcagtactatatatgacacctacccattagccacttac

SEQ ID NO: 987791 - DNA, 120 bp, Artificial Sequence
  ENSG00000281344_444 (sequence is synthesized)
tatccctctcttatcagattgactgtgatggtgtcacattgcttgtgttcaaataacccttattttacttaataataaccccaaagcatgagcatagtgatgctggcaattaggatatac

SEQ ID NO: 987792 - DNA, 120 bp, Artificial Sequence
  ENSG00000281344_445 (sequence is synthesized)
caaagagaagtcaaatatatgtcaaagagaagttgttaatctcttactgtggataatttataaagtaaacttaatcataggtatgcatgtatatgaaaaaccatagtatgtgtagggttt

SEQ ID NO: 987793 - DNA, 120 bp, Artificial Sequence
  ENSG00000281344_446 (sequence is synthesized)
gatattgtctatggtttcaggcattccctgagggtgttgcaatgtatgcccagtggattaaaggggactaccttagaggagtattctgttttttttttttcttaactatcttcctgtgtc

SEQ ID NO: 987794 - DNA, 120 bp, Artificial Sequence
  ENSG00000281344_447 (sequence is synthesized)
agttttgtaatttacgtgtttcaaggaatttgcccatttcttctgacttgtcaaattaattggcatttagctgttaataatattcccttattattatttaactatttgcatcatctatag

SEQ ID NO: 987795 - DNA, 120 bp, Artificial Sequence
  ENSG00000281344_448 (sequence is synthesized)
tgatgtgccttccttcattccagatgctctctttctttttcttttttttccccttttattttttggtcagtcttggtaagatattaccaggtttattaaactttgcaaaaaactagcttt

SEQ ID NO: 987796 - DNA, 120 bp, Artificial Sequence
  ENSG00000281344_449 (sequence is synthesized)
tcgttttattaatttttctcttgtttgtgttctatttcattgatttccattattttattttttagttgcctacattttcatcctttaggtttaattttgtagagttttgagggaatttaa

SEQ ID NO: 987797 - DNA, 120 bp, Artificial Sequence
  ENSG00000281344_450 (sequence is synthesized)
gagttttcaacctttctccttttttctgaagtaagctagtaaagctacaaattaccttctacgtgcttctttagatgcctttcataatgtttattatgttttgttctcattttcatttat

SEQ ID NO: 987798 - DNA, 120 bp, Artificial Sequence
  ENSG00000281344_451 (sequence is synthesized)
ttcaaggtattttaaaatgtctttcatgatttcttctttgattttggatcctttagtactgtgttgcttaattttcagatatttggggtatttttttcaagatatatttttgttattgat

SEQ ID NO: 987799 - DNA, 120 bp, Artificial Sequence
  ENSG00000281344_452 (sequence is synthesized)
ttttaacttagttcctttattaatttctaatttagtatggtattaatccttttaaatttatgcccaatatatgacctatgttgattaatgtaccatgaatacttgaaggattatgtattc

SEQ ID NO: 987800 - DNA, 120 bp, Artificial Sequence
  ENSG00000281344_453 (sequence is synthesized)
tgtagttgtttggttatagtgttctataaatgtcaatcagatagtattggttgataatgattgtttcagttatctattgctatgtaacaaatgtcccccaaatagtagattaaaacaaca

SEQ ID NO: 987801 - DNA, 120 bp, Artificial Sequence
  ENSG00000281344_454 (sequence is synthesized)
gcatttatttggctcaaaattctgctattttggcaagtcttggtggtaacagtttagttatgttacattcagcatcagctggagtatctcaaaggcagactccactcagtgtcagctagt

SEQ ID NO: 987802 - DNA, 120 bp, Artificial Sequence
  ENSG00000281344_455 (sequence is synthesized)
ttgtgctgaattaaaggctataagctgggaatctctctctgttttaaaatgatctctttatatggcctctgcaatggctttggggaagcgactggcttagagctcctaagtttcatgtca

SEQ ID NO: 987803 - DNA, 120 bp, Artificial Sequence
  ENSG00000281344_456 (sequence is synthesized)
cgagagagacagagccaagtagaaactgtatcaactttttgacctagtcttggaagtcatgcagccctacttctgctgtgttccatttgttttggtggtcacagagtactgtccattttg

SEQ ID NO: 987804 - DNA, 120 bp, Artificial Sequence
  ENSG00000281344_457 (sequence is synthesized)
acaaagagaggggatatagacttcacctcttaatgagggtatgactaggtctggaagagtttgtgggacagtaaatcttgctgagaacatttttggaaagtacaattggtcataatattg

SEQ ID NO: 987805 - DNA, 120 bp, Artificial Sequence
  ENSG00000281344_458 (sequence is synthesized)
atcaaatctttttctaatcttttttacccttccaataatggactgagatctttttctaatcataccaacttttagaaaattgatttctgggagtagtgttaaaatatcatactggatgta

SEQ ID NO: 987806 - DNA, 120 bp, Artificial Sequence
  ENSG00000281344_459 (sequence is synthesized)
ggaacttgtacatttatttctttagttttgccagtttctgcatcatttatcttggcttgctattgattgcatacacattttagattatgtctttctgtttgttatacatatgttacaaat

SEQ ID NO: 987807 - DNA, 120 bp, Artificial Sequence
  ENSG00000281344_460 (sequence is synthesized)
acaatgaaacacttttatatttgctttagccaatttttaaataaattgagaaatgagagtcatttatatttacccttttttttcccagtatacttcattcctcgtagatacaagtttctg

SEQ ID NO: 987808 - DNA, 120 bp, Artificial Sequence
  ENSG00000281344_461 (sequence is synthesized)
tggtcttgatatcttgacctcatgatcggcccacctccacctcccgaagtgctggaatgacaggcatgagccaccgtgcccagccagtatcctttttcttaagcctaaggttcaggtctt

SEQ ID NO: 987809 - DNA, 120 bp, Artificial Sequence
  ENSG00000281344_462 (sequence is synthesized)
gcccctatttatgaattctctcagattaaaaaaatctaaatatatttgttttgccttcaatatcaaaactttttttctgaatatagaattcttgttgattatgttttcagtactttaaat

SEQ ID NO: 987810 - DNA, 120 bp, Artificial Sequence
  ENSG00000281344_463 (sequence is synthesized)
atgtcacattttattgtcatctggcttgtactgtttctgatgagaagacagcaatcattcctgttgctcacctgtatgtaatatgtcttttaccccttctgtgcccttttaacattttct

SEQ ID NO: 987811 - DNA, 120 bp, Artificial Sequence
  ENSG00000281344_464 (sequence is synthesized)
ctcactccttgtctttcagcagttttattgtagtgtgtccatgtgtggttttatttgtgtttatctgattagttaaacttcttggaaaatatgagactatagtgttttttaaatttcccc

SEQ ID NO: 987812 - DNA, 120 bp, Artificial Sequence
  ENSG00000281344_465 (sequence is synthesized)
ctctgatatctttttcctctccctctagaactctaattacatatttgttagattatataatattgttccacaggccactgaggctgtgttcacttttctaatctaaatttcttctttcta

SEQ ID NO: 987813 - DNA, 120 bp, Artificial Sequence
  ENSG00000281344_466 (sequence is synthesized)
tgctttagattgggtagttcttttgtctaatctccaaagctaatctttctctggcaatgtatactctagtattaaggctattaggtgaaattttcatttcagataagttttttagttcta

SEQ ID NO: 987814 - DNA, 120 bp, Artificial Sequence
  ENSG00000281344_467 (sequence is synthesized)
gaattttcattcctttctccacccaagttttattctcttttcagtgtctgtatctgtttacttactacaatcatctttgtctttaatacttgaacatgtttaaagtccttgtcggttaat

SEQ ID NO: 987815 - DNA, 120 bp, Artificial Sequence
  ENSG00000281344_468 (sequence is synthesized)
tccaacattagtgccatctctgggcttccactgactttttcctcctgtttttggctcttgttttcctgcttcttcatatgtctagtaatttttattgtatgctggacatttatgatgcta

SEQ ID NO: 987816 - DNA, 120 bp, Artificial Sequence
  ENSG00000281344_469 (sequence is synthesized)
tgttgttacaaatttgatagagtatgccaagagcatgtattccattaagcaaggttgagttttgttgtggatggcaggaaatatattcagtcatctttatcctacttgattttaagcttt

SEQ ID NO: 987817 - DNA, 120 bp, Artificial Sequence
  ENSG00000281344_470 (sequence is synthesized)
ctctgggtgggtctggaatagcccttaatctagtgatagagtaactcttcacttaagaaataccctttctgggatccaaactaaatgtccaaggtattcccaaatctcttcattctggct

SEQ ID NO: 987818 - DNA, 120 bp, Artificial Sequence
  ENSG00000281344_471 (sequence is synthesized)
tatcaaaaattgaacatcttcggcattgtaagagctgtgaagtttgcattaatctcacagtcttttagtagttgttccctaaccgatctcttggagtcttgctctgtgcatgcatagctt

SEQ ID NO: 987819 - DNA, 120 bp, Artificial Sequence
  ENSG00000281344_472 (sequence is synthesized)
aatattcatgcagatactaaagtggatctctatacaaacaaatgggactataattctatgcagctctctcttctctgttaacttgcctcacacatttcactttgctttctctattaggca

SEQ ID NO: 987820 - DNA, 120 bp, Artificial Sequence
  ENSG00000281344_473 (sequence is synthesized)
agatatctgctctctatttgtgatctacttctctgtgctactattcataaggtgcccacaggcaaaaaaccagggagaacatgaagtttaccttatggatttttttcttctctcaagaat

SEQ ID NO: 987821 - DNA, 120 bp, Artificial Sequence
  ENSG00000281344_474 (sequence is synthesized)
tgcacctgtactgttttcttccagtgtctgaaggccatttatttatttatttttgttgaattttagagttgtttgttgtaggaggataaatattatatgaattatttcatcatggcataa

SEQ ID NO: 987822 - DNA, 120 bp, Artificial Sequence
  ENSG00000281344_475 (sequence is synthesized)
actatatatctagacatgttaaatctgagatgtctattagataaacagatagtgaggtgtgatagactgttgaatacatgaatttggagttcaagggtgaggtccatgctggagtcatac

SEQ ID NO: 987823 - DNA, 120 bp, Artificial Sequence
  ENSG00000281344_476 (sequence is synthesized)
atttgagattcaccagcatatataattcatataaagttttgaagtgaatgagatcttctagggatttggtatagattgagagaagagataagggctgagcccctgggcagctttaaaata

SEQ ID NO: 987824 - DNA, 120 bp, Artificial Sequence
  ENSG00000281344_477 (sequence is synthesized)
tcaggaagatcaggaaaaattagcaaactcagaaacagcaagtagataggagcaaaactagtagagtgtaatgacctagagaagaatatattttagggaaaaggtaatattcaactgtgt

SEQ ID NO: 987825 - DNA, 120 bp, Artificial Sequence
  ENSG00000281344_478 (sequence is synthesized)
aaaatagtgctaattggtcgagtgagataagaatgtggactcaccattggatttgtcaaacactggggtcaaaatggtcttgacacaagcagttccagtagagtgctgggaatgaaggcc

SEQ ID NO: 987826 - DNA, 120 bp, Artificial Sequence
  ENSG00000281344_479 (sequence is synthesized)
tgattggaatggattcaaaataaacgtggggatggggaggattgaagacagagagtatgaagaacttgttcaaagagttttgctgtaaaattaagaatgtgaagattatgtgaaaaataa

SEQ ID NO: 987827 - DNA, 120 bp, Artificial Sequence
  ENSG00000281344_480 (sequence is synthesized)
tttaaatataaatagcaagcattgtaatacagtaatcacttgttcttgaatgtttgccagaactttactgggaaaccactggacctgagctactttggatagaggattaattccaggaat

SEQ ID NO: 987828 - DNA, 120 bp, Artificial Sequence
  ENSG00000281344_481 (sequence is synthesized)
atgctggtaaatgttcaacaactaggtctctgaaaagaaaaaaccttgttttgtagccgttgccaatttctgtgatgtaaatattcccatcatggtagatttcaagctataaatgtgatg

SEQ ID NO: 987829 - DNA, 120 bp, Artificial Sequence
  ENSG00000281344_482 (sequence is synthesized)
tcgctgaaaacagagttgggaagacatgcatgcaatccactctcaagagtttagtatatcactgagtaatttctggtcatcttttctaatttactgtatgattattggtatgtttagatt

SEQ ID NO: 987830 - DNA, 74 bp, Artificial Sequence
  ENSG00000281344_483 (sequence is synthesized)
cttttctaatttactgtatgattattggtatgtttagattttttttgagatagggtcttgctttattgccatcc

SEQ ID NO: 987831 - DNA, 120 bp, Artificial Sequence
  ENSG00000281344_484 (sequence is synthesized)
tgggactacaggcatgcaccccactgtcagctatttttttaaaaaaatttttgtagagacaggtgttcctatgttacccaggctggtctcgaactcctgggcccaaacaatcctcttacc

SEQ ID NO: 987832 - DNA, 120 bp, Artificial Sequence
  ENSG00000281344_485 (sequence is synthesized)
ttagccttccaaagtgttgggattgcaggtaggagccaccgcatctggcctagatttttattttacttatttttgatttggctttaagaatttataattttctggaaaaatcattcattt

SEQ ID NO: 987833 - DNA, 120 bp, Artificial Sequence
  ENSG00000281344_486 (sequence is synthesized)
aagttgtcttatgttgttactgacagtagaagaaatataatgaagaatgtgagtgatttaggaatcacataaagttttgtttatacccttcatttgtgtgaaaataattatagtacatta

SEQ ID NO: 987834 - DNA, 120 bp, Artificial Sequence
  ENSG00000281344_487 (sequence is synthesized)
aaaaagaaattcttgttgaaagcataaatatggtctacttttatcactctttttatagaagggaactatatgatatacaagaagtataaatatggaactccttttaatatacaagaagtt

SEQ ID NO: 987835 - DNA, 120 bp, Artificial Sequence
  ENSG00000281344_488 (sequence is synthesized)
tggaactccttttaatatacaagaagtttgaatatggaacttatataagatggacaaataaggttgaataggacctgttatattaaaaaggctggccgggcttggtggctcatgcctgta

SEQ ID NO: 987836 - DNA, 60 bp, Artificial Sequence
  ENSG00000281344_489 (sequence is synthesized)
cttgtacagaagaaagacttaattgaaatctttgaaaatcctaaaccagcataacaagac

SEQ ID NO: 987837 - DNA, 120 bp, Artificial Sequence
  ENSG00000281344_490 (sequence is synthesized)
aattgaaatctttgaaaatcctaaaccagcataacaagactgaatactaacatgttgtatcttgataatgcacatatttttcactttatacttgctttaaggatcttgtataattctact

SEQ ID NO: 987838 - DNA, 120 bp, Artificial Sequence
  ENSG00000281344_491 (sequence is synthesized)
ccaggtgtggatgctgaaactgatgggcatgcaatgaaagctggtatgcagaaaaaattcagaggtggttttactatcttggtattcagttacatggttttattcccagtcttaatctaa

SEQ ID NO: 987839 - DNA, 120 bp, Artificial Sequence
  ENSG00000281344_492 (sequence is synthesized)
gatcaaggacaaggttttgtaggcgattgtgtgaaatagaagtatgtagatgaaaatatttgaaattaaagtataagggaggacaacaatcttaagtgcattttggaaatatttcaaaag

SEQ ID NO: 987840 - DNA, 120 bp, Artificial Sequence
  ENSG00000281344_493 (sequence is synthesized)
catcttaaagcagtatagttaacttgtgagactattttaataaaattggttcatttttgaccaaatcttcgagtccaggagtttaagtcaatataatcttttccttagctaccattagag

SEQ ID NO: 987841 - DNA, 120 bp, Artificial Sequence
  ENSG00000281344_494 (sequence is synthesized)
agaaaggagaacctaataacttggtggcgacattaccacaatagtactttgtgtcagcagagttagctaaaatatagcttgcttctccattgacttcacctgaaaatgagcctcgggcct

SEQ ID NO: 987842 - DNA, 120 bp, Artificial Sequence
  ENSG00000281344_495 (sequence is synthesized)
ttcatatgggaactgtagtggctagaggagcaatttagtagctaattgcaaaattatattgagaaattcttcatgcatgttaaattttttttaaagattactaaaacctttaataaaatt

SEQ ID NO: 987843 - DNA, 120 bp, Artificial Sequence
  ENSG00000281344_496 (sequence is synthesized)
gtaatagcttttacttttgaaagataaaatttcaacttaatcttgtagctcagaagtttattctatgatagtgacatttgattttggctggatgttgattctaatactttgccctttgtc

SEQ ID NO: 987844 - DNA, 120 bp, Artificial Sequence
  ENSG00000281344_497 (sequence is synthesized)
atacagctaaagtacatattcagtaatggatatgaagtaatatgtagttcaataatagaatgtgtttttttcacagttttgaagacatacaatttgtcttccaggtgttgctactgagaa

SEQ ID NO: 987845 - DNA, 120 bp, Artificial Sequence
  ENSG00000281344_498 (sequence is synthesized)
attcaataccactgggatccctcatcttatgcataagaactattacctctggataaatttaggaacttctgtgtgtctctgtcagcataaaatttcataactatttgctttggtgtgggt

SEQ ID NO: 987846 - DNA, 120 bp, Artificial Sequence
  ENSG00000281344_499 (sequence is synthesized)
ccggttatattcattttttttagagactcagtaatttcttcccactgtgaactagtgctctttagctttgagaatttcttttgtattttttctttgataatcttttcaccattttttttt

SEQ ID NO: 987847 - DNA, 120 bp, Artificial Sequence
  ENSG00000281344_500 (sequence is synthesized)
tctgttctttattctgtaaactattatttggtcatctcctggagctcctgagctgatcctctaatttttctcttctttttctcctgtttttcagctttttgtctttttaaaaaatgattt

SEQ ID NO: 987848 - DNA, 120 bp, Artificial Sequence
  ENSG00000281344_501 (sequence is synthesized)
aattatctgttgctgctaaacagattaaatgactcttcatcttttagtttacttcctagggacttcttcaagtttatcttctaacccttccactgagttttcatttatcctaccatactt

SEQ ID NO: 987849 - DNA, 120 bp, Artificial Sequence
  ENSG00000281344_502 (sequence is synthesized)
ttaatccctaagaactttgtttttatattttgtttttgctcatggatgtagtatcttatggaagatattaattatatttctgagattttattctgcttttagaatggattcctttcctcc

SEQ ID NO: 987850 - DNA, 120 bp, Artificial Sequence
  ENSG00000281344_503 (sequence is synthesized)
aagtttctccttctgcctcttggtttgcttctgtttttttctctttaatgttagagtctttccttacatgtctgctgctcttggtagtcccagcacactttagagctaagaggttttgtg

SEQ ID NO: 987851 - DNA, 120 bp, Artificial Sequence
  ENSG00000281344_504 (sequence is synthesized)
tgtgtttgtgtgtaggttttaaatggtgtgcttcatgtttggttatagaaatgggccatttctttgggagacttcctacctttggaagtctcccaaagaaatacacacacacacacacac

SEQ ID NO: 987852 - DNA, 120 bp, Artificial Sequence
  ENSG00000281344_505 (sequence is synthesized)
acacacacacacacacacacacaatcttcagtggtttaattttcccagagcaatattcgttcagtcccctgcctgagagttaaaatctttgctaccagtattctgggaatcaagttggaa

SEQ ID NO: 987853 - DNA, 120 bp, Artificial Sequence
  ENSG00000281344_506 (sequence is synthesized)
ggaaatggaggctcccaaatatcaccattcacgatatactttccaacattttcccagtttttttttttttcttttagtagcacaccttatctcaattctctataagcctggtgctactaa

SEQ ID NO: 987854 - DNA, 120 bp, Artificial Sequence
  ENSG00000281344_507 (sequence is synthesized)
gtctggttcagtatgcaagagaagaaagccttcaaccttcttccaaggtgggggaagagtattcacccagatgtggagtgaactggagagctaggaatcctattgtttcttattcagact

SEQ ID NO: 987855 - DNA, 120 bp, Artificial Sequence
  ENSG00000281344_508 (sequence is synthesized)
tgccatcagttcacccattttcagcttcaccttcatagtcactttctgggatacctgaggtttccaattcctcaggccctcttggagtttgcagtccaaatcagcttagttctgctcttc

SEQ ID NO: 987856 - DNA, 120 bp, Artificial Sequence
  ENSG00000281344_509 (sequence is synthesized)
cttcatggccagtttgttttcacctttctctggtttgctagggagttttacttgtccatctgctttcttgtttctaaatttgaatttctttatctcttctgctattctctttttacctgt

SEQ ID NO: 987857 - DNA, 120 bp, Artificial Sequence
  ENSG00000281344_510 (sequence is synthesized)
gggtttatatcttaaaatcctttagtgccattttggtgaggtttcaggaggaatgagtcaagattaagttctatcttttatgttttactataagtcaactagtttaaattttattcttat

SEQ ID NO: 987858 - DNA, 120 bp, Artificial Sequence
  ENSG00000281344_511 (sequence is synthesized)
gtaggcatactttttgtttctctctctctggatgatttcagagccactttaaccttaaacatatgtctttttcagcacagaaaatatttctaccaatgtatcattgagtatagtgtatgt

SEQ ID NO: 987859 - DNA, 120 bp, Artificial Sequence
  ENSG00000281344_512 (sequence is synthesized)
tgtgttttcttcaagcctctttctttaagagctagctctgggaataccttccctgtgaaccaaatctaacctcccctggcagagccaaactctccattctgtatctccatagcactttgt

SEQ ID NO: 987860 - DNA, 120 bp, Artificial Sequence
  ENSG00000281344_513 (sequence is synthesized)
atgtgtgctaccaaagtgagtactctccagttttaccttggtatctgtgggggattggttccaggaaacctctcaaatacccaaatccatagatacccaagtaccttgcataaaatggtg

SEQ ID NO: 987861 - DNA, 120 bp, Artificial Sequence
  ENSG00000281344_514 (sequence is synthesized)
cagtgtttgcatataacctatgtacatcctcctgtacactttaaatcatctctagattacttgtaatagctaatcctatgcaaatgctatatgaatcgttgttatacagtattacttaga

SEQ ID NO: 987862 - DNA, 120 bp, Artificial Sequence
  ENSG00000281344_515 (sequence is synthesized)
gaataatgacaggaaagaagtccatatatattcaatacagatgtaaccatccacttaaaaatatatttgtatttatattttttctgaccaacggattcttgccacatcaactatccactt

SEQ ID NO: 987863 - DNA, 120 bp, Artificial Sequence
  ENSG00000281344_516 (sequence is synthesized)
ttcccccagctgtggttggttgaatccatggatgcggaacccacaaatatggaaggctgactatagctagttacaattaatttgatttattaaagactcaccactttcaatgatggatca

SEQ ID NO: 987864 - DNA, 120 bp, Artificial Sequence
  ENSG00000281344_517 (sequence is synthesized)
ataattatagataggagatactggaaagcagcatggatctgggtcccccatgtgagaggtgggagatgtggtggctaagtgactatggagtacagagttcctcaatagttggttacccac

SEQ ID NO: 987865 - DNA, 120 bp, Artificial Sequence
  ENSG00000281344_518 (sequence is synthesized)
gttacactgagcatctatagcaagaagactataagcacatgcaattttagcaacagattagctactactataattttgaaatagagataaatgtaaatgttattttttagatatacattg

SEQ ID NO: 987866 - DNA, 120 bp, Artificial Sequence
  ENSG00000281344_519 (sequence is synthesized)
caactatagggtggtatgaaaatatttgtgatttctgttggtgactaagtcatagatgctgctaatattatggtggtttattaactttatttagaattaagaaaaatgtcaagttagagt

SEQ ID NO: 987867 - DNA, 120 bp, Artificial Sequence
  ENSG00000281344_520 (sequence is synthesized)
ttggtaaaaaatgtatcttttcctccctcccatgaccatgaatctctcaaattttactctgggaccccaggttaagcacattagccttagattctttattttagtttcacttatgatctt

SEQ ID NO: 987868 - DNA, 120 bp, Artificial Sequence
  ENSG00000281344_521 (sequence is synthesized)
ctgccatattagtcatggagtcttagacagtaatattggagacaatctcaattccaacattaccatagtactttagtttaattgttattgaatctagaaaaaggtgtttttgataaagat

SEQ ID NO: 987869 - DNA, 120 bp, Artificial Sequence
  ENSG00000281344_522 (sequence is synthesized)
gttaaattctagatggtgaaatctgagaagagtggactatgccagaagccatggagtctggttgttttcacgtcctaaaaggtgactagctccatgaacaaactccccctgtttttcctc

SEQ ID NO: 987870 - DNA, 120 bp, Artificial Sequence
  ENSG00000281344_523 (sequence is synthesized)
aggacttgagaaagattgagccatctttctttctacgttgaacctttccctgggtcatccacagggaagtatatgaatcagagacacatgctgtgatgtctggccctcagaggtatggtt

SEQ ID NO: 987871 - DNA, 120 bp, Artificial Sequence
  ENSG00000281344_524 (sequence is synthesized)
agcccagcagaactatcctgcaaggcatactctgaatatatggttttaatcaaagcaacttgcctagatttatttatttatttgtctctgttaatggagatagtgtgtgggggaaaaatc

SEQ ID NO: 987872 - DNA, 120 bp, Artificial Sequence
  ENSG00000281344_525 (sequence is synthesized)
tatatctgctgtaggcttagatccagtcagaaagctatagtgagtgctaatcttataatctgtgttttccatacatataaatttaaagtatggatatttgagctatatacagtagcaacc

SEQ ID NO: 987873 - DNA, 120 bp, Artificial Sequence
  ENSG00000281344_526 (sequence is synthesized)
aacttaatggtaagtagctttatgatgttatatctaatgtttcttccaaatattatggcttcaaggccattcttataatttaagactgtaaaattgaacccatttttcaaaagttgaacg

SEQ ID NO: 987874 - DNA, 120 bp, Artificial Sequence
  ENSG00000281344_527 (sequence is synthesized)
catggtaccttattatgcatactgttgtctgaggtttggaaagataatgaagactctcatttcgtgtgggattctcaactgagaacaaggaatagaacttaacatttgagtttgaaagtc

SEQ ID NO: 987875 - DNA, 120 bp, Artificial Sequence
  ENSG00000281344_528 (sequence is synthesized)
cttgggttctgcttttgttatgcaataagtcccaatgataagcacaaaataggcactagaaaaagcctacttttaataggcatccattttaaatggggataaaaattttacggtatatag

SEQ ID NO: 987876 - DNA, 120 bp, Artificial Sequence
  ENSG00000281344_529 (sequence is synthesized)
ttaataaaaggtttcattacggcattagcaaataaagcaaaaatcattaaaacaagtttattttatttctctttataaaatttagcttgtaactatgcattgatttaaaacaaggaataa

SEQ ID NO: 987877 - DNA, 120 bp, Artificial Sequence
  ENSG00000281344_530 (sequence is synthesized)
atcagatgttgactttggcatacattttctgacaaatggtatgacagtagaatatgacattcttctctttatgtttttgatttttcttgatgtgatcatgtagagtcagtttttgaaaaa

SEQ ID NO: 987878 - DNA, 120 bp, Artificial Sequence
  ENSG00000281344_531 (sequence is synthesized)
aatttcattggcttcatagattttcctgagggcctcatttcatatttttatattcaaattatcctttttgaggtgtctatcttgtctttttcatattgcaagacttaaatttcactcttc

SEQ ID NO: 987879 - DNA, 120 bp, Artificial Sequence
  ENSG00000281344_532 (sequence is synthesized)
agtctgtgtgctttgtgttgttaaatgttataaagattgactttccgtgagggtagatgtcagtgtattacatgagggatattgagaggaaaataatttcacaggtatttagttcatcag

SEQ ID NO: 987880 - DNA, 120 bp, Artificial Sequence
  ENSG00000281344_533 (sequence is synthesized)
tgaacattttcaggttgtaacaattgcttccatatacattctcctaactgggagggttggggaggaattcatctcccaataattattcatgaaattattattatctcctctttatttatg

SEQ ID NO: 987881 - DNA, 120 bp, Artificial Sequence
  ENSG00000281344_534 (sequence is synthesized)
aattattcatgaaattattattatctcctctttatttatgaaaacatgagaagaaatatgaagttgtagtagcattaaaacataggcatattgagccgggcgcagtggctcacgcctgta

SEQ ID NO: 987882 - DNA, 120 bp, Artificial Sequence
  ENSG00000281344_535 (sequence is synthesized)
ttaaaaaataattaaaaaaaggcatgtttgacaaaattctagaggagtttctaatagtgaaatatggaaagggccctgaggaggaatgtggggttgagctggtaagtggtatgacatttc

SEQ ID NO: 987883 - DNA, 120 bp, Artificial Sequence
  ENSG00000281344_536 (sequence is synthesized)
tacccattcttactatgccatctaccttggacacaggaagctttcactgagtaggagtaagagacaagagtctcttctgcgttctgcagtctgtcttctacatctgttctctgaaaccac

SEQ ID NO: 987884 - DNA, 120 bp, Artificial Sequence
  ENSG00000281344_537 (sequence is synthesized)
ccagagcattagcctttatcttcaactctaacacctctctctcaaatagttctttgtaagcccatatggggatgaaaatttgctataatacactacagcaggggcaatgaacaaccagtg

SEQ ID NO: 987885 - DNA, 120 bp, Artificial Sequence
  ENSG00000281344_538 (sequence is synthesized)
atgttttagaatagagatgtaaaaacttaacataatgattatacaaaatggtgctgctattatgactaaaaacaatagtggctaacatttatggagcccatactacctagtaggcactca

SEQ ID NO: 987886 - DNA, 120 bp, Artificial Sequence
  ENSG00000281344_539 (sequence is synthesized)
cttatgaactcatcaagtctttatgacaatgctatgagaaaggtactgttattatttccatcttattaatgaggaaactgatacatagaaacattcagcaacttgcccgagatcacatag

SEQ ID NO: 987887 - DNA, 120 bp, Artificial Sequence
  ENSG00000281344_540 (sequence is synthesized)
ccaataaatggaaggtcagaatttgggaacctaagtatctaactctaagatcctaccactttaaatgtcttctattgtatttgaggcagatcaatatttaatactgaacactaacttatg

SEQ ID NO: 987888 - DNA, 120 bp, Artificial Sequence
  ENSG00000281344_541 (sequence is synthesized)
ttcttatttgtttagaatctctgctttcaagaggagagttggccctgagatccatttcaaaggtaaatgatataatgtggtagaaaaaagcaggtgttcaaaaagtctaagctttagctg

SEQ ID NO: 987889 - DNA, 120 bp, Artificial Sequence
  ENSG00000281344_542 (sequence is synthesized)
aagttagaagattgagaatatagataaaatgtttctgagaaacattgagaaataatatggcttttacttactttaccagaaaagaaaaagattccctggggctgagaggaatgaggttat

SEQ ID NO: 987890 - DNA, 120 bp, Artificial Sequence
  ENSG00000281344_543 (sequence is synthesized)
atagaggagaattaatgaaaatggggagtctaggaggtcccagagagagggtccttgtctcttgcctccaggctgacagacaaggcatggtgccagactttagagaagcttgggtatggg

SEQ ID NO: 987891 - DNA, 120 bp, Artificial Sequence
  ENSG00000281344_544 (sequence is synthesized)
actttagagaagcttgggtatgggtgggtgatatgacttgggcatcctgcccctggatgataatgccgtgtcagcctcaaagaaagtcatattctattattattattattattattatta

SEQ ID NO: 987892 - DNA, 67 bp, Artificial Sequence
  ENSG00000281344_545 (sequence is synthesized)
tattattattattgagatggagtctcgttctgacacccaggcaggatttcagtggtgcgatctcaaa

SEQ ID NO: 987893 - DNA, 120 bp, Artificial Sequence
  ENSG00000281344_546 (sequence is synthesized)
agatggggtttcacaatgttggccaggcttgtctcggactcctgacccacaagtgatctgccagcctcgacctcccaaaagagagtcatattctttagtgtgacatgaaaacaggagcaa

SEQ ID NO: 987894 - DNA, 120 bp, Artificial Sequence
  ENSG00000281344_547 (sequence is synthesized)
agtgtgacatgaaaacaggagcaaaaagaatcctgttccactcttagtgtggtgctgaagaagcagaggaaatggagatcctgaaatgcccattcggacaggaataagaacaacttcttg

SEQ ID NO: 987895 - DNA, 120 bp, Artificial Sequence
  ENSG00000281344_548 (sequence is synthesized)
ctaagctgtgtgggctgatgatggaagaccaattgggattgtagatttctcagtgtatgtctgtgtagagaagtgattccaacactacatctgctctattccctcctccctgccaatatc

SEQ ID NO: 987896 - DNA, 120 bp, Artificial Sequence
  ENSG00000281344_549 (sequence is synthesized)
tcaatactttgtcagctccctggaacttagacacaactgcacacaagagaaaggtagctgagattcagatttataaaattctattgctctcttgacatagtttacttacccagatgtgca

SEQ ID NO: 987897 - DNA, 120 bp, Artificial Sequence
  ENSG00000281344_550 (sequence is synthesized)
ctctgagatctatggctactatgtttagtctcaagtttttcaggctgttctttaatcttcctagaaaattatgttgtacacaaattgtgaagttgatcaagcatctgcatgtatttacaa

SEQ ID NO: 987898 - DNA, 120 bp, Artificial Sequence
  ENSG00000281344_551 (sequence is synthesized)
atgtatttacaaattctcccccacccaattttagttaattttcaaagtaggtaatatatgcacttggtacaaaaaaaattcaaaaggcggtcgggcgcggcagctcacgcctgtaatccc

SEQ ID NO: 987899 - DNA, 120 bp, Artificial Sequence
  ENSG00000281344_552 (sequence is synthesized)
aaaaaaaaaaaaaaaaaaattcaaaaggcgtcaacaaatagacaatgaaaataaatgttgcccctcagtcctaacacagctatcagttatttgtgtttcctgagatattatgtatacata

SEQ ID NO: 987900 - DNA, 120 bp, Artificial Sequence
  ENSG00000281344_553 (sequence is synthesized)
ttatcatatatatatacagtctaaaaacagacctgcaatgatagcatattttacactctgctctgtatcttgccttttccttgtaacaagatgtcttggatactattctatagttgtatt

SEQ ID NO: 987901 - DNA, 120 bp, Artificial Sequence
  ENSG00000281344_554 (sequence is synthesized)
tagcattccattctagggatgcaccatgatttatttaagcaatctctattgatgggaatttagattatttccagtttttttgctattacaagttgtgctatagtgaattgtttttagctc

SEQ ID NO: 987902 - DNA, 120 bp, Artificial Sequence
  ENSG00000281344_555 (sequence is synthesized)
cctctttgtgcatttgtttgaatatatgtgaatgataactttaaaagtagaatacagggatgatacttacatgtattgaaaatattaacaggtattgcccagtgactctccatagggact

SEQ ID NO: 987903 - DNA, 120 bp, Artificial Sequence
  ENSG00000281344_556 (sequence is synthesized)
gtaccaagtgaaattctcacctgaaagtatgagtgcccatttcctcatattattaaactcttaaaatttgttctcatctgataaatgaaaatcagcatcttcttgtttttcctttcgttt

SEQ ID NO: 987904 - DNA, 120 bp, Artificial Sequence
  ENSG00000281344_557 (sequence is synthesized)
taaaaaatgaatttgtatttttgtctgtactccttttttttcttatctgtctatgacctttgcccatttttctatattgattttcctgagcttacacattttatgaaattagccttttat

SEQ ID NO: 987905 - DNA, 120 bp, Artificial Sequence
  ENSG00000281344_558 (sequence is synthesized)
aatttgtattgcagatgctttcttccaatttattggctgtgctttgactttgcttgcttgtttctttaggtacttagactttttatttatatatagttgaattcatccatcttttaaaaa

SEQ ID NO: 987906 - DNA, 120 bp, Artificial Sequence
  ENSG00000281344_559 (sequence is synthesized)
atggttttagtcaaaccattctcactcaagagattattgtcttatacctcatgctttctttagtatcttttcctaattttatttttatgttgaaatctttctcaatggagaatttgttta

SEQ ID NO: 987907 - DNA, 120 bp, Artificial Sequence
  ENSG00000281344_560 (sequence is synthesized)
aagggaaaagcagactattaattgctacatccatgatgttccatttataacttttactttaattttttgatgaatcatgggcaatggaataagattccattttttaccttcaaaataata

SEQ ID NO: 987908 - DNA, 120 bp, Artificial Sequence
  ENSG00000281344_561 (sequence is synthesized)
tgtttgaatcacttatttaatttacttgcaaaaataagttctgcaagaaaagagtcttcattagatttttttcccactccaagaaaagccatatagtctggttgagttaattgtaacaag

SEQ ID NO: 987909 - DNA, 120 bp, Artificial Sequence
  ENSG00000281344_562 (sequence is synthesized)
attagggtgggaagaaggtcagagagtgtgtttagctattgtaaactttgtgagcaaatgcaaactatggcgaatacagtttacagttttatggaaacaaagacaattctctagggccaa

SEQ ID NO: 987910 - DNA, 120 bp, Artificial Sequence
  ENSG00000281344_563 (sequence is synthesized)
tgttctaaaaaatgtagtttcctataacaaaaatttatattctcaacattacaagtcaacaattcttgaaattattaaaacaaacctttgaatattataagaaaactgtcttattctgta

SEQ ID NO: 987911 - DNA, 120 bp, Artificial Sequence
  ENSG00000281344_564 (sequence is synthesized)
aacttaggcagaaattcaatgttaagataacatgatacagaataagtatagatttaatttaaattttatggtaactggtatataaatattctctgaacttcttcaatatttagctaaaac

SEQ ID NO: 987912 - DNA, 120 bp, Artificial Sequence
  ENSG00000281344_565 (sequence is synthesized)
aaagggcaatatctagtccaatgctttgtgttttaaaagcacttgtgtcaacaactcaaagtttctcattaaataacattgaaacatattgctatcattataactattattttaaccaaa

SEQ ID NO: 987913 - DNA, 120 bp, Artificial Sequence
  ENSG00000281344_566 (sequence is synthesized)
gcttagtcaaagaccttggccacagaatgatacactttaacagataatgaacctaagctatatgacattgcaaaacatggcactttgaatttaaatttaacaaatttgatgaaaactctc

SEQ ID NO: 987914 - DNA, 120 bp, Artificial Sequence
  ENSG00000281344_567 (sequence is synthesized)
attattgatagagtactttctgttgccacacttactaattttgattactgccaaactttttaaaaattaattttaattacgcaacaaaacatggatacgttcacatttgaaaaagacaag

SEQ ID NO: 987915 - DNA, 120 bp, Artificial Sequence
  ENSG00000281344_568 (sequence is synthesized)
agaagataaacctaaagatccctttgtttctactctcttgcctgattttctcttcaccaaaacctcaacctcagactgaagtttggggcttatacttccagagattgtttcacttcttca

SEQ ID NO: 987916 - DNA, 120 bp, Artificial Sequence
  ENSG00000281344_569 (sequence is synthesized)
ctcaacactatatttttcatatctatttgtattgagacatttagatcttgttcatttgttttaactgttgcacagaattttattaaatacatatacacataatcacattcctctgttgat

SEQ ID NO: 987917 - DNA, 120 bp, Artificial Sequence
  ENSG00000281344_570 (sequence is synthesized)
ggacatgtagtttgcttttggtttttcattattataaataacaatgcttataactgtctaccagtgcagactttttcctaaagaaagagtcctggaattgaaattattggtttataggat

SEQ ID NO: 987918 - DNA, 120 bp, Artificial Sequence
  ENSG00000281344_571 (sequence is synthesized)
atgagcattttgagttttaatagatactgtcaaactattcttcaaaatggctgtacttatttattcttccatcagcagtatataataatggtgatttctctacatcttttcaacacttaa

SEQ ID NO: 987919 - DNA, 120 bp, Artificial Sequence
  ENSG00000281344_572 (sequence is synthesized)
ttttgtcaaacttctaaaattagtgctaatttggtgaatgtgaacaagtatctcattatttaatttgcattttcttgattactactgagttgattatctcttcatatgtatactggccac

SEQ ID NO: 987920 - DNA, 120 bp, Artificial Sequence
  ENSG00000281344_573 (sequence is synthesized)
tcaagtttctttccctgtgaattatcctttgcccagttttcttttgggctgcttttcaatttcttgtaggcctgtacgagttctttattttgtcccaaatattaatcctttttatattat

SEQ ID NO: 987921 - DNA, 120 bp, Artificial Sequence
  ENSG00000281344_574 (sequence is synthesized)
ttgtgttacagttattttatccaagcctagtgattatttttaaactctatttcttgtgtcttaagtagagcaggatattgcatagtggttaagagtatgggctttaaaagcaaatgactt

SEQ ID NO: 987922 - DNA, 120 bp, Artificial Sequence
  ENSG00000281344_575 (sequence is synthesized)
gggtttgaatccccactctgaaactatttgtgtgatctttggtaagttacctaacctctcttattctcaagtttctcacctgtaaacttaagattataatagaaatcacctcacagggtt

SEQ ID NO: 987923 - DNA, 120 bp, Artificial Sequence
  ENSG00000281344_576 (sequence is synthesized)
cctcacagggttgatgtgaatgttaaatggcttaaataatgaatagtctctggcatataataagtactcaataattattattactatatagtcaaatttaacaataatttgtttataata

SEQ ID NO: 987924 - DNA, 120 bp, Artificial Sequence
  ENSG00000281344_577 (sequence is synthesized)
aagccttgtttgagaatgcttttcctaatgtgaagtttaaaaatgttttatattttgtattagtaattttattgattttatgtttattttaaaaatttgtctagatattttccatgtggc

SEQ ID NO: 987925 - DNA, 120 bp, Artificial Sequence
  ENSG00000281344_578 (sequence is synthesized)
tttccatgtggcataggtaggaatgttaattttaatttttttcatctgtatatgaagctaattataccagttccatttacgtaaaggcctattatttcctgattgatttaaagtgtaact

SEQ ID NO: 987926 - DNA, 120 bp, Artificial Sequence
  ENSG00000281344_579 (sequence is synthesized)
ttcccataagatcactttcatattatcttcttttttagtgatttgtctattattgtgtcattgttacatttttaaaatttaattattgaagatttataatattccctgaattttttttgc

SEQ ID NO: 987927 - DNA, 120 bp, Artificial Sequence
  ENSG00000281344_580 (sequence is synthesized)
cctgaattttttttgcatgcttctaaatttcagttgtgcttttaatatttgatggtcacttaagttggatacaaaatcattgactcatttttttcttggccttgagtaagaaatatatct

SEQ ID NO: 987928 - DNA, 120 bp, Artificial Sequence
  ENSG00000281344_581 (sequence is synthesized)
ctccattgtcttccatatctaaaagagttatgcctaaatgataactttccttcttgtatgtaatttacttttttggcttaaataacaagaaaatattttttaaggtacaatagttttatt

SEQ ID NO: 987929 - DNA, 120 bp, Artificial Sequence
  ENSG00000281344_582 (sequence is synthesized)
acattttggtggtaatcattctgggaaaattttcctatgtacatggtattccctttaatatgtaaagtattttgttattttaacaaagttttctttaatgacatatttaaaattttgttt

SEQ ID NO: 987930 - DNA, 120 bp, Artificial Sequence
  ENSG00000281344_583 (sequence is synthesized)
tctggcactgatttgcttttttcctttgagaatcttatacatacatgctgtgtatatatatccttttgttttttcatttctacttgattttttctaaaatttctgctttccattctctat

SEQ ID NO: 987931 - DNA, 120 bp, Artificial Sequence
  ENSG00000281344_584 (sequence is synthesized)
tgtctaagtgtcatctgtatactgctgtgtttcttctagtatagtcctctcttctgcaatttacgaagtgtgttttgatgacaaactccaaatttatagttgtatgttaaatctttatta

SEQ ID NO: 987932 - DNA, 120 bp, Artificial Sequence
  ENSG00000281344_585 (sequence is synthesized)
tactctcatttttaatatttatatttttaggtatagaattctattttagcagttagtaccattgacacaaagatattcctttgtcttctagttttcattgttgttattgagaagtcagct

SEQ ID NO: 987933 - DNA, 120 bp, Artificial Sequence
  ENSG00000281344_586 (sequence is synthesized)
gtcttttctaactgttgtttctctcaaggtaattattttaaaatataggttttattataattcaggtatattgaggccatcagatcaggagactactgccattaaaaagatagtttgttc

SEQ ID NO: 987934 - DNA, 120 bp, Artificial Sequence
  ENSG00000281344_587 (sequence is synthesized)
ttcacagctctcaacaggaggggacatgcatgctatgtaatatcacatggagaaacaccaggttggtcaggaagcagaaagaatggaaacaaaacatggtcaaaaggcattattgtggct

SEQ ID NO: 987935 - DNA, 120 bp, Artificial Sequence
  ENSG00000281344_588 (sequence is synthesized)
tctgtataaaggaatgtgtattagtcaaggttcttcagagaaacagaatgaataatgtgataggtagagagattgatagctagatagatttatcataagaaattggctctggtaattata

SEQ ID NO: 987936 - DNA, 120 bp, Artificial Sequence
  ENSG00000281344_589 (sequence is synthesized)
gagactgagaagtttcaagatctgaagtcaagaagctggagatccaggagagctgatttcagtccagtagttccagtccaagtctgaaagcctatgagaagatctgatggtgtaagttcc

SEQ ID NO: 987937 - DNA, 120 bp, Artificial Sequence
  ENSG00000281344_590 (sequence is synthesized)
agttcaaaagttgtcagactgggaagccaagaagagccaatttttcatttcaagggtaagagaaagaaaagaccaatgtcccagttcaagaattcaggcaggaggagtttcctcttactc

SEQ ID NO: 987938 - DNA, 120 bp, Artificial Sequence
  ENSG00000281344_591 (sequence is synthesized)
agccttttcattctaatcaggtcttccactatttggatgaggcccacccacattagagaaggcagtctgctttactcagcctacctatttaaatgttaatctcatccagaaacactttcc

SEQ ID NO: 987939 - DNA, 120 bp, Artificial Sequence
  ENSG00000281344_592 (sequence is synthesized)
tatacacatccagagtaatgtctggccaaatgtctgggcaccctgtagcccagtcaagttgacatgtaaaatgaactataaaagaataggtgaggcagggcgaatggtttcaggattggc

SEQ ID NO: 987940 - DNA, 120 bp, Artificial Sequence
  ENSG00000281344_593 (sequence is synthesized)
tagtttgaataatttcagcaggctctgggctgtaggagatgtcttgagttgtctgatatttgatcctgggttgattgaggcagttgaatattggcctaaagagtaagagccacatagagg

SEQ ID NO: 987941 - DNA, 120 bp, Artificial Sequence
  ENSG00000281344_594 (sequence is synthesized)
agataggggattgtgccctggattggttagattgcatgtgaaagttgtgagttgtttgctatctttaggaattatgtaaccctggcaggggcagtcctttcctggtcagtgaggcctcag

SEQ ID NO: 987942 - DNA, 120 bp, Artificial Sequence
  ENSG00000281344_595 (sequence is synthesized)
atgccagaacatcaagaataaagaaaataaagtataattaatacagtaatctattcttctctctggttgcttttaagactttgtctttatttttctatacttttgactctgaaatatcta

SEQ ID NO: 987943 - DNA, 120 bp, Artificial Sequence
  ENSG00000281344_596 (sequence is synthesized)
atttgggtacattttaatttatctggcttgtgattcttccagcttttcgaatatgtgggttggtatcttccatcatttgtagaaaactaccagtcatttatctcttcaaatattgtgtta

SEQ ID NO: 987944 - DNA, 120 bp, Artificial Sequence
  ENSG00000281344_597 (sequence is synthesized)
cacatctcttcccttcttctccaagcaaagcaatctttgcatgtctttgtcttctattgtctcttgtttttcatattttctgtattggtctttctttctatgctacagtgagttttttaa

SEQ ID NO: 987945 - DNA, 120 bp, Artificial Sequence
  ENSG00000281344_598 (sequence is synthesized)
tggcctattttctagctcagcaattttatcttttgttttgttcagtatgttgctaaacacatccaattcagtttttaaaattagatattgtatttttatttcttaaggctcttatttgtt

SEQ ID NO: 987946 - DNA, 120 bp, Artificial Sequence
  ENSG00000281344_599 (sequence is synthesized)
ctttttcgtatcttgtaggtcatatttctacttccctttgggtattttcaatcttgacttatttcttcaaacattacaagcctattcactttataatctgtgtctgactattccaatatc

SEQ ID NO: 987947 - DNA, 120 bp, Artificial Sequence
  ENSG00000281344_600 (sequence is synthesized)
tgacatctttgtgactctcttttcactggccgttcatgtttctggtctcccttatggtatcatttttccttgtgggcttggttatttttgactatgtaccaccacgtttccttaaaaatt

SEQ ID NO: 987948 - DNA, 120 bp, Artificial Sequence
  ENSG00000281344_601 (sequence is synthesized)
atttatggggattccctaggccttaaagttcctcctctagttagaatttgtatttactcctgttggatccctaggcgcataaccatcccagaattactttaaactaaatttacagcttga

SEQ ID NO: 987949 - DNA, 120 bp, Artificial Sequence
  ENSG00000281344_602 (sequence is synthesized)
ggattcctggaccactccactaatgtgagacagggctgaaaatccatgcaagagttcacttgtggttaccagttttaagggacaactttttaaagattcgatttcccccttctctgctca

SEQ ID NO: 987950 - DNA, 120 bp, Artificial Sequence
  ENSG00000281344_603 (sequence is synthesized)
gcatgaaatctcacccttagaaagttccctacatgtggattgtgattaggaaagtgcatttacttagttcagagttttagtttaatgtgcttgtctcctatttggattctcatggatctg

SEQ ID NO: 987951 - DNA, 120 bp, Artificial Sequence
  ENSG00000281344_604 (sequence is synthesized)
gaccttgacttatataccccatgccccttgaggccctctaaacttcagctcaattttatctaggtcagaaaatttcctcaggggaaaaagaaagcagcttaatgaggtgttcatttttct

SEQ ID NO: 987952 - DNA, 120 bp, Artificial Sequence
  ENSG00000281344_605 (sequence is synthesized)
aaaaagaaagcagcttaatgaggtgttcatttttctgaatatttgctctcttctagagtttggcttggtatctcatcctcacaatctttcgaaattttttattcttttttttttttcttt

SEQ ID NO: 987953 - DNA, 120 bp, Artificial Sequence
  ENSG00000281344_606 (sequence is synthesized)
cagtggtgggatcttggctcactgcaatcttttcctcccaggttcaagtgatccttccacctcaccctcctgaatggctgtgagtacaggcactcaccaccacttctggctttattttta

SEQ ID NO: 987954 - DNA, 64 bp, Artificial Sequence
  ENSG00000281344_607 (sequence is synthesized)
aatggctgtgagtacaggcactcaccaccacttctggctttatttttatttttggtaactgccc

SEQ ID NO: 987955 - DNA, 120 bp, Artificial Sequence
  ENSG00000281344_608 (sequence is synthesized)
cgctcctagccttctttgattcttttaagaaaatgagtttagcaattagaattgttatgaatagactaattcgttactggaaatgctgttactggaattggaagttgtaggaaatctttt

SEQ ID NO: 987956 - DNA, 120 bp, Artificial Sequence
  ENSG00000281344_609 (sequence is synthesized)
acatttacctgaatgcttatagaattgcttcagtttccttgaaatttaaaaatagcaccaggatattttaaggtgatgactttttaaaattaattttgcctagttcataagaagcctttt

SEQ ID NO: 987957 - DNA, 120 bp, Artificial Sequence
  ENSG00000281344_610 (sequence is synthesized)
tgatttactgatttcatgagttttcccacagataaataagatagttattttattatatctttatcacctgtgttccatttcttctgatcatttctttagaaacaaagtctttttatatct

SEQ ID NO: 987958 - DNA, 120 bp, Artificial Sequence
  ENSG00000281344_611 (sequence is synthesized)
atcattttcctcctttggattcatttacttcatattgttggataatttctcaagcatttctaaccttacaagtgattttttttgtctacagtggtgttgctattttaatttctacttgta

SEQ ID NO: 987959 - DNA, 120 bp, Artificial Sequence
  ENSG00000281344_612 (sequence is synthesized)
gtaatgtagaagatatttatatgacattatttccttcattatagctttaaaatttttctagttctcttttgtctcagtatttcattgtttttgattcaggtttctttctgtacttccaga

SEQ ID NO: 987960 - DNA, 120 bp, Artificial Sequence
  ENSG00000281344_613 (sequence is synthesized)
tattgaatattaattcatgatatagtattttatgaaaataattgtatttattttcataaatacactcatatctttccttgttttcagaattgttatcaagcaaatgggttcactacctga

SEQ ID NO: 987961 - DNA, 120 bp, Artificial Sequence
  ENSG00000281344_614 (sequence is synthesized)
caaatgggttcactacctgatgtacacagaaaccaataactatagcactagcttttgagaaaagaaagactttattgcaaaatgagtcaacaaggagtcaggagtgagctcaaatctgtt

SEQ ID NO: 987962 - DNA, 120 bp, Artificial Sequence
  ENSG00000281344_615 (sequence is synthesized)
tcctcaatctggggtctggagcaagtgtatgggcttggagagcaagagaaaagatttaggaatgtagatttgtagaatctgattgcaggggttcaaatttgaccagttatggtaaggtat

SEQ ID NO: 987963 - DNA, 120 bp, Artificial Sequence
  ENSG00000281344_616 (sequence is synthesized)
attgaagtgaattttagctctagatcttctgggtcaacagaccccttgcttcagaaagagttctggtattatggttccagtcatgttccagtcttgttggctttgaggagagaaatcatt

SEQ ID NO: 987964 - DNA, 120 bp, Artificial Sequence
  ENSG00000281344_617 (sequence is synthesized)
tgttttgggtattgttagaggtcaaagcttttcctgttgtgcatgcctgggcttcatgacttgcagtttttggctctgttactacaaggtaactcaacattttgttattaacaacatggg

SEQ ID NO: 987965 - DNA, 120 bp, Artificial Sequence
  ENSG00000281344_618 (sequence is synthesized)
cccagtttgggctggtcccagagttacaggatctttatattggtccattgtgattttatttatttttcaaattttttataatcacttttaaagtcttagataataaataaaatttaaatg

SEQ ID NO: 987966 - DNA, 120 bp, Artificial Sequence
  ENSG00000281344_619 (sequence is synthesized)
atagattccactgaaaataattagccaaaacataaagcaggtaaattgcaccattcaaacacataattctttttaaacctaaaaataaggaagaaatacttaaatcttagttctttattt

SEQ ID NO: 987967 - DNA, 120 bp, Artificial Sequence
  ENSG00000281344_620 (sequence is synthesized)
gtacatagaactttttaacactatatataaatgtgagaaatcattttggccaaaaaagaagtcagaagtcaaaattcataaaacaaaccttaggaatgtggaggttaagatattttctgc

SEQ ID NO: 987968 - DNA, 120 bp, Artificial Sequence
  ENSG00000281344_621 (sequence is synthesized)
cctaccaattaattattatttattaaaagaagtagagagatctgtatacatgaacaaaattgagacaacatgcaggtatatctgttgacaccacttaaaaaaacccacatttattttgaa

SEQ ID NO: 987969 - DNA, 120 bp, Artificial Sequence
  ENSG00000281344_622 (sequence is synthesized)
aggacttgtgaacatccagtcaatagaaaaatacattcagaaaacacttactgaacatttatgatgtgtcagacactgtgttagaaacttgggaggcaaagcttctacgtctaagaagct

SEQ ID NO: 987970 - DNA, 120 bp, Artificial Sequence
  ENSG00000281344_623 (sequence is synthesized)
cagagtcaagttgggggcaggtaagcacaaactttaaatatttacagtattctctctctctctctttctctctctctctttctcctccccaacctgttttatctaaacatgagttataca

SEQ ID NO: 987971 - DNA, 120 bp, Artificial Sequence
  ENSG00000281344_624 (sequence is synthesized)
tgatatgtacaagcttatacattcagttatgtgtcccttaacagggatatgttcagagaaatgcatcattaggccatttcatcattgcgtgaacatcacagagtgtaccatatgtacata

SEQ ID NO: 987972 - DNA, 89 bp, Artificial Sequence
  ENSG00000281344_625 (sequence is synthesized)
atcattgcgtgaacatcacagagtgtaccatatgtacataaacccagatggtgtagtgtggtgtggtgtacataaacctactccacact

SEQ ID NO: 987973 - DNA, 120 bp, Artificial Sequence
  ENSG00000281344_626 (sequence is synthesized)
aggtgtctgtaacacaatggtatttgggtatctacacatatctaaacatagaagaagtgcagtaaaaatatggtataaaagattcaaaaatggtgcacctgtatagggtacttacaataa

SEQ ID NO: 987974 - DNA, 120 bp, Artificial Sequence
  ENSG00000281344_627 (sequence is synthesized)
atggaacttgcaggactcaaagtttctctgggtgagtcagtaagtgagtagtgagtgaatgtgaaggcctgggacattactgtacactactgtagacattataaacactgtgcacttagg

SEQ ID NO: 987975 - DNA, 120 bp, Artificial Sequence
  ENSG00000281344_628 (sequence is synthesized)
tgtgcacttaggctacactaaatttattaaaaatacttttctttattcagtaagttaaccatagcttactattaaatttttactttacaagctttaaaattttttaactttttgattctt

SEQ ID NO: 987976 - DNA, 120 bp, Artificial Sequence
  ENSG00000281344_629 (sequence is synthesized)
cattgtacagctatacaaaaatattttctttctttatatctttatttcataagcttttttctatttttaattttttactttttaaagtttttggtaaaaactatggtacaaacacacaca

SEQ ID NO: 987977 - DNA, 120 bp, Artificial Sequence
  ENSG00000281344_630 (sequence is synthesized)
aaaactatggtacaaacacacacattagtttaggccttgtattagtcaggttctgtagagggacagaactaataggagagagatatataaagggaattttattaagtattaactcacatg

SEQ ID NO: 987978 - DNA, 90 bp, Artificial Sequence
  ENSG00000281344_631 (sequence is synthesized)
ggaatttttctacaataggtcacaaggtttcacaatacgccgtctgcaggctgaggagcaagaagagccagtctgagtcccaaaactgaa

SEQ ID NO: 987979 - DNA, 120 bp, Artificial Sequence
  ENSG00000281344_632 (sequence is synthesized)
ggaagcatccagcacgggagagagatacaggctgggaggctaggccagtctagtcttttcacgttattctgcctgctttatattcagtggtagctgattagatggtgtccacccagatta

SEQ ID NO: 987980 - DNA, 79 bp, Artificial Sequence
  ENSG00000281344_633 (sequence is synthesized)
tattcagtggtagctgattagatggtgtccacccagattatgagtgggtttgccttccccagcccactgactcaggatc

SEQ ID NO: 987981 - DNA, 120 bp, Artificial Sequence
  ENSG00000281344_634 (sequence is synthesized)
tattaaccatcacagacctatacaagataaggatcatcaatattgctgtcttccacctccacatcttgtcccgttggaaggccttcaggggtattagcagctctgttataatcttatggg

SEQ ID NO: 987982 - DNA, 120 bp, Artificial Sequence
  ENSG00000281344_635 (sequence is synthesized)
accactaatgtatatgcagtttgtcattgaccaaaatgtcattatgtggcacatgactgtacttatatatatcacttatttgtgtataccatatgtctttgaatgtatatatggaagttg

SEQ ID NO: 987983 - DNA, 120 bp, Artificial Sequence
  ENSG00000281344_636 (sequence is synthesized)
gtcatgaaggtaacgtttgtgtgaaatatttgcccttttagtttcctgtggaacctggaaggatcaggattcctgaaaatttaaaccagaactcagatattccagtaattgctcatcaag

SEQ ID NO: 987984 - DNA, 120 bp, Artificial Sequence
  ENSG00000281344_637 (sequence is synthesized)
tgcccactagtagctaagcatctgctacacaacagcatacaaagtctggaaggtaatgaaaatagtgcaaatgggttccccatttcttttccaagaaaaacctcctaatgggttgctgat

SEQ ID NO: 987985 - DNA, 120 bp, Artificial Sequence
  ENSG00000281344_638 (sequence is synthesized)
gagctaatcaggtcaagtgttctctgagttgccctctttctacagtcagcaagcataacattttgttaacctattgacacagaggaaatttgttttccatctgaccttttacagtaacta

SEQ ID NO: 987986 - DNA, 120 bp, Artificial Sequence
  ENSG00000281344_639 (sequence is synthesized)
ctcaaaattactttctcttcagctaacaaagctaatgaataaattattcaagtttgacactcatagaaaataacattttacatttttcatttttattcctgattattttgctttcttttt

SEQ ID NO: 987987 - DNA, 120 bp, Artificial Sequence
  ENSG00000281344_640 (sequence is synthesized)
cagccattacttctttccctatgaagagttttaatctttacggaaattttgcagtgttggtttagagagtcatactcggactctctggaactaatcacattcacaaaataagtttcttat

SEQ ID NO: 987988 - DNA, 120 bp, Artificial Sequence
  ENSG00000281344_641 (sequence is synthesized)
tttgcaaatataacatttatatatgttgaaatggtcacatgataattttgtaaatgcagataaattccattaagaatttataaccatttgtataagaataaaattttaactttgggctac

SEQ ID NO: 987989 - DNA, 120 bp, Artificial Sequence
  ENSG00000281344_642 (sequence is synthesized)
atgtaaacaaaaggtttcctaaggaaatagttattagaacaaaaatatttgggacattttaaacctgagaataaactcttctccaagatggaaaagtgaattataggtctttgttattat

SEQ ID NO: 987990 - DNA, 120 bp, Artificial Sequence
  ENSG00000281344_643 (sequence is synthesized)
tctttatgaaatcttaattctaagcatctctactcactaacattttgttaaatttattcctttaataaaaatttcttcaaaattatcttaatgtccagccttttatctgtctcaaactgt

SEQ ID NO: 987991 - DNA, 120 bp, Artificial Sequence
  ENSG00000281344_644 (sequence is synthesized)
cctttcactaaacaggtccaaattggatgtttacttgcagtgaatatgtttttaatggtttgttatattcagaggatcataacttcaaagatggtcatcaattaattcacaaaggtaagc

SEQ ID NO: 987992 - DNA, 120 bp, Artificial Sequence
  ENSG00000281344_645 (sequence is synthesized)
ttttcttcactctttgtggttaggccaatttaaataatacatgttagagaatgagcatctacatatttcctctgcagactgactattctaacattcactatgctaagagtattgttattt

SEQ ID NO: 987993 - DNA, 120 bp, Artificial Sequence
  ENSG00000281344_646 (sequence is synthesized)
gagcatcactaaatgcattcaccttcccaattttcagagacaaagtcaaactcactcatatttatcatgaatgtgcatacaattctattaatttaacattttccatcaatgtaataaaat

SEQ ID NO: 987994 - DNA, 120 bp, Artificial Sequence
  ENSG00000281344_647 (sequence is synthesized)
agcaatattattttatacttgttagaaagattctaccaagagtatttttgatcatcatcagcaagtggtcactgtttcttttggaagatgctcctggtcactaaaaactgtatcacttta

SEQ ID NO: 987995 - DNA, 120 bp, Artificial Sequence
  ENSG00000281344_648 (sequence is synthesized)
accacaacctcgttaaactgggttcagagactcacaaattatatcaacagtagcatttctttcagttgaatttgcaaagtaggcttttattctctatgtgttccaatatctaccttgaac

SEQ ID NO: 987996 - DNA, 120 bp, Artificial Sequence
  ENSG00000281344_649 (sequence is synthesized)
agtcttagaactagttaaagcatttattaagtactcttgtaatgaaggaagtaatgattaattgataactacttttgttatgcttataaaacattttccctaaactttaccttaattttg

SEQ ID NO: 987997 - DNA, 120 bp, Artificial Sequence
  ENSG00000281344_650 (sequence is synthesized)
ggggattgtgagggaagtctcctttactttaattacttatcgacccaggtatcagacagtcataatatcttttttttttaagcaggtaaaactagactttgtatgggaattcttaagaaa

SEQ ID NO: 987998 - DNA, 120 bp, Artificial Sequence
  ENSG00000281344_651 (sequence is synthesized)
tgtcagagagctggtcctgttgaaaagtttagcagttatagaaaaatatttcaaaacataaatgtagcagtttaaacatgatttggtgtccagaataacttgttggtcttatttttcatt

SEQ ID NO: 987999 - DNA, 120 bp, Artificial Sequence
  ENSG00000281344_652 (sequence is synthesized)
ttcaacataaatatcaactgccactgtataattgaatcacaaacatatttgaattcaggaatttttatactgaaatatttctctgtgagcaaatcccacctcaccaaacagaaagatttt

SEQ ID NO: 988000 - DNA, 120 bp, Artificial Sequence
  ENSG00000281344_653 (sequence is synthesized)
gttactgtttgtgtgttctaaaatcgagaaagccttatattatataattctctgttgggtattttatgtatctgtatacttttttattccacttcccctgtcatttttgtattcctcaaa

SEQ ID NO: 988001 - DNA, 120 bp, Artificial Sequence
  ENSG00000281344_654 (sequence is synthesized)
atatctaggacagcatttttgcatgctcgtgtacatttaagaatatagcatagtggttaaaaacttggcttctgcaaccagactgcttaggttcaaatcttggctccataaccttcagtg

SEQ ID NO: 988002 - DNA, 120 bp, Artificial Sequence
  ENSG00000281344_655 (sequence is synthesized)
ctatgacctttgtaattcactcaaacctcctatgccttggatttctcatctataaaccagaaggtggattaactgtcggtggattaaatgagtcagcacatgtagaacacttcaagtagt

SEQ ID NO: 988003 - DNA, 120 bp, Artificial Sequence
  ENSG00000281344_656 (sequence is synthesized)
agctggtacatatcaggctcttagtaaacattagctattattatttttaacaagtattaagcacctgttacactgaaactgtgctgtgggtgctggggatgccacgatgaacaagtactc

SEQ ID NO: 988004 - DNA, 120 bp, Artificial Sequence
  ENSG00000281344_657 (sequence is synthesized)
atctttacttctatcataaaatgtaaagtttggtgaaatattcaggcaaacacatgggtcattgtaatacagtatgataactgctatcatagggtagtgtagggtgccacaattgcctaa

SEQ ID NO: 988005 - DNA, 120 bp, Artificial Sequence
  ENSG00000281344_658 (sequence is synthesized)
tggaggaccccttaccagactaagggtatcaggaaagtttttctggtctaagcagtgtctaagctgagatctgaagaatggtgatatagcttgtaccctccaaatctcatgttgaaattt

SEQ ID NO: 988006 - DNA, 120 bp, Artificial Sequence
  ENSG00000281344_659 (sequence is synthesized)
gatccccagtgttgaaagtggggtccagtgggaggtgtttgggttatggaggtggatccctcatgaatggctttgtcattcttgtgagactgagtgagttcacactcttattcccgtgag

SEQ ID NO: 988007 - DNA, 120 bp, Artificial Sequence
  ENSG00000281344_660 (sequence is synthesized)
atctggttgttaaaaagagtgccaccttcctcccaccccgtctcttccttctgctcttgctgtgtgatgcctcctccctttgccttctgccatgagtggaagcttcctgatgtccttccc

SEQ ID NO: 988008 - DNA, 120 bp, Artificial Sequence
  ENSG00000281344_661 (sequence is synthesized)
tgcttcttgtacagcctgcagaaccatgaaccaaataaacctcttttatttataaattacctagtctcaggtgttcctttatagcaatgcaaacagattagacagatgggtaggggcttg

SEQ ID NO: 988009 - DNA, 120 bp, Artificial Sequence
  ENSG00000281344_662 (sequence is synthesized)
gacagatgggtaggggcttgccatgtgatagtgaatggtgtggaggaatgcagtttcaagaagacagggtagccagaggatccatgatacaggggaaagagagtatgacacatttaagga

SEQ ID NO: 988010 - DNA, 120 bp, Artificial Sequence
  ENSG00000281344_663 (sequence is synthesized)
cttaacaaggctcagttaaatgcactatatagttcatgacaggggatggtgcacaaacctctctattctgagaagaataggcaatcactgaaggtgtagaagagaagggtgtcatgttca

SEQ ID NO: 988011 - DNA, 120 bp, Artificial Sequence
  ENSG00000281344_664 (sequence is synthesized)
tattttagttttcagatctctccaactccagtgtaggtaatatactaaagtgagtttaaaagttgatataggaagatcagttaaaatgccagtgcaccatccaagagaaagatgttggag

SEQ ID NO: 988012 - DNA, 120 bp, Artificial Sequence
  ENSG00000281344_665 (sequence is synthesized)
gcttggaactagagtggtaggggtgaatagaaaaagaacttgagaaatctaagagacgtttatgggaaaagagtcagaaggacttggtaataatacagtgctagatatggagtgagagtg

SEQ ID NO: 988013 - DNA, 120 bp, Artificial Sequence
  ENSG00000281344_666 (sequence is synthesized)
agaaagaagacctaaagatggattcccaggtttctagattgagcatgtgattgatgccatctactgagacaggaaacattgtctgtaatgaatggacagtggttgtggctagtcagtata

SEQ ID NO: 988014 - DNA, 120 bp, Artificial Sequence
  ENSG00000281344_667 (sequence is synthesized)
tatccttggtaattatgtctcaattgtcaactaggagcaactcctgctcaatctcaattcatgtgctcttagatggagttgattccacctccagctccaagggtggagcacatgaaccag

SEQ ID NO: 988015 - DNA, 120 bp, Artificial Sequence
  ENSG00000281344_668 (sequence is synthesized)
attggaccaattagtgcatcacattctcccagccacatgtcagggttggtcacagcaactaagctgacacagttagagtgagtctgatagctttggtgggacttgttgaaaaaggcatgg

SEQ ID NO: 988016 - DNA, 120 bp, Artificial Sequence
  ENSG00000281344_669 (sequence is synthesized)
gagtgtgaattgttggagctgaagcagttatcttgaacccactagaggaatgtctgcgagaaaggagccaacgcagtggaaagcagagctgagagagagaagaaaattctgagaatgccc

SEQ ID NO: 988017 - DNA, 120 bp, Artificial Sequence
  ENSG00000281344_670 (sequence is synthesized)
tttaagtactgaatctagctatgcctatgtcatcctctcccttgcgctttttcttttctttttttaaatttaatttaattttaagttccaatatacatgtgcaggacgtgcaggtttgtt

SEQ ID NO: 988018 - DNA, 120 bp, Artificial Sequence
  ENSG00000281344_671 (sequence is synthesized)
acacaggtaaatgtgcgccatgatgatttgctgcacctaccaagccatcacctaggtattaagccccgcatgcattagctgtttatcctgatactctccctctcccgatcccccaccccg

SEQ ID NO: 988019 - DNA, 64 bp, Artificial Sequence
  ENSG00000281344_672 (sequence is synthesized)
cctgtgtccatgtgttctcattgttctgctctcacttatatgcatgtctaattttttaagaaac

SEQ ID NO: 988020 - DNA, 120 bp, Artificial Sequence
  ENSG00000281344_673 (sequence is synthesized)
taattgcatgtctaattttttaagaaactaccacattctttcccaaagtagtggaaccatttagctctcccactggtagtctgtgagagttccagtttcagaagaaatggtaccaactcc

SEQ ID NO: 988021 - DNA, 69 bp, Artificial Sequence
  ENSG00000281344_674 (sequence is synthesized)
cctctggtagaattcagctgtaaatccgtctggctctgggtatttttttggttagtaggctatttatta

SEQ ID NO: 988022 - DNA, 67 bp, Artificial Sequence
  ENSG00000281344_675 (sequence is synthesized)
atagtattcgctgatggttgttcgtatttctgtggggtcagtggtggtatccctcttatcatttttt

SEQ ID NO: 988023 - DNA, 120 bp, Artificial Sequence
  ENSG00000281344_676 (sequence is synthesized)
ttctgtggggtcagtggtggtatccctcttatcattttttattgtgtctgtttaattcttctatcttttcttctttattagtctagctagcagtctatcttattaatttttttcaaaaaa

SEQ ID NO: 988024 - DNA, 120 bp, Artificial Sequence
  ENSG00000281344_677 (sequence is synthesized)
aaaaaccagctcttggatccattgaattttttgaagggtttttcatgtttctctccccttctgtaccaccctgatcttggttatttattttattctgctagctttggggtttgtttgctc

SEQ ID NO: 988025 - DNA, 120 bp, Artificial Sequence
  ENSG00000281344_678 (sequence is synthesized)
ttctctagttcttttgcttgtgatgttagtgtcaatttgagatctttgtagtttttttaatgtgggcatttagtgctctaaatttccctcttaatactcctttagctgaatcccagagat

SEQ ID NO: 988026 - DNA, 70 bp, Artificial Sequence
  ENSG00000281344_679 (sequence is synthesized)
acaagttgttcaatttccatgtagttgggtggttttcagtgagtttcttaatcttgagatctaatttgat

SEQ ID NO: 988027 - DNA, 120 bp, Artificial Sequence
  ENSG00000281344_680 (sequence is synthesized)
ggttttcagtgagtttcttaatcttgagatctaatttgattctgctgtagtctgagagactgtttattattatgtcagttcttttgcatttgttgaggagtgttttacttccagttatgt

SEQ ID NO: 988028 - DNA, 120 bp, Artificial Sequence
  ENSG00000281344_681 (sequence is synthesized)
gatcagttttagagtaagtgccatgtggcactaagaagaatgtatatttgttgtttttgggtggagatttctgtagatatctatcagttccatttgatccagagctgagttcaagtcctc

SEQ ID NO: 988029 - DNA, 83 bp, Artificial Sequence
  ENSG00000281344_682 (sequence is synthesized)
ctatcagttccatttgatccagagctgagttcaagtcctcaatatccttggtaattttctgtctcaataatctgtctaatatt

SEQ ID NO: 988030 - DNA, 74 bp, Artificial Sequence
  ENSG00000281344_683 (sequence is synthesized)
cgaaccctttaccattatgtaatgctctctttgtcctttttgatattttttggtttaaagtctgttttgtcaga

SEQ ID NO: 988031 - DNA, 89 bp, Artificial Sequence
  ENSG00000281344_684 (sequence is synthesized)
cactgatgggtcttgactctttatccagcttgctattctgtgtattttaattggggaatttaatataaatttgatcctgccatcattat

SEQ ID NO: 988032 - DNA, 120 bp, Artificial Sequence
  ENSG00000281344_685 (sequence is synthesized)
tttgatcctgccatcattatgctagctgattattttgtaggcttgttgatatagttgcttcacagtgtcattggcctttgtacttcagtgtatttttgcagtggcaggtaccattttttc

SEQ ID NO: 988033 - DNA, 120 bp, Artificial Sequence
  ENSG00000281344_686 (sequence is synthesized)
tttcctttccacatttagtgcttcctttaggagctcttacaaggccagcctggtggtgacagactccatcagcatttgcctgtctgaaagagattttatttctccttcacttatgaagct

SEQ ID NO: 988034 - DNA, 120 bp, Artificial Sequence
  ENSG00000281344_687 (sequence is synthesized)
ttgcccagatttgaaattctgggtaggaaattacttcctttaagaatgttgaatattgccccctatctcctctggcttatagggtttctgctgagagggccactgttagtctgatggggt

SEQ ID NO: 988035 - DNA, 80 bp, Artificial Sequence
  ENSG00000281344_688 (sequence is synthesized)
ttctgatgattatgtgttttggggttgatcttctcatggagtatcttactggagttctctggatttcctgaatttgaatg

SEQ ID NO: 988036 - DNA, 120 bp, Artificial Sequence
  ENSG00000281344_689 (sequence is synthesized)
catgtaccccaatcagttgtaggtttggtcttcttacataaccccatagttctcggaggttttgtttgttccttttcattcttttttctccaaacttgtccgcctgtcttatttcagcaa

SEQ ID NO: 988037 - DNA, 120 bp, Artificial Sequence
  ENSG00000281344_690 (sequence is synthesized)
aattgtcttcaagctttgaaattctttcctccacttggtccatttggctattgatacttgtggttgcattgtgaagttcttgtgttgtgttcttcagcttcatcaggtcatttatgttcc

SEQ ID NO: 988038 - DNA, 120 bp, Artificial Sequence
  ENSG00000281344_691 (sequence is synthesized)
tctctagactggttattctggataacagctcctgtaatgttttatcatggttctcagcttcttgcattgggttagaacacactgctttggatcagaaaagttcattattacccacctttt

SEQ ID NO: 988039 - DNA, 82 bp, Artificial Sequence
  ENSG00000281344_692 (sequence is synthesized)
ttctattacccaccgtttgaagcctttttctgtcaattcatccatctcagcctccgcccagttctgtgtccttgctggagag

SEQ ID NO: 988040 - DNA, 120 bp, Artificial Sequence
  ENSG00000281344_693 (sequence is synthesized)
catctcagcctccgcccagttctgtgtccttgctggagaggtgttccaatcatttggaggagaagaggcactctggcttttttgagttttcagcatattttttcattgattctcatcttt

SEQ ID NO: 988041 - DNA, 120 bp, Artificial Sequence
  ENSG00000281344_694 (sequence is synthesized)
gtgagtttatccagcttgatctttgaggctgctgacctttgggtggggttttggtggggactgttttgttaatgctgttgttgttgttgctttctgtttttcttttgagagccaggcccc

SEQ ID NO: 988042 - DNA, 120 bp, Artificial Sequence
  ENSG00000281344_695 (sequence is synthesized)
tcttttgtagggctgctgcaatttgctggggatcctctccagaccctatttacctgggtccctcccacacctggaggtatcaccagtggaagctgcagaacagcaaagatggctgcctgc

SEQ ID NO: 988043 - DNA, 120 bp, Artificial Sequence
  ENSG00000281344_696 (sequence is synthesized)
tccttcctctaggagatcagtcccagaggggcaccaacatgatgccattgggaacacactcctgtataaggtgtctggagacccccgttggggggtctcacccagtcaggaggcatgggt

SEQ ID NO: 988044 - DNA, 120 bp, Artificial Sequence
  ENSG00000281344_697 (sequence is synthesized)
tcagggacccacttaataaagcactctggctgccccttggcagagggggtgcgctgtgctggggggaatcccagtcaccggactgcccagattcctcagagccggcgggggaaagactaa

SEQ ID NO: 988045 - DNA, 120 bp, Artificial Sequence
  ENSG00000281344_698 (sequence is synthesized)
gttggctgatctgtggagaccatggtttccccttccctcagggactctgacatggtttggctgtgtcttcacccaaatcttatcttgaattcccatgtgttgtgggatgaacccagtggg

SEQ ID NO: 988046 - DNA, 60 bp, Artificial Sequence
  ENSG00000281344_699 (sequence is synthesized)
tatcttgaattcccatgtgttgtgggatgagcaagtctttccccgtgctgtgaataagtc

SEQ ID NO: 988047 - DNA, 87 bp, Artificial Sequence
  ENSG00000281344_700 (sequence is synthesized)
gctcctccgcatgtggaaatgtaagtcccttaaacttttgtttgtaaattgctcagtcttgggtgtgtctttatcagcagtatgaga

SEQ ID NO: 988048 - DNA, 120 bp, Artificial Sequence
  ENSG00000281344_701 (sequence is synthesized)
attgctcagtcttgggtgtgtctttatcagcagtatgagaacagactaatacagtaaattgggaccagtagagtggggcactactgaaaagatacctgaaactgtggaagcgactttgga

SEQ ID NO: 988049 - DNA, 89 bp, Artificial Sequence
  ENSG00000281344_702 (sequence is synthesized)
tggaacagtttggagggttcagaagaacacaagacaatgtgggaaagtttggaactccttagagatatgatatggacaatgagatctag

SEQ ID NO: 988050 - DNA, 77 bp, Artificial Sequence
  ENSG00000281344_703 (sequence is synthesized)
aatggctttgacaaaaatgctgataatgatatggacaatgagatcctggagcaaagtgactcttgttatgttttagc

SEQ ID NO: 988051 - DNA, 86 bp, Artificial Sequence
  ENSG00000281344_704 (sequence is synthesized)
cctagagatttgtggaactttgaactgagagagatgatttggggtatctggtggaagaaatttatgttaaagtcattcagtttaat

SEQ ID NO: 988052 - DNA, 88 bp, Artificial Sequence
  ENSG00000281344_705 (sequence is synthesized)
caagaggtgacttgggtgtgttaaagtcattcagtttaataagggaagcagaacataactgaaaagaaaatcccatttcctaagaaga

SEQ ID NO: 988053 - DNA, 88 bp, Artificial Sequence
  ENSG00000281344_706 (sequence is synthesized)
tgcatcataggcccagaggcctaggaggaacaagtgatttcatgggccgggccaagggttccaatgctgcgtgcagcctagagactgg

SEQ ID NO: 988054 - DNA, 120 bp, Artificial Sequence
  ENSG00000281344_707 (sequence is synthesized)
gggccaagggttccaatgctgcgtgcagcctagagactggttgccctgtgttccagatgctccagccatggctgaaaggggccaatgtagagtttgggccatagctttagagggtgcaag

SEQ ID NO: 988055 - DNA, 88 bp, Artificial Sequence
  ENSG00000281344_708 (sequence is synthesized)
tttgggccatagcttttatgtagtgttgagcctgtgagtgcacagatgtcaagaattagggtttgggaacctctgcctagatttcaga

SEQ ID NO: 988056 - DNA, 87 bp, Artificial Sequence
  ENSG00000281344_709 (sequence is synthesized)
tctgctagggcagtgtggaaggaaaacgtatggattggagcccccatacagagtccctgctgagaaatcctccagaccccagaatgg

SEQ ID NO: 988057 - DNA, 74 bp, Artificial Sequence
  ENSG00000281344_710 (sequence is synthesized)
cctcaatgccagcccgtgaacgcagctgggagggaggctgtacccttcaaaaccacaggggtgaagccacccaa

SEQ ID NO: 988058 - DNA, 86 bp, Artificial Sequence
  ENSG00000281344_711 (sequence is synthesized)
gcagaccctcaatgccagcccgtgaacgcagctgggagggaggctgtacccttcaaaaccacaggggtgaagccacccaagaccat

SEQ ID NO: 988059 - DNA, 120 bp, Artificial Sequence
  ENSG00000281344_712 (sequence is synthesized)
ttacaatttgactgctccactgggttttggacttgcatggggcttgtagcccctttgttctggccaatttctcctatttggaatggccatattaacccaatgcctgtacccccattgtat

SEQ ID NO: 988060 - DNA, 120 bp, Artificial Sequence
  ENSG00000281344_713 (sequence is synthesized)
ggactgttgggaaggcatgattgtttttgaaatgggaggacatgtgatttgggagggtccaggggcagaatgatatggtttggttgtgtacccacccacatatcatcttgaattcccgta

SEQ ID NO: 988061 - DNA, 87 bp, Artificial Sequence
  ENSG00000281344_714 (sequence is synthesized)
gacccagtgggaggtaattgaatcatggagatgagtctttccccatgctgttctcatgacagtgaatacatttccctgaacaagctc

SEQ ID NO: 988062 - DNA, 120 bp, Artificial Sequence
  ENSG00000281344_715 (sequence is synthesized)
atgggaatttccctgaacaagctctctttctttgcctgttgccatccatgttaagacgtgagttggtcctccttgccttctgccatgattctgaagcctccccagccatgtggaactgta

SEQ ID NO: 988063 - DNA, 120 bp, Artificial Sequence
  ENSG00000281344_716 (sequence is synthesized)
atcagcagcatgagaacagactaatacaggctccattccagggagattagagttctgtctgtaaaccgctggctggagttgctaaaattcctttagggaggccctgcccagtgaggaggg

SEQ ID NO: 988064 - DNA, 120 bp, Artificial Sequence
  ENSG00000281344_717 (sequence is synthesized)
gctaaaattcctttagggaggccctgcccagtgaggagggatgggtcagggtccagcctaaagaggcagtctggccacaatctgccacagccactgtgctgtgctgtgctgtggggaatt

SEQ ID NO: 988065 - DNA, 120 bp, Artificial Sequence
  ENSG00000281344_718 (sequence is synthesized)
ttccctaggttcgaacctcccagtcttcctgagtccagcaggggaaacaggcagactagagctgcagtgatggctgccgcctctcttgcctggagctccattgtcttagtcatcttaggc

SEQ ID NO: 988066 - DNA, 120 bp, Artificial Sequence
  ENSG00000281344_719 (sequence is synthesized)
agcagacaattgcagtgatggtgtccacccttcccctcaggagttcagtagtcttaggcagtctctagcagagtggctgctgagaatctttacagctctctgcttgggacccaagagcct

SEQ ID NO: 988067 - DNA, 120 bp, Artificial Sequence
  ENSG00000281344_720 (sequence is synthesized)
ggtggcatgggctcacgagggggtctcttgatcagtgggttgaacggatctgtggaaaaagcatagtttcctgggcaggttagcacactcagtcaccgcttcccttggctgggggtggga

SEQ ID NO: 988068 - DNA, 120 bp, Artificial Sequence
  ENSG00000281344_721 (sequence is synthesized)
gctctccttgccctgggtggctcccaggtggcccatcgtaccaccctgctttttcttgctctctttgggtcacaccaatcacctagtcagtcccagtgagagaacctggatacgtcagtt

SEQ ID NO: 988069 - DNA, 120 bp, Artificial Sequence
  ENSG00000281344_722 (sequence is synthesized)
gtcagtgcaggattcactcgctgttttcattcttctcagtgggagcctctgaccacagctgtttctagtcagtcatcttggccccaccccctgcaccttttcttttatgtgcactaataa

SEQ ID NO: 988070 - DNA, 120 bp, Artificial Sequence
  ENSG00000281344_723 (sequence is synthesized)
gttgttttttggcttaagccagataggtttttaaatatatacactttcaaaaatatataagacaccacatatgaaggaactagttgtggaggtagaggttgaattcagccttggctatgt

SEQ ID NO: 988071 - DNA, 120 bp, Artificial Sequence
  ENSG00000281344_724 (sequence is synthesized)
tgagcttgaggtgtttgtgagacatctttatagaaaagagatatccggtaggaaattagatatgtggatagaaagttaacaataccttatacagtctttggtaaaaatttttagagagtc

SEQ ID NO: 988072 - DNA, 120 bp, Artificial Sequence
  ENSG00000281344_725 (sequence is synthesized)
cttttgtaatgcatgcagaaaagatcttcacaaaatgctgacctctcctgtagaaccacctagacccaaaggatttgaaggaagcaattctttattttcagttttttcaaggattattag

SEQ ID NO: 988073 - DNA, 120 bp, Artificial Sequence
  ENSG00000281344_726 (sequence is synthesized)
tctattcagagtttctactcctagatgcaacatttacaatgaatgtccatttcatttccaatttaccttctagttgtgatgaactgtgtaatggcccctcaaagatatctaattcctgga

SEQ ID NO: 988074 - DNA, 120 bp, Artificial Sequence
  ENSG00000281344_727 (sequence is synthesized)
acctgtgaatgttaatttgtttgttaaaagggacttttcaaggtgcgattaaggtaaggattttgagatggggtgattatccttggttatccaggcaagcccagtgtaatcacaagggtt

SEQ ID NO: 988075 - DNA, 120 bp, Artificial Sequence
  ENSG00000281344_728 (sequence is synthesized)
ctcataagagagaaggtgatgtgctgaccgaagcagagattggagtgatgcattttgcagatggagaaatgggccaaaagcaaagagtactggtggcctctagaaactggaaaagacaag

SEQ ID NO: 988076 - DNA, 120 bp, Artificial Sequence
  ENSG00000281344_729 (sequence is synthesized)
ggaacaaattctgtcctaaggcttccaggaagaacgtggccctgccagcacctttattttataccagtgaaactgatccagactcctctcctccaaaactgtaagaaattaattttgtgg

SEQ ID NO: 988077 - DNA, 120 bp, Artificial Sequence
  ENSG00000281344_730 (sequence is synthesized)
tgttttaatacaccaagatctctgaaacttttttacagcagccccactgaggctgttagggtgagccctagtccaatctgactagtatcctttcagggaactaacaccccactgtaatat

SEQ ID NO: 988078 - DNA, 120 bp, Artificial Sequence
  ENSG00000281344_731 (sequence is synthesized)
ctaacaccccactgtaatatgatatttatatatttctttctatgtatatatctcaaatttaacagctttcttgagtataattcacataccataaaatttatccaagtataaaattcaatt

SEQ ID NO: 988079 - DNA, 120 bp, Artificial Sequence
  ENSG00000281344_732 (sequence is synthesized)
gtatgcataaccatatctgcagtcaattttagaacctttcaatcaccacaaaaagataacccatgtactttagctatcttctgcctgtccaccagtttccatatccctaagcagctacta

SEQ ID NO: 988080 - DNA, 120 bp, Artificial Sequence
  ENSG00000281344_733 (sequence is synthesized)
atctactttctgtctctatagattttccagttttagacaattcatatagatggaatcatatataacacgaggcccttgtgatcagcttatttcacttagtgtaatgttttcaaagttcat

SEQ ID NO: 988081 - DNA, 120 bp, Artificial Sequence
  ENSG00000281344_734 (sequence is synthesized)
ccacattgtagcatttatcagtactttattcctgtttttggttttgagacagagtctggctctgtttcccaggctagagtgcagtggcacgatttcagctcactgcagcctccacctcct

SEQ ID NO: 988082 - DNA, 120 bp, Artificial Sequence
  ENSG00000281344_735 (sequence is synthesized)
gccatcctcctacctcagcctcctgagtaactgggactataggcgtgcaccactccatccagctaattgtttttgtagaaatggggtttccccatgttgcccaggatgatctgcaactcc

SEQ ID NO: 988083 - DNA, 120 bp, Artificial Sequence
  ENSG00000281344_736 (sequence is synthesized)
gcaactccttggccttccgaagtgctgagattatttccttttatagatgaatattatcccactatatagacacaacacatttttatgtatccattaattagctgatggaaaagtttttat

SEQ ID NO: 988084 - DNA, 120 bp, Artificial Sequence
  ENSG00000281344_737 (sequence is synthesized)
gtagacatatgatttcattcctcttgggtatatatcgataagtagaactactgggtcatatggtaaccctaagtttaactgtttgaagaactttcagattgttttccaaaggctacatca

SEQ ID NO: 988085 - DNA, 120 bp, Artificial Sequence
  ENSG00000281344_738 (sequence is synthesized)
ttttgcatccctaccagcagtatatgagcattccgattcctccatatcttctccaacattgttattatatgactttttgattctaggcatcctactgggtataaagtgatatctcattaa

SEQ ID NO: 988086 - DNA, 120 bp, Artificial Sequence
  ENSG00000281344_739 (sequence is synthesized)
ggttttgatatgcattcccattataatggttatgacctgaattatcttccccaaacttcctgggttcatatgttgaatcccttatctcctgtatttcagaatgtgactgtgtttggagat

SEQ ID NO: 988087 - DNA, 120 bp, Artificial Sequence
  ENSG00000281344_740 (sequence is synthesized)
agggccttttaaataggtaattaagttaaaatgaggctgttagggtgagccctagcccaatctgactgatatccttataagaagagaagattaggacaaatagagagacaccagggatct

SEQ ID NO: 988088 - DNA, 120 bp, Artificial Sequence
  ENSG00000281344_741 (sequence is synthesized)
atgtgcacaaaagaaagaccatgtgaagacagagcaagaagacaaacatatgcaagccaaagagaagggcctcagaagaaagaaaacctgctgacaccttgatcttgttcttctagattc

SEQ ID NO: 988089 - DNA, 120 bp, Artificial Sequence
  ENSG00000281344_742 (sequence is synthesized)
cagaactgtgaaaaaatttttttctgccacctgctctatggtattttgttatggcagccccaggaaactcatgactaatgatgtcaagcatttttttcttgtgtttattggccatttgta

SEQ ID NO: 988090 - DNA, 120 bp, Artificial Sequence
  ENSG00000281344_743 (sequence is synthesized)
tattttctgtggataaatgttttctgagattgctcattttaaaattgtcttcttattgttgaattgttgagttgtaagagttcttatatattctgcatactatgcccttagcagacatat

SEQ ID NO: 988091 - DNA, 120 bp, Artificial Sequence
  ENSG00000281344_744 (sequence is synthesized)
gatttgcaaatatttcctctaattctgtgggttttcttttaccttgttgatagttcctttgatgcacaaaagtttttaattttaattaaagccaacttatctaatttttcatttcttgct

SEQ ID NO: 988092 - DNA, 120 bp, Artificial Sequence
  ENSG00000281344_745 (sequence is synthesized)
catgcttttggtgtcatatccatttcaaaatccaaggcatgaagatatttcctttatattttcttctgagagttttatagttttagctgttacgtgtatattcttaatccatcttggatt

SEQ ID NO: 988093 - DNA, 120 bp, Artificial Sequence
  ENSG00000281344_746 (sequence is synthesized)
aattattacctatggtgtgaggtaagggcccatttttttttttttttttggcatgtggctatgtagttgttttagcaatgatttgttgaaagagctattctttcactattgaattgtctt

SEQ ID NO: 988094 - DNA, 120 bp, Artificial Sequence
  ENSG00000281344_747 (sequence is synthesized)
gacacctttgtaaaaaataagttgactaaagacacatggttttattctggactcccagttctttttatttattttattttatccacagggtgtatatgtgcttgtttgttacatcggtat

SEQ ID NO: 988095 - DNA, 120 bp, Artificial Sequence
  ENSG00000281344_748 (sequence is synthesized)
attgtgtactggtggggactgggcttctagtttacccattacccaaatggtgaacactgtacctgatagatagttttttatcccttgctcccctccacaacctcctctcatttggagtct

SEQ ID NO: 988096 - DNA, 120 bp, Artificial Sequence
  ENSG00000281344_749 (sequence is synthesized)
tcccctccacaacctcctctcatttggagtctctagtgtctattatttccatctttaggtccatgtgtatccattgtttagctccctattgtaagtgagaacatgtggtatttgattttc

SEQ ID NO: 988097 - DNA, 120 bp, Artificial Sequence
  ENSG00000281344_750 (sequence is synthesized)
ctgcaaaggacataatttcattctttatggctacgtagtatcccatcgtgtatgtatgccacattttctttatctggtcaactgttgatggacacttaggttgcttccatgacttggcta

SEQ ID NO: 988098 - DNA, 120 bp, Artificial Sequence
  ENSG00000281344_751 (sequence is synthesized)
ttgcttccatgacttggctattgtgaataatgctgcaatgaacatacaaatacggatgcctttttgatatgattgtttccttttctttgggtggatagccagtagtgggattgctgggtc

SEQ ID NO: 988099 - DNA, 120 bp, Artificial Sequence
  ENSG00000281344_752 (sequence is synthesized)
cagtggtagttctatttttagttatttgagaaatctccatactgttttccatggaggttgaactagttcaaattctcaccaataatgtacaaatgttcccttttctccacatccatgcca

SEQ ID NO: 988100 - DNA, 120 bp, Artificial Sequence
  ENSG00000281344_753 (sequence is synthesized)
tttattgttttttcaccttttaatagtagccattctgactggtataagatgatattctgattttaatttgcaattctctgatgattgctgatgttaagcactttttcatgtgtttgttgg

SEQ ID NO: 988101 - DNA, 120 bp, Artificial Sequence
  ENSG00000281344_754 (sequence is synthesized)
ctgcttgtattttttcttttgagaaatgtctattcatattcttctcccaagttttaatggggttgttattttcttgttgagttatttatattccttatagattctggatattagtccttt

SEQ ID NO: 988102 - DNA, 120 bp, Artificial Sequence
  ENSG00000281344_755 (sequence is synthesized)
gtcagaggcataatttgcaaatattttctctcatttggtgggtggtctgtttactctgttgattatttcttttgctttttagtttaattaagtccaatttgtctattttcattcctgtta

SEQ ID NO: 988103 - DNA, 120 bp, Artificial Sequence
  ENSG00000281344_756 (sequence is synthesized)
atttgtctattttcattcctgttacatttgcctttgggatcttcatcataaaattatttgcctatgccaatgtccagaatagttttttctatgttttcttctaggatttttatagtttca

SEQ ID NO: 988104 - DNA, 120 bp, Artificial Sequence
  ENSG00000281344_757 (sequence is synthesized)
catcttgggttaattgttgtatatggtgagagatagaggtccagtttcattcttctgcatatggctagccaattttcccagcactatttattgaatagggtgtcctttcaccattgttta

SEQ ID NO: 988105 - DNA, 120 bp, Artificial Sequence
  ENSG00000281344_758 (sequence is synthesized)
tctttgttgactttgtcaaaaatcagttgattgttagtttgtggctttatatccaggttttctattccgttccattgatatttgtgccatttttgtactagtatcatgctgttttagtca

SEQ ID NO: 988106 - DNA, 120 bp, Artificial Sequence
  ENSG00000281344_759 (sequence is synthesized)
atgtagccttgtattataatttgaagtcaggcaatgtgatgcctccagatttgttcattttgcttaggatttctttggctattcaggctcttttttgattccatgtgaactttagaattt

SEQ ID NO: 988107 - DNA, 120 bp, Artificial Sequence
  ENSG00000281344_760 (sequence is synthesized)
ttttctaattctgtggaatatgacattggtaatttgataggagttgaatgtgtagattaatttaagcagtatggtaattttaacaatactgattcttccaatccatgagtgtgggatgtt

SEQ ID NO: 988108 - DNA, 120 bp, Artificial Sequence
  ENSG00000281344_761 (sequence is synthesized)
tccccatttgtgttatctatgatttatttcaacagtattttgtagttttccttgtagagatctttcaccttcttgattaaattaattgctaggtattttgtgtgtgtgtgtgtggctatt

SEQ ID NO: 988109 - DNA, 120 bp, Artificial Sequence
  ENSG00000281344_762 (sequence is synthesized)
gccaatgagattgagttcttgatttggcgctcagcttaaatgttattggtgtatagaaatgctgtcgatttatgtatgtttattttgtatattgaaatttgtttatcaagtctaggggtt

SEQ ID NO: 988110 - DNA, 120 bp, Artificial Sequence
  ENSG00000281344_763 (sequence is synthesized)
tttggaggagtctttagggttttctaggtatatggtcatgtgatcagtgggcagagataatttgacttcctcttttccaatttggatgctttttttcttttacctgattgctctgagtag

SEQ ID NO: 988111 - DNA, 120 bp, Artificial Sequence
  ENSG00000281344_764 (sequence is synthesized)
tgctcctagtactatgtgcaataggaatgctgagattggatatgcttgtcttgttccagttcttaaaggtaatgcaatcaacttttttccatttagtataatgttgactgtgggtttgtt

SEQ ID NO: 988112 - DNA, 120 bp, Artificial Sequence
  ENSG00000281344_765 (sequence is synthesized)
tttttatttttatttttattttttttagaggaataaaatagtggctactccataggcagagcagccaggtatggtcttttgatgcctagtttgttgagggtttttattatgaagggactt

SEQ ID NO: 988113 - DNA, 120 bp, Artificial Sequence
  ENSG00000281344_766 (sequence is synthesized)
gttgagggtttttattatgaagggactttggattttattgaatgccttttttcatgtattgagataatcatatggtttttctttttagttttgtatgtgtgatgaatcacccttttcaat

SEQ ID NO: 988114 - DNA, 120 bp, Artificial Sequence
  ENSG00000281344_767 (sequence is synthesized)
ttgcagatgttaaaccgtacttgcatcccagaaataaaacccacttgatcataattaattatttttctgatgtgctgttggattcagtttgctggttttttcttgagaatttttgcctct

SEQ ID NO: 988115 - DNA, 120 bp, Artificial Sequence
  ENSG00000281344_768 (sequence is synthesized)
atactcatcagagatattagtctgtagtttgcttttctgtgtgcgtgtactggcctgattttggtgtcatgatgatactggtttcattgaatgagtcacagaggaatccctcctccttga

SEQ ID NO: 988116 - DNA, 120 bp, Artificial Sequence
  ENSG00000281344_769 (sequence is synthesized)
gtttttggaatattttcagtaagattggtagcagctcttctctgtgtatctggtgaaatttggctatgaatctctccggtcctgggcttttatttgttgaaagatttttttattactcac

SEQ ID NO: 988117 - DNA, 120 bp, Artificial Sequence
  ENSG00000281344_770 (sequence is synthesized)
tcaatttcattacttattattggtctgttcaggatctctatttattcctggttcaatcttggagggttgtaggtttccaggaatttatcaatttcctctaggttttctagtttgtgtgca

SEQ ID NO: 988118 - DNA, 120 bp, Artificial Sequence
  ENSG00000281344_771 (sequence is synthesized)
tagaggtgtttatagtagtctctgaggatcttttgtatttctgtggcatcatttttaatgtcccttttctcatttctgattataattatttgaatctctctttcttggttaatctagcta

SEQ ID NO: 988119 - DNA, 120 bp, Artificial Sequence
  ENSG00000281344_772 (sequence is synthesized)
gcaatctatcaattttgtttatccttttaaaaaactaactttttgtcgcattgattcattatgtctttaaaaataatctcaatctcatttagttctgctttgatctttgttatttctttt

SEQ ID NO: 988120 - DNA, 120 bp, Artificial Sequence
  ENSG00000281344_773 (sequence is synthesized)
ctgctactagttttgggtttggattattattatttttctagttccttgaggttcaatgttaggttgttaatttgagatttttctatctttttttataagggcatttaatgctacagaatt

SEQ ID NO: 988121 - DNA, 120 bp, Artificial Sequence
  ENSG00000281344_774 (sequence is synthesized)
tcctcttagcactgcttttgctgtatactagagattttagtatgttgtgtctctatttttatttgtttcaagaagtctttcaatttctgccttaatttattatttacccaaaggtcattt

SEQ ID NO: 988122 - DNA, 120 bp, Artificial Sequence
  ENSG00000281344_775 (sequence is synthesized)
gggagcaagtagttttgctttcatgtacttgtgtagttttgagagttcctcttggtattgatttataattttattctactgtgatctgagaagatacttgttattattttgattttctga

SEQ ID NO: 988123 - DNA, 120 bp, Artificial Sequence
  ENSG00000281344_776 (sequence is synthesized)
gtttattgatacttgctttatgggcaaatatatagtcaattttggaatatattccatgtggaggtgagaagaatgtatattctgttagataaaatgttctgtgaatctctattagattca

SEQ ID NO: 988124 - DNA, 120 bp, Artificial Sequence
  ENSG00000281344_777 (sequence is synthesized)
tttggtctacatcccagttgaagtccagagtttctttgttgattttctgccttgatgatctgtctagtgatgtcagtggggtgctgaagtcccccactcttattatattgctatcaatat

SEQ ID NO: 988125 - DNA, 120 bp, Artificial Sequence
  ENSG00000281344_778 (sequence is synthesized)
gttttcttaggtctagtagtatttattttatgaatctgggtgctccagtgttgggtgcagatatatttaggatagttaaatcttcctgttgtattgacttctttatcattttataatgac

SEQ ID NO: 988126 - DNA, 120 bp, Artificial Sequence
  ENSG00000281344_779 (sequence is synthesized)
cttttttgcccccttttttttttaactgttgttggtttaaagtctgttttatttgattgaggatgactactctctcttgcttttgttttccatttgcgtgatatatctttttcaacccat

SEQ ID NO: 988127 - DNA, 120 bp, Artificial Sequence
  ENSG00000281344_780 (sequence is synthesized)
ttactttgattctatagctgtctttagccagtatgtatgtctcttgtaggcagtacatgtttgggttttccttttttatacagtttgccactctgtatcttttaagtggagcatttaggc

SEQ ID NO: 988128 - DNA, 120 bp, Artificial Sequence
  ENSG00000281344_781 (sequence is synthesized)
cacatacattcaaggttaatattgatatgtgaggttttgtttctatcatgttgttgttagctgattgccttgggatttcaattgtgtaattgctttataaggtctgtgagctttttactt

SEQ ID NO: 988129 - DNA, 120 bp, Artificial Sequence
  ENSG00000281344_782 (sequence is synthesized)
atgtgatcttttatgatggtgaatgttgttgtttaatttccatgtttagaactcctttgaggttgggcagtggctcatgcctgtcattccagcactttgggaagctaagtgggaggattg

SEQ ID NO: 988130 - DNA, 120 bp, Artificial Sequence
  ENSG00000281344_783 (sequence is synthesized)
cttgaggccaagagttttagaccagcctggtcaacatagtgagacaccatctctactaaaacaacaacaacaaaaacaaaactccttcgagcatttcttggaggaccagtctagtgttga

SEQ ID NO: 988131 - DNA, 120 bp, Artificial Sequence
  ENSG00000281344_784 (sequence is synthesized)
attattgggtggcatttttttttctttaaagatgctaaaaatagacccccaatctcttctggattgtaagttttctgctgagaagacagctactagtccgatatgattatatatatataa

SEQ ID NO: 988132 - DNA, 120 bp, Artificial Sequence
  ENSG00000281344_785 (sequence is synthesized)
atgcaattagacacttctctcttgccattcaggattattttgtttacattgactttggatagtcttggtgaagttcttgcaatgtattatccagaaattctctgagcttcttgtatctgg

SEQ ID NO: 988133 - DNA, 120 bp, Artificial Sequence
  ENSG00000281344_786 (sequence is synthesized)
atgtcaaaatctctcctaaaaccagggaagttttcttgaagtatttctgcaaataggtttttcacactttttgctttttcttcttctccctctggaatacctataacttacaggtttgta

SEQ ID NO: 988134 - DNA, 120 bp, Artificial Sequence
  ENSG00000281344_787 (sequence is synthesized)
cacttttatatttcacaaaggctttgttcattaaaaaaaattttttaaatattatgtctgactgagttaatttgaaagacctgtcttccagctctgaaattctttcttccacttggccta

SEQ ID NO: 988135 - DNA, 120 bp, Artificial Sequence
  ENSG00000281344_788 (sequence is synthesized)
ttgttaacactttcaatgtattttgtaactccttgactgaatcttttatttctagaagttttgtgtgtgtgtatttttttaaatgacatttatctcttctttcatgtcctaaattgcttt

SEQ ID NO: 988136 - DNA, 120 bp, Artificial Sequence
  ENSG00000281344_789 (sequence is synthesized)
tctatttgtatgggttttctgctttttcttggatctcactgagcttctttaaaatcagtattttgaattatttatctgatatttcaaagacttcattttggttaggatttgttctgagga

SEQ ID NO: 988137 - DNA, 120 bp, Artificial Sequence
  ENSG00000281344_790 (sequence is synthesized)
gttagtattcccctttgggggtgttgttacattctgttttttccatactttcagagttgtttccctggttgtttcttatctggataagctgtctctccttcttattttttaattttgctt

SEQ ID NO: 988138 - DNA, 120 bp, Artificial Sequence
  ENSG00000281344_791 (sequence is synthesized)
ccctttggacaggattattttgcccccttgaggaggtgtctgtactgtatgatgtggtgtagtgtcctttgggtttggttctgggtattttcagtggcaaagagtctgtataaattcttt

SEQ ID NO: 988139 - DNA, 120 bp, Artificial Sequence
  ENSG00000281344_792 (sequence is synthesized)
ggtaatagcctttgtatggtgactttctcaaatgctggttgttgtagtgatgtgctaagcatgtgagcagcctcactcactgcctcctgtgggctcagggtgatggaagtctcaggaagc

SEQ ID NO: 988140 - DNA, 120 bp, Artificial Sequence
  ENSG00000281344_793 (sequence is synthesized)
ttatttcattctccagtactctgcacttgagtcagcagatttcctgttgtgttgcaccattcaacttccaggccagtaggtggtgcttatgtctgtttttatctcctacacccttgtggt

SEQ ID NO: 988141 - DNA, 120 bp, Artificial Sequence
  ENSG00000281344_794 (sequence is synthesized)
tcttatgcttagtgttctacccatgagtgaaaattgggtattgaagtacccaattattgatgaattgtctatttctctcttcatttaaatcaatttatgcttcatatgtattggtgctct

SEQ ID NO: 988142 - DNA, 120 bp, Artificial Sequence
  ENSG00000281344_795 (sequence is synthesized)
gttgttaggtgcatatatatttttgattgatgtatctttctggttaattgaccttttaaaaaacatcttcttttatctatagtaatatcttttgttttaaggtatattttgtcaggtaat

SEQ ID NO: 988143 - DNA, 120 bp, Artificial Sequence
  ENSG00000281344_796 (sequence is synthesized)
tgtataaccattccaactttcttgtggttgctgtttgcatgatatttctctttcatctttttactttaagtctatttgtattttgaatctaaagtgtgtttcccatagatagcatgtatt

SEQ ID NO: 988144 - DNA, 120 bp, Artificial Sequence
  ENSG00000281344_797 (sequence is synthesized)
gactcttgttttttgatctagtctgagaatctctgccttttgactggattatttagtccattcacctttaatgctattattgatatagttggaattatgtttgccatttttgttttttat

SEQ ID NO: 988145 - DNA, 120 bp, Artificial Sequence
  ENSG00000281344_798 (sequence is synthesized)
atatctcatgtttctcttgttcctctgtttctgctttactgctttcttttgcatgaagtgaatattttataatgtagcattttaattttttaaattattttttcactatatttttgagtt

SEQ ID NO: 988146 - DNA, 120 bp, Artificial Sequence
  ENSG00000281344_799 (sequence is synthesized)
attagtggttactctagggtttttctatatacactgtgacttataataatcagtttgagatttatactaaattaattctagtgagatacagaaatgttacttctatatacctttgttccc

SEQ ID NO: 988147 - DNA, 120 bp, Artificial Sequence
  ENSG00000281344_800 (sequence is synthesized)
ttccccccatttttgtgatactattcttattcatattacatctattacatctaatatctgaatattacaaacccaacaatgcattgttgtaatgataaatttacacgcttttatgttttt

SEQ ID NO: 988148 - DNA, 120 bp, Artificial Sequence
  ENSG00000281344_801 (sequence is synthesized)
taaggatattgaggagagcaaatacagacacacacaaacacacacacacatttatagcttttgttgtgttagccttttaatttatcatttctggttctcttcatttgttcctgtgcatac

SEQ ID NO: 988149 - DNA, 120 bp, Artificial Sequence
  ENSG00000281344_802 (sequence is synthesized)
aagttgccatctgaagtcatttccttaatccaatacagctttgcccccacccacctcttttgttctattattgaccaatattacatttttatgttataggctcaacatcacattatatac

SEQ ID NO: 988150 - DNA, 120 bp, Artificial Sequence
  ENSG00000281344_803 (sequence is synthesized)
ttctttatacaattacttttaaaatcttttagaagaagaaaggaaaagaaatgccttgacttttacaattagataattacctttcctggttctttttgcttttttcatatatatattcca

SEQ ID NO: 988151 - DNA, 120 bp, Artificial Sequence
  ENSG00000281344_804 (sequence is synthesized)
attactctcagggttcacttgtttgtagcatgaatttcttttagtacttcttataaggtaggtctgctagcaacacattccctctgtttttattaggacatgtcattattttaccttatt

SEQ ID NO: 988152 - DNA, 120 bp, Artificial Sequence
  ENSG00000281344_805 (sequence is synthesized)
ttggtggatatagaattcttggttaataattgctttttttggttcattctgaatatgttgtccttctggcctcaattaattctgctgagacatcagctgttaatcttcctggagtttcag

SEQ ID NO: 988153 - DNA, 120 bp, Artificial Sequence
  ENSG00000281344_806 (sequence is synthesized)
tctaagtgatgagtcatttttatcttgatgtagtcaaaattttcttattgtctttagctttagctttttcacttttaggtgtcttttgatgtgacattgtaatcatactttttaaatcat

SEQ ID NO: 988154 - DNA, 120 bp, Artificial Sequence
  ENSG00000281344_807 (sequence is synthesized)
ggcccattttatttgaaaatattatttgaaattatttataatctctactttgaaaactttttctgttcaatctgacatctgatgtctgttaaatctgacatctggtaagtcttccaggca

SEQ ID NO: 988155 - DNA, 120 bp, Artificial Sequence
  ENSG00000281344_808 (sequence is synthesized)
gtttctgttgtctacaattttttttcagtgtattgcttattctttcctgcttctttatatgtctcataattttttgttgaaaaattttaggtagtatattgtaataatactgggtactgg

SEQ ID NO: 988156 - DNA, 120 bp, Artificial Sequence
  ENSG00000281344_809 (sequence is synthesized)
tcttctggggcttgttgttatttgcttatttacttgtttgttgattgactagattattttggtgtaatttatttcttcctctgaagcataaagtctataaagttgtttctcaggggatgc

SEQ ID NO: 988157 - DNA, 120 bp, Artificial Sequence
  ENSG00000281344_810 (sequence is synthesized)
agtttgatatgctcacagtcagctggcaacacagtggatttgggagagctctcttttgtctttttctctggtcatacccaggtattatgctccactacttacttgctggctgatggctct

SEQ ID NO: 988158 - DNA, 120 bp, Artificial Sequence
  ENSG00000281344_811 (sequence is synthesized)
gttgctttcaacaatgccctggaatatagattgttttacaaactgacccaaaaatttgggctcttcttaaaaaattgttcctgaggtcagtttttgagatttgttttgaccctaagaggg

SEQ ID NO: 988159 - DNA, 120 bp, Artificial Sequence
  ENSG00000281344_812 (sequence is synthesized)
ttcctcccagatgtcttgctttctatttctctatagcaaatcatccagcttacaacttaggctatatctctaacaaatctatcaattttttcccaattgcttttcacaaactttcactgt

SEQ ID NO: 988160 - DNA, 120 bp, Artificial Sequence
  ENSG00000281344_813 (sequence is synthesized)
ttttgagagtgactttaggcttgaaattgtccatggtttgttggaaatgaagtcaatttctttggggagagattttaagtattctgttatacagcgtgcttctctacgtttgggcaaaat

SEQ ID NO: 988161 - DNA, 120 bp, Artificial Sequence
  ENSG00000281344_814 (sequence is synthesized)
ctctgagccacagctctggtcctggaacagggacaatgacagacttccctctaaatgatatacccactttaagtgctagtaacttttggtgtgtgtgtgaagtggtcccagttcaactcg

SEQ ID NO: 988162 - DNA, 79 bp, Artificial Sequence
  ENSG00000281344_815 (sequence is synthesized)
ctgtcaaggacagagccacgtggagattgaatcatgggggcagtttaccccattctgttcttgtggtagtgaatacatc

SEQ ID NO: 988163 - DNA, 120 bp, Artificial Sequence
  ENSG00000281344_816 (sequence is synthesized)
tcaaggacagagccacgtggagattgaatcatgggggcagtttaccccattctgttcttgtggtagtgaatacatctcatgaaatctgatggctttataaatgggagttcccctgcacaa

SEQ ID NO: 988164 - DNA, 120 bp, Artificial Sequence
  ENSG00000281344_817 (sequence is synthesized)
tgctcctcattcactttccttcatgattgtgaggcagccttgtgggactgtgagtccgttaaacctctttgctttacaaattacccagtcttgagtatgtctttattagcagtgtggaac

SEQ ID NO: 988165 - DNA, 120 bp, Artificial Sequence
  ENSG00000281344_818 (sequence is synthesized)
agattaatacaggcatctgttaaagcagactaaatatggcctgagaaggactctgtatttctatatttgagtccttgtagatgaactgtaacctagcttaatagccagacaaaattgaaa

SEQ ID NO: 988166 - DNA, 120 bp, Artificial Sequence
  ENSG00000281344_819 (sequence is synthesized)
acctaacttaatagtatgcaccgtaacaatagttgagtgttggccattccagtggtcatacttcaaccactcatagactgctgagtgttcaaacaaggcaaacgcagagctgtgaccaac

SEQ ID NO: 988167 - DNA, 90 bp, Artificial Sequence
  ENSG00000281344_820 (sequence is synthesized)
ctgagtgttcaaacaaggcaaacgcagagctgtgaccaacctcactgtttctgtacttcacttttgattcccatacatcactttaacttt

SEQ ID NO: 988168 - DNA, 120 bp, Artificial Sequence
  ENSG00000281344_821 (sequence is synthesized)
attgctcaattaaactcctttaaatttaactcagctgaagtttttcttttatcagataatgtcagaagcaggatccaaagtggagcttctagtgacccccaggagtgctgagtaaacacg

SEQ ID NO: 988169 - DNA, 120 bp, Artificial Sequence
  ENSG00000281344_822 (sequence is synthesized)
aggagtgctgagtaaacacgcaaggtacctgcaggacccacttgtgtccattgatctctcagagcagctgggcatcgtgggtaagttccctcttggattttggagctccacggatttgtg

SEQ ID NO: 988170 - DNA, 120 bp, Artificial Sequence
  ENSG00000281344_823 (sequence is synthesized)
ttttgagctctctgagtttctttgggcaaatttctgatccaaactgggtttggagttgtgacagaaactggactgggtccaggaacagatttgatccgggaattaactggcttggatcca

SEQ ID NO: 988171 - DNA, 120 bp, Artificial Sequence
  ENSG00000281344_824 (sequence is synthesized)
cctcttacatctgactgggtcagaaaggaactggtagtaagcagtaatatttcaggggttatagagtttggcttttgaaaattcacaaggatttttgtgctctacccttttgttcatttt

SEQ ID NO: 988172 - DNA, 120 bp, Artificial Sequence
  ENSG00000281344_825 (sequence is synthesized)
ttcatttttcttgcctgcatcggtaggaaaaaaaatcattggataagttaatcaagagagcctgagagtaaagccaatattttaggtaaaaatggaatccttaatttctggaaaactgag

SEQ ID NO: 988173 - DNA, 120 bp, Artificial Sequence
  ENSG00000281344_826 (sequence is synthesized)
ttccttctggcttatactttaggcctgggaggcagtgaagtcttacagaaatggcaaaatcttactaaaggtaacttacagtggaacgttccgaatgaacaacaatgcactgaagtacat

SEQ ID NO: 988174 - DNA, 120 bp, Artificial Sequence
  ENSG00000281344_827 (sequence is synthesized)
ttacaaatgagggctcttggtaaagtcccttttggctaagaacagggttggcactacgggatgtcaactgctgttttctttggaataatctgccttgcactctttgctgacaactatggg

SEQ ID NO: 988175 - DNA, 120 bp, Artificial Sequence
  ENSG00000281344_828 (sequence is synthesized)
tgacagaattaggatcgtgggacacggagagctttttcctcccccaaaagggaaaacttgaaagctgatgggactgctggaaaaaaaatccttttacaacagcagctgcagccgcctgaa

SEQ ID NO: 988176 - DNA, 120 bp, Artificial Sequence
  ENSG00000281344_829 (sequence is synthesized)
cttctcagtatcactgcaatgggttggtttttctctggtcttcctgagcattttgccttccccaccctgccataggcaaaccttttctctctctcctttctgtttttcatcttttctgtt

SEQ ID NO: 988177 - DNA, 120 bp, Artificial Sequence
  ENSG00000281344_830 (sequence is synthesized)
actcagggcaaccatcatgcccagagaccatgtgttgaaactcctagtcagaggttggattaaagatgatggggcccagctgagggcaaatttaagccttgtcagtttgatattgggtgc

SEQ ID NO: 988178 - DNA, 120 bp, Artificial Sequence
  ENSG00000281344_831 (sequence is synthesized)
taagcagagtggctaatgtctgtttatcacatgtgttttactctggccagaatgaaaaaagataattttcctttatgatgcagcttgtcccccaatgggatggtgtggcaagctgggtta

SEQ ID NO: 988179 - DNA, 120 bp, Artificial Sequence
  ENSG00000281344_832 (sequence is synthesized)
ccggggccacttagggaaaggaaacacagaaacctggcatgcaggccaaagggtaagaatttcttaccagtcagatttctggcttctccctctctgtgcagacagttgattaaatggtaa

SEQ ID NO: 988180 - DNA, 69 bp, Artificial Sequence
  ENSG00000281344_833 (sequence is synthesized)
cactgtttatctcttctgtaaagttttgattaatgcaaaaaagaattccgaggctagtcttaaactgat

SEQ ID NO: 988181 - DNA, 120 bp, Artificial Sequence
  ENSG00000281344_834 (sequence is synthesized)
ttaatgcaaaaaagaattccgaggctagtcttaaactgatatatttgtgctatgaatttgtttttctgtgtcaaggggtgccttaagataaaacatgggcttaggaccccataagctcgc

SEQ ID NO: 988182 - DNA, 120 bp, Artificial Sequence
  ENSG00000281344_835 (sequence is synthesized)
tgctcaagatggcccagcaggctggtcaataacaaactttcctgcaggtccctgaaacaaacaaatgaaaaactggatggggtctccatcttgtttcatgtccttgggagcttgaccttg

SEQ ID NO: 988183 - DNA, 120 bp, Artificial Sequence
  ENSG00000281344_836 (sequence is synthesized)
taaccacgtggcagtactttctcttggtctccaccttccagggaacacgaattttaggttttatgtcatagttagctctaaaaattatcttaagtagttaaaagcctctacaagctcaaa

SEQ ID NO: 988184 - DNA, 120 bp, Artificial Sequence
  ENSG00000281344_837 (sequence is synthesized)
attaactactctagactccttctgggaagaacagtggaactttccctgtggtatagcttggtacataaggttttggcctttcacactagaagtccaggttcaattccctgcttagaaagc

SEQ ID NO: 988185 - DNA, 120 bp, Artificial Sequence
  ENSG00000281344_838 (sequence is synthesized)
aagccttttctggtttaatatctacataaccttgtctagtctcttctccaccatggactatcctaagttttcctttcgctgagcacctgggaggttacctttggtaaagttcaaaaccag

SEQ ID NO: 988186 - DNA, 120 bp, Artificial Sequence
  ENSG00000281344_839 (sequence is synthesized)
aaatattggccaaactgggtaataagaaattttaaaaggatattattaaagggtgctatggttaaaagtcagcttaattaaaagcagatattcaagctctaagagcctggattccttggg

SEQ ID NO: 988187 - DNA, 120 bp, Artificial Sequence
  ENSG00000281344_840 (sequence is synthesized)
aaaaacaggaggcaccagaaacccatttcctggccctgttcttcctagggctccaccctaaagccaataaccaattaagaaacttaaaaactggcaaatgaaaaatcttataactactgt

SEQ ID NO: 988188 - DNA, 120 bp, Artificial Sequence
  ENSG00000281344_841 (sequence is synthesized)
agtaatcttcttatgtctgtctatttgtgtaattatatatgtgttgtgtgtaatgtttatataaaagagctccaattaattggcttaaacaaaaacaagtgcttaaataaaatattttga

SEQ ID NO: 988189 - DNA, 120 bp, Artificial Sequence
  ENSG00000281344_842 (sequence is synthesized)
aagcaaaataaaaactgtaaggccttttagttcatgtaactttagtaattactgggaaataaaaacagctttaaagattattgataaaataaacacattttgtctaaattatgccggtca

SEQ ID NO: 988190 - DNA, 120 bp, Artificial Sequence
  ENSG00000281344_843 (sequence is synthesized)
aatgctttaaggtcataaactgctttgacttttgaaaattgttcaatttattttgaagacattaaattctaaataaggcctggggatatatggaattatccatgtcccctagctatgcaa

SEQ ID NO: 988191 - DNA, 120 bp, Artificial Sequence
  ENSG00000281344_844 (sequence is synthesized)
tcccctagctatgcaaagaaggttataaagagattttacataagaaaggatgttttttggtaaattattgtcctaaagtaaaatgactggttgtttaaaaagagggatgtttagggcagg

SEQ ID NO: 988192 - DNA, 120 bp, Artificial Sequence
  ENSG00000281344_845 (sequence is synthesized)
tcagaaagtctaaacatgtcatacatggtatgtgtaagtcgtgacaatttatgaaaagaaattaatgccagaaatgctttacaatttatttttttattattattattttttattatactt

SEQ ID NO: 988193 - DNA, 74 bp, Artificial Sequence
  ENSG00000281344_846 (sequence is synthesized)
tcccccgttttacaatttaaaggtgattaggcttcctaaatgcttcataaaatgccactatgactcttaactgt

SEQ ID NO: 988194 - DNA, 120 bp, Artificial Sequence
  ENSG00000281344_847 (sequence is synthesized)
cctaaatgcttcataaaatgccactatgactcttaactgtacagcttgcctactctacagctgggtaaggcctgggacacatggagttagacactggaaaggctcagatcttatctgcat

SEQ ID NO: 988195 - DNA, 120 bp, Artificial Sequence
  ENSG00000281344_848 (sequence is synthesized)
ttctgtttgggtcgtaggctccacacctagtacataattaaaatcccttaccaaggttttcaccaaaagtaaaagatgctaagagttaacattttaatatgtaattgagactactgaaaa

SEQ ID NO: 988196 - DNA, 120 bp, Artificial Sequence
  ENSG00000281344_849 (sequence is synthesized)
aataagtttacatacaaggtttgtaaagggaataaaatgtgtttttgtgagagattataagaaagtatgggaatgtaaatttttgtctaggttagagggttaaagatttattttgaatta

SEQ ID NO: 988197 - DNA, 120 bp, Artificial Sequence
  ENSG00000281344_850 (sequence is synthesized)
aaaagctaaaggttagaacaagttgtgaatggtttataaaaattaattacaagagattctatgtgtgaatgtattggctaaagttaaaatggcattattcattttttttctataaattgg

SEQ ID NO: 988198 - DNA, 120 bp, Artificial Sequence
  ENSG00000281344_851 (sequence is synthesized)
acattggaatagaagaacaacagagttttcttagaacattgttctgctctgagaaaaaaagttgtaaagggttataaaaggtttatgaaaatcttaccttatggtcaaactaattaaaac

SEQ ID NO: 988199 - DNA, 120 bp, Artificial Sequence
  ENSG00000281344_852 (sequence is synthesized)
aaatgtcattaaaaactagctttaacataaaaaatacactaatgggaacataaaatttgtttttctcttttaaaaaggatttttatgtaatattaaaagataaaaggttttagtttacct

SEQ ID NO: 988200 - DNA, 120 bp, Artificial Sequence
  ENSG00000281344_853 (sequence is synthesized)
tttagtttaccttttaagtaagctacaaaagggaaaagtggagggaaggaaagaaaggagacagagtcaattgtcctaatgctatcttcattgggtcttgcttggaaagctgagtctcct

SEQ ID NO: 988201 - DNA, 120 bp, Artificial Sequence
  ENSG00000281344_854 (sequence is synthesized)
ctttatcagaatgttttgtccttttaaaaatttttgagttatcattttggctaaatgaatgacttatggtaacctaagattctatttggtaatatccaatgttttaaacatttggtattt

SEQ ID NO: 988202 - DNA, 120 bp, Artificial Sequence
  ENSG00000281344_855 (sequence is synthesized)
aacaaacctttcaaaatcaagctctagattatcatgctaaatcagccaatactaaaattgtttaaatatacaatttaaatgaactccctggtctaagtcaaattacctatgataacccat

SEQ ID NO: 988203 - DNA, 120 bp, Artificial Sequence
  ENSG00000281344_856 (sequence is synthesized)
tagttatcagtgctatgcatctaaattggagaaacaactggtattcaagaggacatgagtctgatgttaagcatggactcatgaagaaccaggacagcctcctagtccttcccgagtcct

SEQ ID NO: 988204 - DNA, 120 bp, Artificial Sequence
  ENSG00000281344_857 (sequence is synthesized)
taaagctcttgttactaaaggttctgcattccatgactcatcacggaaaagataaaataatccaaatagaatatactgatgtggtgacttatagatagtggaaatattttaaaaccaatg

SEQ ID NO: 988205 - DNA, 120 bp, Artificial Sequence
  ENSG00000281344_858 (sequence is synthesized)
tttggtttcatattcctgggaaggcaatcaaagcttcaggtacatttggctacctaatgtgtcatttaaacatttataaagagatttcattcaattgtcattttcactgcatgttttctg

SEQ ID NO: 988206 - DNA, 120 bp, Artificial Sequence
  ENSG00000281344_859 (sequence is synthesized)
ctttcccatgcaagagggctgatgtaacagtagattattgtgctaccatgtattttcaccaggtaaagaccttcacaatcgggaacccgtagattggatcttctgaaaacatcagagaaa

SEQ ID NO: 988207 - DNA, 120 bp, Artificial Sequence
  ENSG00000281344_860 (sequence is synthesized)
acatcagagaaagactatctttgccatccacactacagtaaaactttggagccttgaaccttggatttataatctcacaactgagaagggtccctccatactcctggaactgtacaccca

SEQ ID NO: 988208 - DNA, 86 bp, Artificial Sequence
  ENSG00000281344_861 (sequence is synthesized)
ctgagaagggtccctccatactcctggaactgtacacccattggaactcttaaggtaaaactaaccaggaaagtttctccccagaa

SEQ ID NO: 988209 - DNA, 120 bp, Artificial Sequence
  ENSG00000281344_862 (sequence is synthesized)
cctttgaatatttttaccttgtttatgcctctatgagcaacagaaatgaaaagtgggtctataatgtgcacttatagggtataattttatttgtgaaggattttgcgggaagccagcctt

SEQ ID NO: 988210 - DNA, 120 bp, Artificial Sequence
  ENSG00000281344_863 (sequence is synthesized)
atacataaataaacttatactttaatagataaaagatgaaggcccaaggtgggtgagaaactttagtggtacatatgttgactcataatcagtcaaaactcctcttaacccacatcatgg

SEQ ID NO: 988211 - DNA, 120 bp, Artificial Sequence
  ENSG00000281344_864 (sequence is synthesized)
ccaggaggccttcactcttctagaaggacataatttgttaggtcctttttccatggtttagaatacaagaggcaataattagaaatgtctccctcttaataggcatgggttcaaataagg

SEQ ID NO: 988212 - DNA, 120 bp, Artificial Sequence
  ENSG00000281344_865 (sequence is synthesized)
atgggttcaaataaggcaaacgtggagctgtagccaatctcgctgtttgtgtacctcacttctgattcctgtgtgtcactttaacatttttgtctatacattttttctgaccaggagaca

SEQ ID NO: 988213 - DNA, 120 bp, Artificial Sequence
  ENSG00000281344_866 (sequence is synthesized)
ccccatgagccagggaaagggcaactgaggccgcagtattttcagtggcaccaaggtacaccctgtattccacgagtagggtctggagagaagggagtccccgcctctcaaccagatttc

SEQ ID NO: 988214 - DNA, 120 bp, Artificial Sequence
  ENSG00000281344_867 (sequence is synthesized)
agaaactatagtagatcttctatcctcaaggaaatgcatcttatttctggtatcagaatcaaggagaagcaggcaagactgttctataagatgagttagcatcctggagggtttttagac

SEQ ID NO: 988215 - DNA, 120 bp, Artificial Sequence
  ENSG00000281344_868 (sequence is synthesized)
tcaggaatggggatctctagggaaccgatagtaaaggttcctactaatctgggcaaatagagcttagtgttgcattacagctgttttctaagatggtcaatattgttctactctcttcct

SEQ ID NO: 988216 - DNA, 120 bp, Artificial Sequence
  ENSG00000281344_869 (sequence is synthesized)
ccattcagtaccttttttaaaacaattactcagaggtcattgcttatatcccaaactacttattaggacaatatcagttataaaaggttgctggattctctttgatttgtgccagcttcc

SEQ ID NO: 988217 - DNA, 120 bp, Artificial Sequence
  ENSG00000281344_870 (sequence is synthesized)
catcacttgctgctaggaacctcatatcataagctgggagactggttgatatgcatagctccttacctattttatagtgttttccagtcttttatttcatgtgaattctgattgcctaac

SEQ ID NO: 988218 - DNA, 120 bp, Artificial Sequence
  ENSG00000281344_871 (sequence is synthesized)
aagaaattttcttatcctactaaatttctcactaagaggaaatgtcaagcctctaaagctcttcccagctatctgtactcacagttaaattgaactgcagagactggtatgagtagctga

SEQ ID NO: 988219 - DNA, 120 bp, Artificial Sequence
  ENSG00000281344_872 (sequence is synthesized)
ttgaggaggtaatgaaatatcccaggctgcttttggcagcaactctgaatcaaccaaggccagccaaggcaaactttaaacgcaaaaacccggactaaatggatgaatttattctaatgt

SEQ ID NO: 988220 - DNA, 120 bp, Artificial Sequence
  ENSG00000281344_873 (sequence is synthesized)
atttttgtccacatgcctctgcaaattgtttacaggttttctgccttttgactagtagaattttttattgcattcagatagatcattgatgaacactgctagtttcctgggctattgaaa

SEQ ID NO: 988221 - DNA, 120 bp, Artificial Sequence
  ENSG00000281344_874 (sequence is synthesized)
atttgcctttcttattgggttttcatgaatgtttctctggtagagaaaggaggttaaaaaaatgagagattgctaactttctaccatcataaagtctggatttggatactgttttatggc

SEQ ID NO: 988222 - DNA, 120 bp, Artificial Sequence
  ENSG00000281344_875 (sequence is synthesized)
aaagacagtaatgttcccccaaatttcctagaattcttgcagttgggttgagtcatgtggttagttgtggtcaatgggctcgaaatgacatatattgcctctgatatgaatcttagaaga

SEQ ID NO: 988223 - DNA, 120 bp, Artificial Sequence
  ENSG00000281344_876 (sequence is synthesized)
gtccacacaaacgtctccatctatcttttacttttctctattgaccaagaaggccatatggtagagccttcatcatcctgaataattggggaagagatctttttgacccgacaattgata

SEQ ID NO: 988224 - DNA, 120 bp, Artificial Sequence
  ENSG00000281344_877 (sequence is synthesized)
agagccctggcaagtagtgtgagccgcagtaaactatttttggtacaagccagtgaggtttttaggggtggtttgttattgcagttgcctatcctgactaatgtatttttctacatacct

SEQ ID NO: 988225 - DNA, 120 bp, Artificial Sequence
  ENSG00000281344_878 (sequence is synthesized)
aaaccatcaggtttcatcaaaacattggtggaaaataagaatatttctagatgatttgttggcttttcattcaagttgaatatgtacctatctattggttgaaaaaattaatagggattg

SEQ ID NO: 988226 - DNA, 120 bp, Artificial Sequence
  ENSG00000281344_879 (sequence is synthesized)
tagacatgttattcttagtaggacaggacaggataatggtttttgaacattctccctgctgtatattagctttgcttttaaataaatacagtagtgaggtgtgtttatcagtgtttattc

SEQ ID NO: 988227 - DNA, 120 bp, Artificial Sequence
  ENSG00000281344_880 (sequence is synthesized)
tcccactattggataacaggggctccttgatctaaaatgataggtaagtgatcccctctactgtcctaaggtcattacttattgacacctccctattatgcctagtcaatgtgtgataaa

SEQ ID NO: 988228 - DNA, 120 bp, Artificial Sequence
  ENSG00000281344_881 (sequence is synthesized)
agattgcatggaaatgacaggcatgaaccaggatcttttctcctctgtcctccttttcatttgccttttgatgtttctgctgctatttggcacctccactagaagattagaaggggaaaa

SEQ ID NO: 988229 - DNA, 120 bp, Artificial Sequence
  ENSG00000281344_882 (sequence is synthesized)
gagaggaaattaagctcttttcctgcagactagcagttctgatttttaaagggtacctcggggtattgtttcatctacttatgagtttcaggagtgtgtgtttgtgtgcgtggtggtggg

SEQ ID NO: 988230 - DNA, 120 bp, Artificial Sequence
  ENSG00000281344_883 (sequence is synthesized)
ggagaagagaaagagagaaagacacagagagagagacagatataattaaacatggagtttgagtttccatgttatctgattctaggaatttagtgttgcctccatatttatcaagaatta

SEQ ID NO: 988231 - DNA, 77 bp, Artificial Sequence
  ENSG00000281344_884 (sequence is synthesized)
tctaggaatttagtgttgcctccatatttatcaagaattatagtcctttaccgtaatttactataatgtattatgtt

SEQ ID NO: 988232 - DNA, 120 bp, Artificial Sequence
  ENSG00000281344_885 (sequence is synthesized)
gagatggagagagagagagagaattaaacggattttcagagtttccacattatctgattctaggaatttagtgttgcttctatatttaccaagaattatagtcctttaattattatggag

SEQ ID NO: 988233 - DNA, 120 bp, Artificial Sequence
  ENSG00000281344_886 (sequence is synthesized)
gataactaaaaatatcctgcataataattaaaagttccttattttcaagtggcataatgactttctgtgctaagatcacttgaaaatgttaattaaagaaatctatttgctcaaaaaaac

SEQ ID NO: 988234 - DNA, 120 bp, Artificial Sequence
  ENSG00000281344_887 (sequence is synthesized)
taaatgtgcatactttacacctgtggtaaataatataaaattataatttgcctttgagcttaatcaaaatcagctttaaatttattaggcacctgacttttttatttttaattaaagacc

SEQ ID NO: 988235 - DNA, 120 bp, Artificial Sequence
  ENSG00000281344_888 (sequence is synthesized)
attttgttcagtatgtagtttaaatcatggaagcgtagttacttctcaagcaattcctttaagacttggggcttctgtgtttgaagggatccaggggttacagtgtgggcagtaccccta

SEQ ID NO: 988236 - DNA, 120 bp, Artificial Sequence
  ENSG00000281344_889 (sequence is synthesized)
taccaatttaaggtttttcttactcagtaagatgttttctaagatgaaagagatgggtatattctatgtaacagagataaatgtaaaattttattcaccctatgggaaaaatttggatag

SEQ ID NO: 988237 - DNA, 120 bp, Artificial Sequence
  ENSG00000281344_890 (sequence is synthesized)
attcctcttggcagtgaaaggtataaaatgaacttaaaggatgactctccataacataatattgagtgaaacaagaataaacacattatgactccatttataaaatatttttaaggtaaa

SEQ ID NO: 988238 - DNA, 120 bp, Artificial Sequence
  ENSG00000281344_891 (sequence is synthesized)
attaagcaatttattgtttaaggacacatgtttggtaaaaccataatgaaaaacacatggaaatgaacacaaaataccatctaatgcttactttggggaacgggaagagagcctcaaaca

SEQ ID NO: 988239 - DNA, 120 bp, Artificial Sequence
  ENSG00000281344_892 (sequence is synthesized)
gagagatgtatgtggaggtttctaccactttagtgttatatttctaaagttgagttgtgaatacacagatgttgatttctattctagttcttcacactgtacatatgttttctgtactct

SEQ ID NO: 988240 - DNA, 120 bp, Artificial Sequence
  ENSG00000281344_893 (sequence is synthesized)
tttggaactatactgtattttatgtatagttcaataagtgatagttcaatatgaattgttgatgtgatatgactcactcaaaagagttagtgtctcttgtacataatattgttaagaaac

SEQ ID NO: 988241 - DNA, 120 bp, Artificial Sequence
  ENSG00000281344_894 (sequence is synthesized)
ttggagttaaggaaattgaaggtattgtcatatccagccttgatcagaccatgctttagtactttgttcagttatatgcagcccactttaagagtgatgcagacaaactagattatgttt

SEQ ID NO: 988242 - DNA, 120 bp, Artificial Sequence
  ENSG00000281344_895 (sequence is synthesized)
aggggacagtgatgaggctcgtaatgattcttgaaactatatatgatatatgattcttcatatatttgaagggaagacatgagaatgagagcttagatttatactacatactcaaaagaa

SEQ ID NO: 988243 - DNA, 120 bp, Artificial Sequence
  ENSG00000281344_896 (sequence is synthesized)
tagaatcaaaattaatagatgatgcaacaagaaaatattttattgtaacaaaaatagattttatcataacagaatcaagaacttactaataactacatttgttcaatgagtcgtcttgat

SEQ ID NO: 988244 - DNA, 120 bp, Artificial Sequence
  ENSG00000281344_897 (sequence is synthesized)
acatagtgagtttcttactggtggagatgttctagcacaggttgaatgatctcttggtgggttattatcaggagatatgcctaaaagtcattctgggtcccgaaattcttcgaagatttc

SEQ ID NO: 988245 - DNA, 120 bp, Artificial Sequence
  ENSG00000281344_898 (sequence is synthesized)
cagaaatctctagtcaacctgaaatttctattcaagatctcttagttaagtggcagcggagtgagtaaaatcacagagtctaggaccagattcctgggttgaatcctggcgtttttcaat

SEQ ID NO: 988246 - DNA, 120 bp, Artificial Sequence
  ENSG00000281344_899 (sequence is synthesized)
tactacctgtataaccttgagaaaattacttctctgtgtttcctttttgcaatccataaaatgggtctatcagcctcacagagtggttgtaagacttagaagaatgccagatagtaagtg

SEQ ID NO: 988247 - DNA, 120 bp, Artificial Sequence
  ENSG00000281344_900 (sequence is synthesized)
agtgccactaaatgtttatttttttaagaaataatttttttctaaagatcagtcattcaatttactttgaatcaattacatttttgcttttgttttaaataaaaaaactttatttctctc

SEQ ID NO: 988248 - DNA, 120 bp, Artificial Sequence
  ENSG00000281344_901 (sequence is synthesized)
cctatgagcaaatatatttaattatcctctgacatacaagggtattggagttttttttttttttaattttgtgggccctaaattctaacaattccagtaagtatagaattttaaactaaa

SEQ ID NO: 988249 - DNA, 120 bp, Artificial Sequence
  ENSG00000281344_902 (sequence is synthesized)
aaatctcttaacctgacttaagtggctttagaatagctttgttgcattatcacagaaccacagaacccaaaaagccaagaagaacctgaaagaatgatttagtttctcttactcttggaa

SEQ ID NO: 988250 - DNA, 120 bp, Artificial Sequence
  ENSG00000281344_903 (sequence is synthesized)
ttaggtaccttgtctgcaaagtctccttgcccttgagggattgctgcaaagcctgtctcattgttcaatctttgcatggctccttcaatcgttgctaatacgaggtggattgtctgttaa

SEQ ID NO: 988251 - DNA, 120 bp, Artificial Sequence
  ENSG00000281344_904 (sequence is synthesized)
aagttaatgatggtgagccagggagtagtgtactgttttcggtttatttgcaacagtggaaagggcaaacctattcatctcaatgaaaatgtaactgtttacattggaagcttaaatttt

SEQ ID NO: 988252 - DNA, 120 bp, Artificial Sequence
  ENSG00000281344_905 (sequence is synthesized)
aggacacaccatgtcctgcttttgaaaagacaatttgtagggtaagagatgttacagtgatattatggaggccacaagaagtatattttctggtcattggtagaaaacaatgattaaaat

SEQ ID NO: 988253 - DNA, 120 bp, Artificial Sequence
  ENSG00000281344_906 (sequence is synthesized)
caggcttcttttgtaggagatactggtcatgttttctaaaatgttgactgtgagagaagaaaacaagaattattaaatctagatctctgatgggaagtaagaacagaaatgaggacaggt

SEQ ID NO: 988254 - DNA, 120 bp, Artificial Sequence
  ENSG00000281344_907 (sequence is synthesized)
gaaaggaaggctagacatggtttacacaggtacatttcctgctgatgattggtagtggttgggaggggacagaaggcagggagatgtgaattgatgaggcacggagtatacctgggaatg

SEQ ID NO: 988255 - DNA, 120 bp, Artificial Sequence
  ENSG00000281344_908 (sequence is synthesized)
gtgagacttgaacctcaagttataacctaagattcacataaatcttgaaaaccatactcttgttttcttccaaacatggagccatacctattctaacttcttatgagtgatttgagcatt

SEQ ID NO: 988256 - DNA, 120 bp, Artificial Sequence
  ENSG00000281344_909 (sequence is synthesized)
atgacacctctacaggagatagagaaaaggcagagcaagagattgtcagcttggaatgcctctaggtgatgctggagatagcatcaatctgcttatcagggctttctgggtgtggtgtaa

SEQ ID NO: 988257 - DNA, 120 bp, Artificial Sequence
  ENSG00000281344_910 (sequence is synthesized)
cccagaatagcagtcaggataggctaggtactgctgctgtgacaaagtattttccaatcttgatggcttacaaccccagaggtttattttttcttatactacatgcttcccctgtttctc

SEQ ID NO: 988258 - DNA, 120 bp, Artificial Sequence
  ENSG00000281344_911 (sequence is synthesized)
ggtttattttttcttatactacatgcttcccctgtttctctctccttcacaattctctagaataggggtgtccaatcttttggcttccctaagccacactggaagaagaagaattgtctt

SEQ ID NO: 988259 - DNA, 120 bp, Artificial Sequence
  ENSG00000281344_912 (sequence is synthesized)
aagaaagtttacaaatttgtgttgggcctcattcaaagctgtcctgggctacatgtggctggtaggccatggactggacaagcttgccatagaggctagacaagtaagctttttgtgttt

SEQ ID NO: 988260 - DNA, 120 bp, Artificial Sequence
  ENSG00000281344_913 (sequence is synthesized)
agcttgccatagaggctagacaagtaagctttttgtgttttcctgtcttgttggcacttcctctttgtcataatcctctccttgccataggggtaattctctggggctataatagttaaa

SEQ ID NO: 988261 - DNA, 120 bp, Artificial Sequence
  ENSG00000281344_914 (sequence is synthesized)
gaacaacaaaaaagaacattggtttaatattttcaaaatgttaacccctttaaatatttgatgaagtggagatgttataagaataaatgtgaaagctattagaaaaattctggttaattg

SEQ ID NO: 988262 - DNA, 120 bp, Artificial Sequence
  ENSG00000281344_915 (sequence is synthesized)
gatatatatagagaaatataggctgactgctaaatatatgcagcctttctagcctcattggtggatggtaatgccatttggtgagatgagaattggttgggaggtgagggaaggtttcga

SEQ ID NO: 988263 - DNA, 120 bp, Artificial Sequence
  ENSG00000281344_916 (sequence is synthesized)
gggagaaatctgtctagacttttattaatcttttgctagcttaaaaagtataattataggtgatttttttcttccctattttttacccctaaatttttcgtaaaagaggctttgatagtg

SEQ ID NO: 988264 - DNA, 120 bp, Artificial Sequence
  ENSG00000281344_917 (sequence is synthesized)
aaataacctaatactgaagaacatatgtaggttacattctgaggtctgtgtctgggatatcccaggctgggttgggcctgatctgagactgaggaatgttgctgaaggaggctgggatga

SEQ ID NO: 988265 - DNA, 120 bp, Artificial Sequence
  ENSG00000281344_918 (sequence is synthesized)
gcttcctgtggtttcttagatggtccttgctgggtggacagggtagggcatatggctcaggttgccaagatggtgctaaatgccttaatttggttcagaatggtttgatggatgcttttg

SEQ ID NO: 988266 - DNA, 120 bp, Artificial Sequence
  ENSG00000281344_919 (sequence is synthesized)
atttttttttttaatgcttctcagcttgaaaacatttccagtttttgtccttttcatgggaatttattgaacataagtaagttggatgtttttcttgttaactagaagacttaatcatgt

SEQ ID NO: 988267 - DNA, 120 bp, Artificial Sequence
  ENSG00000281344_920 (sequence is synthesized)
aacatgacaaaggaaagaaagaaaaaggatttatgattctaaagaatgggcaattcccttgaaggagtgggtcattcagtgaagctgtttgtttggcctgggttttctttaagtttattt

SEQ ID NO: 988268 - DNA, 120 bp, Artificial Sequence
  ENSG00000281344_921 (sequence is synthesized)
ttctcactcagttgagattttgactgtttctgactaccttcctcaactctatcactctttctatggcttgtggttggaaaacagggccatccaagtagcttgttgggtcccaggcgaatg

SEQ ID NO: 988269 - DNA, 120 bp, Artificial Sequence
  ENSG00000281344_922 (sequence is synthesized)
ccctttgactctcaacacctttttagaaaggtacattctctttcaaggaaaaatgaagccatgtaagggaagcttatgtacaaaataggataatccagttaactcaggttatggtgattt

SEQ ID NO: 988270 - DNA, 120 bp, Artificial Sequence
  ENSG00000281344_923 (sequence is synthesized)
gtcctttttgtgtgtttgtttcagctgttgctattgaaaactcttatagaagaatttagttatttcttaattttatttagttaataattttagtaaatagatttactttttctatggcaa

SEQ ID NO: 988271 - DNA, 120 bp, Artificial Sequence
  ENSG00000281344_924 (sequence is synthesized)
atgagaacctagcaatactacagaatcataggacatatacatgtacaagacacttattgatcttcccacaacatctaacatttctacatgttttgaaatgtttcttcagtagacgtgttc

SEQ ID NO: 988272 - DNA, 120 bp, Artificial Sequence
  ENSG00000281344_925 (sequence is synthesized)
tgaaatgttttgaaatgtttcttctaaaaactgttcactcctttctccctaaatgtgtattatatgttggtattatactgggtgctcagaattatctttaagaatgatggggtgtgccgg

SEQ ID NO: 988273 - DNA, 85 bp, Artificial Sequence
  ENSG00000281344_926 (sequence is synthesized)
aggctgaggtgggtggatcacctgagcccaggagttccagaccaccttgagtaacatgcaggtgcctgtagtcccagctactggg

SEQ ID NO: 988274 - DNA, 89 bp, Artificial Sequence
  ENSG00000281344_927 (sequence is synthesized)
gtgcctgtagtcccagctactggggagacaggcatgagaatcactacgattgtgccattgcacgcctgggtgacagagtgagattctgt

SEQ ID NO: 988275 - DNA, 120 bp, Artificial Sequence
  ENSG00000281344_928 (sequence is synthesized)
gtgagattctgtctcaaaataaaaataaaacaaaataaataatgatgaggcccaattggtttctcaagaagtgcacttggtttctcaagttgcccacttggccctcccgcaagttgtact

SEQ ID NO: 988276 - DNA, 120 bp, Artificial Sequence
  ENSG00000281344_929 (sequence is synthesized)
ttactttacttttccttcctttccttactgttctaaagcttttaaataaactttcactcctgctctgaaaaaaaaaagaatgatgggaaacacaggggctgctaaaatcaagatcaagta

SEQ ID NO: 988277 - DNA, 120 bp, Artificial Sequence
  ENSG00000281344_930 (sequence is synthesized)
ctgtacctggtcttgggctgcttataagctagttggaaagaaaagacacacacttggaaagatagctaaaatatgacaaatagctaaaatatgacaagtgtcatgtgagcaaaacataga

SEQ ID NO: 988278 - DNA, 120 bp, Artificial Sequence
  ENSG00000281344_931 (sequence is synthesized)
aaaaaaggccatggaagttcagcaagggtatattctctgtgcacagaacaatctgataagccttctcagaagaaatggaattggagctgggatctgaggtttagattagcagagacggca

SEQ ID NO: 988279 - DNA, 120 bp, Artificial Sequence
  ENSG00000281344_932 (sequence is synthesized)
gtgggaaggacatttcagggaggaaagaagcaaaggcacagaaatgaaaaagtagaatacatgtttgggtggggcaggatgatgaaagcaatgagaagattaatttgtttggagcagaaa

SEQ ID NO: 988280 - DNA, 120 bp, Artificial Sequence
  ENSG00000281344_933 (sequence is synthesized)
ccctcccatccccatcaccaatcctattaactcaaaggttcatttagttaaaatacagtaaagcttcagtcccttacttgcccttttgagtcccagtttccttatttgtaaaacgaggtt

SEQ ID NO: 988281 - DNA, 120 bp, Artificial Sequence
  ENSG00000281344_934 (sequence is synthesized)
aatcatacctaccagccatagattaaattattaaatgattaaatggattaaatgagataggatactaaaaggaaggtgttgagcagggttcctcacactttatcatccctcttcactcaa

SEQ ID NO: 988282 - DNA, 120 bp, Artificial Sequence
  ENSG00000281344_935 (sequence is synthesized)
ttcattgcattcaatttaattccagtgctgtctgtcatactatcaagacatctcctatgctactcccccttgaggataatttaaatttgactgttattgcatttctctaaactagtttct

SEQ ID NO: 988283 - DNA, 120 bp, Artificial Sequence
  ENSG00000281344_936 (sequence is synthesized)
attcaccttctggtttaggagaattttcttggcataagccatctgtatatgcaaaggagaccaatgtcacatttgagggctttaaataattcctcactaaccagttcagggtggctagag

SEQ ID NO: 988284 - DNA, 120 bp, Artificial Sequence
  ENSG00000281344_937 (sequence is synthesized)
tataacaagctaaaagggagtagttggcaataagaaaggtgtctcagtttgttttctcttgctataacagaatacttgaaactggctaatttataaagaaaaggaatttatttcctacag

SEQ ID NO: 988285 - DNA, 120 bp, Artificial Sequence
  ENSG00000281344_938 (sequence is synthesized)
agaaaaggaatttatttcctacagttatgggagatgagaggtccagagttcagcagctgcatctggtaagagcctttttttttttttttaagttttgattcttttttttttgtttttttg

SEQ ID NO: 988286 - DNA, 120 bp, Artificial Sequence
  ENSG00000281344_939 (sequence is synthesized)
tatatgccacattttcttgctaatggggatgctgcagagtcctgaggcagtgcagagcatcacgtggcaagggggctgagtgcgctaacatgctagcttaggtttttcttccttttccta

SEQ ID NO: 988287 - DNA, 120 bp, Artificial Sequence
  ENSG00000281344_940 (sequence is synthesized)
tatagccacagttcccttccaatgataactcactatttcattaatctgtgaatagactaagtcattcatgagggcagagccctcatgacccaatcacctcttaaatgcttcacttctcaa

SEQ ID NO: 988288 - DNA, 120 bp, Artificial Sequence
  ENSG00000281344_941 (sequence is synthesized)
tactgcctgatatggttttggctgtgtccgcacctaaatctcatactgaattgtagctcccataatccctgcatgtcatggaaaaaaccccatgggaggtaattgaatcatggcagcggt

SEQ ID NO: 988289 - DNA, 120 bp, Artificial Sequence
  ENSG00000281344_942 (sequence is synthesized)
tacctccatatcatgttcttatgatattgagtgagttcttatgagatctgatgagatctcatgagatctgatggttttagaaggggctttcccccacttctctctgcacatctcctgctg

SEQ ID NO: 988290 - DNA, 64 bp, Artificial Sequence
  ENSG00000281344_943 (sequence is synthesized)
attgtaagtttcttgaggcctcccccgcctatgtccttatagaggtgggagaagggactaatac

SEQ ID NO: 988291 - DNA, 120 bp, Artificial Sequence
  ENSG00000281344_944 (sequence is synthesized)
acccagtctcagatatgtccttatagaggtgggagaagggactaatacagtaaattggtaccacagagagtggggcgctgctgtaaaggtacctgaaaatgtggaagtaactttggaact

SEQ ID NO: 988292 - DNA, 88 bp, Artificial Sequence
  ENSG00000281344_945 (sequence is synthesized)
agacaggaaaatgtgggaaagtttggaaactcttagagacttggagggctaagaaggcaggaagaacgaatggctttgactaaaatgc

SEQ ID NO: 988293 - DNA, 62 bp, Artificial Sequence
  ENSG00000281344_946 (sequence is synthesized)
aagtttggaacttcctagagacttgtcgaatggctttgactaaaatgctgatagtgatatgg

SEQ ID NO: 988294 - DNA, 60 bp, Artificial Sequence
  ENSG00000281344_947 (sequence is synthesized)
aaatctgacagaagcaatttctaagtggcaaggtgttcaagaggaagcagagcataaaag

SEQ ID NO: 988295 - DNA, 80 bp, Artificial Sequence
  ENSG00000281344_948 (sequence is synthesized)
attatgtgaggctgctgaaatttgcatatgtgatgaggagccgaatgttaatcactgaggcaatgtggcagctgttttca

SEQ ID NO: 988296 - DNA, 120 bp, Artificial Sequence
  ENSG00000281344_949 (sequence is synthesized)
ccgaatgttaatcactgaggcaatgtggcagctgttttcagggcatgtcagaaacatgtcaaagttctcaggtatcctataatccccatgggtcatgggaaggacttagtgggaggtaat

SEQ ID NO: 988297 - DNA, 120 bp, Artificial Sequence
  ENSG00000281344_950 (sequence is synthesized)
gggggcggttacctccatgctgttctgatgatagtgagtgagttctcatgagagttgatgattttataaggggctttcccctccttttctctgcacttgtctctcttgccaccatgtgaa

SEQ ID NO: 988298 - DNA, 78 bp, Artificial Sequence
  ENSG00000281344_951 (sequence is synthesized)
ttgtaagttttatctttcctttatcaattaccgagtcttgggtatgtccttattagcagcatgagaatggactaattc

SEQ ID NO: 988299 - DNA, 120 bp, Artificial Sequence
  ENSG00000281344_952 (sequence is synthesized)
tgggtatgtccttattagcagcatgagaatggactaattctctgccacatttgggataaaatttcaacacaaattttggtttgctattcaaaccatagcaaaaggatactttccttcttg

SEQ ID NO: 988300 - DNA, 120 bp, Artificial Sequence
  ENSG00000281344_953 (sequence is synthesized)
tagttttatcaacatcttccaggacataaatttaatggtaaacaacaggtaaaataaatgacattgctcaaaggaatgcaattaaaacctaactgctattgcatttaatccatagaggaa

SEQ ID NO: 988301 - DNA, 120 bp, Artificial Sequence
  ENSG00000281344_954 (sequence is synthesized)
tgtgacccaggtctggggagagggagcactgcattatgtttcattctcatgccatgtgagaatgtttacaccagcttgagttgttgtgatggggtcgtccatatcatttggttcttgtcc

SEQ ID NO: 988302 - DNA, 120 bp, Artificial Sequence
  ENSG00000281344_955 (sequence is synthesized)
ttgtgactcactgcttctgctgtagagttagcttcctgcagtggaaaagggaggagttattttccagaccatatggagtagaaaacaacagattgacataggttttgtggaagctaaagg

SEQ ID NO: 988303 - DNA, 120 bp, Artificial Sequence
  ENSG00000281344_956 (sequence is synthesized)
cacatgaactgaagcctcccagagtgtaaccttgcaaaactctttaaaatagcattttcatagaggtgtttagtatttaggatctatcttaaaaccttaagattccaaagttagcttaca

SEQ ID NO: 988304 - DNA, 120 bp, Artificial Sequence
  ENSG00000281344_957 (sequence is synthesized)
gaaaataggcaagagaggataaattgtattaggtatggaatttcactgcctctgcttgtgtttccaggttggagaagctggagaaaagaatgcttccctttgatttacctgggctgggga

SEQ ID NO: 988305 - DNA, 120 bp, Artificial Sequence
  ENSG00000281344_958 (sequence is synthesized)
gtatgacaatgtccatgtgtgtgtataggagattcttgtacttaaactctgtaaatgtgtgtttctgtggtcctatgctgggtggagggttcaactaaggtattgttaaggaatatggat

SEQ ID NO: 988306 - DNA, 120 bp, Artificial Sequence
  ENSG00000281344_959 (sequence is synthesized)
gagccaaaaagactggaaagtttcaaatgcatgtgtgtttccaactaatattggagaaaacttttttggcatcgaacactggcaatttatagacttgttgattgatagtggatttacctt

SEQ ID NO: 988307 - DNA, 120 bp, Artificial Sequence
  ENSG00000281344_960 (sequence is synthesized)
tagagtgtacctggattatagaggaatctagcttccctgtctaactcatttatcataagcttactgaataactgctatggactatgcatgtgttagatgctggggtagaaagataaatag

SEQ ID NO: 988308 - DNA, 120 bp, Artificial Sequence
  ENSG00000281344_961 (sequence is synthesized)
gacacagtcccacaggaattatagtctagtggagagaggtgtatataaacagtcacagaacaatgtgataagtattatgatgaaggaatatgtaataactgctagcaaagagaaggaaac

SEQ ID NO: 988309 - DNA, 120 bp, Artificial Sequence
  ENSG00000281344_962 (sequence is synthesized)
atttaaacctgcttgggagtggagggaaaagtcagagaaagctctataaaaaagctaactatataatatgtttggtaggatgagttacttggcaaatgggctggagttacacacccagtt

SEQ ID NO: 988310 - DNA, 86 bp, Artificial Sequence
  ENSG00000281344_963 (sequence is synthesized)
tgagttacttggcaaatgggctggagttacacacccagttggggaatatgttgcctccaaaatccaaagagccccattaggcgttg

SEQ ID NO: 988311 - DNA, 120 bp, Artificial Sequence
  ENSG00000281344_964 (sequence is synthesized)
cttgccttttaattcttttaattcctgcaagataaataatccaagccaaaatgaagcagaaatatcattagactgtcaccagttaaggctccagattaattgtctgagaggtagagaaga

SEQ ID NO: 988312 - DNA, 120 bp, Artificial Sequence
  ENSG00000281344_965 (sequence is synthesized)
gaaacaggaaagcagaaatagactttaatttaaaacacaagcaagtaagagtggatcagtcaaggggttctggcaagaaacacagaagaaacacagcatattctgaagagtagaactgat

SEQ ID NO: 988313 - DNA, 120 bp, Artificial Sequence
  ENSG00000281344_966 (sequence is synthesized)
ttgtgaagagactatgtcagagccatgataagaaaaccaacaaaggatagtgaggcacccagggactagcaacatcagggagctattagtactcttggggctgcaggggccagggaagga

SEQ ID NO: 988314 - DNA, 120 bp, Artificial Sequence
  ENSG00000281344_967 (sequence is synthesized)
aatggtgttaatgagcccagtgaaagctggcgtcatggaggaggggaaatagtttatcatgaaaacagaactatggctcctcactcacaatcacttccagacatgaaccactttacagac

SEQ ID NO: 988315 - DNA, 120 bp, Artificial Sequence
  ENSG00000281344_968 (sequence is synthesized)
tcagaataccctgaatgaagggaaggctggatccccttgaggaaggacccctgtacgtggacaaatatttacactgttaatattcctcccagaattccacaaagagctttatgccttttt

SEQ ID NO: 988316 - DNA, 120 bp, Artificial Sequence
  ENSG00000281344_969 (sequence is synthesized)
aatggtactgtgcattgggaaaaaaaacaaaacaaataatttgaactttcagagattactggacactggctctgaactgacagtaattccaggagactcaacacatcactgtggtctacc

SEQ ID NO: 988317 - DNA, 120 bp, Artificial Sequence
  ENSG00000281344_970 (sequence is synthesized)
agtcagagtaggggcttatagaggtcaggtgattagtgaagctttggctccagtttatctcacagtgggcccgatgggtacctgaacacatcctgtgattatttctccagttctagaatg

SEQ ID NO: 988318 - DNA, 120 bp, Artificial Sequence
  ENSG00000281344_971 (sequence is synthesized)
cataattgcaatagatacattcagcagctgttggaatcccctcattggttcccttacctgcacagtaaggactactgtagtgggaaagacctagtgggagcagccactagaactgcctct

SEQ ID NO: 988319 - DNA, 120 bp, Artificial Sequence
  ENSG00000281344_972 (sequence is synthesized)
acagaggaaaatagcaaaccaaaaggaatgctgcatttttggaggaattgcagagattagtgctgccatcaaggacttgaaagatgcaggggtgatgattactactccccactcaactct

SEQ ID NO: 988320 - DNA, 120 bp, Artificial Sequence
  ENSG00000281344_973 (sequence is synthesized)
cttatttggcctgtgcatagaacagatggatcttggagaatagcagttaagtaagcttaaccaggaggtgactccaattgctgcatttcattgcttgagcaaactaacacatcccttggt

SEQ ID NO: 988321 - DNA, 120 bp, Artificial Sequence
  ENSG00000281344_974 (sequence is synthesized)
acctggtatgcagctattgatctggcaaatgcttttccttcatacctgtcaataaaaaccatcagaagcagtttgccttcagctggaaaggccagtaatataccttcactattctacctc

SEQ ID NO: 988322 - DNA, 120 bp, Artificial Sequence
  ENSG00000281344_975 (sequence is synthesized)
agaagtagatcaactctccagccttacaccataatttagttcacatggatcttgatcatctttctcttcaaaaggatattatactggtttgtcatattagtgacattatgctgtttggaa

SEQ ID NO: 988323 - DNA, 120 bp, Artificial Sequence
  ENSG00000281344_976 (sequence is synthesized)
gtagtgagcaagaagtagcaactactctagacttaagtcatttgcatttcagaaggtgggaaataaatgagacaaaaaatggaaagactttctatctcagtaaaatgcctaagggtgaca

SEQ ID NO: 988324 - DNA, 120 bp, Artificial Sequence
  ENSG00000281344_977 (sequence is synthesized)
accccctcaccccccaccactgccaaaaaaataagaacaatgcttaatggacctctttggattttggagtcaacatattcctcatttgggtatgttactccagaccatttgctaagtaac

SEQ ID NO: 988325 - DNA, 90 bp, Artificial Sequence
  ENSG00000281344_978 (sequence is synthesized)
ctcatttgggtatgttactccagaccatttgctaagtaacctgaaaagctgctaattttaagtggaacctagaacaggggaaggctctat

SEQ ID NO: 988326 - DNA, 120 bp, Artificial Sequence
  ENSG00000281344_979 (sequence is synthesized)
taaaatgttagtggcaggtagggaagctatttggagcctctgccaggctcctataagtaaatttaggcatagtcctttaggattttggaataaagctctgccatcctctgcacataacta

SEQ ID NO: 988327 - DNA, 120 bp, Artificial Sequence
  ENSG00000281344_980 (sequence is synthesized)
ttttttttttttttaaggaacagctgatggcctactacaaggccttaatagagactgactgcttaatcatgggctacaaagttacggtgcaacctgagctgcccatcatggtgttttgac

SEQ ID NO: 988328 - DNA, 120 bp, Artificial Sequence
  ENSG00000281344_981 (sequence is synthesized)
tcaccaagccataagtttgggcatataccacttcaaatggaagtggtatatatgtgataggacctaagaaagccccaaaggcacaagtaagttacacaaagaagtggtctaaatgccaat

SEQ ID NO: 988329 - DNA, 120 bp, Artificial Sequence
  ENSG00000281344_982 (sequence is synthesized)
ggtttcaactcctgttacactgccttctctccctcagtctgcacttatggcctcatgaggagctccctatcatcttagtacattttctgttgctataccggaatcaagcagactgggtaa

SEQ ID NO: 988330 - DNA, 120 bp, Artificial Sequence
  ENSG00000281344_983 (sequence is synthesized)
tttataaagagtagaagcttatttggcttacagccttagaggctggaaggttcaaaagcatggtggcagcttccagtgagggcttttcatactgcattataacatgatggagaagtggaa

SEQ ID NO: 988331 - DNA, 120 bp, Artificial Sequence
  ENSG00000281344_984 (sequence is synthesized)
ggagaagtgggtgtgtgtgaaatgatcaaaacatgaggagtggcctcagtttataatacccccagcccaatcttgtggtaatgaatcaagttccatgacagtgagaactcattccccaga

SEQ ID NO: 988332 - DNA, 120 bp, Artificial Sequence
  ENSG00000281344_985 (sequence is synthesized)
gaattaactgagtccttcaagagtgacattaatcccatttaaggacccaatgatgtcttcttcttctttcttctttcttcttcttcttctttcttctttcttcttctttctgagacaggg

SEQ ID NO: 988333 - DNA, 120 bp, Artificial Sequence
  ENSG00000281344_986 (sequence is synthesized)
gcaccaccatgcctggctaattttttatttcttgtagagatggggttttgccacatagcccaggctgatctcaaactcctgcactcaagcaatctttcctccttgacctcccaaagtgct

SEQ ID NO: 988334 - DNA, 120 bp, Artificial Sequence
  ENSG00000281344_987 (sequence is synthesized)
gggattataggcatgaggcactgcacccagccacaatgactttttaaagtccctacctcccaacactgttgcaccaagaaccaaatttctaacacattaattctgagggtacactcaaac

SEQ ID NO: 988335 - DNA, 120 bp, Artificial Sequence
  ENSG00000281344_988 (sequence is synthesized)
tatagcacctatgatcaattgataggagaaaagattactcagacctagtttatagatagttctgtatgatatacaggaatcaatgggtgaaaagtgagagttgcaccattcacaattaca

SEQ ID NO: 988336 - DNA, 120 bp, Artificial Sequence
  ENSG00000281344_989 (sequence is synthesized)
ttccattcacattcacaatttgctaatgacccactagcaaaacttttttttccttgttcctatgaccctgttctctgctggcctagaagtcttagttccaaatggagaaatggttccacc

SEQ ID NO: 988337 - DNA, 120 bp, Artificial Sequence
  ENSG00000281344_990 (sequence is synthesized)
aagagacacaacaatgattccattgaactgcaagataagagtgccacctggacactttgaacatgcctctgaatcagcagaaaaagaagggagttattgtgtagactgagtgaagtagat

SEQ ID NO: 988338 - DNA, 120 bp, Artificial Sequence
  ENSG00000281344_991 (sequence is synthesized)
tgccttccccagtatggttgggcttcgtgcaatccattgaaggcctgcatagaacaaaaagaagaaaaaaatagaagtcactctttgcttgactgtcttccagctgggacattgattgtt

SEQ ID NO: 988339 - DNA, 120 bp, Artificial Sequence
  ENSG00000281344_992 (sequence is synthesized)
ccctggctttgccctagaacttgtgctagaacttacatctttggatctacaggttctcagatctttgaactcagactgaaacttataccattggctctcctggtccttacccactggact

SEQ ID NO: 988340 - DNA, 120 bp, Artificial Sequence
  ENSG00000281344_993 (sequence is synthesized)
cagagaagaagtatctcactggctttcttggtcctcctgctagatgactgtagatcctgaaaatttctagcttccataaccatgtgagtcaatttcttctaataaatatatatctatatt

SEQ ID NO: 988341 - DNA, 120 bp, Artificial Sequence
  ENSG00000281344_994 (sequence is synthesized)
tacatcttcatctatatctttatcttctattctgtttctctggataattcataccaatacatattttggtactgaaaagtgtttgtagttctgtcataacaaatacctaaacatgtggaa

SEQ ID NO: 988342 - DNA, 120 bp, Artificial Sequence
  ENSG00000281344_995 (sequence is synthesized)
gtggctctggaattgggtaatgaatagaggctggaagtattttgaggtgcatgctagaaatatggatgttaagagcaattctgatgagctctcagatgaaatgagaaacatatttttgga

SEQ ID NO: 988343 - DNA, 120 bp, Artificial Sequence
  ENSG00000281344_996 (sequence is synthesized)
aactggaagaaaggcgatctttgttataatatggaaaagaatttggctgaattatgtttgggttctagtgtttgtggaaggtagatcttgcaaatgatgatattggatatttagttgagg

SEQ ID NO: 988344 - DNA, 120 bp, Artificial Sequence
  ENSG00000281344_997 (sequence is synthesized)
atatgtctaagcaaatgtttaagaagtggcttgcttccacctgactgcttatactaaaacctgataagagacagttgaagaagggattgttaaaggataagttgaagaaggaattgttaa

SEQ ID NO: 988345 - DNA, 120 bp, Artificial Sequence
  ENSG00000281344_998 (sequence is synthesized)
gcaaaaaggaacctgaatttgaagatttggaacagtttcagcctacgtatattgcaaaaaaatgaaaaagtattcagaagagaacaccaagggtgtgcctggactgtcattcaatgaaga

SEQ ID NO: 988346 - DNA, 120 bp, Artificial Sequence
  ENSG00000281344_999 (sequence is synthesized)
gcttatgggactatataagcagcaacattgccagtttaaactgaaggagatgcagaaaggactaaaggaaggaaggttattagactcatcaggatttgtgggggaaaagatgaaagagtc

SEQ ID NO: 988347 - DNA, 120 bp, Artificial Sequence
  ENSG00000281344_1000 (sequence is synthesized)
ttttggctgtgaacatgtgctatccttcaataagaggaaaaatgaccctaaaggtaattcagaaattaacagagccaccatcttgttttcaataagtcagatgccctctttcttgaagct

SEQ ID NO: 988348 - DNA, 120 bp, Artificial Sequence
  ENSG00000281344_1001 (sequence is synthesized)
gtgaggccaggaccactttgttgtgctgaaggatcaggacaccttgaagaacgctggggacagggtgcctggaagggccatgaatacaggatctctgcccccatgggttttgaagatagg

SEQ ID NO: 988349 - DNA, 120 bp, Artificial Sequence
  ENSG00000281344_1002 (sequence is synthesized)
accccagtgggtctggaagatagagaatcaagtcaaagagaatgattcttgagccttaagatctgatggaatgtatcttactaggttttagatttgtttgggactaatcatccttttctt

SEQ ID NO: 988350 - DNA, 120 bp, Artificial Sequence
  ENSG00000281344_1003 (sequence is synthesized)
tcctatttttctctcttgtaatagaaaggtctttcctatggctggctcgccattttagaagtacatgacttgtttggtttcacagattcagagctgaatctgaagaggaattttgcttca

SEQ ID NO: 988351 - DNA, 120 bp, Artificial Sequence
  ENSG00000281344_1004 (sequence is synthesized)
ggatgaattgtaccttgagtctcactcatacttgattcaaatgatatttcgataagactatggactttagactttagagttgatgctggcataaattcagacttttgaggctgttgggat

SEQ ID NO: 988352 - DNA, 120 bp, Artificial Sequence
  ENSG00000281344_1005 (sequence is synthesized)
gaaataaatgtactttgcatacaataagaacataaattttggggggccaggggtggaatattatggactgaatgtttctgtcatcactgaatgtcatgtgttaaaaccctaactaccaat

SEQ ID NO: 988353 - DNA, 120 bp, Artificial Sequence
  ENSG00000281344_1006 (sequence is synthesized)
gtaatgtggtttgaagatggggcatttgcacagtaattatagctaggtgaagtcatgaggatgggaatcctcatgatgggattgttgtacttctaaggggaagatcctctctctctctct

SEQ ID NO: 988354 - DNA, 120 bp, Artificial Sequence
  ENSG00000281344_1007 (sequence is synthesized)
cggctccccactccccaactctaccctaggtgagagcacagagagaaagtggccatctaaaagctggaaagataaccctcaccagaactcaaacatgctggcacctgatctcacacttac

SEQ ID NO: 988355 - DNA, 120 bp, Artificial Sequence
  ENSG00000281344_1008 (sequence is synthesized)
aacctccacaaacgtgataaaaaaaaattctgtaatttaagacctgtagcctatggctggcattttgttatagcagcccaagcacactaaaacagtcaattaagtttataatattattca

SEQ ID NO: 988356 - DNA, 120 bp, Artificial Sequence
  ENSG00000281344_1009 (sequence is synthesized)
gatcttctatcactcatcaactaattttttgtgtctacttgtcctgttaattagtaatagaggtgtgtccgaagtctccaactgtaattgtatatttgtctatttctcctttcagttcta

SEQ ID NO: 988357 - DNA, 120 bp, Artificial Sequence
  ENSG00000281344_1010 (sequence is synthesized)
tagattttgctttattttggagttttattgggtgcatatacatgtagcaatattatgtctttttaatgaattgacccttttataattacataatgttgatgttaatataccttattctga

SEQ ID NO: 988358 - DNA, 120 bp, Artificial Sequence
  ENSG00000281344_1011 (sequence is synthesized)
atactactttagctaatattaatataagcactgcagcttcccttaattaatagtataatttttccatccttttactttttcctttgtctttataagtagatttattgtagacaacatata

SEQ ID NO: 988359 - DNA, 120 bp, Artificial Sequence
  ENSG00000281344_1012 (sequence is synthesized)
attgcattttacttgtttgtccaacctgacaatgttaggctttaattggagtgctaattccagatgtatttaatgtaagtattgatatgtttgggtttaaatataccatcttgctaaatg

SEQ ID NO: 988360 - DNA, 120 bp, Artificial Sequence
  ENSG00000281344_1013 (sequence is synthesized)
ttttctacttgtcccattggttccttgtttttcctttcctcttttagtgcctacttttgaactaaatatttttcattattatatttattttcaaaattggcttattagtggtttctctag

SEQ ID NO: 988361 - DNA, 120 bp, Artificial Sequence
  ENSG00000281344_1014 (sequence is synthesized)
gatttaaacatctttaacttatcacagtttacttccaaatgtatcactttacatagagtgtagtagctttaccacatatacttctatttcctttcttccaaccttagtgctattgttgtt

SEQ ID NO: 988362 - DNA, 120 bp, Artificial Sequence
  ENSG00000281344_1015 (sequence is synthesized)
tagtgctattgttgttacagtttttacttctgtgtgtattatcaaccccataatatattgttactattatagttttagacaattatattttaaaggaattcaaaatttaaaacatctttt

SEQ ID NO: 988363 - DNA, 120 bp, Artificial Sequence
  ENSG00000281344_1016 (sequence is synthesized)
ttaccatttctatgctcttcattctttcacacagatgtaattttctatctggtatcatatttcttgtgcctaaagaactttcaataggttagttgcaggtctgctggcaatgaattccct

SEQ ID NO: 988364 - DNA, 120 bp, Artificial Sequence
  ENSG00000281344_1017 (sequence is synthesized)
aagcttttgttggtctgagaaagtttttattttatctttattctgaaagctatttttgctggatatatcattatcagtttattgttgtgcttgttttattactttgaagatgttacatca

SEQ ID NO: 988365 - DNA, 120 bp, Artificial Sequence
  ENSG00000281344_1018 (sequence is synthesized)
tctgctgaactgcatagtttctaaaaagaagtctggtgtgattcttatcttcctccctatgtaatgtttcctttttcctcttctacatcaagatttttctctttaaacttgaatttcagc

SEQ ID NO: 988366 - DNA, 120 bp, Artificial Sequence
  ENSG00000281344_1019 (sequence is synthesized)
ttgaatttcagcagtttgactacaattttcatagctgtgtttttaaaatttttgtttatattgcttagagttttctgagattctttggtctggttttttttttttgctttttgtttctgt

SEQ ID NO: 988367 - DNA, 120 bp, Artificial Sequence
  ENSG00000281344_1020 (sequence is synthesized)
tttacttcagacaattcttgatcattacctcttcaaatatttctttggttcttgctgtcttcttattctggagatacaagtccatgtatattagactgtttggttttattccctaatttt

SEQ ID NO: 988368 - DNA, 120 bp, Artificial Sequence
  ENSG00000281344_1021 (sequence is synthesized)
tggatgatctgttcttttttcccatgcatttaattatttaattttcagtagttcctgtcatcaagttcatcaattatttcctcattgtgtctagtctacagataaagttgtcaaaggaat

SEQ ID NO: 988369 - DNA, 120 bp, Artificial Sequence
  ENSG00000281344_1022 (sequence is synthesized)
aataataataaaaaaactctagaatttccattggtattggtttcctattgctgctgtaacaaattaccacaatgctactagcttaaaactacacaactttattatactaaagttctggaa

SEQ ID NO: 988370 - DNA, 120 bp, Artificial Sequence
  ENSG00000281344_1023 (sequence is synthesized)
ttcagaagtctgaaatgggtctcagacttgtctaaaatcaaggtgtcagtaaggctgcattcctttaggagactctacaggaggatctatttccttaccttttccatcttctagagacca

SEQ ID NO: 988371 - DNA, 120 bp, Artificial Sequence
  ENSG00000281344_1024 (sequence is synthesized)
actgaattccttatctcaggacctctttctccatctttaaagccatgttctctttctccatctttctccatctttaaagccaaactgcaaatcatctccaaattactctgtctctcctgg

SEQ ID NO: 988372 - DNA, 120 bp, Artificial Sequence
  ENSG00000281344_1025 (sequence is synthesized)
ttccctctttcacagtccttgtgattacattgagcctatcaggataatcctggataatattctcatatcatgatccttaacttagtaacatttgtaaagtcccttttgccatgtaaggta

SEQ ID NO: 988373 - DNA, 120 bp, Artificial Sequence
  ENSG00000281344_1026 (sequence is synthesized)
atatagtcacaggttcagagaagtaggacatggacatctttggtaataatggggtgtcccattattgtgctgatgacaccatctgattctcaggatttccacctttagtaggtagaatgg

SEQ ID NO: 988374 - DNA, 120 bp, Artificial Sequence
  ENSG00000281344_1027 (sequence is synthesized)
tggcctctcaaaagatatatctatgtccaaatccctggaacctgtgaatgttatcttacttggaaaacgggtatttgcagatgaatgaagttcaggttcttgagagtagatcatcctgga

SEQ ID NO: 988375 - DNA, 120 bp, Artificial Sequence
  ENSG00000281344_1028 (sequence is synthesized)
ttacttgtgtgattcctaaattcaatgataagtgtgtttgtaatatacagaagaagttaagacacagacagacagaggagatggcaatgtgaagatagaggctgagattggagtgctgtg

SEQ ID NO: 988376 - DNA, 120 bp, Artificial Sequence
  ENSG00000281344_1029 (sequence is synthesized)
gccacaagtcaagaaagccaaggaatgctgactgcccccagaagctgcaaaaagcaaggattttccctttgcacctccaggagtgtggctctgctgacaccttgatttcagacttgaggc

SEQ ID NO: 988377 - DNA, 120 bp, Artificial Sequence
  ENSG00000281344_1030 (sequence is synthesized)
ttctagaactgagagaataattttctcttattttaagccacccagtttgtggtaatttgttatggtacccctaggaaaagaatacatctttctgttgaaatctttatctctttaagtatg

SEQ ID NO: 988378 - DNA, 120 bp, Artificial Sequence
  ENSG00000281344_1031 (sequence is synthesized)
tattatagtttttccattagatcctttaacgtattaattataattattttaaagttcctgtctgttagtttcaacatctggaccaaattctgagtttgtttaatctcttgacaatgggtt

SEQ ID NO: 988379 - DNA, 120 bp, Artificial Sequence
  ENSG00000281344_1032 (sequence is synthesized)
gttatgttcttgctttttgtgtatatggcaattttgtttacataccagataatgtgtacaaagtaacactagaaactgagctaaataatatttatgcccagcagtaggcatgcttcttct

SEQ ID NO: 988380 - DNA, 120 bp, Artificial Sequence
  ENSG00000281344_1033 (sequence is synthesized)
tctgttagatcatgagtctttgggcagttgaggctctctgatatgtacatgagctgagtttaagtttgctgttgtcgtgttgatatattgttatattcagtgaaccctaggcttcaaatt

SEQ ID NO: 988381 - DNA, 120 bp, Artificial Sequence
  ENSG00000281344_1034 (sequence is synthesized)
cctcctgcggtagacaagtgctaccttatccttagtgtgaggtctgaagtgctagaggaattttctaaatgtttcttcactctcagctttcagcaatccatgtatgactttgccactggg

SEQ ID NO: 988382 - DNA, 120 bp, Artificial Sequence
  ENSG00000281344_1035 (sequence is synthesized)
gggatttatctccatgttcttgtatttaccctagcctagagacttcagttgtttgttattctgtgcaagactcatgctggagttggaagctttcacttctcctgttccagccttagtttc

SEQ ID NO: 988383 - DNA, 120 bp, Artificial Sequence
  ENSG00000281344_1036 (sequence is synthesized)
aggcaggtcctgtgctcctgagcctgatgtcagttgttttgaatacccccatgtctctcccatgacaagcctttgcctccttttcagtccatgttttagagtgcaggtaggtttcctgta

SEQ ID NO: 988384 - DNA, 120 bp, Artificial Sequence
  ENSG00000281344_1037 (sequence is synthesized)
cttccctccccgctgaacaggtgaactctgcctccgcccccagcaatagcagtcctcttctttgtattagtgcaggatcctgcgcatgagaaagttttctaccactttcccagtagcagc

SEQ ID NO: 988385 - DNA, 120 bp, Artificial Sequence
  ENSG00000281344_1038 (sequence is synthesized)
ctacctttgcctggaaatagggacatgacagggtttcatgtccctccctcagtggcagattcattttacttcatataaaagcattgtcatgtctgggatgtgaacatgttctttctatca

SEQ ID NO: 988386 - DNA, 120 bp, Artificial Sequence
  ENSG00000281344_1039 (sequence is synthesized)
tctcaacagcgacagattttacttcctatctgagaacattctgggctgtgggaagtagcagctgctcaccatactgtactcatgcagagcccattgagagatgaaattccatagacactc

SEQ ID NO: 988387 - DNA, 74 bp, Artificial Sequence
  ENSG00000281344_1040 (sequence is synthesized)
ctagacactcctgctcttctctcaaacctcagcagaccctgtacacctgtgccaccaagaggcgccttctccag

SEQ ID NO: 988388 - DNA, 120 bp, Artificial Sequence
  ENSG00000281344_1041 (sequence is synthesized)
gaccctgtacacctgtgccaccaagaggcgccttctccagcttcctacctgccctcaatcgttcttgtgaatattcagatgagacccatcaagaaccccatgagtgggtgcagacttgcc

SEQ ID NO: 988389 - DNA, 120 bp, Artificial Sequence
  ENSG00000281344_1042 (sequence is synthesized)
tgtgcctgtggcacctgaagattctacactttcacactagtccacatttgtcctttaagaatgtgctaaatttcatctattttcatcttactgactccaataactgcctcccttccctcc

SEQ ID NO: 988390 - DNA, 120 bp, Artificial Sequence
  ENSG00000281344_1043 (sequence is synthesized)
tattctccctaaaaggtgaaacatttgagtgtcctatgttacctatgaggagcctttcacccttaggaatttagttcaactgatcaacctcagcgcactgatgaacttgaaaactatttt

SEQ ID NO: 988391 - DNA, 120 bp, Artificial Sequence
  ENSG00000281344_1044 (sequence is synthesized)
gtagattttcagctttttttttttttttttcctgaggcagtgtaaattatttaagagtttagattaccaacttttcctgttttggtgatagtgacattcttttgcagtttctgtatccta

SEQ ID NO: 988392 - DNA, 120 bp, Artificial Sequence
  ENSG00000281344_1045 (sequence is synthesized)
agtgaaattagaactatattcattgatttaacagatattcaaatcaacaaatgcatacccagaggaccaagtgatgtctgaaacttaacatatatataatggaacttttggtttgcccca

SEQ ID NO: 988393 - DNA, 120 bp, Artificial Sequence
  ENSG00000281344_1046 (sequence is synthesized)
accattgcctgttccaccctaagcctatctctgtaagttgtaccactgtccacctagttggttaagccagaaactcaagtgttttcctgattttctcttcttcacctcatacatccaata

SEQ ID NO: 988394 - DNA, 120 bp, Artificial Sequence
  ENSG00000281344_1047 (sequence is synthesized)
caacagtaaccactataattattgattctatttccgaaataaatataaaacccatttacttttttccattattgctgtcactagtgtggtccaagctgtcatcatctgttgtctggactt

SEQ ID NO: 988395 - DNA, 120 bp, Artificial Sequence
  ENSG00000281344_1048 (sequence is synthesized)
ctttgtcaaccagaggatctcacagcttttacttttgtcctcgtagactacatcatccacccagcagtcaaagttaaaacataaatcttatcacattctaaaaatataagtaaattttga

SEQ ID NO: 988396 - DNA, 120 bp, Artificial Sequence
  ENSG00000281344_1049 (sequence is synthesized)
gcatgtcaaatccctgctcaaaatcattcagtgtttccccattacctttctaaaggcaactcaatctcaactcctcaccatgacctgcaaggccgtgaatgatccagccctgcctatttc

SEQ ID NO: 988397 - DNA, 120 bp, Artificial Sequence
  ENSG00000281344_1050 (sequence is synthesized)
cacaacaacttcatttggggccactttcttcctcactcacttattcatctgttgagaaaagagaggcacttttaacttatacatgtctgaagaatcagagcagctgtgaacataccccag

SEQ ID NO: 988398 - DNA, 120 bp, Artificial Sequence
  ENSG00000281344_1051 (sequence is synthesized)
aactctgaaatttcaaaagtataaaatgttaatccaaaaagaattctaaacttcaaataatcttctttttgcttattttttatggcatatgtgcattattatttcatcactttcaaaact

SEQ ID NO: 988399 - DNA, 120 bp, Artificial Sequence
  ENSG00000281344_1052 (sequence is synthesized)
gacacagtttccatagttaacttcgagttatttttgtgaactgactattgaacgaaagctctccatttactaacaacagtgtagtcttctgaatcttttagctcttattgaaaaaaacat

SEQ ID NO: 988400 - DNA, 120 bp, Artificial Sequence
  ENSG00000281344_1053 (sequence is synthesized)
tcctttgttatagagtgcaatgtggtttgttttggagggagtaaaggaggcaggatgtctgtctttgcttggtttcctggccagtgcatctcatttgaaaatagtttgtttcaagtagtt

SEQ ID NO: 988401 - DNA, 120 bp, Artificial Sequence
  ENSG00000281344_1054 (sequence is synthesized)
aagtctattcctgggaagcctctatttttatatatttttttaatttttagacaaggtcttgctctgttacccgggctggagtgtggtggcacaatcatagctcatagcagtctcaaactc

SEQ ID NO: 988402 - DNA, 120 bp, Artificial Sequence
  ENSG00000281344_1055 (sequence is synthesized)
tcagcctcccaagtagcttggactacaggtgtgtaccaccatgcctaattgctttttttcaaaattttttagtagagatgaggtcttgctgtgttttctcaggctggtctcaaactcctg

SEQ ID NO: 988403 - DNA, 120 bp, Artificial Sequence
  ENSG00000281344_1056 (sequence is synthesized)
ctcaaactcctgggctcaagtgatcctctaacctcagcctcctgaaatgctagattacagacatgagccactgtgagccttttatttgtttaagttttattttttcctttcttcccttct

SEQ ID NO: 988404 - DNA, 120 bp, Artificial Sequence
  ENSG00000281344_1057 (sequence is synthesized)
ttcttcccttctcccttcctttctttcttttgtttttagacaagtaatttgacattaggaggtcttgaaggtgatggtttcctctggcagtagtgccttttctgtcactgaaggtgttca

SEQ ID NO: 988405 - DNA, 120 bp, Artificial Sequence
  ENSG00000281344_1058 (sequence is synthesized)
gttggtcagaatgcatggccaatggaatcattctttcattaaagaacaaacatttgttaaacgcctccctttgccaaagcattgggacactcactaggagttcaaagataaaaaagcacg

SEQ ID NO: 988406 - DNA, 120 bp, Artificial Sequence
  ENSG00000281344_1059 (sequence is synthesized)
ctttttaacaagtgtacgtttcagtgtcagacatacagttttaatacaactgctcattgttctaatgggaaataagagattcagccattaaactactgtgtggtgtagaagaccttttaa

SEQ ID NO: 988407 - DNA, 120 bp, Artificial Sequence
  ENSG00000281344_1060 (sequence is synthesized)
aatagactgatttctgagagtctgtgatttcacttataaggcttatgagggattcttagcaaggaaaaatgagaatcgtttctggttatactaattatgaactttgtgagccttgagcaa

SEQ ID NO: 988408 - DNA, 120 bp, Artificial Sequence
  ENSG00000281344_1061 (sequence is synthesized)
gtctctaaactttctgaagctcagtttgttttcttatattttaaaagagaatattttgaagagagataaatggaataatacaaataaagttccagcacctattaagtgggggtaaggtgg

SEQ ID NO: 988409 - DNA, 120 bp, Artificial Sequence
  ENSG00000281344_1062 (sequence is synthesized)
agcagtgtttactgaaaatgaaaattagattaaaggacagacacttcagggccatttttttttcctcctccatatgtgtgagtgtggatggggtagggagaggagggtgttttataataa

SEQ ID NO: 988410 - DNA, 120 bp, Artificial Sequence
  ENSG00000281344_1063 (sequence is synthesized)
agaagtaaacggaaagaaaaaatgtgaagatatagttcactgggggaaacactgtaaatatagactagtgacaggcaatgaactgcaggacctgagctggttctgaggcagtgagcctca

SEQ ID NO: 988411 - DNA, 120 bp, Artificial Sequence
  ENSG00000281344_1064 (sequence is synthesized)
gctagaacatcccatatacatcgcaggaggatgatgacgtttaatgtgtcaaagtgtacgtaactgatgacagttttgtgatcaggctttgtttgcaatcatagagaatccagaaaagtt

SEQ ID NO: 988412 - DNA, 120 bp, Artificial Sequence
  ENSG00000281344_1065 (sequence is synthesized)
tccagaaaagttaattttaatactcttgattttgacagataaattctttttaaaatgtaaaattattatttctcattaaagaaagaagaataggacattcctagcctttttttttttttt

SEQ ID NO: 988413 - DNA, 86 bp, Artificial Sequence
  ENSG00000281344_1066 (sequence is synthesized)
gatcatggctcactgcagcctcaactttcattgctcggactacaggcacatgctatcatgcccatctaaatgttgtattttttgta

SEQ ID NO: 988414 - DNA, 120 bp, Artificial Sequence
  ENSG00000281344_1067 (sequence is synthesized)
ctcctgcattgctcggactacaggcacatgctatcatgcccatctaaatgttgtattttttgtagagatggggtctcggtctgttgcctgtgctggtcttgaactcctgggctcaagcaa

SEQ ID NO: 988415 - DNA, 120 bp, Artificial Sequence
  ENSG00000281344_1068 (sequence is synthesized)
tgctaggattacaaatgtgagccactatgcccagcccctgatctattaacattttagaaactagttctttgtgaggctctttcataataaattatcagtatgttacagcattatacaaat

SEQ ID NO: 988416 - DNA, 120 bp, Artificial Sequence
  ENSG00000281344_1069 (sequence is synthesized)
tgcaagtgctttcacatggataatctcatttttatcacccccttttacacatgagaaaattgaagctcagaaatgactagtctgaggtcacacaggtaagatatgccaaagttgaaactt

SEQ ID NO: 988417 - DNA, 120 bp, Artificial Sequence
  ENSG00000281344_1070 (sequence is synthesized)
gaactctggtgtttcttatcatgctgcacataaaattatggactgtgcctcaggttaggagaaatcagaattttcaatgaaaatacaattaaaattggattagtatgtcattctatcttt

SEQ ID NO: 988418 - DNA, 120 bp, Artificial Sequence
  ENSG00000281344_1071 (sequence is synthesized)
gatcagtcttaaccttaattggctaatcatataaaagctcttacactgtgatctaattcagtcctgctggacaaatgctattctattgtattcaatatgatgtcactgaaaacttcatgg

SEQ ID NO: 988419 - DNA, 120 bp, Artificial Sequence
  ENSG00000281344_1072 (sequence is synthesized)
aatatattgagctggaaagattagacaaacaactcctcacttacggtgcacacacgcacacacacacacacatccccacacacttacacatccctactcatttaaatatagaactgtata

SEQ ID NO: 988420 - DNA, 120 bp, Artificial Sequence
  ENSG00000281344_1073 (sequence is synthesized)
atttacatattacgttattagtaagttacttttgaatactccagtataaataatgtaaacaaattaactttaatcaatactttagggccagttagttacagtaatgtaataaaaaatgtt

SEQ ID NO: 988421 - DNA, 120 bp, Artificial Sequence
  ENSG00000281344_1074 (sequence is synthesized)
tacagtaatgtaataaaaaatgtttaacaaccagctctggggaggagtagagtcctgatttgtagcatttgctgatttctgtccatcaatactctcaccatggctggtttcaggctccca

SEQ ID NO: 988422 - DNA, 120 bp, Artificial Sequence
  ENSG00000281344_1075 (sequence is synthesized)
gtgtgaggtcacctaatgcaggaatacagatgctgctatttaaatctgcaccagagggttcattgatgagggtaagggatgttgagcataattttgggggataagtaaatggtgtccaat

SEQ ID NO: 988423 - DNA, 120 bp, Artificial Sequence
  ENSG00000281344_1076 (sequence is synthesized)
gtatgtctggctgaaaaaagattacacaggcatctttgtccttgaaggaacagtattgaaggacccatcaagcccagaagccttacatcttcagagtatcccctgggtctagaactttgg

SEQ ID NO: 988424 - DNA, 120 bp, Artificial Sequence
  ENSG00000281344_1077 (sequence is synthesized)
ttctacacctccctatttaatcaaggctctattacctgatccaattacaggctttgctgattcttctgttagattattattgtaaagcttgttggagtgcctaaaagatagatatcaggg

SEQ ID NO: 988425 - DNA, 120 bp, Artificial Sequence
  ENSG00000281344_1078 (sequence is synthesized)
actgacttcctcaagccaggggaatagtttctatgactattttgaagcttgcttgctaatagatatttctatgtagcagaatattgtctaagatttcctttattacacttgccacctaat

SEQ ID NO: 988426 - DNA, 120 bp, Artificial Sequence
  ENSG00000281344_1079 (sequence is synthesized)
ggtgaggtgaaggaagaagtcatagcttccatttctcttttatcgtattaccaaatattgaggtgataaatatttaccaaaaaatctgacagttgtatagggccaacttggtttattata

SEQ ID NO: 988427 - DNA, 120 bp, Artificial Sequence
  ENSG00000281344_1080 (sequence is synthesized)
tcaatttgcaatatcggtaagtacctactaagtttggggcactataacatgataaaatccttgtctacagagagcttttaggtggatttaaaaatgcagtgttaccatttctatttataa

SEQ ID NO: 988428 - DNA, 120 bp, Artificial Sequence
  ENSG00000281344_1081 (sequence is synthesized)
agtgtgaaaacaaagtggatgccagatcacacacaagccagcagagaatgtctcccagtcttgtttacagtactgggattgtggtcaaggtgaatacacacagtcctttactctcttatc

SEQ ID NO: 988429 - DNA, 120 bp, Artificial Sequence
  ENSG00000281344_1082 (sequence is synthesized)
agagagtgaaggtttaaagagaaaccaacaaaagtgtccaggtactttttttttttcttcagacagggtctcagctaggctggagtatagtggcacgatcacagctgactgcagccttga

SEQ ID NO: 988430 - DNA, 120 bp, Artificial Sequence
  ENSG00000281344_1083 (sequence is synthesized)
tcaggctcctgagtagctgggactacagacgtgccaccacacctggctattgttttaatttttttgtagagaccaggtctcactatgctgcccagtctggtcttgtactcctgggctcaa

SEQ ID NO: 988431 - DNA, 120 bp, Artificial Sequence
  ENSG00000281344_1084 (sequence is synthesized)
cagtctggtcttgtactcctgggctcaagtgatcttcccaccttggcctcctaaagttcttggattacagacctcaaacaccatgtccagcctccaggtactttttaactgtagtgatta

SEQ ID NO: 988432 - DNA, 120 bp, Artificial Sequence
  ENSG00000281344_1085 (sequence is synthesized)
tgtggcattttgatgtaatggctctaaaatattgcccctgaattcttggaaacttcttccttgtagaggttgggtgtggtctatgtccttttccttaaagctgggtttttgactacttga

SEQ ID NO: 988433 - DNA, 120 bp, Artificial Sequence
  ENSG00000281344_1086 (sequence is synthesized)
ccaatagtacatggcagaagtgttgctgtggcagtttcttaagatacaggtctggaaactggcacttgatctggtaaggtccgaactatataccaagaaactggctatttccacttccta

SEQ ID NO: 988434 - DNA, 120 bp, Artificial Sequence
  ENSG00000281344_1087 (sequence is synthesized)
tctctgggatatttgctgttagaacctagtctctattctgtgaggaagcctaggccacctcatggagaggaaccaataggcagcatcaacttaccattcatgaaagtaagccatcttgga

SEQ ID NO: 988435 - DNA, 120 bp, Artificial Sequence
  ENSG00000281344_1088 (sequence is synthesized)
ggtgggtcatccaaccccagttaggccacatggagcagagataagctgtcctgctgagacctgccaaaatggcaaattcttaaataattattgctgtttaagtcatgaaattttggggta

SEQ ID NO: 988436 - DNA, 120 bp, Artificial Sequence
  ENSG00000281344_1089 (sequence is synthesized)
gcttaatatacagcaatagaaacctggacacctagtaatctgtttgtgagaagagactatcagatgcttctcagtactatttttcctgttagttggtgactcattcctttgtagacagtc

SEQ ID NO: 988437 - DNA, 120 bp, Artificial Sequence
  ENSG00000281344_1090 (sequence is synthesized)
tatagatttcttttgtgtttactccctcttggggacttcccacttgtgcctgcctcctgtttagcaggaatctgtagcagacaaatcccaagctgaagcagggattaggggtgagcttct

SEQ ID NO: 988438 - DNA, 120 bp, Artificial Sequence
  ENSG00000281344_1091 (sequence is synthesized)
gtgagcagtggaagtttgcacaacctaacaaagaggtaatttctgcaggggtgcttttggcaagagagatgcccatatgttggattgcataattcttttttcttcccagttgggggtcat

SEQ ID NO: 988439 - DNA, 120 bp, Artificial Sequence
  ENSG00000281344_1092 (sequence is synthesized)
caggtcatctgactgctaattcttcaggtatggacttttcttccagctctgtgaatctgttctaaagggtagagtctgagatgagaatctagagacacaaattgttgctgtgtcaccaac

SEQ ID NO: 988440 - DNA, 120 bp, Artificial Sequence
  ENSG00000281344_1093 (sequence is synthesized)
tgtgtgagctcaatcaagccaattgacattactaggaacataatgggattaagatacttagaagccctacacattgaacatgttatgatattatgaccccagatgtaatgtaagcaaata

SEQ ID NO: 988441 - DNA, 120 bp, Artificial Sequence
  ENSG00000281344_1094 (sequence is synthesized)
caacaaaattctgattttcaccaaggtgactacttgatgcattttttgaattaccaaatgttaaatttgttaatttttgttattttagtgttcctaattagtctacctagtgaataacca

SEQ ID NO: 988442 - DNA, 120 bp, Artificial Sequence
  ENSG00000281344_1095 (sequence is synthesized)
ttgtctaggcctcaattgcttcatccataaaatagataagtagatggtttgatctgttcgatttcttttgtatctaaattttgattctgcaatcacttttattccctttcctttgtttgg

SEQ ID NO: 988443 - DNA, 120 bp, Artificial Sequence
  ENSG00000281344_1096 (sequence is synthesized)
tatgtttttttttctctttgctatagctttattgaggtataattgacaagcaataaactgaaaaatctaaagtgtacaatttgagaatttttgacatacttttacaccgatgagcattac

SEQ ID NO: 988444 - DNA, 120 bp, Artificial Sequence
  ENSG00000281344_1097 (sequence is synthesized)
ctaatcaaaacagtaaacatctccatcatctccacaaatttctttgtgttcttccctttcccttttcttaccccagcttctaggcaactattgagctgctgtgtatcactatagattagt

SEQ ID NO: 988445 - DNA, 120 bp, Artificial Sequence
  ENSG00000281344_1098 (sequence is synthesized)
ttgcactttacagaattttagataaatggaattctagagtatgtattcttttttgtctgacttctttcactcagcataattgatttgagatacagacatgttgttgcatgtaccagtagt

SEQ ID NO: 988446 - DNA, 120 bp, Artificial Sequence
  ENSG00000281344_1099 (sequence is synthesized)
tcatttttttaagttgctgagcagcattccattgtatggatatgccacaatctgtttttccatttacctgctgatggacatttgggttgtttccagtttggggctattagggataaagct

SEQ ID NO: 988447 - DNA, 120 bp, Artificial Sequence
  ENSG00000281344_1100 (sequence is synthesized)
gctgtgaacattcacatataaatacttacatagacacatgattttatttttcttgggtaaataaatacctatgagtggaatggttggatcatatggtaattacatgtttaatttttaaag

SEQ ID NO: 988448 - DNA, 120 bp, Artificial Sequence
  ENSG00000281344_1101 (sequence is synthesized)
aaatggccacacttttcaaaagtcgtggaacaattttactttcccactggtagtctgtgagagttctagtttctccatattctcaccaacattttgtatggtcagtttttaaagtttagc

SEQ ID NO: 988449 - DNA, 120 bp, Artificial Sequence
  ENSG00000281344_1102 (sequence is synthesized)
cattctaataagcatgtagtggtatctcattgtgtcttaaatgtacattcttgtggtaactaatagtgttaaaaatcttttcatctgcttattggctgatatggtttggctctgtatccc

SEQ ID NO: 988450 - DNA, 120 bp, Artificial Sequence
  ENSG00000281344_1103 (sequence is synthesized)
cacccaaatctcatcttgaattgtaatctctgtgtattgggggaggggcctggcatgaggtgactgaatcatggcagtagacttcccccttgctgttcttgtggtagtgagttctcgtga

SEQ ID NO: 988451 - DNA, 120 bp, Artificial Sequence
  ENSG00000281344_1104 (sequence is synthesized)
gatttgatggtttaaaagtgtgtggcagttcctccacactcactctctcctgcttcaccatgggaagaaggtatgccttgcttccccttcagcttgtgccatgattttaagtttcctgag

SEQ ID NO: 988452 - DNA, 120 bp, Artificial Sequence
  ENSG00000281344_1105 (sequence is synthesized)
gcctcccagtcatgcttcctattaagcccatggaactgtgagtcaattaaacttatgttcttaataaattacccagtgtccggtagttctttatagcagtgtgaaaatgaactaatacat

SEQ ID NO: 988453 - DNA, 120 bp, Artificial Sequence
  ENSG00000281344_1106 (sequence is synthesized)
ttgccatctgtatatcttctttggtgaagtgtctgtcacaatattttttctagttcttaaaaattattactgatttttgagagtttaaaaaatatattgtgcataaaagttgttagatac

SEQ ID NO: 988454 - DNA, 120 bp, Artificial Sequence
  ENSG00000281344_1107 (sequence is synthesized)
ataatttgcaaatattttcttgcagtctgacttatattttaattctattaatatttggtatgttcttaaagaggaaaaaatcttaacatgtgaaatattttacatactcttaagttcaaa

SEQ ID NO: 988455 - DNA, 120 bp, Artificial Sequence
  ENSG00000281344_1108 (sequence is synthesized)
gagcagcataggtggatctgggaagaaaaagacattagcaaaccattcaatggtttggcattgaatgcctttgtgtaagattttctttagttagcttttattaagtgacttttgtgtata

SEQ ID NO: 988456 - DNA, 120 bp, Artificial Sequence
  ENSG00000281344_1109 (sequence is synthesized)
aagtattgcagtataagtaaacattgtagtaagtaatgttttagcttgaattctgggctttatgcatgtttttcagaacagccaccaatttagactcatggtttctctcagtattatgcc

SEQ ID NO: 988457 - DNA, 120 bp, Artificial Sequence
  ENSG00000281344_1110 (sequence is synthesized)
tggtctacaaagagtctaagctaaaacacccatgtgtgatatctatatctcccacatcatcatacaccaatctatttctatttctatatatgtatgtataacttgcaaaaaatccaactt

SEQ ID NO: 988458 - DNA, 120 bp, Artificial Sequence
  ENSG00000281344_1111 (sequence is synthesized)
atattcatattcaacttacatctttggtcaaatataaccatcaggcaaactgttgtgacctcacaggtataataaactaaatgataatataaaatatgtatcacaaagcttgtgcacttt

SEQ ID NO: 988459 - DNA, 120 bp, Artificial Sequence
  ENSG00000281344_1112 (sequence is synthesized)
acttcacagtagaaacatggatctgccttcaggtacttatgtagacaattatttataaagcaagatagattataaccagtgaggccacactgacagcatgtggaaaaacagttcacaaca

SEQ ID NO: 988460 - DNA, 120 bp, Artificial Sequence
  ENSG00000281344_1113 (sequence is synthesized)
gtgggaagagagacagagaaaatacagaccccaaaactagaatgcaaagaagtctggatatattttgtatttgtatagaaagccttttaagtatgaatttcccagaggacatggagtcat

SEQ ID NO: 988461 - DNA, 120 bp, Artificial Sequence
  ENSG00000281344_1114 (sequence is synthesized)
ggagtcatgagatttgtaataatttatctcagaaatgcttggaataaattataagttcttaaagggaataaggttttgaagaatgtatagttaactccttgataatataatttatattat

SEQ ID NO: 988462 - DNA, 120 bp, Artificial Sequence
  ENSG00000281344_1115 (sequence is synthesized)
cagaagctataaaaagtataaaacttgccaaagaagggagtgagactgctgaatgaagttaaagtagagggtttatcttgaaaattcttctgctttaaatattctgaatatgaaatagaa

SEQ ID NO: 988463 - DNA, 120 bp, Artificial Sequence
  ENSG00000281344_1116 (sequence is synthesized)
ggatatggttaattgtcagtgggagagaaaggaacaggtattgaatggacctctgtattgtaagagtaaaagagaaattcccaaccaaccaattattaaacctcctaatattaagaattt

SEQ ID NO: 988464 - DNA, 120 bp, Artificial Sequence
  ENSG00000281344_1117 (sequence is synthesized)
atatctagcatttgaaaaatttgatctagaaatttaagaacaggtagaatttccttcatcatccctgttatttcctctcttagtgcttataagtacaaactccagaacagtctagtttga

SEQ ID NO: 988465 - DNA, 120 bp, Artificial Sequence
  ENSG00000281344_1118 (sequence is synthesized)
gtttgagtttcaacatcatcagtgggttggcttccacaaacccaagttttctaacctacagaatggaactaaaatccccacctgaagaggtggtggtgaggattataggagatgcaggta

SEQ ID NO: 988466 - DNA, 120 bp, Artificial Sequence
  ENSG00000281344_1119 (sequence is synthesized)
aagggcttagtatagtacctggcccagggttttaaacacttagtaaatataaaatattacaattattgtttattctagggagaaatttgaaggacaagcagcactgaaaaattcaagcaa

SEQ ID NO: 988467 - DNA, 120 bp, Artificial Sequence
  ENSG00000281344_1120 (sequence is synthesized)
aaacattagcagtcaatatcccataatttgaaattaaggattaaaattaggtattattttcatctgtttttgtttctcttattttaataaaaaagctgtggaagcccccagaaataactg

SEQ ID NO: 988468 - DNA, 120 bp, Artificial Sequence
  ENSG00000281344_1121 (sequence is synthesized)
ccagcttttggagggtgtctctggatgttttgtgtgttccatctgggctgcagccattattctacctacttgacagacgatgaggtcatggaggccaagtgttcttcacgacgacaccca

SEQ ID NO: 988469 - DNA, 120 bp, Artificial Sequence
  ENSG00000281344_1122 (sequence is synthesized)
ggtcaaaggcagagttaaagtacatcccaggtcacataactcattctctgttcaagaatctttcctaatccctggtgccatttgggaactgtttcaaaggcattccaacctcagaatcat

SEQ ID NO: 988470 - DNA, 120 bp, Artificial Sequence
  ENSG00000281344_1123 (sequence is synthesized)
gccagtgcactggttatcaattattttgttgatcctttagcaaatcctcaaactgatttttctgccctcctgagacacaaatcacaaagctgaccttaagtgctttggcatccccctcca

SEQ ID NO: 988471 - DNA, 120 bp, Artificial Sequence
  ENSG00000281344_1124 (sequence is synthesized)
gtcccgaggcacacaaaaaagcagtgcagggttggtgatttattgttttcccacgcaggtcacgctcaagcccagacagatagagaagatttgtctttaacgagagaaatgcaccattac

SEQ ID NO: 988472 - DNA, 120 bp, Artificial Sequence
  ENSG00000281344_1125 (sequence is synthesized)
ttggtcataaattcaacttaatggtaattttagtagggcagcttgcccagggtttgtagaaacacaaatcaaaaatcccaaattccatgcatatcctcctagaaactcttttggcaactc

SEQ ID NO: 988473 - DNA, 120 bp, Artificial Sequence
  ENSG00000281344_1126 (sequence is synthesized)
ccttccatttgctttttaaggaaatcaatttccttagttatggtccctagttgcttagggtggttttgcacagagtctagaatcactgtggcagcagagaggggagtgggtggcatgctg

SEQ ID NO: 988474 - DNA, 120 bp, Artificial Sequence
  ENSG00000281344_1127 (sequence is synthesized)
cttgaactatttttgccaagcattcggccttgacttcagttgtcaaggaggcacaagtgagctgacacacagattcggtagacagtcccaaaaaagtagtatgtggtgaaaatgttcaga

SEQ ID NO: 988475 - DNA, 120 bp, Artificial Sequence
  ENSG00000281344_1128 (sequence is synthesized)
tgactctgtctaaggaaaaatttttttcaaatcctcctgtccttgactgattccaaactgacaaattctggtcattatgaatctcaggtcacataacaagctctgaatccttacagagtt

SEQ ID NO: 988476 - DNA, 120 bp, Artificial Sequence
  ENSG00000281344_1129 (sequence is synthesized)
ggtttagtccaagctggcatagaaatatctatggagtatattcaggcacaaggctaccagacacccctccagactcttagaagtagactcaaacataccatcttgtatgcatgccatatc

SEQ ID NO: 988477 - DNA, 120 bp, Artificial Sequence
  ENSG00000281344_1130 (sequence is synthesized)
ctgtgctccctatgatcatagcaactagaagaccttattgtccttaattacttatgcgtgttcccttatagcacactgtgtgctcccaggtgtatggcaatgccatacctgaatttgttt

SEQ ID NO: 988478 - DNA, 120 bp, Artificial Sequence
  ENSG00000281344_1131 (sequence is synthesized)
ctccagtttttaacccagtgcctgacatgtgacagatgcacagttagcattggttgaatgaacagaagtatgaatgaataacgttcatgcctttccagtaaggtctgacttttaagttgg

SEQ ID NO: 988479 - DNA, 120 bp, Artificial Sequence
  ENSG00000281344_1132 (sequence is synthesized)
ggaacctgggaaatggccattccttcttcttctttttttttttcaggatgatatacatggccaggtgaagacagtagagagaaaacagaactgaaagtaagtgtctcccataagtagggt

SEQ ID NO: 988480 - DNA, 120 bp, Artificial Sequence
  ENSG00000281344_1133 (sequence is synthesized)
aatttgtactttatttacttacaccaaaatttacagaatgccaatacagtcaaaatatagtgtcaggtactgaagaatatttaactaggaatcaaagaactcaagatctcttactcttta

SEQ ID NO: 988481 - DNA, 120 bp, Artificial Sequence
  ENSG00000281344_1134 (sequence is synthesized)
gatctaagatccaatgtataatgctaccctaaattactttattcttaatagcatcactctatccagagaaaatacacgacattctagcttctctgatttggttttgcagatgggtctacc

SEQ ID NO: 988482 - DNA, 120 bp, Artificial Sequence
  ENSG00000281344_1135 (sequence is synthesized)
tataaccttcccctcaggggtagagaggagtttagctggcagtttatttctgtttctactcacacgcctagcatatgagaaggctgggattagagccaaaggagaagcctggaacaccca

SEQ ID NO: 988483 - DNA, 120 bp, Artificial Sequence
  ENSG00000281344_1136 (sequence is synthesized)
ggtgatggcatgtttggatccttataattctctatgaaagagtgaagagactcaaaggctatggctctccagcttgagtgggcatcagaatcacctggaaggcttcctaagacacattat

SEQ ID NO: 988484 - DNA, 120 bp, Artificial Sequence
  ENSG00000281344_1137 (sequence is synthesized)
ttctgggcccccacccccagagttcctgagtcagtaggtttaagttcagattccagaagttgcattcctaggaagtccccaagcaatgcaaatgctactggtttaggaccagctgaacta

SEQ ID NO: 988485 - DNA, 120 bp, Artificial Sequence
  ENSG00000281344_1138 (sequence is synthesized)
aggtaagccctgacactttccaccaaatcaaattctctcattccctcatataatgccacaagatgattccatttgtatggttttgtccaggtagccttggactcaaataaaagaatcagt

SEQ ID NO: 988486 - DNA, 120 bp, Artificial Sequence
  ENSG00000281344_1139 (sequence is synthesized)
tggaattacttatttcatagctgttttccactgatctggggcaaattttttgtgccagataccttcctttgtggtttaacctgtatttatgggctgcctctcttgtcattagttggaaat

SEQ ID NO: 988487 - DNA, 120 bp, Artificial Sequence
  ENSG00000281344_1140 (sequence is synthesized)
aaaaacaatgatagtatcaatgaaagcaacctgcaaaagtattgttaacatagagatgcatacacataaactgtttattcatgccattgggcttgtgtggataactgtgtaaaataatga

SEQ ID NO: 988488 - DNA, 120 bp, Artificial Sequence
  ENSG00000281344_1141 (sequence is synthesized)
atttaacattagcctttggattttttctcctttccttcatctgctctgactaggagaataattgtagcttcagtctaaatggagaaatattagccaggtctttctgtcttctagataggt

SEQ ID NO: 988489 - DNA, 120 bp, Artificial Sequence
  ENSG00000281344_1142 (sequence is synthesized)
cctgtagtccagccaagctatctggatttctgattagacagaaatccatttttataaagagaaaaaaatgtattttctcaagaattatttttagttattttctctcttgtgatgaaaggc

SEQ ID NO: 988490 - DNA, 120 bp, Artificial Sequence
  ENSG00000281344_1143 (sequence is synthesized)
ttatctaaatagcccaagcttcattcaagattcttccccactctttgttgtcacccagccttccctgacctcactcaccctcagacagccagggatttaaaaatacgttggaagatttta

SEQ ID NO: 988491 - DNA, 120 bp, Artificial Sequence
  ENSG00000281344_1144 (sequence is synthesized)
atggtctctgcagagtagaattacattcttctgtgtaacatttggacaccaagcagagagatagcacagtctgtctagctcttttgtaattatttcatggtattgttttaattgtggcat

SEQ ID NO: 988492 - DNA, 120 bp, Artificial Sequence
  ENSG00000281344_1145 (sequence is synthesized)
ggcttaatcactggctgtgcacagattatgccacatacttaaaataattacagggatttggtaagataatgctgtgaattcatttaatgcttcttttccaatagactccacactcttaaa

SEQ ID NO: 988493 - DNA, 120 bp, Artificial Sequence
  ENSG00000281344_1146 (sequence is synthesized)
aggagagagaagcaaagaaggacagtcaatcaatgccagcattggtcattttctgcaccttgtgaggactgaccaggatgatatatgcacatttttttatttcagtcatcttccacctgc

SEQ ID NO: 988494 - DNA, 120 bp, Artificial Sequence
  ENSG00000281344_1147 (sequence is synthesized)
ccaaggaggcattttatctagtactcaaagatcctgaaactagtgtgacaccctgttaagatccctttaccagctaacacttaatataggttcacaactagtaacctagccaggcctgtg

SEQ ID NO: 988495 - DNA, 120 bp, Artificial Sequence
  ENSG00000281344_1148 (sequence is synthesized)
tgaacacattagttttaaatccaatggtttgtctatgtaactgtattagggttctctaaagggacagaactaataggataggttaatatatgaaagtttattaagagtttattaaggagt

SEQ ID NO: 988496 - DNA, 120 bp, Artificial Sequence
  ENSG00000281344_1149 (sequence is synthesized)
caataggctgtctgcaagctgaggagccaggaagcaattccaagtcccaaaactttaaaagtagggaagctgatagtgcagccttcagcctgtggccaaaggcctcagagcccctggcaa

SEQ ID NO: 988497 - DNA, 85 bp, Artificial Sequence
  ENSG00000281344_1150 (sequence is synthesized)
aaaactttaaaagtagggaagctgatagtgcagccttcagcctgtggccaaaggcctcagagcccctggcaaatcagtgagagtc

SEQ ID NO: 988498 - DNA, 120 bp, Artificial Sequence
  ENSG00000281344_1151 (sequence is synthesized)
tggaggccagaagattctgccagtttagtccttccacattcctctgcctgcttttatcctagccatgttggcagccgattagatggtgcccacccagattgagagtgggtctgcctttct

SEQ ID NO: 988499 - DNA, 120 bp, Artificial Sequence
  ENSG00000281344_1152 (sequence is synthesized)
tagtccactaactcaaatgttaatctcttttggcagcaccctcactgacacacccagaaacaatacttcacatttttcaatccaatcaagttgacactcaacattaactatcacagtaac

SEQ ID NO: 988500 - DNA, 120 bp, Artificial Sequence
  ENSG00000281344_1153 (sequence is synthesized)
tgatgactgctatctccattagcagttctttagcttcagaagagtgtaatctggttataaatctttgttagaattacttcgttggttaattttatgtgtcaacttgactggcctaagcaa

SEQ ID NO: 988501 - DNA, 120 bp, Artificial Sequence
  ENSG00000281344_1154 (sequence is synthesized)
cgcccagatagctggtagaacatttgtcctgggtgtgcctgtgagagtatttctggaagacactaccatttgaatcatcagactgagaaaagaagatacactcttgccaatgtgggtgag

SEQ ID NO: 988502 - DNA, 120 bp, Artificial Sequence
  ENSG00000281344_1155 (sequence is synthesized)
catcgtccaatccattgagagccaaatagaaaaaaaaaggtggggcaaggtgaatttaatctcttttcttgagctgggacgtccaactcctcctgcccttgggtcttagagttcttattt

SEQ ID NO: 988503 - DNA, 120 bp, Artificial Sequence
  ENSG00000281344_1156 (sequence is synthesized)
cttgggcttttggacttcaagacttaaaacaatgcccccactcaccacaaggttctcagttttatggccttggacttggagttataccatcatttcctctgatctcaggccttcatgctt

SEQ ID NO: 988504 - DNA, 120 bp, Artificial Sequence
  ENSG00000281344_1157 (sequence is synthesized)
ggattgacttctgccactggatttcctgggtctcccacttgtagatggcatatcatgggacttcttagcctctgtaatttcatgagccaatgcctgcaataaatatcctcttatatctat

SEQ ID NO: 988505 - DNA, 120 bp, Artificial Sequence
  ENSG00000281344_1158 (sequence is synthesized)
ctatctatctatccatccatccatcttctgttggtgctatttctctggagaactctggctaatacaactatcatgcaatttgtatggtttattgaatactgatttaatcattcattcaac

SEQ ID NO: 988506 - DNA, 120 bp, Artificial Sequence
  ENSG00000281344_1159 (sequence is synthesized)
tgaatactgatttaatcattcattcaacagatatttatcttgtgcctgctatgtgccaagtgtgttctaaactctagcagtgaacaagctaagcaaaattcctacttcgtggcactcgtg

SEQ ID NO: 988507 - DNA, 120 bp, Artificial Sequence
  ENSG00000281344_1160 (sequence is synthesized)
tttgagatgtaggggagacagacagtaaaccaacaacaaaataacaatttcagatatggttagtcatatgagtaacataaagcagggttggggaatagagagtggctagagtgtggagat

SEQ ID NO: 988508 - DNA, 120 bp, Artificial Sequence
  ENSG00000281344_1161 (sequence is synthesized)
tttagatagaagatagcatttgaacagagtcctggtgatgagaaggaatcagacttgtgaaggtttgggggaagggaattttaggcagaaggaaggcaaagtgtaaggggctgaatccat

SEQ ID NO: 988509 - DNA, 120 bp, Artificial Sequence
  ENSG00000281344_1162 (sequence is synthesized)
ggtaagcttagtggttctgcgaacagtgaacagtgcagaggggctggagcagagcaagtaagcagtagagttgttggaagaggaggaggctgaggccatgtcaaagggttctgcccccat

SEQ ID NO: 988510 - DNA, 120 bp, Artificial Sequence
  ENSG00000281344_1163 (sequence is synthesized)
ggcaataaggttagatttttatgtaatgggatgtcttagagggtttagattgcctggttgatatttttgaaagatcagtctggttgatgagataagatttataggcaagaatgaaagtag

SEQ ID NO: 988511 - DNA, 120 bp, Artificial Sequence
  ENSG00000281344_1164 (sequence is synthesized)
aaagggccatttaggaagctattgtactggcccagttatcctcggcttggattaggatgggagtggtagagaggttagaaatattttggagctagaactcacaagattttctaatagata

SEQ ID NO: 988512 - DNA, 120 bp, Artificial Sequence
  ENSG00000281344_1165 (sequence is synthesized)
gtgtctggggattaaaggaatgaatagaatcaaaactgattcctagatttctggcttaagcaactggggaatggtggaaccattaactgagagggagaaaactagggcatgcaaaatttt

SEQ ID NO: 988513 - DNA, 120 bp, Artificial Sequence
  ENSG00000281344_1166 (sequence is synthesized)
gtttagatttgttgagtttgagataagtattatacatccaagtgggagtttagtagacagttgaaaatataaatctagggttcaggggataggtcagaggtggagatatatgtgtaggat

SEQ ID NO: 988514 - DNA, 120 bp, Artificial Sequence
  ENSG00000281344_1167 (sequence is synthesized)
tccttactgtatacatgtaatagttattacctaagctacatcttggctgagtgatgagatgaggtgatgcaaacaaagtatacatcattgtcctgccctactggagtatatacttgtaaa

SEQ ID NO: 988515 - DNA, 120 bp, Artificial Sequence
  ENSG00000281344_1168 (sequence is synthesized)
atcttatctttttaaaatgatgtacttaatgaataatagaaggaaacatagagtaggttttgaatacaatatgtttttgttcatttgttgtttaatagcaaataatccaaaatttaaata

SEQ ID NO: 988516 - DNA, 120 bp, Artificial Sequence
  ENSG00000281344_1169 (sequence is synthesized)
tttaaataagaattatctttcaaggtagcctcttgggagggctagccaatcagcccaacaatttcttagagctttcttggagtgattgggattcccttttagatttggtcatgccacaag

SEQ ID NO: 988517 - DNA, 120 bp, Artificial Sequence
  ENSG00000281344_1170 (sequence is synthesized)
aaagttagtctaccttttcataaaactatatctcattttttgttaaaaaataggacttgcttgaaagttcacctgttgttggacttgtgacaacaagaaaaataaaaaaaaaatacgtca

SEQ ID NO: 988518 - DNA, 120 bp, Artificial Sequence
  ENSG00000281344_1171 (sequence is synthesized)
ccgaggaatatgacttggtacccatattagtccattctcctgctgctataaggatatacatgagactgggtgattcataaaggacagatgcttaattgactcacaattgcagggctaggg

SEQ ID NO: 988519 - DNA, 90 bp, Artificial Sequence
  ENSG00000281344_1172 (sequence is synthesized)
agagaagaatgagagccaagcaaagggggaagctccttataaaaccattaaatctcatactcgtaagaactcactcactgtcatgagaat

SEQ ID NO: 988520 - DNA, 120 bp, Artificial Sequence
  ENSG00000281344_1173 (sequence is synthesized)
aatctcatactcgtaagaactcactcactgtcatgagaatagcacaggggaaacctcccccatgattcagttacctcccactggatccctcccatggcatgtgggaattacgggaactac

SEQ ID NO: 988521 - DNA, 120 bp, Artificial Sequence
  ENSG00000281344_1174 (sequence is synthesized)
ttagttatttcctagatacaatggggctacagatgttggcaaataccccctttccaaatgggagaaattggccaagacaaaggggccactgtctccatacaagtctgaaatccaataggg

SEQ ID NO: 988522 - DNA, 120 bp, Artificial Sequence
  ENSG00000281344_1175 (sequence is synthesized)
gatttcctttgactccatgtctcacatcgaggttacgctgatgcaagagatggactcccatggccttgaagagctctgcccctatggcttttcacggtacagcccccttcctggctgctt

SEQ ID NO: 988523 - DNA, 120 bp, Artificial Sequence
  ENSG00000281344_1176 (sequence is synthesized)
gactcccatggccttgaagagctctgcccctatggcttttcacggtacagcccccttcctggctgctttcatgggttggcattgagtgcctttggcttttccaggtgcacagtgcaagct

SEQ ID NO: 988524 - DNA, 78 bp, Artificial Sequence
  ENSG00000281344_1177 (sequence is synthesized)
cactaggcagtgccccagtggggactgtgtgtgggggctccaaccctacatttcccttcttagcaaacttctgcctgg

SEQ ID NO: 988525 - DNA, 120 bp, Artificial Sequence
  ENSG00000281344_1178 (sequence is synthesized)
tccacccctgtagcaaacttctgcctggacattcaggcatttccatacaccctctgaaatgtaggcgtaggttcccaaacctcagttcttatctcctgcacatacacagggccaagacca

SEQ ID NO: 988526 - DNA, 120 bp, Artificial Sequence
  ENSG00000281344_1179 (sequence is synthesized)
tgtagaagctgctagggcttgggcttgcatcctctgaagcaatgactcaagctgtgcattggcccctcttagacatgactggagccgaagcagtgggaatgcaggccaccatgtcctgaa

SEQ ID NO: 988527 - DNA, 120 bp, Artificial Sequence
  ENSG00000281344_1180 (sequence is synthesized)
caggagggccctgggcctgatccactaaagcatttttccctcctaggcctccaggtctgtgatggaaggggctgccatgaaggtctctgacatgtcctggagatatttttcccattgtct

SEQ ID NO: 988528 - DNA, 79 bp, Artificial Sequence
  ENSG00000281344_1181 (sequence is synthesized)
aggtctctgacatgtcctggagatatttttcccattgtcttagtggttaacattctgctacttgttatttaggcaaatc

SEQ ID NO: 988529 - DNA, 120 bp, Artificial Sequence
  ENSG00000281344_1182 (sequence is synthesized)
cttgaatgctttgccacttagaaattttttccacctgataccctaagccattgctttcaagttcaaagttccacatatctctaaggcagtctctttgctaaagcatagcaagagtcacct

SEQ ID NO: 988530 - DNA, 120 bp, Artificial Sequence
  ENSG00000281344_1183 (sequence is synthesized)
atagcaagagtcacctttgttccagcacccaagaagtttctcatctctatctgagacaatctcatcctggacttcattgtccttatcactgtcagcattttggtcaaagccatttaacaa

SEQ ID NO: 988531 - DNA, 77 bp, Artificial Sequence
  ENSG00000281344_1184 (sequence is synthesized)
tctgagcccttttttctgacccttctcaatgattccaatttcttcctgttacccagttccaaaatcacttccacatt

SEQ ID NO: 988532 - DNA, 120 bp, Artificial Sequence
  ENSG00000281344_1185 (sequence is synthesized)
atttcttcctgttacccagttccaaaatcacttccacattttgggatatctttacagcagtgccacactctctgtggtaccaatttactatattagtctgtaataaggacatacccagga

SEQ ID NO: 988533 - DNA, 89 bp, Artificial Sequence
  ENSG00000281344_1186 (sequence is synthesized)
caatttactatattagtctgtaataaggacatacccaggactcgataatttataatgaagaggttgaattgactcacagttccataggg

SEQ ID NO: 988534 - DNA, 120 bp, Artificial Sequence
  ENSG00000281344_1187 (sequence is synthesized)
aaggagaagaatgagagtgacaaaaagggggaagctccttataaaactatcagatctcataagaacttaatcactatcatcagaatatcatgggagaaactgcccccataattcaatacc

SEQ ID NO: 988535 - DNA, 120 bp, Artificial Sequence
  ENSG00000281344_1188 (sequence is synthesized)
tcccactggattcctcccatgacatgtggagattatgagaactataattcaagatgagttttgggtggggatacagccaaaccatgtcagtaccactgatgattttaaatggactttgtc

SEQ ID NO: 988536 - DNA, 120 bp, Artificial Sequence
  ENSG00000281344_1189 (sequence is synthesized)
gcttgccttggtggttcatagaagagtgtctggatatgttttgagcaataaagaaatgattggaaaaagtacacaatctcccatgtgataactttgaaggaaacactgtttatttgcttt

SEQ ID NO: 988537 - DNA, 120 bp, Artificial Sequence
  ENSG00000281344_1190 (sequence is synthesized)
tagagctttagttttattcattcacttatccagtcatgaaaaaaatatttattatctgacatgtgcctggtggtattctaggcagtgaaaaggcagttacaagtagtgaaaagaaaaaaa

SEQ ID NO: 988538 - DNA, 120 bp, Artificial Sequence
  ENSG00000281344_1191 (sequence is synthesized)
caatactaattattaagtcttcatctttggcctaaaatgttagtatctcttagccttaaaaaatccagtgttttgcaaatggctcaatcaatcaatcaatcaatttattgaacaaacaaa

SEQ ID NO: 988539 - DNA, 120 bp, Artificial Sequence
  ENSG00000281344_1192 (sequence is synthesized)
aacattcaaatgaaggaataaaatttaactttacctttgccttcactatctgtcttcctctttgtattatatccccagaaacctcattcccacccctctgcttttgaagtctaaagtaat

SEQ ID NO: 988540 - DNA, 120 bp, Artificial Sequence
  ENSG00000281344_1193 (sequence is synthesized)
ctgttcctgtatgctgtaacatctccttcaaacatgaaacactcttttatttttctttctcccccattttgctgctgggatatgtcaacaaatctctgggctaggacggtaatatactaa

SEQ ID NO: 988541 - DNA, 120 bp, Artificial Sequence
  ENSG00000281344_1194 (sequence is synthesized)
ttaattcatagtcaggtataaatgatttgacgctgatttactaagccctaaacttttattttaacaacaggacaggacttaaatatatctctattgatggaaatgatagcatttgcaagt

SEQ ID NO: 988542 - DNA, 120 bp, Artificial Sequence
  ENSG00000281344_1195 (sequence is synthesized)
agtaaaatgatatatttcttggctgagagccttctccatgtctctgaaatcacagcctatacaatctacttaaattgccaattataattcctaggaacaaaaacctttcagtttctccct

SEQ ID NO: 988543 - DNA, 120 bp, Artificial Sequence
  ENSG00000281344_1196 (sequence is synthesized)
gatgctactatttctttttctttttaagagatactttgcagcgctctcatgtcatgtaatatattagcaagtaatcctcatagttgtgctagaggaatgggccaaattttgccttggcct

SEQ ID NO: 988544 - DNA, 120 bp, Artificial Sequence
  ENSG00000281344_1197 (sequence is synthesized)
ttgtttagctggatggtacctccacactgtactggggctctccatcaccatagctccttcagtcttgtgcaacatattattacaatcagcttcacttgttcccagttctttcagcatctg

SEQ ID NO: 988545 - DNA, 120 bp, Artificial Sequence
  ENSG00000281344_1198 (sequence is synthesized)
tagtggcagctggcgcatctcccacttcatcaggaagtgcattcaagggtatccggctagaaagttcccccagcaagcatttcttcatattgcaaaatgaagaagcaaggtttcacttgt

SEQ ID NO: 988546 - DNA, 120 bp, Artificial Sequence
  ENSG00000281344_1199 (sequence is synthesized)
aggtattcatatctggggtcaagtaaggtagaataaagttagggggatcttccatcatcaaagtgtcttcatcatgggtgaggccagtaaaaaatatcctcttttttttctagtagactg

SEQ ID NO: 988547 - DNA, 120 bp, Artificial Sequence
  ENSG00000281344_1200 (sequence is synthesized)
gtattcctttgatcctggttttaatcagaaaaggaatgaacagaattatgcgattggcactgcccttgtttgttttctaaattctcaaagggaattgctctcataccatgggtttccccc

SEQ ID NO: 988548 - DNA, 120 bp, Artificial Sequence
  ENSG00000281344_1201 (sequence is synthesized)
aagatctacaattctggttaccaaggttcacttttgtgtggggtttcctgcattttgcctttggacacccaagtctatctttcctgcaattaacaggaaaattccattgtgccaattgtg

SEQ ID NO: 988549 - DNA, 120 bp, Artificial Sequence
  ENSG00000281344_1202 (sequence is synthesized)
gttttgctttttcttcttgagaaaacaacctttattgcccttcacctgcctttgcgtccagtattctgtacaaatgtgtcatcgcatgacaaagagggtggcaatgaggaccagcatgtg

SEQ ID NO: 988550 - DNA, 120 bp, Artificial Sequence
  ENSG00000281344_1203 (sequence is synthesized)
tcaaaagtgtttgaaaactgttctagttaattagaaagagccatgctctagaaagttcaactcacgtgaaaattactggctcggagaactaacttatcttcaccattttctctctgggga

SEQ ID NO: 988551 - DNA, 120 bp, Artificial Sequence
  ENSG00000281344_1204 (sequence is synthesized)
agagctttgggacaaccccctccaaggtcattcatttttgtctttgtaatttcatagtatgccatgtgtctggtaatcagtattagagccagaagtgttgctagacttcaacaatctttg

SEQ ID NO: 988552 - DNA, 120 bp, Artificial Sequence
  ENSG00000281344_1205 (sequence is synthesized)
gcagttattgagatagatgtgtctcttggagaaagattaattggagtctgaaatgtttaaggaagctaacaattattgagtgcttgttctgtgccaggcaatatgctaggaatttctgca

SEQ ID NO: 988553 - DNA, 120 bp, Artificial Sequence
  ENSG00000281344_1206 (sequence is synthesized)
tatgctatctcatgtcacagaatctcaatttttctgcttatgagttggaatatgggattttatttaagtcttccttttagcaattttgtctgaagtgttgcctatgtaattttacacttg

SEQ ID NO: 988554 - DNA, 120 bp, Artificial Sequence
  ENSG00000281344_1207 (sequence is synthesized)
aaggaaagtgtattcagtggttaaaaagagccacagaggtagcaaataatttggaattcggcttgttcattaagtacacaaataaatccaaagtacacaaacaaattcacattacagagt

SEQ ID NO: 988555 - DNA, 120 bp, Artificial Sequence
  ENSG00000281344_1208 (sequence is synthesized)
attcacattacagagttagagcttgtattaggccattcttacattgctataaagaaataatgagacagggtaatttacaaaaaaataagtttgattggctcacagttctgcaggctgtac

SEQ ID NO: 988556 - DNA, 120 bp, Artificial Sequence
  ENSG00000281344_1209 (sequence is synthesized)
atagtggcatctgcttctcaggaggcttcaagaagcttccaatcatggcacatggtgaaagcaggaacaagagaaagagaggagaggtgttacacacttttaaatgacccagatatcatg

SEQ ID NO: 988557 - DNA, 120 bp, Artificial Sequence
  ENSG00000281344_1210 (sequence is synthesized)
agaactcacccactatcgtgaggacaataccaaggggatgttactaaaccattcataagaaatccacccctatgagccaatcacctcccagcaagccctacctccaatactggggattac

SEQ ID NO: 988558 - DNA, 120 bp, Artificial Sequence
  ENSG00000281344_1211 (sequence is synthesized)
atttgaatataaggtttgggtggggacaacatccaaactcttattagggctagtcaacaccactagagtcaagtgagctcacaggacaattttgtgaatttggtactaaagcagtcatta

SEQ ID NO: 988559 - DNA, 120 bp, Artificial Sequence
  ENSG00000281344_1212 (sequence is synthesized)
gaactatttatcaatatttccagactttctcttcctgcagtgttctcaagccatataatgtattagcaagtgatcctcatattagaccacaattccccaaatccttgaaattaggtgtgg

SEQ ID NO: 988560 - DNA, 120 bp, Artificial Sequence
  ENSG00000281344_1213 (sequence is synthesized)
ccatgtaacttgctttggccaatgaaatgtgagcagaattgatgtacgtctcttcaggtagaagcctttaggttcagcggaggagacatcttcccttcctccagccatggtgaccaacaa

SEQ ID NO: 988561 - DNA, 120 bp, Artificial Sequence
  ENSG00000281344_1214 (sequence is synthesized)
cattccagaggatgcaggtctgcaagcctgagtcctgagtgatgacaatgtgaagacaaactcactaccaacccaaagtaccatgagcgagaaataaataaacctctgttataagtcata

SEQ ID NO: 988562 - DNA, 120 bp, Artificial Sequence
  ENSG00000281344_1215 (sequence is synthesized)
gagatttggggattgtttgttaatgtagcacaaactagattgtgctaactcatacaggaaccatccagccagaaagccaaaaagtccttcctaaatgtatttgctttcattaccggagag

SEQ ID NO: 988563 - DNA, 120 bp, Artificial Sequence
  ENSG00000281344_1216 (sequence is synthesized)
gtttaaccagaggtttgaattgaccaaattcttgtgatgattatacagtttggtagttaagaggtctctgcagtcaggctgtcaccataggtacatcagccctgctgctttctacctgtg

SEQ ID NO: 988564 - DNA, 120 bp, Artificial Sequence
  ENSG00000281344_1217 (sequence is synthesized)
aaaacttgaatgtgttacttgatccatctgggtctcaatttcctcatctgaaaaataggtataatagtaatactgacctcctagagctattgtaaggtgaaataagataatgtacagaaa

SEQ ID NO: 988565 - DNA, 120 bp, Artificial Sequence
  ENSG00000281344_1218 (sequence is synthesized)
gcacatgtcagtttgtaagttttctgtgattaatgttagctgtcattccattatccagtaccagcactcactttatacaagtctatctttttgcagtttaatggtttggataactgatct

SEQ ID NO: 988566 - DNA, 120 bp, Artificial Sequence
  ENSG00000281344_1219 (sequence is synthesized)
ttcaagtccctcccagctctgaaactatgagtccatgaaatatcttgctttttggtacctaaatttccttagagtagctttaaattgtagtttgagttttgtggcgcatgtgggaactga

SEQ ID NO: 988567 - DNA, 120 bp, Artificial Sequence
  ENSG00000281344_1220 (sequence is synthesized)
tgttagcagagtttctctggcttaagaaatccatctacaaaaaatcagttttctctgcctcaattatctctcgcttgtcctactacatcattccttgaagtttttccagaattttttgac

SEQ ID NO: 988568 - DNA, 120 bp, Artificial Sequence
  ENSG00000281344_1221 (sequence is synthesized)
tttgtagttgcttgcttctttttcattctgaaatacattttttccttttggcttttgacactgaacaacataaattttccttttaatggacttgcctatgtgtatggtaaataaaagcag

SEQ ID NO: 988569 - DNA, 120 bp, Artificial Sequence
  ENSG00000281344_1222 (sequence is synthesized)
gaatatgtgaggaacaatttcccaatagattatggaggtttttggtggcgttttaaggttttatgacactgaagagaggaaaggagaaaaacttgttcttagaaacatatcaactttaac

SEQ ID NO: 988570 - DNA, 120 bp, Artificial Sequence
  ENSG00000281344_1223 (sequence is synthesized)
attacaccgaaacatttcatacacacatatttgcaggaatattctgatttgctgtgtatgttttccagtgttctctctaggaaagaatgcactaagatctgaaaaaagtagttatgattg

SEQ ID NO: 988571 - DNA, 120 bp, Artificial Sequence
  ENSG00000281344_1224 (sequence is synthesized)
gttaaaaatgttttgttaaaatagaaaaaagtgtagccttaagtattttgctggcatagtaggaaccaataactattgctttgaaatgcagctgtgcattgtgaagctgtgaacaagact

SEQ ID NO: 988572 - DNA, 120 bp, Artificial Sequence
  ENSG00000281344_1225 (sequence is synthesized)
tttcaaggaaaatagcattgtctaggatggaggaagaggccaggacctatagttgtgtcagatgtgagcaggtagtgccaaagttatttgtagaaaagatcatgatggttgagttcctgg

SEQ ID NO: 988573 - DNA, 120 bp, Artificial Sequence
  ENSG00000281344_1226 (sequence is synthesized)
gacaataacctgagagatcagggaacacgaaaaggtagagtcaggaaaatcaagcttggggaatggggatggggtatgaaagggagaaaaactgaggcaggaagagggatgagatcaaag

SEQ ID NO: 988574 - DNA, 120 bp, Artificial Sequence
  ENSG00000281344_1227 (sequence is synthesized)
aggatacagaataaatgcagagctacagataaagccctcaggaccaaaagtcagagatcccagttgtttaatccagagacaggaaaaaggacatcctctaaaaagacctaggttatgggc

SEQ ID NO: 988575 - DNA, 120 bp, Artificial Sequence
  ENSG00000281344_1228 (sequence is synthesized)
tgaagggagaagatagataacaggaaagaaccaggtttctcttgggacccagagagcaagaccagccctaacttccccccttcctttctctgttctaacacttctcataaaacaatagtt

SEQ ID NO: 988576 - DNA, 120 bp, Artificial Sequence
  ENSG00000281344_1229 (sequence is synthesized)
taacttgatgctagaatgtggagatgaaacaaactctctgaaaagagagagaacctcagagtccccaagccaggagactgacagagaagccctgacagaaagactagcataatgatggga

SEQ ID NO: 988577 - DNA, 120 bp, Artificial Sequence
  ENSG00000281344_1230 (sequence is synthesized)
attgcagtgacaggccatggccggaagggattgtctcatgctttacaagtattgttttatagaataagtgagtgtgtgcaataggaagcattgaacttgagctgggcttaccagtagcat

SEQ ID NO: 988578 - DNA, 120 bp, Artificial Sequence
  ENSG00000281344_1231 (sequence is synthesized)
ggccttccactccacttctggaaagctaacaccctaaaattccctcccaggtgggaaagtgccttgcctagagttcctgcccaacaaataatgtatgagagagaccactccagaggaagg

SEQ ID NO: 988579 - DNA, 120 bp, Artificial Sequence
  ENSG00000281344_1232 (sequence is synthesized)
tagtcagatgtgagctggggtagggagaaggggcaggagaggtatattgtgctggaaagcaagtgggaagaagagcaatttcctcttttccctcttccaaccctcagataaggtgaatca

SEQ ID NO: 988580 - DNA, 120 bp, Artificial Sequence
  ENSG00000281344_1233 (sequence is synthesized)
tagggaacactgattggtaaatccatcaacctaagtaggttcctttcaccatgtaatggcattgtgtaatttgctgcaatatttccattgtctaggctatactagagggtcactgataat

SEQ ID NO: 988581 - DNA, 120 bp, Artificial Sequence
  ENSG00000281344_1234 (sequence is synthesized)
ccaaagcaaataaaagaagagtttgggaaataattgatgttagacaaggctccagaatcctatgacaatgcaatgtcttgaatgcctgcctatttttcccttgtaatctttatgaatccc

SEQ ID NO: 988582 - DNA, 120 bp, Artificial Sequence
  ENSG00000281344_1235 (sequence is synthesized)
aatggaatcagatctaattcagccttaggatactttaatttgtccaatttgggttattagaccctaagaattccttgacttacctcctttctccattctttggagggagggattcctaaa

SEQ ID NO: 988583 - DNA, 120 bp, Artificial Sequence
  ENSG00000281344_1236 (sequence is synthesized)
tgttttctagaaggatagtcttggatgctgttacctcaaacttgggtccgctacttgtcttggttttgttttgtgctgcaataacagaatagcacagactagatcccttataatgaatag

SEQ ID NO: 988584 - DNA, 120 bp, Artificial Sequence
  ENSG00000281344_1237 (sequence is synthesized)
aaatttatttggcttacatttctggaggctgagaagtccaagactgagaggccacacctggtgagggccttcttgctgtgttataaaatggcaggaagcatcacacaggtgggagagaga

SEQ ID NO: 988585 - DNA, 120 bp, Artificial Sequence
  ENSG00000281344_1238 (sequence is synthesized)
gagagaaagagagaggaagaagaaggaagaaggaagaagaagcagaaacagaagaagaaaagaagaagcagaagaagaagaagaagaggaggaggaggaggacggagcagaagaaaacga

SEQ ID NO: 988586 - DNA, 120 bp, Artificial Sequence
  ENSG00000281344_1239 (sequence is synthesized)
cgaaggaaggaaggagaagaaggagaagaaaggagaggagagggctaatttttttaaataaaaaattagcaacctctaatataacctctattctcatgaatggattaatgctgccatcgc

SEQ ID NO: 988587 - DNA, 120 bp, Artificial Sequence
  ENSG00000281344_1240 (sequence is synthesized)
agtagcattaatccattcatgagagtagagccctcaagacctaattacctcttaaaagtctcatctcttaacactgttgcattgggaattaagtttctaacatataaacttctggggacc

SEQ ID NO: 988588 - DNA, 120 bp, Artificial Sequence
  ENSG00000281344_1241 (sequence is synthesized)
cattcaaactgtattaccactcattagctgtatgtccttaggaaattgccttaatcacctaaatttcagtttcttcatctgtaaatggggtaccacctccttcttatagagaagttgtat

SEQ ID NO: 988589 - DNA, 120 bp, Artificial Sequence
  ENSG00000281344_1242 (sequence is synthesized)
aaactcatgacccagtagatttgagaagtactaaggttacatatggcacccttctctcaggatgctgagtgcctagtatgtcttctttgcccaaataatcctaggggatctttccccaga

SEQ ID NO: 988590 - DNA, 120 bp, Artificial Sequence
  ENSG00000281344_1243 (sequence is synthesized)
agaaagcaagccaattttgtgtgaaggtctcaaggacttggctccagagacaaagtttctcctaaataaccaaactagtatgtgcaatgaattgtccattgtttctttcatctcccagct

SEQ ID NO: 988591 - DNA, 120 bp, Artificial Sequence
  ENSG00000281344_1244 (sequence is synthesized)
tcaaatgttttcttgaaagtctggctgcctgacagcttaagctgctagcctcttcattagtccaacagaggactgggtatgagaattggtgaaaatgggcatgaccagtacacatgtttt

SEQ ID NO: 988592 - DNA, 72 bp, Artificial Sequence
  ENSG00000281344_1245 (sequence is synthesized)
gagaattggtgaaaatgggcatgaccagtacacatgttttaggtgagagttttgttcctaggtgtgtctgtg

SEQ ID NO: 988593 - DNA, 120 bp, Artificial Sequence
  ENSG00000281344_1246 (sequence is synthesized)
gggaaaggcagacccacccttaatctgagtgggcacaatctaatcagctgccagtctggccagaataaaaagcaggcagaagaacgtgaaaagattagaatggcttagcctcccagccta

SEQ ID NO: 988594 - DNA, 74 bp, Artificial Sequence
  ENSG00000281344_1247 (sequence is synthesized)
tggtctccttgcacatggcctgttgtgggaccttgtgattgtgtaagttaatactacttaataaactcccctct

SEQ ID NO: 988595 - DNA, 120 bp, Artificial Sequence
  ENSG00000281344_1248 (sequence is synthesized)
gtgattgtgtaagttaatactacttaataaactcccctctgtatatatgtctatcctattacttctgtccctctagagaacgctgactaatatagcaagttataccttgctgaggtcaac

SEQ ID NO: 988596 - DNA, 120 bp, Artificial Sequence
  ENSG00000281344_1249 (sequence is synthesized)
ttaaaggaaagaagtctcaccaaaggctagggatgatataaaataggagacattcactgagtgtagattcttaggacccacaagtacaaaaagatgacacagttaggttcttccatgacc

SEQ ID NO: 988597 - DNA, 120 bp, Artificial Sequence
  ENSG00000281344_1250 (sequence is synthesized)
ttcaatctcatcacccctgaacctagtgtggtcatggtggcatcagtgttcattgctgctttagtcacaggttatgaaataatcactagatatcacacatgtgtgactccgcaatgatga

SEQ ID NO: 988598 - DNA, 120 bp, Artificial Sequence
  ENSG00000281344_1251 (sequence is synthesized)
cttgtgttccagccatgagacctgagacagagtacgtccagcctgaccatggcaaccccaggcttgcagtattcgtgctgaagcctgctctgaatcagatagttgagttcaatagtgttt

SEQ ID NO: 988599 - DNA, 120 bp, Artificial Sequence
  ENSG00000281344_1252 (sequence is synthesized)
atgggcaacatagagagactcctgtgccttctgctggaccctttggagagctaatgccatctctgttgcagggagctatgtttcccaggttccattaccaactggttttcaggtaggttt

SEQ ID NO: 988600 - DNA, 120 bp, Artificial Sequence
  ENSG00000281344_1253 (sequence is synthesized)
ggctaatgagaggcactgcagagcagatgaaccagagcatttctcctcctttttgctttaaatgaggcttccagcagtggctacttttgtttgtttatgaaattttagctcttattggtt

SEQ ID NO: 988601 - DNA, 120 bp, Artificial Sequence
  ENSG00000281344_1254 (sequence is synthesized)
aaccccattctttgtgtttccagctcctatggagtgatccctgccatggttttaactctcaccaaatggctttagtttctggttctggtaatgctgtattctctctttgtccttccagct

SEQ ID NO: 988602 - DNA, 120 bp, Artificial Sequence
  ENSG00000281344_1255 (sequence is synthesized)
ctagaggtggtgaccacttttggctgtttagctctttcatcatttatgtaaccaattccctgtattaaattctttctgcttaaaatgcctcagttggtttctgtttttctgactagactt

SEQ ID NO: 988603 - DNA, 120 bp, Artificial Sequence
  ENSG00000281344_1256 (sequence is synthesized)
tcactgttacatgtttctcagtcattgctacttcatcttcattttggattgaagtctcccatgcaagttttgcagtctcccaagccacaaactgggaaaccaggtaatgattccttcagt

SEQ ID NO: 988604 - DNA, 120 bp, Artificial Sequence
  ENSG00000281344_1257 (sequence is synthesized)
ccttaggtttctctgaacataccctaggtttctttcactgaactctttgggcttttgaccctatgaaggagacagggtgctttttatttccaagtgacctaccttatatcaacaccagtc

SEQ ID NO: 988605 - DNA, 120 bp, Artificial Sequence
  ENSG00000281344_1258 (sequence is synthesized)
aagattcctgagattgttctcccatccaatggttaatttcttttagaatagaaaagctgctcttagtttatcactcattttctcctttcctttgttttatgttataaactctatgttatc

SEQ ID NO: 988606 - DNA, 120 bp, Artificial Sequence
  ENSG00000281344_1259 (sequence is synthesized)
tctctagactttactgttggagaaaaaagccttccagtaatacaaataaacacaaacacaaagacaaaacagggatggatgcagaacttcaaggatcacatagatctattgaagtgatga

SEQ ID NO: 988607 - DNA, 120 bp, Artificial Sequence
  ENSG00000281344_1260 (sequence is synthesized)
gtggcagcaacagcattacttcaaatttcaagggacagcaatggctgcagggcaattagcaattcccagtcatgggagtgtggatcatcacacccacttagtagtggtaacagtggtgtc

SEQ ID NO: 988608 - DNA, 120 bp, Artificial Sequence
  ENSG00000281344_1261 (sequence is synthesized)
tttatcaactagggttttgtagcatgattttgaacatgatcccttaatgtatagcatcgaagcctgatttgctgactttcctagagattttttgagctactcaatataattttttggtag

SEQ ID NO: 988609 - DNA, 120 bp, Artificial Sequence
  ENSG00000281344_1262 (sequence is synthesized)
atcattacaaatttgtttctgtaattaaaaatagttacaaaattgaaattctgaacaatgttttctgattacaaaaccatacattccgacgtgtccaggtgtactttaatctgatgtgcc

SEQ ID NO: 988610 - DNA, 120 bp, Artificial Sequence
  ENSG00000281344_1263 (sequence is synthesized)
ctcataatgaatctacaatatttgagttccatgtaacattgtggttccccacaattattaggtgattaatgtaatctaccctttgaagggctttgtcctcagctttgtcaatggtgctca

SEQ ID NO: 988611 - DNA, 120 bp, Artificial Sequence
  ENSG00000281344_1264 (sequence is synthesized)
gtggacttgttagtcaagtggccatggtggcagaaagtgacatcctagcttaactatgtgagcttcccttcaccaagggtttcttgacatcatcaatttgccagctctggtgacaaacac

SEQ ID NO: 988612 - DNA, 120 bp, Artificial Sequence
  ENSG00000281344_1265 (sequence is synthesized)
tgacactgccatctgataccattccaaggatactggtcagtcacatggtggctggtgagccatatttaactccttcttttggggaggaggaagcactataccgtaactaaaataagcact

SEQ ID NO: 988613 - DNA, 120 bp, Artificial Sequence
  ENSG00000281344_1266 (sequence is synthesized)
atttggatttggatttactttcctttcctcccccaccttgcttctgccaaagctatgatttgtagataatctagattccttgttcactatcacagtatcccacccaatgttgcttctcac

SEQ ID NO: 988614 - DNA, 120 bp, Artificial Sequence
  ENSG00000281344_1267 (sequence is synthesized)
caagaaacttttttgggagaggaagccaacaggctgacacacatgaaaattcatgttcttataaactctctgtcctggaagcaactggctttacaaaacagtggaatgactgaggtaaga

SEQ ID NO: 988615 - DNA, 120 bp, Artificial Sequence
  ENSG00000281344_1268 (sequence is synthesized)
ctcagttatgatgccaacttgaagttgaaatcttgaaaggttggggtaccattttggaggtgagacgtgttttcctgtgtttgatacatgatgaaggctcttgctgaaaagataaatcca

SEQ ID NO: 988616 - DNA, 120 bp, Artificial Sequence
  ENSG00000281344_1269 (sequence is synthesized)
gggaccaaggtaaggaaatgggaatgccatttctcatgatcacattaatattacacctgtgactctggacaataaatgtataggattttagtagttggaggagaaatgctttaaccacag

SEQ ID NO: 988617 - DNA, 120 bp, Artificial Sequence
  ENSG00000281344_1270 (sequence is synthesized)
gaagcaacagatactgccatcctgctatttcaggctccttttactacttggcagggaaaatatgggtcatagtattggctggggtgactgatcctgttagcaaagatttctgatacatat

SEQ ID NO: 988618 - DNA, 120 bp, Artificial Sequence
  ENSG00000281344_1271 (sequence is synthesized)
tttgatacacagtgggatcagagaggaatataaatgaatctaaaggaaccttttaggattcccctgtctggtggtaagttaagggaagatatagcaattctatataggcaggaaccactg

SEQ ID NO: 988619 - DNA, 120 bp, Artificial Sequence
  ENSG00000281344_1272 (sequence is synthesized)
aaaactcagatccctcaggagtcaagttttgggtcacttcacaatagaaacagtggccatttgaagagaaaataaaaggaacgtagatgagtagttgagggtggaaataataaattttca

SEQ ID NO: 988620 - DNA, 120 bp, Artificial Sequence
  ENSG00000281344_1273 (sequence is synthesized)
ctatggtctttttaccagggaagccatgctttgagagaagacatgaaaagagcaggacatatttttatttaaccagttctgttactgagcacataaaatcataaagcaaaccctccaaag

SEQ ID NO: 988621 - DNA, 120 bp, Artificial Sequence
  ENSG00000281344_1274 (sequence is synthesized)
attttcttctgcaaccagaataaaatccaaacttatttgaatttattgaggcttacaaaatactatgtaaattggcacttgcctacctctctcactctatctcattccacttatccaatt

SEQ ID NO: 988622 - DNA, 120 bp, Artificial Sequence
  ENSG00000281344_1275 (sequence is synthesized)
gcctgccatgtttaagcctatgggtaaagctcatttcagcctcaaggatttgctctagctgttccctccacctggaatgtttcccccaacatatccagatggcttaatccctcacttcat

SEQ ID NO: 988623 - DNA, 120 bp, Artificial Sequence
  ENSG00000281344_1276 (sequence is synthesized)
ttggctctctgctcaaatgctcttgttagtgaaaccttcccttcgcaccctatataaacagcactaccccatgttctctctcttccccttatccatgatttagtttccatgttagaactg

SEQ ID NO: 988624 - DNA, 120 bp, Artificial Sequence
  ENSG00000281344_1277 (sequence is synthesized)
gtaactgtattacatattagacatgtatgtgtttcttatctgtccctctccagtgggatataatctccacgaagagagagactttttgttggttgttgaatcctcagagcctagaactgt

SEQ ID NO: 988625 - DNA, 120 bp, Artificial Sequence
  ENSG00000281344_1278 (sequence is synthesized)
agagttgctcaagtatttgttgaatacatgatttaattaatttatgacagaggaaagatttgttaacagattctagaaagccttggaaatcagactgagatgtttggaaccttaacattt

SEQ ID NO: 988626 - DNA, 120 bp, Artificial Sequence
  ENSG00000281344_1279 (sequence is synthesized)
tgaataaattagtaaggagtaaaatagaagctattttagagagtttttgaaattgctcagggacctttgctgtcttccaagttctttggtcattcagaattgtgccaatgacttccgctg

SEQ ID NO: 988627 - DNA, 120 bp, Artificial Sequence
  ENSG00000281344_1280 (sequence is synthesized)
ttctggggatgcttttatgttgatccctattcttcaataagtgcccccaaccctccctgctggttacccttgtttccttttccagctagcaacagacctctctccctctttcccattttt

SEQ ID NO: 988628 - DNA, 120 bp, Artificial Sequence
  ENSG00000281344_1281 (sequence is synthesized)
tgtttaacattttcttctctaagtggtatattttgattattcagcagctgcttcatgcagatggtgggaaggggccttgtatatttgttattgcccagtatcctgatgaatatgccattt

SEQ ID NO: 988629 - DNA, 120 bp, Artificial Sequence
  ENSG00000281344_1282 (sequence is synthesized)
gcttctgtgtatcagcttttgaaggctattctaaagcttctgcttcgtactttcattatcagaatgtacaggctgctgctcagatggctggttctagtgaaatagatatagtatggagtt

SEQ ID NO: 988630 - DNA, 120 bp, Artificial Sequence
  ENSG00000281344_1283 (sequence is synthesized)
agctctttactatccagcagggcagttgaggtggccttctttttccacttgttctgtccaaatcattctgcttcaaatcattgctgcttcaaggtttgtctggaaactcctgcttttttt

SEQ ID NO: 988631 - DNA, 120 bp, Artificial Sequence
  ENSG00000281344_1284 (sequence is synthesized)
tcaggccttgctggtcttctccttgagctcctttcacatgtatagcttatatctcacatctaagcccttaattatatgctgttacacattattccttcagggcttcagacactcttctgc

SEQ ID NO: 988632 - DNA, 120 bp, Artificial Sequence
  ENSG00000281344_1285 (sequence is synthesized)
cttcatgtagttataagttcacacattcccatcatcaacacatttcttcatcagtaatcatcagtattagagagcttgacatgccccactccattctatttgaaaacctctgcctattat

SEQ ID NO: 988633 - DNA, 120 bp, Artificial Sequence
  ENSG00000281344_1286 (sequence is synthesized)
ttcatttgtctgaattatcttcctcaattagattgtaaattcttgcatccttgattgtatctcatgtttctatagtattcttctagttatggtttgatgcctagaatagtactgggcaca

SEQ ID NO: 988634 - DNA, 120 bp, Artificial Sequence
  ENSG00000281344_1287 (sequence is synthesized)
taatggatgcttttttctacaagaattaattgatattttttattgagtcctaattgattttttttcactgaaatatagtcaccatgtgtatatatatttgatgtttttacctccattcca

SEQ ID NO: 988635 - DNA, 120 bp, Artificial Sequence
  ENSG00000281344_1288 (sequence is synthesized)
aactttcaggacagctgtgctagttctaatctgttcttagattgatcctatgactatgcaatgtgactacaaggaaaatccagttttggttctgtaagaattaactccattcctaagata

SEQ ID NO: 988636 - DNA, 120 bp, Artificial Sequence
  ENSG00000281344_1289 (sequence is synthesized)
gcaaagaccaggcctaccttccctgccaccactcaggcctcttccagcctgacccccaacatccaagaaagcaggagtgcagctgaagacagggtacaaccatgtgagcaatcaattgat

SEQ ID NO: 988637 - DNA, 120 bp, Artificial Sequence
  ENSG00000281344_1290 (sequence is synthesized)
tgataattaatgaatcaatcaatcatgcctatatcataaaaccccaataaaaactctggacactgagctgagttccccaagatggtaatactctgtattgttaaacatcaatgctggaaa

SEQ ID NO: 988638 - DNA, 120 bp, Artificial Sequence
  ENSG00000281344_1291 (sequence is synthesized)
gataatttgtactgaggacaatagaagcttctcatttggaatcctaaactctattctgtgtgtcttttcttttcgctggtcctaatccttttctgtaataaatcgtagctgtgagtataa

SEQ ID NO: 988639 - DNA, 120 bp, Artificial Sequence
  ENSG00000281344_1292 (sequence is synthesized)
tagttttcagtgagttctatgaatctttctaaataattatcaaatctgaggtagtttagggacttccccaaactcgcagttagtgtcaaaacttagggcagtctgggagattgttcccac

SEQ ID NO: 988640 - DNA, 120 bp, Artificial Sequence
  ENSG00000281344_1293 (sequence is synthesized)
tttggctaactccaggtaatgaaacacctacaacccccccgcctttcctgggtaatgacaacttatccagttgactggaatgacaactttacactgttgtagcttgagagagacaggact

SEQ ID NO: 988641 - DNA, 120 bp, Artificial Sequence
  ENSG00000281344_1294 (sequence is synthesized)
ggattttctttgtgttctagtttattttctcacccactccgttagtgctggcttcatttctcagcttccagaccctctctgcataatatgcctcatcttgtactcatccctgcctcagct

SEQ ID NO: 988642 - DNA, 120 bp, Artificial Sequence
  ENSG00000281344_1295 (sequence is synthesized)
ccaggcttcatggaggtaggatagataggaagacctgcaatgcagctggtgcagctcactattaaggctctctaaaagtcagaagtggcctcctgggaaccaggaatgacccttggccac

SEQ ID NO: 988643 - DNA, 120 bp, Artificial Sequence
  ENSG00000281344_1296 (sequence is synthesized)
tgtcccacaaacttacaacttccctcacttccaatcacacctgggacttagtaccaccaggacagatcattaggtgcctgaggatgctgggtttcctctgcattaagaaccttttctgcc

SEQ ID NO: 988644 - DNA, 120 bp, Artificial Sequence
  ENSG00000281344_1297 (sequence is synthesized)
gggtttcctctgcattaagaaccttttctgcctcttcccagtacttcctgatgttggcttagccccatgtattagtccattctcatgctgttaataaagacatacccaggactgggtaat

SEQ ID NO: 988645 - DNA, 120 bp, Artificial Sequence
  ENSG00000281344_1298 (sequence is synthesized)
ttcagcatgtctgggaaggtcttaggaaatgtacaatcatagtggaaggagaagcaaacacatcctttttcacatggtggtaacaagaagaagtgcccaacaaaaagggggaaaatcccc

SEQ ID NO: 988646 - DNA, 120 bp, Artificial Sequence
  ENSG00000281344_1299 (sequence is synthesized)
gaactcactcactatcacgagaacagcttgggggtaactgcccctatgattcaattacctcctactgggtccctcctatgacacatggggattatgggaactcaattcaagatgaggaca

SEQ ID NO: 988647 - DNA, 120 bp, Artificial Sequence
  ENSG00000281344_1300 (sequence is synthesized)
ggaactcaattcaagatgaggacattcaagatgaggatatgggaactcaattcaagatggggacacaaccaaaccctattattccaccctggcccctaccaaatctcatggcttcacatt

SEQ ID NO: 988648 - DNA, 120 bp, Artificial Sequence
  ENSG00000281344_1301 (sequence is synthesized)
ccgtaaaatcaaaaacaagttagttacttctcagatacagtgggggtacaggcattggctaaatacacccattccaaatgggagaaattggccagaaaaaaggggctacaggccccatgc

SEQ ID NO: 988649 - DNA, 89 bp, Artificial Sequence
  ENSG00000281344_1302 (sequence is synthesized)
agggcagtcattaaatcttaaagttccaaaacgatatgctgttgcacaggtgggctcccacagccttgggcagctctgcctctgtggct

SEQ ID NO: 988650 - DNA, 89 bp, Artificial Sequence
  ENSG00000281344_1303 (sequence is synthesized)
ctctgcctctgtggctttgcagggtatagcccccctccctgctgccttcacagctggcattgagtgtctgttgcttttctcaattttgg

SEQ ID NO: 988651 - DNA, 120 bp, Artificial Sequence
  ENSG00000281344_1304 (sequence is synthesized)
ttcacagctccactaggcagtgccccattggggactctgtgttggggctctgacctcacatttcccttctgcctgccctagcagaggttctccctgagggctctgcccctgcagcaaact

SEQ ID NO: 988652 - DNA, 80 bp, Artificial Sequence
  ENSG00000281344_1305 (sequence is synthesized)
gcagaggttctccgcaggtatttccatacatcctcagaaatctaggcagagatttccaaacctcaattcttgacttctgt

SEQ ID NO: 988653 - DNA, 120 bp, Artificial Sequence
  ENSG00000281344_1306 (sequence is synthesized)
caccatatggaagctgccaaggcttggagcttgcactttatgaagccatgatccaagctgtaccttggtcccttttagccatggctggagctgaagctgctgtgacacaggacaccatgt

SEQ ID NO: 988654 - DNA, 120 bp, Artificial Sequence
  ENSG00000281344_1307 (sequence is synthesized)
cccaaggctgcacagaggaggggggccctgagcctggcccatgaaactatttttccctcctaggcttccaggcctgtgaagggaggggcctttgcaaaggtcttggacataccctggaga

SEQ ID NO: 988655 - DNA, 120 bp, Artificial Sequence
  ENSG00000281344_1308 (sequence is synthesized)
cctttgcaaaggtcttggacataccctggagacattttccccgttatcttggtgattaacgttctgcaccttgttacttaggcaaatttctccagcaggcttgaatttctccccagaaaa

SEQ ID NO: 988656 - DNA, 89 bp, Artificial Sequence
  ENSG00000281344_1309 (sequence is synthesized)
ccagaaaatgggtttttcttttctatcgtattgtcagcctgcaaattttccaaacttttatgctgtgctttctctcgaatgttttgcca

SEQ ID NO: 988657 - DNA, 120 bp, Artificial Sequence
  ENSG00000281344_1310 (sequence is synthesized)
agtggcaaaatgctgccagtctctttgctaaagcataagaacagttacctttgctgtagttcccaagaattttctcatctccatctgagatcaccctggactttgttgtccatatcacta

SEQ ID NO: 988658 - DNA, 120 bp, Artificial Sequence
  ENSG00000281344_1311 (sequence is synthesized)
cattttggtcaaagccattcaacaagcctccaggaagtttcagactttcccacatcttcctgttttcttagccctccaagtttctaggaagttccaaactttcctacattttttctgtct

SEQ ID NO: 988659 - DNA, 120 bp, Artificial Sequence
  ENSG00000281344_1312 (sequence is synthesized)
gtctttttctgagccttccgaatagtttcaatctttgcctgttacccagttctaaaatcacttccacatttttgggtatctttacagcagcactccactctctgtggtaccaatttactg

SEQ ID NO: 988660 - DNA, 78 bp, Artificial Sequence
  ENSG00000281344_1313 (sequence is synthesized)
attcaacatggctgaggaggcctcaagaaatttataatcatggtggaagggaaagcaaacacatccttcttcacatgg

SEQ ID NO: 988661 - DNA, 120 bp, Artificial Sequence
  ENSG00000281344_1314 (sequence is synthesized)
tttataatcatggtggaagggaaagcaaacacatccttcttcacatggtggtggcaaggagaagttcccagcaaaaagggggaaaagcccctaataaaaccatcagatcttgtgagaact

SEQ ID NO: 988662 - DNA, 120 bp, Artificial Sequence
  ENSG00000281344_1315 (sequence is synthesized)
catcagatcttgtgagaactcacttactatcatgagaacagcatgagggtaactgctcccatgattcaattacctcctaccatagtccctcccacgacatgtggggattatgggagctac

SEQ ID NO: 988663 - DNA, 70 bp, Artificial Sequence
  ENSG00000281344_1316 (sequence is synthesized)
aattcaagatgagatttgggtggggaccatggagtccccacccaagtgggatcatggctctcataaactc

SEQ ID NO: 988664 - DNA, 120 bp, Artificial Sequence
  ENSG00000281344_1317 (sequence is synthesized)
ggtaattgaatcatggggacgggtctttcccatactgttcttgtaataatgaataagtctcatgagatctggtggttttataaaggggaattcccctgcacacactctctcttgcctgcc

SEQ ID NO: 988665 - DNA, 120 bp, Artificial Sequence
  ENSG00000281344_1318 (sequence is synthesized)
accacataaggtgtgacttagctcctcattcatcttcagccatgatttgaggcctccctagccatgtggaaaggtaaatcaattaactttccatgataaattaccccatctcgtgtatgt

SEQ ID NO: 988666 - DNA, 120 bp, Artificial Sequence
  ENSG00000281344_1319 (sequence is synthesized)
gcagcatgagaacagactaatacacaccatgttttacaaactggactgatgataagaatcacctggggctgttgttaaatgttcagattcgcagcatgtctaatggagattttgattgta

SEQ ID NO: 988667 - DNA, 120 bp, Artificial Sequence
  ENSG00000281344_1320 (sequence is synthesized)
tgattgtaggtctgggttttggctcaggagtctgttttattttaatttaaatattaagtgccccagttattcttataatcatctactacatccctgtgccttaagttttgcttcatgtcc

SEQ ID NO: 988668 - DNA, 120 bp, Artificial Sequence
  ENSG00000281344_1321 (sequence is synthesized)
attttgaactttaaattaccatcttacatatttcccctgtccttgctggtgttagaaaacaaacctgaatctgttctgcataccctctgtgttggaggagtcatgccctagtcctcatcc

SEQ ID NO: 988669 - DNA, 120 bp, Artificial Sequence
  ENSG00000281344_1322 (sequence is synthesized)
tggggcgggcagttctcttaccctgcctcattatgaccaaccctcctttctggcactaggctctttcctgtgccccattccagtgtctgcagtcttgccacttgtagatggacatctgat

SEQ ID NO: 988670 - DNA, 120 bp, Artificial Sequence
  ENSG00000281344_1323 (sequence is synthesized)
atggtgatcaactccacaaacaacttcatttaattcaataaacatttactgacttgagttatgtcccaggcactgtgctaggtgctggcaagatgaaaaaaggaaagaacagtttaaagg

SEQ ID NO: 988671 - DNA, 120 bp, Artificial Sequence
  ENSG00000281344_1324 (sequence is synthesized)
gtgtgacagacacataaagaaacagccataatattgtgtgataaatgctttagcagaagcatgtacaaagtgctatggaaactcagacgagagtgtgattaattcctcctgggaagggtc

SEQ ID NO: 988672 - DNA, 120 bp, Artificial Sequence
  ENSG00000281344_1325 (sequence is synthesized)
aggaaaagtcacagagaagagtttacatttggaaggtaatcaaaagttctctcagaggtcagggagaggggagggccttccaagcagagagcaaagccgaaacaaatccaaggagagtga

SEQ ID NO: 988673 - DNA, 120 bp, Artificial Sequence
  ENSG00000281344_1326 (sequence is synthesized)
gagtgcttgatttactccggcaacttggactgagtcacccagtgggccaagagcagtgttttttccaagtgtagtcctcatgccatcttcatccataattccttgggtagcctattagaa

SEQ ID NO: 988674 - DNA, 120 bp, Artificial Sequence
  ENSG00000281344_1327 (sequence is synthesized)
atacacatttcaagatcttaacctcatacttactgatttgtaatcttggggtgcagcctgacaacgtttattcataactaaccccctcagtgattctttaaactgaaaataaagcagttg

SEQ ID NO: 988675 - DNA, 120 bp, Artificial Sequence
  ENSG00000281344_1328 (sequence is synthesized)
ttctctactttggtacattataatcatcagggagctttagaaaatactgaggcctgatcttatcctccaaggttcccatttaagaggtttgggatatagcctgggcatctccatttttaa

SEQ ID NO: 988676 - DNA, 120 bp, Artificial Sequence
  ENSG00000281344_1329 (sequence is synthesized)
agctcccccagtgattttaatgcatggaaccactgcacccaatttgaggaccacagaacgagagcatcagattcaagaaggcaaagcaggcacttggagacctgctacaaattataatgg

SEQ ID NO: 988677 - DNA, 120 bp, Artificial Sequence
  ENSG00000281344_1330 (sequence is synthesized)
agatgtaaaaagttcatgcagagttttccatgccatgttggggagtttggtttcaattttgtagatggtgaagagacaatgcaagaggtggctcctacgggctcatatttctgtttaggc

SEQ ID NO: 988678 - DNA, 120 bp, Artificial Sequence
  ENSG00000281344_1331 (sequence is synthesized)
ctcaataaatggtggtgttagaaaacaagattgaatctggtttgtacacccatggtgttgagggaagggatgctttactaccactccatgaagtgggctcaactatgccctcagagtaac

SEQ ID NO: 988679 - DNA, 120 bp, Artificial Sequence
  ENSG00000281344_1332 (sequence is synthesized)
tgttcgtctttcagataaaggctctgaatactcctgttgctttcttaagagacacagtgggcacctatcctgtactcactgttgaaaaatcctcaactgtatcccacgtaaattctgagc

SEQ ID NO: 988680 - DNA, 120 bp, Artificial Sequence
  ENSG00000281344_1333 (sequence is synthesized)
cgtgcaaagcttcatgaagggaagacctaagggagattggtggtgggcattatatattcacatggtctccattaggcccagcagttacaggtattgacttcaaccttgaagttcaggaat

SEQ ID NO: 988681 - DNA, 120 bp, Artificial Sequence
  ENSG00000281344_1334 (sequence is synthesized)
agaagaaaatgtgttgtgtggattattgtgcctacaaggcacagagaagttttgggatagattgcaatggcatagaagaaggagaggtgagaggtgagtggggaaagtatagttataagc

SEQ ID NO: 988682 - DNA, 120 bp, Artificial Sequence
  ENSG00000281344_1335 (sequence is synthesized)
caatcaccactccacagtgaggtgttgggacttttgtggaccaccttgattaagatagaaccagatatgttgtgggtacagttgtgaaggaaaatgaagggaggtcagaagtctaatgct

SEQ ID NO: 988683 - DNA, 120 bp, Artificial Sequence
  ENSG00000281344_1336 (sequence is synthesized)
ggagccacctgaagaccctgactagcagctagtcatgcagacctcaatgaagtctctccctctcattgtctcttcaattttctcccctttccctcttctatcttctcagtcttttcccct

SEQ ID NO: 988684 - DNA, 120 bp, Artificial Sequence
  ENSG00000281344_1337 (sequence is synthesized)
cttctttaaccctctgcatcctcactgcccatagtgctcccagaaacaacaataaagcctaccagactccaacatttcttaatgggcccatgagttacagcctttgttgaaacttattgc

SEQ ID NO: 988685 - DNA, 120 bp, Artificial Sequence
  ENSG00000281344_1338 (sequence is synthesized)
taagaagaatgttggtgattctttggtacaacctcttcaatttgtgaatggagaaatggaggtccagaaaggagacatgattgtccaggggaaaaaaaaaaggtcatagagctagttagc

SEQ ID NO: 988686 - DNA, 120 bp, Artificial Sequence
  ENSG00000281344_1339 (sequence is synthesized)
ggtagaattcaaacagatccatgtcttctgactttctctattagcctgcatctactgtgctatgctccggtcacaatggggaattctcatactttgcatgctttgaggggtaaattgtac

SEQ ID NO: 988687 - DNA, 120 bp, Artificial Sequence
  ENSG00000281344_1340 (sequence is synthesized)
actcttcacgtttggttcctacaaccactttgtaagaaggctatagccattagttcatcatgtgtgctaagttcaaagagaaggaatgtgctttgcttaagaatgcgagtttcaccagaa

SEQ ID NO: 988688 - DNA, 120 bp, Artificial Sequence
  ENSG00000281344_1341 (sequence is synthesized)
aggaagtagaaatttataaaataggaaagttcaggtttacataattttaggccatatgagtagaatttttatatagtagattctaaaattactgttttccattatcatgatgtagagtcc

SEQ ID NO: 988689 - DNA, 120 bp, Artificial Sequence
  ENSG00000281344_1342 (sequence is synthesized)
cagaaccattaccctaggacaaggaaagactttgtctgatggttgtgtgtttgagtgcaggaaaagacaggatgtggttacataactttggtgttttgaccttggtcttgcttcattttg

SEQ ID NO: 988690 - DNA, 120 bp, Artificial Sequence
  ENSG00000281344_1343 (sequence is synthesized)
aaggcttctaaccttgtttgctggtgccctcatgagtatgtggaagatgagatcgttgcttctctcacacaacagtgcaatgagaacattatctgtgacattatggagtctgggaatcca

SEQ ID NO: 988691 - DNA, 120 bp, Artificial Sequence
  ENSG00000281344_1344 (sequence is synthesized)
gtgtagcatctgagtcagtcctagcccaatagcaggcactcatgggttattttttgagttgagttgagatgaggcctgcaggtctgcagcaaattactattgatgccatcttgagcaagt

SEQ ID NO: 988692 - DNA, 120 bp, Artificial Sequence
  ENSG00000281344_1345 (sequence is synthesized)
cgttttctttctccaaactcactcttctctcttacaaaataacagacaagaacaagacaacttctgacattccttcccactcagagattggcatcccttttttaaaaaatcccagaaatt

SEQ ID NO: 988693 - DNA, 120 bp, Artificial Sequence
  ENSG00000281344_1346 (sequence is synthesized)
tggacttaggagaccctttgaaggtcaattagcccaacccacagcttgttcaaggcagagccagattattcaaagaagtagagatttggcaacttcatggcttgtataatagtggaaatc

SEQ ID NO: 988694 - DNA, 120 bp, Artificial Sequence
  ENSG00000281344_1347 (sequence is synthesized)
agccaaaaagaataattgaggttaaaaagttatttgagggccagaattactctctttggtcaatatccatcacattaatgaggaatagtgaaatctctattttgctttggttttctcctt

SEQ ID NO: 988695 - DNA, 120 bp, Artificial Sequence
  ENSG00000281344_1348 (sequence is synthesized)
tgctctctactgatatataacatatatacatcagtaaaatgcacaagtcttaagtgtacagtgtgaggaatttttacatatgtatccacccatgtaactatctcacaaatcaagatacag

SEQ ID NO: 988696 - DNA, 120 bp, Artificial Sequence
  ENSG00000281344_1349 (sequence is synthesized)
aacattttgacaactggagaaagcttcctcatgccttcactaccctctctcaagggatagatctaatttctatcactgtaggtttgttttgtctagttttgaactttatatgaatggaac

SEQ ID NO: 988697 - DNA, 120 bp, Artificial Sequence
  ENSG00000281344_1350 (sequence is synthesized)
cacagcgtatataacccattgtgtctgacttttcactcaaccttgtgtctaagattcatccatattgttgcatatgtcaggagtctttttgttgttgttgcaatgtgtgaattgtaagac

SEQ ID NO: 988698 - DNA, 120 bp, Artificial Sequence
  ENSG00000281344_1351 (sequence is synthesized)
taccacaacttaagaattcatcagtgcagattattagctacagacgaggagaaaaagttagaagatttgtctcctaatcttattattaagtagctacatgaacctctctctgggcccatt

SEQ ID NO: 988699 - DNA, 120 bp, Artificial Sequence
  ENSG00000281344_1352 (sequence is synthesized)
ttcctcaactgtgagtgaagaggtcaggctaaagaatcactagcaatttttctaattctaaaggccaaagaatgtatgtgaatcacagaccaaacaagcatctggaagatatgaaaaaaa

SEQ ID NO: 988700 - DNA, 120 bp, Artificial Sequence
  ENSG00000281344_1353 (sequence is synthesized)
tcacatatctgacaaagaactcatcctagaatatgtaagtgactcctacaaatcaataagcaaagaagaaaagtcaattaaaaatgggaaacatgcgtgtgtgcatgtgtgtgtggtatt

SEQ ID NO: 988701 - DNA, 120 bp, Artificial Sequence
  ENSG00000281344_1354 (sequence is synthesized)
tgctgctattgttgttatagtaaagaaaaaaattgttcagtgggaaaccttagggtcatcatgatgaccatgtaataaatattttcaaatatgcagaaatgttgggccatccacatgatg

SEQ ID NO: 988702 - DNA, 120 bp, Artificial Sequence
  ENSG00000281344_1355 (sequence is synthesized)
cagaagctgatttttgaaaaaggatccctttgtattattttctgtaagggaggcaccatgtttaattttagtgaatgcatgaaatgcatgcaaaagggcttcataaactgtaaagctctc

SEQ ID NO: 988703 - DNA, 120 bp, Artificial Sequence
  ENSG00000281344_1356 (sequence is synthesized)
tgcaaatgaaaagcattattattattccagatacaatataagtgcagctgacatcaaccaccatttatcccagttgcaggtgtaacaaccaacaagggtattgtcctttgttcctttgcc

SEQ ID NO: 988704 - DNA, 120 bp, Artificial Sequence
  ENSG00000281344_1357 (sequence is synthesized)
acagctgtgagagagcatctgaatccaatacataaataacagctgtgattttaattgagacttttgagtggataagcaaggtgtacactgaacgcatagcaacagataggttttcatttg

SEQ ID NO: 988705 - DNA, 120 bp, Artificial Sequence
  ENSG00000281344_1358 (sequence is synthesized)
ggcagccacattattatttcctcagactttgaaaagggaaagttttaacagccctcttggaagtgacccttgtttttccccccacctgttcgcagttactgtcacagaatgcgtcatcac

SEQ ID NO: 988706 - DNA, 120 bp, Artificial Sequence
  ENSG00000281344_1359 (sequence is synthesized)
tctcccacgcgcacagtgggaaaacaagtttgccatccagagcaaagggagtttttatgctgtgtcagggatacaagagtctgtgtatggttcattgtccatttcccaattaggctccct

SEQ ID NO: 988707 - DNA, 120 bp, Artificial Sequence
  ENSG00000281344_1360 (sequence is synthesized)
ccctaggcgttggagcttcctgcccagagagcctgcctggactccttatcatttcagcagaaataagtcacatgagaagccactgcaaatcagatttttgccagaatgcttgtggtctct

SEQ ID NO: 988708 - DNA, 120 bp, Artificial Sequence
  ENSG00000281344_1361 (sequence is synthesized)
gccttgccctttttttcccccaagattttgcaactctgttcttgtcttaggagggtgagaaattatcccatcaatgtaatcaacccagattggtcaaccaaagggaatttgcttgttgaa

SEQ ID NO: 988709 - DNA, 120 bp, Artificial Sequence
  ENSG00000281344_1362 (sequence is synthesized)
tcacatttgctgctagtatgttcttggacaagggtatctccatgactctgtcccttgactggggtgtctaactattgggtattctctttcttgtactgtgcatagatatgtttcagactt

SEQ ID NO: 988710 - DNA, 120 bp, Artificial Sequence
  ENSG00000281344_1363 (sequence is synthesized)
tgtatttgccccttaaagctgcccttgtgatagatttagcagctctgtagtaatacacactgaaaactaatctaaacactatatagttgtagagtggaaagagtttcaaagcccagcaaa

SEQ ID NO: 988711 - DNA, 120 bp, Artificial Sequence
  ENSG00000281344_1364 (sequence is synthesized)
tctgaattggaatcaaaatttatcactatacctgggtgataggcctcagctgccttatctgtaaaatggggataaaaatacctccctagctctgaagatcattgtaaggtcaagagaggc

SEQ ID NO: 988712 - DNA, 120 bp, Artificial Sequence
  ENSG00000281344_1365 (sequence is synthesized)
aatgcatgtacacttcccagagagggtctggcccatagtaattgcctcataattagtgagtgagatgattgttccataaactgtacagctggggaagatcccccaatgcagacacatggc

SEQ ID NO: 988713 - DNA, 120 bp, Artificial Sequence
  ENSG00000281344_1366 (sequence is synthesized)
tagcccaagtttaacagcaacttaatggcagatgtaggagaaaagttaagatccagagcttctttctactacatctaagaattgtttcctcaggtttggggaggagacagcaaagctaaa

SEQ ID NO: 988714 - DNA, 120 bp, Artificial Sequence
  ENSG00000281344_1367 (sequence is synthesized)
cacttcaaggtaaattatgatgctttgatgatttcttaagctgagtggtctatagttcactggcatagaaggaaggtttttgttttagaaatatcatctctgcttatgtttacagcatat

SEQ ID NO: 988715 - DNA, 120 bp, Artificial Sequence
  ENSG00000281344_1368 (sequence is synthesized)
ctttcctgttcagccagaggcatccatattgctttgaggagagttagcattgttagattaggacagcaagaagaaagaaactaataaaatagattcttgcaccccacaatagaaacatgg

SEQ ID NO: 988716 - DNA, 120 bp, Artificial Sequence
  ENSG00000281344_1369 (sequence is synthesized)
attcgaatgctaaagtgttgacttgcaagagccaggttcttaatgagagaggaagaagcttgagaatccaaagagaaggtctttaaggaagcaagttgtccatgacataaagttaggtta

SEQ ID NO: 988717 - DNA, 120 bp, Artificial Sequence
  ENSG00000281344_1370 (sequence is synthesized)
caaagagaacaggggaagaacgaggtcaccccaccccctctctgggctagtgggtagttgatagtgacctgattggaggagggagaaaagtggtgggctgagggttgggatgaagatgct

SEQ ID NO: 988718 - DNA, 120 bp, Artificial Sequence
  ENSG00000281344_1371 (sequence is synthesized)
agaggggaccatggggaggagagcctgcaagtataagtggacagtgtaccttgctttgccatttaggggagggccatgttagctgtctctctcagcctttgctgttgagaaccttctgta

SEQ ID NO: 988719 - DNA, 120 bp, Artificial Sequence
  ENSG00000281344_1372 (sequence is synthesized)
aacatatgcttacataccaacccatagattttcagcagaagtgataccccacaatgtccccagattttgctaaggtccatatgagttatctatttggatatcctttttcagtgaccacgg

SEQ ID NO: 988720 - DNA, 120 bp, Artificial Sequence
  ENSG00000281344_1373 (sequence is synthesized)
tcactaataaataccgtgaaacataggcatgatttccagaagatgcttggagatgtggagcataggccctcagcatttgtactggatgcagcaaccatcctcatgccctaggtttaattt

SEQ ID NO: 988721 - DNA, 120 bp, Artificial Sequence
  ENSG00000281344_1374 (sequence is synthesized)
taggagttaatacagcatggcaattaagaatgtggtctctggcatcagactgactgccttagatcctggttctctcctcttattagctgggaaattttgaggaagtttataaaaccctta

SEQ ID NO: 988722 - DNA, 120 bp, Artificial Sequence
  ENSG00000281344_1375 (sequence is synthesized)
gattcttagcttccttgtctcctcaatcacagtatcataatttctgcaacatagtttgcagtgactaaataaattaatacacaggaaggacttagttagaacaatgcctgctacatagta

SEQ ID NO: 988723 - DNA, 89 bp, Artificial Sequence
  ENSG00000281344_1376 (sequence is synthesized)
acaggaaggacttagttagaacaatgcctgctacatagtatagtttaataattgcctgttgtagttgttcttactgcctgtgcccagcc

SEQ ID NO: 988724 - DNA, 120 bp, Artificial Sequence
  ENSG00000281344_1377 (sequence is synthesized)
ttttttgcaataacaaaaagagaagttatttatttactatttcacctttctggggttgttaatttgattttctactcattcatttgtatatgcttttaagaaatatttatggagcccctt

SEQ ID NO: 988725 - DNA, 120 bp, Artificial Sequence
  ENSG00000281344_1378 (sequence is synthesized)
ctatgtgcctatcaggcactgggctgactgctggggataaaatggcatgtaagataggcatatccctgccctcatgtagtttacaactacaactagtctattccaataactgttttccct

SEQ ID NO: 988726 - DNA, 120 bp, Artificial Sequence
  ENSG00000281344_1379 (sequence is synthesized)
ttatctgattttggggcctgggccaatctcctgagcacatttcctagtgctggcaattggggtcctgcagcaggccataaaatgcatggtatatgggtttaataatgtcaggggaaattt

SEQ ID NO: 988727 - DNA, 120 bp, Artificial Sequence
  ENSG00000281344_1380 (sequence is synthesized)
tcagttaatcccttggactgtgggtacacccaggattcaaaggccagaccaaaacggcacgaagagaaacagagaactggtaattatctggtgaatttgggtcatgtggaaagccaaact

SEQ ID NO: 988728 - DNA, 120 bp, Artificial Sequence
  ENSG00000281344_1381 (sequence is synthesized)
aaattactttcgccaaggaaaaaatgatttttttttttctcttcaaatgaattcgttttggtgagattttcctagggtcttcccttccttgctttgcattattcaaccaggtatttccta

SEQ ID NO: 988729 - DNA, 120 bp, Artificial Sequence
  ENSG00000281344_1382 (sequence is synthesized)
gaaaccagcacagcgtgggtaaaatataaagacaaggacttcgagggaaatgaaaactgcttgtccatggggtatttggggagccctggtcttattcccgatatataacatataaggaaa

SEQ ID NO: 988730 - DNA, 120 bp, Artificial Sequence
  ENSG00000281344_1383 (sequence is synthesized)
attgtactaagttgacagtgctaccataaatccagtcagctcgtgggtgctctaattttgaactaaatctaacagcttctgtttatttgtgaaacagatgttttaagttaaacgtttctt

SEQ ID NO: 988731 - DNA, 120 bp, Artificial Sequence
  ENSG00000281344_1384 (sequence is synthesized)
atgtctttttgttcagaattatatcatattataattttgcatttctaaggcaaaagcaaatgaagggaacatgcttaatttttaggatatgagtaatttattatacttttaatagaggat

SEQ ID NO: 988732 - DNA, 120 bp, Artificial Sequence
  ENSG00000281344_1385 (sequence is synthesized)
ttcaatgtattccccatccaggaaatggtaatggaaattgcctacttcaacatgtaatctataagatcttgttaaatagtgtaatgagaatttgtcactttgtcacctagctgacctttt

SEQ ID NO: 988733 - DNA, 120 bp, Artificial Sequence
  ENSG00000281344_1386 (sequence is synthesized)
acaaccctgaaactcaaagtgaagtgacacctccctcaattcagatgaaatgcctgcatattttactgtgttttcaccaagaaatcccttcagccaaaatttcagctagtccaagtcaat

SEQ ID NO: 988734 - DNA, 120 bp, Artificial Sequence
  ENSG00000281344_1387 (sequence is synthesized)
ttttaagcaaagtgcataaccagaaattggcacaaacatttgtgtatcatcctttccatattcaaaagctgtctgagactcatttgattaagcataaaaataactctgtgaatgtcatta

SEQ ID NO: 988735 - DNA, 120 bp, Artificial Sequence
  ENSG00000281344_1388 (sequence is synthesized)
gaaaggcagcgaacattctatgtctggtcccttgaatttgtattctggggatgcattattaagtcactgctaagtcgtttctcttgtaagaacctgatcatgctctctagagtctgaaaa

SEQ ID NO: 988736 - DNA, 120 bp, Artificial Sequence
  ENSG00000281344_1389 (sequence is synthesized)
aattattttcattttgagtttagaaggcttagtttttctatttccgttcaacagaaaggaaacagctggtaagttagggaaggccagtgtatttggctactgtaatctccactgccttcc

SEQ ID NO: 988737 - DNA, 120 bp, Artificial Sequence
  ENSG00000281344_1390 (sequence is synthesized)
ctggttaacagaatatctttattccaaccagggctccctccctgccaaatctccttattaaactaaattgtgattagaaaagaataaatgacattttatttcatatgtggctcctttcaa

SEQ ID NO: 988738 - DNA, 120 bp, Artificial Sequence
  ENSG00000281344_1391 (sequence is synthesized)
acttccatactcctctttaagttttcctcttacaaaacttttccttggccttgggcatttctcctccttggcagaccttcaacattgcaaagttcctgacaagtcttgtagactactact

SEQ ID NO: 988739 - DNA, 120 bp, Artificial Sequence
  ENSG00000281344_1392 (sequence is synthesized)
gaatgaagcacctcctcattcgttcctgtgggatcaactgttatccatgcacttattcattccataaacattaattcttacacacaaaatggctatgtgtattctagactcaagtggtcg

SEQ ID NO: 988740 - DNA, 120 bp, Artificial Sequence
  ENSG00000281344_1393 (sequence is synthesized)
tctctgaggatcatgtattggttcaaaaatgggatgctctttctctttctcagatttgtttttctgttaggtgcagttgcttttttccaaagtcaaggaagtccaaaatgcaggttgcat

SEQ ID NO: 988741 - DNA, 120 bp, Artificial Sequence
  ENSG00000281344_1394 (sequence is synthesized)
attggtggaatgggttccaaatgtggacagatgttgacagaagaagtgtcagttggggagtttattacaaatggatatttagggtcccagtttctagaagttctgagccagttgggtggg

SEQ ID NO: 988742 - DNA, 120 bp, Artificial Sequence
  ENSG00000281344_1395 (sequence is synthesized)
gctcagagttttcttatgtgcagctatatgttgtcccactgatgtgtagggctagagtgatagcagtggatgtggagaaagaggatggattgaaaaacgacctaggaggcagagtgtgca

SEQ ID NO: 988743 - DNA, 120 bp, Artificial Sequence
  ENSG00000281344_1396 (sequence is synthesized)
gggcttgatggccacagataggagtgaggccacaggtaggagtgagaacagaggagttgaagataacctgtgtatacatatttgttcttagttcatctgcaaaaacaaaaagaatactac

SEQ ID NO: 988744 - DNA, 120 bp, Artificial Sequence
  ENSG00000281344_1397 (sequence is synthesized)
ttatttcagcaatggaaaattacccaggattgtttcaacaaggcaacactaaaaatattccccaaacaattctttggtatcaaaaaataaataccagatggagtatacactttttgattg

SEQ ID NO: 988745 - DNA, 120 bp, Artificial Sequence
  ENSG00000281344_1398 (sequence is synthesized)
actgcaaggaatttattgaaggttgaaagaaagtaaaacttaatgttgcatttagcaaagactttgacttttctcctttgtacattcaacctggggccatagtgaaagtcatattgggga

SEQ ID NO: 988746 - DNA, 120 bp, Artificial Sequence
  ENSG00000281344_1399 (sequence is synthesized)
taaaatgtcactatatatttgtaattcagaacttcaaaaggaccttctctgttgatgtagttttctactaaagttgtcttgcctgccacaatgagcatttttttttttttttttttctga

SEQ ID NO: 988747 - DNA, 120 bp, Artificial Sequence
  ENSG00000281344_1400 (sequence is synthesized)
gacagggtcccactccattggccaggtgcagtggtgtcataatggctcactgcagccttgacttctagggctcaatagatcctcctacctcaacctcccaagaagcttggagcacaggta

SEQ ID NO: 988748 - DNA, 120 bp, Artificial Sequence
  ENSG00000281344_1401 (sequence is synthesized)
ctacctcaacctcccaagaagcttggagcacaggtatgtgctgccacatcaggctaattttttgtaatttttttttttaagagacagagtttcaccatgttgcctgggctggtctcaaac

SEQ ID NO: 988749 - DNA, 120 bp, Artificial Sequence
  ENSG00000281344_1402 (sequence is synthesized)
aaagtctggaattccaggcatgagccatcatgcctgccccacaatgaacattttataccttttacgctcacttcaaactttcaccctccagcccacttcttcaccattatcctcactttg

SEQ ID NO: 988750 - DNA, 120 bp, Artificial Sequence
  ENSG00000281344_1403 (sequence is synthesized)
agtgatggacttgaactctacctcatggagaagatagacattatcacataggcacaccctactttttctgctaagtctataaacctacttgcagctgcactttttttttcttcttctcgc

SEQ ID NO: 988751 - DNA, 120 bp, Artificial Sequence
  ENSG00000281344_1404 (sequence is synthesized)
cgcaccattgtcatcaaggaagtaacatttctcctgcaagattttggattttatgccttctcatcttctcaaggacttcattcttcaagttttctcttttctctcttttttacctttagc

SEQ ID NO: 988752 - DNA, 120 bp, Artificial Sequence
  ENSG00000281344_1405 (sequence is synthesized)
gttttctcttttctctcttttttacctttagcctctaactttatactggatcatttttttaaatttccataggttttttggggaacaagtggcatttggttacatgagtaagttctttgg

SEQ ID NO: 988753 - DNA, 120 bp, Artificial Sequence
  ENSG00000281344_1406 (sequence is synthesized)
atacaatgtttggttttccattcctgaattatttcacttagaataatagtctccaatcctatccaggttgttgtgaatgctattaatgcattccttatttatggctgagtagcattctat

SEQ ID NO: 988754 - DNA, 120 bp, Artificial Sequence
  ENSG00000281344_1407 (sequence is synthesized)
atttatggctgagtagcattctatcatttacatttacatatatacacacatatatataatacatataatacacacacacatatatatatctcacagtttctttatctactcgattgatga

SEQ ID NO: 988755 - DNA, 120 bp, Artificial Sequence
  ENSG00000281344_1408 (sequence is synthesized)
gcatttgggttggttccacatgtttgcaattgcaaattgtgctgctataaacatacatgtgccagtatcttttttgtacaatgacttctttccctctggatagttacccagtagtgggat

SEQ ID NO: 988756 - DNA, 90 bp, Artificial Sequence
  ENSG00000281344_1409 (sequence is synthesized)
cagtagtgggattgctggatcaaatggtaagttctacttttcattcttcaaataatctccacagtgttttcaagcagtttagaagtgttc

SEQ ID NO: 988757 - DNA, 120 bp, Artificial Sequence
  ENSG00000281344_1410 (sequence is synthesized)
ttagaagtgttcccttttcactgcatccaagacaacatctattattttttgatattttgattatggttattcttgaaggagtaaggtggtaacacattgtggttttgatttgcatttccc

SEQ ID NO: 988758 - DNA, 120 bp, Artificial Sequence
  ENSG00000281344_1411 (sequence is synthesized)
ttttcatgtttgttggccatttctataacttttttcgaagatttatagattgtgattttctcctactctgtgggttgtctgtttactctactgactgttccttttgccatgtgaaagctc

SEQ ID NO: 988759 - DNA, 120 bp, Artificial Sequence
  ENSG00000281344_1412 (sequence is synthesized)
ttgcatttgcttttgggttcttggtcattaaatccttgcctaagccaatgtctagaggggtttttctgatgttatcttctaaaatttttatagtttcaggtcttacatttaagtctttga

SEQ ID NO: 988760 - DNA, 60 bp, Artificial Sequence
  ENSG00000281344_1413 (sequence is synthesized)
ctgtggcttgccaattatctcaacaccatttgttgaataggatgtcttttccccacttta

SEQ ID NO: 988761 - DNA, 120 bp, Artificial Sequence
  ENSG00000281344_1414 (sequence is synthesized)
ccactttatgtttttgtttgctttgtctaagatcagttcgctgtaagtatttgagtttattctgggttctctattctattccatcggtctaggtgcctatttttataccagtaccatgct

SEQ ID NO: 988762 - DNA, 83 bp, Artificial Sequence
  ENSG00000281344_1415 (sequence is synthesized)
ataccagtaccatgctgttttggtgactacagccttatagtatagtttgaaatcaggtaattattggctatgtgggctctttt

SEQ ID NO: 988763 - DNA, 79 bp, Artificial Sequence
  ENSG00000281344_1416 (sequence is synthesized)
agatttgttctttttgcttagtcttgcattggctatgtgggctctttttgtttccatatgaattttaggattttttttt

SEQ ID NO: 988764 - DNA, 120 bp, Artificial Sequence
  ENSG00000281344_1417 (sequence is synthesized)
tgaatttgcagattcctcttggcagtatggtcattttcacaatattgatgctacccatccatgaacatgggatttgttcagtttgtttgtgtcttctatgatttctttcagcagtgtttt

SEQ ID NO: 988765 - DNA, 120 bp, Artificial Sequence
  ENSG00000281344_1418 (sequence is synthesized)
ttttatagttttccttgtagagatcttttacctccttggttaggtatattcttaagtattttattttatttttgcagctattgtagaaggggctgagttcttgatttgattctcagcttg

SEQ ID NO: 988766 - DNA, 120 bp, Artificial Sequence
  ENSG00000281344_1419 (sequence is synthesized)
tggtgtgtagaagagctactgatttgtgcatattaatttcacatccagaagctttgctgaattcttttatcagttctgggagctttctggcagagtctttagggttttctaggtaaacaa

SEQ ID NO: 988767 - DNA, 120 bp, Artificial Sequence
  ENSG00000281344_1420 (sequence is synthesized)
tcagagggaatgctttcaacttttccctattcattattatgttggttgtgggtttgtcattttactttgtcatttctgttagcatcaataccttttctagcaccttccattaaaaaaaat

SEQ ID NO: 988768 - DNA, 120 bp, Artificial Sequence
  ENSG00000281344_1421 (sequence is synthesized)
aaaaaaatctcttaattccacagccctgtttctctgattcctcctggtcaacattctttttaaaagtcttctacacatttttttcttcatttccacacctctcactcattctttacttca

SEQ ID NO: 988769 - DNA, 120 bp, Artificial Sequence
  ENSG00000281344_1422 (sequence is synthesized)
gcctcaatgtgatgtttgttctgattcaccaaagctactcacgaaaagcacaaatatcctttacattataaaataccttacgaatattttattacctttcaatgcagtagaacactaact

SEQ ID NO: 988770 - DNA, 120 bp, Artificial Sequence
  ENSG00000281344_1423 (sequence is synthesized)
ggctccttgcaacactttgtcgtcctgacattaatttggggaaattcccagccattattatttcaaatatttcttttgcttttttctcttctccttctggtgttcctattgtacatatgt

SEQ ID NO: 988771 - DNA, 120 bp, Artificial Sequence
  ENSG00000281344_1424 (sequence is synthesized)
tacaccatttgtagttgtcctacagtccctggatattttgtactgtttttgtccccagtatttgttctctttgctttttagtttttaagtttctattgctgtatcctcatgctcagagat

SEQ ID NO: 988772 - DNA, 120 bp, Artificial Sequence
  ENSG00000281344_1425 (sequence is synthesized)
tctttcctcaactgtgtccagtctactaagaagcccatcaaagtcattctttatttctgttatggtgtttttgatatctagcatttctatttcattctttcttaggatttccatctgttt

SEQ ID NO: 988773 - DNA, 120 bp, Artificial Sequence
  ENSG00000281344_1426 (sequence is synthesized)
gcttacattgtccatgtgttcttggatgctatctcctttatccattagagcccttggcatgttaatcacagttgttttaaattcctggtctgataattccaatatccctgccatatttgg

SEQ ID NO: 988774 - DNA, 120 bp, Artificial Sequence
  ENSG00000281344_1427 (sequence is synthesized)
ttctgatgcttgctctgtcttttcaaatgatgtttttgtcttttggtatggtttataattttttggcagttggatgtgatgtatcaggtaagtaagccccttgtagtgtggggtaagctg

SEQ ID NO: 988775 - DNA, 120 bp, Artificial Sequence
  ENSG00000281344_1428 (sequence is synthesized)
tggggagcaggaaagcaatctatagtcatatacttaggtctcagtcctttagtgagtctatgcctttgaactgtgaacttcagaagtctttctcagtttttttcttcccttttaggtgga

SEQ ID NO: 988776 - DNA, 120 bp, Artificial Sequence
  ENSG00000281344_1429 (sequence is synthesized)
acagaatggctagagtgggatggagttgggtatttccttccccccaggtcagttagtttctgatgataccctagggggttagactctgattaattagtttattccggggaagatcttgtt

SEQ ID NO: 988777 - DNA, 120 bp, Artificial Sequence
  ENSG00000281344_1430 (sequence is synthesized)
aagaacagaattccccggcctatttcaaaatggttccctttaccctccccctgatggaaacatgaggggatttttctcttaggcttactgtgggaacttggttgagctcctgagacccct

SEQ ID NO: 988778 - DNA, 120 bp, Artificial Sequence
  ENSG00000281344_1431 (sequence is synthesized)
aaagtttttaattatctggcttgtcagcgctgagtccccagtaattagtcaattacagttcaggtgttcctccacagcactagttcccatggcagtttctgctcatgagcatgtcctggg

SEQ ID NO: 988779 - DNA, 120 bp, Artificial Sequence
  ENSG00000281344_1432 (sequence is synthesized)
aagccatgattccctgtatttgcctctgtctccagtcttgtggatagcagtttgccttgtgtcttcccctctattatggatccaaaaagagttgttgattgttcactctgttcagctttt

SEQ ID NO: 988780 - DNA, 120 bp, Artificial Sequence
  ENSG00000281344_1433 (sequence is synthesized)
tacttgttttgagaatggagttttgacttctaagatccttacctgcaagaccggaaaccagaagttcctgtgttaagaacagactgtagaagatgaaaggatggagtattatttttctag

SEQ ID NO: 988781 - DNA, 120 bp, Artificial Sequence
  ENSG00000281344_1434 (sequence is synthesized)
agatgccacaacatactaccacaaacagagtggcttaagccaatagaaatgtattctctcacaattctggaggccagaagtaagacatcaaggtgtcagcagggccatgctctctctctg

SEQ ID NO: 988782 - DNA, 120 bp, Artificial Sequence
  ENSG00000281344_1435 (sequence is synthesized)
aaaactctagaggagaatccttccttgcatcttccagctctggtggcttctggcattccttggcttgtggaagcacaactccagtctctgcctccctcttcacatggcctttccccatgt

SEQ ID NO: 988783 - DNA, 120 bp, Artificial Sequence
  ENSG00000281344_1436 (sequence is synthesized)
atcagtgtctctgtccaaatcaccctctccttgctcttagaaagacaccatttattggatttaggatccaccctagatcaagaatgattcagtcatgggattcttaactaaccacatctg

SEQ ID NO: 988784 - DNA, 120 bp, Artificial Sequence
  ENSG00000281344_1437 (sequence is synthesized)
caaagactccatttccaaacaaggtcacattaataagtgtgtgtgtgcgggtggtagggctcaaatatatctttttgagggatacagttcaacccactacagcattaagtaaccaaatta

SEQ ID NO: 988785 - DNA, 120 bp, Artificial Sequence
  ENSG00000281344_1438 (sequence is synthesized)
aattttaagtgagcagtggcagggcttatgatgacagtgtatatatgaagatttggtgtatgtttctatgagagagattatgagattcgctgatggatttcatttggagtgtgacaaaga

SEQ ID NO: 988786 - DNA, 120 bp, Artificial Sequence
  ENSG00000281344_1439 (sequence is synthesized)
acagcatcaaaaatgacttcgacttttaacttgacataggatgaataggacttttgatctgacataggatgaatttactgatctagaaagatgcaagttttggggggagaggactatgaa

SEQ ID NO: 988787 - DNA, 120 bp, Artificial Sequence
  ENSG00000281344_1440 (sequence is synthesized)
gactttccccaattactttaataatatagcatagaatttaagagcaacacctctggaggcaaatagacctgggctcacaaataatgttaacataccttggggtattttacttaatctccc

SEQ ID NO: 988788 - DNA, 120 bp, Artificial Sequence
  ENSG00000281344_1441 (sequence is synthesized)
tgggtcttgggattcccatttgcaaaatgggcataataaaaataatacctctctcataatattattggaatgatttcacatgattatgcatgtgagctattaatagtcagtggcaaacag

SEQ ID NO: 988789 - DNA, 120 bp, Artificial Sequence
  ENSG00000281344_1442 (sequence is synthesized)
gcagtacttcccctgtaaatcttatctattcatctcattttgaaaggagcctacagagatttggaaggccccttcaaatgcaccattcttttattctgacatcactttggtggattagga

SEQ ID NO: 988790 - DNA, 120 bp, Artificial Sequence
  ENSG00000281344_1443 (sequence is synthesized)
agactgatgtggcagcagcatatagattagactggggtgggaagagaaggaggcagggaacctactaagttgtccattgagagatgtcagtggcatgagaatagtggggaaagagaaaac

SEQ ID NO: 988791 - DNA, 120 bp, Artificial Sequence
  ENSG00000281344_1444 (sequence is synthesized)
agagaggacgttattgagggaactgcacaggacctggcaaatgatgcactgtgagaaaagataaagatgtctgactttctaactctggaaagttggaacacagtaactgatgaaagtggc

SEQ ID NO: 988792 - DNA, 120 bp, Artificial Sequence
  ENSG00000281344_1445 (sequence is synthesized)
aaagtggaagtgtagagtaaccttgggatgagaaaggggaaggagcatattcagtttagactcaccagattgaagtactgacagtataagaaattaggcaccaagtagaatcatggcatg

SEQ ID NO: 988793 - DNA, 120 bp, Artificial Sequence
  ENSG00000281344_1446 (sequence is synthesized)
cagtaagtgctccatatctgaatggttggtagatctaggtcagtactgtccaatagacatatgagagccacaaatgtaagccatgggtcatttaaattttcctagtagccatattaaaaa

SEQ ID NO: 988794 - DNA, 120 bp, Artificial Sequence
  ENSG00000281344_1447 (sequence is synthesized)
attttgataatatgttttatttaacctaatataaccaaaatactttcattccaatatgtaattgccataaaatattgattatgttatattctttttttcaggctaagtttttgaaatccc

SEQ ID NO: 988795 - DNA, 120 bp, Artificial Sequence
  ENSG00000281344_1448 (sequence is synthesized)
aagtttttgaaatcccatatgtattttatacccacagcacatcccaatttgtactagccatatctcgagtgctcactagctgctgtattggatagtataattctaggtggaggtgattgt

SEQ ID NO: 988796 - DNA, 120 bp, Artificial Sequence
  ENSG00000281344_1449 (sequence is synthesized)
caggcagtagattatgataactgcacttcgaaagacaggcatcaatctaaaatcacctgtatggaagaggaaaccaggtaataggatgaactttgtaagagagagaatactaaaagagaa

SEQ ID NO: 988797 - DNA, 120 bp, Artificial Sequence
  ENSG00000281344_1450 (sequence is synthesized)
gggaacctaagatagaatgggggaacaattcattttgcaaaggtttggtttttccattagactgcccagcccctgaaaagaggtgaattagtaatagtgattcaatgcatgtttttaaca

SEQ ID NO: 988798 - DNA, 120 bp, Artificial Sequence
  ENSG00000281344_1451 (sequence is synthesized)
tatggacctcttggttttttaattctactatttgcaagcatcttgttcatgtatttgtttattgtccatctcctcattaccataatgtaaatctgttttgctcacaattatatttccaga

SEQ ID NO: 988799 - DNA, 120 bp, Artificial Sequence
  ENSG00000281344_1452 (sequence is synthesized)
ataacatctctcacacattagtgctcagtaaatgcctgtgagataaaagtctaatctctaccttcagaaaatttacaatatgatgggtaaaaaaccattacatagaggaaaaatatacta

SEQ ID NO: 988800 - DNA, 120 bp, Artificial Sequence
  ENSG00000281344_1453 (sequence is synthesized)
atgatagattcatagagaattagattcctgatgaatgatattgctaaggttgggtccaggagttcaacagagagaaagagtcattgattttggaggagcctagaaatacagaattgaaac

SEQ ID NO: 988801 - DNA, 120 bp, Artificial Sequence
  ENSG00000281344_1454 (sequence is synthesized)
atggtctatgccttaaatgatggctagcctttgaatgtatgggaagcaaggggaagctttccaagtagggtgaatgacttatgcaaaggtgtggtgcatgtgaatattttagttgcaata

SEQ ID NO: 988802 - DNA, 120 bp, Artificial Sequence
  ENSG00000281344_1455 (sequence is synthesized)
gctattaagaaaaagaaagatatcaaattgaaaatggtggccactgaagtttttcataaggtatgccaagcaaaactttaaaaatgctatatcaaatggattgagagaggagtactggtg

SEQ ID NO: 988803 - DNA, 120 bp, Artificial Sequence
  ENSG00000281344_1456 (sequence is synthesized)
agcagccattgcaattgtccagaaggcaataaaggttggactaataagagtgatgcctttgggggtaggaggaggaaagatataagagatgtttgaataatggccttggcatattttgat

SEQ ID NO: 988804 - DNA, 120 bp, Artificial Sequence
  ENSG00000281344_1457 (sequence is synthesized)
ctctatttttaaaaagaggctgttatttagcataaatgaccttgaaggatgacctaatgagcactggatgtttgaatgtgttgctgaggaaaactccaaggttctgaacttggttgactg

SEQ ID NO: 988805 - DNA, 120 bp, Artificial Sequence
  ENSG00000281344_1458 (sequence is synthesized)
aattatggtgccatagacagaaagttccaaatagcaaattgcttttagaggtgaagactagagaggaaaatgggttgaagtcaaagtgttggaagatatccacgtggaaatttccagtaa

SEQ ID NO: 988806 - DNA, 120 bp, Artificial Sequence
  ENSG00000281344_1459 (sequence is synthesized)
gccttcagatgactaagggattcagagaatgtaggctctttccaaatcttctgttctttttgcctatatagaaagtgtttactttatgtgtttccttgtggctctgttgattacattttt

SEQ ID NO: 988807 - DNA, 120 bp, Artificial Sequence
  ENSG00000281344_1460 (sequence is synthesized)
atgtgtggtttggagctcctctggcttcagacctgtatttgttttgggcatagttggagtagagtgctaacaagctcaaggtcataggtttgatccccaaaagggccagttagtttcatg

SEQ ID NO: 988808 - DNA, 120 bp, Artificial Sequence
  ENSG00000281344_1461 (sequence is synthesized)
gagaggaaaattgcattccatggttcacagacttgacccctaatcctgtctgcttgtctcaaaactatctagcattggtcccaagagggcccagtgagaaagtgtgagcagttgtgtgcg

SEQ ID NO: 988809 - DNA, 120 bp, Artificial Sequence
  ENSG00000281344_1462 (sequence is synthesized)
caatctatttaaactactggaagaataactccaagtgggtttatctagttgcttcttcaggaagttttgtctgccctccttcctcaactcttgggacagagatcaccttttcagagacaa

SEQ ID NO: 988810 - DNA, 120 bp, Artificial Sequence
  ENSG00000281344_1463 (sequence is synthesized)
caccatgaacaaatgcacatgaaactgtcatgctcatgtctgcctgcatctgcgttcctatgttcatttacttctcaagcaaagggcagtgtgagcacccaggagcgtatagttctttgg

SEQ ID NO: 988811 - DNA, 120 bp, Artificial Sequence
  ENSG00000281344_1464 (sequence is synthesized)
tacaagtgtctacttgtaagtattggagtattatcagtttgactttgagaactggcttaccagtgttgtacaaaaaagccctagagagcatgaatgtgcccaaaagactctctaagcaaa

SEQ ID NO: 988812 - DNA, 120 bp, Artificial Sequence
  ENSG00000281344_1465 (sequence is synthesized)
cctttccccaacagattttccttatcagactgcttttgcttgcttcgtacttttactgggaaatataagtcaacacagaattcttgtcaattggtcatacaaggatacagcatagaattc

SEQ ID NO: 988813 - DNA, 120 bp, Artificial Sequence
  ENSG00000281344_1466 (sequence is synthesized)
tcagtgttcttgagaagaatgctggtatccataaaacaactcctaaacaaacccacagaaggcatcttccacacaagtacagagttaccagcacctgctgggatggcatctaaaatctgt

SEQ ID NO: 988814 - DNA, 120 bp, Artificial Sequence
  ENSG00000281344_1467 (sequence is synthesized)
ttttttggatactgcattttcaaaaatcagtcttagaggttctcaaattgctttttcagttaacagatataccctgggtcctacaagagttaccctgaagaggacttggaataatgctat

SEQ ID NO: 988815 - DNA, 120 bp, Artificial Sequence
  ENSG00000281344_1468 (sequence is synthesized)
gcacacactgaaagattcaaaataaatcttcatggcttaaaaaggacttgaaaattattttcaagttcacttctctttcagggaattggagattgctacaccagggatatttctcttatt

SEQ ID NO: 988816 - DNA, 120 bp, Artificial Sequence
  ENSG00000281344_1469 (sequence is synthesized)
tggcattatggaaaattttggaggctgagaagtaagagaccagaccatcaaatcttatttcattgatttctaagactaatagtgatgtcttaaaagaatatgttatggaataaatatgac

SEQ ID NO: 988817 - DNA, 120 bp, Artificial Sequence
  ENSG00000281344_1470 (sequence is synthesized)
taaaagtaaaaggcagaataaaattatatgctgatgaatccagcaaaactggttgaaaaattcttagtgtttggtttgtacacagacaagcaacatacttatttgcattgttccttcaaa

SEQ ID NO: 988818 - DNA, 120 bp, Artificial Sequence
  ENSG00000281344_1471 (sequence is synthesized)
ttgattacattgaagataaattattttaacattataaagggacagcctgaaaatatcaaataagtagttaaaaattattacatgaaaactttgcatgtctgctggctgggctgggctgga

SEQ ID NO: 988819 - DNA, 120 bp, Artificial Sequence
  ENSG00000281344_1472 (sequence is synthesized)
gtgaagaaagataaagaattatgacacagtaagaaaatgttagacttgaaatttttacatctgcattgtggtgcaaggatctgcactagcactttttacctgatttttctggtcagagtc

SEQ ID NO: 988820 - DNA, 120 bp, Artificial Sequence
  ENSG00000281344_1473 (sequence is synthesized)
aaattagggggaaatgtggtcagtgtcagaaatgttgagaccatgagttaagagtatatatagaaaacggtgtgacacacaccgggacctgtcaagggctggggggctgggggagggaca

SEQ ID NO: 988821 - DNA, 120 bp, Artificial Sequence
  ENSG00000281344_1474 (sequence is synthesized)
aataaaaaataaaaaaaagaaagaaaatgatgtgacaaagccaatggagagaattctactttggctatcttagatccttaattaatactctcattcttaataatagcagaagtaatgata

SEQ ID NO: 988822 - DNA, 120 bp, Artificial Sequence
  ENSG00000281344_1475 (sequence is synthesized)
taatgataataaaagtaatagtaaaaataccagaaaccacacaaaacaagagctgataagcagacaagtgctggactatgccagtggtttcatctagccacagaaaaattaaaaaagatg

SEQ ID NO: 988823 - DNA, 120 bp, Artificial Sequence
  ENSG00000281344_1476 (sequence is synthesized)
aaaaaaattaaattaatgatgagttttctataaagcttaatttacacaattaaagaatctgcccttttttcttagattatattcttgccatgtttttaaaaaattaattcattttcagtg

SEQ ID NO: 988824 - DNA, 120 bp, Artificial Sequence
  ENSG00000281344_1477 (sequence is synthesized)
atacaatggtgatgatagatgatttttttatttccttattttaggcaaataaagattttgacacctcaggttgatttttctcaatttctacttttattttttgaaatttcaatattttga

SEQ ID NO: 988825 - DNA, 120 bp, Artificial Sequence
  ENSG00000281344_1478 (sequence is synthesized)
gaaatctagaagtttaggaactgttgtatgataatgtttaatccttaaataataatttgaggcagatattgctgttattatcaaaataagaggaaactaaaccccacagaagtcatttta

SEQ ID NO: 988826 - DNA, 120 bp, Artificial Sequence
  ENSG00000281344_1479 (sequence is synthesized)
atttgtccaaagcacatattagaacatgacacaagcccacatctgcctgatttcagcacttgtttcttactactatgtaattcctgtttgtactagttagggcctagtaaggagagcaga

SEQ ID NO: 988827 - DNA, 120 bp, Artificial Sequence
  ENSG00000281344_1480 (sequence is synthesized)
aacccttctagaccaggcattttaaacagagaggattcttttttttttttttttttttaagacatctcgctctgttgcctagactgggctgctgggctggaaagcagtggcgtgatcaca

SEQ ID NO: 988828 - DNA, 86 bp, Artificial Sequence
  ENSG00000281344_1481 (sequence is synthesized)
agcgcaccatcacacccagcttttttaaaatttatttatttatttttatttttaggagagataaggtctcactctgttacccatgc

SEQ ID NO: 988829 - DNA, 120 bp, Artificial Sequence
  ENSG00000281344_1482 (sequence is synthesized)
tttttatttttaggagagataaggtctcactctgttacccatgctggtctccaactcctggaatcaagcgatcctcctgccttgacccccaaaggtgctgggattataggtgtgagccac

SEQ ID NO: 988830 - DNA, 120 bp, Artificial Sequence
  ENSG00000281344_1483 (sequence is synthesized)
cacattcaacagagaggatttaatacagatgatggaagagatgagtagctaaataagggaggggagtcaacccagaaaaaacaacatcctaaaatcactaccatccctatggctagagat

SEQ ID NO: 988831 - DNA, 120 bp, Artificial Sequence
  ENSG00000281344_1484 (sequence is synthesized)
actcagagaggggaaaaaccatctgcatggatctaggtccactaggggaacagaatgctgcttgcactgggaggaaggggttatggagccaagagctgcaagtactgctgaagacgctgt

SEQ ID NO: 988832 - DNA, 120 bp, Artificial Sequence
  ENSG00000281344_1485 (sequence is synthesized)
tggaggcaaagagaaaagggggataatacctggcttctcccttcttcttgtcttttgtcttttgctaatgcctcctattggccaaacttacccagaaaccagagctcataggtgctgaga

SEQ ID NO: 988833 - DNA, 120 bp, Artificial Sequence
  ENSG00000281344_1486 (sequence is synthesized)
aatgtggctcattgtgaaaacgagcaaatcaagggaatgttgggaaatggatatgagagcagacaagtaatcagccagcacattctagcacaaatctgtattaagttattccactgtacc

SEQ ID NO: 988834 - DNA, 120 bp, Artificial Sequence
  ENSG00000281344_1487 (sequence is synthesized)
ttttactatagcagtgaggtctagagataccagaggacgcttttcaatattaactatctaagagaatctacttggtgatagttgacagatgaggatgtctctatttccaattcatcttta

SEQ ID NO: 988835 - DNA, 120 bp, Artificial Sequence
  ENSG00000281344_1488 (sequence is synthesized)
aagcagagtgaggcagaagaaataaaaagaaatttggctctggggtagccttatttttgagtattttagatcatataagggtggctgaatttgaagctctgaactaaataggatggagaa

SEQ ID NO: 988836 - DNA, 120 bp, Artificial Sequence
  ENSG00000281344_1489 (sequence is synthesized)
gcacaatcctgggtcgtgtttctttcttactgttttctccttccctctctccaggaacaatcacctcccacctctgtttcccttttagagatttgggtttgggaaagacagttccatatt

SEQ ID NO: 988837 - DNA, 120 bp, Artificial Sequence
  ENSG00000281344_1490 (sequence is synthesized)
catggggtggagtgatagcttcagcgatagcacgtgtatagggacatttctatgatccctgttatcccctacatgtccatttgaagggagagaccctactcagggttctttctgaaggag

SEQ ID NO: 988838 - DNA, 120 bp, Artificial Sequence
  ENSG00000281344_1491 (sequence is synthesized)
gtttgcacctaagcaggaaccactgaattaaataagtgaggtggagttagaaaattatagcacagttactcaatttttaaatctcctcttaaaaggaaaacctccctaccaggccacatt

SEQ ID NO: 988839 - DNA, 120 bp, Artificial Sequence
  ENSG00000281344_1492 (sequence is synthesized)
tcctactttacttgtagttcaaagtcaaattttacttttgatgtactgctgcaattgtctcaaatccaatttacatctgctcctgtttttagtgattgttttattcttttacaagccatc

SEQ ID NO: 988840 - DNA, 120 bp, Artificial Sequence
  ENSG00000281344_1493 (sequence is synthesized)
tcattccatcacagggcgaagaaaagaacatttagaaaccagatgttgtattaactataaccattatcctttatgggatcccagaggtttaatctctatccataaacaggtgaggaagat

SEQ ID NO: 988841 - DNA, 120 bp, Artificial Sequence
  ENSG00000281344_1494 (sequence is synthesized)
accagctttcagctgagctttacagttaggatgcttcactgagaagggggcgaaggctctgccatccatctgtcattatgactcggggaggctcataatggatgggtatagcccagcagt

SEQ ID NO: 988842 - DNA, 120 bp, Artificial Sequence
  ENSG00000281344_1495 (sequence is synthesized)
ttcaaccctatcagacccaaagctctcctttttataacatatattttatgatctaccctttaatgtccctaagtgaaattcacagataatatcaacatacacaattttaacaaaaagcaa

SEQ ID NO: 988843 - DNA, 120 bp, Artificial Sequence
  ENSG00000281344_1496 (sequence is synthesized)
aatgatgcctgaactgtacataaagtagaaataaaaggaaaaaagtttgtaataaaataacatgcattacaagatagaatgcttaggcacaactctcctagaaaacacacggaagtggtc

SEQ ID NO: 988844 - DNA, 120 bp, Artificial Sequence
  ENSG00000281344_1497 (sequence is synthesized)
agatgtttatactcgtggagaatcacgcatgggacagctgcatgtgcggactgatgcagatgtggagtggaaagattcaaacagcacaattagcattgccactgatgatgtgattttcta

SEQ ID NO: 988845 - DNA, 120 bp, Artificial Sequence
  ENSG00000281344_1498 (sequence is synthesized)
aaacagtgaaaaagacttggtaaagttctaccttttcttaatttgtatggtaattgcatccctgaagaagtcggtttatgttaaaattgtgcaaaaacactttgagtttataaaaattgg

SEQ ID NO: 988846 - DNA, 120 bp, Artificial Sequence
  ENSG00000281344_1499 (sequence is synthesized)
agttatattccggacttaggtgattataaacaggattatctcctacttgaaatgtctggagacctggtccatacccaataaatgtcagaaatgctctccccagtcattgcaacagtgcca

SEQ ID NO: 988847 - DNA, 120 bp, Artificial Sequence
  ENSG00000281344_1500 (sequence is synthesized)
aatgtctcccaaattatctaggaccagcaccactccaccctttgggaatgcttgtgtgggctgtctaagaccactttggagggcagggatatgggaatgtttgtctcatggaactctagg

SEQ ID NO: 988848 - DNA, 120 bp, Artificial Sequence
  ENSG00000281344_1501 (sequence is synthesized)
ctctaagtccacagtttttctccagaagccctgattcaaccatagcacttgagactacctcaacttcaataagctgtcaagagaaaaatagttggattgttgccagaggtcttggtaaga

SEQ ID NO: 988849 - DNA, 120 bp, Artificial Sequence
  ENSG00000281344_1502 (sequence is synthesized)
ttctttataatcagcttccagtttcacttaggtgggaatggtttattcctagactgtgtaagagccaatacataactttcttcatggaggtatcccgagattggctctatatccctgggt

SEQ ID NO: 988850 - DNA, 120 bp, Artificial Sequence
  ENSG00000281344_1503 (sequence is synthesized)
gttacctgcatagcatgaagtactatccagaactgacatgcacatgtggaagaacggcagtggggaatgacacattattagatacattggttaccgtgcagaaatgcttctttatcctga

SEQ ID NO: 988851 - DNA, 120 bp, Artificial Sequence
  ENSG00000281344_1504 (sequence is synthesized)
taatatcatactcaataataggtcatcactcaaaggtgccattagccatgtgtctgcctgtagcgtgtaaagccaattttgaacaagaaagtatcagtcagtattctgagctgtcctcat

SEQ ID NO: 988852 - DNA, 120 bp, Artificial Sequence
  ENSG00000281344_1505 (sequence is synthesized)
gcctggattgggtgtaagtggtggagtagtaaaagcaagtgtcttcagacccagatttgatgtcctcagacccagattcaagccttctctgctggtctgtgaccttcagtaaactaagta

SEQ ID NO: 988853 - DNA, 120 bp, Artificial Sequence
  ENSG00000281344_1506 (sequence is synthesized)
atgtctttgagcctccatttccttatcagtcagtgtttacaatagtgcctgatgcataggcttgttggaaggatgaatgagataatataggtaaaccacttggcataatgactgactcac

SEQ ID NO: 988854 - DNA, 120 bp, Artificial Sequence
  ENSG00000281344_1507 (sequence is synthesized)
agtaagtgctcagtaaatattaaccacccttattgttggagtggtggtaattatctccaataaagatcttacagaagaaaaagatgttcttttaaaaaaagaggctgttatttgacgtag

SEQ ID NO: 988855 - DNA, 120 bp, Artificial Sequence
  ENSG00000281344_1508 (sequence is synthesized)
atgacctggaaggaagatagaattcctcttagggatagaattggtatttcctttaggaaagaacaccttttgtacatattcagtaacaaaaggtgagccagccctgcccccacccccacc

SEQ ID NO: 988856 - DNA, 120 bp, Artificial Sequence
  ENSG00000281344_1509 (sequence is synthesized)
actggcaaagctgggatggggaaagattgccctgcataagaatacaatataattttcttataagttctttccaaaggaggggataaagggtttgatagaaagtggttcctgggagagttt

SEQ ID NO: 988857 - DNA, 120 bp, Artificial Sequence
  ENSG00000281344_1510 (sequence is synthesized)
gcagaagagtggaaaagatcttgctaagatgacaggaggcacatgagccaccagaaattccttggattcatagtaatagtgatgtttgccattgaaatggaaggtattttctgtcctgtg

SEQ ID NO: 988858 - DNA, 120 bp, Artificial Sequence
  ENSG00000281344_1511 (sequence is synthesized)
cttaactcatccccttttcattgtttacaaaatctttagtgaaaggctgtggctagatcaccctagtgtgaatgaaaggagagagggattgtctggagtggagcgaggggagaagtagta

SEQ ID NO: 988859 - DNA, 120 bp, Artificial Sequence
  ENSG00000281344_1512 (sequence is synthesized)
cagaacaccatgactataggaggcaaaatgctaagagcatgaacaagacatttggaggaagaaggggcccgcataatgttagtcccagggagattcttggacattttgagggagcaaagg

SEQ ID NO: 988860 - DNA, 120 bp, Artificial Sequence
  ENSG00000281344_1513 (sequence is synthesized)
taggaatgaacgtgagatgggacaccaatggcacgtgagaaaatattaaagaaaactttactataatttccttaaaactaagtacaaaacttgtgagactttttttatatttgggtaact

SEQ ID NO: 988861 - DNA, 120 bp, Artificial Sequence
  ENSG00000281344_1514 (sequence is synthesized)
ttccaaatagttaatgaatttttaaaaaatgaaatgagatgcttttaaacgagggagattaccaatctttataccttgtacttctataaatgctgttgtgaatttgatattcacagtatc

SEQ ID NO: 988862 - DNA, 120 bp, Artificial Sequence
  ENSG00000281344_1515 (sequence is synthesized)
tattcagtaaaaaattggaacgatttattgaaacaaaaactcaatgctgagagatcacattcttataaatctcttggtatgggaatgtattagatgccatttatatattatgtgccttat

SEQ ID NO: 988863 - DNA, 120 bp, Artificial Sequence
  ENSG00000281344_1516 (sequence is synthesized)
ttgatacgtgtgaaccttctggcaatagaatattttcccaaccactttgtgtcagggattataagtcactgttgggtgacagtgaggggattttacgtacaactgctttattgttaatgc

SEQ ID NO: 988864 - DNA, 120 bp, Artificial Sequence
  ENSG00000281344_1517 (sequence is synthesized)
atatattgtacaattcatacatctcttacatagcttttgcaagtcctttgaaacatatttacttttaaatagaatctgtaaattctatgagatgtcttcatttttgtgtgtgattagttt

SEQ ID NO: 988865 - DNA, 120 bp, Artificial Sequence
  ENSG00000281344_1518 (sequence is synthesized)
tgtttttctgggtatgttttcatgtttatttattgcaatgaccttaataaaaatggtatataacagtagaattcttaaggaatgacacattacaccaacattatccaaaagaactaatta

SEQ ID NO: 988866 - DNA, 120 bp, Artificial Sequence
  ENSG00000281344_1519 (sequence is synthesized)
atcaaacatgactaattttaatgtaattactaaagaaagatataccattttattatgacactctagccatacattttcaaaatatgcttattaaacagtaaatgtaagataatgattcaa

SEQ ID NO: 988867 - DNA, 120 bp, Artificial Sequence
  ENSG00000281344_1520 (sequence is synthesized)
ttagttacatttttagaagtcattaggattgatattcctctgccataagtgaattgaataataatttcaaatacaatcagaattaatttaataaaaaatatgcttttcaactaagacaga

SEQ ID NO: 988868 - DNA, 120 bp, Artificial Sequence
  ENSG00000281344_1521 (sequence is synthesized)
tgtaacgaatggccagtcattattttctggtttcaaagtagcaggggaaattaattcagtgtctgtaagtttatttatcacacttggcctataagtgtgataaaaatacatgaggcaaaa

SEQ ID NO: 988869 - DNA, 120 bp, Artificial Sequence
  ENSG00000281344_1522 (sequence is synthesized)
tacatgatgtaatcccaattctcatagttcattaactcttttaccaaaaagatctgacatggtatttggggcctttatgtaaactgaatataagctgcgtgatatttgaaaggttttgat

SEQ ID NO: 988870 - DNA, 120 bp, Artificial Sequence
  ENSG00000281344_1523 (sequence is synthesized)
attttgaatagacattttcatgatacacagacacagataaaagatgtaagtagacagcttgaggtttcagagtccctcctgcagtgtgtttagcagcgggtacaagataaatatccaaac

SEQ ID NO: 988871 - DNA, 120 bp, Artificial Sequence
  ENSG00000281344_1524 (sequence is synthesized)
aaaatcagattaagggattaacagaagtgactttgctatgagttggtgagtggggtcaatgggtggcttgaaagggattttagagctctgtttttatttttcctactttacatcagtgca

SEQ ID NO: 988872 - DNA, 120 bp, Artificial Sequence
  ENSG00000281344_1525 (sequence is synthesized)
ttttgggcaaaataaaatgagtaatgtttacttttaggcctcagtaatataaaaaaaggcagattctaaggattgtggaaggtcatgtttttgaaagtgaaaggtaattcagctccggtt

SEQ ID NO: 988873 - DNA, 120 bp, Artificial Sequence
  ENSG00000281344_1526 (sequence is synthesized)
attaggagaaactctgtctccatcttaactcatatttcagttgagcagtaacatttggttttgtgtcctctctttttttttttttactttaaaaaagcttggatttttttccccttgaaa

SEQ ID NO: 988874 - DNA, 120 bp, Artificial Sequence
  ENSG00000281344_1527 (sequence is synthesized)
gaaagaccccatcaaagatagttgaagaatgaggagagaaggatcatgtttaagatccatgtaatcatacattaagagggaacacatgggcagggtgtggtggctcatgcctgtaatccc

SEQ ID NO: 988875 - DNA, 120 bp, Artificial Sequence
  ENSG00000281344_1528 (sequence is synthesized)
atctcacaaaaaggaaaaaaaaaaagagggaacacgtgaaatatatgttttcagtgaggttcctttaattctagagtttcagcttggtcagccctctataaaattctgaggcagatacta

SEQ ID NO: 988876 - DNA, 120 bp, Artificial Sequence
  ENSG00000281344_1529 (sequence is synthesized)
aaataataagggctgggttgggatgggggcagaataaagacagcttcaaaaatcccctgggcctctgtcttatctgtgagaggtttctttaaaaaacaaaagcattgttccagataggaa

SEQ ID NO: 988877 - DNA, 120 bp, Artificial Sequence
  ENSG00000281344_1530 (sequence is synthesized)
ttggttatttaaattgatatctttatcctgtaccatatgcacttaaagcttctgacagtcttctctcttttttaaatagaaattacacaaaaaagatatctatgtatcactttctaatac

SEQ ID NO: 988878 - DNA, 120 bp, Artificial Sequence
  ENSG00000281344_1531 (sequence is synthesized)
ctaacaggaaggtcttataaaatattaaaatagcaataagcaaatatgtactacaggattaaacactagcattgaaaacaaaacaaaatccaaaaccaagaatcaacaacattttccttt

SEQ ID NO: 988879 - DNA, 120 bp, Artificial Sequence
  ENSG00000281344_1532 (sequence is synthesized)
tgttgttgcccccctaccagatctggactttatggtctttgcaagggaggggcataaactttcacaattcttctgttttaaaataaatgatgccattgcataaatcagatttatcttttg

SEQ ID NO: 988880 - DNA, 120 bp, Artificial Sequence
  ENSG00000281344_1533 (sequence is synthesized)
aaaatattggtggaaagccatgtgatttgaatggaaagattctttcttctgaggagagccaaacaggttctgctctaataaattagcacaatcttttaagattaaaaatagcaaaacatt

SEQ ID NO: 988881 - DNA, 120 bp, Artificial Sequence
  ENSG00000281344_1534 (sequence is synthesized)
ttaaatagtctgattatagcttcaacaagtcaaacatacatttctatctagcctatagttttaaagagtctatgtgggtttaacttattattcctcattctgatataaaaaaagaagaaa

SEQ ID NO: 988882 - DNA, 75 bp, Artificial Sequence
  ENSG00000281344_1535 (sequence is synthesized)
tattcctcattctgatataaaaaaagaagaaaagaaccaagtcattttgaacattaagaaattcataaagactgc

SEQ ID NO: 988883 - DNA, 120 bp, Artificial Sequence
  ENSG00000281344_1536 (sequence is synthesized)
ttctcataaattctttctttatcagtagataacccccatctcataaggaaatactttccaacatttcccaaatgagatcagtgattgcttttcatgagagctactgctctttgagatgtc

SEQ ID NO: 988884 - DNA, 120 bp, Artificial Sequence
  ENSG00000281344_1537 (sequence is synthesized)
tgggtgaagggagaatgtcttctataaaccagtaaatgccaaagaatacccaagggggatttggcagaagctattttttgcaggtaaatctatgtattttttctctttgttcttattttc

SEQ ID NO: 988885 - DNA, 120 bp, Artificial Sequence
  ENSG00000281344_1538 (sequence is synthesized)
tccacttgctgaatatctgttttagagcagagtgcacaaaaatcaataaggaacttacttatcttttaaattcttctatttgcctataagatcttttttcccgcgtttattctccatgct

SEQ ID NO: 988886 - DNA, 120 bp, Artificial Sequence
  ENSG00000281344_1539 (sequence is synthesized)
cttgatcaagttcagaagattggataatatattgctaattttgctaagtttgagagccaacaaaacaatggagccttctaactttaaaaaatttccaactcctgcccctgcacccccaaa

SEQ ID NO: 988887 - DNA, 120 bp, Artificial Sequence
  ENSG00000281344_1540 (sequence is synthesized)
ttcacaatttggtgaacagtacactacttgtgagtgataaaaagttgaaaggtggtggtggctagatagacctaatgctattttattaagccatctatctatagaattgttgtttttata

SEQ ID NO: 988888 - DNA, 120 bp, Artificial Sequence
  ENSG00000281344_1541 (sequence is synthesized)
ttttttctttttttcttttttttttagtcaagtactttcttaaagaaacaatagcaccacattggcatagctggccaaacaataaatgggaaagcaaaatgtgctacatcttttattcta

SEQ ID NO: 988889 - DNA, 120 bp, Artificial Sequence
  ENSG00000281344_1542 (sequence is synthesized)
agcaaaatgtgctacatcttttattctaagccttctcccaagtgcataaaatagtaacagaaaccctggagccacagagcatgagatggtttcatctacacaaacattgacgttccaagg

SEQ ID NO: 988890 - DNA, 120 bp, Artificial Sequence
  ENSG00000281344_1543 (sequence is synthesized)
agaggaaggattctcaagggtggacaggctttttgtttgtttgtttgttttttaataaaattttcaaggaagtgatttcttttcagtattccattggatccttagggtgaatgtgtgtgt

SEQ ID NO: 988891 - DNA, 120 bp, Artificial Sequence
  ENSG00000281344_1544 (sequence is synthesized)
gtgtgtgtgtgtgtgtgtctgtgtatgtagggtgggtgttaagagattttcatatccctagaagagtggattctgatggagagctgcattaactttttcaggggaactgcctcatcttaa

SEQ ID NO: 988892 - DNA, 120 bp, Artificial Sequence
  ENSG00000281344_1545 (sequence is synthesized)
gcctcatcttaaaaagttcaaataatactttaatattatttggggaagagagaacagaaatttgacctaagtatccagtatggtcaattaaattggaaataagcctatgagttgaaagct

SEQ ID NO: 988893 - DNA, 120 bp, Artificial Sequence
  ENSG00000281344_1546 (sequence is synthesized)
cattcttaccaatgtttactgttcttttacaaatatcttgaaattgcctcattcaagaattataaagcaatctaattctgaagcaaagcttgtaaagttttgggttgtgacattttggtt

SEQ ID NO: 988894 - DNA, 120 bp, Artificial Sequence
  ENSG00000281344_1547 (sequence is synthesized)
gctcctttctatgaaatctgagtcattctgctgtagtatatagtaatcaactgacttccagggtttgcatcaatttgttttctagttttaattcattaaaaaataaaatagtgaattggt

SEQ ID NO: 988895 - DNA, 120 bp, Artificial Sequence
  ENSG00000281344_1548 (sequence is synthesized)
ataatgagttattttcaatttatttataatccagttggagaggattatgtgttggaaaaagttaagaaagataatatggcagtgcatctttcagctttcctccttgggggatttttgact

SEQ ID NO: 988896 - DNA, 120 bp, Artificial Sequence
  ENSG00000281344_1549 (sequence is synthesized)
gtggatagaattaagtgaaggaaataagtcatagacactcttagaattatcacatctaactatgacagaaaacacgttaagtctgcagaagactgcctataaagttttgttgagagggaa

SEQ ID NO: 988897 - DNA, 120 bp, Artificial Sequence
  ENSG00000281344_1550 (sequence is synthesized)
taattttaaaaggtacacactggggacaagaaataaaaagaagtgccatcttgggaagaggagtccagtatcttattccacagaacctgtatgtctggaaaacaggcagagggcaaaaat

SEQ ID NO: 988898 - DNA, 120 bp, Artificial Sequence
  ENSG00000281344_1551 (sequence is synthesized)
gatgtatagtttcttttacatctgtccatagtgattagaacattgctaagcatgcttgaggtgctcaattcaaataatgttggactgagagttaaaatacttgttgactgaacaggattg

SEQ ID NO: 988899 - DNA, 120 bp, Artificial Sequence
  ENSG00000281344_1552 (sequence is synthesized)
ctggctccactaaatggggccttctttttgcatatattcagagatccagggagtcttttttttttttttcctggcctctgatccttgaggtgacccagtgggagaaaaactgaagatgtt

SEQ ID NO: 988900 - DNA, 120 bp, Artificial Sequence
  ENSG00000281344_1553 (sequence is synthesized)
atttttgtttttcatatagactttccaagaatgtaaaatatagaatttgcatgaaataatcaagcctgggtacttttaaccaaaaagttctaaggtgactagaaagatctgaatgctgga

SEQ ID NO: 988901 - DNA, 120 bp, Artificial Sequence
  ENSG00000281344_1554 (sequence is synthesized)
taattcattgttctaatgagaaaatcttgatctgcagatagggatcattttctaggctatgatggactagtacactaaccagtggactttcttgataccaattttcagttgaatggataa

SEQ ID NO: 988902 - DNA, 120 bp, Artificial Sequence
  ENSG00000281344_1555 (sequence is synthesized)
aacacattcacagagagctaggggctacccttctgagcaggcatgggaaatttcttgttgtgatggaagtttttgcctttcaactggaaactctagtcaagcatattttaacaaactttt

SEQ ID NO: 988903 - DNA, 120 bp, Artificial Sequence
  ENSG00000281344_1556 (sequence is synthesized)
aaaaaaatgtatatacagctaagaataagagtaaagtttgttaaagaagataactttgtgactttttattagatattattttaatatttcaaattttggatcactttccttatattgcct

SEQ ID NO: 988904 - DNA, 120 bp, Artificial Sequence
  ENSG00000281344_1557 (sequence is synthesized)
agaaaagaaggaatcattgtgtttttcaaaatgaatagaatattatttatagtattaaacgaggttttactagatatgtagtaactgcatagaagagtcagtgagtgctaacaaagagta

SEQ ID NO: 988905 - DNA, 120 bp, Artificial Sequence
  ENSG00000281344_1558 (sequence is synthesized)
attaattcccctttcactggtagaaatctctttgtttttctcctttttcttttcctttctctcttttcacttatctttgtattcataaaaccaaatgcagaattcaaaatcaaattgaaa

SEQ ID NO: 988906 - DNA, 120 bp, Artificial Sequence
  ENSG00000281344_1559 (sequence is synthesized)
atcaaatgcttcccacatattttgaaaagtgttttaagagattgagctgttagcttttaacaactagttggccagttatttggatagcttcactgacaagaactgagatgtcaggagcat

SEQ ID NO: 988907 - DNA, 120 bp, Artificial Sequence
  ENSG00000281344_1560 (sequence is synthesized)
tcaattcaccaatctctagctatgctatgaatgggttatttatagaattccttgcatctcagcaactcaagcgccctgatgttgcacccttacagcaacccagggtaaaaaaaatctgaa

SEQ ID NO: 988908 - DNA, 120 bp, Artificial Sequence
  ENSG00000281344_1561 (sequence is synthesized)
tctttatctttttaaaccttataccacccctttgaggtaggtagatgacatattgcccccattttgcagatgaggaaactgaggcacagagaggtgaagtgacttgcccaaggtcacaca

SEQ ID NO: 988909 - DNA, 120 bp, Artificial Sequence
  ENSG00000281344_1562 (sequence is synthesized)
gtggtgagtccatgacacagctggcagatgttcatttcttccatgagaaaaagaaaccaggactgctaaaattcctagccttctgctttttccattccacagtttcctctctggactcgc

SEQ ID NO: 988910 - DNA, 120 bp, Artificial Sequence
  ENSG00000281344_1563 (sequence is synthesized)
cagtccaatttgcatcagtggacttttgtgtctgaagttcctcttggaaggcataactggggggactttgccttctttcccaaatggatggtgttttcagtacccttccccttgtgtcat

SEQ ID NO: 988911 - DNA, 120 bp, Artificial Sequence
  ENSG00000281344_1564 (sequence is synthesized)
ctttggctccaggcttcccctattgttttgctttcacgtattaccgttttggccagactctttcatataacaaactacaaaatagcaccattatactaaaaaacagagttttacatactg

SEQ ID NO: 988912 - DNA, 120 bp, Artificial Sequence
  ENSG00000281344_1565 (sequence is synthesized)
tttgatatatcctgtataattgatatgctaaatttacatagtgctctatatggaaaaaataaaaagaggaaagttactaattaggttgcacattaactcatcatttgaaggaactctttt

SEQ ID NO: 988913 - DNA, 120 bp, Artificial Sequence
  ENSG00000281344_1566 (sequence is synthesized)
gagttgaagaaactttctatgtttaaaacatatgcctaaaaatgattggcctcaaagttgcaactatttgcattattcttttttgtaagcatgatgtggaaaaataaagctttgtgtcta

SEQ ID NO: 988914 - DNA, 120 bp, Artificial Sequence
  ENSG00000281344_1567 (sequence is synthesized)
aaataaaatgcatccaacttatatttggtacaaatgccacagatggaatcttgtgggttagaattggtgtgcttcttgacgacttgctgctgcttttgaggaggccaaattcggcaaata

SEQ ID NO: 988915 - DNA, 120 bp, Artificial Sequence
  ENSG00000281344_1568 (sequence is synthesized)
taaaggttatgaagggaggtggtgggtatagactaacaagattatcagacactgtaaaacaaacagcccgagttgtgtagaaagaagtgcaaataaggaaacaattcataaaccacttag

SEQ ID NO: 988916 - DNA, 120 bp, Artificial Sequence
  ENSG00000281344_1569 (sequence is synthesized)
acaaggttgctgaatgaatggctccagcagccaagattcagagaggaatttagtgcaactggatctatacaacacccatgcatttgtggctcttgagaggcagggactaagatatatata

SEQ ID NO: 988917 - DNA, 120 bp, Artificial Sequence
  ENSG00000281344_1570 (sequence is synthesized)
tatatatattttttttttcttttctatagaacattattgataaaagatcaacagcaatctaccaactccaggaccatttttgcaaggtgcaaatcactcctaaagacaatgttggaatgt

SEQ ID NO: 988918 - DNA, 120 bp, Artificial Sequence
  ENSG00000281344_1571 (sequence is synthesized)
ttacttgtgtatttcattgggggaaacgcccatcttttaaatgttatcaaacttattttttggtaggtgttccaaagtttaacaggtaactcgtgcagagcaaaggatcctgcggtggca

SEQ ID NO: 988919 - DNA, 120 bp, Artificial Sequence
  ENSG00000281344_1572 (sequence is synthesized)
tgtcactcttcactcctcaggagggtcttcctacatcctgtagttcttgtttcctgcactccctctacttgcgttcttcaaatgtacttcctataaataaaggagaaaaagtgacattaa

SEQ ID NO: 988920 - DNA, 120 bp, Artificial Sequence
  ENSG00000257839_0 (sequence is synthesized)
ccgcttcctgggaagtaaggcataaccgagacctagcctcccggtagggaagttcatccgtttagtaaacagccccaactacgtgcggaccctcacggggatacgaagaattcaaccagg

SEQ ID NO: 988921 - DNA, 120 bp, Artificial Sequence
  ENSG00000257839_1 (sequence is synthesized)
gctggacaagtcagagtgggccaaggacaagtgagcattccagagaatttctacatgaccagctgttcattcttttaagaggatgacattcttcagctcatctggaaaggatacttcctt

SEQ ID NO: 988922 - DNA, 120 bp, Artificial Sequence
  ENSG00000257839_2 (sequence is synthesized)
taagtctgttattcacagtctccaagggcaggtgtagttgggaaagacatttcatatggaaaaacaaacttgatagggtaaaaaaaaaaaaaatgagatgtaatctggaggcccaagtca

SEQ ID NO: 988923 - DNA, 120 bp, Artificial Sequence
  ENSG00000257839_3 (sequence is synthesized)
ctgaaacaaatgcattctattctcatttgaaaatgtctgaacagccaccaattttcaaaatcacccatttaactagagactttaaagcccagaatttgcagttacgtatttcagaatgat

SEQ ID NO: 988924 - DNA, 120 bp, Artificial Sequence
  ENSG00000257839_4 (sequence is synthesized)
ttagtaattttgtgagcagctcagaggttaagtctacaatgtctgactacggtgcattattgaaaatatcagtagtgtaaggatcccgtagattggtgataactttgctcttgttatttc

SEQ ID NO: 988925 - DNA, 120 bp, Artificial Sequence
  ENSG00000257839_5 (sequence is synthesized)
aacagttaccaccaacagttggtgacttaacaaattaagagcatagttgccatatgctcatatttggcaaatatgtcaaaatggccatatttgccaatttttaagacaataaattcacag

SEQ ID NO: 988926 - DNA, 82 bp, Artificial Sequence
  ENSG00000249359_0 (sequence is synthesized)
ctcccacggtgcagcttgaggccgaggaggcgcggagagccagcgagggatgccagcaagctgtcacctctcagaaatacag

SEQ ID NO: 988927 - DNA, 120 bp, Artificial Sequence
  ENSG00000249359_1 (sequence is synthesized)
gcgagggatgccagcaagctgtcacctctcagaaatacaggaagaacatcaataatgttcgaagttataaattgcggaggtcagaagtcagaaaacaaggtgtctgcaggaccaacctct

SEQ ID NO: 988928 - DNA, 120 bp, Artificial Sequence
  ENSG00000249359_2 (sequence is synthesized)
cctctggatgctctagtgcgttttatcacaagaacatgacctttaagcacaagaacaccttgtattccaccactaaaaacagaaatgacatctaccttcactgcttccctatttctctcc

SEQ ID NO: 988929 - DNA, 120 bp, Artificial Sequence
  ENSG00000249359_3 (sequence is synthesized)
atctttactgacttggtattttgttgttgctgtcatttctggttgttggtcaattttcatttctattcttattttgctgataattcttataaatcagtgctgaattttgtcaaattattt

SEQ ID NO: 988930 - DNA, 120 bp, Artificial Sequence
  ENSG00000249359_4 (sequence is synthesized)
ttctgcatctctacagatgatcattttatgtttttgtctctgtgataatttggtgaatgtcattgatcaatttttaaataatgaatatctttgcatttaagataatatttttcactatta

SEQ ID NO: 988931 - DNA, 120 bp, Artificial Sequence
  ENSG00000249359_5 (sequence is synthesized)
atgaatatctttgcatttaagataatatttttcactattaatgttatctctgaaatgaaagctaaacctagtcaatagatattagaggtgcatgatttttaaaattgtataaaattagat

SEQ ID NO: 988932 - DNA, 120 bp, Artificial Sequence
  ENSG00000249359_6 (sequence is synthesized)
aaaatgtaaatgccaaatgatagagcattaaatgaagcttgtaatattaaatacaatctttagaaactcttttgcagtgcaggaaaaaaatagaactgaaaacaaaccagaagaaatcac

SEQ ID NO: 988933 - DNA, 120 bp, Artificial Sequence
  ENSG00000249359_7 (sequence is synthesized)
agatataaaattaaagaggatagaattaagcacctgagttcccacatctaaagtgaaaatctaagaatttaaatatcattcaaatacagactaaaatacaatataaaataaaatttcctg

SEQ ID NO: 988934 - DNA, 120 bp, Artificial Sequence
  ENSG00000249359_8 (sequence is synthesized)
agctaatttttaaaatactgcttaatttgtagctaaaaatgcagactaattttctgactatattactataaaaaccttctacaaatattttttaactaaaattataagaaaaacatccac

SEQ ID NO: 988935 - DNA, 120 bp, Artificial Sequence
  ENSG00000249359_9 (sequence is synthesized)
cataaacacgtaagattaatattttcatttctgaagtataaaatgtctggatagacttgagcttgttgctttagttttatatgtgaagactggaaaaattctgttttgttttggaaaata

SEQ ID NO: 988936 - DNA, 120 bp, Artificial Sequence
  ENSG00000249359_10 (sequence is synthesized)
ttttgagctagaaatgttgtattccacatttgttaggaatggaagtctttaaaatatgaaatatttccaactgaagaaaaatagtgaaaatgaactttatctgaataagattaatgaaaa

SEQ ID NO: 988937 - DNA, 120 bp, Artificial Sequence
  ENSG00000249359_11 (sequence is synthesized)
taaaggaacaaaatatttgcagctctattttattgagaaagtaattacaaaacaaaaacaaggagtttttgtaattacaaaagaatatattaataatattatttagaagcacaaaaccag

SEQ ID NO: 988938 - DNA, 120 bp, Artificial Sequence
  ENSG00000249359_12 (sequence is synthesized)
ataatattatttagaagcacaaaaccagaaaagctttatattatttctaacaataagtgtaaaccatctaattttctgaaaaggggtggaaataaatatttaacaaagaagatgttattc

SEQ ID NO: 988939 - DNA, 120 bp, Artificial Sequence
  ENSG00000249359_13 (sequence is synthesized)
ttaaattgtaatatgtacattgcctaaaaataaaaaggtagttgaagatatattgtgaacaacaaaaaatgaagagctgataatattaatgtgcgaaggaaactcataacatattgtact

SEQ ID NO: 988940 - DNA, 120 bp, Artificial Sequence
  ENSG00000249359_14 (sequence is synthesized)
gcgaaggaaactcataacatattgtactaattataaatcagtgtattgacaaaacctaagtcctcaattattattgactgttattgacatattaatgatagaatattaaatatagaatat

SEQ ID NO: 988941 - DNA, 120 bp, Artificial Sequence
  ENSG00000249359_15 (sequence is synthesized)
aagcgatagacatgaatagaaacaaaatgcaactgttcaatattaaaagcctttctaaattgcttgtgtttttctagtgacctgtttcgctatgcagtgtaggctcaggtgtctagattt

SEQ ID NO: 988942 - DNA, 120 bp, Artificial Sequence
  ENSG00000249359_16 (sequence is synthesized)
tagttgcagataaacacaggtagtattttccagatctcagaatgaccagttacataaaaataggccataaaccatatatttcattcttatggttgacaaacctctaattcacctgaaaat

SEQ ID NO: 988943 - DNA, 120 bp, Artificial Sequence
  ENSG00000249359_17 (sequence is synthesized)
attaaaaagaaagaagacagacgtgacagtggttggaagttgaggataagaagaagttggcagaaataagctttcttcttttggacagcaatgcatgataaaaaaattaaactaaattca

SEQ ID NO: 988944 - DNA, 120 bp, Artificial Sequence
  ENSG00000249359_18 (sequence is synthesized)
gttcatttccactaactgggacttatttagaaactttaaggaagtctttgaagaatttcaattgaggagtaaataagggccaatttatttcatagtatggactctcaagacaatatacag

SEQ ID NO: 988945 - DNA, 120 bp, Artificial Sequence
  ENSG00000249359_19 (sequence is synthesized)
cagtgcttctcaaagttaaacagtatatgagtgacctggaaatgaagatgcagatttaacagggctggagagaagtctgagattctaaatttccaatgaattaaattacaaagaggagaa

SEQ ID NO: 988946 - DNA, 120 bp, Artificial Sequence
  ENSG00000249359_20 (sequence is synthesized)
ttgtttaaagtattgctctgataagaattaaattacatatttcataggaaacattttctttacattcgggttttatctattattagaataataatagaatcttgactttatgtaactcta

SEQ ID NO: 988947 - DNA, 120 bp, Artificial Sequence
  ENSG00000249359_21 (sequence is synthesized)
tattccaaacaactagaaacttttcgatagcaattgttcaccatttaataacatttttccaagatatctaatgcactcaaggacaaaatagctgccttccagtgatttccaatttattca

SEQ ID NO: 988948 - DNA, 120 bp, Artificial Sequence
  ENSG00000249359_22 (sequence is synthesized)
attttcaggcaatctgtctgcccacacaatgacagattgtagttacattcttgccacgctccaaacagctaagccaattgttttcaatcttttttcttcagcaactccatctcttaaagt

SEQ ID NO: 988949 - DNA, 120 bp, Artificial Sequence
  ENSG00000249359_23 (sequence is synthesized)
acttcagagtagttcatgaaaggattcctctttagttaaatggctatacagctctcccatcatccaaaataatcagtggagagatagcaatatttttcattacattaggccaagttccat

SEQ ID NO: 988950 - DNA, 120 bp, Artificial Sequence
  ENSG00000249359_24 (sequence is synthesized)
tgcttccttcatgttgtaatctgatcagaaacaccactatagattcaataattgagtttagagtttcagagaatttggggtcacagaacatctatgtctattttgtaaagattattgcat

SEQ ID NO: 988951 - DNA, 120 bp, Artificial Sequence
  ENSG00000249359_25 (sequence is synthesized)
attactgaaatagcttgtcaaacactgcagtctgcttaaagtatcaaaatagaaatgttgaatgctgtgtctgcacagagttcatttaagcaaagaatctactaggctcttaagtctgtt

SEQ ID NO: 988952 - DNA, 120 bp, Artificial Sequence
  ENSG00000249359_26 (sequence is synthesized)
aatgcaaattcctgaatacaattgaccctccataaccccattgtgggtggatttaactaacatgaatcaaacatatttgttaaaagaaataccaaaaataatttttaaaaagaaatacaa

SEQ ID NO: 988953 - DNA, 120 bp, Artificial Sequence
  ENSG00000249359_27 (sequence is synthesized)
caataaaacaatgcaaataaaaaacaatccttataacaattatgtgcatagcatttatattgtattcagtattattaatgtaggtaatctggaaatgatataaagtatacaagagggtgt

SEQ ID NO: 988954 - DNA, 120 bp, Artificial Sequence
  ENSG00000249359_28 (sequence is synthesized)
gtgtaagttatatgcaaatactaggccattttatataagaaacttgagcatctctggcttttgctatgaagggatgatggtggtaggattggtggtggtcctggaacaaatccccagcag

SEQ ID NO: 988955 - DNA, 120 bp, Artificial Sequence
  ENSG00000249359_29 (sequence is synthesized)
gtaccaagggggactgtagaccccaaagctgttaggaatgggtcacagcagcaggattgaggtaggaatgctccccacagaaaacatcaaccacctgttgatttgtgaatctgctcttct

SEQ ID NO: 988956 - DNA, 120 bp, Artificial Sequence
  ENSG00000249359_30 (sequence is synthesized)
caggcatgccttcaaatgctataacctggagattcaactcattttcatgctgctaagtaggaataggtgattcaattccccaagaaagtgacagaggtccctgaaatatagatttaaagt

SEQ ID NO: 988957 - DNA, 120 bp, Artificial Sequence
  ENSG00000249359_31 (sequence is synthesized)
tacatagtgtcaaatgctagtcattttctctttgctcgatggtatcctctcagaaaaacctttcataatatttctaattcatttaccagatttatagaatcatcaaattatctatcaatg

SEQ ID NO: 988958 - DNA, 120 bp, Artificial Sequence
  ENSG00000249359_32 (sequence is synthesized)
tgtttttcaaatattttgtgaagtgcctagggtaacaacctattgttcgaacatattttgtgaagtggctagggtaacaacataatgttagaacttatgttcgtatttaaatacaaatgt

SEQ ID NO: 988959 - DNA, 120 bp, Artificial Sequence
  ENSG00000249359_33 (sequence is synthesized)
attttggttgagtgattactcaaggtcactgaggagtccacaaggttaacgtcctgactctagaaccattgttatatagagatatataaatagctgatttaatattataggcttagcaaa

SEQ ID NO: 988960 - DNA, 120 bp, Artificial Sequence
  ENSG00000249359_34 (sequence is synthesized)
atatttaataaataaggtcttagtaaaacaacacacatgtatttatccacttatttaattttgtttttccatttcttctgaacataagttcctgaggacacgggccttttttcacagttc

SEQ ID NO: 988961 - DNA, 120 bp, Artificial Sequence
  ENSG00000249359_35 (sequence is synthesized)
atttttggattccaacatctagccagtactttgcaaagagcactgaatttgaaataaatttctcagttaatgatttgaatcatataaaatatttagtaaatttgaaaactagtaaccgtg

SEQ ID NO: 988962 - DNA, 120 bp, Artificial Sequence
  ENSG00000249359_36 (sequence is synthesized)
taaagtgattaaaacaaacatactagagggtaataatcccccaccccttgccttcttcctttacatccacttcattcttattcttgtctacttcccctgctccacccagggaacgtggtt

SEQ ID NO: 988963 - DNA, 120 bp, Artificial Sequence
  ENSG00000249359_37 (sequence is synthesized)
agcccatcaactgcaaagattgttctcatataatattgttctgatggataatgagactctgaaagtggaacataaacagataaaacaaaaacaaacagaaaaaaacccaaaaacctaaac

SEQ ID NO: 988964 - DNA, 120 bp, Artificial Sequence
  ENSG00000249359_38 (sequence is synthesized)
tcaacttcagttaaagcagaaaatatctgtccagcctaaaccaggcatactcaacagacttcttctgttagaagcctgatcctacttcagtctggaactacctagtcttcaggtttgcct

SEQ ID NO: 988965 - DNA, 120 bp, Artificial Sequence
  ENSG00000249359_39 (sequence is synthesized)
ggtgctcaccagctgaagaaatcctttaacgacctttattcagtcaagtaaattgttttattttggcaacttgcatgttattttttaggttttcatttatttttttttatatttaaagtc

SEQ ID NO: 988966 - DNA, 120 bp, Artificial Sequence
  ENSG00000249359_40 (sequence is synthesized)
atattttcttccttttattcactttgctggtctttctcactttgattttttttttttgccttgttttgcatttgtttactttaacattgtttgtaacttatctcttttattttggaaatt

SEQ ID NO: 988967 - DNA, 120 bp, Artificial Sequence
  ENSG00000249359_41 (sequence is synthesized)
attcacattatcagttttcttttgctaggcaattttgatattctaataaacattattaacataaaatataaagtttattaacaccaagcccaaacaataccaagtcttagggctctttaa

SEQ ID NO: 988968 - DNA, 120 bp, Artificial Sequence
  ENSG00000249359_42 (sequence is synthesized)
ttgcaattatttaaaaatatttgctacaaattgttcattattttatatttacattgtttttcttattcccacaaatcacatattgttggtgtgtttgttaaataaaattgtgattgctta

SEQ ID NO: 988969 - DNA, 120 bp, Artificial Sequence
  ENSG00000249359_43 (sequence is synthesized)
agagtgggctgaggccgaggaggcgcggagagccagcgagggatgccagcaagctgtcacctctcagaaatacaggaagaacatcaataatgttcgaagttataaagctggaatgcactt

SEQ ID NO: 988970 - DNA, 120 bp, Artificial Sequence
  ENSG00000249359_44 (sequence is synthesized)
ggataccagagattttgatttcttaatgtgaaataagttgcggaggtcagaagtcagaaaacaaggtgtctgcaggaccaacctctcctctggatgctctaggtgagaatcttttccatg

SEQ ID NO: 988971 - DNA, 120 bp, Artificial Sequence
  ENSG00000249359_45 (sequence is synthesized)
cctttctcttagcttctgatgttgccatcagaacttcagatggtgttccttggcttctgttaatattaatacataaatccttttcagtctcagcttctgtcttcacatggtcctctccat

SEQ ID NO: 988972 - DNA, 120 bp, Artificial Sequence
  ENSG00000249359_46 (sequence is synthesized)
atcctatctgtttctgttccctcttcttataaagataacccatgttgttttaagtcccacctaaagacctaattttagcttgattacatctgcaaaaactttgtgtccaaataaggtttc

SEQ ID NO: 988973 - DNA, 120 bp, Artificial Sequence
  ENSG00000249359_47 (sequence is synthesized)
tttcactcattaatgagttaagggtgctttgatattattacatttgaatgagagtggtttttaaaattacattttgtcgcgtagtttgttccaccctgatgcttaaagggagtcacctgc

SEQ ID NO: 988974 - DNA, 120 bp, Artificial Sequence
  ENSG00000286414_0 (sequence is synthesized)
agactgggatcaagtgactcaatcatcttagagttttgcctttagtcatgaagatagaggagtgagaaaaaacacggaagatgatgtgggacattttaggagccaagcctggatggggaa

SEQ ID NO: 988975 - DNA, 120 bp, Artificial Sequence
  ENSG00000286414_1 (sequence is synthesized)
agggctgcctacatttcattggccagaagtcagtcgcttgatcaccctaactgcaggagtctgggaaggtaaaggtgcatatggatccagttacagggaactgtaaattattcagggacc

SEQ ID NO: 988976 - DNA, 120 bp, Artificial Sequence
  ENSG00000286414_2 (sequence is synthesized)
cattcttggattgtacattagtctggcgacattttcagcatcctgttttgggctttttagaaaaaacaaatgggccaggaatgaagcctctcaaaataagcccagagtggaagggagctg

SEQ ID NO: 988977 - DNA, 120 bp, Artificial Sequence
  ENSG00000286414_3 (sequence is synthesized)
ccatgtggtgagctgccctgtgtagagatccatgggtcaagaaattgatgtttccagccaacagccagccaagacctcagggctgccaacagccacgtcagtgagcttggaagtgcatcc

SEQ ID NO: 988978 - DNA, 120 bp, Artificial Sequence
  ENSG00000286414_4 (sequence is synthesized)
tatccgagttgagcccgcagatcactcagccccagccaacccctttgctgcatccttgtgagagatcctgagtcaggcaccagtgaagccttgctcagattcctgatccacagacatgag

SEQ ID NO: 988979 - DNA, 120 bp, Artificial Sequence
  ENSG00000286414_5 (sequence is synthesized)
tccaagcctgatcctctttggggacctgactggtcaggttctgtttaagcagcttcaccttcagaggaatacagggcagtccagtctcactttggaaaacttctccatggaggacatatt

SEQ ID NO: 988980 - DNA, 120 bp, Artificial Sequence
  ENSG00000286414_6 (sequence is synthesized)
agatttttttgaatccaagtgataaacagagaagaggaaaagcaagtagattagtatttatgagggaggaagtagtgcaggagatggccatggaagcccacttctggctccaagggtctg

SEQ ID NO: 988981 - DNA, 120 bp, Artificial Sequence
  ENSG00000286414_7 (sequence is synthesized)
gtttgtagcagcctgatcctgctgatgcccgattggaaagttggacaaaatgccaaaggatctgtctgaagacacctggtagctagaacttggccaatgtctcaaggaaagaggagcaca

SEQ ID NO: 988982 - DNA, 120 bp, Artificial Sequence
  ENSG00000286414_8 (sequence is synthesized)
ttgatatgaaccagtgggtacctgacacaaaagcaacccacattgcaagtgttcaatcgccacctacagctactctactagacagcagagatagagcttctacagtttcctatatacaat

SEQ ID NO: 988983 - DNA, 120 bp, Artificial Sequence
  ENSG00000286414_9 (sequence is synthesized)
atctactatgcaatgaaaactttccaggcatacaagaaagtaggaccaaaagaaaaaaaaaataggtaatagaaacagatcccgatatgagaatgatcaaaaatagatttttaaataact

SEQ ID NO: 988984 - DNA, 120 bp, Artificial Sequence
  ENSG00000286414_10 (sequence is synthesized)
aagattcatatattcaagaaattagaagacaaatgtgaattcagcagaaaactcaaatcaataaaccaaatgaaaattctagaactgaaaaatgcgataactgaaattaagagctgaata

SEQ ID NO: 988985 - DNA, 120 bp, Artificial Sequence
  ENSG00000286414_11 (sequence is synthesized)
gatagatttaacagcagattagtcacagtcaaataaaagattaggaaactgaaagattggccaatagaaaaatccagaataaagaatagagaatttaaaagggtataaaataccaaaaaa

SEQ ID NO: 988986 - DNA, 120 bp, Artificial Sequence
  ENSG00000257831_0 (sequence is synthesized)
cagagagccttgggccagagttccagggactctgggagtggctgccagcttgtgttcatccagctctttcgactccgtccatgaacactctatctcctctcaacaatgatttgggctgtg

SEQ ID NO: 988987 - DNA, 120 bp, Artificial Sequence
  ENSG00000257831_1 (sequence is synthesized)
aatgatttgggctgtgttttggatccagctgcttaagaaggaatgactgaggagaagtcaattgggccaaaattattctaggaggtaaccagagatgaccttgtactgtgagaggatttg

SEQ ID NO: 988988 - DNA, 120 bp, Artificial Sequence
  ENSG00000257831_2 (sequence is synthesized)
aggatttgaccctggcatgtgaaatggcagatgagagctagaaagagtcaaggaaacatttcttttgagctattgtcaacttttaacaaggaagtatactcctatgaacaaaatttggag

SEQ ID NO: 988989 - DNA, 120 bp, Artificial Sequence
  ENSG00000257831_3 (sequence is synthesized)
tttctttctacctgatttctccagaatttgggaactatttggatgcattctcaccatgctgcaaggctgctctcggactcctggcctcaagcaatctgcccaccgcgtcctcccaaagtg

SEQ ID NO: 988990 - DNA, 120 bp, Artificial Sequence
  ENSG00000257831_4 (sequence is synthesized)
gacaaactgaactgcttccaaatagcctcaattacctggatcccaacagtcaagaattgttgttaaggcacttcggagaaggtcagtccaagcagtacggctcttttctgcccgggccat

SEQ ID NO: 988991 - DNA, 120 bp, Artificial Sequence
  ENSG00000257831_5 (sequence is synthesized)
gggagaagataatattccttttagagcctgtagggaagctgcaactgtcgaagataactggcccccaggtaacttcacagcagtctctctgaggaccccgattgtgaggtacaatatagt

SEQ ID NO: 988992 - DNA, 120 bp, Artificial Sequence
  ENSG00000257831_6 (sequence is synthesized)
agggagaattgagatgcttcctgtaagatacattttttaaaaacacactggatttcaacctatatatatggtttctaaaaagaaatcatcaaggagtaagacaatgtcagattttcagtt

SEQ ID NO: 988993 - DNA, 120 bp, Artificial Sequence
  ENSG00000257831_7 (sequence is synthesized)
agtttttaaaagatgatttctaataaagaattataactgttaagataatgtaagtagctttattaaaatttttatggatggattaaatcttgatggttataactggagattacgtttaaa

SEQ ID NO: 988994 - DNA, 120 bp, Artificial Sequence
  ENSG00000257830_0 (sequence is synthesized)
gccgccaggggcgctcgtctccagggcgccggagcctgctcggggctggagcaggcaggcggagcccggctgaacggaggacgactgtccgagggaggaaagcccttcctccccccaccc

SEQ ID NO: 988995 - DNA, 120 bp, Artificial Sequence
  ENSG00000257830_1 (sequence is synthesized)
caagccccagaagacagacttgcagacatctcctccagatacacagaccctcctccccaccaggagacagatgtacaaactccccgaaaggaacaggcaaactggggctcattccatcca

SEQ ID NO: 988996 - DNA, 120 bp, Artificial Sequence
  ENSG00000257830_2 (sequence is synthesized)
cagactacattttaagcccatgctctttgctctccaccaaggttatacacaccccctcaacccagagagcaagaactgttcacaccagcccattgcaaactttcttctagggcagatgga

SEQ ID NO: 988997 - DNA, 120 bp, Artificial Sequence
  ENSG00000257830_3 (sequence is synthesized)
gtgtgggggaacagacctcaaaacatcatctcaatttctgctgtgttcccactgcccccaacttttctgctcctgttcccaaaagctgtatgcccaacagatctgggtgaagtccaagac

SEQ ID NO: 988998 - DNA, 120 bp, Artificial Sequence
  ENSG00000257830_4 (sequence is synthesized)
acctcatccctgtgtgaccagggagccacgtgtatgagtctcaccatggagaaagaactgtggtctcctccaagcctctcttgagcaccaaagcccagcttcagcccaagagctaccaga

SEQ ID NO: 988999 - DNA, 120 bp, Artificial Sequence
  ENSG00000257835_0 (sequence is synthesized)
agtacctatatttctaaccaaaggtttgacctctaacagctagacatgggtgaaattggataccaagcttaatggtttacctacagcatcataggaaaatggcaatgataaaatgggaga

SEQ ID NO: 989000 - DNA, 120 bp, Artificial Sequence
  ENSG00000257835_1 (sequence is synthesized)
gaatggattgattattgctgcttgagcccatacagaaatagggccttggagttgctggatgccattgattgctatctattcattctcacaacaactttaaggaaaatgcagccaagagga

SEQ ID NO: 989001 - DNA, 120 bp, Artificial Sequence
  ENSG00000257835_2 (sequence is synthesized)
actggacctgccaaaaagaaaacaattactgctggtcccttccctgagttttcaataactgaactcacatgacaggaggaaacactgaagtcagtaaacactcctggatagacttgtcac

SEQ ID NO: 989002 - DNA, 120 bp, Artificial Sequence
  ENSG00000257835_3 (sequence is synthesized)
aaaccactgtaggttctgtgggcccagcagattttgtcccaggcctttgtatgttcttcgagcccattgacttcccctaaaaatcatttactatgcccctaaaatcatccagacttcctc

SEQ ID NO: 989003 - DNA, 120 bp, Artificial Sequence
  ENSG00000257835_4 (sequence is synthesized)
atctcccttttcccctaagaagggtgtataacctgtaccccattgcatagtggggtaatcactctgtgatcttccctcatgcacatcaataaatttatatgcttttttcttttaatctgc

SEQ ID NO: 989004 - DNA, 120 bp, Artificial Sequence
  ENSG00000257837_0 (sequence is synthesized)
cttaggtggtggtagaggtgtgggcagaatatcaggaaatgcttccctcaggaattgatgtgcatgaggaatcctggagaataagaagcactgttatcagctgtgacagagcccttcctg

SEQ ID NO: 989005 - DNA, 120 bp, Artificial Sequence
  ENSG00000257837_1 (sequence is synthesized)
tgaaggacttcaatttctctttacaagaatcaacgtggagcaaactccagttgcctactgcctagcattcttgctaagatacgtatgtaaataaaatgtctttatatacctgagaattta

SEQ ID NO: 989006 - DNA, 120 bp, Artificial Sequence
  ENSG00000255087_0 (sequence is synthesized)
ggaagacaccagagctgtccctctctcggcttgcactaaggaggaggtcacgtgagcacacagtgagaaggcggaggaccatctgcaagcaggaagagagccctcgctagaaccccccac

SEQ ID NO: 989007 - DNA, 120 bp, Artificial Sequence
  ENSG00000255087_1 (sequence is synthesized)
ggtggcatctgatagtggacttctagcttccagaactgaactcataaatgtcacatcaggctgcctcttggtgaatttttaatcaacggggagaatttcagctacaaatagaccaagaat

SEQ ID NO: 989008 - DNA, 120 bp, Artificial Sequence
  ENSG00000255087_2 (sequence is synthesized)
caagaggcccactattgatcggtcaaagtggcacttatgaacctgaggttgaagcagtttggataaaaggattctgggctttcgatggccccagagacatctttttccatcaagtccagg

SEQ ID NO: 989009 - DNA, 120 bp, Artificial Sequence
  ENSG00000255087_3 (sequence is synthesized)
cttgctgatcggtacagctgagaacatgttgaatttgatgtgcctgtggatatttgagtctggaacattgaagacaagtttggtctggagatgtagactggggatatctcagcacacaga

SEQ ID NO: 989010 - DNA, 120 bp, Artificial Sequence
  ENSG00000255087_4 (sequence is synthesized)
tgataactgaaatgatggagcggatgatataaactggagagagtctggtgtgggaagagtcttccctgaggtggccgaaagatgtaattcttactccaaagactgaaatagagacaagag

SEQ ID NO: 989011 - DNA, 120 bp, Artificial Sequence
  ENSG00000255087_5 (sequence is synthesized)
tagagtgtgtcatatcccaagagtgaagcaaggacaaaccaaagaacaactgggaagatctgggagaaaaagggtgagtgcagtggctagaagaagggggagaagtttatgtgaggagca

SEQ ID NO: 989012 - DNA, 120 bp, Artificial Sequence
  ENSG00000255087_6 (sequence is synthesized)
aaaaactgggaggagtgagtggctctggatattgtccttaaagaagctccagactcaagaggccctttcacgtgacggctgacgtgtgcttgtaaggtggtcgtgggcactttgaaaggt

SEQ ID NO: 989013 - DNA, 120 bp, Artificial Sequence
  ENSG00000255087_7 (sequence is synthesized)
agtactgggctggactctattattcctaacattgccaggtgatccttgtgaggctagcttacatggaaaaggccttcagatttttgtgctttgttgagcacattgtgttctgccttagtt

SEQ ID NO: 989014 - DNA, 120 bp, Artificial Sequence
  ENSG00000255087_8 (sequence is synthesized)
tctccaaggtcctcattttttttttctttttttcaagagacagggtcttactttgttgccaaggctggcttcaaactcctgacttcaagagatcctcccaccccacccacccaaagtgct

SEQ ID NO: 989015 - DNA, 120 bp, Artificial Sequence
  ENSG00000255087_9 (sequence is synthesized)
gggattacaggtgtgcgccactgtgcctagcgggtcatcagtctttgagatgctgttgacaaagccatttgatgatatcaaagaaggaatgaagcataaggttttttggcccctctgctt

SEQ ID NO: 989016 - DNA, 120 bp, Artificial Sequence
  ENSG00000255087_10 (sequence is synthesized)
gggatgccacttgcaggcagaactctccacagttttaccatccagtgaagaatcacctgtttatagcctgtgtaaaatcaatgatgcttcttggaaacaagtctattctcatagacagct

SEQ ID NO: 989017 - DNA, 120 bp, Artificial Sequence
  ENSG00000255087_11 (sequence is synthesized)
gacgtttcaagaactcaaggttcagtactaggtcttagaggaagacttcattttagctttgatgctctccgctaggcacagagaaacttaagcagaatgacaagacctgctgtttgagta

SEQ ID NO: 989018 - DNA, 120 bp, Artificial Sequence
  ENSG00000255087_12 (sequence is synthesized)
gtgtgctcagattctccgggacttggagcacttgttccagaaaggaaggccagggaagtcttccaggagtagatggcgcctctgctgacctgaagggtgaggaaaaagtgtccagttgca

SEQ ID NO: 989019 - DNA, 120 bp, Artificial Sequence
  ENSG00000255087_13 (sequence is synthesized)
gaaggtgcaactgcctatagaacagctgccgcggcccactgaaagcttcaagccgagacctgaggtgcatgaaccctccttctgataagcttcagagcagaaatgatgcaactgagtcac

SEQ ID NO: 989020 - DNA, 120 bp, Artificial Sequence
  ENSG00000255087_14 (sequence is synthesized)
agagaagttaagtaatctgcctgccgacactcgggtcgatgccgcctcattccatcactcgggcaatggagccaaaggccacgttcacaaccactaggctgtcccagccccttgcttcaa

SEQ ID NO: 989021 - DNA, 120 bp, Artificial Sequence
  ENSG00000255087_15 (sequence is synthesized)
agatagccaggcaggagttattttatagaatggaagtaatttctacggggccaagcaataataaggaaattggaagtcaaggactatcttccgaatggagaagaagctccatcaaccaca

SEQ ID NO: 989022 - DNA, 120 bp, Artificial Sequence
  ENSG00000255087_16 (sequence is synthesized)
gaaggaaattatgatcactcctgccatcctgctcctttgtgtatccaggatgaaggggagaattggagtcttgcacaatgaaaggacaacattgctgccaaaacaatccatcgtgactgt

SEQ ID NO: 989023 - DNA, 120 bp, Artificial Sequence
  ENSG00000255087_17 (sequence is synthesized)
agacatattttccaccctcatcctgcaggttttctgccagttgttggcccctcaccaattttgctcctgggcagtctgaggtggaacataattttgtataaaacaaattatgctcaacct

SEQ ID NO: 989024 - DNA, 120 bp, Artificial Sequence
  ENSG00000255087_18 (sequence is synthesized)
cacttataatcagggaaatgtgagtcaaaaccacaataaaatatcacctcatgctgtttaggattgctgttatcaagtagacaagaaagaagtgttggtgagggtaaggagaaaataaaa

SEQ ID NO: 989025 - DNA, 120 bp, Artificial Sequence
  ENSG00000255087_19 (sequence is synthesized)
atcttgccctaaaattgtgctcaacagaaggggtgacgccatatggatgccatgttatgggagcctgtcacctgctaaccgagatgagaaattacaggttataatccccttcctgctgtc

SEQ ID NO: 989026 - DNA, 120 bp, Artificial Sequence
  ENSG00000255087_20 (sequence is synthesized)
caatccttcttctggacacataatcaaaggaaatgaaatcagtatctcaaatagatatttgcaccccatatccattgcatccttttttgtaataaccaagatatgggagcaatcgaagtg

SEQ ID NO: 989027 - DNA, 120 bp, Artificial Sequence
  ENSG00000255087_21 (sequence is synthesized)
tccatcagcaaatgaatggataaagaaatcatggtacacatatacagtggaatattattcagacataaaaaggaaggaaatcctgtcatttctcaagacattaatgaacccagaggacat

SEQ ID NO: 989028 - DNA, 120 bp, Artificial Sequence
  ENSG00000255087_22 (sequence is synthesized)
catactaagtgaaataagctagatataggaagacaaaaaccacatgatctcacttacatgtggaatctaaaaaagtcaaactcatagaagcagcgagtagaatagtggttgtcaagggct

SEQ ID NO: 989029 - DNA, 120 bp, Artificial Sequence
  ENSG00000255087_23 (sequence is synthesized)
ctatatagtatgggtgatgacggatgtgttaattaatttgattgtgacattcattacacgatgcatatgtataacaaatcatcacattgtacaccttggatatattccatctttatttat

SEQ ID NO: 989030 - DNA, 120 bp, Artificial Sequence
  ENSG00000255087_24 (sequence is synthesized)
caattaaatatttcaaaatgtttttaaaaaggaaggcaaaatgggccaaaaggagtaactactttatgtagagctgatgtccaggctagaatttctaaactttttctgtaacctagagtc

SEQ ID NO: 989031 - DNA, 120 bp, Artificial Sequence
  ENSG00000255087_25 (sequence is synthesized)
tctgttatacttttgacttacccattattcataacagatctcaggaaccctcatcacactgcctattgctaaaaactcaaaggagttattgttatatgaacaacccaagttaatgcagtc

SEQ ID NO: 989032 - DNA, 120 bp, Artificial Sequence
  ENSG00000255087_26 (sequence is synthesized)
attaatggaaatacagagtcttgactgaaagagatcatttctattttttgttgcgatagtcagatcatagccagtcacatcttttagggaggatgcaaataggctggacttccttcagca

SEQ ID NO: 989033 - DNA, 120 bp, Artificial Sequence
  ENSG00000255087_27 (sequence is synthesized)
aacaggatgctgtagaataaaatattctacatgagaatacttaaacaaattggagtgcctggtgccaccatgtaaattgtgaggtgtcagacaggctggtctttggattagagattggac

SEQ ID NO: 989034 - DNA, 120 bp, Artificial Sequence
  ENSG00000255087_28 (sequence is synthesized)
ttactctctgtggccctatgagtagagcaggtcggggtggggctgggcagggaggaagatcatcttaaagtgatagatgtaggctcagtgtgaggaaggatttctaagagttggagctgc

SEQ ID NO: 989035 - DNA, 120 bp, Artificial Sequence
  ENSG00000255087_29 (sequence is synthesized)
tcagaggtgaaatatcaagagaatgcccttcaggagcagtgtctgaagacagaccacatggccaatagggagagataagcgggctgggtggccctcagcgctttgcttccagtcttggga

SEQ ID NO: 989036 - DNA, 120 bp, Artificial Sequence
  ENSG00000255087_30 (sequence is synthesized)
gtcttactgaaatagctaatgaccactcaacccaaagaacagacacatgtctgccatgtctctccaggctcatcctgcttattgcaagtgaggcccaaaggtggggctgttattccctga

SEQ ID NO: 989037 - DNA, 120 bp, Artificial Sequence
  ENSG00000255087_31 (sequence is synthesized)
tgtttcaggtccatgtgcaacttattcccagatcttttctgaaaaaaaaagcagagagactgtttgccagacagctggaccagaatgaggtaaaagaagataaggcccaaccgagaagtc

SEQ ID NO: 989038 - DNA, 120 bp, Artificial Sequence
  ENSG00000255087_32 (sequence is synthesized)
agaaaagcttcacttttcattagctccacattccaaagtaagaaatcaatgtgcttagctgcaattcaaagcaattagtctttgttctcacacactctcaaagaacgacttaaagaagcc

SEQ ID NO: 989039 - DNA, 120 bp, Artificial Sequence
  ENSG00000255087_33 (sequence is synthesized)
aagatcactccggctattacatggagggtggactgaaggaacaaggacagggaacaggaatggcagtaaagaaaccaggagactattgagatgatcctgacaagaaatggcaacttggac

SEQ ID NO: 989040 - DNA, 120 bp, Artificial Sequence
  ENSG00000255087_34 (sequence is synthesized)
tacggcagtggcaatagagctcatccctttccccacatctcagcatgatataacaagagttgcctggggcctcatggcccaatggggcccaggcctcaaataaatctgcagagaagtctt

SEQ ID NO: 989041 - DNA, 120 bp, Artificial Sequence
  ENSG00000255087_35 (sequence is synthesized)
tcatttgtcagagtgctctggctttaaatatacctccaagtcttaagacacatgaacttttgaggtgcaggaatcagcaattctaaaaggcacaagtcttccatccaaggtcctggttgc

SEQ ID NO: 989042 - DNA, 120 bp, Artificial Sequence
  ENSG00000255087_36 (sequence is synthesized)
cttctagatcctgttctaacaaacatatctccaaatctcatttgcttaaccccatacaagtttatttgccgagaacatcaaggtgaaggtatgctccatgaactagcagcattggcatta

SEQ ID NO: 989043 - DNA, 120 bp, Artificial Sequence
  ENSG00000255087_37 (sequence is synthesized)
cctgggagcttgttagaattcagaatctcagacccacctcagacctactgaatcagaatttcattttaacaagatctccaagtggtgtgtaagcacattaaaaatttggaagtgctgccc

SEQ ID NO: 989044 - DNA, 120 bp, Artificial Sequence
  ENSG00000255087_38 (sequence is synthesized)
caagccactggtataaatccatgagtccaaaagccaaagaacttggagtctgatgttcgacatccagcacaagagaaagatgaaggctggaagactctgcaagtctgccccttccacctt

SEQ ID NO: 989045 - DNA, 120 bp, Artificial Sequence
  ENSG00000255087_39 (sequence is synthesized)
cttctgcttgctttttctagccacgctggcagctgattggatggtgcccacccacattgagggtgggtctgtctcttccaatctactgactcaaatgttaatcttctctggcaatgccca

SEQ ID NO: 989046 - DNA, 120 bp, Artificial Sequence
  ENSG00000255087_40 (sequence is synthesized)
gaagcaatacttttcatccttcaatccaataaagtcgacaatattaactctcacagagaattttgctgaaagggttgtttttggggattaattctaaccggaaaggctctgctaggagac

SEQ ID NO: 989047 - DNA, 120 bp, Artificial Sequence
  ENSG00000255087_41 (sequence is synthesized)
acaatctgggggtcttacgaaaattggtttttcagtagataaacatgaggttgaaacaacatgggataggcttttagtctaagggaccagctttgacatcggttgccttgataagctcaa

SEQ ID NO: 989048 - DNA, 120 bp, Artificial Sequence
  ENSG00000255087_42 (sequence is synthesized)
agggaggctcagagggtgggtccccttccctgcctctcaagcagcaggtcagtttgagctcacatctcacctcgggaagtaggaaattgaatgactgctcttctcacttcacagggcagg

SEQ ID NO: 989049 - DNA, 120 bp, Artificial Sequence
  ENSG00000255087_43 (sequence is synthesized)
ttttttatcctctggggaaagtctttgtgaatgctcacagattctgcccatagaatctaagctccttgagggctaggaggaagcaggccgccattgtccactgctatattttcaatgcct

SEQ ID NO: 989050 - DNA, 120 bp, Artificial Sequence
  ENSG00000255087_44 (sequence is synthesized)
ggtacacttcccaacactttgtaagtgctccctacatattcattgcagtgaataaataaaaataacaactaatacttttgtaccgcttactatgtaccagacactgttgtaggggctttg

SEQ ID NO: 989051 - DNA, 120 bp, Artificial Sequence
  ENSG00000255087_45 (sequence is synthesized)
caggtattaatttatttcatctccactacaaacctatccagatggatgggactagtgtgaatagaagaaatgctgatgatgtgatggtagacagagcaatctgtgcatcatccgagccga

SEQ ID NO: 989052 - DNA, 120 bp, Artificial Sequence
  ENSG00000255087_46 (sequence is synthesized)
gccacagtgatggtgccggcaaacaggggctttctcttcagtaaataaagggcagcctagggtagatgtgagatctcaatggtagctccctgactctaacaacaagtaaggagggttatc

SEQ ID NO: 989053 - DNA, 120 bp, Artificial Sequence
  ENSG00000255087_47 (sequence is synthesized)
tgatgactctccatgatccagtccagacagagacaagcttatgacaatgatatttgcagctgcagcaaagccagtccctctgtgaacgatcacactggtgacgcaggtctcaggctccct

SEQ ID NO: 989054 - DNA, 120 bp, Artificial Sequence
  ENSG00000255087_48 (sequence is synthesized)
ctgtgaatgatcacatcggtggtaaacatgcttctttccttgaaagttaaacccgttttgagcagggctgtggggttgagtgtgtgcgggagcccctggggagggcaggtcaccctagac

SEQ ID NO: 989055 - DNA, 120 bp, Artificial Sequence
  ENSG00000255087_49 (sequence is synthesized)
agttaatgcaaacacagctgctatccccgtggagaatggtctcttagtagcaattgctgggcccacagtcgaatcaatgttgtgcagtgtagctgatgggaagtgtcagttctcctaagt

SEQ ID NO: 989056 - DNA, 120 bp, Artificial Sequence
  ENSG00000255087_50 (sequence is synthesized)
ctttccttttccaggataatcccctcattggacctgaggagcagagaagagctggcctctgagcagggtgctggggaaaagtgtagcttccatgtcctgcacctgcttctctctccccag

SEQ ID NO: 989057 - DNA, 120 bp, Artificial Sequence
  ENSG00000255087_51 (sequence is synthesized)
tgacctcaccactgtgacctcaccttggtggagagcagcaacaaactcataggtgctgataattgaaactcaaggagggaagcagaaatgtgtgttatttggtagaatgggcaattcaag

SEQ ID NO: 989058 - DNA, 120 bp, Artificial Sequence
  ENSG00000255087_52 (sequence is synthesized)
aacaatttagttttgggatgcattaactgtcttatttcacatatgtaactgatgtttagagatggatgggaccatagaggtgattcattccaaaatctttattttacaatggggaaaagg

SEQ ID NO: 989059 - DNA, 120 bp, Artificial Sequence
  ENSG00000255087_53 (sequence is synthesized)
aagggttgggaaaaaattgaataaataatgccattttattgagtagtagctgactcccagtccattgcttatttcagtaaacaaaattatttcccagatatgaacaactatgtctacaga

SEQ ID NO: 989060 - DNA, 120 bp, Artificial Sequence
  ENSG00000255087_54 (sequence is synthesized)
aataaacaaatgtttttggaatcacggcaatagagaatcaaggcgaagaaagttttctgaattcttcagccagcagaacccgaaactctgaattttcctgtagagggggtgactttgcct

SEQ ID NO: 989061 - DNA, 120 bp, Artificial Sequence
  ENSG00000255087_55 (sequence is synthesized)
tgggtttgccatttgagcagagatcagctagtgagttgtatctctggtctgcagagcttgtgaatggcacagaaaatgaggaggattttgaagccagctaaggccaggtttgtattgtag

SEQ ID NO: 989062 - DNA, 120 bp, Artificial Sequence
  ENSG00000255087_56 (sequence is synthesized)
ttctgccattttcttatctactgtgcaactgcaggcaagtaagttcgcttttctgagctcagtctcttctttggaaaaagtgaatgacgtatgctacgtatctgttccctctgtcttgtc

SEQ ID NO: 989063 - DNA, 120 bp, Artificial Sequence
  ENSG00000255087_57 (sequence is synthesized)
gacagtggtcatgcaccaggcacaagatgctgaggtttgttgtctctatttaatgtctcactacaacttcacagtttttaaaatgaggcagcagttaatattataatgtctattttacag

SEQ ID NO: 989064 - DNA, 120 bp, Artificial Sequence
  ENSG00000255087_58 (sequence is synthesized)
ttccaagatgaattgggtcctatccttgaggagaccatacatgttagggaggttgttggatacatgagcagatacaacacatggcagaacgtgttggatggaggctgagcaccggaaatg

SEQ ID NO: 989065 - DNA, 120 bp, Artificial Sequence
  ENSG00000255087_59 (sequence is synthesized)
cgtgagctttaattcaagatggaaaatgagaatccactggaatcatgaaggacatcccagatcccaggaaggagaacactggcaaacagcgcccgaaataaaagtgactggctgataaaa

SEQ ID NO: 989066 - DNA, 120 bp, Artificial Sequence
  ENSG00000255087_60 (sequence is synthesized)
gctcctccccactgcaaatggtgcggacttctgtggctccatcccgataggcaccccagtgcacgggccggttggagttttgcgagggagctcttctcacctggctgtctcaatgatagt

SEQ ID NO: 989067 - DNA, 120 bp, Artificial Sequence
  ENSG00000255087_61 (sequence is synthesized)
atttacattttggaggaaacatggatgccacacctgaaaggcagtggccatttcggtaatcacctgaggcaagatcagaaaaaatctaaaagaattgcagagatgctgaccttgatgact

SEQ ID NO: 989068 - DNA, 120 bp, Artificial Sequence
  ENSG00000255087_62 (sequence is synthesized)
tcaagctgctgaaccaaggatcacctgaccccacatgcttcctgcatcctcacttcatctgttcatgttggggaggctgcacttaagatcctgttatttggagtttgatcatggacagga

SEQ ID NO: 989069 - DNA, 120 bp, Artificial Sequence
  ENSG00000255087_63 (sequence is synthesized)
agtgtccgcgaaagggaaaagctgaaaagttgatgaactaagcatgacgttactggaaatggaaaaactgtagattcctgactgaagaaaaattatatttacttacttagttatttatac

SEQ ID NO: 989070 - DNA, 120 bp, Artificial Sequence
  ENSG00000255087_64 (sequence is synthesized)
atagaaaagagaccatatcttaaaacaagtgttacttgagagtggttttcaaggatttctactttttgtaaaaaacttaatttgggagggtgggaagtaatgcttttaattttaaaaaaa

SEQ ID NO: 989071 - DNA, 120 bp, Artificial Sequence
  ENSG00000255087_65 (sequence is synthesized)
tttattgagtaataatttatgtatcatgaaatttgtctaatttaagtgaataattcaattattttttgtacatttacccatttgtgcaatcatgaaaacaatccagttttagaacagttt

SEQ ID NO: 989072 - DNA, 120 bp, Artificial Sequence
  ENSG00000255087_66 (sequence is synthesized)
catcgccctagtaagattccccatgcccatttatagtcaattcctattttcgctctagccccaggcaaccactgatctactttctctctctatgtattcatctattctggacaattaata

SEQ ID NO: 989073 - DNA, 120 bp, Artificial Sequence
  ENSG00000255087_67 (sequence is synthesized)
gaactgtgagaaaatacatttctgttgcttaagtcacccagtttgtggcattttgtcatggcagtctgagcagactaatacgatgaacttgcatttgggttgctgctactcataatggct

SEQ ID NO: 989074 - DNA, 120 bp, Artificial Sequence
  ENSG00000255087_68 (sequence is synthesized)
gtgctggaaggagtactaagaggagagatgctttgctttagtaggatggcagctttgggaaagagacgcgagagtgagtgtgcagagagcttgttctgagtgcaagagataagtgggatg

SEQ ID NO: 989075 - DNA, 120 bp, Artificial Sequence
  ENSG00000255087_69 (sequence is synthesized)
aatcctgtcttagaggcaatcaagcaagagaggatggggtggcaggcacttcagctctctagcccctccttccagggcagagccattttagagatccacgtcttttccccatccataggc

SEQ ID NO: 989076 - DNA, 120 bp, Artificial Sequence
  ENSG00000255087_70 (sequence is synthesized)
tgctgaagccagaaacagcccagcacttaagaggggagcggaaaatgacatcactagtctgggcagtatcttctcagcctaaaccattattccctccctcccttttaacaaagactccta

SEQ ID NO: 989077 - DNA, 120 bp, Artificial Sequence
  ENSG00000255087_71 (sequence is synthesized)
gtttcccacccaatatccagtctccattttcttcctaactgaatgttgacttcttccccctgggaaacaagatatcaaggaaaatgatgcaccttgtttgcctcccttgcaagtgggcct

SEQ ID NO: 989078 - DNA, 120 bp, Artificial Sequence
  ENSG00000255087_72 (sequence is synthesized)
atcttcggtgctcttctgctccctgtttttgctccttccatccttccatagagctcaaattgtctgtttctccacttggcgccccttccctttccttgagtagcaaaacccactgactgt

SEQ ID NO: 989079 - DNA, 120 bp, Artificial Sequence
  ENSG00000255087_73 (sequence is synthesized)
gaacttcttcaggccaggacttttccttgttctggcatccccagaaccaagcacgatgccagcttccggctgctgcttttagtatttgttaaaggaatgaacagctcttctcaaagctcc

SEQ ID NO: 989080 - DNA, 120 bp, Artificial Sequence
  ENSG00000255087_74 (sequence is synthesized)
caatcatacctcgatgtagaggactgaaaacagctgagagctttgcctcttctcctgggacatcagtattttaaaaacagatcaaagcgacatggaagaagttcaattacattgaatggt

SEQ ID NO: 989081 - DNA, 120 bp, Artificial Sequence
  ENSG00000255087_75 (sequence is synthesized)
agagttccagacagcatttgatcctttcctttgagcaaaggaccttctctatccctaaaaccaaatcacagaagcctgtggcctgtcagggctgctggaaatggtggtttcagactcttg

SEQ ID NO: 989082 - DNA, 120 bp, Artificial Sequence
  ENSG00000255087_76 (sequence is synthesized)
aaacagaaatagcttccagaagacttcagataagttcatggataatagagccaaaaatgatcactaaaagggaagtcagaaagattcagagctccatctttagacaggtaaaatctgatt

SEQ ID NO: 989083 - DNA, 120 bp, Artificial Sequence
  ENSG00000255087_77 (sequence is synthesized)
gaacaacagcagctgccttcatcaagggagcctggagagcaaacagcggaaaaacagtcatctggcaacatgttgcaggaaaaagacattacaaaagaataacaagcttgaggaaacatg

SEQ ID NO: 989084 - DNA, 120 bp, Artificial Sequence
  ENSG00000255087_78 (sequence is synthesized)
gggaaatcaggattatagttgtttggctgtttcagacacacctgctggtcattcgccacctgaacccacaatcgggtatttggactcggcagtgagtcctgccacggaggcagctctgac

SEQ ID NO: 989085 - DNA, 120 bp, Artificial Sequence
  ENSG00000255087_79 (sequence is synthesized)
gcgactggtggaggattagcacttcacgtgggaagaagcagcaggaaaggatgaaaatcttaagtagcaaagatcttgttttcgtctctagaactccagtaataaaggccagtggcaatg

SEQ ID NO: 989086 - DNA, 120 bp, Artificial Sequence
  ENSG00000255087_80 (sequence is synthesized)
attcttcttggacatcagctgacttaaccattgaggaaataaatgaacatctattgagcacctgttatgtgctgatgcttgctcactacttgtttcatttggctttactggattcttatg

SEQ ID NO: 989087 - DNA, 120 bp, Artificial Sequence
  ENSG00000255087_81 (sequence is synthesized)
ttagcaacatcaagcaggagaggcagagaaagcagcaataactccacatatgacttggaaattggctcagtctcgtggcaggagatgtgtgtttttatggtgttaagtgtgaaggagtga

SEQ ID NO: 989088 - DNA, 120 bp, Artificial Sequence
  ENSG00000255087_82 (sequence is synthesized)
atccatcagaggtaagtagaagtcatcaggtggggctttcaggcaagctcttcaatgaagctgactcagctgggggacgatttttctcttcctccttctttctgcctaatatgtggacat

SEQ ID NO: 989089 - DNA, 120 bp, Artificial Sequence
  ENSG00000255087_83 (sequence is synthesized)
ctgtttggatcttgaggcaaattcgatgacagaatcacatcctagaggtattaaagcagacgtttaggaggacactggtacctgatgactgctgtatctgcctatgactggacctcagtg

SEQ ID NO: 989090 - DNA, 120 bp, Artificial Sequence
  ENSG00000255087_84 (sequence is synthesized)
taagaagccacttgtttgaattttctgtgcatgcaaggaactccattctaagtgctgtatctctcgcccatgctgcctgtattaggtagggaaagtaaatttatctgctgtaacaaacaa

SEQ ID NO: 989091 - DNA, 120 bp, Artificial Sequence
  ENSG00000255087_85 (sequence is synthesized)
gaggagttcacatttatggtgagcccatgcaagaagaccctccgacaggtgcctgtcacccctgaggagtcactggttgcagcccgttctgaagtgtcattgagatagaaaccaagtcaa

SEQ ID NO: 989092 - DNA, 120 bp, Artificial Sequence
  ENSG00000255087_86 (sequence is synthesized)
ttataccacctctaaggagagcagccatcttcctccctgtcctgagcaggaataaacaaagactgcataaacccttgcagcggggtcggggatgttatctccaccccagccatcccctca

SEQ ID NO: 989093 - DNA, 120 bp, Artificial Sequence
  ENSG00000255087_87 (sequence is synthesized)
tgtcatggtgcctgctgtttccacaacctctcctgctaagaagatgaccctagacagtcagggcaaaggataacaaccttcctgggacattccaagaggactctttgtgccaacactctg

SEQ ID NO: 989094 - DNA, 120 bp, Artificial Sequence
  ENSG00000255087_88 (sequence is synthesized)
aaagccagaactcagaatacatctctcagaagacatgaaataaggagctttcctgtggggccaatgcagtgacatgagaagccggtgttgctaggatgtgctgctgcggtggccaggact

SEQ ID NO: 989095 - DNA, 120 bp, Artificial Sequence
  ENSG00000255087_89 (sequence is synthesized)
cggaacgcctctccccgcctagctgggccctgtgggctcccctccgcaaccctaaggcgggaggccgagggcagcggggagtcgcgcttcaccttcgcccctcatttgacccatggactc

SEQ ID NO: 989096 - DNA, 120 bp, Artificial Sequence
  ENSG00000255087_90 (sequence is synthesized)
attaatggaagaaccgaggcaagcaagttcacgggaagaaatgcgccctcccaactggaggccaccagctgcccactcgggaacacctcagggtgccaactgcatctctgcggggtcgcc

SEQ ID NO: 989097 - DNA, 120 bp, Artificial Sequence
  ENSG00000255087_91 (sequence is synthesized)
agagttcatccctttccccacatctcagcatcatatagcaagagttgcatggggcctcatggcccagtggggcccaggctcgaacaaatttgcggagaagttttgcagcctgctgccacc

SEQ ID NO: 989098 - DNA, 120 bp, Artificial Sequence
  ENSG00000255087_92 (sequence is synthesized)
tctgggctctgctgctgcacaaacagggactattcgtggaagctgtttggctcatcactgaacctaagtgtctggggagcttcagggcctcagtggcctaaggcttcatgagcccttctg

SEQ ID NO: 989099 - DNA, 120 bp, Artificial Sequence
  ENSG00000255087_93 (sequence is synthesized)
cttagagagttaatgcctgagactaaaatctggggtaacgggacagatttctgctcagcagcaaaagctgccccagccttccttataaaatggagactgcaaataaagttcattgtttcc

SEQ ID NO: 989100 - DNA, 120 bp, Artificial Sequence
  ENSG00000255084_0 (sequence is synthesized)
gctgaagactgcagaagcccttggtcagactactctcaaggttgaatctccctggcttgactgagattcagactttatggaacctgattcaacaactgatgagactggaattgaagcact

SEQ ID NO: 989101 - DNA, 120 bp, Artificial Sequence
  ENSG00000255084_1 (sequence is synthesized)
actttaagatttattgtctcctcttctacaaggatatacattcaacaaggaaagagattctttgttcaccacttttcctccagcacatgtcatgtagtcaattaatattaattgataaaa

SEQ ID NO: 989102 - DNA, 120 bp, Artificial Sequence
  ENSG00000255084_2 (sequence is synthesized)
cttcattgtacatctggtagaactcagctatgaatccatcaggtcctgggcttttttgaatgctgatcaacgtcaagaattcttccagtcatgtataatgaagacggcatttgattatca

SEQ ID NO: 989103 - DNA, 120 bp, Artificial Sequence
  ENSG00000255084_3 (sequence is synthesized)
ttctgaatgacttcaacctatcaggacaacttctcccagagactactttgttcaataatataaagcaccaccaccattattaagagtcaaaaagcactgaaccggagaaagcagttacat

SEQ ID NO: 989104 - DNA, 120 bp, Artificial Sequence
  ENSG00000255084_4 (sequence is synthesized)
acaaattttgtcatttgatagaatcaaccaaatatataaacaagaatcctgacatcttaaagataaagaaatcagtaaacaaataaaagaagtaccaaagtaccactcatgatcatacca

SEQ ID NO: 989105 - DNA, 120 bp, Artificial Sequence
  ENSG00000255082_0 (sequence is synthesized)
tcatattataggttttttaatttttttgaaaagtaactggcttcacaaacaccaagtacaacatgatttagacaactgagaaacaggcaagtatattttgaagtgctaaaataaaacata

SEQ ID NO: 989106 - DNA, 120 bp, Artificial Sequence
  ENSG00000255082_1 (sequence is synthesized)
tttatacaagtacaaagcaaaacaatgctgataaaaatgttaaactttatgaaaaaaaatcatttgcagttcacatcaaaataatttaacattctctattattttaatagtacaagctgc

SEQ ID NO: 989107 - DNA, 120 bp, Artificial Sequence
  ENSG00000255082_2 (sequence is synthesized)
cacaacagagaaagaacagatacacgcacacaattttaaaaccaaatcagttataagtgcagaaaaaagtaagtacaagcacttttagcccacacaaatcttttaggattggcaccatct

SEQ ID NO: 989108 - DNA, 120 bp, Artificial Sequence
  ENSG00000255082_3 (sequence is synthesized)
ttctaaaacatctataatctatatagatttctaattacaacaccatcagcagctgccattgatttctagaaatacacacaatatacatagtatatttgttcacattgggaagatcagtga

SEQ ID NO: 989109 - DNA, 120 bp, Artificial Sequence
  ENSG00000255082_4 (sequence is synthesized)
aattcaaccaactattttatacatgcctcattcttcaatagacagtagagactctcccaggcctcagaccctcttcaaagtgaattctgacttgtctttatgctttcactgatctgtatt

SEQ ID NO: 989110 - DNA, 120 bp, Artificial Sequence
  ENSG00000255082_5 (sequence is synthesized)
ttttcacagtataaaattgtaaatggtaactatagagattctgacagcttgagggttattaataagctgttgctaaatgtgaactcacataatacctttgaagtctccaaaacatgtaca

SEQ ID NO: 989111 - DNA, 120 bp, Artificial Sequence
  ENSG00000255082_6 (sequence is synthesized)
ttttactgggagactagcataggaaatgcttttgttttttgttattcttaaaaagagcatttaattcctggcttggaagtcacagaactgcagcagagctattatacaattcatttacag

SEQ ID NO: 989112 - DNA, 120 bp, Artificial Sequence
  ENSG00000255082_7 (sequence is synthesized)
tcagaaatagctcctagtcttcctgatcacttgctggtaacagcagtagtttgggaaagatagttactttcaaggattagcacgtttggggatttgctttttttccttgcttcagtcaaa

SEQ ID NO: 989113 - DNA, 120 bp, Artificial Sequence
  ENSG00000255082_8 (sequence is synthesized)
tctcttataatttttctttccatactccctttctgttccccatccctagcccagaaagacggttcttcccaatccagatatgttcttcttaggctgcccccactcctttcccaaaatgga

SEQ ID NO: 989114 - DNA, 120 bp, Artificial Sequence
  ENSG00000255082_9 (sequence is synthesized)
aggatgagtggactgcttagattagtcagtataacttggttaaaccacgtcttcttctttccatcctgggacatatctctcatttagggtcactttgctgagccttagcatatccccttc

SEQ ID NO: 989115 - DNA, 120 bp, Artificial Sequence
  ENSG00000255082_10 (sequence is synthesized)
cttttagtcatgctggtcccgactgaattatcactgggcaccaggaacagattgttttgaaggaaattcaatgagaatgtacccaaatgaattgtgaagttcatatcctatagccctaga

SEQ ID NO: 989116 - DNA, 120 bp, Artificial Sequence
  ENSG00000255082_11 (sequence is synthesized)
atgaatattcagttctctttgtactgtagagttattacttggaacctggtattagaattggcaaagagacagagttagcatcattccaaaataaaagatctcaagaatgcattactaata

SEQ ID NO: 989117 - DNA, 120 bp, Artificial Sequence
  ENSG00000255082_12 (sequence is synthesized)
atcttatgtccaacatacaatgtattcaatggagtggcaaaagttatagaaatacagagaaaaatatatcttgtccttttctaattggataaatcatttttattattacagttgattatg

SEQ ID NO: 989118 - DNA, 120 bp, Artificial Sequence
  ENSG00000255082_13 (sequence is synthesized)
atagcatgtggaagtatcagatggcaatttacttgcattaaatttaatttctgatgaagttttttataaggtagtgtgctttttaagagatatgttactaaaaaaatagaaaatgaattt

SEQ ID NO: 989119 - DNA, 120 bp, Artificial Sequence
  ENSG00000255082_14 (sequence is synthesized)
gaccatgaacaaagtttaaacatgttcttcaactggtctagagtgaaacgtattgtacttgagaataaaatgaaaatcaacataaggattttataaaacaaattttaaaatgtagagcat

SEQ ID NO: 989120 - DNA, 120 bp, Artificial Sequence
  ENSG00000255082_15 (sequence is synthesized)
atcaagaaaggtttttaatacctaagaagtcaagataggaatcctcaggtgaatgccatccttttgatgaggatccaaagggtattaacacctcaaaagatttccatttgtttttcagat

SEQ ID NO: 989121 - DNA, 120 bp, Artificial Sequence
  ENSG00000255082_16 (sequence is synthesized)
agaggcagacatttgcttttaatgaaaccatgaaacttagctagatttcacttacattttaaaagcctcggtgtaatatttgggatcagggtgctgtgatgatgttattttcaaatctag

SEQ ID NO: 989122 - DNA, 120 bp, Artificial Sequence
  ENSG00000255082_17 (sequence is synthesized)
catgggaggttcgatttcttttaaattaatactttagtacattaatgttagcttttaatgttttgtattgggaggtttgacttaaagttgcaagtaagaacaaatagcagaaaagaaaac

SEQ ID NO: 989123 - DNA, 120 bp, Artificial Sequence
  ENSG00000255082_18 (sequence is synthesized)
tcaagcagaatatttattagaattttttaaagtgaagaatgataaattatgccaatggactgacttctatttctcagtttattttctgttaagtagatgtgaaataaaaaaaaatactta

SEQ ID NO: 989124 - DNA, 120 bp, Artificial Sequence
  ENSG00000255082_19 (sequence is synthesized)
ccaaagtaaggatattgagctaaaagaaaaagttttatttattattctctctgccaaaatatacttctgcctcacagcacatatttttcataaggctatcttaagtataaggctgggtca

SEQ ID NO: 989125 - DNA, 120 bp, Artificial Sequence
  ENSG00000255082_20 (sequence is synthesized)
acacctcctccatttattactatccttatttaaaaatcaaaacatttggtacctgaggatagctgcaatgggaggaagaaagagatgacagtggattcaggtcttgaactatgaattcta

SEQ ID NO: 989126 - DNA, 120 bp, Artificial Sequence
  ENSG00000255082_21 (sequence is synthesized)
cctatttgagactatcaaagcacacttgtttctgttatactctaaatctcttttctgtagttttaaaaagtgacagtatgaagtgcacaaaatcatattaatcattattttaaaaaagaa

SEQ ID NO: 989127 - DNA, 120 bp, Artificial Sequence
  ENSG00000255082_22 (sequence is synthesized)
aataagaattgctttgcctctttttggaatggctaagaaagactgtgtggttaatattcattaaggttcctcttttttagtattttgtattgctttgaaaaatctacatttgtcatagtt

SEQ ID NO: 989128 - DNA, 120 bp, Artificial Sequence
  ENSG00000255082_23 (sequence is synthesized)
catagctgccctgtttaagcagccaagaatagttaaaatcactgctcactggcatagctaaatctccactaagctgacttgacacagttaaaattttcagtgtattaagattgtgttaat

SEQ ID NO: 989129 - DNA, 120 bp, Artificial Sequence
  ENSG00000255082_24 (sequence is synthesized)
cctttcaacaacagtctctcaaatcatgacaatgtcttcatggggtctatggaccactcttccagtggtgggactcgaaaagaacaaaggagctctttgtgcatcaggttctcaaaataa

SEQ ID NO: 989130 - DNA, 120 bp, Artificial Sequence
  ENSG00000255082_25 (sequence is synthesized)
aggaatgaagaagccccaatgcatattttaatattttagttggcaatgcaaacgcaacagcattcctaaagagtggccatgtttcttgaaagagatagccaggctggagctcaagaatga

SEQ ID NO: 989131 - DNA, 120 bp, Artificial Sequence
  ENSG00000255082_26 (sequence is synthesized)
tttttataaagagaatttccagctacaatgcaccccagtgagggaattacaaaacagtattccagaaaatattttttttgctactccagtattgattggcaacatggtgaaatagtcaag

SEQ ID NO: 989132 - DNA, 120 bp, Artificial Sequence
  ENSG00000255082_27 (sequence is synthesized)
aaatcttccactggttttcttggttaatggaggtgaatctgaaataagtaggtggaatccccgatgcaggcttttggaagagtatttcacaacccaattggagaggaaaatctctggtag

SEQ ID NO: 989133 - DNA, 120 bp, Artificial Sequence
  ENSG00000255082_28 (sequence is synthesized)
aagccctacgtagtacattagcgcagcactcactatccagtagtgtgttatgcatgggacacattcacaacgcctccgtaaatactggacccaagttactgcttttcaaggtctttacag

SEQ ID NO: 989134 - DNA, 120 bp, Artificial Sequence
  ENSG00000255082_29 (sequence is synthesized)
aaaaagaaagaaaaaagaaagaaaaaagttgatgttttggtcccagattttgagtttgttagaaaatgtacattcatgtttggtgaatcaaagactcttctgggaaaagaattaaagtaa

SEQ ID NO: 989135 - DNA, 120 bp, Artificial Sequence
  ENSG00000255082_30 (sequence is synthesized)
gaattaaagtaaacaaataaaactttttacagttgcttattaactatgctcttcaccctccgttacgctgtttcacacgcactgcttccctagagcaaagcacttggtatggaactgttt

SEQ ID NO: 989136 - DNA, 120 bp, Artificial Sequence
  ENSG00000255082_31 (sequence is synthesized)
gaagagacgccttgtcagccctcaaagatatcagccgtgtttcttaaaagcccatgttttctaaggccactagaagaaaatctgccaaaagatttgtcgtcggtttcttcgtcggttgtc

SEQ ID NO: 989137 - DNA, 120 bp, Artificial Sequence
  ENSG00000255082_32 (sequence is synthesized)
atgagatagcactactgatctcgtgtttccattaaggggtgcccttggcatcttccccctgggccgtaaccaggcgactatgcttgccattgtgtgtgtgtgaacacggggggctccgct

SEQ ID NO: 989138 - DNA, 120 bp, Artificial Sequence
  ENSG00000255082_33 (sequence is synthesized)
ccgcacgcgcaggccggcgtgctttccagggacattcacaacgacgaggagctctgagtgtaatctcttatgataagagtgtcatatttgggagacgacgggatacagagggccgactcg

SEQ ID NO: 989139 - DNA, 120 bp, Artificial Sequence
  ENSG00000255082_34 (sequence is synthesized)
gacactggcgagttgggggttgtgctccccgagtccaccgagtctctgaagggggacggcggggtgagagccaccagctcctccaggtctggcttggcggccgcagcctcgggaccggcc

SEQ ID NO: 989140 - DNA, 120 bp, Artificial Sequence
  ENSG00000255082_35 (sequence is synthesized)
gcggggctctcccgggccgcgtccccagccgcctgcgcccctgccgcgggctgcgcgcctcccgtgacttcgatggccggcagaggctggatttcggcaaaggtcgtcatggtcgtgggc

SEQ ID NO: 989141 - DNA, 120 bp, Artificial Sequence
  ENSG00000255082_36 (sequence is synthesized)
aactggatctctttggggatcaggtgtccactagcttctggaacatggcagagaagaaatgggccagtttatttacgagatttgattgggaggatggttgccaactacaccctttctcct

SEQ ID NO: 989142 - DNA, 120 bp, Artificial Sequence
  ENSG00000255082_37 (sequence is synthesized)
atcagaaggataagaaacaggtgtttcgaaagttgaacatgatggaacataactttggatgttagcagtaacagtctttggaatcacctgtagccatgccccaaaacatgatagcatgtt

SEQ ID NO: 989143 - DNA, 120 bp, Artificial Sequence
  ENSG00000255082_38 (sequence is synthesized)
gcaaaacctctagtgcccatggccataagggagaaagagcaccagaccatctgaataacgtgaaagtggacacaggaaacaccagacacccagagaaatggagtccaaatagaaactcag

SEQ ID NO: 989144 - DNA, 120 bp, Artificial Sequence
  ENSG00000255082_39 (sequence is synthesized)
accattcttgctggagatacatcaagtgaatacctttgtagatctggacctgacccaaggaagcctggatgatttgcaaaagttttccttccatacctctacaccacagatggattgaga

SEQ ID NO: 989145 - DNA, 120 bp, Artificial Sequence
  ENSG00000255082_40 (sequence is synthesized)
gtttcgaaagtgcccatggccataagggagaaagagcaccagaccatctgaataacgtgaaagtggacacaggaaacaccagacacccagagaaatggagtccaaatgtgagtacttcat

SEQ ID NO: 989146 - DNA, 120 bp, Artificial Sequence
  ENSG00000266988_0 (sequence is synthesized)
ctgctatcaccaataattaaaccataaaaaaccgaaattatttttccctctggggtgattacaaccacacgggagctgtgatgagagatgaaagaactgaccctcaaggagaccaaggga

SEQ ID NO: 989147 - DNA, 120 bp, Artificial Sequence
  ENSG00000266988_1 (sequence is synthesized)
atgatagcccagtcaaactggccacttggttctcaaaccctggccttttaagtcaaaattgtattactacactaaatgtaaaatggcatcttaccaaaataaatggaatctttgaagaga

SEQ ID NO: 989148 - DNA, 120 bp, Artificial Sequence
  ENSG00000266988_2 (sequence is synthesized)
ttctgtgtttgtgtcttcaaaacagctgctatcaccaataattaaaccataaaaaaccgaaattatttttccctctggggtgattacaaccacacgggagctgtgatgagagaaagctat

SEQ ID NO: 989149 - DNA, 120 bp, Artificial Sequence
  ENSG00000266988_3 (sequence is synthesized)
tcttgtgaccaaatcaacagctctttccaagaaaaaaagaccttattgatgtgaagtcttgacactgcctcctgggagcatcgtcctgtaatcaagggcagaaaactctgtgtgtgtaca

SEQ ID NO: 989150 - DNA, 120 bp, Artificial Sequence
  ENSG00000266988_4 (sequence is synthesized)
tgtgtgtaaatgcatgtgtgtgcccatagggccaccattaggctaaaaggcccttatgacatccatgtgggaattatttcctcctccctccaggcagatgcagccccatgctaacttgtg

SEQ ID NO: 989151 - DNA, 120 bp, Artificial Sequence
  ENSG00000266988_5 (sequence is synthesized)
gaacaggtttggtttcaggccgcacttactcttttgaccaaagttacaactgttcacaacacctgtgtgtgtgtgtgcgggggggggggggggtgtctatatgcgaagatttcaaaaaca

SEQ ID NO: 989152 - DNA, 120 bp, Artificial Sequence
  ENSG00000266988_6 (sequence is synthesized)
tatcagaaattactcccaagaggtatccctttttatctggagggcataacatcgttctagatttatacagggaggtggatatttaaagctgccattaatctttcaatatcattcctgtag

SEQ ID NO: 989153 - DNA, 120 bp, Artificial Sequence
  ENSG00000266988_7 (sequence is synthesized)
tttcaaatctgacttcaaaattgatgtagaaaaagactcactgacatcctgacatctcaggatcctacctgtcactttacctggactaaagaccttcgaacatccatgctgtccaggggc

SEQ ID NO: 989154 - DNA, 120 bp, Artificial Sequence
  ENSG00000266988_8 (sequence is synthesized)
actcaccccacagggtcataaatcacaaatagttgttctttatttcagtttacttcatgaattaattatgcagccaataggaaccccatttttccacctccccccgaattaaaacacaca

SEQ ID NO: 989155 - DNA, 120 bp, Artificial Sequence
  ENSG00000266988_9 (sequence is synthesized)
cacacacacacacacacacacactcggctcagtcaaaccctgataggttccatctgaaccagaactatggaagatggtggagatacacagatgaacaagccctgatcctggcactcaagt

SEQ ID NO: 989156 - DNA, 120 bp, Artificial Sequence
  ENSG00000266988_10 (sequence is synthesized)
ggctgctatcaattcttcctttccctatgtgctcctatcatcaagaagcagaggctagttcacccactctggggctggcctcatgactttgtttgaccaataaactatgtatggtaaaca

SEQ ID NO: 989157 - DNA, 120 bp, Artificial Sequence
  ENSG00000266988_11 (sequence is synthesized)
tggcactgtgccaatttcaagtttagactagaagcttccacttttctgctttctggggaagccagcggctataaagaagcataggctagacttctgaggggtcagatgccacatggagaa

SEQ ID NO: 989158 - DNA, 120 bp, Artificial Sequence
  ENSG00000266988_12 (sequence is synthesized)
agagaggccacatggagtaaaatcaagacaccttccagccctaccatcagctgaatgcagctaagtgacctgagggaacaaaagagcctcccagccaagagccctgctcaaattgctgac

SEQ ID NO: 989159 - DNA, 120 bp, Artificial Sequence
  ENSG00000266988_13 (sequence is synthesized)
ttgcagaatcatgagaaaaacgtagtttggggctgttggttaggcagcaataacaaattattggtgagaaaacaaaattattggtgagaaaattaacacagtcaaaacagctatttaacc

SEQ ID NO: 989160 - DNA, 120 bp, Artificial Sequence
  ENSG00000266988_14 (sequence is synthesized)
ttgtgcagaaaaaatactgttttaaaaagcagacatctcactgtggtctactttccaattggttgtctggccatatactgactgaggtactgcatatgaaaccctatatgaaaaatcatg

SEQ ID NO: 989161 - DNA, 120 bp, Artificial Sequence
  ENSG00000266988_15 (sequence is synthesized)
tggactggagggaatccaagagacagaagttgtggttcctacaacctggtacttcctcctcacctagatggttttccataagaaaaaaaaattatgtcttccatttctttggcactgtcc

SEQ ID NO: 989162 - DNA, 120 bp, Artificial Sequence
  ENSG00000266988_16 (sequence is synthesized)
tattaaagatctctgcatattatgccgagcgcatatgggccatcaatgaatataaatggattgagtttgtaaagtttaactcaaatttcaatccccagttttttccaccctctgcctttc

SEQ ID NO: 989163 - DNA, 120 bp, Artificial Sequence
  ENSG00000266988_17 (sequence is synthesized)
gatctttagtcctgttacattgaggcccaagacttagggttgaattgaagtatctcggtcagcaagagaaaaggagttttgacttaagaactcaaggcctaggagaatggggtcacatgg

SEQ ID NO: 989164 - DNA, 120 bp, Artificial Sequence
  ENSG00000266988_18 (sequence is synthesized)
tcacttcacatgttctctttagcacaccattcctgcatggaattccatctctgaagccctttggtggggggctatcttgtatgtgacagtttaaagtaaaagtgtctggaatggagtttc

SEQ ID NO: 989165 - DNA, 120 bp, Artificial Sequence
  ENSG00000266988_19 (sequence is synthesized)
ttctgtgtttgtgtcttcaaaacagctgctatcaccaataattaaaccataaaaaaccgaaattatttttccctctggggtgattacaaccacacgggagctgtgatgagagtcacaggg

SEQ ID NO: 989166 - DNA, 120 bp, Artificial Sequence
  ENSG00000266988_20 (sequence is synthesized)
agaatcaaaacttttgttgaagacagaccttacaccatctggcctaatgatttgcaacttgtttttcagagccctttctgcaagtaaaaacatatgtgaaaccccaacatgatggataaa

SEQ ID NO: 989167 - DNA, 120 bp, Artificial Sequence
  ENSG00000266988_21 (sequence is synthesized)
atgaataaaatgtagaatgggatggggcagaggagccccaagtcacttcagaacatagttagaaaagataatatcttgccctcattttatgaataaagacattgctgcccaaagatagaa

SEQ ID NO: 989168 - DNA, 120 bp, Artificial Sequence
  ENSG00000266988_22 (sequence is synthesized)
ttcaaaacagctgctatcaccaataattaaaccataaaaaaccgaaattatttttccctctggggtgattacaaccacacgggagctgtgatgagagctcagcaatcctgtgatataggc

SEQ ID NO: 989169 - DNA, 120 bp, Artificial Sequence
  ENSG00000266988_23 (sequence is synthesized)
cactgcaactccaagccatcctggttcaccaactgctagaaacacccagattttaactttccaactcacttcttccaagaagctccccctggtatatggccacctcctctgagaccactt

SEQ ID NO: 989170 - DNA, 120 bp, Artificial Sequence
  ENSG00000255089_0 (sequence is synthesized)
tggtgcccaggcagctggattatcccataaccctcactgtggtgcccaggcagccggattatcccattaccttcagtgtggtgcccaggcagccggattatcccattaccttcagtgtgg

SEQ ID NO: 989171 - DNA, 64 bp, Artificial Sequence
  ENSG00000255089_1 (sequence is synthesized)
ccggattatcccattaccttcagtgtggtgcccaggcagctggattatcccataaccctcactg

SEQ ID NO: 989172 - DNA, 120 bp, Artificial Sequence
  ENSG00000245869_0 (sequence is synthesized)
cagtggcttaaggggtgcaggggtctggagaaatgagactgggctgtgggtgagggtgtaggtctgtaccccttaccccgtctttcttcaggaggcccacagcccctaaagaccatctga

SEQ ID NO: 989173 - DNA, 120 bp, Artificial Sequence
  ENSG00000245869_1 (sequence is synthesized)
gactctggcttgccatttgtcacatctcccttgccgcacccacagccttcagggacaagtctgtgagactcctctttcatctctacccacgggttttggccatcagaagcaggtccacat

SEQ ID NO: 989174 - DNA, 120 bp, Artificial Sequence
  ENSG00000245869_2 (sequence is synthesized)
atgcggccactgtttctgccgttctgctagaggagtgggatcagctgcagcctgcgtccctggggaaagcaagagttcctgacggagactctgcagtttgtatgcccgaacccatattca

SEQ ID NO: 989175 - DNA, 120 bp, Artificial Sequence
  ENSG00000245869_3 (sequence is synthesized)
ctttgaccctgacccatcctcagcttggccttggggctctccctcatctctgacccttccaactacaccccagttgggcctcctctgctggggttcctctgggacttttgacctggttgc

SEQ ID NO: 989176 - DNA, 120 bp, Artificial Sequence
  ENSG00000245869_4 (sequence is synthesized)
ggggggcgggtggagaacctccctttcccctagatgaagcccagaaacagcctgagctggttttggttcctcttcttcacacctacatgatgaaatgagatggtccacgtggacgggctg

SEQ ID NO: 989177 - DNA, 120 bp, Artificial Sequence
  ENSG00000245869_5 (sequence is synthesized)
tgtcgcctgtgatgctctggtcacactgaagtcatgatgtgtggtaattgtctatggagaggggtcatagaaagccaggctctggggcttggaccagcttcaccgtgcgctatagcagct

SEQ ID NO: 989178 - DNA, 120 bp, Artificial Sequence
  ENSG00000245869_6 (sequence is synthesized)
gttggaaggaggctctcagatcgagggtcgcatagacagggtctgctctaggtctgccaggatcggcctttccagcaggatgggtccctggcatacccaccccaggacctggaatcttct

SEQ ID NO: 989179 - DNA, 120 bp, Artificial Sequence
  ENSG00000245869_7 (sequence is synthesized)
tgttcctggttcttagccatctaatttttgttctatttggacctttcattgatgagaattagcagcccgtccccaccccccagcccctgccttaaagaagtggacattttaagcggctcg

SEQ ID NO: 989180 - DNA, 120 bp, Artificial Sequence
  ENSG00000245869_8 (sequence is synthesized)
agttggtcttcgagttcaagaggacaaatggaatacagaatgacgaacctggcttatggccaggagcccccagttccttttttttttttttttctggcaagtttgtgtaaccaaaaggcc

SEQ ID NO: 989181 - DNA, 120 bp, Artificial Sequence
  ENSG00000245869_9 (sequence is synthesized)
ccagttcttagctcaacatgagagtgtaaaacccagcgttcaaggaatgtgaaccaatacctggtatgggcaaggacaaggaggagaataggaagcagaaggaatagaaggacccagact

SEQ ID NO: 989182 - DNA, 120 bp, Artificial Sequence
  ENSG00000245869_10 (sequence is synthesized)
aactccagaggaaaatggtgagctaagacctttactgcatcacaaatcaataaatacttattgagaagctgctacatgcaagattctcctgcctgtaccactacgcccgaggtttttgta

SEQ ID NO: 989183 - DNA, 120 bp, Artificial Sequence
  ENSG00000245869_11 (sequence is synthesized)
ctgtgacactgagggacagtctgccaagctgctcacggcccttcagtgagtgggtgggggcggaggagagggtctgtgttctgaggggacattggccctggagacagggtgtgtaggaga

SEQ ID NO: 989184 - DNA, 120 bp, Artificial Sequence
  ENSG00000245869_12 (sequence is synthesized)
ttcgtgaagggggaacgaggcactggtggctggctgaagagctccagagcccagatggtcctaggactcctgggctcctggctagaccctgagtgagggatccagatattggaatgcctg

SEQ ID NO: 989185 - DNA, 120 bp, Artificial Sequence
  ENSG00000245864_0 (sequence is synthesized)
aacccaggagaagccccatcccgcaatgagggcgcggcaggctaattttgcctacggctgaacagttggggcaaacggtggttaacacgctggatccctctctagtgaaggcccgaccgt

SEQ ID NO: 989186 - DNA, 120 bp, Artificial Sequence
  ENSG00000245864_1 (sequence is synthesized)
cccgatctttggggtccgcaccaatgatcccatgaaaaacaaaggacggtgtggacctgcgcccctcttccccgtagcgaccgtgttggagaaactcgctcggaggaccagtgtgctgcg

SEQ ID NO: 989187 - DNA, 120 bp, Artificial Sequence
  ENSG00000245864_2 (sequence is synthesized)
tgttatcttcacagcaacttagcaagccccacagaacaaaagttaaagcgtgattgcactataccttgccccgggttactcaggcgcctgtctcccattttggacatgcaggaaatgttg

SEQ ID NO: 989188 - DNA, 120 bp, Artificial Sequence
  ENSG00000245864_3 (sequence is synthesized)
gatttggggaggtttgatttggctgggtttggtttgtctatataagccctgctggagtactgtactgaggaacgcgccttgatggactcgggtgttaattaacgcgctaatttgagcttc

SEQ ID NO: 989189 - DNA, 70 bp, Artificial Sequence
  ENSG00000245864_4 (sequence is synthesized)
tgtgggcggctgaggaccgccggctgcccggctcggagaagaactgtggatcgcttgaggtcaggagttc

SEQ ID NO: 989190 - DNA, 120 bp, Artificial Sequence
  ENSG00000245864_5 (sequence is synthesized)
aaaaggcaggaagaaaactgggctttatcaagaaagtcgcatgcgcttgactgagggactttccctttcgtccggcgaaggtctggtgagtccaatgggggagtggaattcgttccggtg

SEQ ID NO: 989191 - DNA, 120 bp, Artificial Sequence
  ENSG00000245864_6 (sequence is synthesized)
atcctctcggtcgctcccgtcgtacgaactgctacagctgctcaagctgtcaacaggagatctccccgcctcgtggcgcgtgtgttgtgggtatctcgaaggggtggtggtacggtctct

SEQ ID NO: 989192 - DNA, 120 bp, Artificial Sequence
  ENSG00000245864_7 (sequence is synthesized)
gggcattaaaaaaatatgcaaatcctgcgcgaagaggagcgggtgcattcctggcgcgatcgccttttattgaagcttttaattaaaggggccagttggcgagcccctgaaacaaccgcc

SEQ ID NO: 989193 - DNA, 120 bp, Artificial Sequence
  ENSG00000245864_8 (sequence is synthesized)
aaaaccccccaaaagagaaaaataaacgctgtagccttcgagaacggttgtttcggctcctgttctgtgggcggctgaggaccgccggctgcccggctcggagaagaacaggtggaaaga

SEQ ID NO: 989194 - DNA, 120 bp, Artificial Sequence
  ENSG00000245864_9 (sequence is synthesized)
aagaacactgaaaacagttacaaggaagacacagtaagatgtgatcttctaaagtgaaaatttcccaaagtaccaaggaaaaggagaaactgcagaagagcttcaagaaccacaaacact

SEQ ID NO: 989195 - DNA, 120 bp, Artificial Sequence
  ENSG00000245864_10 (sequence is synthesized)
tgggttttgcatcttgccagaaaatctgcactgttggtagaagcctggggtagggctggcaggacctgactcagcggagaaaatgccacccacagtcactgactctgcttccgcagtagc

SEQ ID NO: 989196 - DNA, 120 bp, Artificial Sequence
  ENSG00000245864_11 (sequence is synthesized)
ggagctcccctgttttctctggaggtttcccacagccgggccaatacccatgtctctcagatgggaaactggacttttggaaaattgaaactaaataaagttgtataacttttaaaagaa

SEQ ID NO: 989197 - DNA, 120 bp, Artificial Sequence
  ENSG00000245864_12 (sequence is synthesized)
aaacagctgagctgagtaaggaagacgaagaacactgaaaacaggggctggaagtcctaaatgtatatactgtctctcagctgactgactacgttttgaaaagatttattcatgtatgtc

SEQ ID NO: 989198 - DNA, 120 bp, Artificial Sequence
  ENSG00000245864_13 (sequence is synthesized)
aagataaggcaagagatctcctaaaaccaccagcttctctccttacgtatctgaagaaactctttcctcagagaactcaagtaaatcttgagcaagcctgtatactgaagtcagctttcc

SEQ ID NO: 989199 - DNA, 120 bp, Artificial Sequence
  ENSG00000245864_14 (sequence is synthesized)
acgtcagagtgacactgttgaggtagatccatcaactacagaggcttctgggatattttcacaagacagcgattgtcatactgtgagctgagaacagccgtttcctagaggagtaattag

SEQ ID NO: 989200 - DNA, 120 bp, Artificial Sequence
  ENSG00000245864_15 (sequence is synthesized)
attgacagaaggtgacatattccaagcaataaatgggagaaagagtccagacaggtaatccaaaaaccacgtggaatctttcctcccagacatgtggacatatggaccctgcattattcc

SEQ ID NO: 989201 - DNA, 120 bp, Artificial Sequence
  ENSG00000245864_16 (sequence is synthesized)
atttgctcatcggaaaaacttgaaatacgtacaaactgatgatgataggtgacaggtgcttcaaaaattctaatgaaatagaatttcattaggggaacagattctatttcgttactgaaa

SEQ ID NO: 989202 - DNA, 120 bp, Artificial Sequence
  ENSG00000245864_17 (sequence is synthesized)
ggaatataaatgaaaaagaatgctacatggagctctcatttcttgttttaggcattacgttatcaactagaaaatccttttcttatgcagtgattaaaactgatttttcccttcttaaat

SEQ ID NO: 989203 - DNA, 120 bp, Artificial Sequence
  ENSG00000245864_18 (sequence is synthesized)
ctttcaaaaattatctcgttagtaaaaagaaataagtaaattattgacctttttcgattatatgaagctgtatttttatattaatgctatttaagtaaaattcagctttttttcagagaa

SEQ ID NO: 989204 - DNA, 120 bp, Artificial Sequence
  ENSG00000245864_19 (sequence is synthesized)
aaaattcagctttttttcagagaaccaccatcacagactaaaagctttcaaccactcaatttctttacatgtctgcagtctcagtcctcaagaatgtatattttcatcatcatccttttc

SEQ ID NO: 989205 - DNA, 120 bp, Artificial Sequence
  ENSG00000245864_20 (sequence is synthesized)
ctgtgcctgcccattctacatgcagagaaacctggagaaacccccaaattactcctattaacctttgttaaaaatccaagtaatcacactttgttgcataggtagtgtgatctttacttc

SEQ ID NO: 989206 - DNA, 120 bp, Artificial Sequence
  ENSG00000245864_21 (sequence is synthesized)
agagggttgatgtgtcaagaacacatgcaggaattattactattagttgcatcaatgtcatgttcacacaaaaaccaagaaaaaaaagcatcaacttagaaaaggtagtttcctttcctc

SEQ ID NO: 989207 - DNA, 120 bp, Artificial Sequence
  ENSG00000245864_22 (sequence is synthesized)
tgatcctgaatcatttttttgcttgtcgttcacagctttatgaagataagtatctactcttaacaagctgaataatctttagaaagtagtaaattcatgtaggaataggaagtgcagttg

SEQ ID NO: 989208 - DNA, 120 bp, Artificial Sequence
  ENSG00000245864_23 (sequence is synthesized)
aaatgaatactgcctataaattgagtttctaagaatatttcctgaaagtgtttccatattggtgtgctggtactcacgctgctgctgtttcctgaccctttagtatctacagagaggtgc

SEQ ID NO: 989209 - DNA, 120 bp, Artificial Sequence
  ENSG00000245864_24 (sequence is synthesized)
tttgaggactgtgcccagtgccttacttcatttaaaatttattcggcaaacaattattgaaaacctaccatgtgccagatactgttttgtacgcttatgtgttaggaaagcagccaaatt

SEQ ID NO: 989210 - DNA, 120 bp, Artificial Sequence
  ENSG00000245864_25 (sequence is synthesized)
taaaactaaaaagctctgacctgacttataacattgtatggtttttgccttaggctgagggaagattagatgccaagaaatttctccacaggttttaataaaactgtaagcattgtctat

SEQ ID NO: 989211 - DNA, 120 bp, Artificial Sequence
  ENSG00000245864_26 (sequence is synthesized)
actatctctccctgtagtaccatagtcccttttctttgttcttattctagaaatgaagacacattaatatattaaatctagtataatcagcaggtagactttaattaggcaagcaaatca

SEQ ID NO: 989212 - DNA, 120 bp, Artificial Sequence
  ENSG00000231039_0 (sequence is synthesized)
ggattaagagaaggcaggctgccttgctgaagctatgtggtcttcaagtgagagttgcaggcaatagaactactttccttttggagtaaaaggaggaattcattttcagtagccacaaga

SEQ ID NO: 989213 - DNA, 120 bp, Artificial Sequence
  ENSG00000231039_1 (sequence is synthesized)
ccacaagaaaagttttttttttttccagggtggctggcaaaatggccaaatagtaacagctccagtctgcagctcccagtaagatctacacacaaggcgggtgatttctgcatttccaac

SEQ ID NO: 989214 - DNA, 120 bp, Artificial Sequence
  ENSG00000231039_2 (sequence is synthesized)
gccacacagtcttgtcacctctgctctgggtgtgaggacagcatggagatcatcaggtcaacgcaagtaagatgaggacttgggccaggaagcagagagaatgctgggccgctgtccttt

SEQ ID NO: 989215 - DNA, 120 bp, Artificial Sequence
  ENSG00000231039_3 (sequence is synthesized)
tcttcatgggatggtgtttagacaacattctctggtgacaaggactctcttcttgcccaaaccctagtcaggctcctctgggctcctttttcagtgaggccccattttggggtgtgtccc

SEQ ID NO: 989216 - DNA, 120 bp, Artificial Sequence
  ENSG00000231039_4 (sequence is synthesized)
aagaccccagttttagcaagaatcctgttacctcaattcagccagaatcccccacccttgatgtctatcaatcaccctcagcttcaatatctggccaggttctttgtccctcaccatccc

SEQ ID NO: 989217 - DNA, 120 bp, Artificial Sequence
  ENSG00000286416_0 (sequence is synthesized)
ggggctcggaagcttctgcccgcgcggagataaacaagcaccgcgaccgccgagcagcgccgaacccagcgcgcccagtcagaccccagggcctgtgtaccgagcatgcgcagttcccgc

SEQ ID NO: 989218 - DNA, 120 bp, Artificial Sequence
  ENSG00000286416_1 (sequence is synthesized)
ccaagccaggagcagcgtcaacctgagactcccgagacattaagaattcggaagggatgagatggtagaggggctagagctacctccaagctttatcctgaggcggggagtgaaggagag

SEQ ID NO: 989219 - DNA, 120 bp, Artificial Sequence
  ENSG00000286416_2 (sequence is synthesized)
atgcccaaggcccaagaggggccgcgagggcctttgtccgatgccacccagtctgtcagcactcctagagctttggttttatcttgtattagcatgtgaagctttaaggggggggcacct

SEQ ID NO: 989220 - DNA, 120 bp, Artificial Sequence
  ENSG00000286416_3 (sequence is synthesized)
acaggcttctgactgaagttgtgtaaacgcaacaaaatgaagctttggagcgttaggacattgatgggagggtgacgcccccctctagcagcgcgccagaggggcgagtcagaggcggcc

SEQ ID NO: 989221 - DNA, 120 bp, Artificial Sequence
  ENSG00000286416_4 (sequence is synthesized)
acacaccacggaagtcgggtccaagcccgctgacgtcgccggggtcccgcccaccaaccctctggacccgcccacatttcttctagacccgcccctttcggtgccgaactgaagtcgagc

SEQ ID NO: 989222 - DNA, 120 bp, Artificial Sequence
  ENSG00000286416_5 (sequence is synthesized)
tcttcccacgccctgtcagccacgggtgagttgaaaacctggagagcggaatcccgaacggcagccggaaggccctggactcctcatagcaacagccagctaggggcatctagtgggaag

SEQ ID NO: 989223 - DNA, 120 bp, Artificial Sequence
  ENSG00000286416_6 (sequence is synthesized)
ctgggattcattctagccaaccacatcacgtctctgtaccacaaggtaccattcacgaccaataagagagcgcccccataccacgtgcctttactccttcaaccaatcgagaaaaacgct

SEQ ID NO: 989224 - DNA, 120 bp, Artificial Sequence
  ENSG00000286416_7 (sequence is synthesized)
agtcgtaggatccgcaagcccacctcccagtgccttgccaggcggggctcttcgcgcacgctctgccaaccaatcgtaggtgagctggcgagtgacggaagcttcggccaagccaaccag

SEQ ID NO: 989225 - DNA, 120 bp, Artificial Sequence
  ENSG00000286416_8 (sequence is synthesized)
agctcgcgagccccttgccaccgaggccggcgggatggagacagggaccggctgctggggtttgggaggggcagagattgaggagccagttgctgtgccctgttctggcaaaagaacaag

SEQ ID NO: 989226 - DNA, 120 bp, Artificial Sequence
  ENSG00000286416_9 (sequence is synthesized)
atgcgttgcaagccagaatgatgaattccacttttcacgtcgcctccgtggcattctgcctaaatgatgggcatggaaatggtgctgagggatgtgggctgaatcgagaacacagggact

SEQ ID NO: 989227 - DNA, 120 bp, Artificial Sequence
  ENSG00000286416_10 (sequence is synthesized)
tttgtcttcagggtgagaaatgttccggtccttaaggaaacatcgtgcagcagttgcatgggtcttccaggcgttcctcccaaaacattattttttttctttcactattgagttttaaaa

SEQ ID NO: 989228 - DNA, 120 bp, Artificial Sequence
  ENSG00000286416_11 (sequence is synthesized)
cttagcgttctgtcgctagcattgcatcttagttacacatcctctcccacccataacgtcaaatttaggagacgatacatccccaagctttcctgcattattttttgcagtaactggtta

SEQ ID NO: 989229 - DNA, 120 bp, Artificial Sequence
  ENSG00000286416_12 (sequence is synthesized)
ttcagtttactttctttaaactatgtccttctcaaactagtctcacctgttcgttactgtcgcacatttcctgcgaataacacgtttctgtagttctgttgttagagcctggcatacctc

SEQ ID NO: 989230 - DNA, 120 bp, Artificial Sequence
  ENSG00000286416_13 (sequence is synthesized)
tccccgttcctctttcccacaaggtcatcatgcagaggggattttggtctgagttaaaagccaggtattctttcaccatcttttctgtcgatagtcaaactactacaaagactactcaaa

SEQ ID NO: 989231 - DNA, 120 bp, Artificial Sequence
  ENSG00000286416_14 (sequence is synthesized)
tttagtagtttcttatttccctatagcttcgttatattagaatggataacttatatttgcattaccttgctgtaatgaacacacaccaagttttcatttaaaattatcaaggacaaatgt

SEQ ID NO: 989232 - DNA, 120 bp, Artificial Sequence
  ENSG00000286416_15 (sequence is synthesized)
cctctgaatttaaaaatgtgtatgtagtaaaatataactcagcatttcttgattacatatcattaaaatatgaatggtactatctgagccaccagaatcagcagtgaaggtattatatta

SEQ ID NO: 989233 - DNA, 120 bp, Artificial Sequence
  ENSG00000286416_16 (sequence is synthesized)
ataaaaaggactaagaatcaggactgttttaagggaactggaaccgaagaggatctactatttcatcctaggctagttaacatgaaatagtgaattaaaattgaaagagcttacatggat

SEQ ID NO: 989234 - DNA, 120 bp, Artificial Sequence
  ENSG00000286416_17 (sequence is synthesized)
gcttcatatctgagctactttggcagggatgtttcaagaggatgtagggaacagtgtgttctgtactaaaggaaaacccctgcttggaacaaaggtgttgctgagtagttctgccagaga

SEQ ID NO: 989235 - DNA, 120 bp, Artificial Sequence
  ENSG00000286416_18 (sequence is synthesized)
aggcagaattttatttcacaggaaatgtgaatctgaaagtattttactagtaattagcttttaaaatagcaagtgacttcatgttcttcatttatgcttggaagctggacatggaatttg

SEQ ID NO: 989236 - DNA, 120 bp, Artificial Sequence
  ENSG00000286416_19 (sequence is synthesized)
tggggaatttttctgacttttgtgaaattgttagggacacgccatattctagctaagaaataaagatgtaccaaactcggctttcacctgagacatcacccactgcctacggaacagtcc

SEQ ID NO: 989237 - DNA, 120 bp, Artificial Sequence
  ENSG00000286416_20 (sequence is synthesized)
taaggcgatggtgagccaagatattaagggatatcaactaagtgtcctgagttggtgatgttctagcggggaccccagctccttgtactttcatcctcatctccagtgaaattctcacag

SEQ ID NO: 989238 - DNA, 120 bp, Artificial Sequence
  ENSG00000286416_21 (sequence is synthesized)
gattcatcatcatgacagcactcgctaagtgttcaatcttcttgtcctcatttgtagatggtaaaactgagacacagagaggttaaaggtctggccaaaggctcacagttagtaactagt

SEQ ID NO: 989239 - DNA, 120 bp, Artificial Sequence
  ENSG00000286416_22 (sequence is synthesized)
gggagacaagattggtgcctaggcaatctgacctcaaagccacttctcttcccatatttgaagacattaaactgggacattggcgtgagtgactgatatagacagattctgtcacatccc

SEQ ID NO: 989240 - DNA, 120 bp, Artificial Sequence
  ENSG00000286416_23 (sequence is synthesized)
tggctgctgttatcactggtaagttgcggcttagatctctacctcagcctttcactgatgcacattctcagttttactaggtaacacataatagttttctaaagtgataccaatttaaac

SEQ ID NO: 989241 - DNA, 120 bp, Artificial Sequence
  ENSG00000286416_24 (sequence is synthesized)
tccaaacactacataagagtaccttttgttgaatgtttaaattttttgctgacctgatatatatgaaatggtacctcgttatggttttaattgcatttccccgatttttaatggagaatt

SEQ ID NO: 989242 - DNA, 120 bp, Artificial Sequence
  ENSG00000286416_25 (sequence is synthesized)
tttcatgtttcggggccatttatgtttcctcttctatgaaatgcctgttcatgtcttttgcttatttttatattgggttgtttatccctttttgtattgttttgtaggagtccttaacat

SEQ ID NO: 989243 - DNA, 120 bp, Artificial Sequence
  ENSG00000286416_26 (sequence is synthesized)
attcaaatattaatttttatctcctgtgtgtgtatcaagtatcttcttttagttcattttcttgtcttcctttagagcccttagacaagtagaatttcttaatttcaaaggagttgaatt

SEQ ID NO: 989244 - DNA, 120 bp, Artificial Sequence
  ENSG00000286416_27 (sequence is synthesized)
tattaatttttccccgaagattctaaactttataaaaacatttcatgtatcttcccctccccccaagatgggaaacatattcttatgcactatcttctcaaaaatgtataatttttccct

SEQ ID NO: 989245 - DNA, 120 bp, Artificial Sequence
  ENSG00000286416_28 (sequence is synthesized)
tcacaatgaaaccttctatctaatttgaatagatgatttttatgaatggtgggaggtaagggttcaacctaaatttttttttaatccattgcataaccaaattccctagtagcatttatt

SEQ ID NO: 989246 - DNA, 120 bp, Artificial Sequence
  ENSG00000286416_29 (sequence is synthesized)
tccattgcataaccaaattccctagtagcatttattgcataattcccctgtccctactgatcttcaatgcctgtcactctgtcatgagccaaggttttttttgttttgtttttttgtttt

SEQ ID NO: 989247 - DNA, 120 bp, Artificial Sequence
  ENSG00000286416_30 (sequence is synthesized)
ttctgttttattccattggtcttccttgtctaacactatatcagttccacactgccttagttactacagtttttgaattagccctggtaggggttgggagagctctttaccttattctcc

SEQ ID NO: 989248 - DNA, 120 bp, Artificial Sequence
  ENSG00000286416_31 (sequence is synthesized)
ttcaagagtgttttggctgttcctagttctttgcttttctgtatacattttagaatcagttttccaggtaccataaataatgctgttaatattttgattcaattgcattaaagctataga

SEQ ID NO: 989249 - DNA, 120 bp, Artificial Sequence
  ENSG00000286416_32 (sequence is synthesized)
ttaatatgggaagatgtgatatcttaatgatattgttttatttcccatttgtgcacatggaatatctctctgcttattaagatcttacaaaaaagctgaaaattttctcaaaaagcactt

SEQ ID NO: 989250 - DNA, 120 bp, Artificial Sequence
  ENSG00000286416_33 (sequence is synthesized)
gcacatattttgtcatattaattcctaggtatgtcatctggttcataaaaacctcatttacagctccccagtctttctttccctgtatgttgttggatgctcacaataactttggaagtc

SEQ ID NO: 989251 - DNA, 120 bp, Artificial Sequence
  ENSG00000286416_34 (sequence is synthesized)
acaagttgaacaggatggcatctccatcagtgggcccacaagtgacttggtggagtagagccccatctctcacctatttcccattaaattagctttacctgctaagaaacaaattctttt

SEQ ID NO: 989252 - DNA, 120 bp, Artificial Sequence
  ENSG00000286416_35 (sequence is synthesized)
gttaagccactgagatgtatctattacaacaaataagattatcttaattaatgcatattaattttaatcttggaaatctgataaacatttattaatcttaatatttacctgttgattctt

SEQ ID NO: 989253 - DNA, 120 bp, Artificial Sequence
  ENSG00000286416_36 (sequence is synthesized)
gtgcaatgttgaataaaaccagctatggtgtaccatttgccttggtcttgataaggaagggagttatttaacattttaccattagctgctgttcttggtgtaggtattttgtatatattc

SEQ ID NO: 989254 - DNA, 120 bp, Artificial Sequence
  ENSG00000286416_37 (sequence is synthesized)
tttacaataatatgaaagttctcttattactagtttgtaaagagattttatcataaatggatgttatttaacgatgtgtttgcatctttggaaagatgttttttctccatgaaattgata

SEQ ID NO: 989255 - DNA, 120 bp, Artificial Sequence
  ENSG00000271761_0 (sequence is synthesized)
gttgcatgtctttgttcaagtttgctattgttgtacgtttttaaaatcgtgattaatacatagtaaacaacattataggttgtttattaatttcaaatacacagagttttttcctgaaat

SEQ ID NO: 989256 - DNA, 120 bp, Artificial Sequence
  ENSG00000271761_1 (sequence is synthesized)
aaatatgatcagatagtagacattgatttgataactttaaactgaaatatatagttatttaatttaaaatcaaacctacaaaaattgtaaagagatacagaaggtactgacttatttggt

SEQ ID NO: 989257 - DNA, 120 bp, Artificial Sequence
  ENSG00000271761_2 (sequence is synthesized)
tgttacacacatatgtatgtttataaatatatgtatatgattgtttgtgtatgtaagtatatttctcctaaatccctcacttcagtcttatttcttctataatctagtgttgagaggtga

SEQ ID NO: 989258 - DNA, 120 bp, Artificial Sequence
  ENSG00000271761_3 (sequence is synthesized)
acattcataatatatccatggttgtaaccaaaatctctgattgtaattaatccacatattatttctttgttttatagtagattaacagaaaaaaaattcaaataaattagattattccct

SEQ ID NO: 989259 - DNA, 120 bp, Artificial Sequence
  ENSG00000271763_0 (sequence is synthesized)
cccctcaagaaatatggactccgtggcagatgaatgtagatgccggttctggaggctcttctgggtagaccagaagcacccacctcctccgctcacaccctagggcacagccaccttccc

SEQ ID NO: 989260 - DNA, 120 bp, Artificial Sequence
  ENSG00000271763_1 (sequence is synthesized)
ttctgtgacagtccagagaggaaatattgtaaactctgcagatcccacaatcacggtgataactcctcaaccctgctgttggggtggaacagcagccacagcaagaaatgcttggccatg

SEQ ID NO: 989261 - DNA, 120 bp, Artificial Sequence
  ENSG00000271763_2 (sequence is synthesized)
gctgtgttccagtacaatgttatttatagacactgaaatttgaattgcatgttactttctcatgtcataaaatagtattcttcctttggttctttttcaaccattaaaatgtgaaaatca

SEQ ID NO: 989262 - DNA, 120 bp, Artificial Sequence
  ENSG00000271766_0 (sequence is synthesized)
ctacatcaaagcttcattcagaaaccaaaagggttatgcaaaaagtggaattctacctcaatacaaactcaggaagaactagacatccttcaaggctggaatgaaaaacctaagctcctg

SEQ ID NO: 989263 - DNA, 120 bp, Artificial Sequence
  ENSG00000271766_1 (sequence is synthesized)
ctctctgacccagcagagatccatctgtgggatgtccaggttagagaatacccagagaggcaaatagcagtttgacttgagccttagccctcataccaagagcacagtttgattttggct

SEQ ID NO: 989264 - DNA, 120 bp, Artificial Sequence
  ENSG00000271766_2 (sequence is synthesized)
tggctataagcatgtatgcctaaagtggaatgcattgtatagaaatgcttgaatttgaatcatttcttagatgtctggcattgtgatctttacaaacttttaataaatggcaatcaaccc

SEQ ID NO: 989265 - DNA, 68 bp, Artificial Sequence
  ENSG00000279516_0 (sequence is synthesized)
gctgcattcaaggcctgtaatcccagctctttgggaggccatggcaagaggatcacaaggtgactcga

SEQ ID NO: 989266 - DNA, 120 bp, Artificial Sequence
  ENSG00000279516_1 (sequence is synthesized)
ctttgggaggccatggcaagaggatcacaaggtgactcgaagaattcttccaaaaagcgtgtgaaaagggagccctactctactaccaaggtaaagcagcctgtctttgcctaagataat

SEQ ID NO: 989267 - DNA, 120 bp, Artificial Sequence
  ENSG00000279516_2 (sequence is synthesized)
acaagaagatatgctgtgcacaccaaccagtgtcggagacctcatggctccccggtaaagaagaagatgtacccacaagaagatgacttccatcatacaatcttcagcaaccttgaaaga

SEQ ID NO: 989268 - DNA, 90 bp, Artificial Sequence
  ENSG00000279516_3 (sequence is synthesized)
gaggagatggagagaggccagtcaacgtgagggtggtgcaggtggcccctctgaggcgtgaatctagtaagtattctggaatcacttgcc

SEQ ID NO: 989269 - DNA, 120 bp, Artificial Sequence
  ENSG00000279516_4 (sequence is synthesized)
gaggcccgggcagcatcggcggcgtggtcagagcgagtctcggagaagatgtggtggcttccgtttgttggtggaggaggtggcaggcctcggcggtgactcgaagaattcttccaaaaa

SEQ ID NO: 989270 - DNA, 78 bp, Artificial Sequence
  ENSG00000279516_5 (sequence is synthesized)
ggagatggagagaggccagtcaacgtgagggtggtgcaggtggcccctctgaggcgtgaatctatgactcctcactac

SEQ ID NO: 989271 - DNA, 120 bp, Artificial Sequence
  ENSG00000279516_6 (sequence is synthesized)
ctactcaggtggagaacctgaagggccaagggagtggccccagctcctgagttcctgaatgaaaaagtgaaaacacgaacccaggagtgtgggccagtgctgacactgacatgcacttag

SEQ ID NO: 989272 - DNA, 120 bp, Artificial Sequence
  ENSG00000279516_7 (sequence is synthesized)
tcatggagtgttcaccaccacacagggagttcagcattcatctataagccctaaagcaccgagcccaaaaggccccagacactgcccatcatcataaagtggcctctgtggtcacacaac

SEQ ID NO: 989273 - DNA, 75 bp, Artificial Sequence
  ENSG00000279516_8 (sequence is synthesized)
actgcccatcatcataaagtggcctctgtggtcacacaacccagggcagttataggctcatctccccacggacag

SEQ ID NO: 989274 - DNA, 120 bp, Artificial Sequence
  ENSG00000279516_9 (sequence is synthesized)
gcaggatgtgcaggtttgctacatatagaaatgtgtgtcatgagagtttgttgtacagattattgcatcacccatacattgagcctaatatcagctatttttcctgatcctccccctcct

SEQ ID NO: 989275 - DNA, 70 bp, Artificial Sequence
  ENSG00000279516_10 (sequence is synthesized)
taaaacaagtgtaaatctcatacaacaggcaaatgcagaagcaatgtggtctcgcaagttgtaaagagga

SEQ ID NO: 989276 - DNA, 120 bp, Artificial Sequence
  ENSG00000279516_11 (sequence is synthesized)
acctgggtagaagacatgagggaactctgtcactgaatcacggcagagttcaaggccacttgtagactatttcatgttacagaaggtagcctttagctactaagcaaaggcctcggtttc

SEQ ID NO: 989277 - DNA, 120 bp, Artificial Sequence
  ENSG00000279516_12 (sequence is synthesized)
tcatttctttcctgttcatcttcttggtcatccttcttccgcaagggaaacgagcccaagcaaaaggcagtttcaatattaatttgaccgaggttttgtgcagtttattatcatccaggt

SEQ ID NO: 989278 - DNA, 120 bp, Artificial Sequence
  ENSG00000279516_13 (sequence is synthesized)
cgaggttttgtgcagtttattatcatccaggtaatcaggtgcaacccagtctgcctagcagcccccctctctctgctctgtgttttcatttaataaacattttggtctacttactatgtg

SEQ ID NO: 989279 - DNA, 77 bp, Artificial Sequence
  ENSG00000279516_14 (sequence is synthesized)
gagaccaagtaaatgagatagaatctttatgttggcagctaagttagatttatgtatgtgtgaatgcatactgaaag

SEQ ID NO: 989280 - DNA, 120 bp, Artificial Sequence
  ENSG00000273619_0 (sequence is synthesized)
ggcaaggaggttctcggaccccagcctgctggccctggggcgcggggcgtcgtgggggtcgttgtcgttgagggtcgttgccgtgtgtggcgtcttagcctggcccctgggttgtgcccc

SEQ ID NO: 989281 - DNA, 120 bp, Artificial Sequence
  ENSG00000273619_1 (sequence is synthesized)
acggacgcagtcgacccctctgagcgcctcgggagccccgaatagcagctgggagaaggggcgaggactgagcctcgctgcccgctgccggccgggctagagatacgggcgtgcccccca

SEQ ID NO: 989282 - DNA, 120 bp, Artificial Sequence
  ENSG00000273619_2 (sequence is synthesized)
cgtgcacgtagccgctgcgagcggaggcctgctcacctggtgcctgctactcactcccccgggccggtgggcgaaggacacccgcaggaactcggcagaggagaaattcagacggctccc

SEQ ID NO: 989283 - DNA, 120 bp, Artificial Sequence
  ENSG00000273619_3 (sequence is synthesized)
gagggtaggaaaagaccccggcccaccgtggaatctgaaacacccgaccactctgccatcccatgtttcaccagtcagacccccagggcagggcaggggaagcagaatgcaaactggggc

SEQ ID NO: 989284 - DNA, 120 bp, Artificial Sequence
  ENSG00000273619_4 (sequence is synthesized)
accgtttccctgaagcgtgttggccgcgtttgtcgtagtgctagaggtgcatacccttggaccccgaaaacccattcctgggaatttgctccaaggaagtaaagatgttacaaagatgga

SEQ ID NO: 989285 - DNA, 120 bp, Artificial Sequence
  ENSG00000288002_0 (sequence is synthesized)
gacttgataggtggaaagccattcatggattgaattgctttcaatccctgctatttcagaaacttgcacatgttaagattggttggaagcttttaaaccctctaaaatgtcagacgattt

SEQ ID NO: 989286 - DNA, 120 bp, Artificial Sequence
  ENSG00000288002_1 (sequence is synthesized)
gggcaaagagttcttccattcggttgcgctgcttcaaaaataaggacactctgctatcaactaccacctgctatgactcctcccaagctgaatgctcagggatgaaagtgaggacccagc

SEQ ID NO: 989287 - DNA, 120 bp, Artificial Sequence
  ENSG00000288002_2 (sequence is synthesized)
tcctttgctctggttataagtggtctgctgcctcatggactggctgtgcagtgtggaaaatcatctgtcctgcctcttaaccaacttgataatgaagactcggtaaaaataggacagtca

SEQ ID NO: 989288 - DNA, 120 bp, Artificial Sequence
  ENSG00000288002_3 (sequence is synthesized)
attttaaaaggcagcatgagtcacgcgtgtgaggctgcacagtcgcagaaggtggtttgtatggaaccaaattcactttcagaaacagtctcccagtgcagaagcacctcctctcctcac

SEQ ID NO: 989289 - DNA, 120 bp, Artificial Sequence
  ENSG00000288002_4 (sequence is synthesized)
ccctgccagtgttcactgtcttacaggcatcttttcttcaccagttcatcgttttcaaaagaagtttaaaaagagacttggaataaaccaaaatcaaacaaacacagcaaacacctcact

SEQ ID NO: 989290 - DNA, 120 bp, Artificial Sequence
  ENSG00000288002_5 (sequence is synthesized)
tacactgcagttaaatgactggaaagttacctgccttccttgaggtgggaaggttgccccatggaggctcacagtggtccttcagagccccagagacactcacatcggtgagaaaatgca

SEQ ID NO: 989291 - DNA, 120 bp, Artificial Sequence
  ENSG00000288002_6 (sequence is synthesized)
gttgggctggcaacatatttcacactttcatgtttcaatgccttaggctggtcttctgaacttcccaggaaaagataaaatgctgtaagttcccaggaaggtgcgtgagccaccctttgg

SEQ ID NO: 989292 - DNA, 120 bp, Artificial Sequence
  ENSG00000288002_7 (sequence is synthesized)
cttagggggctttgcagcctctcctttaattcaagtagaaaactctccttctgcatgcttattcacagtagaaggcaaatgtgcacatgcacacacatgcgccaaatagacacacataca

SEQ ID NO: 989293 - DNA, 120 bp, Artificial Sequence
  ENSG00000288002_8 (sequence is synthesized)
catacataccacatgcacacacactaaacacacagacacatcacacacagacacacatcctacacacacaaatacacgccacacacatcctatacacacagaaacacaccacacacgccc

SEQ ID NO: 989294 - DNA, 120 bp, Artificial Sequence
  ENSG00000288002_9 (sequence is synthesized)
cacatagacacatacacaccacacacactccatacacacagacacacaccacacaccccatacacacagacacacacaccatatacacaccacataggcacatacacactacacagatac

SEQ ID NO: 989295 - DNA, 120 bp, Artificial Sequence
  ENSG00000288002_10 (sequence is synthesized)
acatatacaacacctgcccgtacactaacatatcacagacacatcacacaccacatgcacacacactgcacacacagaccccacacacagacacacaccctatacacacacacaccatat

SEQ ID NO: 989296 - DNA, 120 bp, Artificial Sequence
  ENSG00000288002_11 (sequence is synthesized)
aaaccccacatagacacagacacacatatacaacacctgctcatacacgaacacatcataaacagacatatcacacaccacaaaaaccatgccacatagacacagagcacaacatacaga

SEQ ID NO: 989297 - DNA, 120 bp, Artificial Sequence
  ENSG00000288002_12 (sequence is synthesized)
acacatcacacacgacaccacatgcacacacacagacacatgccacgtacacacataccacacacatacagacatcacagataccacatacacagcacacacacacttcacacacacaca

SEQ ID NO: 989298 - DNA, 120 bp, Artificial Sequence
  ENSG00000288002_13 (sequence is synthesized)
catcacaaacatacttcacacactacgagacactgagtcacacatacacacaccgcatgcacatacacaccctacaaacacaccacacactacacattcacacaccgccaccacaccctt

SEQ ID NO: 989299 - DNA, 120 bp, Artificial Sequence
  ENSG00000288002_14 (sequence is synthesized)
acaccacacacacacaaacacatacacgtaacacatataccgaacacatgccacacacattcacacaccacgtacacatatacacacagattgttttttgaagaatgcaaagagtaaata

SEQ ID NO: 989300 - DNA, 120 bp, Artificial Sequence
  ENSG00000288002_15 (sequence is synthesized)
gtgattaaagaccatttaaacctgagatccaaatttgaaaatagcttaatttctcctaagttgactttttagaattacactatttcacattcctatagtgacttacttaggatgagtttt

SEQ ID NO: 989301 - DNA, 120 bp, Artificial Sequence
  ENSG00000288002_16 (sequence is synthesized)
acttaccaagaattcttacaaattacaaggaagaaaaatgtaaaaactgtaattttgatcacgaacgtatcttatcttttctacgcaaggcatacattatacagaaaataatgacatcga

SEQ ID NO: 989302 - DNA, 120 bp, Artificial Sequence
  ENSG00000288002_17 (sequence is synthesized)
ctcagtatcttttcctctgctgaccttaaaggataaatgtcttttacaatggcatattttcccctatgagattgtaaatatgtcttagtgcatatgaatgctgcttctgctttctgtgtt

SEQ ID NO: 989303 - DNA, 120 bp, Artificial Sequence
  ENSG00000288002_18 (sequence is synthesized)
ataaaaatattacaaggcactctccattcctctggaattcagaaattttcacagagtcttcactaagtagggacaaaagaatgcaggctttggagaagtgatcatggagatgctatcctg

SEQ ID NO: 989304 - DNA, 120 bp, Artificial Sequence
  ENSG00000288002_19 (sequence is synthesized)
acagggagagctgaagaagcccattgagctgcaggttcacaagttcaattattttcagagatgatagcaactctgtaaacacaggccacagatgtgtcactagccattgttcagaaggcc

SEQ ID NO: 989305 - DNA, 120 bp, Artificial Sequence
  ENSG00000288002_20 (sequence is synthesized)
aagaatattagaaagaatcttacaggaaagagaagttgtctttctttacacttcacctggtgtgagtatcaccttgggccagataaccataaggaagatggctttaagacaatcaaacac

SEQ ID NO: 989306 - DNA, 120 bp, Artificial Sequence
  ENSG00000288002_21 (sequence is synthesized)
agctgctatggaaaacggtatggaggtttctcaaaaaattgagaagagagctacatataacccagcaattccatgctgggtgtatattcaaaggaagtgaaatcagtgttgcagaaagat

SEQ ID NO: 989307 - DNA, 120 bp, Artificial Sequence
  ENSG00000288002_22 (sequence is synthesized)
acctgtactcccatgctcattgcattattcactatagccaagatgtggaatcaacccaaatgtccatcaacagaagaatgagcaaacaaaacgtggtatacacaaataatagttcaatat

SEQ ID NO: 989308 - DNA, 120 bp, Artificial Sequence
  ENSG00000288002_23 (sequence is synthesized)
ttttcaaccttaaaagagaaggaaatactgccattcatgacaatatggatgcatctgaaaaacattacattaagtaaaataaactagtcacagaaggatcaatgctatgtgactctgctt

SEQ ID NO: 989309 - DNA, 120 bp, Artificial Sequence
  ENSG00000288002_24 (sequence is synthesized)
atacgaggtatcttcaatagtcaaactcatagaaacaaatccatcactgagtaccagaggcttgagggagggggacattgttgttcaattggtgtaaagttcagtcattcaagacaaata

SEQ ID NO: 989310 - DNA, 120 bp, Artificial Sequence
  ENSG00000276269_0 (sequence is synthesized)
ctgctttctgtgctgttctcaacaccagggtcctttcctccagaagtgggacctcttaagtgtgagaaaagaacttgttcttttaagatggtacctgaatgacttttgaaatttaattag

SEQ ID NO: 989311 - DNA, 120 bp, Artificial Sequence
  ENSG00000276269_1 (sequence is synthesized)
aaggaggtgattgaggttaaatgaaaccataagaatggagctccaatccagtagtgctggtgtccttgcaaagaagaggaagaggcatcagagatgcacaagcatggagaaaaggccatg

SEQ ID NO: 989312 - DNA, 120 bp, Artificial Sequence
  ENSG00000276269_2 (sequence is synthesized)
tgaggacacagcaagaaggtggctgtctgcaaacctggaagagtgtcctcactagaagccatccatgctagcaccttgaactccagaaccatgagaaaataaatttctgtttttaagcca

SEQ ID NO: 989313 - DNA, 120 bp, Artificial Sequence
  ENSG00000276261_0 (sequence is synthesized)
aaaaaagaaaaaaaaatcaaaagtgcttagtacgataatccagatccactctttgattctttatccagcccagtaaacaggatccacagtgaatctaaaggcgcgtcattaacttcaatc

SEQ ID NO: 989314 - DNA, 120 bp, Artificial Sequence
  ENSG00000276261_1 (sequence is synthesized)
tagatttaggcttaagtgcatgccctgttttctttccattgagcctggtgttcttcaaattaaaatacgccttgcaacattggggaacaccaacccccaaatcccttctcttcaacttta

SEQ ID NO: 989315 - DNA, 120 bp, Artificial Sequence
  ENSG00000276261_2 (sequence is synthesized)
ggaaaggagcattcataatccccatgatgcctgcagcttcaggaaagaagaaagggatgtatattctcttcagcctcaagaaatggctttgttttccctcccgtcaatgtttattcaccc

SEQ ID NO: 989316 - DNA, 120 bp, Artificial Sequence
  ENSG00000276261_3 (sequence is synthesized)
ccatagccctctccttgaggaacctggaataggaagaacatatctgtggccttgtagttgtccttcattagaagctggcatgaaagagtgtttaataaaatggagtattgatatacacaa

SEQ ID NO: 989317 - DNA, 120 bp, Artificial Sequence
  ENSG00000233479_0 (sequence is synthesized)
ctcggctcagctgcggacgggatctgctggagctgggtcacacctggggccctccgtgagcctggtctggtacggaagaaattccccctactgttctagaactcatctggtgtcaagtgt

SEQ ID NO: 989318 - DNA, 120 bp, Artificial Sequence
  ENSG00000233479_1 (sequence is synthesized)
gtcagtgacggggcactgagactgatgcaaaggagaaaggcaaggagagaaatgatttgcatcttagactggtgcaaattcacactttgtggaaaattaacaggttcctcacaagacacc

SEQ ID NO: 989319 - DNA, 120 bp, Artificial Sequence
  ENSG00000233479_2 (sequence is synthesized)
gccaccgtgaaaccagatgctccttagcctccccagggatgtgtcttacatgtgccaacagtgagcctgggctgcctctcaccctgagtctgtgttgctgtggaggcaccactctgcagc

SEQ ID NO: 989320 - DNA, 120 bp, Artificial Sequence
  ENSG00000233479_3 (sequence is synthesized)
cttcttcctctctgcaagcaggctgctacccacactggcttggacctctgccccagtcaaggggggcagagctatgacactagtctcagagtttcaacaatgcctgttggaaaggaaaac

SEQ ID NO: 989321 - DNA, 120 bp, Artificial Sequence
  ENSG00000233479_4 (sequence is synthesized)
ccacctatttattgtatcctttctaactcacttaggaaggatgcacaacatcttaaatatcactggagataagaagtcaactctgacatgagtctgcacaaataaaccttatggaaataa

SEQ ID NO: 989322 - DNA, 120 bp, Artificial Sequence
  ENSG00000233478_0 (sequence is synthesized)
gcttagatcagggaacatccgaggcaggcgggtgccttcgcagctccagtccttcctcagccttgcaacagcctcctgctcttcccagtgcatcccctctgggcagcaggctcaggcacg

SEQ ID NO: 989323 - DNA, 120 bp, Artificial Sequence
  ENSG00000233478_1 (sequence is synthesized)
acgcaggggtgtctggcagggccagggccactgatgctgctgctggccaggactgaaaaatgcagactgcaggcaacataagcaagcaggacaaccccgctcagattgtgtgtgtgtgta

SEQ ID NO: 989324 - DNA, 120 bp, Artificial Sequence
  ENSG00000233478_2 (sequence is synthesized)
aagtttgatggaactgcacgggctgggggcgtctggggaagtatctataagtggcaatcggctgagcagctgggaggaacttcagagaagagacagaatattaagagccaccacctccca

SEQ ID NO: 989325 - DNA, 120 bp, Artificial Sequence
  ENSG00000233478_3 (sequence is synthesized)
cagccatctatgcagttcctcagtgctccccgcaccctctgcagcctggaaggcccaggacgatgagggcaccatctccaagcggccaggcctgggcccagcagggaggctgcaccgcac

SEQ ID NO: 989326 - DNA, 120 bp, Artificial Sequence
  ENSG00000233478_4 (sequence is synthesized)
acgggcgtggcgtcagaagtcagatgcgtttcggtgtagttggtgagatggccacagggtcctccaccacaagccctgcggggaccagcacggaggaaggaacaggaactccggttagct

SEQ ID NO: 989327 - DNA, 120 bp, Artificial Sequence
  ENSG00000233478_5 (sequence is synthesized)
ttccgcacctatgcaagaaggctaagtgcccagcactggctgctgaaaacgcagcgaacacagaggagaaagtccccgcacatttctcagttctgcaacagtgaactggaatagacatgc

SEQ ID NO: 989328 - DNA, 120 bp, Artificial Sequence
  ENSG00000233478_6 (sequence is synthesized)
accggccccatctcacctgctaccctgggggataggcagacctcaacattcattcttcaagatgctcacaccactgaagaaagctcagagtgatttgggcaagacagcaaaagccaaggc

SEQ ID NO: 989329 - DNA, 120 bp, Artificial Sequence
  ENSG00000233478_7 (sequence is synthesized)
tacttgttgccagagacagggactgctgtggcatcgagccttcaagacctccttagacatgcagcccagctgaggagctgtcttcaaacccaggcagggccaagaagcagggcggctctg

SEQ ID NO: 989330 - DNA, 120 bp, Artificial Sequence
  ENSG00000233478_8 (sequence is synthesized)
gtggcagcagtgagggctcagatatcggggaaatctggaaggatggctggagccagaatgccacttagacataagtggatggcagtttcagcaggaactttgccaaatgactctcccttc

SEQ ID NO: 989331 - DNA, 120 bp, Artificial Sequence
  ENSG00000233478_9 (sequence is synthesized)
agaggaacatggtgttatctatttggcccctgtgtgcttgtggtcactgagtaaagacaaaatacatcttcaccactctgcaatttcttcctttcctcgagagcaatgaagatgaacttc

SEQ ID NO: 989332 - DNA, 120 bp, Artificial Sequence
  ENSG00000233478_10 (sequence is synthesized)
tttcctgatgaaggagctagcctgtgaatcttcagtgtgtggccaggccagagatgcatcctgtttccagaaaggcgatggaggaaccactctgggcattctgctgggataaggaatgag

SEQ ID NO: 989333 - DNA, 120 bp, Artificial Sequence
  ENSG00000233478_11 (sequence is synthesized)
ctacaagcctgggttcctgcagcacagcccaagagaagaggcacaggacagtcctcaggtgagctcttgcactctcagtgggaagccagaaagcagacagctcagagcgcctggagctcc

SEQ ID NO: 989334 - DNA, 120 bp, Artificial Sequence
  ENSG00000233478_12 (sequence is synthesized)
ttggcagaggtggaatggtgagccttgaccaacgtcagaagatgggggagaaagaggctttccaatccttgatgccagcaagggaacaaagcccaggagcctgcagccagtgaagacgcc

SEQ ID NO: 989335 - DNA, 120 bp, Artificial Sequence
  ENSG00000233478_13 (sequence is synthesized)
ctcagcacaccaggcgaggggagaggacaaggggaaactgcaggaaagccccccagtggctgaggcatgctcaccagggtcagcaggcagtcaggtttggcagaatcagctagtaaaggg

SEQ ID NO: 989336 - DNA, 120 bp, Artificial Sequence
  ENSG00000233478_14 (sequence is synthesized)
aaaagcaggctggatgtggcacttggtctttctgctacctgactcaaccttctcccccaacctctggttgttctttaaaacactggtgttcccaaaggctctgagccctctccctttcca

SEQ ID NO: 989337 - DNA, 120 bp, Artificial Sequence
  ENSG00000233478_15 (sequence is synthesized)
cctttccatccaggttttcctcaaatggctctgtgctcaagccttcaagccctgactcgctaaactaggacctctaaatctacatctctcggccgggcgtggtggcgcatgcctgtaatc

SEQ ID NO: 989338 - DNA, 120 bp, Artificial Sequence
  ENSG00000233478_16 (sequence is synthesized)
ttgggaggctgaggcaggaggatcgctttgagcccaagagttcaaaaccaggctgggtcacatggcaaaaccccatctccacaaaaacgcaaaacaattagctgggtgttggtggcacgc

SEQ ID NO: 989339 - DNA, 85 bp, Artificial Sequence
  ENSG00000233478_17 (sequence is synthesized)
acaaaaacgcaaaacaattagctgggtgttggtggcacgctcctgtagtaccagaacggacgctacagtgagcccagatcgcacc

SEQ ID NO: 989340 - DNA, 120 bp, Artificial Sequence
  ENSG00000233472_0 (sequence is synthesized)
ttccggatgccaaagaggcaaatgtggaatgatgttaggatatcacctgtcataatattatacggattcagctcaaagcagaacctttctgcaaacacgtagggatatgaggaccaacct

SEQ ID NO: 989341 - DNA, 120 bp, Artificial Sequence
  ENSG00000233472_1 (sequence is synthesized)
aaaaaacttcattaagctttacctcaagttacagaaacatgataaagcacaatgcagtggaaacagcgtggagctggaggatgccagacgacattccagccctgattccactgctcatca

SEQ ID NO: 989342 - DNA, 120 bp, Artificial Sequence
  ENSG00000233472_2 (sequence is synthesized)
ccaatgtcaccctgggcaaggtactccagccctgctgctcagtttgctccactgtaaaatatgaagataatatcttccatgtaagatagttgtgggattaaatgagatcatgtatggaaa

SEQ ID NO: 989343 - DNA, 120 bp, Artificial Sequence
  ENSG00000233470_0 (sequence is synthesized)
cagcagaaacagatgaactctcaagaaataaagatctcgttttcatggaaatcatctcccaagaacaagagaaaaaaataaagaaaatgtatgagagacttgggattgctgtaaaagaca

SEQ ID NO: 989344 - DNA, 120 bp, Artificial Sequence
  ENSG00000233470_1 (sequence is synthesized)
acagcttcagacacagccaagtataatgctcttgcttcatgaagccaaacagccactttcttctctggaatgttaatctgctcttattggagttagcaaccccaggaggatcgcttcctg

SEQ ID NO: 989345 - DNA, 120 bp, Artificial Sequence
  ENSG00000235138_0 (sequence is synthesized)
acacacgagatgctggggcttccctggccccgactggctagccacaggcagggctggcaggaggaggccaccgccaccctgcgtgtcccaggagggcacggacagttgagaacgcccata

SEQ ID NO: 989346 - DNA, 120 bp, Artificial Sequence
  ENSG00000235138_1 (sequence is synthesized)
ggaacgctgcacagtggagaacgcatgcaggcctccaaccatggccagggccctgcggcgtggccccgtgtctacctgtaaaggtactgggacccaccacctggcaaggaccacgccggg

SEQ ID NO: 989347 - DNA, 120 bp, Artificial Sequence
  ENSG00000235138_2 (sequence is synthesized)
caggaggagaccaggaggcgacagtcagacagagaagctgaagaaaccagaaggcgtctgtgcaagagagccccacacagacactggaaagaaccagggcaacctgcagaccaactcgaa

SEQ ID NO: 989348 - DNA, 120 bp, Artificial Sequence
  ENSG00000235138_3 (sequence is synthesized)
agacctcccctagggcgacggaaatgagatgaggcaaacagcttcccgaccagagcccatgcaccttccacgtctgtgcagggagctcggggccacatcccgagatgggaaagacaactg

SEQ ID NO: 989349 - DNA, 120 bp, Artificial Sequence
  ENSG00000235138_4 (sequence is synthesized)
aggcttccacaaagaaattacaatgaaacagacactggccaggccagctgaaaatcagtgatggactacggtccaaatcaacgtggaggttccaacaagagaaggacggtggtggggtca

SEQ ID NO: 989350 - DNA, 120 bp, Artificial Sequence
  ENSG00000235138_5 (sequence is synthesized)
ccctaccccagcctgcgagtgccccagagggtgcacaagcaggacagccaccctgttgcagagtgtggtgctttcacaccatgttcaccccacctcagccctctggcccagacgtcggtg

SEQ ID NO: 989351 - DNA, 120 bp, Artificial Sequence
  ENSG00000235138_6 (sequence is synthesized)
gctcctctgccaggtgaggtgaggtgaggtgaggtgggagcagacagtggagaaacaccacaaacagcacaggtggtcggccagggccacgagcccttcagctcaccgatgccgagaccc

SEQ ID NO: 989352 - DNA, 120 bp, Artificial Sequence
  ENSG00000235138_7 (sequence is synthesized)
cacaatccccacaacaaacctgcaaggtcagaataattgcgcacgtgtacggacgactaagctgaggccccttcctccttcacctccggaatgccacctgagcgcaaaggctttgggaca

SEQ ID NO: 989353 - DNA, 120 bp, Artificial Sequence
  ENSG00000235138_8 (sequence is synthesized)
caacctgcaggcggccacacagcaagaagaccctgggaagttaaagaacgaggcgctcctgcttcccccaccctcaacggccagcaaggacacaaaggcagcccagggcagggccagccg

SEQ ID NO: 989354 - DNA, 120 bp, Artificial Sequence
  ENSG00000235138_9 (sequence is synthesized)
ccagccacaaggcccctccagaacccaaggtccagtggagactctgaaagggctgattgcagggcccccacggggtccacacaccagacacagaggcccatgcagaaaggcggtaagggg

SEQ ID NO: 989355 - DNA, 120 bp, Artificial Sequence
  ENSG00000235138_10 (sequence is synthesized)
cccccctggggtctgcacacccgacacagaggccctgcgagagggaggcatggagcgcccgcggtgtcggcacaccaggattcacagcccggctctccacccccagctgacctcgctgtg

SEQ ID NO: 989356 - DNA, 120 bp, Artificial Sequence
  ENSG00000235138_11 (sequence is synthesized)
aagagatggtttgtgctgagagcttagcaaggccgtcgtctaccgagtgcttcccaccacagcccatgcgcaggcatgagagtcatgcctcccgcaggccacagcttcactcatgcaagg

SEQ ID NO: 989357 - DNA, 120 bp, Artificial Sequence
  ENSG00000235138_12 (sequence is synthesized)
acattctgggggccgggacgtcctagccagtggctagaactgggtgtgaccatgggcccccttggctggggagaaaaggaggtgcccctagatcccaagtcccctggggccgcagcaaag

SEQ ID NO: 989358 - DNA, 120 bp, Artificial Sequence
  ENSG00000235138_13 (sequence is synthesized)
ggaggaggaccttgcatcactccagggtgccacgtggacgaacagaggtaacattgggagtgtggctggcagtgttggacattcagaacatgtctgcccaaaacaaacatggccttcgct

SEQ ID NO: 989359 - DNA, 120 bp, Artificial Sequence
  ENSG00000235138_14 (sequence is synthesized)
tctcccagctcccagaaacaaagtaaacagaaggatcacgtctggacaccagggaccagcccctgttacatccctgtcccccccaggccagagcctgaccactccgtgtcacctgcctct

SEQ ID NO: 989360 - DNA, 120 bp, Artificial Sequence
  ENSG00000235138_15 (sequence is synthesized)
actcctgtagtgactgtcaactttttggatttcagaaagccaaaccagcaagggaagccttttcccggggggtagaggtgtctctcctacacacacccctaccccagggtctgagatgac

SEQ ID NO: 989361 - DNA, 120 bp, Artificial Sequence
  ENSG00000235138_16 (sequence is synthesized)
atcccaaatcaaacccggtattctgcagagatacacaaaggttcaaactacagacagccttgtatcagctgtaaaggggggccagattttgctgcaaaagaaaaaacccagtatcccctc

SEQ ID NO: 989362 - DNA, 120 bp, Artificial Sequence
  ENSG00000278390_0 (sequence is synthesized)
gttccttgttttagctgacgacactcgagagcgccaattttcctagattcgattttgtggtttggaactgtggttttggaatccagagtagtcgcctcgttctagtatccaattgctcca

SEQ ID NO: 989363 - DNA, 120 bp, Artificial Sequence
  ENSG00000278390_1 (sequence is synthesized)
gcaccaactggtgaaaagaccatcattcttctactcagttgcatttgaagctttgtcaaaaaccagacacaattggagacacaggttcttctatcaaggccttgactggaatggcatatt

SEQ ID NO: 989364 - DNA, 120 bp, Artificial Sequence
  ENSG00000278390_2 (sequence is synthesized)
acattgctttgaggaaatgaggctgatgttgcagagctgataaaacccccacagaaaggccagcctacctctggtgttggccagattgagaaataaagggaaagagtacgaaagagagaa

SEQ ID NO: 989365 - DNA, 77 bp, Artificial Sequence
  ENSG00000278390_3 (sequence is synthesized)
attgagaaataaagggaaagagtactatgtcagcaggttccgtgatgcccctcaagccacaaaaccagcaagttttt

SEQ ID NO: 989366 - DNA, 120 bp, Artificial Sequence
  ENSG00000278390_4 (sequence is synthesized)
gttccttgttttagctgacgacactcgagagcgccaattttcctagattcgattttgtggtttggaactgtggttttggaatccagagtagtcgcctcgttctagacacaattggagaca

SEQ ID NO: 989367 - DNA, 80 bp, Artificial Sequence
  ENSG00000278390_5 (sequence is synthesized)
ttgcagagctgataaaacccccacagaaaggccagcctacctctgggtctcactctgttcaccttgaactcctggactta

SEQ ID NO: 989368 - DNA, 120 bp, Artificial Sequence
  ENSG00000278390_6 (sequence is synthesized)
caggtgtgtgccaccacgctcagctggatttagctaatattgaaccattgttcctaacactgatttaacaaatactgaaccattactgccaagtggttcagaatctactaaattagtgtt

SEQ ID NO: 989369 - DNA, 120 bp, Artificial Sequence
  ENSG00000278390_7 (sequence is synthesized)
tgctgcaactttacagaacataactactgggaataatgaaaatcaacttcattcgtgcatgtgtgtgtttattagtgattgaaaggtggctcccaaaaagatatgttcatattctaattc

SEQ ID NO: 989370 - DNA, 120 bp, Artificial Sequence
  ENSG00000278390_8 (sequence is synthesized)
atggaaccttattcggaaaaaggttctttgcagatgtaattaagatgaaattatcctggattatcaggataggccctaaatccaatgacaagtgtccttataacaaacaactaaagacag

SEQ ID NO: 989371 - DNA, 120 bp, Artificial Sequence
  ENSG00000278390_9 (sequence is synthesized)
taaaggagaagaccatgtgaatttgaagagtgttatcgtttcaagccgaggaacacctggagcaaccagaagctggaagatgcaagggaggattctccccagagccttcagagaggcaca

SEQ ID NO: 989372 - DNA, 120 bp, Artificial Sequence
  ENSG00000278390_10 (sequence is synthesized)
ggtaatttgttacagcagcctttggaaacttatacacagacacagacacacacacacacagaaacacacacacacaaatagttaacgaatatgtttttattttgtttgttttttgttttt

SEQ ID NO: 989373 - DNA, 90 bp, Artificial Sequence
  ENSG00000278390_11 (sequence is synthesized)
atagtttggaaacttatacacagacacagacagacagacacacacacacagacacacgcacacacacacacagttaacaaatatttttgt

SEQ ID NO: 989374 - DNA, 85 bp, Artificial Sequence
  ENSG00000278390_12 (sequence is synthesized)
gagacaagagtcttgctttattgctcaggctggagtgcagtggcgtgacctcagaattcactgcaacctctgactcccaggttca

SEQ ID NO: 989375 - DNA, 73 bp, Artificial Sequence
  ENSG00000278390_13 (sequence is synthesized)
gaatactcccgggtagctgggattataggtgtgtgccatcactaccagctactttttgtatttttagtagaga

SEQ ID NO: 989376 - DNA, 120 bp, Artificial Sequence
  ENSG00000278390_14 (sequence is synthesized)
aacaaatatgctattttttaggggagagctaacattttgttccacattcatcatttattagtgtgaatgacagaaagcagatgtgacttttctctttgaaaagtaactagtaactgggtc

SEQ ID NO: 989377 - DNA, 120 bp, Artificial Sequence
  ENSG00000278390_15 (sequence is synthesized)
aaggctggaatctaatacactgtttagctgattgttcttttgtatgtttcctctcaaatgactgcaacacagtgaagaaaatgattatacagcttttgttaatatatgttagagttggct

SEQ ID NO: 989378 - DNA, 120 bp, Artificial Sequence
  ENSG00000278390_16 (sequence is synthesized)
tgcagagctgataaaacccccacagaaaggccagcctacctctgctgggttgtagaccttcatgactgggatgtcacagatacaatagatttcatcattgaagacacatgcttcctgaaa

SEQ ID NO: 989379 - DNA, 120 bp, Artificial Sequence
  ENSG00000278390_17 (sequence is synthesized)
gtcactacgtttaagagaagcacagttcagccacatattgtggctaggatcatagcaaagcatgcgcttactgttgacagcataaagatagttctgaaccactatgagttcaaaggaata

SEQ ID NO: 989380 - DNA, 120 bp, Artificial Sequence
  ENSG00000278390_18 (sequence is synthesized)
cagaaaggccagcctacctctgaacagggtcatgcccttccaacatcccatcctgatggctggaatatggacatgagggtgaaccaccttggaccatgtgaaacagggtaacaccccaag

SEQ ID NO: 989381 - DNA, 120 bp, Artificial Sequence
  ENSG00000278390_19 (sequence is synthesized)
ggcagtagaacaggaagacaacaagcctgggtctcagataactttgtagctcaggatccacataaaagattggactgttatatgagaaatccttttaaagatctataaggtctctcttgc

SEQ ID NO: 989382 - DNA, 120 bp, Artificial Sequence
  ENSG00000278390_20 (sequence is synthesized)
atacaaccaacttatgtgctaactaatgtataaagtgagagaaaacctcatcctatgacatattctctgtactaataaagccttgaagacattgacactctggatcaggctgtgccttga

SEQ ID NO: 989383 - DNA, 120 bp, Artificial Sequence
  ENSG00000278390_21 (sequence is synthesized)
tggtgttccttgttttagctgacgacactcgagagcgccaattttcctagattcgattttgtggtttggaactgtggttttggaatccagagtagtcgcctcgttctattgagatggggt

SEQ ID NO: 989384 - DNA, 120 bp, Artificial Sequence
  ENSG00000278390_22 (sequence is synthesized)
tctcaaaatcctgacctcaggtatccaattgctccagcaccaactggtgaaaagaccatcattcttctactcagttgcatttgaagctttgtcaaaaaccagttgagtatattggtgtgg

SEQ ID NO: 989385 - DNA, 120 bp, Artificial Sequence
  ENSG00000278390_23 (sequence is synthesized)
atgtgtttctattctgtggatctctcttccgttccattgatctatgtgtctgttcctttgccagtactacactgggttgactaccatagcaatgaaataaaccttaaaatcaaacagagt

SEQ ID NO: 989386 - DNA, 120 bp, Artificial Sequence
  ENSG00000235131_0 (sequence is synthesized)
cctgggacagccttgggggctggaattggcagcagctggaggtggccggagacagcggagggaggggagtaagctgtggacatggtggggtggtccctcttcagcttttaagggcccaag

SEQ ID NO: 989387 - DNA, 120 bp, Artificial Sequence
  ENSG00000235131_1 (sequence is synthesized)
tccctgctgcagatccctgcgccacatgatatcagcaattgctgcaatttcgccctaagtactcttgtttcccctaataatccacgtttcatctccacaataaacattgttagaactctt

SEQ ID NO: 989388 - DNA, 120 bp, Artificial Sequence
  ENSG00000275512_0 (sequence is synthesized)
tgttttataggctctgttcatttttttaattgtgttaaaatatacatgacataaaatttacaatcttaactatttttaaatgcacagtttagtagtgtcaactacattcacattgtgcaa

SEQ ID NO: 989389 - DNA, 120 bp, Artificial Sequence
  ENSG00000275512_1 (sequence is synthesized)
acaatctccagtactcctgtaattctgcaaaagtgaaaccttatacccattaaacaactgcccattgccacctccccctccgcccagtccctggcaatcaccattctactttctgtctct

SEQ ID NO: 989390 - DNA, 120 bp, Artificial Sequence
  ENSG00000275512_2 (sequence is synthesized)
atgaatttgactactctaggtacctcatataagaagaataattcagtgtttgtattttttgtgattggctttttttcccttggcatcatgtcctcaggatcacccatggtgtaccatgtg

SEQ ID NO: 989391 - DNA, 120 bp, Artificial Sequence
  ENSG00000275512_3 (sequence is synthesized)
tcagaattttcttccttttgaaggttgaataatagtccattatactaaataccataggttgtttatctactcatccattgatagacatgtgtgttgcttcctccttttggctattgtgaa

SEQ ID NO: 989392 - DNA, 120 bp, Artificial Sequence
  ENSG00000275512_4 (sequence is synthesized)
taatgctggctattgtgaataatgctgctactaacatgggtgtccagatatttcttcaagatcctgctttcaattcttttgggtatatacccagaagtggaattgctggatcatatggta

SEQ ID NO: 989393 - DNA, 120 bp, Artificial Sequence
  ENSG00000275512_5 (sequence is synthesized)
attttatttttagttttttgaggaaccactgttttccatagcagttgcaccattttacttttctatcaataatgcacaagagttccagtttctccacatttttgccaacgcttgttattt

SEQ ID NO: 989394 - DNA, 120 bp, Artificial Sequence
  ENSG00000275512_6 (sequence is synthesized)
tccagttgtttgctttggttttttgctagtagccatcctaatgcatgtgaggtggtatcttgtggttttgattttcatttccctaattaatggtgtttagcattttttcaggtgtttgtt

SEQ ID NO: 989395 - DNA, 120 bp, Artificial Sequence
  ENSG00000275512_7 (sequence is synthesized)
agaccatttgtatatcttccttggagaaatatctactcaagacctttgcccatattttaattggttgtttgttgttgttgcattgcagttctttatgtattctggatattaaaccctgtc

SEQ ID NO: 989396 - DNA, 120 bp, Artificial Sequence
  ENSG00000275512_8 (sequence is synthesized)
tgaaatgatttgcaaatattttctcaagttctataggttgccttctcactctgttgattgtatcctttgatgcacaggagttttaaagtttgatgtagtccagtttatctattttggctt

SEQ ID NO: 989397 - DNA, 120 bp, Artificial Sequence
  ENSG00000275512_9 (sequence is synthesized)
tgttgcctgtgcttttggtttcatattgaataaatcattgccaaatccaatgtcttgaatattttcccctgttttattctgagagttttatagctttagctattgcatttaggtctttaa

SEQ ID NO: 989398 - DNA, 120 bp, Artificial Sequence
  ENSG00000275512_10 (sequence is synthesized)
aatttttgtatgatgtgtaagggtccaactttattcttttgcatatggatatccaatcttcccagcactatttgttgaaaagactttccccactggatggtctcagcatccttgttaaaa

SEQ ID NO: 989399 - DNA, 120 bp, Artificial Sequence
  ENSG00000275512_11 (sequence is synthesized)
agcatttgactatgtgtggggtagtttgtttctgagctctctattctattcctttggtctgtaggtctgtctttacaccagtaccatactgttctgattaccgtatttttggaataagtt

SEQ ID NO: 989400 - DNA, 120 bp, Artificial Sequence
  ENSG00000275512_12 (sequence is synthesized)
ttgaatttaggaagtatgagacctccaaatttgttctgtttcaagattgttctcattatttgggagtgcttcagattccctcaattatatttcaaaactttttgcttagaagtcatgcct

SEQ ID NO: 989401 - DNA, 120 bp, Artificial Sequence
  ENSG00000275516_0 (sequence is synthesized)
aaaaggcggagggagcgcatgtggcccaggtccacgcggaacacgccgcaaatctgctccagggcgcacacccgctgcggctcgtcccagcgtggggtctgcaggaggccgttgctgtcc

SEQ ID NO: 989402 - DNA, 120 bp, Artificial Sequence
  ENSG00000275516_1 (sequence is synthesized)
agagggggacgggggtcatgggggagtcatttaaacctacgcaccaagcttaaacacacatacaggcacggctgaatatgccctgtaaacacctgtgaataaatgaatgtatgaacccca

SEQ ID NO: 989403 - DNA, 120 bp, Artificial Sequence
  ENSG00000288004_0 (sequence is synthesized)
ctcacgagacctgacggttttatgaggggcttttccctcttttgctcagcatttctccttgctgccgccaggtgaagaaggacgtgtttgcttccctttctgccatgaatgtttcctgag

SEQ ID NO: 989404 - DNA, 120 bp, Artificial Sequence
  ENSG00000288004_1 (sequence is synthesized)
gcctctccagccctgtggaaataaatgattattattcttcaagaagaaatccactaacagcatccttttcagaatgaagatctgaaaaggaagagattatctcctctttaatgctgtatc

SEQ ID NO: 989405 - DNA, 120 bp, Artificial Sequence
  ENSG00000288004_2 (sequence is synthesized)
atgaggcaataaattattagcaaagagagcggagtatttacaggcagcgatatactaatgaacctaaaaatttggagaatatttggaaaaataaaagagcttgcatccctggaatgcaac

SEQ ID NO: 989406 - DNA, 120 bp, Artificial Sequence
  ENSG00000288004_3 (sequence is synthesized)
gaaaagaaaagtgctcaaaaagtgataatatacacagtgtcaatttgttcactgcttttttggaatgtttgaaatttattgtaagtagatcatttatccattagagtgactaagtgtttt

SEQ ID NO: 989407 - DNA, 120 bp, Artificial Sequence
  ENSG00000288004_4 (sequence is synthesized)
aagagtatagttctataatcccattcaattagcttttatttaatgggttccttctggtggtggacatttgagttgtttacagttattaagaataaaactactataaacatatatcaacaa

SEQ ID NO: 989408 - DNA, 120 bp, Artificial Sequence
  ENSG00000231830_0 (sequence is synthesized)
aggattctgccacaggacttttggagcaaattgatgcccctgaacacagaatgagtgacctggaagacgatgccaaagacacttcctcctgccccgttcttagcagatgatgtggcttcc

SEQ ID NO: 989409 - DNA, 120 bp, Artificial Sequence
  ENSG00000231830_1 (sequence is synthesized)
ttatttttgcctccctgctctgggggttgtagcttcttccttcaccaactctgttacttcagtatcccttttgcactttcagccctcaaaccccaagtaaatacgctttcacttcccttt

SEQ ID NO: 989410 - DNA, 120 bp, Artificial Sequence
  ENSG00000268015_0 (sequence is synthesized)
atgctgagaattctcgatgccaggctgcccaaggccacagtgagcatcagataagggagaactattcctttgttctgaagacttcatgactcagggctgagctcaatctaaatgacatgc

SEQ ID NO: 989411 - DNA, 120 bp, Artificial Sequence
  ENSG00000268015_1 (sequence is synthesized)
agcattattttctacttactatgtagtctagggttcctcctgtttctctgccacctagagatcaattcatttttatcaatatttgggaaaatcagtgacataaatcagctccagcatcaa

SEQ ID NO: 989412 - DNA, 120 bp, Artificial Sequence
  ENSG00000268015_2 (sequence is synthesized)
gattcttccaacatgaagctcacagaaggtgagttacctcagtccgttctcctgagagcactccctcagtaacacacttgaacgagtctccactcgggctctgcttctagagcacatgac

SEQ ID NO: 989413 - DNA, 120 bp, Artificial Sequence
  ENSG00000268015_3 (sequence is synthesized)
ccaagacaccaggcaactcctggttaactcaggactctgccagcgttcaataactcaagctatccttcaccctcgtctctcatactcactcctgtggtcgctgagtatcacctcattacc

SEQ ID NO: 989414 - DNA, 86 bp, Artificial Sequence
  ENSG00000268015_4 (sequence is synthesized)
ggattttctctttttgacaagttcctgaattattattttttttcatatggggtcttgctctgtcaccctggctggagtgcaatggc

SEQ ID NO: 989415 - DNA, 120 bp, Artificial Sequence
  ENSG00000268015_5 (sequence is synthesized)
gattacaggcgccctccaccacgcccagctaattttttcatatttttagtaaagacagggtttcactgaattggtcaggatggtctcgaactcccggcctcaggtgatccgcccacctcg

SEQ ID NO: 989416 - DNA, 120 bp, Artificial Sequence
  ENSG00000268015_6 (sequence is synthesized)
caatggacttaataacatcacattcatcacctgattggattcttccaacatgaagctcacagaagttgagaaaacacaccttgagaagggaagggagccaaggtcacacagcaagcaagg

SEQ ID NO: 989417 - DNA, 120 bp, Artificial Sequence
  ENSG00000268015_7 (sequence is synthesized)
agcgctgccaggcctctgaccctgggctctaccttcaaaggtcaaagattaaggtgcccacaagaagcccctgccagtgtgtgggggagtatccagacctcacctgttgtccaggatggg

SEQ ID NO: 989418 - DNA, 120 bp, Artificial Sequence
  ENSG00000254029_0 (sequence is synthesized)
acaaggccacactggtgtgtctcatgagtgacttctacccgagagccatgacagtggcctggaagatagatggcatcaccatcacccagggtgtggagaccaccacaccctccaaacaga

SEQ ID NO: 989419 - DNA, 120 bp, Artificial Sequence
  ENSG00000254029_1 (sequence is synthesized)
tatgcggccagcagctacctaagactggcacccgacagtggaagtcccacaacctctacagctgccaggtcacgcatgaaaggaacactgtggagaagacagtggcccctgcagaatgtt

SEQ ID NO: 989420 - DNA, 120 bp, Artificial Sequence
  ENSG00000254028_0 (sequence is synthesized)
aggagaggcggagaaggaaccgagcgggcagttgagggaaatctcggaggaggttacctgcgatcaaactggggctgcgtagtgttagggtcaggcagctttgaagtggaatccggatcc

SEQ ID NO: 989421 - DNA, 120 bp, Artificial Sequence
  ENSG00000254028_1 (sequence is synthesized)
gccactctcgctgcgtgatattgggcatgccatcaaagcgctctcaaccgaacgtctcgggtaaaatgggattagtgaagtctaccaaggtagttgtgaggatcaaaagagataacgcgg

SEQ ID NO: 989422 - DNA, 120 bp, Artificial Sequence
  ENSG00000254028_2 (sequence is synthesized)
aaaacgcctcacctggcacgttatagatcctaaatgcctagctattattatggagcccacaacctccatattttacaactgggaacacgggactcaaagagattaaaaaactaaatgact

SEQ ID NO: 989423 - DNA, 120 bp, Artificial Sequence
  ENSG00000254028_3 (sequence is synthesized)
tcaggtagtggtggagacccaggcttcaagttcaatactctttgtcctacaaagccttcccttaagcaggggtaataaaacatttcagaaaaaccaccttaaagagcatcgcttgtgatc

SEQ ID NO: 989424 - DNA, 120 bp, Artificial Sequence
  ENSG00000254028_4 (sequence is synthesized)
tgtggatcacttggtagtccccacctccctcccatccccgcaaaggtttagagctggacataagggccttggtgcaacttttggagggcagttgttcagcttctgaatttgcatctgaac

SEQ ID NO: 989425 - DNA, 120 bp, Artificial Sequence
  ENSG00000254028_5 (sequence is synthesized)
gagcaataaggaattttctgggaagttaagaatttccaataaatcttggactactctaaaatgcaccagaaattacgtggtcacactcgtgcagtgaaagaaggctttggcagtagcata

SEQ ID NO: 989426 - DNA, 120 bp, Artificial Sequence
  ENSG00000254028_6 (sequence is synthesized)
agacattaagcagaagtaggaaatgcagtgaggaagaagttgtaatgttttcaacagctgccactatggatctaggatgagagctttccacatgttgttaagaatgagagacagattact

SEQ ID NO: 989427 - DNA, 120 bp, Artificial Sequence
  ENSG00000254027_0 (sequence is synthesized)
cactgcggcgccccggcccggcagtgccagcagcaggtcggcaccgccagcgccacgcttctcgggggccctggtgttccatggggtaccaatccaaagggttcggctcaactgggtacg

SEQ ID NO: 989428 - DNA, 120 bp, Artificial Sequence
  ENSG00000254027_1 (sequence is synthesized)
cgacggcctctcgggcgcctcctgcaagcagggactcgcccggcgcgccccacgcctcatggacgccggcgcctgcacgtttcggcgcctctgcaggcccaggaagccagaggggtcacc

SEQ ID NO: 989429 - DNA, 120 bp, Artificial Sequence
  ENSG00000254027_2 (sequence is synthesized)
tcctgcacccctccgtttgacaacatatccaccgccgtttttcctttcaaaatacccggaccaatcgattagccctcgccggactcggactgcaggaagtgattgatcggctgtttggtt

SEQ ID NO: 989430 - DNA, 120 bp, Artificial Sequence
  ENSG00000254027_3 (sequence is synthesized)
tattgattcattaactacggtgcctccctgaccttctgctcctcgccagcgcacaagctcacaatccacaccctcctaagagaacctgctctcgccatccgcaggtctccctggcccaat

SEQ ID NO: 989431 - DNA, 120 bp, Artificial Sequence
  ENSG00000254027_4 (sequence is synthesized)
agtggggatatacctgagttgagctagaggattttatccctgttgggatgggggacgtctcgggaagtgtggtttctaaactaaaagactgcaggaagtgtcaactttagtgactgtcat

SEQ ID NO: 989432 - DNA, 120 bp, Artificial Sequence
  ENSG00000254026_0 (sequence is synthesized)
aaaatgttgcattcaattttggaatgtgaagagatcatttgaagccgatccagaggcctctaagatgtcttaaaactatttaaggggatccacgcaaaatgttgttcccttaaaagaggg

SEQ ID NO: 989433 - DNA, 120 bp, Artificial Sequence
  ENSG00000254026_1 (sequence is synthesized)
cacatctctctcacgtggagaaatactggtaagaggaaaagactttcaagtcaaccaacttgatgtggtgtgcaggtgctgcaatttacttcagacattgcatctataaaagaaagataa

SEQ ID NO: 989434 - DNA, 120 bp, Artificial Sequence
  ENSG00000254026_2 (sequence is synthesized)
gtgaccggatctcactctggcacctagactggagggtactggcatgaactcctgggctcagatgtcctcccacctccaccttctgagtagccggaattacaggaatgaaccatcatgctc

SEQ ID NO: 989435 - DNA, 120 bp, Artificial Sequence; identical to SEQ ID NO: 800719
  ENSG00000254026_3 (sequence is synthesized)

SEQ ID NO: 989436 - DNA, 120 bp, Artificial Sequence
  ENSG00000254024_0 (sequence is synthesized)
tggcaatgggcagacacagagcagaaagtggcggacttgggcggccacagagcctttatgaccgaagatggaactgaaatgccatcctgttatcaagaaggagcataagaacagctagag

SEQ ID NO: 989437 - DNA, 120 bp, Artificial Sequence
  ENSG00000254024_1 (sequence is synthesized)
gagagatgcaagattgaaatatcatggaatggactatggtttatcctctcttctggtcgtaaaacaccatcaggttgtaattgttcagatcagaaattcccaagcttttaataaagcctt

SEQ ID NO: 989438 - DNA, 120 bp, Artificial Sequence
  ENSG00000254024_2 (sequence is synthesized)
atccaggggcaactgccctgtcattgggaataagtagagtgtgtgggaaatatgttgtccttggtaaaacctccccttaggaaagaaggcaagagaattgagtaagagaatgatgggcca

SEQ ID NO: 989439 - DNA, 120 bp, Artificial Sequence
  ENSG00000254024_3 (sequence is synthesized)
aaaggagaaaatagagaaagaggctgcatgctacagagaacaagagcaaaattcaaaagcctggcacagttgggcttgaaaccatctgtgtaaaggggactaataatgctgacctcactg

SEQ ID NO: 989440 - DNA, 120 bp, Artificial Sequence
  ENSG00000254021_0 (sequence is synthesized)
gttgaaactgatagcgtttaatttttattctatcagaaagattttactgagaatcttctacaagcaatgtatagactaggctgaaacaattctagataatagtcatgggacattaaggat

SEQ ID NO: 989441 - DNA, 120 bp, Artificial Sequence
  ENSG00000254021_1 (sequence is synthesized)
cacacagtatttgtgaatcaaagatgcttcttgactaaaagacttagctctgatggccctttcctcaggaaagaagaatgtggataattatgtacttcaaatatcaggatgctcttttct

SEQ ID NO: 989442 - DNA, 120 bp, Artificial Sequence
  ENSG00000254021_2 (sequence is synthesized)
atctaacacaaacgtggcttagttcttgcagaagcagcaagatcctgataaagctacaactcgtttcacttctctttgagtccaatgctacaataacaagtatgtttaatgtgtgatctc

SEQ ID NO: 989443 - DNA, 120 bp, Artificial Sequence
  ENSG00000254021_3 (sequence is synthesized)
agattctcaaatataactaagaaatctatgaccattagtttatttccacaatgtttttattataacggattcaaaatactactgtgcatcaactaatattaataataatattcaacattt

SEQ ID NO: 989444 - DNA, 120 bp, Artificial Sequence
  ENSG00000287584_0 (sequence is synthesized)
cagctcatgttccctgggcgtctcagggttgaggccgctcgtgtggcgtggccgggggtattcagagcggagctggcgacgtggcttgtcacgggccaaatcccaggaggcgggtcagcc

SEQ ID NO: 989445 - DNA, 120 bp, Artificial Sequence
  ENSG00000287584_1 (sequence is synthesized)
gcctaccctggctggagggtctcgtggctgccctgggcctcatctaactgctgatcccctggagaattcgctttctcggacggtctgcgagttctttctgaggggtgtcggacccccctg

SEQ ID NO: 989446 - DNA, 120 bp, Artificial Sequence
  ENSG00000287584_2 (sequence is synthesized)
cgactctgcaggtgtcggtgtggcactgagatcatcttgcggccccatggcactgtgatttggtagcttgtgagaagtagtttcactaaatccgtaaatttaagttagcagctacagatt

SEQ ID NO: 989447 - DNA, 120 bp, Artificial Sequence
  ENSG00000287584_3 (sequence is synthesized)
cttatgtcttgacatttattcgcttatctctctttgctccccacaaattgagtaccaactatattcctggtatgagccattcaaggaatgtccagtctagtgggcagacatacatgaaag

SEQ ID NO: 989448 - DNA, 120 bp, Artificial Sequence
  ENSG00000287584_4 (sequence is synthesized)
tggatagctttactaacgtaggttagagttttaaagataaataggcattttctactacaaaaataggggtgggatggcaaatccggatccgaacagaaaggagatgcagcacggggacaa

SEQ ID NO: 989449 - DNA, 120 bp, Artificial Sequence
  ENSG00000287584_5 (sequence is synthesized)
ataatttgttgagaagaatgagtaataattacaggtcttgaagttcaaacttaggttgctgaagaagatgaggctggagaagaaaacaggagccaaatcacgaatcgtctatgccttgga

SEQ ID NO: 989450 - DNA, 120 bp, Artificial Sequence
  ENSG00000287584_6 (sequence is synthesized)
attgctccattccaataaaaatattttaaatttaatcattgacaacagttaagctggccataggctgaggattgaggatggtgggttgcacaaatatctgctgaatggagagctagaagg

SEQ ID NO: 989451 - DNA, 120 bp, Artificial Sequence
  ENSG00000287584_7 (sequence is synthesized)
aggatgacttcaagaagagtcagcaataggaacgcaatgaaagacaacctcaaattcattagtcagcctgtctcagctgctttttggtggctcacagctatgctaacctagcataaagca

SEQ ID NO: 989452 - DNA, 120 bp, Artificial Sequence
  ENSG00000287584_8 (sequence is synthesized)
gtgagaaatagaatacttcattttgagcagagcttcagaaaaccacaaatagtaaaagccctataaataatagctacagctgcaaaccaaagactaattattagtttttaactctatatc

SEQ ID NO: 989453 - DNA, 120 bp, Artificial Sequence
  ENSG00000287585_0 (sequence is synthesized)
ctactgtggggtttcaacatggctaaagttaccagaaagttgaagggatctagcaaagttatggagcaatcaaacccaagcacagaacaattaatctcaagcacaaaagggaagaacaag

SEQ ID NO: 989454 - DNA, 120 bp, Artificial Sequence
  ENSG00000287585_1 (sequence is synthesized)
ataaaacgactgcttcatgggagttcaagaaaaaaatcgtctagtactagtacagaaattccacaaaaggtaaaaagagtgaaaagagccaagaatcggccactagcaaagattgagtag

SEQ ID NO: 989455 - DNA, 120 bp, Artificial Sequence
  ENSG00000287585_2 (sequence is synthesized)
gagccaaagcactcaggccaggcccaagatgctgtaaaaaaaaatgacactcctacaagatacaacagcataatgaaacagcgatggtggtaattaaaacaaaatcaacatgttatgaaa

SEQ ID NO: 989456 - DNA, 120 bp, Artificial Sequence
  ENSG00000287586_0 (sequence is synthesized)
agaacaaggggaggggtgggctgtcctggaccaggtcagagatgggtcaggatgaaccgaatcctcccaaggccggcccgctgggatttcccgcgctcggagcaggatctgtgttccaca

SEQ ID NO: 989457 - DNA, 120 bp, Artificial Sequence
  ENSG00000287586_1 (sequence is synthesized)
tcccattcttccagaacaaggagggcgggcctctgaggacaggaagacggctgtgcaattggacttgctccccactggactgcatgccatattctgaaatgccctgctgggcaaagaaga

SEQ ID NO: 989458 - DNA, 120 bp, Artificial Sequence
  ENSG00000287586_2 (sequence is synthesized)
gtccagaaatcctattttcattcatttgtggggaatttggaccccaagaggccatagccagaagtccaagctaagatgtctatttggagacgcagttcctccaaggatctcccaagagcg

SEQ ID NO: 989459 - DNA, 120 bp, Artificial Sequence
  ENSG00000287586_3 (sequence is synthesized)
tcaggggaaagaaaagaaacagctccaattttcgaagcagactgtaacttactaagccttctctcacctctctggtctggagaactgactgaggcctggtgtggaagatcatctccattg

SEQ ID NO: 989460 - DNA, 120 bp, Artificial Sequence
  ENSG00000287586_4 (sequence is synthesized)
tattaaggagcccactgaggctctggactctgtgactcaccccaggtctcgcggaagggccaggggttcaccctcactccctcactcctgcgttgctgtgaagccgctctcacctgcctg

SEQ ID NO: 989461 - DNA, 120 bp, Artificial Sequence
  ENSG00000287586_5 (sequence is synthesized)
cacaggcacagtggggcctggcacaagggacactctcattgacagtaagttacagcactgagaggctgtctgtaggcagagtgcaattctgggggcccccgaaggagcccaagttgggcc

SEQ ID NO: 989462 - DNA, 120 bp, Artificial Sequence
  ENSG00000287586_6 (sequence is synthesized)
tctggggctcagagaactgagggacagctggcaggccatgtgagggagggggcccaaggtgggagggcaaagccacagggcagggtagcttggaggtcccctctccagcagccacataca

SEQ ID NO: 989463 - DNA, 120 bp, Artificial Sequence
  ENSG00000287586_7 (sequence is synthesized)
atttctccctttccctttcacataggcatggccttgcccaggtgggcacatgtgacacctcagccatgccaggtcttagaaggatggtggcattagggcctctggaacctgtctggcctc

SEQ ID NO: 989464 - DNA, 120 bp, Artificial Sequence
  ENSG00000287586_8 (sequence is synthesized)
atcagcacagtagactggagggaaggtcctagcaccagctgctcccttctcagtctcttctagggaagggaaaggagaatttggctgtgccccatccccacatcatggggcccttcgggc

SEQ ID NO: 989465 - DNA, 120 bp, Artificial Sequence
  ENSG00000287586_9 (sequence is synthesized)
aagaggggctggctgaaagctgttccctgtatgaacattcagagacctaaggaaatgtgtgccctgtacctccccatgcagcctctccccaagagcacatcctgctggcactcagaaagg

SEQ ID NO: 989466 - DNA, 120 bp, Artificial Sequence
  ENSG00000287586_10 (sequence is synthesized)
gggctcctgcatgtggggcacaggctcccgcctccctactctgtccctaaggctgctgcctttatcgggaagggaggcctcctggccacccagggggtgtccgatggaagggcagcatgg

SEQ ID NO: 989467 - DNA, 120 bp, Artificial Sequence
  ENSG00000287586_11 (sequence is synthesized)
agaagagggctacaggtgacgcccagcccctctccaggagggctcccagcctcccaggacccacctgagctgaaggacaggggcggaagggtaggggcaattctttcaggagctgagttt

SEQ ID NO: 989468 - DNA, 120 bp, Artificial Sequence
  ENSG00000287586_12 (sequence is synthesized)
aaacagtggcggccctgtgtgcttctctagcctttgtctcaggcaggctggagcccaggtcccaggcctttctggaccagcctgctttggaatgagccagctctgttggggaccctgtat

SEQ ID NO: 989469 - DNA, 120 bp, Artificial Sequence
  ENSG00000287586_13 (sequence is synthesized)
gttaccagctaagcttttgggtcacaggccctaaaccacctgcttctccctccttctcaagctgttcccttaactcctgcaggctgaggaagccccaaagcccttgactttcttacctgt

SEQ ID NO: 989470 - DNA, 120 bp, Artificial Sequence
  ENSG00000287586_14 (sequence is synthesized)
cacgcaaaatgttcacacctttctgaagtctctggggaccactagaaaggcaaagagctgaggatctgcctgggtctgcccggcagtgacaacatcttgtaggagtttgagcaaatgtca

SEQ ID NO: 989471 - DNA, 67 bp, Artificial Sequence
  ENSG00000287586_15 (sequence is synthesized)
cggcagtgacaacatcttgtaggagtttgagcaaatgtcagctcttcagttactttaaaaaacacaa

SEQ ID NO: 989472 - DNA, 120 bp, Artificial Sequence
  ENSG00000287586_16 (sequence is synthesized)
aataaaattaaaaaatcaaaacaaaaaacaaatgttcttatggtgaaaacatttgcaatctccttttaagtcaaggagtcgagtttacgagtgagactaagaggacatacccaaaagggt

SEQ ID NO: 989473 - DNA, 120 bp, Artificial Sequence
  ENSG00000287586_17 (sequence is synthesized)
cagggacatactttgtgattaggggaaagaagggctgcaggcagagtttgatccagccaagcaggggatgagaacactggagcaccaagtgcaggaagggccaggtctgagcattgcttg

SEQ ID NO: 989474 - DNA, 120 bp, Artificial Sequence
  ENSG00000287586_18 (sequence is synthesized)
agatgtctgttctgagtccctctgggtatccaactccaggctgcactcacagctcaagaaatgctggcccaggcagggcccagatgtggctcaacatggaaggtcagatatggctggtgt

SEQ ID NO: 989475 - DNA, 120 bp, Artificial Sequence
  ENSG00000287586_19 (sequence is synthesized)
tttcctcctgggaacacgggtcctttccccaggcttctggcttctgaaaggtggcctgggggtggacaatgcctttgctaggtgcagaggggcagccccgcagaggttcctgatatctgg

SEQ ID NO: 989476 - DNA, 120 bp, Artificial Sequence
  ENSG00000287586_20 (sequence is synthesized)
gttaacagtaggcactgtgtgccttccaggaatcaatcacacacgcaacagcttcggcagaggcagcggcttgtgttgttgcttttcttgaaaatttgtaaaaatgagagggatcaagag

SEQ ID NO: 989477 - DNA, 120 bp, Artificial Sequence
  ENSG00000287586_21 (sequence is synthesized)
gaaggtaggcgctctcccaacacccgcttctctgggctccaggctgggtgagctgcggattcagcctggctctggaacagctgtgccgagctgctctgcctggaattctgtgtcagtgtc

SEQ ID NO: 989478 - DNA, 120 bp, Artificial Sequence
  ENSG00000287586_22 (sequence is synthesized)
tgtgtgctattttgtttccccaggagccaaagttaacaataaaatctaagtttacaagacaccttggctacaaacgcagcagcaagcttgtttgctccctgtctcctcctctaataggat

SEQ ID NO: 989479 - DNA, 120 bp, Artificial Sequence
  ENSG00000287586_23 (sequence is synthesized)
gctgcaggctgagctccatcacgcggctcagcttgcaggcgatggacggaggagtcgagaaacaacattgccatctgtgccggtggacagaaagccagatggaggctgagtgctcgggga

SEQ ID NO: 989480 - DNA, 120 bp, Artificial Sequence
  ENSG00000287587_0 (sequence is synthesized)
ggggagggtagcggttacgctgagcgccggcgttgctggtccccgacccctggtacccgggcatcgttttttcatcccgggcagctgggaccccgggatgacctaaggaacaaggattca

SEQ ID NO: 989481 - DNA, 120 bp, Artificial Sequence
  ENSG00000287587_1 (sequence is synthesized)
gacgcagactccacggtgaattggccttattcacgtgtgaacgaacgtccaggagaaaaccaaacccgaatgggccaggctctaaccagaggagaccccaaaactgtgatctgcatcaga

SEQ ID NO: 989482 - DNA, 120 bp, Artificial Sequence
  ENSG00000287587_2 (sequence is synthesized)
aaacgaaccagccagccggttcccggctctgccaggtctaggggtgctttattcaagccctgggttcgctccctggtcagcaagtatgagcccacaggtcgtgctaggaaggagacggga

SEQ ID NO: 989483 - DNA, 120 bp, Artificial Sequence
  ENSG00000287587_3 (sequence is synthesized)
ccagatattgactgctggtttaaagtatatgctaatcctacagtcattcactcagcaactcctgatggcacctgttttgcaccaggcgctgagctgaaccctggaagcaggaaggattgc

SEQ ID NO: 989484 - DNA, 120 bp, Artificial Sequence
  ENSG00000287587_4 (sequence is synthesized)
gcagagaagaaaacagaattgaatatttctagatcacgtattattgtgtgctgtagaatagagcacatattaatgtaggttaattcatttaatcctcaaaatgactttactcagctaaat

SEQ ID NO: 989485 - DNA, 120 bp, Artificial Sequence
  ENSG00000287587_5 (sequence is synthesized)
tgaggaacttgctaagtgccatacaattagtaaatggcagagttaagttcaaaccaaggacactctgcctgcaaagatatacttgctctgctctgatgtgctgccattatcatcatcatc

SEQ ID NO: 989486 - DNA, 120 bp, Artificial Sequence
  ENSG00000287587_6 (sequence is synthesized)
tccatcatctgcctcctcactgttaccatcaccatcatcttcaggatgctccctgaggatctggaccatagcggtaggaagctgagctttctaactcagaaaacagaccttcaaacatat

SEQ ID NO: 989487 - DNA, 120 bp, Artificial Sequence
  ENSG00000287587_7 (sequence is synthesized)
aagtaaatgagtgtgcaaataactatagcaagaagtacaaagtgatcagtaccaccaaagaggagcagatatcatgttgagaaagattacttccatctgaggtagacctctagaaatggc

SEQ ID NO: 989488 - DNA, 120 bp, Artificial Sequence
  ENSG00000287587_8 (sequence is synthesized)
tgaaggaaatccaaagacaggaaggagtctcaacagaggcattagggataggaatgtcagatcataaaagattcagtttgcacatttacaacctaaactaatatagttctggtgccccaa

SEQ ID NO: 989489 - DNA, 120 bp, Artificial Sequence
  ENSG00000287580_0 (sequence is synthesized)
aattgggcatgagacagtatgaggggtggtctcctcccttatccccaccagaactttttaatgaagaattggaatatgactttgttaatatagtggaatatatttgagcttgcatcatgg

SEQ ID NO: 989490 - DNA, 120 bp, Artificial Sequence
  ENSG00000287580_1 (sequence is synthesized)
atccaggagataatcaatcaactaagagccaggcacctttttaagtccagtaagaagaaacatttttacaacctgctgtctctgaagtctgctatctgagattcctctccacaataaaac

SEQ ID NO: 989491 - DNA, 120 bp, Artificial Sequence
  ENSG00000287580_2 (sequence is synthesized)
actgtcaaccggaaaatgtgtaaatttgcctatagcccggaagccgccactttgagttgttctgcctttcggacaaatccatgtatttcttaaatgtatttcattgatgtctcatgtctc

SEQ ID NO: 989492 - DNA, 76 bp, Artificial Sequence
  ENSG00000287580_3 (sequence is synthesized)
cttaaatgtatttaacccgaccaccttggcctgatcacaggacctcccgagggctgtgtcacaggccatggtcact

SEQ ID NO: 989493 - DNA, 120 bp, Artificial Sequence
  ENSG00000287581_0 (sequence is synthesized)
gcaaatcttcaggggaagaaagctggcaggaagctgcactgcttgtctcagaaaatggaacgggctgctctcctgcaaaacaatattaggcttcctcctcggggcaatcctgctgaatct

SEQ ID NO: 989494 - DNA, 120 bp, Artificial Sequence
  ENSG00000287581_1 (sequence is synthesized)
gaggatacattgaagaatttctctggcattttctgaaatcacttgacactactagctctgcactcagctggacagagaagcagagctgaccactcacaagagtaaaaggggaaggggagt

SEQ ID NO: 989495 - DNA, 120 bp, Artificial Sequence
  ENSG00000287581_2 (sequence is synthesized)
cacaggcagggtttcagaatctgttcggaccaggagaggggtgaggcccacctgagctgctggatgaggtcctccccttccttgatcacgttgacagtcacctgcagggtggtctgctgc

SEQ ID NO: 989496 - DNA, 120 bp, Artificial Sequence
  ENSG00000287581_3 (sequence is synthesized)
tgctggccaaagcgcttgatgaggtcctgcacggcctccaccgactcggcatacacgtcgtccagcagctccttctgcagctcctccagccacgtccacagctggggaaggggagagggg

SEQ ID NO: 989497 - DNA, 120 bp, Artificial Sequence
  ENSG00000287581_4 (sequence is synthesized)
ggtgaggccggccggcctggctgcaccaccaggtgggccgcccggtgtccaaggggccccagtggagacggtgtgtgacttgccctgggaggggactggtgacagaccactcccggaggg

SEQ ID NO: 989498 - DNA, 120 bp, Artificial Sequence
  ENSG00000287581_5 (sequence is synthesized)
aaggaaggaaggacgggagggaggggcatccagtcccactgccagcggaacacatgcacaacaaaagcagcatgccaccgccgcagggaggaaaataaacaggcgaacggcgggcagcac

SEQ ID NO: 989499 - DNA, 120 bp, Artificial Sequence
  ENSG00000287581_6 (sequence is synthesized)
tgtcacaaaagagaaaaaggaaagggaagggaagctgctctttcccattctcccgaggctcaatccagactgcagtggaaataagaaaagaccctcagttcgcagaaacatctgctgata

SEQ ID NO: 989500 - DNA, 120 bp, Artificial Sequence
  ENSG00000287581_7 (sequence is synthesized)
gaagcacacagaaggaagtgcacaatgtgatgagaggaattcaccaccgagcctggccagggaccagggtgtggagctagggaggtgacggcacgagcccaggccccacaatcaggctgc

SEQ ID NO: 989501 - DNA, 120 bp, Artificial Sequence
  ENSG00000287581_8 (sequence is synthesized)
caacagttcgggccttcaacggaaagagtgtgcatgctgaaaagatgcagacacctccactgccaccaccataaaacaggctgctggagacctagatgagtaaagacaccctggaatgag

SEQ ID NO: 989502 - DNA, 120 bp, Artificial Sequence
  ENSG00000287581_9 (sequence is synthesized)
agtggcaagaatgactttgggccaggtgggagccagggagcagagcctacttcctgaaagtccattaactcctgcagatctctggggtactattcacggaactgaaaaagacaattaatt

SEQ ID NO: 989503 - DNA, 120 bp, Artificial Sequence
  ENSG00000287581_10 (sequence is synthesized)
acattaaatgggccctggtggcttgtatgtagagaaaatgctttcagcctcctcagggactaagagtcagctcacgcatcttctgtatgtctagtggggacagccggctcagctggtgag

SEQ ID NO: 989504 - DNA, 120 bp, Artificial Sequence
  ENSG00000287581_11 (sequence is synthesized)
atggggcaagtcgggacctcccgcttgataccctgtgcaacgcctgctgcctcaagactcataagtcaaaactgcacttgcagaaagaaactgtgtgtgcatgtggtcttctgtttccaa

SEQ ID NO: 989505 - DNA, 120 bp, Artificial Sequence
  ENSG00000287581_12 (sequence is synthesized)
gccaagctttttacaaaacggctttactgaggactaactgacatactataagctgcacaaatgtaaagtgtccaatgtgagttctgacatttgtctatacccacttcaccgtgagcctct

SEQ ID NO: 989506 - DNA, 120 bp, Artificial Sequence
  ENSG00000287581_13 (sequence is synthesized)
ccctcacctcaaagctggctgatgccctctgtcatgctccctccctggcactcacctgctctcagccactggagattaccttgcattttctaaaataatttctagaactggaatgggaca

SEQ ID NO: 989507 - DNA, 70 bp, Artificial Sequence
  ENSG00000287582_0 (sequence is synthesized)
agtgctgccataggagatcttggaaaagcccaggccgggctccgtggctcacatctgtaatcccagcacg

SEQ ID NO: 989508 - DNA, 66 bp, Artificial Sequence
  ENSG00000287582_1 (sequence is synthesized)
cggtggctggcgcctgtaatcccagctattcgggagcctggggcaggagaatcgcttgaatccggg

SEQ ID NO: 989509 - DNA, 84 bp, Artificial Sequence
  ENSG00000287582_2 (sequence is synthesized)
gaaaaaaaaagaaaagcccctctttccaggtggacttgactgaggtgatgtgaagctggagccgctgctgccctgtcatcatta

SEQ ID NO: 989510 - DNA, 120 bp, Artificial Sequence
  ENSG00000287582_3 (sequence is synthesized)
gtgatgtgaagctggagccgctgctgccctgtcatcattatgtagatccttagagtgaagccaacacacaggggccagtaagagaaggggtggagaaagatggcttggtgactttgctgg

SEQ ID NO: 989511 - DNA, 120 bp, Artificial Sequence
  ENSG00000287582_4 (sequence is synthesized)
agattatagaattttgtggagaaaaattcgttcttttcctgagggaaggccaaagcctgcagtcatgatggagttggagaaaggtgtgaagggccaggccaggagcccagggagaggagg

SEQ ID NO: 989512 - DNA, 120 bp, Artificial Sequence
  ENSG00000287582_5 (sequence is synthesized)
cctgagagaggagccctgtggaatgaagcctgtgaacagcccattttcacttctgaagcagttggtcccccacaaaaagattattttctccaaagcagatgaaaatcccctttccctccg

SEQ ID NO: 989513 - DNA, 120 bp, Artificial Sequence
  ENSG00000287582_6 (sequence is synthesized)
cctgctcctgcagcctgtggtcatggaggcaaagaaatcaccccttcctctgccacttaccagctgtggtcctgtgcaaatgtcttagcttctctgagcctctgtttcctttctgtagag

SEQ ID NO: 989514 - DNA, 120 bp, Artificial Sequence
  ENSG00000287582_7 (sequence is synthesized)
tgaaaataattcattatttgtgagattatgtgaggattaagtaatactgtatgtggaagggctgaacacagtgcttggcacaaagtgggtgcaataaaagagaattcccttctagactcc

SEQ ID NO: 989515 - DNA, 120 bp, Artificial Sequence
  ENSG00000287583_0 (sequence is synthesized)
gcattgaataacacagacaagaggctctcgctccattaattattaattgtactttttgcatttcttaggacagcaaagagctgagctctaaggcggaagaaagggagactggaaaggatc

SEQ ID NO: 989516 - DNA, 120 bp, Artificial Sequence
  ENSG00000287583_1 (sequence is synthesized)
agcagacagagctgcccctgtgcttgcccctgagggacttcccggactccgctccggtcatgtcctcagactcgggacatgcgacggagtctctccaccttgcatgtgggtttgcgcgta

SEQ ID NO: 989517 - DNA, 120 bp, Artificial Sequence
  ENSG00000287583_2 (sequence is synthesized)
cgggtgtggggaggcaaaatttccaagtgcacggtgggagggggctgtccctattgggaaaaagcaggaggctggctctggaaagagccttctttgtctctgagcccagccttgcccgag

SEQ ID NO: 989518 - DNA, 120 bp, Artificial Sequence
  ENSG00000287583_3 (sequence is synthesized)
ccacctgtgctgtgaactctggagaaggtaaagagccagccccgcgtgggacctgcaggcgacgtccctgtcagctgtggggtgggaaagtcactctccctgctccctgcacatgttctg

SEQ ID NO: 989519 - DNA, 120 bp, Artificial Sequence
  ENSG00000287583_4 (sequence is synthesized)
gggattttgcccatgtcagctgctctttctcagcggccctctctcctgccagccagcgattccaagcccccaatgcccacacccaacgagggccctggaagcaccgtgggacatgcgggc

SEQ ID NO: 989520 - DNA, 120 bp, Artificial Sequence
  ENSG00000287583_5 (sequence is synthesized)
cctccgaggacagtgaaggctggtgggggtcacccttctctgagagaaccagaatcctttgcttcccacacatattcccctattatcttcctaatgtgttccttattctggagaggtaga

SEQ ID NO: 989521 - DNA, 120 bp, Artificial Sequence
  ENSG00000287583_6 (sequence is synthesized)
attaaaaaataagaaggggaaaaagaaaagagaaatgttttgccttagttggacttcgtttaaattgtctccttccaagatgcagaggagggttcaccatgatcatcattattattagag

SEQ ID NO: 989522 - DNA, 120 bp, Artificial Sequence
  ENSG00000287583_7 (sequence is synthesized)
tctgctctagaggggaaggggaggatggaggggagccagccagggctggagcgttctcctgactgtgaccttggcacagcctggctgtgaagacaaggaccagcccacaagtctaggcct

SEQ ID NO: 989523 - DNA, 120 bp, Artificial Sequence
  ENSG00000287583_8 (sequence is synthesized)
gaaggaggaaaaaaagttgcctggcaaggaccgtacgtctcagagtcttcccacatattttgccagatagtaaaactgagtccaaaaaggaaagtgtcttgctcccaatctcaaagcctg

SEQ ID NO: 989524 - DNA, 120 bp, Artificial Sequence
  ENSG00000287583_9 (sequence is synthesized)
ttaataacagggcaggatttttataaaggctgcaacaaaatcagccaagagaatggaccctaaactctgaagtggattatttattattcacaaaaccgtaggcttaaaggcatgcatgca

SEQ ID NO: 989525 - DNA, 120 bp, Artificial Sequence
  ENSG00000287583_10 (sequence is synthesized)
gataaccaattaaagagccttcgctggtgttttatcatcctgcgctccccaggtgctgggggcccagccaggaggggctcaggtctgcagtggccctctctgacccagcccctgtttcgt

SEQ ID NO: 989526 - DNA, 120 bp, Artificial Sequence
  ENSG00000287583_11 (sequence is synthesized)
tcagcattgaggtctcacaccactgcctctgtcacagacctatgtacagaaccccagctggctttgagagggctccaggtgtctttgccgcgtctacacctggttggtgttatctatgca

SEQ ID NO: 989527 - DNA, 120 bp, Artificial Sequence
  ENSG00000287583_12 (sequence is synthesized)
gaacaccaggaaaacgaagcctctcctttcaccctcatcacttggatccgtggtgcaccgggacagcgctcacagctctgtgtgccctctttatttcctcccctgggagttatttgttcc

SEQ ID NO: 989528 - DNA, 120 bp, Artificial Sequence
  ENSG00000287583_13 (sequence is synthesized)
cagcaggaggcgtcagcagcgagcgggggctggatggagagctgcattccaggcctggtgtcccaggtgacgaggcctccagccagagcatctgtccttcctcacagcccagatgtcctt

SEQ ID NO: 989529 - DNA, 120 bp, Artificial Sequence
  ENSG00000287583_14 (sequence is synthesized)
tcttctgcccatcctcattcctcaccactggcccctgcaggtggtgcagcgcccacctccttccgtgctcctgtcctgaagcctgcgtgcctccacacagtcaaagctgggacatctcca

SEQ ID NO: 989530 - DNA, 120 bp, Artificial Sequence
  ENSG00000287583_15 (sequence is synthesized)
gtgaatctatcactggcaacacaaccatttcctgactcctacggcttggtcaaatccctccttccaccccaggcctctggactggaaggctgtggtcatgctggttcttgcagccctgat

SEQ ID NO: 989531 - DNA, 120 bp, Artificial Sequence
  ENSG00000287583_16 (sequence is synthesized)
ggctcccctcgggctcctggtgccacgttgtgcctgtccaagccactcagcttcaggacgaagaggtgtttgccctgctggctccctgcaaggtaagtaagcgtgtgtcaggtgacagct

SEQ ID NO: 989532 - DNA, 120 bp, Artificial Sequence
  ENSG00000287583_17 (sequence is synthesized)
tccacacgcaggcaatgtgacctcacccatggacgtgacagtgcatccacagcacatgagcgaacatttcctttcagccacaggagggcgataccatagtcttttgatctctcaagaaaa

SEQ ID NO: 989533 - DNA, 120 bp, Artificial Sequence
  ENSG00000287583_18 (sequence is synthesized)
aatacacactggaaaaatgcaaggtattatggttacttatataaagcttcttacctgtgcacatgggcctcaataaccataagaatcatcaaacctaaggaagaaacattctcaattaat

SEQ ID NO: 989534 - DNA, 120 bp, Artificial Sequence
  ENSG00000287583_19 (sequence is synthesized)
tctgggttggaagtgaagagacaggatttgatatcagaaaggacgccataaaaactgtcatgtgcatatcacttaaaaacagatgctgccacggggcttgagccaccagcccagggaatg

SEQ ID NO: 989535 - DNA, 120 bp, Artificial Sequence
  ENSG00000287583_20 (sequence is synthesized)
tagctcccttttcctgtcacccaccttggaagtcacagagaacgcgagcagccattaggtgcacgcctggcagtgccggctcagggaggctgcaggagaggagcccaggccggagctcag

SEQ ID NO: 989536 - DNA, 120 bp, Artificial Sequence
  ENSG00000287583_21 (sequence is synthesized)
ggttcctggtccgggctgccctctgaaagtgtcctcgatcatgtcgaggtcctgggtattacagggtatgccctcaggttcgtcatgtcaggttcaggacctcgcttccaagagccagta

SEQ ID NO: 989537 - DNA, 120 bp, Artificial Sequence
  ENSG00000287583_22 (sequence is synthesized)
tcatatccacaaaactggaactagggtggaagctatccctctgtaacagtttccctctttgtaaaatgggaataataccacttaaagccttcattcttacccttgaaaatgatagagttc

SEQ ID NO: 989538 - DNA, 120 bp, Artificial Sequence
  ENSG00000287583_23 (sequence is synthesized)
tgtgactgtagaatgctattgaggacatcctcctccttcctgctttttacagaggatgccccatcccctgtcatcttcctccagtgcacagtgtggatgatttcatgggctcgtctttgc

SEQ ID NO: 989539 - DNA, 120 bp, Artificial Sequence
  ENSG00000287583_24 (sequence is synthesized)
cacatctaggctctggtggatagttcagcctgtgatcctgtcactgttgggtgtgacctgcataagcaaattggtcacagtggtgtggccgtccaggcacctcgctatcccaggtctctt

SEQ ID NO: 989540 - DNA, 120 bp, Artificial Sequence
  ENSG00000287583_25 (sequence is synthesized)
ccgaaacccatcaccaccctcgctggactgatgtcttttctctacccaaacccactcctcctcgtgcgtcgtcgaagactctgtgcaattctcaaaccagaatgtccacacatcctgggt

SEQ ID NO: 989541 - DNA, 120 bp, Artificial Sequence
  ENSG00000287583_26 (sequence is synthesized)
tcctttcctgggcatcgtgggctatttagtagcaagtcctgttactctgtctccttcacataccctcccgcagcctcagctgcttaggacacccttctctctggcctggagcaccactac

SEQ ID NO: 989542 - DNA, 120 bp, Artificial Sequence
  ENSG00000287583_27 (sequence is synthesized)
agcctcctaggaggactattctggtttcactccctcaaatccatcacagagagatcttcctgggggagatgttttaatttttttgttttcaaatttgttatatttttattaataaatgat

SEQ ID NO: 989543 - DNA, 120 bp, Artificial Sequence
  ENSG00000287588_0 (sequence is synthesized)
ggtggggtgaaacgagcgttaccatggcaaccctgcggcggaagctctgagaagctcttggcctctaccggttctgcgagaaagtaaactttgggcacgacaagtcatgaagtcggcacg

SEQ ID NO: 989544 - DNA, 120 bp, Artificial Sequence
  ENSG00000287588_1 (sequence is synthesized)
ttggggagacaccgtgtcacaatgacaaggtaccctacaaggcctgtcagggaagatagggtagaatcctgagaatgctcccacacagtgctgatggggaaggaccactatcccatccac

SEQ ID NO: 989545 - DNA, 120 bp, Artificial Sequence
  ENSG00000287588_2 (sequence is synthesized)
tgctacaactctggagacacagctctcctatctcccctatatgacacaaggcctaatctgcagagaaagagcatccaaacctgagtcacaaggcactggggaaaaactcccgaactgagg

SEQ ID NO: 989546 - DNA, 120 bp, Artificial Sequence
  ENSG00000287588_3 (sequence is synthesized)
gtagagaaacaaggccaacacccacatttttgcacagatgcatctcccataaagaaaacaaattattaacttacagggcactgttgcaggcccacttcaactgggagttaagaacatgga

SEQ ID NO: 989547 - DNA, 120 bp, Artificial Sequence
  ENSG00000287588_4 (sequence is synthesized)
agtagggacaggaatgtgttcttgccctggcattgcatctacaggaggggcaggaaactcttcaaatgtcagtaaccccacaccccagttcacagtgctaagtctgaggcttcctcagaa

SEQ ID NO: 989548 - DNA, 120 bp, Artificial Sequence
  ENSG00000287588_5 (sequence is synthesized)
cattggagatcccctcactccctcaccgctgctaccaggctaagaagcatggagtcaaaagaacagtggaatatagctgggccaagtgcaagaaaccatgtgtgggaagagacacaaagg

SEQ ID NO: 989549 - DNA, 120 bp, Artificial Sequence
  ENSG00000287588_6 (sequence is synthesized)
gaaggcacagcaaacccgggagatattagcaaagtatcatgaaagggatttgaatttcctcgtcatcagaaggctattactgccataacgacttttaatcccagcctacctctcatctac

SEQ ID NO: 989550 - DNA, 120 bp, Artificial Sequence
  ENSG00000287588_7 (sequence is synthesized)
atgaccacaaacccctacactaaggcctatctgagggaaaatcgctcatcgataacctaaaaactatcccctttcaatgccagtgggctgatgaaaaaaataaaaagaataaaaaaccca

SEQ ID NO: 989551 - DNA, 120 bp, Artificial Sequence
  ENSG00000287589_0 (sequence is synthesized)
aaggtgctatggtttggatatttgcctccccaaacctcatgttgaaaattgatcccaatgttggaggtggagcctaacgggaggtgattgggtcacggaggtggatccgtcatgaaaaga

SEQ ID NO: 989552 - DNA, 120 bp, Artificial Sequence
  ENSG00000287589_1 (sequence is synthesized)
tcaatgccctaccttgggagggggatgattgcattctcctcttcaagagctggttattaaaaagagcctgacttctccctgccctctcttgctgcctctctctatatatgatttctgcac

SEQ ID NO: 989553 - DNA, 120 bp, Artificial Sequence
  ENSG00000287589_2 (sequence is synthesized)
aggccagccccccttcactttttgttgtgaaaggaagaagcctgagaccctccctagaaactgggcagctgctggtgccatgcttctgtacagcctgcacaattgtgatccaaatacact

SEQ ID NO: 989554 - DNA, 120 bp, Artificial Sequence
  ENSG00000287589_3 (sequence is synthesized)
tcttttctttataaactacccagcctcagatattcctttattcaaacaaactggactgacagaaaattggtacagtgaagtagaatgctgctaaaatgataactaagtatgtggaagcag

SEQ ID NO: 989555 - DNA, 120 bp, Artificial Sequence
  ENSG00000287589_4 (sequence is synthesized)
ctttggaactaagtaatggcaacaggttggaagagtttggagggctcagaaaaagataaaaggatgaaagaaagtttgggccttcttcaagattggttaagtgattgtgaacaaaatgtt

SEQ ID NO: 989556 - DNA, 120 bp, Artificial Sequence
  ENSG00000287589_5 (sequence is synthesized)
tatagaaatatagacaataaaggccctgctgtcaggtctcagctggaaatgaggaaattattgggaacctgagcaaaggtcacccttgttacaccttagaaaagaattggctgcattgtg

SEQ ID NO: 989557 - DNA, 120 bp, Artificial Sequence
  ENSG00000287589_6 (sequence is synthesized)
tccatgccctagggctttgagaaaggtcaaaattaagagtgataatctagaggtaaaaatttccaagcagaaagcattcaagaagtggcatggctacttgtaattgcttactctgaatca

SEQ ID NO: 989558 - DNA, 120 bp, Artificial Sequence
  ENSG00000287589_7 (sequence is synthesized)
tctgaattaatggagcaaaggaatggcctaaagatggaattgataactaaaagggaagcagtgcattcaaatttcaaaaatttgcaacctgatcatgagatagaataggaaagagcattt

SEQ ID NO: 989559 - DNA, 120 bp, Artificial Sequence
  ENSG00000287589_8 (sequence is synthesized)
ttagaagaataattcaaaggtaaagctgagagaccctttgttaaagacattagcacaggtaaaagggagccaggtactaataaacaggacggtgaggaaatggccccaaaggcattttag

SEQ ID NO: 989560 - DNA, 120 bp, Artificial Sequence
  ENSG00000287589_9 (sequence is synthesized)
aaatctttgaagcagtccctcctattatagccccagaggcctaggacaacagaatgacagaatggtttcaggggagggggtggggggactgctgccctgcaaggtctcaactctatctat

SEQ ID NO: 989561 - DNA, 120 bp, Artificial Sequence
  ENSG00000287589_10 (sequence is synthesized)
gactgaaacagccccagatactgctcagaccttgaccatagagagtgcaaaccataagctttggtaatgtccacatagtattaagcctgcaagcacaaagaatgcaagaatggtgaagct

SEQ ID NO: 989562 - DNA, 120 bp, Artificial Sequence
  ENSG00000287589_11 (sequence is synthesized)
tggtagcttccaactggatttcagatgatatattggaaagcctgggagcacagacagaaaactgccacagaggcagagccaccacagagagtccccactgggacaatacctaatggagag

SEQ ID NO: 989563 - DNA, 120 bp, Artificial Sequence
  ENSG00000287589_12 (sequence is synthesized)
gtgagagcaagactgccacgaagactctagaattatagagccactggcagcatgcaaccttctcctggaaaggctacaggcattcaactgcaacccacaagggcagccacatgggctgta

SEQ ID NO: 989564 - DNA, 120 bp, Artificial Sequence
  ENSG00000287589_13 (sequence is synthesized)
cctagcaaaaccatgagtacagagctgtccaaagcctcaggagctcaccctcacagcagtgtgcccaggacataggacatggaggcaaggagattattttggagctttaagatttaatgt

SEQ ID NO: 989565 - DNA, 120 bp, Artificial Sequence
  ENSG00000287589_14 (sequence is synthesized)
ctatgctgctgggttttagactcatgtggggcctattacccctttcttttgacctatgtttcttttgacctatgtttcttttgaatgtttacgcaatgccggtatcaccattgtatcctg

SEQ ID NO: 989566 - DNA, 120 bp, Artificial Sequence
  ENSG00000287589_15 (sequence is synthesized)
gctgaaaggaatttaccttgagtctcagatgatactttgaactttgaatttttaagtttctgcagaaacaagctaagactgttgggactatcgggaaggaatgttttgtaatgcgagaag

SEQ ID NO: 989567 - DNA, 120 bp, Artificial Sequence
  ENSG00000287589_16 (sequence is synthesized)
gacatgcttttggggggccaaatgtagaatgatatggcttggatgtttgtccaccaaaacctcatattaaaatttgatccccctgttgtaggtgccctccctccaggagagggtgagtca

SEQ ID NO: 989568 - DNA, 120 bp, Artificial Sequence
  ENSG00000287589_17 (sequence is synthesized)
gttatccattagttttcatgagaattgatttttaaaaagacctggcatctccccattctctctcttgctttctctcccatcacgtgatctttccacacactggctcaacttcgccttctg

SEQ ID NO: 989569 - DNA, 120 bp, Artificial Sequence
  ENSG00000287589_18 (sequence is synthesized)
ccatgaatgcaaggaacttgaggccctcactagaagctggacagatgctgggaccatgcatcttgtacagcctgcacaaccatgagccaaataaacatcttccctttataaatttcctag

SEQ ID NO: 989570 - DNA, 120 bp, Artificial Sequence
  ENSG00000287589_19 (sequence is synthesized)
cctcaggtattccttgacagcaacagaaaatgaattaatacacaaggtattaaagatagaaagacatctaagacacaaagtttgctcataaagagtttattggatagtgggaaagaccaa

SEQ ID NO: 989571 - DNA, 120 bp, Artificial Sequence
  ENSG00000287589_20 (sequence is synthesized)
aatgcaacccacaaaaccaaacatgtatagtataatatgctaatacatatatgttcacataaaaatgtagaagtcattagctaggtggctaataacatcagggaatgccagataaagtgg

SEQ ID NO: 989572 - DNA, 120 bp, Artificial Sequence
  ENSG00000287589_21 (sequence is synthesized)
gtaaaatgcatattaagagaaagattgagatgaagtttaccatccacaacacacatacaggcaggcccacccataagagtgctcacaacttagcttttacacatgattccatatacatgg

SEQ ID NO: 989573 - DNA, 120 bp, Artificial Sequence
  ENSG00000287589_22 (sequence is synthesized)
ctctattctaagtaaaatatagaaattagaagcatcatggacaatgactacttggtttatttcattttgtacatgtgacactaagtgcacaagaagtccagaggtgaccagatcaatgtg

SEQ ID NO: 989574 - DNA, 120 bp, Artificial Sequence
  ENSG00000287589_23 (sequence is synthesized)
gcaaggacatgcaaacgatcaaaatctaacattagtatatgcacataaatctagagtataagttctctgagagaaggaattgttttatattttgtccaaatagaagaaatgttaaatttt

SEQ ID NO: 989575 - DNA, 120 bp, Artificial Sequence
  ENSG00000287589_24 (sequence is synthesized)
caatagcatgaatttctaacatctaaaatggcgcctaatataaaaagtggtactcggtaaatatttatggaaaatatgtatacatgaataaatatacccggtagaaaataaaagaaacag

SEQ ID NO: 989576 - DNA, 120 bp, Artificial Sequence
  ENSG00000287589_25 (sequence is synthesized)
aagtaaatatcgccatccaaataatttaaggtcaatagtttcagtttctcttttgcaaaatctttaacttgcttaactttctttcttttagttgtgttcaagagtcggaatgccaaacct

SEQ ID NO: 989577 - DNA, 120 bp, Artificial Sequence
  ENSG00000287589_26 (sequence is synthesized)
gaaggaatcctagcacctaccttatctggtgaaattctgaatataagaagaatgcccacccaggaaatgtatatatcagatggaaactgaagatgaaatagaacacagataactgaaaat

SEQ ID NO: 989578 - DNA, 120 bp, Artificial Sequence
  ENSG00000287589_27 (sequence is synthesized)
acagaactctttcactacaaagtgctatatcttatgagtccattcaaatactaaagatttgctattagttgaatcagctaaaggacttttccaaaactatgaaccatataaaaatatgtg

SEQ ID NO: 989579 - DNA, 120 bp, Artificial Sequence
  ENSG00000287589_28 (sequence is synthesized)
cagaaccaacttttcaatactttacactttgtcattctgctcattcaactttagcagaacctaaaaatgctttaaacattcaccattgttactccattatcctgttgattttgccagtga

SEQ ID NO: 989580 - DNA, 120 bp, Artificial Sequence
  ENSG00000287589_29 (sequence is synthesized)
tttagcacataaaaacattaggacatatgccatgagtatttcatcccatagccatcaagtaaaaatatagtttctagagactaaaatttatggatgacaagtaggttctacctatgaact

SEQ ID NO: 989581 - DNA, 120 bp, Artificial Sequence
  ENSG00000270140_0 (sequence is synthesized)
ctgtgtgtgtagagtagacagtgttgatttctgttttcaggagcctaacctgcagggagagctgtaagaccttctcagacaacaatgatgtggggagatgtggacaaaatcagtctgtgt

SEQ ID NO: 989582 - DNA, 120 bp, Artificial Sequence
  ENSG00000270140_1 (sequence is synthesized)
ctgaacactgcgcagttatgattttgggcagtaacatttactgagtcacacaaaccatacagaacctgttctaggcactaaatggggcagggtgggaaaaaaatacaaaagataagatat

SEQ ID NO: 989583 - DNA, 120 bp, Artificial Sequence
  ENSG00000270140_2 (sequence is synthesized)
aatccctgactttcttgttagagcctcacaacgtgagaaacagaatagagaagtgaattattctgggtcacacagtatgttaatatcacaggagcaaaataaagattccttgactcttaa

SEQ ID NO: 989584 - DNA, 120 bp, Artificial Sequence
  ENSG00000270141_0 (sequence is synthesized)
gggttgcggagggtgggcctgggaggggtggtggccattttttgtctaaccctaactgagaagggcgtaggcgccgtgcttttgctccccgcgcgctgtttttctcgctgactttcagcg

SEQ ID NO: 989585 - DNA, 120 bp, Artificial Sequence
  ENSG00000270141_1 (sequence is synthesized)
ggcggaaaagcctcggcctgccgccttccaccgttcattctagagcaaacaaaaaatgtcagctgctggcccgttcgcccctcccggggacctgcggcgggtcgcctgcccagcccccga

SEQ ID NO: 989586 - DNA, 120 bp, Artificial Sequence
  ENSG00000270141_2 (sequence is synthesized)
agagttgggctctgtcagccgcgggtctctcgggggcgagggcgaggttcaggcctttcaggccgcaggaagaggaacggagcgagtccccgcgcgcggcgcgattccctgagctgtggg

SEQ ID NO: 989587 - DNA, 120 bp, Artificial Sequence
  ENSG00000270141_3 (sequence is synthesized)
acgtgcacccaggactcggctcacacatgcagttcgctttcctgttggtggggggaacgccgatcgtgcgcatccgtcacccctcgccggcaatgggggcttgtgaacccccaaacctga

SEQ ID NO: 989588 - DNA, 120 bp, Artificial Sequence
  ENSG00000222033_0 (sequence is synthesized)
gttcctgctggcgacctggaagttttcctcaggccacaacttttgcagagtggacctgggaaaaacacccgcgccgcgcataccctcaaagctgagctcggcaggacacccaaggcgacc

SEQ ID NO: 989589 - DNA, 120 bp, Artificial Sequence
  ENSG00000222033_1 (sequence is synthesized)
cgtcatgcccacccgaggggaagaagctgtgctgtcccgcccccttctccccaggccacccaggaggcccgggctgggctgtggggggccgaaagccccagcgctgctggtgatttctcg

SEQ ID NO: 989590 - DNA, 120 bp, Artificial Sequence
  ENSG00000222033_2 (sequence is synthesized)
cccggagccccgccaagccagcgcgccctctcgcaagcctggcagaccaggagctactggaaaaaaggcgcggtcgaggaagcctggttgttgtggtcccacaaaccacaaatcatacga

SEQ ID NO: 989591 - DNA, 120 bp, Artificial Sequence
  ENSG00000222033_3 (sequence is synthesized)
gagaggatcccgaaggcgggagaaaagtcagtacagacttgttcctgccacctttggaaagaaaaagttcctcaccaggcgcggggcgtgctttgctctgggcagggtcgcgcttgcagg

SEQ ID NO: 989592 - DNA, 120 bp, Artificial Sequence
  ENSG00000222033_4 (sequence is synthesized)
ggcttgggtgacccccatccctccctggcggctcacctcctgccgaggagggccacctgcctcctcctggcccagggcgcagggcgcgtcctgccccggcactgcggacgcggggatcgc

SEQ ID NO: 989593 - DNA, 120 bp, Artificial Sequence
  ENSG00000222033_5 (sequence is synthesized)
gggatcgcctctcccgggcgcgcgggcggggaaggaggaagaggcgggcggggaaccgcggggtgctcaccgccctggggcattaggggtgcggaaccgcgttggaggcctcgcggcccc

SEQ ID NO: 989594 - DNA, 120 bp, Artificial Sequence
  ENSG00000222033_6 (sequence is synthesized)
agagcgcactgcggagtggccgccggagctcggcctactcctctcccccacccacctcccgtcggacacagtctccactctccaggccgccggccgtgggggagcccctaatcagttcgc

SEQ ID NO: 989595 - DNA, 120 bp, Artificial Sequence
  ENSG00000222033_7 (sequence is synthesized)
gcccggcctctctgcccgtcttcctcacgggaaccgcactgcgaccgggacggacggggtgacctatctcccgatgcagcgtcagaggttagcctaactacaacggactcggaatctgga

SEQ ID NO: 989596 - DNA, 120 bp, Artificial Sequence
  ENSG00000222033_8 (sequence is synthesized)
gggcgcgcctgcggaatgagaatatcgtactcaagacgggtgggctgcttgcgacccaaatacaatgggtccctcgcacatcctgcactcgcacgcccccttctcccccaacgagttgtc

SEQ ID NO: 989597 - DNA, 120 bp, Artificial Sequence
  ENSG00000222033_9 (sequence is synthesized)
ccctctaaaacgcgagcggcgaccacacaacttggccgacccgatctggcttctgaagatgaggtcggctgctctgggagcggagaaggggagagagcttagtggtttcatccgaggcct

SEQ ID NO: 989598 - DNA, 120 bp, Artificial Sequence
  ENSG00000222033_10 (sequence is synthesized)
ggccaacctgctccttcccacgctcccgtccaggatttgagtcttggagaagcgtgagactcgagggagctcttccctggatgcaagtcggaggccagggagccccttggcacacactcg

SEQ ID NO: 989599 - DNA, 120 bp, Artificial Sequence
  ENSG00000222033_11 (sequence is synthesized)
cgcctgcacatgcttgcaccctcgaagcgatctggttccttagcgctggtttcctttccagcttctttgagatcttcgaagtcccctttcccagggaggcgggcagggccgggctaagca

SEQ ID NO: 989600 - DNA, 120 bp, Artificial Sequence
  ENSG00000222033_12 (sequence is synthesized)
ggatggaaggcagccctttttattgaatctgatagctactttcccaaaaaggccagaaaagccatttcacatccccatagttatgggaattagctttttctccaagatgcccccattagc

SEQ ID NO: 989601 - DNA, 120 bp, Artificial Sequence
  ENSG00000222033_13 (sequence is synthesized)
cagttaaaccatcagtgggccaacagggtcaaagttagtggcttggtggttgaaagctcggagtccgaactctctgaagacatttttcccgccttgccactttctagttggtgaccttgg

SEQ ID NO: 989602 - DNA, 120 bp, Artificial Sequence
  ENSG00000222033_14 (sequence is synthesized)
caagcaaggtactcagccgctgtgtacctcagttttgcggtttgtaaaatgggagttacaatagtgcaccccttgtagagtggctataggtttaagagttaatatacgcaaggtctttag

SEQ ID NO: 989603 - DNA, 120 bp, Artificial Sequence
  ENSG00000222033_15 (sequence is synthesized)
gacggtgctgagcgtacagaaggccctctcttgagtggtcgcagttggctgctctcggcctcatctccgtttgtgaaaacccgtccagattccggtcctcccaggccccagctgaagttt

SEQ ID NO: 989604 - DNA, 120 bp, Artificial Sequence
  ENSG00000222033_16 (sequence is synthesized)
ggagagaggctttgctgaatagctgtttagtctcccccaacccccttggccctcggagctcctggaaaaagttcttaatgaagtaatgttgagagcgtccattaaaaatgcaatgctggg

SEQ ID NO: 989605 - DNA, 120 bp, Artificial Sequence
  ENSG00000270147_0 (sequence is synthesized)
ttatttttgtttttcttgggatctgacttttgggaggctttaagtgattatgattgcacttccctccacctggaaaccacctcttccttctctgatctcaccttggcttagctctccaac

SEQ ID NO: 989606 - DNA, 120 bp, Artificial Sequence
  ENSG00000270147_1 (sequence is synthesized)
acaagactctgtggtgtctgcccatgcccactactctcactgttgagaatagtattcaatatctgtttaacatatataactacttttaacaaacactgaatactcctttttactaaaggt

SEQ ID NO: 989607 - DNA, 120 bp, Artificial Sequence
  ENSG00000270147_2 (sequence is synthesized)
aaggtgatcaaattctggtttattggcaatgagctcttcttttgtaggaatgtttattcccatgaagcatggatatttaattggtggtgaagctactcgaatgtgtaccttggaaagaaa

SEQ ID NO: 989608 - DNA, 120 bp, Artificial Sequence
  ENSG00000270147_3 (sequence is synthesized)
tcattgcacacaaggtttttaagactatgcaaaattctttcattgtgcaaatacaatacaaaattgttttgcagaatattcagtaacaacatatgggtaataaattattctttctacaaa

SEQ ID NO: 989609 - DNA, 120 bp, Artificial Sequence
  ENSG00000248206_0 (sequence is synthesized)
gcactggctggtgctgggtgagctccaccgctgcccgggctgcgagcctgacggctgtgtgtcgggaatgacgagacccaggcttgcaaagacttgcacggcaactggaatttatgacaa

SEQ ID NO: 989610 - DNA, 120 bp, Artificial Sequence
  ENSG00000248206_1 (sequence is synthesized)
atagctcactgcagctaaactttgatacagtgtacagtagaaccgcctgttacacacaggagggagacgcgtccttcgtcaccatgcaaagccagccttaacacaacataggaaaatgtg

SEQ ID NO: 989611 - DNA, 120 bp, Artificial Sequence
  ENSG00000248206_2 (sequence is synthesized)
gcaggtctctaattacggactgagaacaagcagaagaggagtgacactgcagattccgaggcactgcagtgggatgttggctcagcaagtggctgtgatgtacgggataggcatggaaca

SEQ ID NO: 989612 - DNA, 120 bp, Artificial Sequence
  ENSG00000248206_3 (sequence is synthesized)
ggattccagctgttccatgcaaataggataaaagaatggtaaagaggattcctttttttttccctcctcaaaacgttaccagcaaagtacattcacagagcctttttaaggtgccttttg

SEQ ID NO: 989613 - DNA, 120 bp, Artificial Sequence
  ENSG00000248206_4 (sequence is synthesized)
ccagcttttgaactgaacttgtaccagtatctcaagccctgaattgtaagaagagctgagagttctggaactcatttttaaaaagtagatctacgaagattctaggacgtccgtttctgt

SEQ ID NO: 989614 - DNA, 120 bp, Artificial Sequence
  ENSG00000248206_5 (sequence is synthesized)
tactggctccttcttgtgcttggatgcagctccctagcatgcaccaggctttagcgtcagtgctacctgggggatggagccagtccagaaagggccagtcacatccatctcatagctcac

SEQ ID NO: 989615 - DNA, 120 bp, Artificial Sequence
  ENSG00000248206_6 (sequence is synthesized)
cctgtcacagaagaaaagagagcatgtttcctttctccactgtcagaggtctcttctttctgcatagcagtttgcatcttcagagcaacgttgaggatgctgagtcaggtttaaaggatg

SEQ ID NO: 989616 - DNA, 120 bp, Artificial Sequence
  ENSG00000248206_7 (sequence is synthesized)
tttggtcagaaaaaacacaagcatgcaggtatcttttggaaagctacggatgtcacccaggaaggagcaggtgtaagctgttgtgaaagtcatatcccaggagcggtgctggtctcctgc

SEQ ID NO: 989617 - DNA, 120 bp, Artificial Sequence
  ENSG00000248206_8 (sequence is synthesized)
ggtgctggtctcctgcgtgtgcacaggctgagaagttcctggaacctcaattaatgactgcaaaaagtgaaaatgccacttataaaggacagggctttattttagtcttttttttttttt

SEQ ID NO: 989618 - DNA, 120 bp, Artificial Sequence
  ENSG00000248206_9 (sequence is synthesized)
tttgcacaaatagaaccgagataagaacagttttggaacttgagtgcttaaaggtatttgatgtaaaataggcattcagatatttcttgaaaggatgaattatgtgagagagagtttttt

SEQ ID NO: 989619 - DNA, 120 bp, Artificial Sequence
  ENSG00000248206_10 (sequence is synthesized)
aggggaaaatagatagagggatttaaatagtgaaaatggatgcgcttgataaagctatttcctgaggtaggggtgactagctgtagacaatccaagagcaggttggcgtctgcaggacat

SEQ ID NO: 989620 - DNA, 120 bp, Artificial Sequence
  ENSG00000248206_11 (sequence is synthesized)
ctgcctgttgtccgttgtgcgagtgattttaggaatcaccagctctttctccagagttgcacaagagtgattttctcatgcaagcatatcatgtgatttgtctgtatgaaaacaggggca

SEQ ID NO: 989621 - DNA, 120 bp, Artificial Sequence
  ENSG00000248206_12 (sequence is synthesized)
gtgcctcgtcaccgtcaagaataagatctaagccttcttgtcaaccaggatctggccccttttttctctgtatctcaccaccagcctgccccaggggagcctgaacctgccgcagctccc

SEQ ID NO: 989622 - DNA, 120 bp, Artificial Sequence
  ENSG00000248206_13 (sequence is synthesized)
cagtctcagctccccgggctgcctgggctcagcatgctgcacccccgtgctggctgggctgttccgcctctcctggagggggtccgtcttccatgcccctcatcatccacccggctactc

SEQ ID NO: 989623 - DNA, 120 bp, Artificial Sequence
  ENSG00000248206_14 (sequence is synthesized)
tttctcttcatgccagtcagccgacaatgacctcacatgaaagcagtgtccacattttcactcatgcattttaaatgttaaatactcttaaaacagaagtttacttacaattgtaatatt

SEQ ID NO: 989624 - DNA, 120 bp, Artificial Sequence
  ENSG00000248206_15 (sequence is synthesized)
ttcatgtcttttcacattttaagctcgcttaaaaatctatggaatgcttcctctgtccaaggcactgagtttggttttatctgaaatagcctagatttgacaaaagtcctctgaggactg

SEQ ID NO: 989625 - DNA, 120 bp, Artificial Sequence
  ENSG00000248206_16 (sequence is synthesized)
tacttaaatggatgtttgtaagaaaataaagctgaactaaaatctatctactccttttttagaacaataggacagaattatagcagtttagaaagaattttttagctgacaaagtgccaa

SEQ ID NO: 989626 - DNA, 120 bp, Artificial Sequence
  ENSG00000248206_17 (sequence is synthesized)
tgtgctttaagatgagttgtcgttatgaatgtgttctgaactaattctgacgatggaaaaatccatcctataaattatagacaagtaaattataatccacatttcatgcaaaatatggta

SEQ ID NO: 989627 - DNA, 120 bp, Artificial Sequence
  ENSG00000248206_18 (sequence is synthesized)
gtttctgtagataatgtagattatcgtgaccaacaatattttagcagtacctacattctccttttttcttctttgaataaataaatgtggtccggtagttggaagaattttctagtagca

SEQ ID NO: 989628 - DNA, 120 bp, Artificial Sequence
  ENSG00000248206_19 (sequence is synthesized)
tatcttaaaaatgactagttggctcgttaagcaggtttatataagatccacagaagattatggtaaacttgaataatgtttatgttgtgttgagagatacctgtgattcctttaatacag

SEQ ID NO: 989629 - DNA, 120 bp, Artificial Sequence
  ENSG00000269652_0 (sequence is synthesized)
acatgcaggctgcgctgggggccgtgacctggagccgtggccagggggacagcatcctggagccagaaatgtctgacagctcatcctcatctcattctatggatgagaaaaaagagaccg

SEQ ID NO: 989630 - DNA, 120 bp, Artificial Sequence
  ENSG00000269652_1 (sequence is synthesized)
tctgaagaccagaatggcctcctgtgacctgatggtgtctgatgcctaggacatccaactacccccaagaagtcttttcacccagaacatataatcccccagccttggcaccataactta

SEQ ID NO: 989631 - DNA, 120 bp, Artificial Sequence
  ENSG00000269653_0 (sequence is synthesized)
cagatgaggcagctgaggcccagagtcacagggctggtgaggaacacagcctggatcagagcccaggaagcctgggtcaaggctcacgtctcttgagtgaggggctctgccctcctccat

SEQ ID NO: 989632 - DNA, 120 bp, Artificial Sequence
  ENSG00000269653_1 (sequence is synthesized)
cctgttctttgtagtgtcatctttcatgacctacatggagacattcaaatccggggatgacacagagcttggagggagagacgtgtcaggagacagaaacagtgtccctggagatatcag

SEQ ID NO: 989633 - DNA, 120 bp, Artificial Sequence
  ENSG00000269653_2 (sequence is synthesized)
caggcaagtgtgctgagctcacactgagagccagaggggattctgaaaactagactgatgattaaaactgcttaaaaactcagcagcctccccatgctcccgggattaatgatgcaggct

SEQ ID NO: 989634 - DNA, 120 bp, Artificial Sequence
  ENSG00000269653_3 (sequence is synthesized)
cacattgactacacacgtttataccaggcgccatgttctttgccgaaactcccgctcagagcctggatgatctgcccctcacctctgccctcgttcccatccactctcccctccttgctc

SEQ ID NO: 989635 - DNA, 120 bp, Artificial Sequence
  ENSG00000269653_4 (sequence is synthesized)
tgttccagccacactggcctcttgctgttcctcacactctccacgtccaggcacaccccagggcctttgcactggctctcactgctgcctccagtgagctccctccagatcttcttgggt

SEQ ID NO: 989636 - DNA, 120 bp, Artificial Sequence
  ENSG00000269653_5 (sequence is synthesized)
gcagctcatgaggactcgctctaatgccaccccctcaaacaggtcctcctggccttcagtagcccaggctgtcattctgtgtcactgtactctgttccacatcccgtgtcccccatggga

SEQ ID NO: 989637 - DNA, 120 bp, Artificial Sequence
  ENSG00000269653_6 (sequence is synthesized)
gtttgattctcacgtgaccccaataagtagatactataaggcccccacttttcagtgtggcccaagttgggccctgctgaaccctgttaccctcctcaacaatcacccgtacacactgct

SEQ ID NO: 989638 - DNA, 120 bp, Artificial Sequence
  ENSG00000269653_7 (sequence is synthesized)
tcctctgcctggaacccaccccccaacccgcacccccactctaggcccactcctgcccacccatgttaatttgctggggcagccgcaacaaactaccacacactgagtggcttaaactgc

SEQ ID NO: 989639 - DNA, 120 bp, Artificial Sequence
  ENSG00000269653_8 (sequence is synthesized)
agaaatgtatcatctcacagttgcggaggccagaagtccaagttccaggcgtcaacagggtggttccctccaagggcggtgagggagaacctgttcctggcctccctcttagcagccggt

SEQ ID NO: 989640 - DNA, 120 bp, Artificial Sequence
  ENSG00000269653_9 (sequence is synthesized)
gggtgtcagcacgtagattcatcacccccgtctctacctcctcttcgcatgatgttctccctgcatctgtgcccacatttcctctttctgcaaggacgccaatctaacgggattaggggt

SEQ ID NO: 989641 - DNA, 120 bp, Artificial Sequence
  ENSG00000269653_10 (sequence is synthesized)
ctaccctaatgacctcattttcacttgattgcctctgtaaagactctgtctccaaatgaggtcacatttggagatgctggggcttaggacttcaatgtagctttttgtggggccccagtt

SEQ ID NO: 989642 - DNA, 120 bp, Artificial Sequence
  ENSG00000269653_11 (sequence is synthesized)
caacccataacaccactccttgggtatcaacacagacacgcctttcttgcagaagttgtctgaacccccacaccaggctcagcccacccccagcacctgtcccagggcacagcgaccgcc

SEQ ID NO: 989643 - DNA, 120 bp, Artificial Sequence
  ENSG00000269653_12 (sequence is synthesized)
actcccttggcaacttgcttcctctctgtcacccccatggggcccagaacagagacatcctgaacctcacccagaccacacacttagtaggtgctcagaagatgtacctggagagacaac

SEQ ID NO: 989644 - DNA, 120 bp, Artificial Sequence
  ENSG00000269653_13 (sequence is synthesized)
aaccctatccaacaacagctttcccagtgatgaaatccagagatggcttgtatatgtgtgtgttggtgtaaacatatgtaaactaagcatataaaatatcagcaggagacacaaatgaaa

SEQ ID NO: 989645 - DNA, 120 bp, Artificial Sequence
  ENSG00000269656_0 (sequence is synthesized)
gcctggtggttcacatctagctggagctccagctagtgggcagggagacatagtgctgctcccagcagccacgctgcagctccatgcccactgggaaaacacctagaaagacagctgggc

SEQ ID NO: 989646 - DNA, 120 bp, Artificial Sequence
  ENSG00000269656_1 (sequence is synthesized)
cttcaagccagaggcaacaagaggctccaaaaatcaactgcaaggaggtggcagccctaagtagacacctgctggaattctggaattcaggatgtccaggttccctactacctctggtga

SEQ ID NO: 989647 - DNA, 120 bp, Artificial Sequence
  ENSG00000269656_2 (sequence is synthesized)
tctgcccaggcttggaagggctgccagcttcacagctattggacagaccacgatccagtcggctgatgaccccttcagacacaccctaggccctcaccaggctctggcggtgagttctgg

SEQ ID NO: 989648 - DNA, 120 bp, Artificial Sequence
  ENSG00000269656_3 (sequence is synthesized)
cacctacatgcttgtgcgccacggggggacacgcagagtctgcacccgggagcagccgcccgcaggaggcacacaagccacacgtggagcccactgatcagctagaagagattttttatt

SEQ ID NO: 989649 - DNA, 120 bp, Artificial Sequence
  ENSG00000265148_0 (sequence is synthesized)
cttgtttgtgctctaggaagtccccaagagcacaggagcccagagacctcgcaggaggaagcagcagtatctgtgttccaaatcctgcccagcccccaggcagccatgcctcctgccccc

SEQ ID NO: 989650 - DNA, 120 bp, Artificial Sequence
  ENSG00000265148_1 (sequence is synthesized)
aacaggattcctcacatcccaggaccagctggaaaaggtggtgagagttggaaagagactgctcagtgaggactgccctgcgaaccagcttggattcatcccgttcacctccacgttctg

SEQ ID NO: 989651 - DNA, 120 bp, Artificial Sequence
  ENSG00000265148_2 (sequence is synthesized)
cactcggggccgagggaagggaggcagcccaggcagctagagaacttgatgaaacacactcaatctgaatctcgcttgatcgtcatgctgacccagtgagggtcaggcatcctttccgac

SEQ ID NO: 989652 - DNA, 120 bp, Artificial Sequence
  ENSG00000265148_3 (sequence is synthesized)
tactcactcagcagcggatccccacccgcctctgactcccagtgtctttcggctccaacgtaagttcaccgaacgtctaagagctgaggattcaaaggcatgtaagaccgcccctgccct

SEQ ID NO: 989653 - DNA, 120 bp, Artificial Sequence
  ENSG00000265148_4 (sequence is synthesized)
tctttccccgaccttggtcccccatgggccctacaaccaggtccccgactgacaccttgaccagcgaacacagcaaacaggcccgcagatgccgcaggtccttcggcaccgtctccaggg

SEQ ID NO: 989654 - DNA, 120 bp, Artificial Sequence
  ENSG00000265148_5 (sequence is synthesized)
ccatcttcgccgatgggaagaacaacagggagatagacgaccacagcctgtgcacccgcaggaagtaaatagctcgttacccagaatgcccaccacttccggcgcttagacttcctcttc

SEQ ID NO: 989655 - DNA, 120 bp, Artificial Sequence
  ENSG00000265148_6 (sequence is synthesized)
cttccggtgtgggcggacgccagctccgcccctacccccgccagaggagatggtttctcccgccagcaggcggggaggctgggcggccggccgccacctgggccggagcgcgtcgcagcc

SEQ ID NO: 989656 - DNA, 80 bp, Artificial Sequence
  ENSG00000265148_7 (sequence is synthesized)
gggtagtcagcgggcccccggggcgggggggcggctgcgcttgcgcgggagtgtgtcgggctgagccgcagcgccgagac

SEQ ID NO: 989657 - DNA, 120 bp, Artificial Sequence
  ENSG00000265148_8 (sequence is synthesized)
tctccccgttttagaagcattgggggcagtgaatccactgtctccctctggattgtctctgcagagaccgagaagaaatccagggacagccccacccctccttcctaactgcgagagcgc

SEQ ID NO: 989658 - DNA, 120 bp, Artificial Sequence
  ENSG00000265148_9 (sequence is synthesized)
tatagggtttccacttgcttcccacaggaatgctggcctgggagctacggcggaaaaaaatgcgtatttatcttttaaaactccgtctgtttgctcgttccggctgataatttatacttt

SEQ ID NO: 989659 - DNA, 120 bp, Artificial Sequence
  ENSG00000265148_10 (sequence is synthesized)
gcgcagttcttagcgcttagacacggttcctttactaaagaccatttgtaggagattaggtgtcctttttttccctttcatttcaccgtctaggaagcgaaatgccttgttctataggca

SEQ ID NO: 989660 - DNA, 120 bp, Artificial Sequence
  ENSG00000265148_11 (sequence is synthesized)
ctaaaccaccacccctaccaaacctttctcggggaagcagaaggggaacttgtgccttgtgaggaagcgacaaaggccccttctggccctggagacttcacgccaatggagcaccagctc

SEQ ID NO: 989661 - DNA, 120 bp, Artificial Sequence
  ENSG00000265148_12 (sequence is synthesized)
tctgtcctcgcaatagcccgagtgcaggcagaacgcagtcatttgtgtttatctgagaggagctttgggatataaatagtttcaggccccgctgcgctgtcattccagcccagcctcctg

SEQ ID NO: 989662 - DNA, 120 bp, Artificial Sequence
  ENSG00000265148_13 (sequence is synthesized)
attgagctgcttccgggcgggctttcttcttgttggcggtcccatgctgtgttcagatgggctctgtgacaggtttggatgttttctatcactgaataaaactttccactttggaacata

SEQ ID NO: 989663 - DNA, 120 bp, Artificial Sequence
  ENSG00000265148_14 (sequence is synthesized)
cggctgccaggacaaccagggatttgcggccgggccgtaccactggcagcgcggcaggggcggccggccaggccccgctgggcgcaggcctatggagggcggaaccctggagcccccagg

SEQ ID NO: 989664 - DNA, 120 bp, Artificial Sequence
  ENSG00000265148_15 (sequence is synthesized)
catgtaagtcctgcaacaactattaagtaggcccattttatggactgaaaaagcgaggcacagagtatttgcccaaggtctgagtcactgaagtatgataatgtgtgaagtgaacagtat

SEQ ID NO: 989665 - DNA, 120 bp, Artificial Sequence
  ENSG00000265148_16 (sequence is synthesized)
aataataatgactgaagcacagtaagaatccagtcatgctttctccttccctgatctcactaagccacacttttaggggcttacaaaccagttcttattgccaagccctctactctaccc

SEQ ID NO: 989666 - DNA, 120 bp, Artificial Sequence
  ENSG00000265148_17 (sequence is synthesized)
tatcctttcatgaatcggagcctagcctctgataacataaataatttacttctcttgatgtagaaagagatgacgttgttaccctgagtgacagtcacgacagaacaaaaccacaagacc

SEQ ID NO: 989667 - DNA, 120 bp, Artificial Sequence
  ENSG00000265148_18 (sequence is synthesized)
attaacatcttgtctgcatcccacaacaggcagatggccctgtgcagggctgagctggaagaggtgaccagggcctcctcgcaccttgcccaccagagtgagcctggcctgcagctccct

SEQ ID NO: 989668 - DNA, 120 bp, Artificial Sequence
  ENSG00000265148_19 (sequence is synthesized)
gcactcccgctgcaaggcagcaatctgcttgtccttggccagcagtgcactggctgtctcactgaggtcccgggctcgctggcgggctagggccttccgacacaactccaagctggtccc

SEQ ID NO: 989669 - DNA, 120 bp, Artificial Sequence
  ENSG00000265148_20 (sequence is synthesized)
cggccggggcaagggggcactcacctagccagaggaggggttggctgagctcttccccacccacaaaggaggctgcagaaggcgccagggctgctggagctggagccagggcctcctgcc

SEQ ID NO: 989670 - DNA, 120 bp, Artificial Sequence
  ENSG00000265148_21 (sequence is synthesized)
agacctcgcaggaggaagcagcagtatctgtgttccaaatcctgcccagcccccaggcagccatggtatcttctcagctggctcgagggcacacctcccaaaatgcagagaaggcagggt

SEQ ID NO: 989671 - DNA, 120 bp, Artificial Sequence
  ENSG00000265148_22 (sequence is synthesized)
atccagagagttgaaactccaccacagagctctccaaagtggcacatggtgctgtgcagactccaccgctgctgccagtaccagtcctgtgcgtccaaagcctgcctgcagggtagccat

SEQ ID NO: 989672 - DNA, 120 bp, Artificial Sequence
  ENSG00000265148_23 (sequence is synthesized)
cagcagccagggccagagggcagccagctgcagctggtggccaccactcatgctaccagctgcagcaatgcacttcaaccatacatactgcttccactagctaataccaaatgcaggttc

SEQ ID NO: 989673 - DNA, 120 bp, Artificial Sequence
  ENSG00000265148_24 (sequence is synthesized)
tcagatccagacaaatggaggaaaagaacatttatgcttccgtttcagaaagccaagtcgtagttttggcccttcctttctctaaagtttattcccaaaaacaggtagcattcctgattg

SEQ ID NO: 989674 - DNA, 120 bp, Artificial Sequence
  ENSG00000265148_25 (sequence is synthesized)
acagaaggaagagcaggtttctcacggcatgtcagcccagggctcccacatgtggcctcccaccctcatcttcacacattctcacaccttccggagtacagaggcgagtggggtgcagat

SEQ ID NO: 989675 - DNA, 120 bp, Artificial Sequence
  ENSG00000265148_26 (sequence is synthesized)
gggcaagggggcactcacctagccagaggaggggatcaaaggatgctgctaatttggggctgccactgtgatgggtctcatccctgcccccactccagctctataccctgagatgagctc

SEQ ID NO: 989676 - DNA, 120 bp, Artificial Sequence
  ENSG00000265148_27 (sequence is synthesized)
catggatttgcatttccccctctgccttctgctactcaagcccccagggatgaggtgacagttaaccccccacttcctgctagtggccccagagcgctcacttccttccagtctactcag

SEQ ID NO: 989677 - DNA, 120 bp, Artificial Sequence
  ENSG00000234265_0 (sequence is synthesized)
acccagcggcagccgttgactccctccacccttgcttccctctcaaccatctcacctccatctgtccagtggagccagatgtcccaccttcttgggagaaattaattgaggctcatttcc

SEQ ID NO: 989678 - DNA, 120 bp, Artificial Sequence
  ENSG00000234265_1 (sequence is synthesized)
aggacagaggggcaagctgggtctgaggagccaagcagaaaaacttcccaaaatcactgggtggggaggggtcagagacttactgctgccccagctgttctgactctgcccccagctttt

SEQ ID NO: 989679 - DNA, 120 bp, Artificial Sequence
  ENSG00000234265_2 (sequence is synthesized)
ggccccacccttttaaagcaccttcagaggttcccaatggtgacagtaaacaagtctccactgtcctggccatctctgctgtgttcaccctactcctgatctttctggctgctcagggac

SEQ ID NO: 989680 - DNA, 120 bp, Artificial Sequence
  ENSG00000234265_3 (sequence is synthesized)
tgacagccaagatgtgaggctgtgatgagcaggaacagggaggcctggagcccccagccattgtcatcacttccctgatctgcctaaattctgcccagcagtccgtgaaaatggtttgct

SEQ ID NO: 989681 - DNA, 120 bp, Artificial Sequence
  ENSG00000234265_4 (sequence is synthesized)
gatgacatatgtaaggactttaactcccctcaagcaatctgctcatctcaaaggatttgcaatgatcaagaggcgtcctgtgaatgcagtttgcaaaggacttaggcacacagcatctcc

SEQ ID NO: 989682 - DNA, 120 bp, Artificial Sequence
  ENSG00000234265_5 (sequence is synthesized)
cagatgtgaggattatttcaatggtgaagaagcatcctgagaggttacgtagttcaactaatgtcacaccaagagcaggagagcatctgggcatttggacatggaaggtgtggggcacaa

SEQ ID NO: 989683 - DNA, 120 bp, Artificial Sequence
  ENSG00000234265_6 (sequence is synthesized)
gcatctcatggccagggaacgggggaggagcatctcagagctgcatcagagttcatgctggtcctaggacaagagtcaagcacaccctgctttcaccagctgctggtagctttcactcag

SEQ ID NO: 989684 - DNA, 120 bp, Artificial Sequence
  ENSG00000234265_7 (sequence is synthesized)
agtctgatgctaaagaagtctcgactcaggaaaaccacaagggtggacttgggaagactcaacaggttgtaatgactctccagcaaatcatgtcaccatgccatttgatgatggtaggaa

SEQ ID NO: 989685 - DNA, 120 bp, Artificial Sequence
  ENSG00000234265_8 (sequence is synthesized)
gaaacaaagccttgaagattcatgcattgagagaataagagttagtgagtaaaccagatgtgtttcaggactgggaccctgcagtcatcaaccacctcacacctgcgtcagtaacaaacc

SEQ ID NO: 989686 - DNA, 120 bp, Artificial Sequence
  ENSG00000234265_9 (sequence is synthesized)
caagctacagcatgatttttgttctacctcagcagatattttatagatggaaaaactgaggcataaagtgggtaaatacctcccccaaggtcacgagataaagataacgcagtcatcaaa

SEQ ID NO: 989687 - DNA, 120 bp, Artificial Sequence
  ENSG00000234265_10 (sequence is synthesized)
gatgtcagcctaagcttagtcattttgaattttcctggcccttgaaacaactacattttttcacttttatgaccaagaaaaagtctgagaagctcacgacccctcaggattaggtacaga

SEQ ID NO: 989688 - DNA, 120 bp, Artificial Sequence
  ENSG00000234265_11 (sequence is synthesized)
gaccacagcagctgcttgccctgggagctcttcatgcctgttctcagccatcttcagtgaagatttcacaggataacccaaactggctcctttctgtgacaccacccagggaactgcatt

SEQ ID NO: 989689 - DNA, 120 bp, Artificial Sequence
  ENSG00000234265_12 (sequence is synthesized)
ccaagtgtgggtgtacacggatctccaccattggtccttgctctctctcctgtcccatcctttctccccttcctcagttatgctctggggcaggtgagtaatcctgcatgccttcggaga

SEQ ID NO: 989690 - DNA, 120 bp, Artificial Sequence
  ENSG00000234265_13 (sequence is synthesized)
tgtccatttgggaatgagatcctacctttccttttcccaggcacccccagccttatgagggattcccatcacgtggctttagagatgagaaggcatctttgccatgaactcttgcttcat

SEQ ID NO: 989691 - DNA, 120 bp, Artificial Sequence
  ENSG00000234265_14 (sequence is synthesized)
cactttggccacttaattctctgaacctctactacatgaagagactagaacttgattagaaaaaaatggaatgactcttaatgagcaagtggatgaataaattgtggtaaatccctacaa

SEQ ID NO: 989692 - DNA, 120 bp, Artificial Sequence
  ENSG00000234265_15 (sequence is synthesized)
tattaaaagtggccacctgcagagtcttccttccttagagtctatgcagaagcccaagaaacaggctgcagccccagtaatctggggctactctatacctctctggatgaacttaacctg

SEQ ID NO: 989693 - DNA, 120 bp, Artificial Sequence
  ENSG00000234265_16 (sequence is synthesized)
ccacattcctgggggtaagaacttcaagaactgacatgttcactccctccaatatctgccttccttccttttctgactttggatatgtaaagtgatgatcttcaggcttggctctcatct

SEQ ID NO: 989694 - DNA, 120 bp, Artificial Sequence
  ENSG00000234265_17 (sequence is synthesized)
ttattgtattatagcctatcctatcccactgagcttttctttcttccactgcatatccaaccactcctctcttagtggtcctagacaggaggggtcttctttgctgtagaagaaagcctg

SEQ ID NO: 989695 - DNA, 120 bp, Artificial Sequence
  ENSG00000234265_18 (sequence is synthesized)
tgatctcagcctgtaggtgcaactcttagtctgctcaatggggcctacaggaaccttagaaaatcttttctctcataatagaggctgactctcaaggttcttattaaacaacaacaattt

SEQ ID NO: 989696 - DNA, 120 bp, Artificial Sequence
  ENSG00000234265_19 (sequence is synthesized)
agcagggcacaaaagctctagaaatacaaagctgcagaggatggacgtgttctgcctttcatttctcaagacagatttgcaatgatcaagaggcgtcctgtgaatgcagtttgcaaagga

SEQ ID NO: 989697 - DNA, 120 bp, Artificial Sequence
  ENSG00000234264_0 (sequence is synthesized)
aggcacaggagtcgctcctcatagcgagtctggtgcggcctacgcgcggcgcttcctttcggacctgaggcccagaccctcaaaatagagggagcggataaggaagtcataatattaatg

SEQ ID NO: 989698 - DNA, 120 bp, Artificial Sequence
  ENSG00000234264_1 (sequence is synthesized)
aactctgaggactgctatgaggataaaatgggatcatcatcatcatcatcatcacttactcaatgcgtactacaatcctggcactcctctaagtgttacaaatatattaactccaacaat

SEQ ID NO: 989699 - DNA, 120 bp, Artificial Sequence
  ENSG00000234264_2 (sequence is synthesized)
aactccagaagaaatcctagtattgcataagtgatcttcatgaagcttcctattccctgtggagtttggaaggagaggcattcctgtaggcttctgctgagaagggaagaagagtcttcc

SEQ ID NO: 989700 - DNA, 120 bp, Artificial Sequence
  ENSG00000234264_3 (sequence is synthesized)
tctgctgagaagggaagaagagtcttcctgcttggacactgggcttctgaaaaggccatgtgctctcctatctcacagttttctttcttttactttttttgtttgtcttttttctctttt

SEQ ID NO: 989701 - DNA, 120 bp, Artificial Sequence
  ENSG00000234264_4 (sequence is synthesized)
ttgtatgtgttttgactgtcacaagaatgagcattggacgtggtagaaaaaattcttggattagtgcctctcattagtccctaaaaatacatatgtatctggccccaactcctggtgact

SEQ ID NO: 989702 - DNA, 120 bp, Artificial Sequence
  ENSG00000234264_5 (sequence is synthesized)
agcttccgcaatgatttttaaaacaggacaaaatcccatatgaaccttctgttatactccattaaattgtcaataccagagatacaggaaaattattttctcattctaactttatatacc

SEQ ID NO: 989703 - DNA, 120 bp, Artificial Sequence
  ENSG00000234264_6 (sequence is synthesized)
caatatctaacaaagcagctgcaaaatggttgctactcaataaatatttgttgaatgaatgaaggaatgaaaagccaaatgtaatacatagaaaagttgattataaattctttggtacaa

SEQ ID NO: 989704 - DNA, 120 bp, Artificial Sequence
  ENSG00000234264_7 (sequence is synthesized)
aatagacagacaaaacataatctaggaaatatgcaccctgagaaattgctatcatcatcttaataccttataacaacgaaagttcttaaactggtccccttaataccattgtgtttattt

SEQ ID NO: 989705 - DNA, 120 bp, Artificial Sequence
  ENSG00000234264_8 (sequence is synthesized)
tctgtatgtttatacttttatgctttggtttcattttctacttattagttaaatgattatgagaactgtggggataaatttaaaacattactgtgtttctatagagagttctgctgtaat

SEQ ID NO: 989706 - DNA, 120 bp, Artificial Sequence
  ENSG00000234264_9 (sequence is synthesized)
gcagtgattatgaaatgatctcaaatctattcagaattattaaaaggtacagttcaataaatatttttatttttgttaattcttccccaaatcacattaaaacgatccttttgcacttaa

SEQ ID NO: 989707 - DNA, 120 bp, Artificial Sequence
  ENSG00000234263_0 (sequence is synthesized)
gaggcaatcatgagaatttttctagaatcatctctttattgctgtctgctcagaacaatcaaaactggtagcgggaagagaatcagtgtaggaaggcaacattgacaaggccaaacaacg

SEQ ID NO: 989708 - DNA, 120 bp, Artificial Sequence
  ENSG00000234263_1 (sequence is synthesized)
aagtggtgactcactgagtccttgcactctcgaaggaaacaaccaccttagaaaaaaccatgcactttcggcgggggcttaatcacattaggttctctgtgtagcatattaatgcctgcc

SEQ ID NO: 989709 - DNA, 120 bp, Artificial Sequence
  ENSG00000234263_2 (sequence is synthesized)
acaagggtgctatcaaccagaatcttcagtgaatcttctttgtctgaattgcacatatctcagaggagaatagagaatgtgtaaggacaccgtggcccatgcattgacactgtcatagat

SEQ ID NO: 989710 - DNA, 120 bp, Artificial Sequence
  ENSG00000234263_3 (sequence is synthesized)
actgatcttcctcctcactgaacgccacagaccaagaacccataatgtcctcctcaggaaccagcacagtcccaaagtccacagaactcaaaagaacgctggtagattgatttgctctac

SEQ ID NO: 989711 - DNA, 120 bp, Artificial Sequence
  ENSG00000234263_4 (sequence is synthesized)
catcatctcaacagtgctttcctcgggtgtagcatgatgcattttaacacaattaaaatgacatgttagaaatgttgctgatggggttgctggggcaatgacttctttcaaagtcttccc

SEQ ID NO: 989712 - DNA, 120 bp, Artificial Sequence
  ENSG00000234263_5 (sequence is synthesized)
tctatttactgcactcatggaagtgagtctcatgggaagctatgtcttagctgaaagcctgtcttcaaagtcctttggcaaggaagttttctgttatgaataaattagtatcacaagtaa

SEQ ID NO: 989713 - DNA, 120 bp, Artificial Sequence
  ENSG00000234261_0 (sequence is synthesized)
cagccacataaaggatttgaaagctcaacttgctttcccactctgttatccctggagttggcttggattcaccctgaagccttccccctcccggggaaagttgcttcacgttgcagctca

SEQ ID NO: 989714 - DNA, 120 bp, Artificial Sequence
  ENSG00000234261_1 (sequence is synthesized)
gcaggtttgtccagctacataggctccagaaaacaagaagcaagactggaaagctggggatgattgtacgccctcgcctgaatcttacgtggttcctccttcttccacctggccagtgca

SEQ ID NO: 989715 - DNA, 120 bp, Artificial Sequence
  ENSG00000234261_2 (sequence is synthesized)
gagccgtgggtgccacgtggccacttctggattgggttccccttggcctgccaccctgtccttctgctttcccactttgccagccagagtcaatttgaggacgccaagttctcctctcca

SEQ ID NO: 989716 - DNA, 120 bp, Artificial Sequence
  ENSG00000234261_3 (sequence is synthesized)
tacagagctcctggtctccttgtaacttgtaactcctgggcacagttacaagtgctgaattcttgcgaggatgaactcaagatacaaaatatgcttggcaactcacccctgagtggccac

SEQ ID NO: 989717 - DNA, 120 bp, Artificial Sequence
  ENSG00000234261_4 (sequence is synthesized)
aggcacacgcaggagtcgaacccacccacctctgctgacagtcatgggtcaagctcaaagtcctggctgcttctctgctcaagaagaaaagacacagaggcaaagagaaacacatagaga

SEQ ID NO: 989718 - DNA, 120 bp, Artificial Sequence
  ENSG00000234261_5 (sequence is synthesized)
ggagaatgcctcgtgaaaatggagaccgagattggtgcaatgtgtccacaagccagggaatgccaacgtggccagcaaccaccagaagctgggagagaggcatggaacagagtcctcgga

SEQ ID NO: 989719 - DNA, 120 bp, Artificial Sequence
  ENSG00000234261_6 (sequence is synthesized)
acatcagccctgaatagcaaatacagatgacccaggtttaaatcctagttctgccacttatgagcgtgggtacataactactttctagagccccggtttcctcatctgtaaaaaacctca

SEQ ID NO: 989720 - DNA, 120 bp, Artificial Sequence
  ENSG00000234261_7 (sequence is synthesized)
tacggttattaagaagatcaaatgagatacaaacataaattcttaacagtgctggcatgttaattgttcaataaatatgagttatttacaacaattgtgatagtaatgagtaacacagag

SEQ ID NO: 989721 - DNA, 120 bp, Artificial Sequence
  ENSG00000234261_8 (sequence is synthesized)
acacagagaaatgagaattgacttaacagaggctggctcggcaagcctctatgccaacaaaatttatttggaaatcaaaagtatttacttcagactgggcgcagtggctcacacctgtaa

SEQ ID NO: 989722 - DNA, 70 bp, Artificial Sequence
  ENSG00000234261_9 (sequence is synthesized)
gcccagtccacaggcagacagcccggtgccacaccctgggcttggtagttaaagatcgacccctgaccta

SEQ ID NO: 989723 - DNA, 87 bp, Artificial Sequence
  ENSG00000234261_10 (sequence is synthesized)
ataattactggtgtatgcagcccccagtcacgtaccctctacttgctcaatcgatcacgaccctctcacgcagacccccttagagtt

SEQ ID NO: 989724 - DNA, 120 bp, Artificial Sequence
  ENSG00000234261_11 (sequence is synthesized)
gctccagcctctttgctacagccttgagtcttctgctgggtcctttccaaccaagaacctatggggtctagtcttcccctacactgcctttcactcaccactgggctgcctgctttaagc

SEQ ID NO: 989725 - DNA, 120 bp, Artificial Sequence
  ENSG00000234261_12 (sequence is synthesized)
atggtagcattcatctcattcacctttattgggttaaaagtgtgtgagacacaaaactgaaacttgaaagttaagaaacttgaaagttaagtaacagcttttctctgtcttcgtattttt

SEQ ID NO: 989726 - DNA, 120 bp, Artificial Sequence
  ENSG00000234261_13 (sequence is synthesized)
ctcccaaatacatgcaatctctagagaacttcaagaaaacttcctctctaagcagcagagaatagcttgcagaagagggaaaaattcaagatctattgtattttattgatttatacctgg

SEQ ID NO: 989727 - DNA, 120 bp, Artificial Sequence
  ENSG00000234261_14 (sequence is synthesized)
ttttgttccaaaattgttgttagctgcatgcataattaactctaccactgactgccgtgtaacttactccaagttctctttattgtagtttcatgcacggccttggcatatccaaagatt

SEQ ID NO: 989728 - DNA, 120 bp, Artificial Sequence
  ENSG00000234261_15 (sequence is synthesized)
aatgaagatggatccaaatccttactactaagcaaaaagcctccaagcaaataacaatggactgaagagttacctttgtaggcataaacgtatcattacaattaaagagatgtcaaatga

SEQ ID NO: 989729 - DNA, 120 bp, Artificial Sequence
  ENSG00000234261_16 (sequence is synthesized)
caaagtgctgggattacctgcatgagccactgcacctggcttcagccctttgttttatccaagagaaggtcaagagcagataaattggaagaaaagacacagaggcaaagagaaacacat

SEQ ID NO: 989730 - DNA, 120 bp, Artificial Sequence
  ENSG00000234261_17 (sequence is synthesized)
atgtgggtggctgagaagggcactagggtgggggtggctggaggaattttaagtgctgtgatgaaatgggcacccttctctgccctccatcgccaagccctacacctctgcgaagactgt

SEQ ID NO: 989731 - DNA, 120 bp, Artificial Sequence
  ENSG00000234261_18 (sequence is synthesized)
gacacataaagtcctgtgtcaacgatctgtgcccgcagagagagcctgctccagcctctttgctacagccttgagtcttctgctgaagctgtggagactaccaaatggactcgtctagat

SEQ ID NO: 989732 - DNA, 120 bp, Artificial Sequence
  ENSG00000234261_19 (sequence is synthesized)
ttcacatgcaacgtggctctgccttccctgagcactctgggcctttccatggagacagaatgaatagataatgggctgtcaccatcttgcactgccagctgtcctctctgaaggttgaac

SEQ ID NO: 989733 - DNA, 120 bp, Artificial Sequence
  ENSG00000234261_20 (sequence is synthesized)
agaagaaaaaaggagtcagcacagatgacaagctctgctttttagtgtacatggtcttccccagtatgcacattcttttcctattcttgacttatctcccttaacgataaaatggccaag

SEQ ID NO: 989734 - DNA, 120 bp, Artificial Sequence
  ENSG00000234261_21 (sequence is synthesized)
tcttgacttatctcccttaacgataaaatggccaagttagaaaccctagacactcttattctcttttctttctttctttcttttctttcttaagagacagggtctcattctgtcacccag

SEQ ID NO: 989735 - DNA, 120 bp, Artificial Sequence
  ENSG00000234261_22 (sequence is synthesized)
gcagcctgaaattcctaggctcaagtgattctcctgcctcagcgacttcggagtggctgagattccaagcttaaaccattgtgtcctgcacttctcactttcatggctgttatcctgggg

SEQ ID NO: 989736 - DNA, 120 bp, Artificial Sequence
  ENSG00000234261_23 (sequence is synthesized)
cacagcctccgtaaccttcagcagccaccatcctgatcagttagcagccatcatcaagacaagacccttccccagcataaacattacggcttgctgaagacttagatcatagttagcatt

SEQ ID NO: 989737 - DNA, 120 bp, Artificial Sequence
  ENSG00000234261_24 (sequence is synthesized)
tttaagcaatcaagtgttttaaaattaagatctgtgcccgcagagagagcctgctccagcctctttgctacagccttgagtcttctgctaagaaaagacacagaggcaaagagaaacaca

SEQ ID NO: 989738 - DNA, 120 bp, Artificial Sequence
  ENSG00000234261_25 (sequence is synthesized)
tcaggaagtctaacaaaaaccacgcatcatttgtctgtgggaagagggtatagtataattgaaatgtcaaggtttttcaatagtttgcttttaatggaataatagttgctaggtgtggta

SEQ ID NO: 989739 - DNA, 120 bp, Artificial Sequence
  ENSG00000234261_26 (sequence is synthesized)
acactggttatctcatgaaaaaaggaattaacatatacaatttgtttcagataaaagatttacaaagtatagggaacatacgtgaaataataaaagtgtctttgtattgtgttccaacca

SEQ ID NO: 989740 - DNA, 120 bp, Artificial Sequence
  ENSG00000265142_0 (sequence is synthesized)
gagaggctattttttgctatggttgactaaatatggtcagggaagagagaggcacaagagagcctgtttgcctgggagtgcatgtttcaaatgcttagctgcctataaagctgtaacagt

SEQ ID NO: 989741 - DNA, 120 bp, Artificial Sequence
  ENSG00000265142_1 (sequence is synthesized)
ttagccagtggtcactgaggaagaatataagttagcctcgtagtgaccatgtggaagtcctgacctcgcttgcagacttgacctctggatgtgacaaggtgaggttctgtgttcactgat

SEQ ID NO: 989742 - DNA, 120 bp, Artificial Sequence
  ENSG00000265142_2 (sequence is synthesized)
acatccccttccttcaccgggctcatgaaaagaaatgctgaatcagcaaatagagtgaacgaacaatcaagatgagatggctgctgttgatgtgattctctaggttactacctttcttcc

SEQ ID NO: 989743 - DNA, 120 bp, Artificial Sequence
  ENSG00000265142_3 (sequence is synthesized)
tgctgcaaatgctgcatgacactaagcttacaggatctagaagcagactacaaaaaaagaagaaattcactctgaagactgaagaaacactaggctgatcttaagtttccgaaatacact

SEQ ID NO: 989744 - DNA, 120 bp, Artificial Sequence
  ENSG00000265142_4 (sequence is synthesized)
ctgtaacactacactgattctttgaatctcttgcaaaaagaatcaaaccaggacaaagttcaacagataactggtcaaatgcttaggaatgtctatgtccaccaagaatatggaaccatt

SEQ ID NO: 989745 - DNA, 120 bp, Artificial Sequence
  ENSG00000265142_5 (sequence is synthesized)
aatgccatgcttcaggtaaacttgttacaaaatttagtcttcgataaattagtctctgcaaatgatttaccattgctctacattagtaagctgaatgtttcactaacaaataagaaaata

SEQ ID NO: 989746 - DNA, 120 bp, Artificial Sequence
  ENSG00000265142_6 (sequence is synthesized)
aaatatttcatgtttttacagctaacaacttagtaatacctactcagagtacatacttctttatgtacccatatgaacatacaatgctatggaatgtaaagaagtatgtatttttggtag

SEQ ID NO: 989747 - DNA, 120 bp, Artificial Sequence
  ENSG00000265142_7 (sequence is synthesized)
gcaataaaccaccaagggagaattaaactgagctaaaagaagctcttgcttctttctacgtgaatgaccgtcatatggtaaattaacctagtcatgaacagatgacctttggcaatacta

SEQ ID NO: 989748 - DNA, 120 bp, Artificial Sequence
  ENSG00000265142_8 (sequence is synthesized)
acaccaaaaaaaaaaggttatctactactgatagatagaaactatccctaaggtttttatttcatgaaggaaaagaagatccagtgaagtagatttcaattatcatgaaactccttttaa

SEQ ID NO: 989749 - DNA, 120 bp, Artificial Sequence
  ENSG00000265142_9 (sequence is synthesized)
atcatctaagtttaaaacagacatcttacatttttaaattaggcactctcattattaaaatttgactgcaaaagggaaaatagtattactagcacaaaagaatgaggaatacacatgacc

SEQ ID NO: 989750 - DNA, 120 bp, Artificial Sequence
  ENSG00000265142_10 (sequence is synthesized)
tattttctgtctccacaatttaatcttaagtatatctcattagtagggctcactgatttgtacagaaaaataagatactaagagctggcttcattcacataataagctatttcttctcat

SEQ ID NO: 989751 - DNA, 120 bp, Artificial Sequence
  ENSG00000265142_11 (sequence is synthesized)
tttgataaatgtataattaatattagaggaatttctgaccaaaagttttgttgttttaaaaaggctttcttttttgacagctacaaacatagtggcccttgtccttccttctcaagttta

SEQ ID NO: 989752 - DNA, 120 bp, Artificial Sequence
  ENSG00000265142_12 (sequence is synthesized)
tcagggtcttaacccaaatctctactttaaatgtgaagttaaaacttaaaattaattaaaatgtaagatttaagcatgaaaaatgacaaaattctggtccacagctgtaagtcagcaggg

SEQ ID NO: 989753 - DNA, 120 bp, Artificial Sequence
  ENSG00000265142_13 (sequence is synthesized)
tatattggtaacagactaccaaatatttaaaagaaattaatttatctgtattatcttcgaatttgctttctccaaagagggcatgtaaaatgaaagcactatagtcaagaaccaatttat

SEQ ID NO: 989754 - DNA, 120 bp, Artificial Sequence
  ENSG00000265142_14 (sequence is synthesized)
acagatcgaagaactgtttttattgtactatgcaattacaattcaatttctctaaacttgatcaatccattgtttagaaatatcaaaatacttttatttcacacagtttgtatattattt

SEQ ID NO: 989755 - DNA, 120 bp, Artificial Sequence
  ENSG00000265142_15 (sequence is synthesized)
ataaaaaattccaaataatgctcttagcaaaatttataagcagtacctgttttaagctactaatgacaaagttagaaaataagagtaatattcacatattctaaccatttcttactaaaa

SEQ ID NO: 989756 - DNA, 120 bp, Artificial Sequence
  ENSG00000265142_16 (sequence is synthesized)
tagttaatacaaagatgattttcattttatcagattataaagaatgagaatgacttacacatggcatcatatgtgttactgcatgtttactggaaattataaaaggcacataattttaaa

SEQ ID NO: 989757 - DNA, 120 bp, Artificial Sequence
  ENSG00000265142_17 (sequence is synthesized)
acataagcatagcccttctgatcatccacaaaacagaatggcaatgattcatgttctatttggtaagtttacctgtataggtcctaaataccaagaactcaaaatatatacctcaaaagt

SEQ ID NO: 989758 - DNA, 120 bp, Artificial Sequence
  ENSG00000265142_18 (sequence is synthesized)
agaggttcttctataaaaatactcaaagcttattactctacttgtgttttataataaacagttatattggtcattctataggtatacaagttgtttaataatccttctcaaacatcctag

SEQ ID NO: 989759 - DNA, 120 bp, Artificial Sequence
  ENSG00000265142_19 (sequence is synthesized)
caactaagactctctttgctataatattaagactatataaataatccttagaaaataaaatgacaggctattcatttttaaaagtaaaattatatgctgattctggtgcttgcgagttta

SEQ ID NO: 989760 - DNA, 120 bp, Artificial Sequence
  ENSG00000265142_20 (sequence is synthesized)
acttatctaagagtattttcaatcactctaaaatgtcacatctatcacttagatcagctgttcatttttaactgagtacatattaaactctgggcatctgctgacactggtataactcaa

SEQ ID NO: 989761 - DNA, 120 bp, Artificial Sequence
  ENSG00000265142_21 (sequence is synthesized)
acatttcaactgtctccctgacagggataacagatgctgacattatcaaatgctgtactatttttttcccatggcctctccttgccccgatatggccagtatatgaaactgaactgccat

SEQ ID NO: 989762 - DNA, 120 bp, Artificial Sequence
  ENSG00000265142_22 (sequence is synthesized)
ccaaaaacacacttgagcaactggatctgctaaacagctcccatataactagtaaaaatagaagccagtattattgctatcttcagcacttaagtttaggcagtttaacacctgtttcac

SEQ ID NO: 989763 - DNA, 120 bp, Artificial Sequence
  ENSG00000265142_23 (sequence is synthesized)
ttctactagaaaaaatgatgaaaaagaattgtagttaatttcaccagcagtatgatacttaccaaccaacagacgcagaatatacttagtgtaagagtcatttgcatactgcctgaatta

SEQ ID NO: 989764 - DNA, 120 bp, Artificial Sequence
  ENSG00000265142_24 (sequence is synthesized)
gcgttgacctctcagtttaaaatagtaactgtaaagaatatttctctactctatatttctctgagagcacttaactttataggcaaattataatttatcaaacttttattttatgcaaga

SEQ ID NO: 989765 - DNA, 120 bp, Artificial Sequence
  ENSG00000265142_25 (sequence is synthesized)
agacacccctctcaagacattgaaatcaacagtaaaaccacattataacaaaaatttactctgatttttcaagtattatccacacaatagattttaatacttgtatccatggattgtaac

SEQ ID NO: 989766 - DNA, 120 bp, Artificial Sequence
  ENSG00000265142_26 (sequence is synthesized)
taaccaccatgtattactaaggcgataatgagaagtaacttggcaatctgtacccaaaatgacaaagaacttagtcaaggaaatagacctttaaaagggttaaattactaagctatgatt

SEQ ID NO: 989767 - DNA, 120 bp, Artificial Sequence
  ENSG00000265142_27 (sequence is synthesized)
agtaacaccacgtaagcaaaaacaaagaaaaactggcatgcatggtagttcctttcgacacaagtccaagcaatacactgaatacacatgtgatctatttataaatcaaagggcagaggt

SEQ ID NO: 989768 - DNA, 120 bp, Artificial Sequence
  ENSG00000265142_28 (sequence is synthesized)
actttcttaaggccactgatattcctacacccatcaacaatttgctattagccctcaactataatgctaaaagaagcagtggcagtagaagggggtgactaactgaactcttccccaacc

SEQ ID NO: 989769 - DNA, 120 bp, Artificial Sequence
  ENSG00000265142_29 (sequence is synthesized)
ttttagcttaactatttatctggtttgctgcctagagataaatggaaaacattactctaaaatacatcaaggtctatttgttcctttaaatactattggttttgaaatagcttattgtct

SEQ ID NO: 989770 - DNA, 120 bp, Artificial Sequence
  ENSG00000265142_30 (sequence is synthesized)
acatgtaagaattaagcaaagacttcggctgtggacaagattagaaaaagaaaaagaagcaaagatgttgaaaacaaagacgtacattgatcattccttaatgcagtaatgtgttaaaag

SEQ ID NO: 989771 - DNA, 120 bp, Artificial Sequence
  ENSG00000265142_31 (sequence is synthesized)
gaaaagatttttaaaccattaagcgcaggaaaacagtaggaaagtgacttcaaaatggaaaatttgacattcagtgactgaagcattggtatgataatttctaacacttgtagaaggtcc

SEQ ID NO: 989772 - DNA, 120 bp, Artificial Sequence
  ENSG00000265142_32 (sequence is synthesized)
atgactgtaattttaccaatgaaaagcatttaactgttttggattccaaactagcagcactacaatgctttgctagagctggtaaaatggaaccaaatcgcctcttcaatggatttggtc

SEQ ID NO: 989773 - DNA, 120 bp, Artificial Sequence
  ENSG00000265142_33 (sequence is synthesized)
cccttcaaccagctgtagctatgcattgattactacgggacaaccaacgttttcatttgtgaatatcaattacttgccaactaatttcaacttatttacattatgcagactgtgattata

SEQ ID NO: 989774 - DNA, 120 bp, Artificial Sequence
  ENSG00000265142_34 (sequence is synthesized)
atcaaataacttgttactgttaattctacctggaaaagctagaatggttaaagatgtttataaaaagctttatgaaaaatgtatggatgacttaaggatttcaaataaaaattttactta

SEQ ID NO: 989775 - DNA, 120 bp, Artificial Sequence
  ENSG00000265142_35 (sequence is synthesized)
tggtcactgaggaagaatataagttagcctcgtagtgaccatgtggaagtcctgacctcgcttgcagacttgacctctggatgtgacaaggtagcttcactacagctctactatttaatc

SEQ ID NO: 989776 - DNA, 120 bp, Artificial Sequence
  ENSG00000265142_36 (sequence is synthesized)
aaaaaaaaaaaaaaaatctaaaagcaagaaagatgcagactatttcctaagaagtcagaagaacccaatgtattctggagggcaaagaaaaacagggtgaatgtttacagttatttgggg

SEQ ID NO: 989777 - DNA, 83 bp, Artificial Sequence
  ENSG00000265142_37 (sequence is synthesized)
actataaaattaacttctgcaactttttcccctcttctgaagcatttcatctgacaagctaggttcattttcttggcctttgt

SEQ ID NO: 989778 - DNA, 120 bp, Artificial Sequence
  ENSG00000265142_38 (sequence is synthesized)
atttcatctgacaagctaggttcattttcttggcctttgtagcaaccttttttgattgcttaactttccctatataactgtgcaagactgttatatgacattccaaatcaaatggccaac

SEQ ID NO: 989779 - DNA, 120 bp, Artificial Sequence
  ENSG00000265142_39 (sequence is synthesized)
actgattcaattttagagttgtttttgttggtggtttttgtttttgtttttgtttttggtaaagggaagaggggaggagagggaaaagtaagcttgttttttgtttgctcgtttgttttt

SEQ ID NO: 989780 - DNA, 120 bp, Artificial Sequence
  ENSG00000265142_40 (sequence is synthesized)
attctatctaaccatagcctaatttcacaattcaagttaagagctaatgtagtgtaaaaaggaatattgttcagatactatggcagtaactttttatcttaaaaatgtacaaatacatta

SEQ ID NO: 989781 - DNA, 120 bp, Artificial Sequence
  ENSG00000265142_41 (sequence is synthesized)
ttgtcatttacattattaaagatttagtcattattgtttcagattaagtgatgattttgcatctctagtaagtcacatcctgcttccaaagtatacttattttctaaaactattagcttc

SEQ ID NO: 989782 - DNA, 120 bp, Artificial Sequence
  ENSG00000265142_42 (sequence is synthesized)
tatttcaaggtttagtcaaccaagaaacttggcagatcataaaatactttttaatgcttactaataattggccacaaaaataaatcagaacgtgcatggtgtaattctaatgctgcattg

SEQ ID NO: 989783 - DNA, 120 bp, Artificial Sequence
  ENSG00000265142_43 (sequence is synthesized)
ctgaaactgctgtagtgctgggctatctactgctacattctgatttgctctctataagctgcactagctttttatcacaagctgcagaaattctactatccctgcccttttttttcctcc

SEQ ID NO: 989784 - DNA, 120 bp, Artificial Sequence
  ENSG00000265142_44 (sequence is synthesized)
tttgacaaatctgaaaatttcttgaggttttaaattaaccttctaataccacaataactgaaggctacttaccaactataatttcttttcattctaaactatcaaggtaaataaaaccca

SEQ ID NO: 989785 - DNA, 120 bp, Artificial Sequence
  ENSG00000265142_45 (sequence is synthesized)
ggtgctcacagactaaaacctttcagttctttgaagtgatactttctaaaagttgacgattctgacagttatcctttatactaaaaagattaaagaatcaaaacaacttaaactcaccaa

SEQ ID NO: 989786 - DNA, 120 bp, Artificial Sequence
  ENSG00000265142_46 (sequence is synthesized)
aattagatatttctacatctatttgaatttgtattcaactcatatttgtatttaacccaaagagaagcatcaaagtgcaaacttcaggtaaggaactaataaagaaaaaagaatgacaaa

SEQ ID NO: 989787 - DNA, 120 bp, Artificial Sequence
  ENSG00000260450_0 (sequence is synthesized)
atcactactgctggggtattttgctgccaagataatggtctctattatggattgaatgttaatgggcagtcctttaccccagactacacccagccccttctgcagctccacatttgaagg

SEQ ID NO: 989788 - DNA, 120 bp, Artificial Sequence
  ENSG00000260450_1 (sequence is synthesized)
ccttgtctaagtggcatctcaatgagatgggcatggaagtcatccaacagctgctggagggactgtgcagagttacgacggagacagtgactcctccaaaggggtctcgaggggatgcat

SEQ ID NO: 989789 - DNA, 120 bp, Artificial Sequence
  ENSG00000260450_2 (sequence is synthesized)
taaatgcattcgtgggctctcaagaagcattagggatgccatgaaggaggggcatttttactttgtgtcctaccaaattcacttaattatacatagcaatgaggaaagtgtgggaaacag

SEQ ID NO: 989790 - DNA, 120 bp, Artificial Sequence
  ENSG00000260450_3 (sequence is synthesized)
caaatctgaccttagtgtgcctttgactaatccaagcttattgtttgtgagttaatattgtgaaatgatcccctgtgcatataatgcagtcatcttcaaataaaaatctgtggcttcaga

SEQ ID NO: 989791 - DNA, 120 bp, Artificial Sequence
  ENSG00000260450_4 (sequence is synthesized)
atgggggtgggaggggatagaagaagcgttcagcttctaatcttgaaaagggaggactcggaacttggagaggcaaaaatgaggaaatcatccattagagtgcctcagctgtgtatgaag

SEQ ID NO: 989792 - DNA, 120 bp, Artificial Sequence
  ENSG00000231163_0 (sequence is synthesized)
tagggaataaatgaaatgcctgggacatcatcgttaagtggcatctgatgcataagcagtgccctaggaatggggttgcctgccttggtctctaaaggatgggttcaaaaggcaagagca

SEQ ID NO: 989793 - DNA, 120 bp, Artificial Sequence
  ENSG00000231163_1 (sequence is synthesized)
gcacacaagaagatagcttcaagcaggagataaagcttggcccagggcccaaaggggatacgacccttcagcaaactgacatgctgaaagctgccctatggagaggctcatgtggcaagg

SEQ ID NO: 989794 - DNA, 120 bp, Artificial Sequence
  ENSG00000231163_2 (sequence is synthesized)
aacagagggtggcttctggccaacacccagtgaggaactcaggccctcagtcaaacagcctgcaaggaactgaaccctgccaataaccaggcagtgtcagcccccggccaatgaccacca

SEQ ID NO: 989795 - DNA, 120 bp, Artificial Sequence
  ENSG00000231163_3 (sequence is synthesized)
agtaagaagccaggagccatcccgtgaggccgttactgcaaacaagctgaaaatcctgctttgtttcttttggacacaacatgctttccttcagcttcagtagacgatgaggccagcacc

SEQ ID NO: 989796 - DNA, 120 bp, Artificial Sequence
  ENSG00000231163_4 (sequence is synthesized)
acatgggctagatgtacatgagatgtgagcaaccacacttcccctctgacggggacagacagcatcacaggacatgaagttctaagaggttcagtgacttgtctaagattaaacagctat

SEQ ID NO: 989797 - DNA, 120 bp, Artificial Sequence
  ENSG00000231163_5 (sequence is synthesized)
gaatggagaactggaggcaaatgctgagctctgaaacttctcctggcagttcaagagagcgatggagggaatgctggggcacatctaaataaagcctccaagtgggagttcctgctcagc

SEQ ID NO: 989798 - DNA, 120 bp, Artificial Sequence
  ENSG00000231163_6 (sequence is synthesized)
tatgcatgagctctttgtgacttcatctcccagcctacaacttgtgaaataagcacgacttcactcagagcacagccagaaacatacaaactttccaaaaatatttgaatgttgacagca

SEQ ID NO: 989799 - DNA, 120 bp, Artificial Sequence
  ENSG00000231163_7 (sequence is synthesized)
gaagaactgagggctgtctctggtcaatagcactgaggaactgaatccagcaaacaattatgtgaagaaacttggaagcttgtcctcccctctagttgagctttgagatgactgccgccc

SEQ ID NO: 989800 - DNA, 120 bp, Artificial Sequence
  ENSG00000231163_8 (sequence is synthesized)
tagtggacaccttgattgaagccttatgagaaaccctaagccagagaacccaattaagctacgcttacattcctaacacagagaaaatatgagctaataaatgttgtttcaaaccactaa

SEQ ID NO: 989801 - DNA, 120 bp, Artificial Sequence
  ENSG00000231163_9 (sequence is synthesized)
cactgggcatacacttcaatcatccataaagaaaaatggaggcctcatcatctctcacctgggcaactgcaacaatgagcagtttgtgtctgtgcctgcatccatccttccatcctgtac

SEQ ID NO: 989802 - DNA, 120 bp, Artificial Sequence
  ENSG00000231163_10 (sequence is synthesized)
tccagcagcagccagggtggtctttcaaaaatgcaaagctgataatgttactcccctgctgtaaaccttccagcggtttcctattgccttcagaataaaatacgaatcatctggcctcca

SEQ ID NO: 989803 - DNA, 120 bp, Artificial Sequence
  ENSG00000231163_11 (sequence is synthesized)
caggttggccctgacctctgggttggattaccagtgacacaatgaacatttcattatgaggccatcccttgagcaaactgacatgctgaaagctgccctatggagaggctcatgtggcaa

SEQ ID NO: 989804 - DNA, 120 bp, Artificial Sequence
  ENSG00000231163_12 (sequence is synthesized)
acggggacagacagcatcacagtatcctgttgggacagacagatgaagaaccagagaccagagagtttaagtagcttgccaaaggtcacacagcagtgtaagcagtacgggtgattctta

SEQ ID NO: 989805 - DNA, 120 bp, Artificial Sequence
  ENSG00000231163_13 (sequence is synthesized)
agcccacattgtttgacttccgagacatatcagaaaactacgtcaaagaacacgcacaactcagacctatttccagtggcctatgcagaagagctaccctgcttgaatggaaacccctta

SEQ ID NO: 989806 - DNA, 120 bp, Artificial Sequence
  ENSG00000231163_14 (sequence is synthesized)
agatacactattctcaaaaacctaagtgcttagcctggcttatggaggaggcaatgcaatctaccacaagatgattaagacaacaatgaacttaagacccagccactgctggagaatatc

SEQ ID NO: 989807 - DNA, 120 bp, Artificial Sequence
  ENSG00000231163_15 (sequence is synthesized)
gttcaggctgctgggtgacatttctatgtctccccttcaacggtgaaatatttcagtggttgtccatcacctatgggagtctgacatggcataatcaggccactggggcattgctagttg

SEQ ID NO: 989808 - DNA, 120 bp, Artificial Sequence
  ENSG00000231163_16 (sequence is synthesized)
tgctgtccctgatattcaccgtggtaggcagtttctgaaatggctcccagtgatctccaactcctgaaattcacactctgtgtaatcccctccctttgagtgtgggctagacctggtggc

SEQ ID NO: 989809 - DNA, 120 bp, Artificial Sequence
  ENSG00000231163_17 (sequence is synthesized)
gaagagtcctccaagcagcagggaagcaagtgcaaaggtccttgcagaagcgagcttggcatattagagggacagagggaggccggagcaactggagggtcttcagagactatcaagtgc

SEQ ID NO: 989810 - DNA, 120 bp, Artificial Sequence
  ENSG00000231163_18 (sequence is synthesized)
caacaaggggattacccctctgcccctctaaaggattgcaagaaagaagacaccaaatccatggcattttttcccttaggaaagaagggagataatgagaagcctccacttgcaaactga

SEQ ID NO: 989811 - DNA, 120 bp, Artificial Sequence
  ENSG00000283696_0 (sequence is synthesized)
cttctgggtgtcagaaaagacacaaaaactgacagggcggaaccgcgacacggtgcctgatgatatcaaaaggtctcacggctccggagggacccagtcgcccacagccgccaggggcgc

SEQ ID NO: 989812 - DNA, 120 bp, Artificial Sequence
  ENSG00000283696_1 (sequence is synthesized)
cgccggctccgagcccgttgtcgagagccgctcggctgctggggtctgcccttcagtccttccaactctcctcggacctagagttccgggatctcactgcgatctgggcgaattcttacg

SEQ ID NO: 989813 - DNA, 90 bp, Artificial Sequence
  ENSG00000283696_2 (sequence is synthesized)
gagttccgggatctcactgcgatctgggcgaattcttacgtagaattcgaaaggatatggggaaggaaaaaaacaaaaacgggaaccact

SEQ ID NO: 989814 - DNA, 120 bp, Artificial Sequence
  ENSG00000283696_3 (sequence is synthesized)
aaaccaggcggtggcaggttttccacaaatgactctgaaaagtcagaggctcaccactgtgtctctgacccacgagaaaagtacccgggcgggccacccacagcttcgggatcggggcgc

SEQ ID NO: 989815 - DNA, 120 bp, Artificial Sequence
  ENSG00000283696_4 (sequence is synthesized)
cattgccccgcggttttcaagactgacttcaggatcatctgggagaggttgaaaggcacatgcagtgttcaccgccttgaactgaagatcactgaacatggctttggtggaaaccactgc

SEQ ID NO: 989816 - DNA, 120 bp, Artificial Sequence
  ENSG00000283696_5 (sequence is synthesized)
agtgatatcagaaaggaaaaaagcaaacttccctgaccgggaatcgaacccgggccgcggcggtgaaagcgccgaatcctagccactagaccaccagggagggctggtgacactgtgggc

SEQ ID NO: 989817 - DNA, 120 bp, Artificial Sequence
  ENSG00000283696_6 (sequence is synthesized)
gacactgtgggcagcaccttctgagaaaagatcttaggacagacgcctcaaccacctcaggcacatgttagaaacctataggaatgtctttttctccctctccctctccccacggtctcc

SEQ ID NO: 989818 - DNA, 120 bp, Artificial Sequence
  ENSG00000231165_0 (sequence is synthesized)
gcctcaaggatgctgtagttacacaattcccaagacacagaatcattgggacaggaaaggaattcattctactgtgtccccagaatatgaatcatgttgcaatgtactggtatcgacaga

SEQ ID NO: 989819 - DNA, 120 bp, Artificial Sequence
  ENSG00000231165_1 (sequence is synthesized)
gaaaaaggagatgtctctgagaggtatcatgtttcttgaaatactatagcatcttttctcctgaccctgaagtctgctagcaccaaccagacatgtgtgtatctctgcgccagcagttca

SEQ ID NO: 989820 - DNA, 120 bp, Artificial Sequence
  ENSG00000284052_0 (sequence is synthesized)
aagttcgcccgtggccgctcagccgcgaaagtgtcccgcacttggcggaccgggagtggcgaccgtccgctccggtctacactgcagccaaaggacccagcagctggagtaccctccatc

SEQ ID NO: 989821 - DNA, 120 bp, Artificial Sequence
  ENSG00000284052_1 (sequence is synthesized)
atgagggtggatggaggattttgtttgtttccttgacaaaggtgtgtgacttgtcagccaagatgttggctttttcatgaaaggagcaaggaaataggaagagagcatgttaaggaagag

SEQ ID NO: 989822 - DNA, 120 bp, Artificial Sequence
  ENSG00000284052_2 (sequence is synthesized)
tctgtacttatgacaagtaactaaagtagatataactattttgggagaagtgaaaagccaaagaaaaagtaccaagtacagggctcccctaaaaaaaatggaaagaaaaggcagaggggg

SEQ ID NO: 989823 - DNA, 120 bp, Artificial Sequence
  ENSG00000284052_3 (sequence is synthesized)
caaagaagagatcatcctcacataaactcctctaaaccagcctcttgacgtgggacagatgggagtgttgggatggagtagttgggacagatctgcagggaaaaggggcagagaaacagc

SEQ ID NO: 989824 - DNA, 120 bp, Artificial Sequence
  ENSG00000284052_4 (sequence is synthesized)
ctgcctcgcccatcttgccccctccccacctccgctctggcgttgggacgggaggaggagggaggaatggaaccagggagtccgaagtacagctttgacaactgtcgcgctggccgggtc

SEQ ID NO: 989825 - DNA, 120 bp, Artificial Sequence
  ENSG00000284052_5 (sequence is synthesized)
gtcttctctcttcgcttggattgcaagaggatcagcagatctgttttcactacctcaaggtacacagccccaaacactgcccatccccagctccccatgcacatctttcctgttggagaa

SEQ ID NO: 989826 - DNA, 120 bp, Artificial Sequence
  ENSG00000284052_6 (sequence is synthesized)
accaggagagagatgagcatttctgttccagttccgaactccccagagagattctgatgggcccagcttaggtcaggggatagtcttcactcaagagttcctgagataacagagactgga

SEQ ID NO: 989827 - DNA, 120 bp, Artificial Sequence
  ENSG00000284052_7 (sequence is synthesized)
tgcagaactgattttataaaggaagaacgtgtaccataaatattgctagttaagagcatgtatactgttgagttctacctcctcagaagtctaaaaggtttccttcctttgagggtgaag

SEQ ID NO: 989828 - DNA, 120 bp, Artificial Sequence
  ENSG00000284052_8 (sequence is synthesized)
aagcagtaacaggcgtcctccatcagacccctctctgtgggcacctagaacacttcccattgacgtctgcttcaaggggaggtcactaaaagtgccccacatgatgcagcagacatttcg

SEQ ID NO: 989829 - DNA, 120 bp, Artificial Sequence
  ENSG00000284052_9 (sequence is synthesized)
ctggtcccagtgccctccccaagaccttccagatggtgaagtgttaagagtctaaaatggagtaaatgatctgcagaaattcagtggtgtcagaggagccagtccaaagtcactcggctc

SEQ ID NO: 989830 - DNA, 120 bp, Artificial Sequence
  ENSG00000284052_10 (sequence is synthesized)
taaacgctgcgattctattattttaatgatgcccaggaacacaaagaggcacgacagacccagaggcaagtgtgcagctgccaggggagcagctggagggactgcggggggctgctggcc

SEQ ID NO: 989831 - DNA, 120 bp, Artificial Sequence
  ENSG00000284052_11 (sequence is synthesized)
ggccagttcccagtgggaggagggacgcggtaggcgcgggaggaggaagagcgcagtgcgagggcggagccgcggtggcctgcgcgatgcagtctgttgcgctcagcttattagcttggc

SEQ ID NO: 989832 - DNA, 120 bp, Artificial Sequence
  ENSG00000284052_12 (sequence is synthesized)
acacggatagaaaaatatatggcacgcacacttgggaaacccagaataatgggaactcaaaactgttattcattcgagagctcatcagtccaagaagatgccaccttggtcagatgtgga

SEQ ID NO: 989833 - DNA, 120 bp, Artificial Sequence
  ENSG00000284052_13 (sequence is synthesized)
tgaggcatgactggaccgaccctgtgggctcggcacccacctgtgctataaactgttcatgtgaaaactgtgtgcccctgggttgtctgacctgcagctgtaccgcacttttagtacaat

SEQ ID NO: 989834 - DNA, 120 bp, Artificial Sequence
  ENSG00000284052_14 (sequence is synthesized)
gcctgccacccacaggagtgttgtcacaattgaagtgaatgctataaagcattgtgagcaactcaaaagaagggtgctgcttaactacccaaaattactatacacccacaggtaaagctc

SEQ ID NO: 989835 - DNA, 120 bp, Artificial Sequence
  ENSG00000284052_15 (sequence is synthesized)
agaggcggggaggcaggtggtccaggtgcgcccctgcccgggggggcgaggcgtccggcgggaaggctgcagcgaccgcatggaggaaggggcggcaggtgcgcggcgctggaagaaccg

SEQ ID NO: 989836 - DNA, 120 bp, Artificial Sequence
  ENSG00000284052_16 (sequence is synthesized)
gcggctgggagagcatctctgcctcgcccatcttgccccctccccacctccgctctggcgttgggacgggaggaggagggaggaatggaaccagggagtccgaagtacagctttgacaac

SEQ ID NO: 989837 - DNA, 120 bp, Artificial Sequence
  ENSG00000284052_17 (sequence is synthesized)
ttgcagaagaaacttttctctctcttttcctttcccctgagcattcttccatatctcccaccacatgagagcaaacaactgattggggtttctgataactttggagatgtgacatcagaa

SEQ ID NO: 989838 - DNA, 120 bp, Artificial Sequence
  ENSG00000284052_18 (sequence is synthesized)
tagaggaaaaacgttcaggactcttgaagagttaaaatattcattagtatcaagcaggacaggaattaactgcatgaactgaactaataggagactgaagtgatctttttgactttttgc

SEQ ID NO: 989839 - DNA, 90 bp, Artificial Sequence
  ENSG00000284052_19 (sequence is synthesized)
gaactaataggagactgaagtgatctttttgactttttgcttaaaatgttgctaatcctttgttttgcttttcagagtcaaggagaaagt

SEQ ID NO: 989840 - DNA, 77 bp, Artificial Sequence
  ENSG00000284052_20 (sequence is synthesized)
aagaatctgttttctttcgtaagaggacacagttggaaaaactggttattttaccaagggctttgactggaatggta

SEQ ID NO: 989841 - DNA, 84 bp, Artificial Sequence
  ENSG00000284052_21 (sequence is synthesized)
aacaagaatctgttttctttcgtaagaggacacagttggaaaaactggttattttaccaagggctttgactggaatggtatgct

SEQ ID NO: 989842 - DNA, 120 bp, Artificial Sequence
  ENSG00000284052_22 (sequence is synthesized)
gtccctgtacagggtttctgatctgtggtaagcaaacaatgtcactttccaagaggccaggaaccccaagttatcttggaacctcaagaggagaggaattcacccaattcataggtattt

SEQ ID NO: 989843 - DNA, 120 bp, Artificial Sequence
  ENSG00000284052_23 (sequence is synthesized)
gatggtacaaatccatggctgggcttggctttaaaaaggtctcatcttagattccttctatggaacaaagttccatcaaagccaatataaaagacctatgtgaaaataattattcttgct

SEQ ID NO: 989844 - DNA, 120 bp, Artificial Sequence
  ENSG00000284052_24 (sequence is synthesized)
gcactttatacaaataatctggccaaatataataaagcataccagtcctaccatgaagagagaaaaattatgtttcaaaactatagtatacctgttaaattctagtcttgcctgattttt

SEQ ID NO: 989845 - DNA, 120 bp, Artificial Sequence
  ENSG00000284052_25 (sequence is synthesized)
taatgttttcaatttttccctttttcttttccttttcccccattcttcctaattggaaatcactgaaacctgagctgtgctttcgtaaagccctgcaaacttaagactagacaacttaaa

SEQ ID NO: 989846 - DNA, 120 bp, Artificial Sequence
  ENSG00000284052_26 (sequence is synthesized)
ctttagaagaaaacagcagcaacctctttatatgtgttgctgttgcatactattctaggcccccgaaatagagccaatagagggaacaaatcaaccacctccactccagcactgcattca

SEQ ID NO: 989847 - DNA, 120 bp, Artificial Sequence
  ENSG00000284052_27 (sequence is synthesized)
gtccccataatgatgaccctctctcagcaggaagtagccagaaagattatgatgccccatatccctatgatcttgtgataaataaatatacaagcatgatagaaatcatgcacaaattga

SEQ ID NO: 989848 - DNA, 120 bp, Artificial Sequence
  ENSG00000284052_28 (sequence is synthesized)
cagtggtgattgtggcaggccaggtctcactaatgcaggcctgcattacaacaactgtcccagctctgactgagtagctaggttaaacattaaaagctgattgagccagtgcccttatac

SEQ ID NO: 989849 - DNA, 120 bp, Artificial Sequence
  ENSG00000284052_29 (sequence is synthesized)
aaaggctggaatgtaacaaagagcccaccaagagttttgcctaggcttttcatgggccttgaagtttgacaagataatgaaggaattcttaacaggacccttttaggattaaacaagttt

SEQ ID NO: 989850 - DNA, 120 bp, Artificial Sequence
  ENSG00000284052_30 (sequence is synthesized)
attcttaacaggacccttttaggattaaacaagttttattggggggtctgaagaaactcctcgggcctccacaaacaagtttattgagatctaaaggaactccccaaacctccatgattt

SEQ ID NO: 989851 - DNA, 65 bp, Artificial Sequence
  ENSG00000284052_31 (sequence is synthesized)
acaagataagggtaatcaccccagcacctagacccatttagattaagtaaacttactgaggctct

SEQ ID NO: 989852 - DNA, 88 bp, Artificial Sequence
  ENSG00000284052_32 (sequence is synthesized)
ctttgtaattttgagttggtctggcaataatttccctctcttcgtccccagttcatctgcatctcattattgggccacgagaaatagc

SEQ ID NO: 989853 - DNA, 120 bp, Artificial Sequence
  ENSG00000284052_33 (sequence is synthesized)
cagttcatctgcatctcattattgggccacgagaaatagcagcccaacccccatattggttcaggaacaatgccaagagcatgctgtaatcccctctatacagtagtcccccttatcttc

SEQ ID NO: 989854 - DNA, 120 bp, Artificial Sequence
  ENSG00000284052_34 (sequence is synthesized)
atagaatacattccaagaacttcagtggagcctaaagctgcagatagtaccagaccctatatatattttctttttatacatacgtacctctgataaaatttttttaataaggttcagcta

SEQ ID NO: 989855 - DNA, 120 bp, Artificial Sequence
  ENSG00000284052_35 (sequence is synthesized)
aactaataataaaatagaacaattatactacagtaaaatcatacgcatgtggtctctctcgctccttcaaaatatcccattgttctgtattcctgtggcaacagcttcttcattagcaga

SEQ ID NO: 989856 - DNA, 120 bp, Artificial Sequence
  ENSG00000284052_36 (sequence is synthesized)
cttcttcattagcagacacagcctctctagtaatttatatatttttcagtccaaacctattcctgaatctgttaactatcccttacttgcaataaatggcttggtgtcactcgtttcagg

SEQ ID NO: 989857 - DNA, 120 bp, Artificial Sequence
  ENSG00000284052_37 (sequence is synthesized)
ggatcccttgctgtagggatcaatgcttgtcttcatacaggctcaatgctttctggtgcaacgtgttgccaatcaaaacacatttcttttaatgtctcccacctgcaaactgaatgcctt

SEQ ID NO: 989858 - DNA, 120 bp, Artificial Sequence
  ENSG00000284052_38 (sequence is synthesized)
tttcatcttaactaagcacttatcatactctatggccatgacgtttacagtttgaggtgctgtaaccagcacaaatatatttttctttacaaattcacgggtaaaagatttgttcttata

SEQ ID NO: 989859 - DNA, 120 bp, Artificial Sequence
  ENSG00000284052_39 (sequence is synthesized)
aattttgttaatttcagcaatttttttttctttccttgttaagtcaagaactttcaccttttcacttaagtgaagcactttatagcttctctttggcatatacgaattgccagcatcact

SEQ ID NO: 989860 - DNA, 120 bp, Artificial Sequence
  ENSG00000284052_40 (sequence is synthesized)
actctcgcacattgggaccattattaagtaaaataaggattactcgaacacaagcactgcgatactgcaacaatctgatagccaagatggctacaaagtgactaacggatggggaacgtg

SEQ ID NO: 989861 - DNA, 120 bp, Artificial Sequence
  ENSG00000284052_41 (sequence is synthesized)
tacggcgtgggtacgggggacaaagggatgattcacatcctgggtgggacagagcaggacagcttgaaagtttacaccctactgagaacgtcacacaatttaaaacttattatttatttc

SEQ ID NO: 989862 - DNA, 120 bp, Artificial Sequence
  ENSG00000284052_42 (sequence is synthesized)
tggtgttttctatttaatatttttggactgcagtttaccatagataactaaaactgcagaaagcaaaagtaccaataaggagtgactactgtacaccagtcttcatctcagagtctgttt

SEQ ID NO: 989863 - DNA, 120 bp, Artificial Sequence
  ENSG00000284052_43 (sequence is synthesized)
ccagggaagcccaccctgagggaatgagtgttcacatctataaaatacaggggttatgctatcagaagcatgagtcaacaaaagaaaaatagattgtacttcaaaatgaaaagcctttgt

SEQ ID NO: 989864 - DNA, 120 bp, Artificial Sequence
  ENSG00000284052_44 (sequence is synthesized)
aattttacctggaaatggctggaggtgatgattgcacggcaactgactgtacttaatgccactgaactgtgctcttgaaaatggataaaatagtaaatttatgttatgtctaattttacc

SEQ ID NO: 989865 - DNA, 120 bp, Artificial Sequence
  ENSG00000284052_45 (sequence is synthesized)
aatgtctgtgtgtgtttcattccatttgttattcattttaacttttaaattaattattattttcaggatgttatccttgcactaaaggaaacctattaatttaatgcttctatgtcacta

SEQ ID NO: 989866 - DNA, 120 bp, Artificial Sequence
  ENSG00000284052_46 (sequence is synthesized)
ctatggactgaatatttgtgtccccccaaaattcatatgttgaaatcctaaccctcaatgtgctgcattgggaggtgtggctttggggaggtgattatgtcatgacgacagagtcctcat

SEQ ID NO: 989867 - DNA, 120 bp, Artificial Sequence
  ENSG00000284052_47 (sequence is synthesized)
tttcacccctttctgcaatgtaaggacatagtcagaagaccacagtctataaactggtaagctggtccctaccagacactgaatctgcatcttaatcttggacttcccagcctccagaac

SEQ ID NO: 989868 - DNA, 120 bp, Artificial Sequence
  ENSG00000284052_48 (sequence is synthesized)
tagtatttttgttacagctgcctgaatggagtaagacagtcaccatgtttgaaaaagagacatatttgggtctctagaagctgcctgtctgttaatttatgactaaaattaatttggtca

SEQ ID NO: 989869 - DNA, 120 bp, Artificial Sequence
  ENSG00000284052_49 (sequence is synthesized)
tgatttcctctctaaatctagattatttggccatgtgtcagaaacacatgtttgggaatttatttggctagatggcttggattgaagcctcaaattttaaaaagaaagaaaaaaagcaca

SEQ ID NO: 989870 - DNA, 120 bp, Artificial Sequence
  ENSG00000284052_50 (sequence is synthesized)
actaaacagaagctaatcaatgtaaatacctgacagcattgaagcagccagggacgatggtggcctaaagcatcatagatagctgtttagctatctttttctgtatagcttgcttttact

SEQ ID NO: 989871 - DNA, 120 bp, Artificial Sequence
  ENSG00000284052_51 (sequence is synthesized)
tttcctttctttcttttataaaataacagctttattgagatgtaattcacatatcaaaaatgcatcctttcaacgtgtgcaattcagtgttcttagtacattcacaaagttgtgcaacca

SEQ ID NO: 989872 - DNA, 120 bp, Artificial Sequence
  ENSG00000284052_52 (sequence is synthesized)
ttgacactagttccagaatattttcattacccgaaaaagaagccctatgcttatttgcaattaccccattccccctttctgaggcccctggaaaccattaatctactttctgtctctaca

SEQ ID NO: 989873 - DNA, 120 bp, Artificial Sequence
  ENSG00000284052_53 (sequence is synthesized)
gacttgcctcttctggacagtttatataaatggaatcatacattatgtggattctttcattcagtataatactttcaaggttcatctatcttttttcctttttatggccaaataatattc

SEQ ID NO: 989874 - DNA, 120 bp, Artificial Sequence
  ENSG00000284052_54 (sequence is synthesized)
catcgtatggctataacacactctgttcatcagctgatggacatttgggttgtttccacattttagctactattaatcatgttctgtgaacatgagtgtacaagtttttgtgtagacatg

SEQ ID NO: 989875 - DNA, 120 bp, Artificial Sequence
  ENSG00000284052_55 (sequence is synthesized)
ttttcagtgctcttgggtgtatacctagcactggcattgctgggccatatggcaactccatggttaactttttgaggaactgccaagctgttttccaaagtgactgcatcatttgcattc

SEQ ID NO: 989876 - DNA, 120 bp, Artificial Sequence
  ENSG00000284052_56 (sequence is synthesized)
tcaccaacgataaatgaggattcagatttccccacatccttgtcaacactttttattgtctatctttttgatgatagatgatttaatggatgtgaagtggtttcttgtggttttggtttg

SEQ ID NO: 989877 - DNA, 120 bp, Artificial Sequence
  ENSG00000284052_57 (sequence is synthesized)
cattaccctaataactaatatggttgagaatcttttcatgtgattactaaccaacctttctttgtctctccttcacccctactattcccagcctctggtaaccatgaatccactctctac

SEQ ID NO: 989878 - DNA, 120 bp, Artificial Sequence
  ENSG00000284052_58 (sequence is synthesized)
ctccatgagatccacatttagctcccacatatgaatgacagcatgtggtatttgtctttctgtgctcagcttatttcactcaacataatgacctccagatccatccaagttgctgtaaat

SEQ ID NO: 989879 - DNA, 89 bp, Artificial Sequence
  ENSG00000284052_59 (sequence is synthesized)
caacataatgacctccagatccatccaagttgctgtaaatgaaagcattgtattttttatggctgaataatattccacctatccattga

SEQ ID NO: 989880 - DNA, 120 bp, Artificial Sequence
  ENSG00000284052_60 (sequence is synthesized)
gcgatcggggctcactccaacctcaacctcccaggctcaggcgatccaaccccgtcagtcccgccaagtagctgggactacaggtacgagccaccacacctgccttttttttccttttat

SEQ ID NO: 989881 - DNA, 89 bp, Artificial Sequence
  ENSG00000284052_61 (sequence is synthesized)
caggtacgagccaccacacctgccttttttttccttttatttttctttttaattttagtagagatgttatgttgctctgttacccaggc

SEQ ID NO: 989882 - DNA, 120 bp, Artificial Sequence
  ENSG00000263424_0 (sequence is synthesized)
gcttttagctttttatttttgtattaacaggagtcttattacacataggtctgataaaactggtttatgatcttcagtctgtttccagtgctgcataactagataacgtatgaaggaaaa

SEQ ID NO: 989883 - DNA, 120 bp, Artificial Sequence
  ENSG00000263424_1 (sequence is synthesized)
acgacgacgaacaaaaaattaattgcttggaagacttagttgaatctatccatgaaaacagaatcaattaaacatgtatgtgttacttagactaaatataaataacccatataaatggta

SEQ ID NO: 989884 - DNA, 120 bp, Artificial Sequence
  ENSG00000263424_2 (sequence is synthesized)
gctcaaacatctcaagtgtttcagagaatgttagaatctattgtttgaagttttaatttcatctctaggcaagttctgtttccaaacattagtattagttggtgatatttccccttcata

SEQ ID NO: 989885 - DNA, 120 bp, Artificial Sequence
  ENSG00000263424_3 (sequence is synthesized)
gggaaggtaaaaaaggtttgtagaggtggcaaacaatatttggtttaaactagcaggagacaaaggaattccaagaaaggcaaaaatcctttcagtagttttctgaggaaaatgcacaat

SEQ ID NO: 989886 - DNA, 120 bp, Artificial Sequence
  ENSG00000263424_4 (sequence is synthesized)
atcttcaaacttgaccagctggtagctagtaggcagcaaatctgtatttattctcaaggctgctgctgtatttgctagccacaagtgagacaagagggacactgcatttgatttggattt

SEQ ID NO: 989887 - DNA, 120 bp, Artificial Sequence
  ENSG00000263424_5 (sequence is synthesized)
tgataattctttcctcaatggttcatactcgaaagcataacccgaatttaagttacatttgcctttacctccctctattttaaacaattttgctaaatgctctggtacattcttcaaaga

SEQ ID NO: 989888 - DNA, 120 bp, Artificial Sequence
  ENSG00000263424_6 (sequence is synthesized)
ataaagacttggtttactattgtacaacattgaataaatccatgcccgagggtctcttactatgtacaatgccctcatcgaagctcctaaaacttcctgaaaaaaatgaagctttaacgt

SEQ ID NO: 989889 - DNA, 120 bp, Artificial Sequence
  ENSG00000263424_7 (sequence is synthesized)
ccagcttccactgcttaaactgagcacaggacgtgcacttggatagtaaaccaggtgtctcctcaaagccctaatatattcagcatctctatcaaaggcgcctttcatttgacttctttg

SEQ ID NO: 989890 - DNA, 120 bp, Artificial Sequence
  ENSG00000263424_8 (sequence is synthesized)
ttctggcaaagactctctccttttaaattttctttttttgtccttattcattgcaaaatattgggccagtttacccctattgggttcatgcagatggatgttttgcaaatgtaattttgt

SEQ ID NO: 989891 - DNA, 120 bp, Artificial Sequence
  ENSG00000263424_9 (sequence is synthesized)
gtcctggactaaagactgcaaccagcctcggagtaaacgaaaatgcccactgcggatatctgacaccttccattcacaagcatctacaaatgagtcgatttccaactcagtttcaggaat

SEQ ID NO: 989892 - DNA, 120 bp, Artificial Sequence
  ENSG00000263424_10 (sequence is synthesized)
atcaatgtaggctgtaggaaccctgatgtagagaaaatcactactgttgaaaaaaagttgtttgagaatttcagctcctgaaccaggaagtgaggtaatgacaacatcaggaagatccat

SEQ ID NO: 989893 - DNA, 120 bp, Artificial Sequence
  ENSG00000263424_11 (sequence is synthesized)
gtggtgcccttcagaagacaaagacttcttgcttccctcagcctctgtccttgtccattttgcacaaatgggctgactacaagtgctccacacatccaaaagctcaataaaccacaaggc

SEQ ID NO: 989894 - DNA, 120 bp, Artificial Sequence
  ENSG00000263424_12 (sequence is synthesized)
aataacaagtattaatatccatcgcattagttttctaaaagaaaggtaaaaacgccattggaaagttaaaatcaccaagctaatgcacaaaattaatccaactgctatattaaatttaaa

SEQ ID NO: 989895 - DNA, 120 bp, Artificial Sequence
  ENSG00000263424_13 (sequence is synthesized)
tgagtgcccaaaccaaatcgggttatttggccttgatcagccacactggcaaagccaccgaatcccagataattgaatcttgtcttcaggttatggtaatcagttacaatagaaacaaca

SEQ ID NO: 989896 - DNA, 120 bp, Artificial Sequence
  ENSG00000263424_14 (sequence is synthesized)
tgttcagtattattgacattgagagaaatctgaagtccaggattggaactatcaataaatctgcagctggagacattgatatatggcccataaaagacatatgcaattcttgtgattgtg

SEQ ID NO: 989897 - DNA, 120 bp, Artificial Sequence
  ENSG00000263424_15 (sequence is synthesized)
ggttccatctgaaaagtaacattaacaaattgagtccatcgttttttaaattcagcagcttgctctgcttcctgtatactggccatgggactattgccatgatgatcaaaccaaaacatt

SEQ ID NO: 989898 - DNA, 120 bp, Artificial Sequence
  ENSG00000263424_16 (sequence is synthesized)
ttgtaatgtgcatcccacacatccatcatggcaccattatacctattcataaacttatatgggatatatttaaaatcaatatccaaattatgaaagaaggcactgacagaatttattggg

SEQ ID NO: 989899 - DNA, 120 bp, Artificial Sequence
  ENSG00000263424_17 (sequence is synthesized)
gaatcttcttgcctctcaatatgatcaacaactagcagagtttgggaatttaagagaagcaaagcacgatatacacttttcagtctcattgctgaagaataagcagacacggcttcccca

SEQ ID NO: 989900 - DNA, 120 bp, Artificial Sequence
  ENSG00000263424_18 (sequence is synthesized)
ctcacaaataccatttccccatgttgagaggcagtgattatttccccagctgcatcaccaacctcctcgccagtccacttaagccactgcgcacattctcccagttgaccttcccagggc

SEQ ID NO: 989901 - DNA, 120 bp, Artificial Sequence
  ENSG00000263424_19 (sequence is synthesized)
ttattacactggcttgagggtgatggagcaaacaccaatacattgttaaggtggctcaacttgggtccatagagagcttcagaaacaaatacttgtccattgggggcaaaagtaaatgag

SEQ ID NO: 989902 - DNA, 120 bp, Artificial Sequence
  ENSG00000263424_20 (sequence is synthesized)
ttctgatctggatgctcatgtcctgggttaaaacttctccacccatcaatccaggaatatggctgaaaatgaactatgtcatacacagctcgtccccccagcttcccagatttaaaagac

SEQ ID NO: 989903 - DNA, 120 bp, Artificial Sequence
  ENSG00000263424_21 (sequence is synthesized)
acaaaggtgttggtctgtgtgtttggcaacccagccccataagtaaccacaccccagttagggaatgtgtgtatttttgcagtaccataatcagcaggtggctgtggtgtgagctgggga

SEQ ID NO: 989904 - DNA, 120 bp, Artificial Sequence
  ENSG00000263424_22 (sequence is synthesized)
tcataccagatgtattcagtgtgaagagtactccacctttgggcagttgaaggaaccatcggtccatctttaggtcggtgctttctaatttgctgagctaaccaatttccagctccattc

SEQ ID NO: 989905 - DNA, 120 bp, Artificial Sequence
  ENSG00000263424_23 (sequence is synthesized)
tttaagatgaacttatccaagaaaactagctggctttctggaccataaaaccaattataattggaatctgctatacccacagttctttggaagccaggtaaaagggtggcataatagaac

SEQ ID NO: 989906 - DNA, 120 bp, Artificial Sequence
  ENSG00000263424_24 (sequence is synthesized)
caaaagtgcatctttaaccagttattatccaagttgttgatattaaaatggcgctgggccagaaaaacatactgtgtgacggatttagctgtgtagcttccataggccacaccttcatcc

SEQ ID NO: 989907 - DNA, 120 bp, Artificial Sequence
  ENSG00000263424_25 (sequence is synthesized)
aaagaaccatcaacaatatgattcaatagaaacattgtcttttccatgacatccactacagcctgtttccatatatttgctttagatcctttatctactccagtcaccaaggcccctgtg

SEQ ID NO: 989908 - DNA, 120 bp, Artificial Sequence
  ENSG00000263424_26 (sequence is synthesized)
agtaatgctatcatattagtggcttggtggttatggagaagctgtttgccccatgagcggaccttggaatactcgtacatttcctcagtaataacccatattttttccaggtatttttgt

SEQ ID NO: 989909 - DNA, 120 bp, Artificial Sequence
  ENSG00000263427_0 (sequence is synthesized)
agcagctgaaggtcccacgtgctcctcaaaagaaattaactcatctccagataatcatcagagtccaactaagcggctaatagaacagaacaggacgtgaaagcaaacagcccttcaaac

SEQ ID NO: 989910 - DNA, 120 bp, Artificial Sequence
  ENSG00000263427_1 (sequence is synthesized)
ccacaggcctgtacatcaaaggagtggtcaacgcctgagcaccgtcagcagagcagctgctttgcctctgggaacatgcgggagataggaggcttcctccttaaccctactgcagaggac

SEQ ID NO: 989911 - DNA, 120 bp, Artificial Sequence
  ENSG00000263427_2 (sequence is synthesized)
ccgggtaatggagcaggggtcgcttcccttcccatgagacctttgttcaggcactcaagtggaaggttgagcaataagccaactttcttgctcagaggctccgcagacttcctgtggttg

SEQ ID NO: 989912 - DNA, 120 bp, Artificial Sequence
  ENSG00000263427_3 (sequence is synthesized)
tttgttccactctgtggtcagtcaagcaagctcaccgcctgattctcttattgttgtactaagcacaagctattatacttatgattcataatcatattagtaaagcactattctaaagca

SEQ ID NO: 989913 - DNA, 120 bp, Artificial Sequence
  ENSG00000248537_0 (sequence is synthesized)
ctgaagatggttcctgcctgaaccatgcacactaatcatttaatgttctacagaagaaaagaacaaacagagcagggaggcagatgtggccacatactggatctacacttaaaacagtga

SEQ ID NO: 989914 - DNA, 120 bp, Artificial Sequence
  ENSG00000248537_1 (sequence is synthesized)
acaggaagaaaggaaggatcacctatagaaaactcaccctgaaaagatgtggagacaggactcaaggaggtcccatttccaaatggaagaagtaaaattttaacaggatgaagtctttga

SEQ ID NO: 989915 - DNA, 120 bp, Artificial Sequence
  ENSG00000248537_2 (sequence is synthesized)
cccgaacctaaatacagaccagaattctgagcccaaaaactatctccagcatccggagaagaagcatcatgaaaggggaggagagagctgtttatatataaaataagttgaatttgcaag

SEQ ID NO: 989916 - DNA, 120 bp, Artificial Sequence
  ENSG00000267580_0 (sequence is synthesized)
ttgactttgatatgtttatattatagatataatacataaaacatctagagtgagactctacgttctccccaaaagaagagaaccaagccgtccttccctgctcccagccccagtgatgcg

SEQ ID NO: 989917 - DNA, 120 bp, Artificial Sequence
  ENSG00000267580_1 (sequence is synthesized)
ttggcgggaggccacctcccttcccgaccaggagccagggcctctgggggacaagccttgtgggcagcccaggccggaggggctggggaaagctgagggcaaaggagaacccccctcacc

SEQ ID NO: 989918 - DNA, 120 bp, Artificial Sequence
  ENSG00000267580_2 (sequence is synthesized)
ccttcccccagctgccgacggagagtctcattttggcaagtatccgagcaaaaccaaaacaaaacaaaaaccaaataaaatggtggtttagcagagacgcgcacattcacattgcacaag

SEQ ID NO: 989919 - DNA, 120 bp, Artificial Sequence
  ENSG00000267580_3 (sequence is synthesized)
gcactgctggggcacagaggccagatacaagtgttgatatcggctgataaagcaaaatatttggaaagcttgtcataactccggtccctctgggatggactgatcgtgcttcgtgttcct

SEQ ID NO: 989920 - DNA, 120 bp, Artificial Sequence
  ENSG00000267580_4 (sequence is synthesized)
aggcacaaggttatcctaaatactagagttgccgggctcccagctcagccccaagaattctcccctcctcgcagggagaagccaccgcctggccccctcatcttagacgcaccaagtccg

SEQ ID NO: 989921 - DNA, 120 bp, Artificial Sequence
  ENSG00000225798_0 (sequence is synthesized)
tattattttctaagactgggatagtgacagagcctggattacaactactctggactcatagtcctatgctcagactattaggctgccatgatattgcagagctagaattattaccagtta

SEQ ID NO: 989922 - DNA, 120 bp, Artificial Sequence
  ENSG00000225798_1 (sequence is synthesized)
tctatttttaactagtacctaattcactgttatctttcagggacacttaaaagctccttagctaaactcattctatagacgctttacaacaagtaaagcaagttttagggctaaaatcac

SEQ ID NO: 989923 - DNA, 120 bp, Artificial Sequence
  ENSG00000225798_2 (sequence is synthesized)
agagtctgaaaaagaggcttgtgtcctgaccataccgccccagacaaaaaaacagaatgagtacttcataatgtaccaaaaaagtctatctgcttatcaaaataaataaataaaaataaa

SEQ ID NO: 989924 - DNA, 120 bp, Artificial Sequence
  ENSG00000225794_0 (sequence is synthesized)
gaaactgaggccccaggacccccagagctagaggctgaacctggcatgaacccaagagctctaggcaaccaaatctgttctcttcccttcaagggcctccctgcaggattatgagaagcc

SEQ ID NO: 989925 - DNA, 120 bp, Artificial Sequence
  ENSG00000225794_1 (sequence is synthesized)
aagatggtaaagagatatttgtagttgccatctggagattcttttgggcaacatcatgatctcctggaaagagaggttcagctggaacttgaggcactgggcaactctctggacgtcagt

SEQ ID NO: 989926 - DNA, 120 bp, Artificial Sequence
  ENSG00000225794_2 (sequence is synthesized)
gaagtccgtggtcaccatctgggcctggatcccgaagtgcctgtctgcagcgatggccacacggttcttccccttcatggccatgatggctcctccgttataggacataatagacatgat

SEQ ID NO: 989927 - DNA, 120 bp, Artificial Sequence
  ENSG00000225794_3 (sequence is synthesized)
tgtgtggtatacgaggacccctccattgccggagcaattccagtaaaccgggtctagccttcactcctgcccatcatttctgacatttagactctacatagagggtcctgagattccagg

SEQ ID NO: 989928 - DNA, 120 bp, Artificial Sequence
  ENSG00000225794_4 (sequence is synthesized)
cctttactcatcctgcatcccctacctacttggatgaatattaatatttacaataacagagaaaagttctccagaatgtctgggaggtgaaagaagttaaataaatggaaagtgttgtta

SEQ ID NO: 989929 - DNA, 120 bp, Artificial Sequence
  ENSG00000225794_5 (sequence is synthesized)
tactggtaaagggattaaagctgttttcttaattcacacatttcatcttccatggatgaactctagcttttcagctcatcttgcaagccctccactacagattcatacctgaattaccca

SEQ ID NO: 989930 - DNA, 120 bp, Artificial Sequence
  ENSG00000225794_6 (sequence is synthesized)
gcaaggtggagcactgtgtgccaagactgggagccaggaaacctgggcggcttggtgttctgaatttctccatgtccttagaaagtggctttacttctcttcctacatcttcctgggtcc

SEQ ID NO: 989931 - DNA, 120 bp, Artificial Sequence
  ENSG00000225794_7 (sequence is synthesized)
gagggtgcctactggtaaagggattaaagctgttttcttaattcacacatttcatcttccatggatgaactctagcttttcagctcatcttgcaagccctccactacaggttcagctgga

SEQ ID NO: 989932 - DNA, 120 bp, Artificial Sequence
  ENSG00000259705_0 (sequence is synthesized)
gcagaggtgatcaggtcctgcccggcctgggactttttgtcttgaggtggggaggggagaaatgggaagaggtggagtagcggttttagcccgctctgcggctgcgaggtttagatccga

SEQ ID NO: 989933 - DNA, 120 bp, Artificial Sequence
  ENSG00000259705_1 (sequence is synthesized)
gattaacctctcccgcgataggtgaagccctaccggagcagaaagctgttccacctgcaccaagaatgcgcgctggagacggttgccccggaggccctggcccgagagaaaaccagtccc

SEQ ID NO: 989934 - DNA, 120 bp, Artificial Sequence
  ENSG00000259705_2 (sequence is synthesized)
cgctgcccgcgcctcccggtagcgcgctccctgcgcctctcccgccggacactcagcagacgccggaggccgggaggctaagactgggcgcgtcgcaggccgggaccgcggcagaggctg

SEQ ID NO: 989935 - DNA, 120 bp, Artificial Sequence
  ENSG00000259705_3 (sequence is synthesized)
ctgtgccgaccgaggagagggctctgccgcccccacttgccctgggtgtcgagagcccactccagacgcggctcttctgaggctcaattcaagccacccaggcctgaatccagggtgctc

SEQ ID NO: 989936 - DNA, 120 bp, Artificial Sequence
  ENSG00000259705_4 (sequence is synthesized)
tctctaagtcggtgtccaacccaggggcctgtaaatgttggaacctaggatgtaggatgggagcggtgaagggatggtcctcttgcccagcccagattaagactggggttcatctggagg

SEQ ID NO: 989937 - DNA, 120 bp, Artificial Sequence
  ENSG00000259705_5 (sequence is synthesized)
actctacttacaccctcccggtcccctcgccctcccccacacacagctgcctctccccaggatatgcgcggcacagtgaatttagtggctttgaaaggtatagtatttgtggcatcctta

SEQ ID NO: 989938 - DNA, 120 bp, Artificial Sequence
  ENSG00000259705_6 (sequence is synthesized)
tatggataatgcccaatgatgcctgcaccctgtaacagtttaggaaggcctgaagtcgcacactgggtcctggctgctgtaactggagacccccagaagatcccctgcaagcagccacca

SEQ ID NO: 989939 - DNA, 120 bp, Artificial Sequence
  ENSG00000259705_7 (sequence is synthesized)
gcctgctgtcaagccaataataaaagctcagcacaaacagagatgaagaaactcacattgagaagagttaagaaacttgctcaaattcataaaatcaagaggagaggtggatgtaattaa

SEQ ID NO: 989940 - DNA, 120 bp, Artificial Sequence
  ENSG00000259705_8 (sequence is synthesized)
gaaacttttcatgtcgtcactgctacctcatccgtggccacaaaatctcagtcaagatctagggttgatgcaaactggagtcattcccagtatccacaacacttctcttgtgtcttctgg

SEQ ID NO: 989941 - DNA, 120 bp, Artificial Sequence
  ENSG00000259705_9 (sequence is synthesized)
gaagctaagatttcatcccttgagtttcattgctgcctgaatctattgcatcttacttgagagcctcatttattccatgctacaagatccatgcaagattccaggatcaccaagatcact

SEQ ID NO: 989942 - DNA, 120 bp, Artificial Sequence
  ENSG00000259705_10 (sequence is synthesized)
ccaggaaatgaagagatcaagagagctgccatggacaagtctctgcctctctgcttcagcttctagttccctcataatataggacaattccttgtacaaaacgggtgctccataaatatt

SEQ ID NO: 989943 - DNA, 120 bp, Artificial Sequence
  ENSG00000259705_11 (sequence is synthesized)
tgttgaatgaacttcttttctagatggtgacgtgatggcaaccttaaaacctcatgccattcttcctcatcattctctgggttaaagaaaggcctaaacttttccagcaattgacagagc

SEQ ID NO: 989944 - DNA, 120 bp, Artificial Sequence
  ENSG00000259705_12 (sequence is synthesized)
cttggtgtgtcatattgcctcattgtgcctcagttgtcccatcactcccacttgggagaggatatgaatgaatggatcttagttttaaagagctgaaggtggaattcagttgcctgattg

SEQ ID NO: 989945 - DNA, 120 bp, Artificial Sequence
  ENSG00000259705_13 (sequence is synthesized)
tttttttttttttttttgattgtttagttcatttatttgtgtaaccaattttgattaaaagctgaacactgtgctggaagctgaggcttcactggtgtagggatgccatttctgccccct

SEQ ID NO: 989946 - DNA, 120 bp, Artificial Sequence
  ENSG00000259705_14 (sequence is synthesized)
ggcttcactggtgtagggatgccatttctgccccctaagaatcacaagggctagagcattgcaggaggtccttacagcaacaattaccatgaactaagcctttgcttagtgcaggcactg

SEQ ID NO: 989947 - DNA, 120 bp, Artificial Sequence
  ENSG00000259705_15 (sequence is synthesized)
tgttaagagggaagttagtaatgttcttcccattttagaattttgtaactataaaaatataatgcaggcttaagaaagagcagtttaaaatgacataaataaacctttgttttagggaaa

SEQ ID NO: 989948 - DNA, 120 bp, Artificial Sequence
  ENSG00000259704_0 (sequence is synthesized)
ccgcagtaggagcccctacgtaggccctgcaagaggcctggcgttcaggaaagggcccgctgaccatccagtgcagggaaaggagtccagctctggcctctgcccctcagctccacctcc

SEQ ID NO: 989949 - DNA, 120 bp, Artificial Sequence
  ENSG00000259704_1 (sequence is synthesized)
aaccggtcccaacagctccctccacccttcatgaacgggggctggaaaatgtggtctgctctgataaggatttgcgtcaggctactggctactcagcagccgagaagagcaagcctccag

SEQ ID NO: 989950 - DNA, 120 bp, Artificial Sequence
  ENSG00000259704_2 (sequence is synthesized)
gcctctgcacgcgtgccttctgcccggtgagcctctcactatcgtccttctaaaagacacttcaaaaagaggcaaaatcatgccttccatacatatattaaaaaaagaatatgtgtcaaa

SEQ ID NO: 989951 - DNA, 120 bp, Artificial Sequence
  ENSG00000259704_3 (sequence is synthesized)
agggcaggcaaaaggatgtgggggaaacctcactgtggctcatcaccacgtccatctgcctcaccaagttcccagcaaggagtcggccctgatgggtgtattcctcagccacagctcctc

SEQ ID NO: 989952 - DNA, 120 bp, Artificial Sequence
  ENSG00000259704_4 (sequence is synthesized)
aagatggacctggccccaccccagcctgcgggtcaccacccatggcgggacaagtgagaaaagttggccttgctcaccgctggagcccaaaccacaggtttcatttccccttgataaaga

SEQ ID NO: 989953 - DNA, 120 bp, Artificial Sequence
  ENSG00000259704_5 (sequence is synthesized)
caatgtttgctattgttgcatctgatggtaaaagcaagtcatattcactatcaaaaagtttgaaaggcggccgggcacggtggctcacacttgtattcccagcattttgggaggccgagg

SEQ ID NO: 989954 - DNA, 61 bp, Artificial Sequence
  ENSG00000259704_6 (sequence is synthesized)
aacccgggaggcagaggttgctgtgagccccaagattgcaccactacactcttccagcctc

SEQ ID NO: 989955 - DNA, 120 bp, Artificial Sequence
  ENSG00000259704_7 (sequence is synthesized)
aaaaaaaggaaaataagaatccagcctcaagcctgtcacccaggaacaatcactctagttggctggtgtatttccctccagtctttttttcagtgtatgtatataaactttatttatata

SEQ ID NO: 989956 - DNA, 120 bp, Artificial Sequence
  ENSG00000259701_0 (sequence is synthesized)
cagttcaacccccttagacccatcccttctctctctgtttctcctttgacttcgaagttaacaaaaacatttaatcgcattctaaatgcaaaagccccatgcaaacacttggaattggga

SEQ ID NO: 989957 - DNA, 120 bp, Artificial Sequence
  ENSG00000259701_1 (sequence is synthesized)
gaggagaatacaacagtttctgccctcaaggaacataaagacagagtcacagagaccttgaagaatggaggaggtagaaaaaggagaaatgcaggaaggaggtgtgttatggagttatcc

SEQ ID NO: 989958 - DNA, 120 bp, Artificial Sequence
  ENSG00000259701_2 (sequence is synthesized)
agtggaggctcgcatccagctttattttgcctccaaagatcttgcatcctacctgttaagaagcttggaatgccactattccattaaatcttaaaggaacttgagtctttcatttaaaaa

SEQ ID NO: 989959 - DNA, 120 bp, Artificial Sequence
  ENSG00000259700_0 (sequence is synthesized)
gtagggtctcagggcgaccccagcagcctggaaacgaggcgggcttcccatatgtcacttctaagtaggatattggaggaatgaagaggtctaaatgacacgttaaggtccaagctcacc

SEQ ID NO: 989960 - DNA, 120 bp, Artificial Sequence
  ENSG00000259700_1 (sequence is synthesized)
cgtgaatcagaacttaccggaggccacggaggctgttaccgcgaggaaactctagtcctggcggaagaccaacttctagcagatccccttaccctggctctagtccactagctccttcct

SEQ ID NO: 989961 - DNA, 120 bp, Artificial Sequence
  ENSG00000259700_2 (sequence is synthesized)
agtcacaaccgaactcacggggcggaggcccttaaggagcactcgcatccttcaatcgccgactagaagctcgcccggtgggcggagccgtgccagctcagggcagagcgaggaggcaga

SEQ ID NO: 989962 - DNA, 120 bp, Artificial Sequence
  ENSG00000259700_3 (sequence is synthesized)
gcaaagtacggctgtttgaaagcgggcgccagaggtggcgggaagctccccctgtgcgcccattggtggattcgagagccaattacgaggaagtcaccccggagtgggcgggctgatcgg

SEQ ID NO: 989963 - DNA, 120 bp, Artificial Sequence
  ENSG00000259700_4 (sequence is synthesized)
ttgcctagagacgccgaggcgcttcacccgctaccttcggccagggtgcagcagtcttacggggaccccttgcccgtttggtaccggagactgcaaaggtgactcgtgcctcctgcgctt

SEQ ID NO: 989964 - DNA, 120 bp, Artificial Sequence
  ENSG00000259700_5 (sequence is synthesized)
cagcacacagaatcccgcagattccccaccgaactcttgccttagaggttttttacatttgcccttgttttctaaggcgcctgcttccccattatttaacagccttagatattttgcttt

SEQ ID NO: 989965 - DNA, 120 bp, Artificial Sequence
  ENSG00000259700_6 (sequence is synthesized)
gggcgaccccagcagcctggaaacgaggcgggcttcccatatgtcacttctaagtaggatattggaggaatgaagaggtctaaatgacacgttaaggtaaaagctgagcccgcaacatgc

SEQ ID NO: 989966 - DNA, 120 bp, Artificial Sequence
  ENSG00000259700_7 (sequence is synthesized)
ctatttactactctaatttcctcgggtgtgagtgttcttgtcacttaggtgtatattattaacctgcccctaaagacagcgccacccagtcctcagtaaagcccagtactgtgtctatct

SEQ ID NO: 989967 - DNA, 120 bp, Artificial Sequence
  ENSG00000259700_8 (sequence is synthesized)
tctctggctgaaagggttccagtgaataatcaaggaattggtggcggcaggttcacatatcctttcaaccctttcccatgtgtactggcacggagtaaaatggttgttcgaggctcttca

SEQ ID NO: 989968 - DNA, 120 bp, Artificial Sequence
  ENSG00000259702_0 (sequence is synthesized)
agagactaagggtagtcacatgggtgaacagaatgtccgaatggccaactcccagtaaaaactctggacaacaaagcttggaaggagaggaaaaggcccaacacctgcctgtcagggctc

SEQ ID NO: 989969 - DNA, 120 bp, Artificial Sequence
  ENSG00000259702_1 (sequence is synthesized)
ctggatcacgccctgctgcctgctgacctatattggactcgagcccttcttctggcatgctcacctgttaacccacctatcagcccacacctctgactgctggctgctccccattgagcc

SEQ ID NO: 989970 - DNA, 120 bp, Artificial Sequence
  ENSG00000259702_2 (sequence is synthesized)
tgaaatactgtgctatctgcctgtacccttttgcataagctggggttgggttatctcagatttctatttgggtcaagattgccacatacctcacctcttctgttctggtcctcatcctgt

SEQ ID NO: 989971 - DNA, 120 bp, Artificial Sequence
  ENSG00000259702_3 (sequence is synthesized)
gttcctggacaaaaataacatttgagtagaaagcttttctacttgttgacatagttgaacagattttgctttattgagatgaaatggagcctaaatttatctggaaatgtgtggaatcag

SEQ ID NO: 989972 - DNA, 120 bp, Artificial Sequence
  ENSG00000259702_4 (sequence is synthesized)
tagagagaagtaaacacaactcgaagaaagcgggaaacccctgtgtacaattcagctttttcactcccagggagttgggcatgattgtaaagaatgatgttttcaagcctgccaataaca

SEQ ID NO: 989973 - DNA, 120 bp, Artificial Sequence
  ENSG00000259702_5 (sequence is synthesized)
gaacacgtctgtatccattgtggatgggcttctttgagaaagcttccttttcgcccaagtagaggagctcttcactgccctaagattctgctttcctactcccatgtcagagcaggaaaa

SEQ ID NO: 989974 - DNA, 120 bp, Artificial Sequence
  ENSG00000259702_6 (sequence is synthesized)
tgaatatttttcacacagaatagcctcatccattcccacggggagtgagatagttcctgtagggtgctagtgatggcataaaattacagctcactagagaaacagttgcgagtaaagaaa

SEQ ID NO: 989975 - DNA, 120 bp, Artificial Sequence
  ENSG00000259702_7 (sequence is synthesized)
tatatacatttcctctatttgtgttccctgtctgtgttgtctaagttgcaaacaacagactccacttcagctaggttaaagggaaaagaggtttaataaagaaaattaaatagcttatag

SEQ ID NO: 989976 - DNA, 120 bp, Artificial Sequence
  ENSG00000259702_8 (sequence is synthesized)
catcactggggaactagagaaacagatttaaggctaagcttccagaaacatatcccaaaacatgcccccaaaccgtgacactgacatgaagagacagttgtcattgctgctttattgaac

SEQ ID NO: 989977 - DNA, 120 bp, Artificial Sequence
  ENSG00000259702_9 (sequence is synthesized)
agaggactgagaatttttctacagtcactgctgttctctgcactgatggaagccaagcctgcctggagaactcaactttgcaacccaaagctggtggctaatgtggctacccctaccaac

SEQ ID NO: 989978 - DNA, 120 bp, Artificial Sequence
  ENSG00000259702_10 (sequence is synthesized)
aaaatggaaactccaccaggtgtctgaatccagctctcacgaccatttagtggagcaggaagaaactgcaggccttttggaggtatttccttgtgattctggtccaatccaccaccaccg

SEQ ID NO: 989979 - DNA, 120 bp, Artificial Sequence
  ENSG00000259702_11 (sequence is synthesized)
tctcacgcttagaaccctgcaatccttcgtataatttgacctcttttggatgtttaaattgaaaatatgtgaagaacttaagtccctttatttttaccctcttctgttattggagtcttc

SEQ ID NO: 989980 - DNA, 120 bp, Artificial Sequence
  ENSG00000259702_12 (sequence is synthesized)
tgctgtttgtactttatgattctacttcatggcttcttctaggccagttccccattgctctgcttcactggggtgaccgagaccttaaaataaattctcaatcaacatgtgtaaaccaaa

SEQ ID NO: 989981 - DNA, 120 bp, Artificial Sequence
  ENSG00000259702_13 (sequence is synthesized)
agagactaagggtagtcacatgggtgaacagaatgtccgaatggccaactcccagtaaaaactctggacaacaaagcttgggtcctagacagtgcaatacacaaaagaaatatgagctat

SEQ ID NO: 989982 - DNA, 120 bp, Artificial Sequence
  ENSG00000259709_0 (sequence is synthesized)
aggatggagacccgggaccctttgagaacatcccagacgttgatagtgtaatcattgtatccagcaaacagcaggcgaccttgaagcaggaaaagttccctttggggcatgaagagaagc

SEQ ID NO: 989983 - DNA, 120 bp, Artificial Sequence
  ENSG00000259709_1 (sequence is synthesized)
aaaggctggggagaaaatgcctgagagcattgtggaagtgaatttctgacacttcattgccttgaaggacagcattaggtcatagaggcgacactggggagcaaataaataaagaagcac

SEQ ID NO: 989984 - DNA, 120 bp, Artificial Sequence
  ENSG00000259709_2 (sequence is synthesized)
ttacttctggcttcagtttggtgacgtgatgaccacagagctacagggaaggaacaaattacaaggaggggaatctgctcccgccctggtgttgcacccactggctgtccacaggacccc

SEQ ID NO: 989985 - DNA, 120 bp, Artificial Sequence
  ENSG00000259709_3 (sequence is synthesized)
ctagcaaagtagcttatggacacacaaaacctgaaccgaggctgaaatttgggtactcatattttgttggatgctcaaattccctcaatctctcctggcccacacccactagtggctgtt

SEQ ID NO: 989986 - DNA, 120 bp, Artificial Sequence
  ENSG00000259709_4 (sequence is synthesized)
ccaactcactgctttcctaataacacttgcagtaacttacagtttattttgagacaccaggtccaaacaattttctttaagcaactaccccagtcttgctctttaatttaggaaattttc

SEQ ID NO: 989987 - DNA, 120 bp, Artificial Sequence
  ENSG00000259709_5 (sequence is synthesized)
tgctctttaatttaggaaattttcataccatactgtttgatcaaagaaatgaatagtttttaaaagttaaaagtagatttctaatacttttcaattttgtgtttctgatcttcattataa

SEQ ID NO: 989988 - DNA, 120 bp, Artificial Sequence
  ENSG00000259709_6 (sequence is synthesized)
accaaacatttattcatataaatgcattaaacagaacccctaactcattgtcactcatttgttctggaatgcagagaatttgtaagtttaataccatagtctcataccagccgcttgagt

SEQ ID NO: 989989 - DNA, 120 bp, Artificial Sequence
  ENSG00000259709_7 (sequence is synthesized)
gacttaagctagcaaagtagcttatggacacacaaaacctgaaccgaggctgaaatttgggtgagaaaaatgaagcacgcagaaattcaaacgctgtctaggatcaccagctagaacaca

SEQ ID NO: 989990 - DNA, 120 bp, Artificial Sequence
  ENSG00000259709_8 (sequence is synthesized)
gcggagccaagatccaatcctgctgtctgcctccagagccacccttgacctaccctgcctcccaggccgcgtccccgccgaggtagccagctgtgacttccctttatctccggctaagct

SEQ ID NO: 989991 - DNA, 120 bp, Artificial Sequence
  ENSG00000259709_9 (sequence is synthesized)
ggcttcagatgcctgatggtcgtggtagccccctgagcctgccttcatccagcctaaatgtcctctgttgctttggtttgcctcaggcccaaagacatctcattttggccactgcaccag

SEQ ID NO: 989992 - DNA, 120 bp, Artificial Sequence
  ENSG00000259709_10 (sequence is synthesized)
tcagtggccacagcgccccctggtgaacaagtctgcaagattcctggttaggctcaaataataggtgtaaacaacaggggcacaatggtgacactgcaagtcccaacatccctccagtca

SEQ ID NO: 989993 - DNA, 120 bp, Artificial Sequence
  ENSG00000259709_11 (sequence is synthesized)
gcaattgaacaattacccagccacctgacctccctgcctctaacctccccatccctcctgacatcaattcactgaagccagagtaaactatggaaggctttaatctaactcagacacttt

SEQ ID NO: 989994 - DNA, 120 bp, Artificial Sequence
  ENSG00000259708_0 (sequence is synthesized)
aagggtgggactgggagagctgcgccctgcggtccccacccggcctctccccgggggtgtggccgccgtctgttcggtcacagccaggctgcggcctaagttgaggtacaggggtccttt

SEQ ID NO: 989995 - DNA, 120 bp, Artificial Sequence
  ENSG00000259708_1 (sequence is synthesized)
tcctctcgaatgcccaccactgggaacccttaagtccctcaagatctttcctcagcctcggccagtcctatctcagcagtagtggccggtgttaagtatggtgcctagaaaattacagac

SEQ ID NO: 989996 - DNA, 120 bp, Artificial Sequence
  ENSG00000259708_2 (sequence is synthesized)
tattccagaccaggaaggaaagttgacttcatcttcagatactcaggctccagcctggagacatctcatctctcctctgtcactccttccccattattaaagtttgtggatgttccttag

SEQ ID NO: 989997 - DNA, 120 bp, Artificial Sequence
  ENSG00000259708_3 (sequence is synthesized)
caaggctgaggtgaacctctggccttccagttgaggtacaggggtcctttgctggccccagatgtggacagtatcctctcgaatgcccaccactgggaacccttaagtccctcaaggtct

SEQ ID NO: 989998 - DNA, 120 bp, Artificial Sequence
  ENSG00000259708_4 (sequence is synthesized)
catggctcactgcagcctcaacctcctaaactcaagtgatcctctcgcctcagcttccctagtagctgggactgaagtcttgcttcaccctacccagctaattttaaaaaaaattttttt

SEQ ID NO: 989999 - DNA, 82 bp, Artificial Sequence
  ENSG00000259708_5 (sequence is synthesized)
atttttttgtagagacagcattcatactatcctcccacctcggcctcccaaagtattgagattacaagcatgaaccattgca

SEQ ID NO: 990000 - DNA, 120 bp, Artificial Sequence
  ENSG00000258077_0 (sequence is synthesized)
gtggaagtgaggaagagggagagctcctgggcaccagaatgaatggggagggtcctttagggcactgtgaggccattagcttttactcctactgagactggacatcccaggagagtttca

SEQ ID NO: 990001 - DNA, 120 bp, Artificial Sequence
  ENSG00000258077_1 (sequence is synthesized)
gagcagagaagtgctatgactgctcttgaagtttaagaggaccaggtggctggctttgctgtgtgtcagagaacaggagcagaaacagggagaccagctgggaggtgactgcaaaagtcc

SEQ ID NO: 990002 - DNA, 120 bp, Artificial Sequence
  ENSG00000258077_2 (sequence is synthesized)
aggtgagaggcgatggagctagtgaggagtgccggaggcctggtgtattctgacggtgccaggacctgtgataggtgctgagagagatgaggaactgctcagatcaccagctgcttcagg

SEQ ID NO: 990003 - DNA, 120 bp, Artificial Sequence
  ENSG00000258077_3 (sequence is synthesized)
tctgacaaccttggtaaagaaaccaaggcttagagacctgctcacagtcgtttcgtgagggaatgcaacatctgggtctagggtccaaatctatctctgctgtgaagaggaactcataca

SEQ ID NO: 990004 - DNA, 120 bp, Artificial Sequence
  ENSG00000258077_4 (sequence is synthesized)
ggagatctacatgattaccaattcttggccttgcagtggaggatattaattttaagtacctgtgaaatgaagttcttaaaacctaagattccccaaaactccagttatcaacaaggttat

SEQ ID NO: 990005 - DNA, 120 bp, Artificial Sequence
  ENSG00000258077_5 (sequence is synthesized)
ataggaatcaaagcgaggcgtttggagtagatgccgagatcacctctccctcacacctctgctgaccccagctacctgcaatcctgccaggaccattctggaggtgaggtgatccttttt

SEQ ID NO: 990006 - DNA, 120 bp, Artificial Sequence
  ENSG00000258077_6 (sequence is synthesized)
actacttctccagattctgaatgttctacatctgggcacaagattaccgttctttcattgtaccatctcaggctcagtcattgttacttaagcaggccaccatgttgcgggactggtggg

SEQ ID NO: 990007 - DNA, 120 bp, Artificial Sequence
  ENSG00000258077_7 (sequence is synthesized)
gatgagcttgcaggctcagttgtcagtgtgagaactttccctttcctatgaccttccagatgaggaactgctcagatcaccagctgcttcaggttaccagcccacacctgtctgtctcac

SEQ ID NO: 990008 - DNA, 120 bp, Artificial Sequence
  ENSG00000258077_8 (sequence is synthesized)
gtctgactcatgagccgctgtccgtgatgacttgacattctcaaaaggaaatcccgaatgttctcactgcatgctgctgcaggccctcatggcagggcatccacaccactggctcaggtg

SEQ ID NO: 990009 - DNA, 120 bp, Artificial Sequence
  ENSG00000258077_9 (sequence is synthesized)
ctggttgctccagaatctctcttcagctggcctttttctactgaactgtctgtgagaacatcactgcaggcacggttttctccaaccataattgctgctgccaaagccacctcggacttg

SEQ ID NO: 990010 - DNA, 120 bp, Artificial Sequence
  ENSG00000258077_10 (sequence is synthesized)
ggaaagggaaacaacactccactagagagcgtagaatcttagaattcatctacttcattctcctcctggtactctactttcttctacaacgtcccagccgagctgaggtctgagctgtgc

SEQ ID NO: 990011 - DNA, 120 bp, Artificial Sequence
  ENSG00000235785_0 (sequence is synthesized)
aagagattttatgaagttcccctaacggagggaataatgaagtgcctggcagagaaggaaatggagataagagggaggctggtgtcaggaggatgtccacagggggtctcgaagggttat

SEQ ID NO: 990012 - DNA, 120 bp, Artificial Sequence
  ENSG00000235785_1 (sequence is synthesized)
taggacacaagttgggggtggggaccctgggaaggcacagccaggcggagtctgaagcaggaagcaagacccagatcacacctctctgtcctgaccctcgaccctctcagcagacagtca

SEQ ID NO: 990013 - DNA, 120 bp, Artificial Sequence
  ENSG00000235785_2 (sequence is synthesized)
ttggattatctgaggccaacagcaaatagcaagggcaggagtgctttcgacatctcttttccaagtaaaatagctcaggctggctattcaacacccaagcaaattatcagctgccacaag

SEQ ID NO: 990014 - DNA, 120 bp, Artificial Sequence
  ENSG00000235785_3 (sequence is synthesized)
aaaaagaaaaaagaatgaatttcttgattttcagcaactgcacaaaagactagcatatgtcaaaatgctggaccaacatcccgtgaatgtggcaccattcatcaagcctccatctagtgt

SEQ ID NO: 990015 - DNA, 120 bp, Artificial Sequence
  ENSG00000272170_0 (sequence is synthesized)
caatggggaatgctgtgagggctgtgggggtggggggacccagcagacctgggggccgggttgaatgtcagctgcttgaagagaggtccatggtgctggcactgaggccccgggagacct

SEQ ID NO: 990016 - DNA, 120 bp, Artificial Sequence
  ENSG00000272170_1 (sequence is synthesized)
actggctcctagagtccatccatcccatggtcacagtgtatctctggacctaggatcacatctgtctctggaccagtctatctctggacctgggactttgtttagcctctgctagggttt

SEQ ID NO: 990017 - DNA, 120 bp, Artificial Sequence
  ENSG00000272170_2 (sequence is synthesized)
tccagaaggccacaatctggtggagaagctacctggaagaaccacatgaatactggcatatacttgtgtgttgatacaagaagtcatttgccattaaaatatcactagtgttttctcaga

SEQ ID NO: 990018 - DNA, 120 bp, Artificial Sequence
  ENSG00000272173_0 (sequence is synthesized)
tctgcgtggccacgggcagcacgaattgcagcatcttacccatgtcgttgcaggcgttatcccgagcctcgtccatgcgcactgcattctccggggcggagaacgcctggatcacctccg

SEQ ID NO: 990019 - DNA, 120 bp, Artificial Sequence
  ENSG00000272173_1 (sequence is synthesized)
cgaggaccactgcgcgccagaagcatcccagggaggcgtcccgggtaggcgtcggagaacagacagcgggcccagcggagagcgcaaggaattagtggattgaggctgtaggtaacccaa

SEQ ID NO: 990020 - DNA, 120 bp, Artificial Sequence
  ENSG00000272173_2 (sequence is synthesized)
taagatcccaagtcttgggggcaagcgccccacttagaaggacggtacccggcgtcccctaccccattttcccggcggacgtagccaggtttgtcgccccacatcctccgcccgcatcct

SEQ ID NO: 990021 - DNA, 120 bp, Artificial Sequence
  ENSG00000272173_3 (sequence is synthesized)
ccccagaccagcagcccatgccttgactaccccaggccagcagcctatgccttgactaggacgattctcaccctttgcttgctcagcgctcaaggccgccggttgggtcgaggcggacgc

SEQ ID NO: 990022 - DNA, 120 bp, Artificial Sequence
  ENSG00000272173_4 (sequence is synthesized)
tctaggttcagcggaggtaaatggaaaactcacgaataaagagccacgtcctacaaccgttcccaacgcccctgggagcggaaaggaaacagcatccggcgcagccggaagcgcccaggc

SEQ ID NO: 990023 - DNA, 120 bp, Artificial Sequence
  ENSG00000272173_5 (sequence is synthesized)
gtggcccaaaccttcataccccaagcttacaactgcatcaagaccaccaaaactacccataatttttgcacagtgaaaacaatctatcattggcaacaaacatcataagaggggctttcc

SEQ ID NO: 990024 - DNA, 120 bp, Artificial Sequence
  ENSG00000272173_6 (sequence is synthesized)
ggtaaaaagccagaaagcctactagacaaattctaaaagagctgtaacactgctgcgtatgtgtttggagagaagatgggatataaaggaactccacaattgatgagggtgagcttaggt

SEQ ID NO: 990025 - DNA, 120 bp, Artificial Sequence
  ENSG00000272173_7 (sequence is synthesized)
gacttttttcttgttcctattactgtataaacaacgacgcatgtggtaactttcagtaggaaaaataatattctaaggaacttacttaagtcattcatttctagagttcgcgaacatttg

SEQ ID NO: 990026 - DNA, 120 bp, Artificial Sequence
  ENSG00000272173_8 (sequence is synthesized)
ttctcagcccatgcaaatgagttcggtgctgattggttgagaaagcagccagtcacagccccttcgttgttgttaagcccggagacctggattcggcagtaaaggcccagagcaaaagcc

SEQ ID NO: 990027 - DNA, 120 bp, Artificial Sequence
  ENSG00000272172_0 (sequence is synthesized)
tgcccgcgcctccgacagtcccgcgccgccgccacccggcatctgcctctgggcctccacatctcgtgcctggaaccgcgttcattgcgcactgcaccagtaaacacctgaacactccca

SEQ ID NO: 990028 - DNA, 86 bp, Artificial Sequence
  ENSG00000272175_0 (sequence is synthesized)
cggcctcaaagaatcttaagggtccaaaattctaaataattgtcaaatttggaacaattcttccttttttatcatttcatgggtgt

SEQ ID NO: 990029 - DNA, 120 bp, Artificial Sequence
  ENSG00000272175_1 (sequence is synthesized)
tctcaataagatttgtagtttgtcttcagatagatcctatacttttcctgtttattcttagccattttattggcttttttttctcaatattgtaaataaatgtaagattgtttccatcca

SEQ ID NO: 990030 - DNA, 120 bp, Artificial Sequence
  ENSG00000265962_0 (sequence is synthesized)
acaataaataaaacagttggtgtcaatacaactccccttattttctctcaagtcacctggatcgtcctgaccccgggaaccccgtctgcagcaccaggccccctccgtggagaaaagatg

SEQ ID NO: 990031 - DNA, 120 bp, Artificial Sequence
  ENSG00000265962_1 (sequence is synthesized)
gagccggattaagcacccagtgctaaggcgactaagacgccactgcccgcaggccctgccggaaaatactcagagagtgcagcaggcgccgcgattccttagaaagtgctggcgtggcct

SEQ ID NO: 990032 - DNA, 120 bp, Artificial Sequence
  ENSG00000265962_2 (sequence is synthesized)
ctcctgacacagaaagccggctcctggatgcttacaaaggactggcccgcgcaacaccgttgctcctcaacccgggccacactccaaggacctctactgagcttcagcttgctcaccgaa

SEQ ID NO: 990033 - DNA, 120 bp, Artificial Sequence
  ENSG00000265962_3 (sequence is synthesized)
tagccgggggccctccagtggcattatcctgaaccgccacgcccgcacgtggcccggctagagctccctggcgaaggatcacctgttcctacagtgacaactggacctggcccgaacccc

SEQ ID NO: 990034 - DNA, 120 bp, Artificial Sequence
  ENSG00000265962_4 (sequence is synthesized)
tggcatctggcaacattattacctgtcgaaacagaagtagagatttgaaatagaggatgcctgttcccatttcctcctgctgtctggaaggaagtctggctttccagcccaactctaagc

SEQ ID NO: 990035 - DNA, 120 bp, Artificial Sequence
  ENSG00000265962_5 (sequence is synthesized)
tcatctttacatacaaaataagggtatgtttacatggaaagcaaaaatagaaccatggatttacagaaggttccatagcagcaaataacagtgcttatgaaataaacattttaaatatta

SEQ ID NO: 990036 - DNA, 120 bp, Artificial Sequence
  ENSG00000265967_0 (sequence is synthesized)
gaggttcctgcaggggcataaggagggctggaccacgggagaaagctggtttgcttctattggtcagtggagctacccaaagatggggcaaacccctctgggatagacagattatcatct

SEQ ID NO: 990037 - DNA, 120 bp, Artificial Sequence
  ENSG00000265967_1 (sequence is synthesized)
tgtatacagagaattaattaggttcacaaaataaccctatcaatcaccaagcccttgcaattctagaattctggtgccaggctcctacttccaaaggaattattcctcaaatggtcttta

SEQ ID NO: 990038 - DNA, 120 bp, Artificial Sequence
  ENSG00000265967_2 (sequence is synthesized)
aacagcagaagcaatgggccaactcactgaaaagacaagaataaagtgaggatttttttttagaccataataccctttgtcttcctagaagtaatccctggagcctgcctgccctgtgtc

SEQ ID NO: 990039 - DNA, 120 bp, Artificial Sequence
  ENSG00000265967_3 (sequence is synthesized)
cagcactaatctatgagcttgtgatatttctttctttaagctagtcatatttagcagtggggcttgtgatatttctggtttcctgatctctctcctcttcaaataaacgcaagatatcta

SEQ ID NO: 990040 - DNA, 120 bp, Artificial Sequence
  ENSG00000265964_0 (sequence is synthesized)
gtattaggccttggaccagcagcacgggagaagctatctaactaagcagggagctgacacctagagaaccaggcagtaggagggatgcctggtggccccagagtccctggtttaagtcat

SEQ ID NO: 990041 - DNA, 120 bp, Artificial Sequence
  ENSG00000265964_1 (sequence is synthesized)
tcctgaggctggctgcattcttgtccagccagtggtttggatactggagtcaataagtaatccccatactcccctttcccagaagcccgagcaaagctggctctgtacgcaggatgaggg

SEQ ID NO: 990042 - DNA, 120 bp, Artificial Sequence
  ENSG00000265964_2 (sequence is synthesized)
tcagagatggtactgaggctctgaaagcctacgtgctggggaggaagatcccaaggaagcaataagggattgttataagaacaggtgtgaaaataacaacagagtctctggccaggcccc

SEQ ID NO: 990043 - DNA, 120 bp, Artificial Sequence
  ENSG00000265964_3 (sequence is synthesized)
tcctgaacagtgggaggatattttggcctagagacagccacagagagtcccaagggcgtgggggtcaggggagggattgagctaagggaatgctggggcaattctacagctaggtcaaag

SEQ ID NO: 990044 - DNA, 120 bp, Artificial Sequence
  ENSG00000260305_0 (sequence is synthesized)
atcaacagctgcaaaggcaaagggattggcctcctgggcagaaaggggccaaaagggagggccctttggaggagcgtggctctggtgaggggtggaggtgagacccacacttatgctctg

SEQ ID NO: 990045 - DNA, 120 bp, Artificial Sequence
  ENSG00000260305_1 (sequence is synthesized)
atgccttgcaactgatttcctccagatacaaacagggcagctgaatggggagatggcctcccccatcagaggcagttcccagccagcttccttggatggccacacaggaatcactccaca

SEQ ID NO: 990046 - DNA, 120 bp, Artificial Sequence
  ENSG00000260305_2 (sequence is synthesized)
caccatccctgagaagcagaaccacagggaaacctcttgtccctctggaaactcagttacaatcagttcagcacttgaaggaaggatctcgaaacattacagcccgaagaacaagagggt

SEQ ID NO: 990047 - DNA, 120 bp, Artificial Sequence
  ENSG00000260305_3 (sequence is synthesized)
gaaactgtggaggcctcagcatcttctacccagagtgtgcccaagctataccctggggcagccaccagcatcaagagcttcaggccagtagggagctaggggacctcttggtcccatttc

SEQ ID NO: 990048 - DNA, 120 bp, Artificial Sequence
  ENSG00000260305_4 (sequence is synthesized)
cttgataacatcagaaatctgaagaacaactctccagcaaggcacgggcttcaactgaagccctcttcccaagtcatactaaaacaagaactgaccccagctgcgggtgcttctctctgc

SEQ ID NO: 990049 - DNA, 120 bp, Artificial Sequence
  ENSG00000260305_5 (sequence is synthesized)
ccgcacatccctcttccagcctgctccatatgcagccccacacagtgggggttcctgttgggattgtgtgtctggggcaagtgaccttaccaccccaagcctccatttcctcagaagtca

SEQ ID NO: 990050 - DNA, 120 bp, Artificial Sequence
  ENSG00000260305_6 (sequence is synthesized)
aacagggatggggatgctgactttccgggaagccagctcactttgctttcaacttccaagtccactgaaagtttccagtcccgggattttaggaagaagaaagaagatactagacatttc

SEQ ID NO: 990051 - DNA, 120 bp, Artificial Sequence
  ENSG00000260305_7 (sequence is synthesized)
tcacaacagcattttatgacacatttttatgacatcagctctttaagcatctctctccaaggaacacaaaattctccaacataacctcacccaggccttacaacagtcccccagaatcca

SEQ ID NO: 990052 - DNA, 120 bp, Artificial Sequence
  ENSG00000260305_8 (sequence is synthesized)
gcagagtacagcaatttttggtgtttattggatacctatttttcctgcctcgtttccgaaatggatttacaggcaaatataatgacctctccatcgtacagtcccctagaagcagaagga

SEQ ID NO: 990053 - DNA, 120 bp, Artificial Sequence
  ENSG00000260305_9 (sequence is synthesized)
caaggagcaaccacccttgttgaagtctctgcccgaggctcctggcagaaggttttccctcttccattcctggcacacacagcccctggcaactgttggtctcatcctggcagcctgaca

SEQ ID NO: 990054 - DNA, 120 bp, Artificial Sequence
  ENSG00000260305_10 (sequence is synthesized)
tttcagagagaagattctaggccccacttgtctgacagcttgtggtttctgacccaggactgatgtggaccaggaaggacagacccacatgggagtggcagcgcatgccggcccttcctc

SEQ ID NO: 990055 - DNA, 120 bp, Artificial Sequence
  ENSG00000260305_11 (sequence is synthesized)
accccctcagccccagcccatcaccctccctggcttttagggagctgatcttctgcagacatgcctggagcctggtgagggcaggacaactgtccacccaaggatggaaatgaatgctga

SEQ ID NO: 990056 - DNA, 120 bp, Artificial Sequence
  ENSG00000260305_12 (sequence is synthesized)
cagctcctgatttatgcccttgttatcctgtaaggaagacagcaaggcaatttaaaaggccagcagctttgggaagcccaacaaggagccccacagcacctggagctgcccactgtctcc

SEQ ID NO: 990057 - DNA, 120 bp, Artificial Sequence
  ENSG00000260305_13 (sequence is synthesized)
ccagccaacgctagctagctgcttcctggaaaggccaagataccctcctcccatccccagcctgaaagggagaagagggaaaaggaagcacgtccctgagtgcccacgagggtcagatgc

SEQ ID NO: 990058 - DNA, 120 bp, Artificial Sequence
  ENSG00000260305_14 (sequence is synthesized)
cagtggactcctccccacccagtggcgtctctctcatcatccatcttttgcaggtgaagaatcagacacttaaagaggttaagtcgcgtacctgaagttacactggggagaccaggagca

SEQ ID NO: 990059 - DNA, 120 bp, Artificial Sequence
  ENSG00000260305_15 (sequence is synthesized)
aacttgcatctgtctgacctcaaagccctgcttctaagcagccagggagcagtgggatccagtgcagagatggggaggaggggctctgccactcccagcctgggaatgaagtggagccaa

SEQ ID NO: 990060 - DNA, 120 bp, Artificial Sequence
  ENSG00000260305_16 (sequence is synthesized)
tggcaagagcttccctagggctgggtcaaacctccctgctccaggcatgaagagaaaggaaaaggctgctccaggtgggggaagtctggtccagctccttgttaaagaagaaacaggaaa

SEQ ID NO: 990061 - DNA, 120 bp, Artificial Sequence
  ENSG00000260305_17 (sequence is synthesized)
atacagcaacagggggaagtcacaggggaactgacattttgtcaaaagatgatgggtttctggctctctcctgctttccaactttccctggatccccactgcctacaggtctccacttta

SEQ ID NO: 990062 - DNA, 120 bp, Artificial Sequence
  ENSG00000260305_18 (sequence is synthesized)
agctccaccacccagcatccagcactgtccaggacccagcctctcctcccacttcagctgctctgccaccagactgccccttgtgcccagcacctgggctccagcccacttccaatctca

SEQ ID NO: 990063 - DNA, 120 bp, Artificial Sequence
  ENSG00000260305_19 (sequence is synthesized)
ccttttcccactgttacccatctctatattttggctcttcagctccagcctgtcaaaactctgtctagctttcaaagcccaggcatctcacctccctaacaagccccccaatttctccaa

SEQ ID NO: 990064 - DNA, 120 bp, Artificial Sequence
  ENSG00000260305_20 (sequence is synthesized)
gcaattttgcctcctgtatgttcagaacggggcagctcagcaactattacagcatcattgagagccttccattggtcttccatccgtcagagatggccatgcatacttctgcctctatcc

SEQ ID NO: 990065 - DNA, 120 bp, Artificial Sequence
  ENSG00000260305_21 (sequence is synthesized)
tgaactctaggttccttgaagccagggccatatatttacacagagtccagtacctaacaggcattccatcaatgtgtgtttatctagtacacattgaattaaactagaaaaccaaaccag

SEQ ID NO: 990066 - DNA, 120 bp, Artificial Sequence
  ENSG00000260304_0 (sequence is synthesized)
ttttttatgtttttgagatggggcctcaacacactgcccaggctggaatgcagtggctgttcacaggcaccatcatagctcactgcagccccaaactcctgaattcaagggatcctcccg

SEQ ID NO: 990067 - DNA, 120 bp, Artificial Sequence
  ENSG00000260304_1 (sequence is synthesized)
gaccagactccgtctccaaaaaacaagaaaaagaaaagcaatattcagaaagagtaggaagaggtgacccgctgagaaagactcactgttctggctctggccataagaagaatagctgct

SEQ ID NO: 990068 - DNA, 120 bp, Artificial Sequence
  ENSG00000260304_2 (sequence is synthesized)
ctggccatagcctgaagtgtccgtggactggctataaccactgtaactctgctgtccgtagggctgactgctctgctgggaatagccctgcccgggctgggtggggtaggccccatagct

SEQ ID NO: 990069 - DNA, 120 bp, Artificial Sequence
  ENSG00000260306_0 (sequence is synthesized)
aaaagttttggtgatgagacattcaggaagatctatcaataaatagcaaacctggtcctttttaagacactgtgtataaaaaaattccaaaaagattaaaatcagtgcagaaaccaaaga

SEQ ID NO: 990070 - DNA, 120 bp, Artificial Sequence
  ENSG00000260306_1 (sequence is synthesized)
accatttttttctatatcatattgatcatttcaagtggaactgttagctatcttagaaaaattgtggttctcaattggttttgcctctatctctgaaccaccattcctaaaggaaaacat

SEQ ID NO: 990071 - DNA, 120 bp, Artificial Sequence; identical to SEQ ID NO: 860362
  ENSG00000260306_2 (sequence is synthesized)

SEQ ID NO: 990072 - DNA, 120 bp, Artificial Sequence; identical to SEQ ID NO: 860363
  ENSG00000260306_3 (sequence is synthesized)

SEQ ID NO: 990073 - DNA, 120 bp, Artificial Sequence; identical to SEQ ID NO: 860364
  ENSG00000260306_4 (sequence is synthesized)

SEQ ID NO: 990074 - DNA, 120 bp, Artificial Sequence; identical to SEQ ID NO: 860365
  ENSG00000260306_5 (sequence is synthesized)

SEQ ID NO: 990075 - DNA, 120 bp, Artificial Sequence
  ENSG00000260306_6 (sequence is synthesized)
atttgagtggctcctcaagcctccccaactccctctccaacctcgctacacagtcttcccaggtctggtatttgacctccagactgccgcccagaaagcaactcagagctcagcaacacc

SEQ ID NO: 990076 - DNA, 120 bp, Artificial Sequence
  ENSG00000260306_7 (sequence is synthesized)
atgatgatgaaacacaaatatgtgggcccccaactttggagactccactggttgcttttgtgcagctctttctatatatgactttcaaaatggcagccaaccctctcaactgttggttga

SEQ ID NO: 990077 - DNA, 120 bp, Artificial Sequence; identical to SEQ ID NO: 860368
  ENSG00000260306_8 (sequence is synthesized)

SEQ ID NO: 990078 - DNA, 120 bp, Artificial Sequence; identical to SEQ ID NO: 860369
  ENSG00000260306_9 (sequence is synthesized)

SEQ ID NO: 990079 - DNA, 120 bp, Artificial Sequence; identical to SEQ ID NO: 860370
  ENSG00000260306_10 (sequence is synthesized)

SEQ ID NO: 990080 - DNA, 120 bp, Artificial Sequence; identical to SEQ ID NO: 860371
  ENSG00000260306_11 (sequence is synthesized)

SEQ ID NO: 990081 - DNA, 120 bp, Artificial Sequence
  ENSG00000260306_12 (sequence is synthesized)
actcgtcctatttgcataatattgttctttaagttaacccattcttaatttattgttttaatcttaagcaataatattcaagaactaatgagttttgtgtattcattatatttttccata

SEQ ID NO: 990082 - DNA, 120 bp, Artificial Sequence
  ENSG00000260303_0 (sequence is synthesized)
gttttgtcaaaggggactcttccaattccctgcctagggaatataaatctagttgccagtgccctaactgcaagtgagggaaaaagggtgggagtctcactaattagtatatggcatgta

SEQ ID NO: 990083 - DNA, 120 bp, Artificial Sequence
  ENSG00000260303_1 (sequence is synthesized)
gacttgaccttgatcatcctttttcagccttactcctatcctctacaaaacatggtatcattgggtctgaaaatccctggctctatttccctagaaattaaaccagttgcctgctgggct

SEQ ID NO: 990084 - DNA, 120 bp, Artificial Sequence
  ENSG00000260303_2 (sequence is synthesized)
ggttggtgtacagaagaggagaaggattctgaggggtcatctccaatcccattttttttcagccccagcctgcatccctttctacagaagtaacaacaatttccagtttctgagcctttc

SEQ ID NO: 990085 - DNA, 120 bp, Artificial Sequence
  ENSG00000260303_3 (sequence is synthesized)
cagggttgtacagtaggtattcatttgctttttgatattttccacagcaaagcaaactttcttgctgctctgttaacttcgttaccactcacccgtctgccttctgtcttccaacatttt

SEQ ID NO: 990086 - DNA, 120 bp, Artificial Sequence
  ENSG00000260303_4 (sequence is synthesized)
gttgctagctcttgtctgctgttgcctcttctgttctctttatccttccaggttttataagattgtttttattccttttcagtcatttcagagaggcttcaggatggagttgtgataaac

SEQ ID NO: 990087 - DNA, 120 bp, Artificial Sequence
  ENSG00000260303_5 (sequence is synthesized)
gcatgtgttcagtctacaatgtttaacagggagtgcctcttgattttttcatgtgaattactgaggagtaggtagtagactatcttgatgcccttcctcatgtccctttgactctgagtt

SEQ ID NO: 990088 - DNA, 120 bp, Artificial Sequence
  ENSG00000260303_6 (sequence is synthesized)
gacctgcagctgcagtgaacacttcctaaggatgctgatgtcttcccctatcaagcacttgcctcattctgcttctccgaggatttcctccagtacaccaagagcttgcccgacactcac

SEQ ID NO: 990089 - DNA, 120 bp, Artificial Sequence
  ENSG00000260303_7 (sequence is synthesized)
aaggtatcctggaactgctggggactgaaaacccctcaacccatgaagaatgaggatcagtggattaatagcaactgtcccataccttggtgggactattataaggcattctggttggtt

SEQ ID NO: 990090 - DNA, 120 bp, Artificial Sequence
  ENSG00000260303_8 (sequence is synthesized)
cctcagaggtcccaaatgggattgaaccaaagttgcccacagtaaaaactcattcaccaactcaattttcatttcacccctctcaatttgcacactcactcacttgttctacctgggata

SEQ ID NO: 990091 - DNA, 120 bp, Artificial Sequence
  ENSG00000260303_9 (sequence is synthesized)
ctctccaagataaactcctgtatccaaagctttgtctcaaggtctcatttgggaggaactcaaactaagataataggtactggaagtgactacagaaagtatattatcaatggtatggag

SEQ ID NO: 990092 - DNA, 120 bp, Artificial Sequence
  ENSG00000260303_10 (sequence is synthesized)
gcaacaaaaaccccattaatggtggtgagtaaggtggtgacaaaccctggcactttgaagaatttcattacccacaattgacccatggtgtacttggatgaggtaaaaatgaaaggagac

SEQ ID NO: 990093 - DNA, 120 bp, Artificial Sequence
  ENSG00000260303_11 (sequence is synthesized)
gctaaccttatgcaatagtgctaactcctgaaagatatagggctgtgataatcacaggaattgaagagttgtcttgttcttgttaactcccctagaagaattgggaaaaaagaaagatag

SEQ ID NO: 990094 - DNA, 120 bp, Artificial Sequence
  ENSG00000260303_12 (sequence is synthesized)
gtttacaacatccaactacccattcagagcatagcaatgaaagccagaaggtctccttgggagaatctgaagagacccccatttcctgcaaccagagggcaggctgttctaaaaaaatga

SEQ ID NO: 990095 - DNA, 120 bp, Artificial Sequence
  ENSG00000260303_13 (sequence is synthesized)
cattcaggggttcactgcaagaggaattgaactacagagcagactgaagacacagtccaggcaggcctctcatgcaaaagtcaaagccctagaggaaggaaatggtccttaaaaactact

SEQ ID NO: 990096 - DNA, 120 bp, Artificial Sequence
  ENSG00000260303_14 (sequence is synthesized)
gggatgcaggcaggcatctggatagatgtgctagataaccttgaacccctagattccctgaacaacccaggctagcaggagtatcctgcaccctgttacttgaacagaacagcttccctt

SEQ ID NO: 990097 - DNA, 120 bp, Artificial Sequence
  ENSG00000260303_15 (sequence is synthesized)
tgcctagagactctacacagtcctcctctgaagcagacacctccaagattacttcaaggtctgctacttcctgccctcattgcctctattccaaaaactggaaacaagtctcagcatgcc

SEQ ID NO: 990098 - DNA, 120 bp, Artificial Sequence
  ENSG00000260303_16 (sequence is synthesized)
ctgagcagggtagcacatttcttgctgtgagagatatgacagattgtattttctaaagaaggctgcaaccatgtctctcatcccaaatgctcttctacaatgcaatcttgtcactcctct

SEQ ID NO: 990099 - DNA, 120 bp, Artificial Sequence
  ENSG00000260303_17 (sequence is synthesized)
gacactgtgtgattcttacagctgagtcataaaaggtgatgcagcttctgccttgttcctggggacatatgcctctgtgagattgagctactaaataacaagaccacctaccttgaggct

SEQ ID NO: 990100 - DNA, 120 bp, Artificial Sequence
  ENSG00000260303_18 (sequence is synthesized)
gccatgctggaagaaagcaaagccacatgaagagcaagtaagctggttgctttagcaagatccttcatattgatagtgaatgtgcacttctgtctttctcttgtgaatgcaaaccacttt

SEQ ID NO: 990101 - DNA, 120 bp, Artificial Sequence
  ENSG00000260303_19 (sequence is synthesized)
ttcaatagtctcacgttaagtgccaaagattgttgtttttgttgaatgcattctctttatcattcactacctggccctaggaatttgttcaatgatcctcatttctgttacaatatagtc

SEQ ID NO: 990102 - DNA, 120 bp, Artificial Sequence
  ENSG00000260303_20 (sequence is synthesized)
ttcagtgaccttgatcatcttcacattctatagaacatcatcctggcccattatattaatgacagaataataattgaacttggtttttaggaaggagcaagtatactggttttaaatact

SEQ ID NO: 990103 - DNA, 120 bp, Artificial Sequence
  ENSG00000260303_21 (sequence is synthesized)
tcatgctgaaggaatgagagataagccctacaaagttttggaagtctgccacatcagggaatattttaggggcccaaagatccaggggtatgttgagacaccctactcaaaagaatactt

SEQ ID NO: 990104 - DNA, 120 bp, Artificial Sequence
  ENSG00000260303_22 (sequence is synthesized)
tacatttcctaccactaagacagaggcacagcacttggtgagctgctttgaattcctgaggcaaaaaaataacaataataaatactacccatgagaataatgctctgatctattgtatca

SEQ ID NO: 990105 - DNA, 120 bp, Artificial Sequence
  ENSG00000260303_23 (sequence is synthesized)
gaagactattgactttgcgggggtctgagagagtatctgaatagccttttaaagacttaaaaaggcattggcttaggaattgcaccttgcatggctaggtcattgtcctcgaggatacag

SEQ ID NO: 990106 - DNA, 120 bp, Artificial Sequence
  ENSG00000260303_24 (sequence is synthesized)
catatttgttgaaccagtgatcactatatgcaatcactgtgctgttttcccagcatttggaatacacaggaatgataattaaaggatacaagtaggactgacttaaacacactccctttc

SEQ ID NO: 990107 - DNA, 120 bp, Artificial Sequence
  ENSG00000260303_25 (sequence is synthesized)
acccattagtggaaattatgtttttaattcttacaactttaggctcttcctgattaaaagccttggtctcaaggtgtgtgtacagacggagacagtaagtgttccactgcatcaatgcag

SEQ ID NO: 990108 - DNA, 120 bp, Artificial Sequence
  ENSG00000260303_26 (sequence is synthesized)
tgccatctgaggatttgggcatctccatactgacaggtcagcaggcaaaaatgggagtactatactggcagggacacctgactgattatcttgaagagtcggagttgctgctacataatg

SEQ ID NO: 990109 - DNA, 120 bp, Artificial Sequence
  ENSG00000260303_27 (sequence is synthesized)
ggcccagggaggaagatgtctagaacttgggggaatcactcaggccccccttagtgcttctttgtctggcgataatagcagagaagcaattgaagtagccatgtcctcacaagggcaagg

SEQ ID NO: 990110 - DNA, 120 bp, Artificial Sequence
  ENSG00000260303_28 (sequence is synthesized)
taatcaaggcccagccactcagagatgaaggtctggtcatacactgagcaagcaatgatgactagtggaagtgctagccaaggattcgggaaatctagaagaagtggaattggagagaga

SEQ ID NO: 990111 - DNA, 120 bp, Artificial Sequence
  ENSG00000260303_29 (sequence is synthesized)
tgatgagtatagattatagccttgggaccagctgcagcagtgaagattgtgacttgttccacatattcttctattttcagtcatttttggagattgcagccagctacaactctgaaatgt

SEQ ID NO: 990112 - DNA, 120 bp, Artificial Sequence
  ENSG00000260303_30 (sequence is synthesized)
cagtaacagagcaaactaagggtgggcatgagaggatctgctgagagcaaggaatgaacatggtagtcactaatgatacactgcccatgttccccggctcacctgttagctccccggcag

SEQ ID NO: 990113 - DNA, 120 bp, Artificial Sequence
  ENSG00000260303_31 (sequence is synthesized)
cttgcaaacatgtctatacacactgccatcttcctaccacgagtgccataactctctgcttctctgctgaggcccttctcagctcacagtgcgagtagcctgcaagtgctaagggcataa

SEQ ID NO: 990114 - DNA, 120 bp, Artificial Sequence
  ENSG00000260303_32 (sequence is synthesized)
tgcctccaaggtcaactttaatcaacgaggttcaagagtcagaagagtgaattccttctgagatacattctttctggtttctcagaggctccccagaggaagtaggccccagttgcttag

SEQ ID NO: 990115 - DNA, 120 bp, Artificial Sequence
  ENSG00000260303_33 (sequence is synthesized)
gaaaaatggaacctacttattaaggcaccccctttttacttttctcctttctttctctccctttccccactccattccgtgaagttcctgggatcaccaaataaactatctgtaatcaaa

SEQ ID NO: 990116 - DNA, 79 bp, Artificial Sequence
  ENSG00000260302_0 (sequence is synthesized)
gggtccaatcccgggcacaaaaccacctcaatctcccaaagaccgaaagccctggtgtcgctgggaccagagttctgga

SEQ ID NO: 990117 - DNA, 120 bp, Artificial Sequence
  ENSG00000260302_1 (sequence is synthesized)
agaccgaaagccctggtgtcgctgggaccagagttctggaggctggatgtccaagatgaaggcactgctaaactctgcatctggagagggtggtttcctgattcacggacaatgtctcct

SEQ ID NO: 990118 - DNA, 120 bp, Artificial Sequence
  ENSG00000260302_2 (sequence is synthesized)
ccctgtgtcctcacatggcctctactctgtgcgcacctggagagagagcgccccgtccctccctcttctgatgaggtcaccagccctatcaggaatgcaggaagatggacacacggctgg

SEQ ID NO: 990119 - DNA, 120 bp, Artificial Sequence
  ENSG00000260302_3 (sequence is synthesized)
cacgaacactcattcccgaggactcatccaatactaataagagaatgctcttgtttttgaagaattttctgaaagccatcctgacaaattaagtagagtatgctgaagatagtcagactt

SEQ ID NO: 990120 - DNA, 120 bp, Artificial Sequence
  ENSG00000260302_4 (sequence is synthesized)
tgtttttaagaattgaatattctggaagaggctcttcagtccaatctttagttctctccacagagcaaacgaagtgaagtgctgaaggcctggagcccgagctgttcccacacggactcc

SEQ ID NO: 990121 - DNA, 120 bp, Artificial Sequence
  ENSG00000260302_5 (sequence is synthesized)
aggacagttaaggcagggttgccttaactaaatctctgacaactgtttcttctgtctttctcctaaaaatggaatgcaggccatctattctagggaaataaaggattctagttatgtgaa

SEQ ID NO: 990122 - DNA, 120 bp, Artificial Sequence
  ENSG00000260302_6 (sequence is synthesized)
tcgctgggaccagaggtgagacgtggaacacgtggggaagatgagaaggcgctggagaaggagggtggtggtcgcagatgggaatgtggtggagccaatgagctgtgcgggtaaaaatgg

SEQ ID NO: 990123 - DNA, 120 bp, Artificial Sequence
  ENSG00000260302_7 (sequence is synthesized)
ttgatagaaattgatgtatattttaccacaattgtgtgtgtgtgtgtttgtgtgagagttctgtttatctgcacaataggattgtactcgtagtttgcagtgttgttgagagaaagaaat

SEQ ID NO: 990124 - DNA, 120 bp, Artificial Sequence
  ENSG00000260302_8 (sequence is synthesized)
aggatcttaaagtgcttatcacagcatctagcgccttttaaatactgaagaatagtaatacgattagcagccgaagaatgtgctatttatattaaaataaaaaatacatcaggccatccc

SEQ ID NO: 990125 - DNA, 120 bp, Artificial Sequence
  ENSG00000260302_9 (sequence is synthesized)
aagctatgctctcagcagacccaaaaccccatctaatcacgagaaaaacagcagacacatgccagctgagaggatagcgggccaggcctcctcaaaactgatgggctcatcagcaacaag

SEQ ID NO: 990126 - DNA, 120 bp, Artificial Sequence
  ENSG00000260302_10 (sequence is synthesized)
gaaagtgtgaggaactcttagcttgggaggagcctgcggagagtaactacaaccaccaccggcaacggggcatcctgggccggctcccagaccagaaaatgacatcaggtaaaaactaaa

SEQ ID NO: 990127 - DNA, 120 bp, Artificial Sequence
  ENSG00000260302_11 (sequence is synthesized)
ggaagctgaataaatggtgggctttagttataacagtggatcagcatgagttcattaattgtgacaaatttgccattctaatgtaagatgttaagaggagaaaccgggtgtggggcatat

SEQ ID NO: 990128 - DNA, 120 bp, Artificial Sequence
  ENSG00000260302_12 (sequence is synthesized)
aggaactctgtgttagcttggcaattgttctataaatctacaacgaatctaaaatgtaacaattattggaaaggaggactgaaaagattcaagagaaagtgataatattgaagacagggg

SEQ ID NO: 990129 - DNA, 120 bp, Artificial Sequence
  ENSG00000260302_13 (sequence is synthesized)
aagaaactgacatacagataataggagtccctgaagaagaaatccaaagtgaatagaacagtgaaatttgtaaatcaagaaaagtttcctgaaataaaatttgaaactacatactgagaa

SEQ ID NO: 990130 - DNA, 120 bp, Artificial Sequence
  ENSG00000260302_14 (sequence is synthesized)
ggcaacccactcagattccgtttcatagtgtggaggttttgttctttcactctgcagtaaatcttactgctgctcagtgtttgggtctgtgctacctttatgagctgtaacactcacggt

SEQ ID NO: 990131 - DNA, 84 bp, Artificial Sequence
  ENSG00000260302_15 (sequence is synthesized)
ttgggtctgtgctacctttatgagctgtaacactcacggtggaagcctgcagtctcactcctgaggccaggggaggcgcagact

SEQ ID NO: 990132 - DNA, 120 bp, Artificial Sequence
  ENSG00000260302_16 (sequence is synthesized)
tggatggggaaatagttcatacgcagctcagcgaccttgaagcggcatccgaggagatgtggccacggggcaggcgaccgacaccagcgagtccagagggccagcgtgtgcaccactgtg

SEQ ID NO: 990133 - DNA, 120 bp, Artificial Sequence
  ENSG00000260302_17 (sequence is synthesized)
tgtctccagagacttcaggaagcagccaccacgcccgaggaatgcaggaagatggacacacggctggggaagtacaatgaaaggccaagtaggcagcctgttctcctcagatcagtcccc

SEQ ID NO: 990134 - DNA, 120 bp, Artificial Sequence
  ENSG00000264174_0 (sequence is synthesized)
gaagctgtgggatttggtgctgggtggaggggaagatgcagtaggccaagaaaagcctctaccttccaatcttttccttttgggctgacaggtacgtttcaagggaaattgaatctgcac

SEQ ID NO: 990135 - DNA, 120 bp, Artificial Sequence
  ENSG00000264174_1 (sequence is synthesized)
atttcagcttcatttgcacttaacacatctggctggcagtgggcaggaggcttttgatgtctgcgtttcggtgcccaagcctttttaagcctcttttctttgaagccagggagacttgtg

SEQ ID NO: 990136 - DNA, 120 bp, Artificial Sequence
  ENSG00000264174_2 (sequence is synthesized)
tcccaaaggccctgggggctggaggccccacttcttcatttgttcagcctacaaacacttattcaagacttactgtgcaaaagcttccccaaaactgcctttcataggaagggtatagag

SEQ ID NO: 990137 - DNA, 120 bp, Artificial Sequence
  ENSG00000264174_3 (sequence is synthesized)
agaaactctggcagatttcacaatcaaactcaccaagctcatttgtctaagaagcaagggaagggagtctatgtcccaccaatattttctagagtgactttagctccccgataatttcat

SEQ ID NO: 990138 - DNA, 120 bp, Artificial Sequence
  ENSG00000264174_4 (sequence is synthesized)
cagcctctctaccttcccacccacctctaaagtcatcccttgctgttcttatttgtaatgtgggcaaattgatgatttctcaatgtcatatgaagtgtgaataaagcacttgagaaagtg

SEQ ID NO: 990139 - DNA, 120 bp, Artificial Sequence
  ENSG00000253154_0 (sequence is synthesized)
gagtcattaaatctcaaggatatctatttggtcatgttttcttgtggtatttcaaggctactggtgacttcttcaacagttgagaaactgaactatgtgttcatgaaaatactccatcat

SEQ ID NO: 990140 - DNA, 120 bp, Artificial Sequence
  ENSG00000253154_1 (sequence is synthesized)
atcttgtccatcattcttaacaatttgacagcgtgtccagaacattgcgcctaaatgaatctaacaagaggtaagttgaacataatattggtatttgaaagtcttcaatagaattaggcc

SEQ ID NO: 990141 - DNA, 120 bp, Artificial Sequence
  ENSG00000253154_2 (sequence is synthesized)
cttaatttagctttttctaagactttaaacattcaaatgtttcttctgcttatacttaaatagtctttaaggcaacttatttgttccctgaacaaacttcagttgcttaaaaaaaaaaaa

SEQ ID NO: 990142 - DNA, 78 bp, Artificial Sequence
  ENSG00000253154_3 (sequence is synthesized)
cggctcactgcaggagagtagagatgaagttttgccatattgccccagactggtctcaaacttctgagctcaagcaat

SEQ ID NO: 990143 - DNA, 120 bp, Artificial Sequence
  ENSG00000253154_4 (sequence is synthesized)
tggtctcaaacttctgagctcaagcaatctgcctgattcagcctcccaaagtgctgagattccaggtgtgagccattacacctggaaaaaagaggctgcctttttcatctctcctgtttt

SEQ ID NO: 990144 - DNA, 120 bp, Artificial Sequence
  ENSG00000253154_5 (sequence is synthesized)
cctgttttcgagatttttgatgctgccatgccctctcccatttttttgcccctatggtttatacctttaagacaaagttcattgtcttttgttttaatgaggagctggaagagaacaaaa

SEQ ID NO: 990145 - DNA, 120 bp, Artificial Sequence
  ENSG00000253154_6 (sequence is synthesized)
gaagaaagcacatgtgtttaacgctatctatctggtgagagttcaagatttcaacattttaagataatctgaaaaaaattggaatgtgcccccagctgcgtgagtaactaaagataacag

SEQ ID NO: 990146 - DNA, 120 bp, Artificial Sequence
  ENSG00000253154_7 (sequence is synthesized)
taaccaagtctcattggatgacccagttcagctaaaagcttctcttacagatgatgctatattcttgagaggagcttagagtgactgtgtggttcacaaactgtgcaaatcaaaatgtaa

SEQ ID NO: 990147 - DNA, 120 bp, Artificial Sequence
  ENSG00000253154_8 (sequence is synthesized)
attcttagcttatctaataattgatttattgtgtaaggtacaataaatggtttaaccactctgaaatttattttcaaaataaaatgaactctagatgtattcctaacagatgcagagaaa

SEQ ID NO: 990148 - DNA, 120 bp, Artificial Sequence
  ENSG00000253154_9 (sequence is synthesized)
ctcacactaggatgccttgaggttttctgagatgtttatttatcctttgtttcaatagtgagaactaattagaataaaataaaattaatgagagctaattagaataaagataagattgat

SEQ ID NO: 990149 - DNA, 120 bp, Artificial Sequence
  ENSG00000253154_10 (sequence is synthesized)
tatttctacttccagttaaaactaaagatgcagaatcaattttatggaaaaaaaggttgccaggttttactaaattcaaggctgtttttttccctctatttgtttaggataaacataggc

SEQ ID NO: 990150 - DNA, 120 bp, Artificial Sequence
  ENSG00000253154_11 (sequence is synthesized)
ttcttcctgcatgtcaatacaatactacatttggcaagtgtctcctgtttccagatgatcccggcagttcattgttcgggatattgattttaattagcacaagtggatcagcagctctca

SEQ ID NO: 990151 - DNA, 120 bp, Artificial Sequence
  ENSG00000253154_12 (sequence is synthesized)
cttcagttgatctgaaaatcaacatctctagatgcttttcctctgctcttccttccttcagaagaggaaacgcagtttttcatgtttgaaaatcaatagaataattgcaggccaataact

SEQ ID NO: 990152 - DNA, 120 bp, Artificial Sequence
  ENSG00000253154_13 (sequence is synthesized)
ctatgccagcagaactcatctgtgaacaaccaaaagaaagaagccaaaagaatggttgattcatttttgttgtaatatacaattacttagagcactgttcctatagaggagatctagtca

SEQ ID NO: 990153 - DNA, 120 bp, Artificial Sequence
  ENSG00000253154_14 (sequence is synthesized)
gaaaagaattaaatcactccttccaacaaaattgcttatgcaggtaaatagaaaccaaaagtcagtgtatgataaagaagaaagctaccatttgaggaagaaaagcccaggtagtgggtc

SEQ ID NO: 990154 - DNA, 120 bp, Artificial Sequence
  ENSG00000253154_15 (sequence is synthesized)
tgagaagttacaaacatttagtactgccagcaacatcagttggctctcttggtagttttccacggaggttttacattcagcttttgcctactgacatgacctgaacttgccttgaatttc

SEQ ID NO: 990155 - DNA, 120 bp, Artificial Sequence
  ENSG00000253154_16 (sequence is synthesized)
ctttcactgagcactggggattacatatttttccaaatgcaacggtctaaatattaagtaaatttcaaacttcagatgaaaatttttagaagggtaggtggaacctattttgaaggtctc

SEQ ID NO: 990156 - DNA, 120 bp, Artificial Sequence
  ENSG00000253154_17 (sequence is synthesized)
ttttaatcttccaattaatttcatgagtttattgcttagaacttgatcctagagattatcttgtaaaaagcttataattttctttctaggataagagaatctctcaggaggctgaattta

SEQ ID NO: 990157 - DNA, 120 bp, Artificial Sequence
  ENSG00000253154_18 (sequence is synthesized)
ataaattatgttgtcgaaatgtcatcaataagcaaacaccaattcaatgtctttctaatcaaactcatagcaatagcagaatggtggtttctaggaacaagaaaaggtagggagttgata

SEQ ID NO: 990158 - DNA, 120 bp, Artificial Sequence
  ENSG00000253154_19 (sequence is synthesized)
agtagatgtaaagtttcagttatgcagaatgggcgtgggaagagcttttagaaatctgttgcacaaaaatgtgcatatggttctatccaagtctctgtgtgtgtgtgtgtgtgtgtgcat

SEQ ID NO: 990159 - DNA, 120 bp, Artificial Sequence
  ENSG00000253154_20 (sequence is synthesized)
atgtgtttgtaaaaattttttggtcagtgacttaaatgaggacagaaatactatgtttggcaaactgacaaacttactgaataagtggtcattgtgataacatgaaggcagaggaaaaaa

SEQ ID NO: 990160 - DNA, 120 bp, Artificial Sequence
  ENSG00000253154_21 (sequence is synthesized)
atcaagcataaaaatgtaaatatataaagacaaaatccttcccatcaacaatcccaggttcaggatagatgcttatggctaagtagtccttatgtgaaaagcaatctgattttgtagttg

SEQ ID NO: 990161 - DNA, 120 bp, Artificial Sequence
  ENSG00000253154_22 (sequence is synthesized)
ccatcaaaacttatatgagtaatgtgatgaggctgggccaataattaatgagctgagctacacacataaaattttagagtccagaacaaggaaataatttttttttctcgcactgaatta

SEQ ID NO: 990162 - DNA, 120 bp, Artificial Sequence
  ENSG00000253154_23 (sequence is synthesized)
tgtacatgctagaggaccactgaatttgtatgtacatttcagggagacatacctacaaggatgtttggcaaactttaatattaaaaagacagagaaacagaaaaatgtagatgatttggt

SEQ ID NO: 990163 - DNA, 120 bp, Artificial Sequence
  ENSG00000253154_24 (sequence is synthesized)
gtgaagaagtaagccttcaaaattaaaagatatacttgagagactttcttaaagatcactgggtttgtaaatgctgagaattagataaattcctttgcagttctatagaacagaatggaa

SEQ ID NO: 990164 - DNA, 120 bp, Artificial Sequence
  ENSG00000253154_25 (sequence is synthesized)
ataaaaagtataaaattatatcagcaaatagatgctatggttctatctacatcaccagttttggcaaagaagaggtgctatggtttgaatgtgtcccccaaaaagcatgtttttgaaatg

SEQ ID NO: 990165 - DNA, 120 bp, Artificial Sequence
  ENSG00000253154_26 (sequence is synthesized)
taatccccaatgccacagggttgggaggtgtgtttttgaaacttaatccccaatgccaccctaatggaaggtgtttagatcaagaggactccatcctcatgaaaagattaatgctaacta

SEQ ID NO: 990166 - DNA, 120 bp, Artificial Sequence
  ENSG00000253154_27 (sequence is synthesized)
taaaagggcttgaggcttcaacttctatctcttactctccctttccttctctttgcccttctaccatgtgatgatgcagcaggaaggtccttagtagatgccagcccctcaatcttggac

SEQ ID NO: 990167 - DNA, 120 bp, Artificial Sequence
  ENSG00000253154_28 (sequence is synthesized)
tttccagcccccagaaccaataaatctctgttcattatcaattatcaagtctcagttgttctgttgtagcaccacaaaatggactaagacaaaaagaaaaggtttatgtaagagatgtac

SEQ ID NO: 990168 - DNA, 120 bp, Artificial Sequence
  ENSG00000253154_29 (sequence is synthesized)
agtgcctgacacctgaaagccactcaatgcatggtagtagctattgttgttattataatcactttgtttatttgaggaaagggggtgagtattatctctcagacccttctcatcaattct

SEQ ID NO: 990169 - DNA, 120 bp, Artificial Sequence
  ENSG00000253154_30 (sequence is synthesized)
ttctcttacttctctgaacataaatttaatatgattaaggcttcttcaattaattgtttatatatatataattcttaaattcatattgtatggcaatgaagtagatgaagacaattgttt

SEQ ID NO: 990170 - DNA, 120 bp, Artificial Sequence
  ENSG00000253154_31 (sequence is synthesized)
agccaataagaataaaatttactgctgcaactatggtaatcacagaacttttcccaatgatatttgtcccaagatacactgctccttattcacttgtccattagagactctagctgaaaa

SEQ ID NO: 990171 - DNA, 120 bp, Artificial Sequence
  ENSG00000253154_32 (sequence is synthesized)
gcaattaatcagattttttcagatgagaagttctattttcattattcctgtattcctgaatttatttttgggagctattttagacattttaaattgaagtttctttattaaactaaatac

SEQ ID NO: 990172 - DNA, 120 bp, Artificial Sequence
  ENSG00000253154_33 (sequence is synthesized)
ttgacaagccagcacaaagcaaatttgtcatgtttgtttatggaacctagtaatactgggactctggtggctatgtatttctgatggaaaagataactgaaccattctacaattgggtag

SEQ ID NO: 990173 - DNA, 120 bp, Artificial Sequence
  ENSG00000253154_34 (sequence is synthesized)
cattgctttgaagggaagatggatggatcccctagtaaactacagcttgaggtgcaatttcctaaagttcaaatgcctgaaaaaggaaacgaaagaaagaaactcaactcttgagacagc

SEQ ID NO: 990174 - DNA, 120 bp, Artificial Sequence
  ENSG00000253154_35 (sequence is synthesized)
ttcaatgctagctttgatctcaattatagagttatttatgaaaagtgcatttttacaactaaaaataaattaggatcaaaagcttctagaggctatactatggagtgcttaataaaaagt

SEQ ID NO: 990175 - DNA, 120 bp, Artificial Sequence
  ENSG00000253154_36 (sequence is synthesized)
gccttctcctgtctgccaccacgtgagatgtgcctttcaccttccactatgattgtgaggcctcaccagccatgtggaactagttcaagatttcaacattttaagataatctgaaaaaaa

SEQ ID NO: 990176 - DNA, 120 bp, Artificial Sequence
  ENSG00000273407_0 (sequence is synthesized)
ccttgaagaccagaaatctgatgcatgttgcctgaatcaccagtgaaaaacatacccttctaaatccttggaaagcaggatgttttcctgaaacaaatctggctatcatgtgagatggct

SEQ ID NO: 990177 - DNA, 120 bp, Artificial Sequence
  ENSG00000273407_1 (sequence is synthesized)
tggggaaagcataatatcagtaaaatatatttccaaacagtaatgtttatcctctgacaatttattgaagggaagtaaagtggtaaagttttatctcaataaaatttatgccgtggcata

SEQ ID NO: 990178 - DNA, 120 bp, Artificial Sequence
  ENSG00000261064_0 (sequence is synthesized)
agcccagctcccagcggcaagtacactaggctcttaacttcgcttgtcctctctgcaggccctgccgaagctccccctggtttcccgcagcgatcccgcgcagggctgaagcagtgccta

SEQ ID NO: 990179 - DNA, 120 bp, Artificial Sequence
  ENSG00000261064_1 (sequence is synthesized)
ctcaatagaaccagtcatcgtgcaaagacatgccacctgactcaaaggcaaagccagagtgcagcttggagcaaagaagtttgtgttgaaggagaaactaacaacgaaaatggacttgtt

SEQ ID NO: 990180 - DNA, 120 bp, Artificial Sequence
  ENSG00000261064_2 (sequence is synthesized)
ggctgcgcgctgctgtgttctggaaaggcgcattgtgccctcgctgtggcaggtaagagtcctgtacaggtgctctgcccactttacctttcaggcttctgtatcagctgtttttccctt

SEQ ID NO: 990181 - DNA, 120 bp, Artificial Sequence
  ENSG00000261064_3 (sequence is synthesized)
gtagaatgtgcccctgacctgtgcccctgacttccaccccttaaccctgcccaatacatctttacatgtctgaccatcaagactcttctgggtcatattcagttcatgctgatattttcc

SEQ ID NO: 990182 - DNA, 120 bp, Artificial Sequence
  ENSG00000261064_4 (sequence is synthesized)
cacagcggccttgggtttgggctccagccccagccgggccccctcgcgccgctgcggctgctgcgcggtgaggtcgtgacaagtcacagctaacttgccctccgcgccattccacgccac

SEQ ID NO: 990183 - DNA, 120 bp, Artificial Sequence
  ENSG00000261064_5 (sequence is synthesized)
gcgcagccggtgcctctcggcatcggcgaagaggccttgccggaccggcgcccagccctccaggctgtcgagctgctcgtcctccatggccgtcggcggcagcggccctaggactcggcg

SEQ ID NO: 990184 - DNA, 79 bp, Artificial Sequence
  ENSG00000261064_6 (sequence is synthesized)
cctccatggccgtcggcggcagcggccctaggactcggcgggcgcgggcctgacctcgtcgcactgcctgtcaggggac

SEQ ID NO: 990185 - DNA, 120 bp, Artificial Sequence
  ENSG00000236324_0 (sequence is synthesized)
agagtgaatgttcgctggggccttccagaagacagttcagtcttagcaaactggccaggaaggattttcatcaagatggaggaaaaacctggagatctttggctcaaaggacatgaccta

SEQ ID NO: 990186 - DNA, 120 bp, Artificial Sequence
  ENSG00000236324_1 (sequence is synthesized)
aatctgtactgacgttagaaaaccactggtggaacataaaacttgtacattcttctaaaaatgaaggtagatcacagcagactcaatctatttatagccagtcatatcaacattactgat

SEQ ID NO: 990187 - DNA, 120 bp, Artificial Sequence
  ENSG00000236324_2 (sequence is synthesized)
tgggaattaccaaaagaggtgaaattatttaacaaatcctttgttaagtcatattctgaacctacagatgtcaatttcaggtgtttattttttaaataaagataattaaaacactaaaaa

SEQ ID NO: 990188 - DNA, 120 bp, Artificial Sequence
  ENSG00000236326_0 (sequence is synthesized)
tggagaacacaggaatagcataaaacctcatagcctgcaaaaatcacttaatctcactggactcaatgttcttgactattaattgaaagaactggtatagatcagttggttttcaattct

SEQ ID NO: 990189 - DNA, 120 bp, Artificial Sequence
  ENSG00000236326_1 (sequence is synthesized)
cccagaccaattaagccaagtctctggaggatatgttctagccagtgggtctcaaactgtaatgctatgctattagtctatggatcacactttgagaaccactggactaggcatatgtgt

SEQ ID NO: 990190 - DNA, 120 bp, Artificial Sequence
  ENSG00000236326_2 (sequence is synthesized)
aagagtgactgtgcgtgtgagtgtgtgtccccaggtgaattctaatcacaaaactactgtatagaaaatatcaataaggttctaagttttaggatactgagattttaatataataagagt

SEQ ID NO: 990191 - DNA, 120 bp, Artificial Sequence
  ENSG00000251652_0 (sequence is synthesized)
cccgcagcacctgggagggcgcgtgtgactcgtctcccaggtcgtttgggctggagtaggcggaggaacgcaccgcgagcaccaacgtcccgcccctgtcttggcggtcctcagaatgaa

SEQ ID NO: 990192 - DNA, 120 bp, Artificial Sequence
  ENSG00000251652_1 (sequence is synthesized)
tgtccccatttcccaggaggatattctgtttccctataacgttttgaagagtctcagtagaagcagcctgtttttgacaaaaagatcgtcagagtacagctcagcacattctcacagaca

SEQ ID NO: 990193 - DNA, 120 bp, Artificial Sequence
  ENSG00000251652_2 (sequence is synthesized)
gaatcgccctggtccagacatcgtcagcatcctggaagctgccatgccacctatcactacccccaccaagggagccactacgctgacttctaaatacagattatttttgtctgttgttgt

SEQ ID NO: 990194 - DNA, 120 bp, Artificial Sequence
  ENSG00000251652_3 (sequence is synthesized)
tgcctccttattgatcttagaatgaaatccagattcactaaagagttcctcagtcctctaggacctggcccttttttctcattgatcatactgcctgctcctattctgagggtaacagga

SEQ ID NO: 990195 - DNA, 120 bp, Artificial Sequence
  ENSG00000229893_0 (sequence is synthesized)
acctctcccgagaccggccaggcccctacagtacaggggctgaagggtgtagcacgagccctaaaagagatgcagctggaggccgccccgcacaaggcgctggggtggaccggggaggcg

SEQ ID NO: 990196 - DNA, 120 bp, Artificial Sequence
  ENSG00000229893_1 (sequence is synthesized)
ccttacccagtggaaagactcccggatcaagggagaaagttacgcaggcttccgatcctgatccgccatcagccgccgaacctcttccgccactaccgcctacccccaaagaccggctac

SEQ ID NO: 990197 - DNA, 120 bp, Artificial Sequence
  ENSG00000229893_2 (sequence is synthesized)
acctcccctcccagccgacagtaggccttgcgtcacttccgcccacggggcggtctcttccgcctcctgcctggttcgccgctcccctccgcgacgacacgcccccagcccactccgccg

SEQ ID NO: 990198 - DNA, 120 bp, Artificial Sequence
  ENSG00000229893_3 (sequence is synthesized)
cgggacgcctcatcccgcgggtacccttcacaggtttaacagcctccacccctcgggcaccaagcagtgttatccaggaaaaaaaaaaaaaaagagactgattctcagtagtaatctctg

SEQ ID NO: 990199 - DNA, 120 bp, Artificial Sequence
  ENSG00000229893_4 (sequence is synthesized)
gtaaggaaacttccttgtgcttctttaagcacagttgctatcattccgggagaagctccttttaacccatatcttcttccaactagcatcctattttttttctttccttcccagctgaac

SEQ ID NO: 990200 - DNA, 120 bp, Artificial Sequence
  ENSG00000229893_5 (sequence is synthesized)
ttcttaaggaccaacctatatgatgtgatattttagatattaacctatttttcttggtattccttgtatagcttgccactttcccaaccctcacccataggtttgttgcattgaagaaag

SEQ ID NO: 990201 - DNA, 120 bp, Artificial Sequence
  ENSG00000229893_6 (sequence is synthesized)
gatgtagaaggaaaatctttctggcttttgtttctagactctcaaaccccacaaatggggagaggattcaggccacagagaaatggcttcaggagaagccaagggcaggggtatataggt

SEQ ID NO: 990202 - DNA, 120 bp, Artificial Sequence
  ENSG00000229893_7 (sequence is synthesized)
ggagggagaacaggcagcatcttcctccccctcaactctagaaacagatttctctgggtctgagagggtgggagggtgcttctaggtggacaaaaccacacagcccgtttaaccttcctg

SEQ ID NO: 990203 - DNA, 120 bp, Artificial Sequence
  ENSG00000229893_8 (sequence is synthesized)
gtctccaaaatatcccgtaccctatcttagtacagagcaatatttcaaaatcctgacaaaaccagaatggagactcaaaacagaaattgaattggtggaatatattaaaacatatttctt

SEQ ID NO: 990204 - DNA, 120 bp, Artificial Sequence
  ENSG00000229891_0 (sequence is synthesized)
cagcggccggccgcggggcctttttgtcctgagggccagagaaagggagaagggggtggggggacagccacgtggccgcaggaggatttacaacattttctttcgccatcgatgttatcg

SEQ ID NO: 990205 - DNA, 120 bp, Artificial Sequence
  ENSG00000229891_1 (sequence is synthesized)
caaaatgtgtgagagaagcggctgcgcagcccggacgggagcgtgagggtgcgggccaggtaagcagccccggcggtttcgccgcatacgggactgcggggcgaccgcgggcaccagcca

SEQ ID NO: 990206 - DNA, 120 bp, Artificial Sequence
  ENSG00000229891_2 (sequence is synthesized)
cgcgcagcggctccgcggggtctcggccgggtccgcgctctgaaggatctcgagagccatggatggtgcaggcgggaccctcgagctgcagcatctccggtgacccggggttgccgagga

SEQ ID NO: 990207 - DNA, 120 bp, Artificial Sequence
  ENSG00000229891_3 (sequence is synthesized)
ggtggagaccagcacaggtggtccggcccgggcgcctccgaatccgggggtggtcaagacggatccccaaggctgaggtcggcagtcccggggactcgcagctgttgagcctgtggagac

SEQ ID NO: 990208 - DNA, 120 bp, Artificial Sequence
  ENSG00000229891_4 (sequence is synthesized)
tcaaatcactgcttcaacagcttttaaaaatctggacctagttactcctgtcatctatgtgtaaagatttagaaaaaaaatcccaaacccaagggtgggcagccgcgaggatgtacagct

SEQ ID NO: 990209 - DNA, 120 bp, Artificial Sequence
  ENSG00000229891_5 (sequence is synthesized)
cctggcagtgtgcgctcacccggagacctgaggtcaaagcccaaatgctgagcacctcctgggaggcgggagcatggtctgctcagtgccagacatctggatattgagaaaacatctggg

SEQ ID NO: 990210 - DNA, 120 bp, Artificial Sequence
  ENSG00000229891_6 (sequence is synthesized)
tagctggggttttcaggtttctgcctgacatttaatatcacaaacattgagcctgctcctgtcccccaccagccacgcggcttctcctcccaaacatacccagctccttcccctgccttc

SEQ ID NO: 990211 - DNA, 120 bp, Artificial Sequence
  ENSG00000229891_7 (sequence is synthesized)
ctgacgggtaagaaacatccattctttccaattccccagcgttttccccctaccggaaatctgatgggcttatgacatcatggctggctgctgagcgatgaagtggatgccacaaagaaa

SEQ ID NO: 990212 - DNA, 120 bp, Artificial Sequence
  ENSG00000229891_8 (sequence is synthesized)
tccgacatatcagatagattctgaaatcggtttccctccagctgtagtaacaggcgtgaagtcaggagaatttgagctttgtttaaaaaataaataaataaataaataaaccataacaaa

SEQ ID NO: 990213 - DNA, 120 bp, Artificial Sequence
  ENSG00000229891_9 (sequence is synthesized)
cttgccctgtattaaatgcaattttcttaaaaacaagcaaaccttttggacatcattttattttaatagaaatgctgagttttatgaaactaaagtggctaataaatcagacctgaagct

SEQ ID NO: 990214 - DNA, 120 bp, Artificial Sequence
  ENSG00000229896_0 (sequence is synthesized)
ttatatctttttttccctctaggtatttttccatgtgtttatcctgtctccattaatttgtaatcttccagagggcaaggcctgaacacaagcttctgttggtgtaaagtggaggcacag

SEQ ID NO: 990215 - DNA, 120 bp, Artificial Sequence
  ENSG00000229896_1 (sequence is synthesized)
gctgcaggactgtctcagaagggaaataatatttaccttccaaactgagatctaaaacccgaacaaagcctcaggaaacatactccaccaccatcttacaagtttgtgctacgggtggag

SEQ ID NO: 990216 - DNA, 120 bp, Artificial Sequence
  ENSG00000229896_2 (sequence is synthesized)
atgaatctaatgtaggaggcctcccgctgtgcgtctagcaggaaagaccatacggtgcaagtctccaggatcactagaggggtggattgttcatttcagtccaggtagcaacaggaagcc

SEQ ID NO: 990217 - DNA, 120 bp, Artificial Sequence
  ENSG00000229896_3 (sequence is synthesized)
cgtgcaaatgttcctctctcactgcggggctaaggagtgtgggtcctttcccgcgactacctgcttgcctctctcagaacctgcaagtgaagtgcggaagatctgtctatcttctcggcg

SEQ ID NO: 990218 - DNA, 120 bp, Artificial Sequence
  ENSG00000229896_4 (sequence is synthesized)
ctcaccttcaagttatttccctcctctagaatgctgtacttccaccactgccaaatcgtgaactttctctccttcaatatcccactgagaactcacccccaggatgggactctgctcacc

SEQ ID NO: 990219 - DNA, 120 bp, Artificial Sequence
  ENSG00000229896_5 (sequence is synthesized)
gggaatgaagcgcctccctctagcatttcctctcacgcccacttccaacctaggaggcttttggtttctgcttttttgtttttaaaattaaaagttaaacccaggaagctttggatcaga

SEQ ID NO: 990220 - DNA, 120 bp, Artificial Sequence
  ENSG00000251339_0 (sequence is synthesized)
gtaattatgttaggagagattctcagttcaatctaatcctgtctaaacaggctgaaagaaattagtcactcagaattatataaaaggctctattgagtcttgcaatggtaaacaacagac

SEQ ID NO: 990221 - DNA, 120 bp, Artificial Sequence
  ENSG00000251339_1 (sequence is synthesized)
cctggagtttgaggacaacaccaaggtactgccatacttgaggtggagatggcgtttctcagccagtatcgtactgaataggcaaaagctggaagcagtccctttgaaaaccagcacaag

SEQ ID NO: 990222 - DNA, 120 bp, Artificial Sequence
  ENSG00000251339_2 (sequence is synthesized)
ttcaacatagtattggaagctctggccagagcattcagccaatcttggcagattgaggtactgcaaaaatcatgagcagaagactttatgccattgaatgccattgagacggtcaatgta

SEQ ID NO: 990223 - DNA, 120 bp, Artificial Sequence
  ENSG00000251339_3 (sequence is synthesized)
tgtaacaaaggacagctgtttgtttttcttctgcttttcatgggccagtatcaactaaagattgtcagtttttaagaccttacttaaggatgcaatgattagtaaagaaaattcaacaat

SEQ ID NO: 990224 - DNA, 86 bp, Artificial Sequence
  ENSG00000251339_4 (sequence is synthesized)
gactcccatacaataataatgggagacttcaacaccccactgtcaatgttagacagatcaacaagacagaaaattagcaaagatat

SEQ ID NO: 990225 - DNA, 120 bp, Artificial Sequence
  ENSG00000251339_5 (sequence is synthesized)
tattctccaatcatctttttaatctggacacctctggccatttctattgccacaaccatagttcaatttattgtcatctcctaactgaactactgtaatcgtttcctaatactcactcag

SEQ ID NO: 990226 - DNA, 120 bp, Artificial Sequence
  ENSG00000251339_6 (sequence is synthesized)
atgatcttactttatgtaatatctacttcacatacgcagctggagtaaaatgttacattacaaatctgatatgagaaaattacatctgggagcattttaatttactttaatagagagatt

SEQ ID NO: 990227 - DNA, 120 bp, Artificial Sequence
  ENSG00000251339_7 (sequence is synthesized)
cttttgttatgcaaatatcccttcaatgaccaaattgtctttctaaggggatgtcatcaagagggaaaagagcttaaatttattgaactaaagaaataaagcaattattcaagtaaataa

SEQ ID NO: 990228 - DNA, 120 bp, Artificial Sequence
  ENSG00000251339_8 (sequence is synthesized)
gatgataagatgaatgactgttagagatggaagggactcagagagcctctgaactgctttctaaattcacagattgaaaatctaaaacccacagagttcaaagaccttactcaaagtcaa

SEQ ID NO: 990229 - DNA, 120 bp, Artificial Sequence
  ENSG00000251339_9 (sequence is synthesized)
agagctagtgggtggtcaagcttacattaattctagatttgtctagattgatggattctgcattctaccatctaagattaaaatttgactggaagaatactctagatgttcagtcaaaag

SEQ ID NO: 990230 - DNA, 120 bp, Artificial Sequence
  ENSG00000251339_10 (sequence is synthesized)
ctaaaggttaaaatttgcatgaaataactcatgaattctatttccattgtttcaactgaaaattatttgcaaaataaatgtgcgtgtacattataaatttgattggcaatattgatttaa

SEQ ID NO: 990231 - DNA, 120 bp, Artificial Sequence
  ENSG00000251339_11 (sequence is synthesized)
aacggaggttatcaatattttttaagtacaaggtgtcagaattgtattgaactcctaaaagaataaacccaaaataagttttaaaatatgaccaaaatttgatattaaaatcacagaaaa

SEQ ID NO: 990232 - DNA, 120 bp, Artificial Sequence
  ENSG00000251339_12 (sequence is synthesized)
gagtaatagaaccctggattgagaataaaaatgactgtattctgccttagaatgtactcctttaaatgaacagtaattccttgaagaagtctctgtgcatatctaaatttaattttcttc

SEQ ID NO: 990233 - DNA, 120 bp, Artificial Sequence
  ENSG00000251339_13 (sequence is synthesized)
tttggggatcgatgaatcgcttgagaatctctgattgggcaaaaggcctaagtgtctataagaagctgaggagctggagtgggagcagaaacgtctggcagggtgaatggaggtgaggaa

SEQ ID NO: 990234 - DNA, 120 bp, Artificial Sequence
  ENSG00000251339_14 (sequence is synthesized)
gaggcagaggactgaaggaggatatagcaaaggatgccaaaagccaaatggaagatcaaaggtggtaaaaagaaaaggtggaaaagcagagctggaagaagtgggattaatccatatggt

SEQ ID NO: 990235 - DNA, 120 bp, Artificial Sequence
  ENSG00000251339_15 (sequence is synthesized)
aaagaagaaaatatagatatttggaccgaagaggttaaaaaagtcaatggatgacaccattctctgaagaaaattaaagaggaatccaaactcattgtatgaggccagcattacgctgat

SEQ ID NO: 990236 - DNA, 120 bp, Artificial Sequence
  ENSG00000251339_16 (sequence is synthesized)
acctgatccacagaaggacactagaagaaaagaaaatcacaggctaatttccttgatgaacatagatgcaaggatcctcaacaaaataccagcaaaccaaattcaacagcacattaacag

SEQ ID NO: 990237 - DNA, 120 bp, Artificial Sequence
  ENSG00000251339_17 (sequence is synthesized)
tgtcacacatgagcaactggaatttatccctgggacggaaggatggttcaacactggcctattgtttttaaggctttctggctctggaaactgtaaactcttgcctccaaaatgacctca

SEQ ID NO: 990238 - DNA, 120 bp, Artificial Sequence
  ENSG00000251339_18 (sequence is synthesized)
ggagtctcccaggaattacaggagactattccaaggtgcaataatttatctctcaaagagataaaagtttaattttaatttttctttcttctgctttactgaattaatttatgaaaattc

SEQ ID NO: 990239 - DNA, 120 bp, Artificial Sequence
  ENSG00000251339_19 (sequence is synthesized)
aaaaggctctattgaggacacagaaagaagaggcccatctgtaaaccaggaaaaggaccctcatcaaactgagctctgccaacacactgatcttggacttcccagcctccagaattcttc

SEQ ID NO: 990240 - DNA, 120 bp, Artificial Sequence
  ENSG00000251339_20 (sequence is synthesized)
gcccatctgtaaaccaggaaaaggaccctcatcaaactgagctctgccaacacactgatcttggacttcccagcctccagaatttcttgcaatggtaaacaacagaccctggagtttgag

SEQ ID NO: 990241 - DNA, 85 bp, Artificial Sequence
  ENSG00000251339_21 (sequence is synthesized)
aggtggagatggcgtttctatccagcctggtgaaggaacgagactaaagtctaaaagacaaaaaataaaacaaacaaacaaaata

SEQ ID NO: 990242 - DNA, 120 bp, Artificial Sequence
  ENSG00000260871_0 (sequence is synthesized)
attctataataaaataaataagagataatagaatccccggagtccaacatttctgatttaatatgcttgtaacatttgcctaacacaccactgtgctctctgaaaagggcgatcattttc

SEQ ID NO: 990243 - DNA, 120 bp, Artificial Sequence
  ENSG00000260871_1 (sequence is synthesized)
actgtatggtgttacctagactgcctatccccagggtcttccaaaagtccatgtacgtttgacagcatggaaacgtgtactgttgtagagcataaatactagagacttattgatggaagc

SEQ ID NO: 990244 - DNA, 120 bp, Artificial Sequence
  ENSG00000260871_2 (sequence is synthesized)
ctatttctgatacgtagctttttaaagaccactcaatatacataaactaaatgttaagtgacaaaaatattttcaaattatatttcctaccatttaggacctccttaaatttaacagcag

SEQ ID NO: 990245 - DNA, 120 bp, Artificial Sequence
  ENSG00000260871_3 (sequence is synthesized)
aaagtttatacatttaaggtttctaccaaacaggtagatataaccatactttcagcaagattacattttcctttttctattaagatttaaaatgttccattaaatctgagtagctagcca

SEQ ID NO: 990246 - DNA, 120 bp, Artificial Sequence
  ENSG00000260871_4 (sequence is synthesized)
aaactgagctttccaggagactttctataccagtcttgctgggagataattgttgctaatctaagtccaagggatagtgggatgtttttcaacactggcaataaaaacaaaataactctt

SEQ ID NO: 990247 - DNA, 120 bp, Artificial Sequence
  ENSG00000260871_5 (sequence is synthesized)
tcaaagagggagaagcaagatttggattctaagaattttccttgtgaaagaaaactttgtttatatctaattggttgatttcactactgtagcaaagatacaagaaaaaaaactgggaaa

SEQ ID NO: 990248 - DNA, 120 bp, Artificial Sequence
  ENSG00000260871_6 (sequence is synthesized)
gatttttaaaaactagaaaattaacagtctatttcatgtcgtttggggaaaaattaaatgacattatgtttgtgaaaatgttttgtgaattgcaaagttatattaaaattaattgttata

SEQ ID NO: 990249 - DNA, 120 bp, Artificial Sequence
  ENSG00000260877_0 (sequence is synthesized)
ttttccttggtgaacttctattcatccttcaaagcccagcagtaatcatcctttagaaagtcttctttcagagggaaccaaaaagaatggggagaattgtgcctgcccagcctcctcctt

SEQ ID NO: 990250 - DNA, 120 bp, Artificial Sequence
  ENSG00000260877_1 (sequence is synthesized)
ggcccaaagaaccaagagctgcaaatgtcctggtggccttggaagtttatggatggtacagatctggggtggagggcatggccaggacagggagggctgtcagagagagggtctgtgggt

SEQ ID NO: 990251 - DNA, 120 bp, Artificial Sequence
  ENSG00000260877_2 (sequence is synthesized)
ttgtggagtgtggggatcagtcgctgactcattagatgaaccaggagcctgcatgctacagcccacctgccaaatcttgcccccacctgctttttaaaataaagttttattggaacatgg

SEQ ID NO: 990252 - DNA, 120 bp, Artificial Sequence
  ENSG00000260876_0 (sequence is synthesized)
ggagaaaggaggaaggaggaggaggagaagaagaagaggaggaggaagaagaaaatgacaagcgtcgcctgcacacgtcagcacaaatgggaacatgatgagtgatgctgcctggagtta

SEQ ID NO: 990253 - DNA, 120 bp, Artificial Sequence
  ENSG00000260876_1 (sequence is synthesized)
aaggaggccaggagcaccagaagctggaggaggccggggtggattctcgcctggaggcttcagtgggagcacgagctcccgacacttcggttccatctcttgtttaaaggcacccagttt

SEQ ID NO: 990254 - DNA, 120 bp, Artificial Sequence
  ENSG00000260876_2 (sequence is synthesized)
ctcatcatttgttacagcaccatggaaaacccacacacaagtgaagccccgacccacctcccaagtgcccatctgagcacccctcgtggactctgagcagggggttgccatcaccaactc

SEQ ID NO: 990255 - DNA, 120 bp, Artificial Sequence
  ENSG00000260876_3 (sequence is synthesized)
caagtcttgcagcccctcttcccttcagtctggctgccaccttcttcattgccctggaaaaaaataatgaagtttcaccatttaaagggtttcagtgcagcttgctatgggaacactgga

SEQ ID NO: 990256 - DNA, 120 bp, Artificial Sequence
  ENSG00000260876_4 (sequence is synthesized)
gctaacaacaggctcacagttctccttctgttgcctccttttatccacatgagaatcaaacaagactactgattaaatgaagcctttgatgaagtgcatgcagtttgtagcttgattcat

SEQ ID NO: 990257 - DNA, 120 bp, Artificial Sequence
  ENSG00000260876_5 (sequence is synthesized)
gggaatactcatcacagactgaaagtgtaacccagggtctctgggtttttgggaacgcgctgtgtaaaagtatctacttgtaactgttactccctgagttgttgttgttttagaaagttc

SEQ ID NO: 990258 - DNA, 120 bp, Artificial Sequence
  ENSG00000260876_6 (sequence is synthesized)
caagaagaagcttagccttggaaaaaacaaaaactggttgaatccagaagtggagatgaattttggccaacgctcctcactgccacactaaaaaccctgctcagagaggagcttattcac

SEQ ID NO: 990259 - DNA, 120 bp, Artificial Sequence
  ENSG00000260876_7 (sequence is synthesized)
catgttctattcatgcaatgtgtgtggaaacatgatctacgacagcatgcgtgctgccttcaccctacctctacatacaatgactcatttaacctgctgaataaaagccctgttttcacc

SEQ ID NO: 990260 - DNA, 120 bp, Artificial Sequence
  ENSG00000260876_8 (sequence is synthesized)
aagggcaggaggtaaccattaaagaggaccatcatgtagtgtgaggagtcaacatttcacactagaaagcccttggttcaagttttgtctctgccacctacagattttgtaaccctgagt

SEQ ID NO: 990261 - DNA, 120 bp, Artificial Sequence
  ENSG00000260876_9 (sequence is synthesized)
aaaagttgtccagcctttctattttacaactgaggcttcaaaagataaaagagatccatgctgaagggagaggaaaagaagaagaccccaaggaccacaggcctgggcctgtgttatccc

SEQ ID NO: 990262 - DNA, 120 bp, Artificial Sequence
  ENSG00000260876_10 (sequence is synthesized)
aatgccatcatctcaggatacgatgggagctgctaggtgtagagatggctcttctttgaagaaacccccatgaaatggtttcaggggaggtcactgtggttatatcccagaagatttgcc

SEQ ID NO: 990263 - DNA, 120 bp, Artificial Sequence
  ENSG00000260876_11 (sequence is synthesized)
ctgcaagtgaaacagaagcttctcatggagatgtggagggggctgccccgctgtgtcagaaagtggagactctatggaaccaaccccattatactgagatagggttgaggctgctgatgg

SEQ ID NO: 990264 - DNA, 120 bp, Artificial Sequence
  ENSG00000260876_12 (sequence is synthesized)
gtctttacctattgtagcttccatttgtatggtaggcagccgctaagatggccccagatatcactgccttgtgatagtcctgtctttgtgtaatccactccccatgagtgtgggctggat

SEQ ID NO: 990265 - DNA, 120 bp, Artificial Sequence
  ENSG00000260876_13 (sequence is synthesized)
ctactggctctcttctgctaaacagatgatcgaaaaagtgatgaaatgtcacttctaaaattaggttacacagagaatgtggtttcttttttgctcactccctcttactcagggaaacta

SEQ ID NO: 990266 - DNA, 120 bp, Artificial Sequence
  ENSG00000260876_14 (sequence is synthesized)
gctacctctttatgtactgccctatggagaggcacacatgtcaagaaactgagggagtgccttccagtcaacagccagccaggaactaaggtgctcagtacagcagcctccacaaaggac

SEQ ID NO: 990267 - DNA, 120 bp, Artificial Sequence
  ENSG00000260876_15 (sequence is synthesized)
tgaacaatgccaacagctatttgactgtgcttggaagatctccgtttagttaacccttcagatgagaccgcagccctggccagcaaacaaattgcagcctatggaaagaccttaaggcag

SEQ ID NO: 990268 - DNA, 120 bp, Artificial Sequence
  ENSG00000260876_16 (sequence is synthesized)
aagcacccaactgaaccacccgagggctctgacttacagaaactgtgagcatatagtgaaatggcctctaccttattttgaatggatttctgggataaagttcttcagtgataacatgtt

SEQ ID NO: 990269 - DNA, 120 bp, Artificial Sequence
  ENSG00000260876_17 (sequence is synthesized)
tgaagcggctatcttatgtgcccatgttacatgctcatgataaagctgcatttcctgaggggacaccaatggatacacctctgcctggcacgcagcttagaggctaaatgtatgaaaagc

SEQ ID NO: 990270 - DNA, 120 bp, Artificial Sequence
  ENSG00000260876_18 (sequence is synthesized)
cccactagtgatctgaccatgaaacctactaagagacttccagaagaagatgacctctgaaaggagaaaactttcttccaagcttctgtggaacaagaagatgccatccctttggtggag

SEQ ID NO: 990271 - DNA, 120 bp, Artificial Sequence
  ENSG00000260876_19 (sequence is synthesized)
tccttttatccacatgagaatcaaacaagatcttctaggaatctaaaaatgtgtgtgagatttcacctgtaaaagctgagttattctgaatctgcgttttcctgaagatttttctttgtg

SEQ ID NO: 990272 - DNA, 120 bp, Artificial Sequence
  ENSG00000260876_20 (sequence is synthesized)
aagggcaggaggtaaccattaaagaggaccatcatgtagtgtgaggagtcaacatttcacactagaaagcccttggttcaagttttgtctctgccacctacagattttgtaaccctgaaa

SEQ ID NO: 990273 - DNA, 120 bp, Artificial Sequence
  ENSG00000260876_21 (sequence is synthesized)
ttccaaacataatgggcttggagtaatggagaactccaagggcaggaggtaaccattaaagaggaccatcatgtagtgtgaggagtcaacatttcacactagaaagcccttggttcaagt

SEQ ID NO: 990274 - DNA, 120 bp, Artificial Sequence
  ENSG00000260876_22 (sequence is synthesized)
gatcaggatggggagggttgaggaggttaaggaagttgttagaagttacactgaagttaagaaaggaaaaaggacttagaaacttattcttccaactttagaaccacggtcagtgaccaa

SEQ ID NO: 990275 - DNA, 120 bp, Artificial Sequence
  ENSG00000260876_23 (sequence is synthesized)
ggccctgcttagaactttctgaaggttgcagctggccttctacctggagttttgacttcctttccgagaaaggaacttgaatggcaatcacaagaaagttgagaacttctctttcatatt

SEQ ID NO: 990276 - DNA, 80 bp, Artificial Sequence
  ENSG00000260876_24 (sequence is synthesized)
atactaattgtatatatgtataaggtaagatatgatagtttgatatggctaccttgtaataaaatgagcctcattaccaa

SEQ ID NO: 990277 - DNA, 120 bp, Artificial Sequence
  ENSG00000260876_25 (sequence is synthesized)
atttgtacaaatcttgaaaccaaagcacagcctgtatgaacccatgttgaaccctggactttcaggactactgtatggctaaccacagccctgcaaggccaggctcagcatgtcacagtt

SEQ ID NO: 990278 - DNA, 120 bp, Artificial Sequence
  ENSG00000260876_26 (sequence is synthesized)
ttgccactgaacaagaatctttcgaaggatcgcaaatactacatggaaaatgactgtattctttctgcaaggccactctcttagacatcaccctaacaaaaacaattacgggttggaaga

SEQ ID NO: 990279 - DNA, 120 bp, Artificial Sequence
  ENSG00000260876_27 (sequence is synthesized)
ggagaaaggatgcaaagtttgtgccttgacctaaaaaaggtcatgagcacctctaccggttcttggaaacattagttgcagtggatctcaaattctattgcgcaaaagaacgacctggtg

SEQ ID NO: 990280 - DNA, 120 bp, Artificial Sequence
  ENSG00000260876_28 (sequence is synthesized)
accctctaaaagtgtagattctctggtttcacccctagaccttgtgactcacatgtccagtgaggccaggaactcctcactgttaacctgtgccctattttaacaagccctgctgggagt

SEQ ID NO: 990281 - DNA, 120 bp, Artificial Sequence
  ENSG00000260876_29 (sequence is synthesized)
cgggatgttgggggtccccacaccacactgaaatagaggaattccctgctcaaagatcccgttatgtcctgattacaatctgcaatgagattatgaaatcattaaatcatgattaagcca

SEQ ID NO: 990282 - DNA, 120 bp, Artificial Sequence
  ENSG00000260876_30 (sequence is synthesized)
atttgcgtgagggggaaaaaatacccgcttgtccgtcctgtcccttcaggctgcgcaacgctggagggcgatgggagctccacacaggtgggacgagcctagcaggacaagcgtcgcctg

SEQ ID NO: 990283 - DNA, 120 bp, Artificial Sequence
  ENSG00000260876_31 (sequence is synthesized)
gagagttcaccgagttgataaaattattaaaacacaaaatacacatttgcgtgagggggaaaaaatacccgcttgtccgtcctgtcccttcaggctgcgcaacgctggagggcgatggga

SEQ ID NO: 990284 - DNA, 120 bp, Artificial Sequence
  ENSG00000260876_32 (sequence is synthesized)
gaaaggtgcttcctggggtttcagaggagggtgcagaaggggaacagtgagtctggagggacagatggaacattcctgcaatgctatcaatccatatctgaccctcaattcatgaaactt

SEQ ID NO: 990285 - DNA, 120 bp, Artificial Sequence
  ENSG00000260876_33 (sequence is synthesized)
tccagacaacccaccctgacagatccctctcttcttagagctctcacgtacctttcttttagcatttaacattcataacctcaaatgaatgatttctatgcatgagtcatttcctgagta

SEQ ID NO: 990286 - DNA, 120 bp, Artificial Sequence
  ENSG00000260876_34 (sequence is synthesized)
gactgtcagatccttgaaggcaggaaggcaatgtaatataatggagaatatcctatgtcttcaaatagttatgaagattagaaaggcaatctaagcaacatccttagcatattactaggt

SEQ ID NO: 990287 - DNA, 120 bp, Artificial Sequence
  ENSG00000260876_35 (sequence is synthesized)
gcacataaaaagtgatgaatagacagatttatgactattcattttttttatccttcctatccttcaccatgtggaagatacactgccattacacacacctccaaaaagaaaactcagcat

SEQ ID NO: 990288 - DNA, 120 bp, Artificial Sequence
  ENSG00000260876_36 (sequence is synthesized)
ttcttatgtatcttctctgggtgatttactatgtagaagttcaagtatgttattagaatgcttccccaatttagttacacacagattccacttaaagtacagaataaaatctgacatatt

SEQ ID NO: 990289 - DNA, 120 bp, Artificial Sequence
  ENSG00000260876_37 (sequence is synthesized)
ctttttagtatgatgttttaaaaaaatatttggaaagcaaaattctgttttacctcccaatgcttattgctgttacgaaactataaaacaaaataaattaataaattgaatgcaaacaaa

SEQ ID NO: 990290 - DNA, 120 bp, Artificial Sequence
  ENSG00000260876_38 (sequence is synthesized)
cttcactttttgcaagtaatagaatacccttgttaaatcctacttggttgtggtcattatagtgtcacccgccaagcaatcgatcccacccagggttaacaaatgcgggataacaaatgt

SEQ ID NO: 990291 - DNA, 120 bp, Artificial Sequence
  ENSG00000260876_39 (sequence is synthesized)
caggttttaggcaagttacttactcgctcaaaatatgaagatataagttaccatcagttgtcaatcatggtgagctttgctctgctgcagtaacagacaatcgtaactcttagtagctct

SEQ ID NO: 990292 - DNA, 120 bp, Artificial Sequence
  ENSG00000260876_40 (sequence is synthesized)
aaatgaccagtttaaataacacctcgtctttgtagttttgatagcgacaggaggcagccaaatgcctaggcaggtaggggcaggttccccgtgaaactccatctccaagccgaagacagt

SEQ ID NO: 990293 - DNA, 120 bp, Artificial Sequence
  ENSG00000260876_41 (sequence is synthesized)
ttagagcctgaaagccaagctccacattaaatcctccgactggattgagaacttgtcttcctgtttagtgtgcttttctctcattggtccctgccattcacctatttcatatacacctaa

SEQ ID NO: 990294 - DNA, 120 bp, Artificial Sequence
  ENSG00000260876_42 (sequence is synthesized)
ccttttctaattggttttctatactgtcatgcccaactttgagtggtctttgctttaaccttttctacatattcacaaaccgatcagcatgcaccccccattctgagtccatgaaaggct

SEQ ID NO: 990295 - DNA, 120 bp, Artificial Sequence
  ENSG00000260876_43 (sequence is synthesized)
ctggatctagccacacagaggaactttcccatcttcaggtaggggggccaccaccaacatgtcccctctccaccaaaagctgttttcattgttcaataaaattcttctctgccttcctca

SEQ ID NO: 990296 - DNA, 120 bp, Artificial Sequence
  ENSG00000260876_44 (sequence is synthesized)
gattttgtaaccctgagagaaaaggaaaatcctacggaggaggggctctgatggctttgaagaaggcagtgaatggccacatgttccctgaggacagcacaggctaaaggctcagctaga

SEQ ID NO: 990297 - DNA, 120 bp, Artificial Sequence
  ENSG00000260876_45 (sequence is synthesized)
aaaagaagagaagaaggagaagaaagaagaagaagaagaaggagaaggagaaggagacgagggaagagggagaagagagagaagagggaggaaaagaagaagaagaagaagaagaagaag

SEQ ID NO: 990298 - DNA, 120 bp, Artificial Sequence
  ENSG00000260876_46 (sequence is synthesized)
aggaaggagaaaggaggaaggaggaggaggagaagaagaagaggaggaggaagaagaaaatgtgagtgcatgagagtctaacatcttggcgtctctgtaaaaatgggtaatttggcaccg

SEQ ID NO: 990299 - DNA, 120 bp, Artificial Sequence
  ENSG00000260876_47 (sequence is synthesized)
tgagggggaaaaaatacccgcttgtccgtcctgtcccttcaggctgcgcaacgctggagggcgatgggagctccacacaggtgggacgagcctagcagcacaaatcagagcgaacgacgt

SEQ ID NO: 990300 - DNA, 120 bp, Artificial Sequence
  ENSG00000260876_48 (sequence is synthesized)
gaaaagagttctgtttctcctggaaggatgccacttgtttctactccaggggaaatgtcttccaagctctttaccaaatctgcaagctgaaccaactcaactgtggctgccttgcccacc

SEQ ID NO: 990301 - DNA, 120 bp, Artificial Sequence
  ENSG00000260876_49 (sequence is synthesized)
gcatggtacaagagcacaggaaccactgaaggtgggtacaagttataatacaggcaagtgggggcatgccagctttggctgagtgaggaccaggtcgagcattactgtcaggggatccct

SEQ ID NO: 990302 - DNA, 120 bp, Artificial Sequence
  ENSG00000260876_50 (sequence is synthesized)
ggcttgcaaagtgaccaagaagaaaagtcttacattagtttggctagggtgaggccctgacctctgttaccttcactcggccagctcactgatggtgactctgtattgataggcactcca

SEQ ID NO: 990303 - DNA, 120 bp, Artificial Sequence
  ENSG00000260876_51 (sequence is synthesized)
cccagaaattgtgcactgacatttcctggccaacgaaagttactcaactatgcctgattttaaactgcaatcctaacatgacccagaaggtgaagagccagaaatatttgatgactacac

SEQ ID NO: 990304 - DNA, 120 bp, Artificial Sequence
  ENSG00000260876_52 (sequence is synthesized)
tgagcccactttccctcacaggcttgttttgcagggttaatgatttaagccatgtgatgtatggttcacagggtgcctggcacctgccaagtattcttcccccaggagttggcaggtcct

SEQ ID NO: 990305 - DNA, 120 bp, Artificial Sequence
  ENSG00000260876_53 (sequence is synthesized)
tgaaggcactctctggtttagatattcttagctccttccactgttcctcatgctacattatcttaaatctttttatttttaccatcctggttcgtctcctctaaaaatcctacccaaatg

SEQ ID NO: 990306 - DNA, 120 bp, Artificial Sequence
  ENSG00000260876_54 (sequence is synthesized)
tccctgttaattcatgatccaccagaaacaaacaatcttccagctgaatacagaacccaagagaacaaaatgatctccttccttcttctagattatgcatcctaaaatctgactgttttt

SEQ ID NO: 990307 - DNA, 120 bp, Artificial Sequence
  ENSG00000260876_55 (sequence is synthesized)
tcttttctggcaatcagagtgcactgttgaatttactgtcaattaaacattctccatctcttctatgtatttttctgtatttagacatttttctccaatcccatacttgtgtcattagct

SEQ ID NO: 990308 - DNA, 120 bp, Artificial Sequence
  ENSG00000260876_56 (sequence is synthesized)
tttcagtcacaaataaaagaagtttcacattgttccttattaaagagcatctgtttgacttggcccattcttcccagcagttataattcagaccaaggttgttctcatccaacattcaaa

SEQ ID NO: 990309 - DNA, 120 bp, Artificial Sequence
  ENSG00000260876_57 (sequence is synthesized)
caaacactatggaatgggagaggtatgaaagcattcatcccgacaaacaatggtctcaccattttggaaggcatcttttttacttcattttttaacagctgtattaatatgtaactgagg

SEQ ID NO: 990310 - DNA, 120 bp, Artificial Sequence
  ENSG00000260876_58 (sequence is synthesized)
gggatatggcaatgtgagttcggcgtggcagctatcgtggtggtgtcatggtggtgggaacagcagtgatggtttcaggaaagaggcactggcctttacttctccacctcgattcacttc

SEQ ID NO: 990311 - DNA, 120 bp, Artificial Sequence
  ENSG00000260876_59 (sequence is synthesized)
catgctgttgacaaatgttatagttgcccaggatcagagggagagactgaccctgtgaccatttccccaaaggcggcctttggccactccgtgcactggagcacatgaccctctgcctcg

SEQ ID NO: 990312 - DNA, 120 bp, Artificial Sequence
  ENSG00000260876_60 (sequence is synthesized)
cccctgccacattaaccaggtgactgtctgccaaggcccagcccagtccaaagggaattgggattcagtgtcccaaacaaggcactgattagctggtaatcaggcagcgattagcaggtc

SEQ ID NO: 990313 - DNA, 120 bp, Artificial Sequence
  ENSG00000260876_61 (sequence is synthesized)
gggtcacctgcagttcagtgcccattgttcccagcaaagtcctgggatatttgccacacggctggccagtctgaatgtctgaggattccgatgcctgcagctctgctgtggagatgtgtg

SEQ ID NO: 990314 - DNA, 120 bp, Artificial Sequence
  ENSG00000260876_62 (sequence is synthesized)
attaggaacaaatcctctgttctctaagcccatccccccaaggaggcagtgcagtgtgaatagtgaatccccttctctattcacacacaaaggtttggggagaagaatggcctgcttagg

SEQ ID NO: 990315 - DNA, 120 bp, Artificial Sequence
  ENSG00000260876_63 (sequence is synthesized)
agctcaacagtgacagagaggtgaggccccaaggatgcactgaagaactgaaagcaaattagcacattcctcttcctgcaccatgatgactgagagtggaggaacgggcaagcccacatc

SEQ ID NO: 990316 - DNA, 120 bp, Artificial Sequence
  ENSG00000260876_64 (sequence is synthesized)
accttgattttgagagtttaataacacttgcctcttcagcctttgaagttcagatttagaaaatgaacataaagcagttactacagtctctgtagcgtgtgaccaatacatgctatcacc

SEQ ID NO: 990317 - DNA, 120 bp, Artificial Sequence
  ENSG00000260876_65 (sequence is synthesized)
gttatcatcggtcatagtaatatcaatatttaaaatatcataattatttgaaatactttatttaaaatatgcctctgtaacatcacttctaaatgagagatagcccctttgtaggaggcc

SEQ ID NO: 990318 - DNA, 120 bp, Artificial Sequence
  ENSG00000260876_66 (sequence is synthesized)
atgataaggatgagatgagaattcttgtaaagctttcatcacagggcctagcaagtaattagcacttaataaatcatagtaacaatggtgatcaccatcattattgtttgtacaaagttg

SEQ ID NO: 990319 - DNA, 120 bp, Artificial Sequence
  ENSG00000260876_67 (sequence is synthesized)
aatggaaaagactattttgtagcacttttcactgtattgtagcatgtgatcatgaaaatttagacaaagcataatttttcgagctaaaaggagattaatgaaattattcatggcacattc

SEQ ID NO: 990320 - DNA, 120 bp, Artificial Sequence
  ENSG00000260876_68 (sequence is synthesized)
acaccattggacactgttcagctttatagtctatgtgcccttccaccacctggagatcttgctaaaattctcatttggtaaatctggggtcagcccaagattacgcatttccagtggatt

SEQ ID NO: 990321 - DNA, 120 bp, Artificial Sequence
  ENSG00000260876_69 (sequence is synthesized)
ctcaagtgattccagggctacctgtccatggactccactttgagtaaacaggatgtacacttttacaataaaaaatgtgtatatgcatttatacagaaatatagaaaaatattcctaggc

SEQ ID NO: 990322 - DNA, 120 bp, Artificial Sequence
  ENSG00000260876_70 (sequence is synthesized)
tatactcaagatgggggacagtgtttttcacccccttcgctaaactgtactatctttcccagaaatttaataacaaacatgtaaaaacatttaaaaatgcaataaattttattgatgcaa

SEQ ID NO: 990323 - DNA, 120 bp, Artificial Sequence
  ENSG00000260876_71 (sequence is synthesized)
ggcaggaggtaaccattaaagaggaccatcatgtagtgtgaggagtcaacatttcacactagaaagcccttggttcaagttttgtctctgccacctacagattttgtaaccctgacatca

SEQ ID NO: 990324 - DNA, 120 bp, Artificial Sequence
  ENSG00000260876_72 (sequence is synthesized)
tctgtgcactccaatatttatgagaaacccacaaagatcctttggcaatgtttccaacactggctcaacttctggtgcactgagctgtcctttagagttcagattgccagggcttctgct

SEQ ID NO: 990325 - DNA, 120 bp, Artificial Sequence
  ENSG00000260876_73 (sequence is synthesized)
ggtgcagcggatgacatggaattttaaaaattaagaagcacatgcactatcttatcattcaaaaacaaaagccacttgagatacgtggctaccaaagggagtccacgcaagcctggcggt

SEQ ID NO: 990326 - DNA, 120 bp, Artificial Sequence
  ENSG00000260876_74 (sequence is synthesized)
caaagcagcagctggagttccacagctgttttccattgctcttggagcattacacatgcattcggaaatgacccttaggagtcaagcggccttctttttgtttgcttttctagaagataa

SEQ ID NO: 990327 - DNA, 120 bp, Artificial Sequence
  ENSG00000260876_75 (sequence is synthesized)
ctttcccaatatagcactggagtcaaaagcaagaattcagggttggaaactcagtctatgcaatggcccaaaggtcttgggccattcaaattgcaaaactgtgaatcttctgggtctggt

SEQ ID NO: 990328 - DNA, 120 bp, Artificial Sequence
  ENSG00000260876_76 (sequence is synthesized)
aggggggccagggagggttgagcttggctatccttggccatgggctggtgatatgcaacataacctcagaatgtactccaggcttgagtgaacagacaatttaataatgattgtgacagg

SEQ ID NO: 990329 - DNA, 120 bp, Artificial Sequence
  ENSG00000260876_77 (sequence is synthesized)
ccttcctctatgacatgttccagcctcatggtgaaaggacaatggttttcagtatacctgaccttggatgccaagtacctgaagattgagacctaaaataaactgtgggctgaaacctta

SEQ ID NO: 990330 - DNA, 90 bp, Artificial Sequence
  ENSG00000260876_78 (sequence is synthesized)
acaagcgtcgcctgcacacgtcagcacaaatgggaacatgatgagtgatgctgcctggagttaaaggaggccaggagcaccagaagctgg

SEQ ID NO: 990331 - DNA, 120 bp, Artificial Sequence
  ENSG00000260876_79 (sequence is synthesized)
acttcttggaatagatcctaaattggtctgactctcaaaccagtgttttaaaaatactactctaaactgcttccttgggatatggcaatgtttcaggaaagaggcactggcctttacttc

SEQ ID NO: 990332 - DNA, 120 bp, Artificial Sequence
  ENSG00000260876_80 (sequence is synthesized)
ttcttagataaatactcccatcttgatatttcattggtgtcaaagagtgcaggctgtggagttacacttcgagggttcaaatcccagctctatttagaatttggacaacttattagactt

SEQ ID NO: 990333 - DNA, 120 bp, Artificial Sequence
  ENSG00000260876_81 (sequence is synthesized)
ctgtgcttagttttcccatatgccaaatggggtacccttcataactatgaatcatttattgtacaagctcccagaatggtgggcagggcatgataaagttggtacggactctataaataa

SEQ ID NO: 990334 - DNA, 120 bp, Artificial Sequence
  ENSG00000260876_82 (sequence is synthesized)
ggaaaaatccagaagccaccatcaacttacaaccctgcatgaataaatgtaatgtttcgtttggagattgagagctgatatataggacaaggataactggcccaatacagacaaagttcc

SEQ ID NO: 990335 - DNA, 120 bp, Artificial Sequence
  ENSG00000260874_0 (sequence is synthesized)
cactcctgcctcccaggtctgacggggactccggctcggagctgggcccccgaggccgccagggaggtgactgcgggcgacgccgggattttggtttgggtaactgggtagatgggggcg

SEQ ID NO: 990336 - DNA, 120 bp, Artificial Sequence
  ENSG00000260874_1 (sequence is synthesized)
ccattatcgcgcttctcttgcagggggccggtgaaggttatacgagaggctccatctgtccttattgaaagtgctcttaacgcagggaccagccgtcttgctgacgcctgggccaccgag

SEQ ID NO: 990337 - DNA, 120 bp, Artificial Sequence
  ENSG00000260874_2 (sequence is synthesized)
agagttgggattaagagcccctggacaaggggccgaggcagtgaaggacgtccatcactcatctgccactatcctcctcacatttaatcctcacaacacccctgtgaggtttatccgctt

SEQ ID NO: 990338 - DNA, 120 bp, Artificial Sequence
  ENSG00000260874_3 (sequence is synthesized)
cacctgttgctggggaacactgctctccgggggacttgggggacgacactgtaaacatgacttcctggcctgatggtggcagggctgtgtgtgcgagtcactgtccagggacagcactga

SEQ ID NO: 990339 - DNA, 120 bp, Artificial Sequence
  ENSG00000260874_4 (sequence is synthesized)
gaccccctgccaggtcaggaccctgaagtccaggtcaagaatcttctaccttgctacggtcccctgtgttaccctcctgtggtgagaagcgtgggtgacatgcctcttccaagttggaca

SEQ ID NO: 990340 - DNA, 120 bp, Artificial Sequence
  ENSG00000260874_5 (sequence is synthesized)
gctgcccgccatgactccaacaaatgtggagatgacaagttggccatctagctcaagccaagtggacgcagaagcaagcaaccgggaaactgacaggactcacactaactgggcttctgg

SEQ ID NO: 990341 - DNA, 120 bp, Artificial Sequence
  ENSG00000260879_0 (sequence is synthesized)
cgctcaggcggcgccccggcggcgacccacctcctcggcgtcctggcccagagggatgcccaggttcctgagcccctcctgcagctcgccgatgtccaccactccgtccccattgcggtc

SEQ ID NO: 990342 - DNA, 120 bp, Artificial Sequence
  ENSG00000260879_1 (sequence is synthesized)
cagtgcctggaagagggtctcgtagcgcgtcggctgctccgcgtcctggcaggccgcggtgggcagcacgaagtcccgcagccagcgcaacatggtcccagaggcgcaggcggcctggcc

SEQ ID NO: 990343 - DNA, 120 bp, Artificial Sequence
  ENSG00000260879_2 (sequence is synthesized)
tggtcccagaggcgcaggcggcctggccgaggaagtcacgggagatcgagggctgcggggcgagaccgggaccagcgcgaggccgggctgggcggggcgcgcggcgcaacagcgtttggg

SEQ ID NO: 990344 - DNA, 80 bp, Artificial Sequence
  ENSG00000260879_3 (sequence is synthesized)
cagggcgcagggcgcaggagcggagaccccacccgagcccgcgcggagcgcagggtgtggccgtcccgccgctgctgggg

SEQ ID NO: 990345 - DNA, 120 bp, Artificial Sequence
  ENSG00000260879_4 (sequence is synthesized)
cgcctccagagagccggaagtgagggagctgggagctgggtctcgggaggtgctgtgcggacccggggtcgacctctgcccagttgccagtcccgctgtcagcatgcgggtccgaggaag

SEQ ID NO: 990346 - DNA, 120 bp, Artificial Sequence
  ENSG00000260879_5 (sequence is synthesized)
aggcccccagcaggtccagggctgcagcgtcagcgcgtcggtggcttgggagcggggtcttgaagactggttactccacttaaagaccctctcgggccggagccttggcggtcagcccag

SEQ ID NO: 990347 - DNA, 120 bp, Artificial Sequence
  ENSG00000260879_6 (sequence is synthesized)
ttctctctgcctggaaactgggccatggagggcattgtctctcacggatgtctaattttttcgtggttgcacacctgggatggcgattctgctttaaaaagcagagagttaaatcctaaa

SEQ ID NO: 990348 - DNA, 120 bp, Artificial Sequence
  ENSG00000260879_7 (sequence is synthesized)
gcatctattggagcaattataaaacaaaaaggagaaactcctggatttgttgcagaaaagatcaacagccatctgcgtgggcaacggggaaaagaaggactagtttggtaggcagcttag

SEQ ID NO: 990349 - DNA, 120 bp, Artificial Sequence
  ENSG00000260879_8 (sequence is synthesized)
ctaggatttgcccgtgattaagcgtatagagtgtctgccagctgcacttatcagaaaaaaccacagcgccctcctccttctcaagatgggtgcagttccgaggtttggagcttattactc

SEQ ID NO: 990350 - DNA, 120 bp, Artificial Sequence
  ENSG00000260879_9 (sequence is synthesized)
aggcaagacagaacttattactgcctagcatggaataacggaaggaacattggacttaacagagaaagtacctaatccttcaggtgtgacatagcgtctccgggtagtctctcatcagta

SEQ ID NO: 990351 - DNA, 120 bp, Artificial Sequence
  ENSG00000260879_10 (sequence is synthesized)
aaatgagaatataaatatctgccttcacaacaaagttgtatattaggtgtgaaaggtcttaattctctaaggcgccaatcaaatgagatatcattaattgtaataatcctgttcattcac

SEQ ID NO: 990352 - DNA, 120 bp, Artificial Sequence
  ENSG00000260879_11 (sequence is synthesized)
agctgcgtaagaggaactattgttgtactgctgtttgcagaaaagaagatacctctgtacttgtaaattagggtgtctcacatcttctgaatcactacacagaaatcagttccaacaaca

SEQ ID NO: 990353 - DNA, 120 bp, Artificial Sequence
  ENSG00000260879_12 (sequence is synthesized)
gccaggaactcagaccctgaacttacctctcctcatatcattttgtatgtttaagatatgtatgaatctagaatttgtaaattaagggctgcctgcttagtaaaatcatcttgaaactga

SEQ ID NO: 990354 - DNA, 120 bp, Artificial Sequence
  ENSG00000260878_0 (sequence is synthesized)
aactgatcataatgtgtaaaaaggtgtaacgtataattagaaagacataagtaaaactcaattattgagccacaattctcatgaattaaactttaccatccacagttaagtccttattgc

SEQ ID NO: 990355 - DNA, 120 bp, Artificial Sequence
  ENSG00000260878_1 (sequence is synthesized)
ttgttaatcttgggtgcctgcactacacttgattttaaaattgttggtcttctataaattttcaagattttcctgagcagatacaaattcaggttttgatgtgcttcaaactaaggaaca

SEQ ID NO: 990356 - DNA, 120 bp, Artificial Sequence
  ENSG00000260878_2 (sequence is synthesized)
gctacatttgaatagaaaataaaaggaataaagtatttttcctttgctacaaattaataatacgatcacatgcagagagaatgtgaggaaccttcaacactaaactttgatagtcacatt

SEQ ID NO: 990357 - DNA, 120 bp, Artificial Sequence
  ENSG00000260878_3 (sequence is synthesized)
atgtgaaatttgaaattttctgggtgacagtatacttattggtaggttttctggttcatgaaaataactcaagaactaatatttgtaattgtgaccttgttgtaattgggaaaggccact

SEQ ID NO: 990358 - DNA, 120 bp, Artificial Sequence
  ENSG00000260878_4 (sequence is synthesized)
agttgatcatatgacctttattgaatatgtcatgcttgctgtttaaaaaattcctaactaatcacatgcaaattaatgctaaacaacttttttgtatttattaaaaatgatttaaatata

SEQ ID NO: 990359 - DNA, 120 bp, Artificial Sequence
  ENSG00000224717_0 (sequence is synthesized)
aagccggctcctcttgcactcacttcctttgtgtctctctctctctttctctctctctccccctcaccaatctctttcttccctccttgtccgattctctgctgtagcttccagtggaga

SEQ ID NO: 990360 - DNA, 120 bp, Artificial Sequence
  ENSG00000224717_1 (sequence is synthesized)
aaaataattattcttcaatgggttagcacggggcgcacgcacacacgcgcgcgcacacacaccccgccgaggtacccaatcaatgcacaaatcttcggggtccctttaacctctgcggat

SEQ ID NO: 990361 - DNA, 120 bp, Artificial Sequence
  ENSG00000224717_2 (sequence is synthesized)
gactccgggagttaattatgaagcctatttcggcgcggcataaatatgcattaagccccccagccccggggccggcgtgcccggcccaccccgccctccgcgccccccgacggccgcggt

SEQ ID NO: 990362 - DNA, 120 bp, Artificial Sequence
  ENSG00000224717_3 (sequence is synthesized)
cagccggcattccggagcagcgcgtcggagctgcaacttcgcgcctaagcgcccgcacctcgcagcccggcgggcgggagacaaaagctgcggcgccgccgccggaggccgcgcggccaa

SEQ ID NO: 990363 - DNA, 120 bp, Artificial Sequence
  ENSG00000224717_4 (sequence is synthesized)
ggaattaatggagaattcagagaaatcagagcttctaccccaccaccctctgtcattgcactgccctggcacatgggcacaacgtcttctgagaagggacacaaactgctcagacatgcg

SEQ ID NO: 990364 - DNA, 120 bp, Artificial Sequence
  ENSG00000224717_5 (sequence is synthesized)
gcatcctccctgtagtcctcctttcctggccagttggagaacgatctctgcctttcagttctgaacagcttccagcatgccccatagggaacattttggatttgaatgaagagcataaaa

SEQ ID NO: 990365 - DNA, 120 bp, Artificial Sequence
  ENSG00000224717_6 (sequence is synthesized)
atgtggtcagcatattggccttggtatttgattttcttttttccatgcaaccggccccaggaggtgactgacaagttgggccaagtgcactgaaagccctgtctcggctggcccataact

SEQ ID NO: 990366 - DNA, 120 bp, Artificial Sequence
  ENSG00000224717_7 (sequence is synthesized)
cctgagctacacagacccctaaggaccccgtgagccagcagagagccataaatccagcaagctggaggctgggagctcactgattgcactggggaaaagcagcctgatctgattgctatg

SEQ ID NO: 990367 - DNA, 120 bp, Artificial Sequence
  ENSG00000224717_8 (sequence is synthesized)
tgagctggagagagaaaaggtggtaactggagtgctggaaatacaacgactttggaacaaaatgaagcaacagaggaatggcaggagggactgtggttttctcatctgtacaacaaaggg

SEQ ID NO: 990368 - DNA, 120 bp, Artificial Sequence
  ENSG00000224717_9 (sequence is synthesized)
gctggattggactgcctctgaagccctttcatcacagaaattctgtgtttctctttgtaactaaggtcaaacagatgtgggagggtgtcaggatgggaaagcaagatcgggggacccaga

SEQ ID NO: 990369 - DNA, 120 bp, Artificial Sequence
  ENSG00000224717_10 (sequence is synthesized)
gaagccagaagaggcaacgaggaggccaacatatttactgcccaattactatcacattttttggtgtgtgtgtgagacagggtctcactctgtctcccagactggagtgaagtggtgtga

SEQ ID NO: 990370 - DNA, 64 bp, Artificial Sequence
  ENSG00000224717_11 (sequence is synthesized)
cttaagccactcacctatcacatttaattctcagaataacaagtgagatagatatagttatcgc

SEQ ID NO: 990371 - DNA, 120 bp, Artificial Sequence
  ENSG00000224717_12 (sequence is synthesized)
taattctcagaataacaagtgagatagatatagttatcgctattttacagagaacactgaagtacagaggctacattaatatctcaaggtcacaaggctccgtgctcaggctgggattcc

SEQ ID NO: 990372 - DNA, 120 bp, Artificial Sequence
  ENSG00000224717_13 (sequence is synthesized)
aacccaggcagtctgacccagagcctgcacgcttggtcatgaagccctctcgcctgagtatgcaatgtgaccaggaaaaccctggaggaaacatgtacacaacttgtgtttccttacttt

SEQ ID NO: 990373 - DNA, 120 bp, Artificial Sequence
  ENSG00000224717_14 (sequence is synthesized)
aacttgtgtttccttacttttaagggtaagagtggaaaacagatagtccccatggagtagattgtccaaaatacacatctgtcttctgggaaagaggagtgtgtgtgtgtgtgtgtgtgt

SEQ ID NO: 990374 - DNA, 120 bp, Artificial Sequence
  ENSG00000224717_15 (sequence is synthesized)
gatgtaacagacagaaccaagaagcatgtaggtgaaaatatttaatagggatgaatgtaaattcctgtacctgggcacagaatccccattatataaaaatagaatagagagttaggatca

SEQ ID NO: 990375 - DNA, 120 bp, Artificial Sequence
  ENSG00000224717_16 (sequence is synthesized)
gaaagcatcaatttaggggcttcacctgacagtaagctcaggttgaacaccagtgtggtgaggcttccagaaaagcccaccacagggctgcatcaacagaagggaagtgtcccacaccag

SEQ ID NO: 990376 - DNA, 120 bp, Artificial Sequence
  ENSG00000224717_17 (sequence is synthesized)
gacagaacccttagaccattcgcgctaggttgagttccaggccccttgctataagagggacagagccaggccggagaggataaagaggagagcaacagggatagtgatggacatctgagg

SEQ ID NO: 990377 - DNA, 67 bp, Artificial Sequence
  ENSG00000224717_18 (sequence is synthesized)
taaagaggagagcaacagggatagtgatggacatctgaggaagaggtaaaacaccagttgaaagaac

SEQ ID NO: 990378 - DNA, 120 bp, Artificial Sequence
  ENSG00000224717_19 (sequence is synthesized)
aagattgtgccactgcactccagcgtgggcaacggagagactctgtcataaaaaaaaagaaaagaaaaagaaagaaccaggtgacattgtgcaagttacaccatacatcacaacgtcagt

SEQ ID NO: 990379 - DNA, 120 bp, Artificial Sequence
  ENSG00000224717_20 (sequence is synthesized)
ccatacatcacaacgtcagttttcctatctgcaaaaggggtttattagtagggacggcatagagattaaatgaggtaatgcatgtaaagtgcttagctgggggctggacataataaacgt

SEQ ID NO: 990380 - DNA, 120 bp, Artificial Sequence
  ENSG00000224717_21 (sequence is synthesized)
tagctgcaccagccgttattaaaccctgagcatgctcacctcagacaaggggtgcatcagggacctggctggaggatcaagcacagggatctccatggcatgggtccagagtcacagctc

SEQ ID NO: 990381 - DNA, 62 bp, Artificial Sequence
  ENSG00000224714_0 (sequence is synthesized)
gggtgggagtgaccaggtgccgtccatcacccctttctttgattaggacgtcgtgcacggtg

SEQ ID NO: 990382 - DNA, 120 bp, Artificial Sequence
  ENSG00000224714_1 (sequence is synthesized)
tttatggcgaaatgttgaaagctatgcttgaaatggaaataggtgcagtggatgagatactgtttgataacatgagaagaccaacaagatcagaacagaaaccctcaggctacaaataca

SEQ ID NO: 990383 - DNA, 120 bp, Artificial Sequence
  ENSG00000224714_2 (sequence is synthesized)
ccaacaagatcagaacagaaaccctcaggctacaaatacatggaaatagcaaatagtgccaccacgcccagctaatttattttgtatttttcggggtctcaccatcttggccaggctggt

SEQ ID NO: 990384 - DNA, 120 bp, Artificial Sequence
  ENSG00000224714_3 (sequence is synthesized)
caaactgctgggaatacaggcatgagccaccacaccgggccaatacatagttttttataaagagatattcgcctgtgaaagaaattgaatccatggttgtcagaagtgaatagaaagtta

SEQ ID NO: 990385 - DNA, 120 bp, Artificial Sequence
  ENSG00000224714_4 (sequence is synthesized)
aaaaccattaataagttaatattttcattaattcaacaaatatgattgagtacaatgagatcccaggcactattcaggatttccacagacatgaatgaaacaaaagtcttcctaatgtca

SEQ ID NO: 990386 - DNA, 120 bp, Artificial Sequence
  ENSG00000224714_5 (sequence is synthesized)
gagctaaagtaataaacacagtacttttcaataaaatcacagggattattggacaaggaatgagtattcacacctatattcttttcttgaagacaagaatgttcaagcacactgaagatg

SEQ ID NO: 990387 - DNA, 120 bp, Artificial Sequence
  ENSG00000224714_6 (sequence is synthesized)
aggaactaaaactaagacaatgtaaagaggtcaaatcgactttctctataagcaaagcaaaagcatcatcagtctaccatgactctcagtgaatcaaaagctatttatcagaaaaaaaag

SEQ ID NO: 990388 - DNA, 120 bp, Artificial Sequence
  ENSG00000224714_7 (sequence is synthesized)
aaaaaaaaaagcagaaaaaagtacattcatggcttgtatctcaggtatatgtgggctttgattttttaaccagtctggtaagttgatgaaagaaatccctgctaaatatcagctccctac

SEQ ID NO: 990389 - DNA, 120 bp, Artificial Sequence
  ENSG00000224714_8 (sequence is synthesized)
aaaaaccagtgtactatctgttgacaatgcaaagttaagttcattaaaagtaccacaataagaaagaactctactttgaaagagtcttaaaaagggcaaattatgaatgaatgtttacat

SEQ ID NO: 990390 - DNA, 120 bp, Artificial Sequence
  ENSG00000224714_9 (sequence is synthesized)
ggttgttgaatctgagctttggttgtcttttaaggggactgctttttgagattggataattttgtcacataatcatttagggttgtttgacttctttaagacagaaaccttgaagtaatt

SEQ ID NO: 990391 - DNA, 120 bp, Artificial Sequence
  ENSG00000224714_10 (sequence is synthesized)
cttggtaagaaaattgttagattaatatttaattgctcggatagcaaacaatttggttagataaattggtttcattactgtcttaaatattacagtgagggtttatagtcttattcttgt

SEQ ID NO: 990392 - DNA, 120 bp, Artificial Sequence
  ENSG00000224714_11 (sequence is synthesized)
cctcttaagcaaaaatttcccagaccaaagactcagccctgatcatttgtcatcctgaactagaggatatataatcgtcatctgtggagatgatcagtccagatccgaactgctgattga

SEQ ID NO: 990393 - DNA, 120 bp, Artificial Sequence
  ENSG00000224714_12 (sequence is synthesized)
ggagtggccgttatgtgttatgtttctaatggtgatcacttcaacgtctaggaacatcaggttttcttatcccttttctggatgatcaattgtggtttttaaaatttttttttatctttt

SEQ ID NO: 990394 - DNA, 120 bp, Artificial Sequence
  ENSG00000224714_13 (sequence is synthesized)
tagtggggcagcaaatgtgcaacagcattcagactttgcagagctcatctctaaacaaaccaacatgaccagcgtaaatatctatattcagagttcatatccaattctaagccagaatcc

SEQ ID NO: 990395 - DNA, 120 bp, Artificial Sequence
  ENSG00000224714_14 (sequence is synthesized)
aagtgtgcctaaattaaaacaggagttggattcaatctccaacctgaagagaacagaaatctacatattacattattctattatgatagcacatgtttcacctgttgagtataactgtct

SEQ ID NO: 990396 - DNA, 120 bp, Artificial Sequence
  ENSG00000224714_15 (sequence is synthesized)
gcccaatcttattaaatttttatgtgatgttttctaaagctttagtgatattttcttgattccctgtcagtttttgaactggatggtttcccctgttttccaggctttgtgtaaaggata

SEQ ID NO: 990397 - DNA, 120 bp, Artificial Sequence
  ENSG00000224714_16 (sequence is synthesized)
aggaggaagatgcttgaagaaaaaggaaagcaattcaaaattacctgtgagtggttaaatttgtcagatatcaagtaaacatgaggacaggtgattgatgataaaaggagctggatattg

SEQ ID NO: 990398 - DNA, 120 bp, Artificial Sequence
  ENSG00000224714_17 (sequence is synthesized)
atcaagaaaaaatgtgacaaattccacatttgatttaaatgtataaccactttacatttcctcactatctttctttcattgttaatgtccataattctaaaaaataaagttatattgtta

SEQ ID NO: 990399 - DNA, 120 bp, Artificial Sequence
  ENSG00000224714_18 (sequence is synthesized)
agtgccatcttttttgttccttactgtacatgtgacttgcaaagagaagagatgatggagccgccattttgaacatgcctattcccagggtcccttagctgtggtgcaagtggggcatgt

SEQ ID NO: 990400 - DNA, 120 bp, Artificial Sequence
  ENSG00000224714_19 (sequence is synthesized)
gcaatcaaaaattcatccattctgagcagctttcttgagccttggaccagttcacaatggacctgaggcttcttttgcccctttctgcttatgggtgcagtggatgagatactgtttgat

SEQ ID NO: 990401 - DNA, 120 bp, Artificial Sequence
  ENSG00000224715_0 (sequence is synthesized)
gcagggctgctccctcagaagcaccagggaggatccttcctgcctcttccagctcccaggggctccaggggttccttggctggtgacggcaccatgccatcctctgccttctgtgcacac

SEQ ID NO: 990402 - DNA, 88 bp, Artificial Sequence
  ENSG00000224715_1 (sequence is synthesized)
tggtgacggcaccatgccatcctctgccttctgtgcacacagccttctcctcgactctctcttccattgataaaagggtcttgctcta

SEQ ID NO: 990403 - DNA, 120 bp, Artificial Sequence
  ENSG00000224715_2 (sequence is synthesized)
tccacctcagcatctggagtagctgggactacaggtcagtcctctgggctccatctataaaacaaatgtttgtcatcctccgggaaacagagcacatctaacagaggcaggcaattcctg

SEQ ID NO: 990404 - DNA, 120 bp, Artificial Sequence
  ENSG00000224715_3 (sequence is synthesized)
gagcttcttgattctgttcagcagaaccagggccccagcggcagaggcctcccaggaggtccacattgtgcaagacacgaactcaggtcctttcatctcatccatcaacagcccagaaca

SEQ ID NO: 990405 - DNA, 120 bp, Artificial Sequence
  ENSG00000224715_4 (sequence is synthesized)
gagttaattttgcccactgtacaaagggtgaaacccaaattcagagaaattgactggcctgcccgtgcctgcccagctgggaggagtcagagctggcttccattcacacgtgtctcactg

SEQ ID NO: 990406 - DNA, 120 bp, Artificial Sequence
  ENSG00000224715_5 (sequence is synthesized)
agaacaccaacccacaccctgactgaagggctggtccaagcctacttattgggtgtttgctcactaccctccttctccctgtccacccttcccttcgtggacagaagccagagttcagag

SEQ ID NO: 990407 - DNA, 120 bp, Artificial Sequence
  ENSG00000224715_6 (sequence is synthesized)
aggatccccaggtccccagggacacacagccaggcaaggagggagctcacctcaactgctgccttctgtccagggcctctccaccccaaccccacagcccgccaccttcatgcagccagg

SEQ ID NO: 990408 - DNA, 120 bp, Artificial Sequence
  ENSG00000224715_7 (sequence is synthesized)
actgtgggtaatgcactaaacacatgattagcatttattatggcttcatttcatagacacaggacaatgaacagagccataaacagggagaacaacaatggaatcaagaaaatatggcac

SEQ ID NO: 990409 - DNA, 120 bp, Artificial Sequence
  ENSG00000224715_8 (sequence is synthesized)
ttttaagaatagtttatgagttgaacaaaaggaaaactctagtcttccactctgggatattgagcagtgctcctagggctctttggactataaagcattattgaactgttcctgcaatgc

SEQ ID NO: 990410 - DNA, 120 bp, Artificial Sequence
  ENSG00000224715_9 (sequence is synthesized)
aaagtgtacaagatggtcataattaagaacaattgattcaatatttttgccaaacctcagggtaagaatataaactagtcataatggaaaaatgccagatctgaggtgacctgagccaag

SEQ ID NO: 990411 - DNA, 120 bp, Artificial Sequence
  ENSG00000224715_10 (sequence is synthesized)
atgatcattgcaagaatacaggaaccattgcagtggaggtgacactctcacaatcgtcacagcggagatgacacagcatggagtgaccatacacaaccatcacagcggaggtgacacaca

SEQ ID NO: 990412 - DNA, 120 bp, Artificial Sequence
  ENSG00000224715_11 (sequence is synthesized)
ccgcatggagtgatgacactcacacaaccgtcacagcggagatgacacagcatggagtaaccatactcacaaccatcacagcagaggtgacgcacacagcatggagtgactgcactcaca

SEQ ID NO: 990413 - DNA, 120 bp, Artificial Sequence
  ENSG00000224715_12 (sequence is synthesized)
caaccgtcacagcggaggtgatgcacacagcacgttagaagacctccaggtgccggttgctgggctcacatctgatgatctaatgaagagcaaagcagacacaggtcgctgcccaggttg

SEQ ID NO: 990414 - DNA, 120 bp, Artificial Sequence
  ENSG00000224715_13 (sequence is synthesized)
ttttgccacctagagagaggtggactctaaccacaaaagccacacctgtgattcaaagacacctgtgtcaggctgcacccacgagcagtgtcaggtgtggctgctgtgggggcaggtgcc

SEQ ID NO: 990415 - DNA, 120 bp, Artificial Sequence
  ENSG00000224715_14 (sequence is synthesized)
aggtagtctgcctccagagctagtgtcaactgtgtctgggttcagtggacgagcagattcaaaccaggctatggaaaccaccaaacaacatggtgcctggaaacagaagggtgtgttcag

SEQ ID NO: 990416 - DNA, 120 bp, Artificial Sequence
  ENSG00000224715_15 (sequence is synthesized)
ccgaggggcatctgccctggagctccccagacactcaggagccgactctctgggaagtcacaacaggggctcagaactcgctgtggggctaaaccttgtgcctgcctttcataggatgac

SEQ ID NO: 990417 - DNA, 120 bp, Artificial Sequence
  ENSG00000224715_16 (sequence is synthesized)
aaggccgcctccacccactcacccactgtccctcacagggccaccacagagcaagatgactgtgccttccaccctctgtccactggctagggccagcgtgaatggaggtgtggccacagg

SEQ ID NO: 990418 - DNA, 120 bp, Artificial Sequence
  ENSG00000224715_17 (sequence is synthesized)
gggcaagcttcttaggacaccaagtgctgagaaaatgactcgctgaagactattaggaaagaggatctctagagtctgggagagaacacagggagccagccgtgggccaggccgcagtgt

SEQ ID NO: 990419 - DNA, 120 bp, Artificial Sequence
  ENSG00000224715_18 (sequence is synthesized)
ggtcgtgcagtcatcaccaatagccctggtgcaattgctcccaccatggctgattcccagctacaaatgtcacatcaactgttgcaggattccaggatatttaacaacaggctctctgga

SEQ ID NO: 990420 - DNA, 120 bp, Artificial Sequence
  ENSG00000224715_19 (sequence is synthesized)
gcggtactagctggccccagcactgcaccctcccaggactctggcttctgaggaagcctggtccacagaaatctacagctgtaatggaacctcaaagcaggtccctccgcggggtagggt

SEQ ID NO: 990421 - DNA, 120 bp, Artificial Sequence
  ENSG00000224715_20 (sequence is synthesized)
ctggtcactgcagtcagcttgctgcaggcctacaggagttctgagccccaaagtgtccaccccaccggtaggaatcaagccttcctccaaacacttggtttatcacattgcatagagagc

SEQ ID NO: 990422 - DNA, 120 bp, Artificial Sequence
  ENSG00000224715_21 (sequence is synthesized)
acctgataggttcaagatctgtgttcaaccagaaagctacacactcaagctgaactcatgctcccaggagcccccagaggccaggacacgccctccccacagtcgggggggacaggagaa

SEQ ID NO: 990423 - DNA, 120 bp, Artificial Sequence
  ENSG00000224715_22 (sequence is synthesized)
agtgcatgcgtgctggaacgtcaaacatcacgtggcacagggaggggagaaaggggccaggggatgcggggcttggccctggccctggcccagatcttagataatgggcaggcacccggc

SEQ ID NO: 990424 - DNA, 120 bp, Artificial Sequence
  ENSG00000224715_23 (sequence is synthesized)
agggaggacaaagcagaaagggcatttctaggtgaatgagaagctgagctggcaaagatatgactgggggtcccagcaagcgggaatgaaactgtagattagtgtgtggagccccaaaca

SEQ ID NO: 990425 - DNA, 120 bp, Artificial Sequence
  ENSG00000224715_24 (sequence is synthesized)
ggcatgtgggtggcctcgcacactggagaccctggtgccagaagaggcaactgccattgacggggccctgctgtgagctgcgtgccaggccttgtggctgcacacacaatcccacacacc

SEQ ID NO: 990426 - DNA, 120 bp, Artificial Sequence
  ENSG00000224715_25 (sequence is synthesized)
ctcagggtttactgagacatcctcccggtgtccccagaaaaggcccagcagtccaggaggtggagctctcgggggacgggggacagagccagggctcatgggcctgtggagcacctggga

SEQ ID NO: 990427 - DNA, 120 bp, Artificial Sequence
  ENSG00000224715_26 (sequence is synthesized)
agccgtgaggaggacgtgggggctgcaagtggaaagcttctgtgggagcacaaatccttgccgagctcagtggagccgggccgtgaatgtcacctgtgggtgggtgtgttccctgacaca

SEQ ID NO: 990428 - DNA, 120 bp, Artificial Sequence
  ENSG00000224715_27 (sequence is synthesized)
gccagccgccctcactgctgtcgccttgacccgaagtccccccagttcctcacctgctgccaggctgagcctcaaggactctcctgagacctggcatcatggggcagaaggcacgtaacc

SEQ ID NO: 990429 - DNA, 120 bp, Artificial Sequence
  ENSG00000224715_28 (sequence is synthesized)
ataacctccagatgcatcatggatgctgaacgcacgtcgattgattgagcaaataaataactgctgcggccgcaaagtaccagagaaggatgggactgtgcccagactttctgaaataga

SEQ ID NO: 990430 - DNA, 120 bp, Artificial Sequence
  ENSG00000224715_29 (sequence is synthesized)
tctaaattttgccaggtggccaaggcaggcagcagtggggctgtgacaggaaaggccatcctcgccacccagaccccaccggcctcacgttctgttgtcgaaagacacctgcctgctttg

SEQ ID NO: 990431 - DNA, 120 bp, Artificial Sequence
  ENSG00000224715_30 (sequence is synthesized)
cgactccatctccaccgaaacggtctctgcagtcatttgcagggatcggtccatttcccttgaacacctcctttatccctctccccagaatcatgaagcccagccccgatcaatcttgcc

SEQ ID NO: 990432 - DNA, 120 bp, Artificial Sequence
  ENSG00000224715_31 (sequence is synthesized)
acttacatcaccccactggtatcttcacttttcaatctctttaacatacatgcaggaaaaagacagccagcatggaatacagttcagcagggccaaagaggagcagtggcgtcatctcag

SEQ ID NO: 990433 - DNA, 120 bp, Artificial Sequence
  ENSG00000224715_32 (sequence is synthesized)
gatgtgctgggcaggcaccacagcgccggcgtccccacgtccaggacaaagctgagtgcaagtgtcaccgtgagctggcctgtgtgagcccggcccactgaccaccccccagataaaaaa

SEQ ID NO: 990434 - DNA, 120 bp, Artificial Sequence
  ENSG00000224715_33 (sequence is synthesized)
gagcaggagatgcctctcagccaggactcagaccaccagcacgcagcacccggcacccacggctgagcatgtgccctcgagtagagaggagacctcggtatggaggggacagtgatgtga

SEQ ID NO: 990435 - DNA, 120 bp, Artificial Sequence
  ENSG00000224715_34 (sequence is synthesized)
cagccaccaagtccatggtctgacccccagcagcaggggtgccagcctcattgtggagtgttgcagcatgcggggaaatgattttcctaatcactgctaccagttgggtgctaatgagcc

SEQ ID NO: 990436 - DNA, 120 bp, Artificial Sequence
  ENSG00000224715_35 (sequence is synthesized)
ccagttctggttccactggtgacatttcagtttacacatcgctgccatttggggtgaataagtccaagccacttaaacctcaggctcacattgattagagacgtcccctccaggtcccaa

SEQ ID NO: 990437 - DNA, 120 bp, Artificial Sequence
  ENSG00000224713_0 (sequence is synthesized)
acagtggactcggagatgcattaaggacccaggacagggcatctggacatggctgtgtgaatgtttggctcgctctgttccagcggctctcccagaagttgggaggggtgaagatcccct

SEQ ID NO: 990438 - DNA, 120 bp, Artificial Sequence
  ENSG00000224713_1 (sequence is synthesized)
tgggctgtccgctcttgggtccatggcttgaagaagaatccccttctgctcactatgaacatggcttatgacctcgcagagagcaaagataaggagacccagagccaggaaaaggtctca

SEQ ID NO: 990439 - DNA, 120 bp, Artificial Sequence
  ENSG00000224713_2 (sequence is synthesized)
gcccccaggatcctctccaccttcccatcctccctcagctgaacatggtagcctcagaaggaaaggctgtgttccacctctcactcctcctcccagggcttcactgaagatgatgatttg

SEQ ID NO: 990440 - DNA, 120 bp, Artificial Sequence
  ENSG00000224713_3 (sequence is synthesized)
ctcaaagaggaagacgcgcctctctcgacctcgggaagacagcagccctccagcctcaggctcggtgacccagaaagtgtcctggcccaagagcttcccctgagcagtcagtttgccctg

SEQ ID NO: 990441 - DNA, 120 bp, Artificial Sequence
  ENSG00000224713_4 (sequence is synthesized)
aaaccaaaaggatagtggccttggaaaaagaacaagaaaaaggacaattctctgctcctcccttcctcgcctgacatgcccaaccaaccatggggtcagccccaggagaagacaactccc

SEQ ID NO: 990442 - DNA, 120 bp, Artificial Sequence
  ENSG00000224713_5 (sequence is synthesized)
cataaggacctcctgaatgctagggctggggcagaagagcatcgggcctccagtttcttgccctatctccgtacctcaaatccccgcaatctccccagcgtcatcatatcgttgcagcgc

SEQ ID NO: 990443 - DNA, 120 bp, Artificial Sequence
  ENSG00000224713_6 (sequence is synthesized)
ttgggcacaaagcacatgacctccacagcttgctgggacacagttcactcaggacatacctaggatgaaagcaggaggaggcccccacttcagcgtcggagctcatccttggttcagccc

SEQ ID NO: 990444 - DNA, 120 bp, Artificial Sequence
  ENSG00000224713_7 (sequence is synthesized)
gttcctccctcctcccctttatcatcatagccaaccttggaggaaattccatctaaaatgtgagggacagtcttctggaagttgtgcaactgcagggaagggctgtggacacttacatac

SEQ ID NO: 990445 - DNA, 120 bp, Artificial Sequence
  ENSG00000224713_8 (sequence is synthesized)
tcctttccagagccttcttcttctgttcctcctcactctcaggggcttgggacaaagtctcctcttcaggtggctggaaggaaagaacatcctagggtgagcaaacgaatgccccttgag

SEQ ID NO: 990446 - DNA, 120 bp, Artificial Sequence
  ENSG00000224713_9 (sequence is synthesized)
ggtcagttccggcagctcctctcctgtggctagagctggctccaacatccagttctgggggccagaaatcaagtgtcagaggtcggggacagtagctgggtggccccaacttgccctctc

SEQ ID NO: 990447 - DNA, 120 bp, Artificial Sequence
  ENSG00000224713_10 (sequence is synthesized)
tgccagtgtccttcatagatgtcccacatgctttggtgccgttccctgctcacctcatatggtcctgcctgaccactgtctgcctcagtttccacactgagacaatgtttggaatgatcc

SEQ ID NO: 990448 - DNA, 120 bp, Artificial Sequence
  ENSG00000224713_11 (sequence is synthesized)
aaccatctcctcaggccactgacgggccctggggggcctggggaacaggggccagagctgaggccagagctggggccagagggggcagccagaccggaggcagcagaagccgatatactc

SEQ ID NO: 990449 - DNA, 120 bp, Artificial Sequence
  ENSG00000224713_12 (sequence is synthesized)
ccctcactgcccgcaatggaataggattctaatgggaggaaaaagagaggaggtgatagaccttgccccagctccagactcagggtccccagggaactcccagggtcttctcttcatgat

SEQ ID NO: 990450 - DNA, 120 bp, Artificial Sequence
  ENSG00000224713_13 (sequence is synthesized)
gctcagcctctctctccaagggctcactctcttgccatcctcatttgagttggccaggatagaaaatttcaccagggcacccctgggagaaagcacagtaaggtaaacgcctggctctcc

SEQ ID NO: 990451 - DNA, 120 bp, Artificial Sequence
  ENSG00000224713_14 (sequence is synthesized)
aggcctggaacccccagttacatgtggaggttccccatatcctgagcatagcatagatatgggggtgggggcagccatctgggcagacattggaagctgggggtggccatctgctctcct

SEQ ID NO: 990452 - DNA, 120 bp, Artificial Sequence
  ENSG00000224713_15 (sequence is synthesized)
acaaccctccctctttcaatgggtacagaccattctctgggaagaggggaggatgagctgggtccatctgccactcccagtcccctcctccaccaattgcagtaatcactataaaaagaa

SEQ ID NO: 990453 - DNA, 120 bp, Artificial Sequence
  ENSG00000224713_16 (sequence is synthesized)
aagacttctgcagcccacctccccaacacatgcgtagacccaatagaggaggccagtgaggagggtccatcagggttatcgttggcctgtgctcagcgacagagagctgtgattccttat

SEQ ID NO: 990454 - DNA, 120 bp, Artificial Sequence
  ENSG00000224713_17 (sequence is synthesized)
aaagccccttgtagaaccacctcattctcattcctccattctcctgtccctcttcagaagtagattcttagcaaaaggtttgaggaaaataatcggttctaggcctaaggggattgtggg

SEQ ID NO: 990455 - DNA, 120 bp, Artificial Sequence
  ENSG00000224713_18 (sequence is synthesized)
tgggtttttctcaaacccatttgacaaagggaaagagatgagttccctgccccttcccctatttccttaacttgaactaacagaaatttggaggcagaagggaccttagggatcacttaa

SEQ ID NO: 990456 - DNA, 120 bp, Artificial Sequence
  ENSG00000224711_0 (sequence is synthesized)
aaattagatatttgttgaatcaggccaagacacagaaatatactgcatgccaaaatgtaaaggtgacatgagtgatcaaaagagagggaaagtgaaaggtcaagggagaaactctcagca

SEQ ID NO: 990457 - DNA, 120 bp, Artificial Sequence
  ENSG00000224711_1 (sequence is synthesized)
tgtaggtacagaaccatttccatgaggtcagctacattccaaagtggctgcggcactggatgggagctgttgggacatgctgcacagcccaagacagtctttgaagatggctggatgcat

SEQ ID NO: 990458 - DNA, 120 bp, Artificial Sequence
  ENSG00000224711_2 (sequence is synthesized)
gaccttgtcatatacgtaaaacatccacagactaactggaaaaggacttcacctcagccaaaggccttcaagaggatcaatatttccaggatgttggtattagcatccattgttcgctgg

SEQ ID NO: 990459 - DNA, 120 bp, Artificial Sequence
  ENSG00000224711_3 (sequence is synthesized)
cattgagccttgtgagaactctctattataaaaagattggctaatttcttaaaactactccttcaataaggacccaggttatgtgccatggtatctgtagctttctggctgggtcagggt

SEQ ID NO: 990460 - DNA, 120 bp, Artificial Sequence
  ENSG00000224711_4 (sequence is synthesized)
gacccgcacacaaccctggcaggacgcccttggacacagtatttgcatccctttggtgtgccaaggtatcaagcattcacagttcacattgaaaccactaaacgaagagctgtgcaaaca

SEQ ID NO: 990461 - DNA, 120 bp, Artificial Sequence
  ENSG00000224711_5 (sequence is synthesized)
ggtcatcagtttctccagaggggaataatcttacaactgttacgaagggtcaaaggtaactttcattttgagatgctaattactccaagaatttgatgcaggaggcagctggttaaaatg

SEQ ID NO: 990462 - DNA, 120 bp, Artificial Sequence
  ENSG00000224711_6 (sequence is synthesized)
aatgagtgctgaagcgttgaaggggaaaatcaaatagatggttataataaaagtgcaatatgcaacctaataagtatgcagagaataagggacaatattgttaataaacatctattagtc

SEQ ID NO: 990463 - DNA, 120 bp, Artificial Sequence
  ENSG00000224711_7 (sequence is synthesized)
taaaacatccacagactaactggaaaaggacttcacctcagccaaagtgagtgcattgcagaataagtgcagagagcttaccttggtttttaaagatattgcaatccgttttaattgggg

SEQ ID NO: 990464 - DNA, 120 bp, Artificial Sequence
  ENSG00000224711_8 (sequence is synthesized)
aactgtccaggtggttgagccagaattgaaatgttggctgtcttcatctggagcccacactttctaccttcctgttgtgttctttatgattccaacatgctgccactgacccgttggcca

SEQ ID NO: 990465 - DNA, 120 bp, Artificial Sequence
  ENSG00000224711_9 (sequence is synthesized)
taagtgactcaaagtgttttcctgcatgagtgcaggatttgtgccagcctctccatgcctcctcccttgtccaacctcatgaccccttcagcatggacttctaggacaaggtgtggactt

SEQ ID NO: 990466 - DNA, 120 bp, Artificial Sequence
  ENSG00000224718_0 (sequence is synthesized)
agtggggctagagttgcctccccaggaggggctggaggtcagggcctggtgggctctgcaggcttatcagttcagcacaacgtgctcctgcattcaagaaacagggcatggggctgctca

SEQ ID NO: 990467 - DNA, 120 bp, Artificial Sequence
  ENSG00000224718_1 (sequence is synthesized)
ctggcactggaggccgaaagaaggtgagggcaagtgagatgcagggacctcttctcacagctgtgctgacaagcacaaaaaggagccccccacgtccacaccaggaaaggggggatggtg

SEQ ID NO: 990468 - DNA, 120 bp, Artificial Sequence
  ENSG00000224718_2 (sequence is synthesized)
cacaagatccagcaggaactttggagtcacactgacgtgggttcaaatcccagctctgccgctgagcaactgtgagatcttggcaaatgtttaactttcctgatcctctattgactcata

SEQ ID NO: 990469 - DNA, 120 bp, Artificial Sequence
  ENSG00000224718_3 (sequence is synthesized)
tgctaaatgtgacttagaatgcttgtgtcgtaagactggcgtgagataaagtacggcaagtgggaaacacaaagcctgtgcacgtgaggccctcaacagaaaaagctgaattgctgtgta

SEQ ID NO: 990470 - DNA, 120 bp, Artificial Sequence
  ENSG00000224718_4 (sequence is synthesized)
ctggtagcctcctttctcttaccaggaagcccacgcctctggctaaaccctcaggctcacttgcccaccattaccaggtgcctgtctcccttgcctgtcttcccttgactcggggaactt

SEQ ID NO: 990471 - DNA, 120 bp, Artificial Sequence
  ENSG00000224718_5 (sequence is synthesized)
cacctgctttccttccctagaaggccccagcgcccaccttgcttgctgtccttcaaatcaaacaacctgccctttcttctaaaaaggctttactgttatcactaaagggaaacaaaaagg

SEQ ID NO: 990472 - DNA, 120 bp, Artificial Sequence
  ENSG00000224718_6 (sequence is synthesized)
tgcaactaaaactagccttccttaagcctgggcccaagtcccaaccctgatgctaacttgcagtgctaccttcaataaggtgtccagcttctcaaagcctcaattctcttacctgtcaat

SEQ ID NO: 990473 - DNA, 120 bp, Artificial Sequence
  ENSG00000224718_7 (sequence is synthesized)
tgtcctaaaagagctttaagagtctctcctaccctacaaaattgttttattttagaaacaaaagaaacatcttgcaaaatcttcataagtacttatatcccgtatttctctccatactct

SEQ ID NO: 990474 - DNA, 120 bp, Artificial Sequence
  ENSG00000224718_8 (sequence is synthesized)
tctcatgcgtgatcggctgactcccaaacttcttgccaaagtgctcctttatcctgagatgttagtgcccctcaccaccaccaccagcctctgggttcccccgactccccctgtgctctc

SEQ ID NO: 990475 - DNA, 120 bp, Artificial Sequence
  ENSG00000224718_9 (sequence is synthesized)
aatctgcctgcattctttgggcatcatgttctggaagattgatagggctttaggtattcaggtagctcaatgagccattttcttcccaggtggctcattccttagggcataatccttcct

SEQ ID NO: 990476 - DNA, 120 bp, Artificial Sequence
  ENSG00000224718_10 (sequence is synthesized)
gtcctccttccctttttctcacataatccttgtttcagtcaacttaagctaagttcagcaatggtaacaaatgatcccaaatcttagtggcttacaatagccaagagctatttcttgctc

SEQ ID NO: 990477 - DNA, 120 bp, Artificial Sequence
  ENSG00000224718_11 (sequence is synthesized)
atattcatgtgcatggcaggttggcaaggcctgttccacatcctcttcatcccagaactgagaagtctcacctgatggaggaagaaccaatggcagagccatgtgatggatcctcaagct

SEQ ID NO: 990478 - DNA, 120 bp, Artificial Sequence
  ENSG00000224718_12 (sequence is synthesized)
tctgcttgaaccaagtccatgtcacttccatttacattgtatcagctaaagcaagtcacacaggccagcctgctgtcggtaggacaggaggtgacaggacaaaagcccagagacatgaga

SEQ ID NO: 990479 - DNA, 120 bp, Artificial Sequence
  ENSG00000224718_13 (sequence is synthesized)
taattagcctgagctaacgcagcaaatcagtggaagaggagggactagagcccaaatgtgttgaccttccagtgcagatacaacagaagggccaagaggagataggtctggattcaatcc

SEQ ID NO: 990480 - DNA, 120 bp, Artificial Sequence
  ENSG00000224718_14 (sequence is synthesized)
cagctccataattctaggcaaattctttcaactctgagccttggcttcccttctataatataggctaagagcacccacctcctgcagggaggttgggagagctggctgaaatttcataaa

SEQ ID NO: 990481 - DNA, 120 bp, Artificial Sequence
  ENSG00000280587_0 (sequence is synthesized)
aggttacgatctgccctcccgaggctggggagccaagactacttgcctttgttcccagctccctgcctgcgatgctggcagcaaaatctcagccccgcccggcagggcaggagctcaggg

SEQ ID NO: 990482 - DNA, 120 bp, Artificial Sequence
  ENSG00000280587_1 (sequence is synthesized)
ccgtgttgcaacgtgactaatggatgagaaggttgaggaggaaagccattacttcaccaatgtgaatcaaggtcattcgtcacctcgggaagcacacggagctgcgacgttcaggaggga

SEQ ID NO: 990483 - DNA, 120 bp, Artificial Sequence
  ENSG00000280587_2 (sequence is synthesized)
ggcacgctgctcccaagccaaaccacgatgcagcctggcaccagtcccatgcagcagggagaaggggagtttctggaagcgaggatgagctgggcagccaggcccagggccctggccgtg

SEQ ID NO: 990484 - DNA, 120 bp, Artificial Sequence
  ENSG00000280587_3 (sequence is synthesized)
catgcatcagcccctcctgagaaaaagagctcaaggactacatggggtcttacccacgagtggggcaacggtgcagtttccaggaggcgttggcaggagctgaccggccactgacgctgg

SEQ ID NO: 990485 - DNA, 120 bp, Artificial Sequence
  ENSG00000280587_4 (sequence is synthesized)
ccggggtccctaggggacagggactggagggtcagcggcctctgaccatccagcgtcatctgaggaaatcaggccaatcgtgagccaccagagtgtcctcaccgagacggcctctctccc

SEQ ID NO: 990486 - DNA, 120 bp, Artificial Sequence
  ENSG00000280587_5 (sequence is synthesized)
tagtataacaagccacatttgctgcctttctgggagagttagaagcaagccacgtgggtgacttcttttcaaagttctctgcctcagaggaggaagccccatgggtggaggccaggcccg

SEQ ID NO: 990487 - DNA, 120 bp, Artificial Sequence
  ENSG00000280587_6 (sequence is synthesized)
aggccatcctgctctgggccagagcgtgcctgtgtctgatgagcgaggacatgcctcgtctggctgagccttccatttcacaccggcagctcgaaccccccatcacggcttccttttggg

SEQ ID NO: 990488 - DNA, 120 bp, Artificial Sequence
  ENSG00000280587_7 (sequence is synthesized)
ctcccctcctcaggggaccgagcttgaaatgtgcttgcccttcatccctaaggcctgcgtcccttcctcagagaggactaagcccctctcccagtcttgatgttctccgaggcccttctt

SEQ ID NO: 990489 - DNA, 120 bp, Artificial Sequence
  ENSG00000280587_8 (sequence is synthesized)
attcacagaacctatctggcttatttattcgcttgcttgcttctgatgtcttctcttactgaaaggtaagttatgtgggagatggaatcatgccagctttggttcaccattacatcctcc

SEQ ID NO: 990490 - DNA, 77 bp, Artificial Sequence
  ENSG00000280587_9 (sequence is synthesized)
gatggaatcatgccagctttggttcaccattacatcctccacacttttctattctgatttatttatttattttagag

SEQ ID NO: 990491 - DNA, 120 bp, Artificial Sequence
  ENSG00000280587_10 (sequence is synthesized)
atcctcctgcttcagcctcctgagtaactaagactacaggtgtgcatcaccatgcttggctaatttaaaaaaattgttttaatacaacaattagctggacgtggtagtgtgaacctgcag

SEQ ID NO: 990492 - DNA, 120 bp, Artificial Sequence
  ENSG00000280587_11 (sequence is synthesized)
aggatcacttgagcccaggagattgagtctgcaatgagctgagatcgtaccactgcattccagcctggcaacagagtaagaccctgtctcaatttttttttttgtagacgtggggtctca

SEQ ID NO: 990493 - DNA, 120 bp, Artificial Sequence
  ENSG00000280587_12 (sequence is synthesized)
tttttttttttgtagacgtggggtctcactatattgcccaggttggtcttgaactcctggactcaagggattcctctgcctcagcctctagtgtcactgggattacaggtgtgagccact

SEQ ID NO: 990494 - DNA, 120 bp, Artificial Sequence
  ENSG00000280587_13 (sequence is synthesized)
ttttgtggagcctggcaccaggggaacccaatatctatcctttgaatgaatgaataaatgcaaggaaataaatgaagaggaggcgggggtcaggaggggcatgttttatatgagtagata

SEQ ID NO: 990495 - DNA, 120 bp, Artificial Sequence
  ENSG00000280587_14 (sequence is synthesized)
ccatgcaaaggtcctcctgggtgccatcgccagtgcggggcagcctgcgagccccttgagggaggtctccctgacacactgcccactcctcctggggccgagcaggagtcacatccaagg

SEQ ID NO: 990496 - DNA, 120 bp, Artificial Sequence
  ENSG00000280587_15 (sequence is synthesized)
gctgggtcattatctgataaatgagtgggttgtgcggatgagtaaacagggactgacccagaggtcaggtgtaactcagcctcagaaactgcgtgtgtcaataggaatcgaagggccaag

SEQ ID NO: 990497 - DNA, 120 bp, Artificial Sequence
  ENSG00000280587_16 (sequence is synthesized)
gaatgtgtttttcgttgatgtcaacttgctgcaaaggaccacacctgcttctcgacccaggaacgtgggaaagggaaaggcttggcttgttttggtggagatggagatgctggtaacagt

SEQ ID NO: 990498 - DNA, 120 bp, Artificial Sequence
  ENSG00000280587_17 (sequence is synthesized)
ggaggaatgccctccttctgattcacagtggggaggtgctctgggcccctgccactgcccgaggacttcaggtaagtcagcccgtggcccccagcccttccctgccagacgccctggcag

SEQ ID NO: 990499 - DNA, 120 bp, Artificial Sequence
  ENSG00000280587_18 (sequence is synthesized)
acggcttgttctgacaagtatgcgctttctggatggaacagcctcccttttgtccaaacccttcctttgaatttaaaatgcacaaagaacctttcgaagaggaaaagaatgggatcagga

SEQ ID NO: 990500 - DNA, 120 bp, Artificial Sequence
  ENSG00000280587_19 (sequence is synthesized)
agaggaggctgtatctcatttggacactcaagccctcagctcctgcccaagagtttctggaatttgctcccacatcacgtcatgacttttggctcccagccaggtgcggtggcatctgtg

SEQ ID NO: 990501 - DNA, 120 bp, Artificial Sequence
  ENSG00000280587_20 (sequence is synthesized)
gcttcatccttctgggaagtcagggtcatgttcccttgagtcttctccctttcctctccccagcttttggttgtcctgctgagaggatgcggcatttgagcagtagcttctggagcccag

SEQ ID NO: 990502 - DNA, 120 bp, Artificial Sequence
  ENSG00000280587_21 (sequence is synthesized)
agtgaagccccacccaggcaccctgacaggaccacaggaatgctcctggcacagcaagcaggactcttgagaagctcagcctccacgctccttgtagatgttcagttcaaactccacagt

SEQ ID NO: 990503 - DNA, 120 bp, Artificial Sequence
  ENSG00000280587_22 (sequence is synthesized)
ttgtgtgactcactgaagggcttggtttggctctcgctgacgagtctgtcatcggtgccaggtgacacgcttttcccctcctcccgtctagtcctctctcttgccccagggcttctggtg

SEQ ID NO: 990504 - DNA, 120 bp, Artificial Sequence
  ENSG00000280587_23 (sequence is synthesized)
gggaagtttaacctcctcttcataagcagtgggagggctactgtgctgccctctggcccaagctctggtattccctttgcagtggtgggtgctctcattcctttgcaatgtgccctgcag

SEQ ID NO: 990505 - DNA, 120 bp, Artificial Sequence
  ENSG00000280587_24 (sequence is synthesized)
tgtgaacccaggggatccatgagacagggaactcacgtctgttttcttcatttggtgtagcatgccattgggcgtttgccagacagggcctatcatgtgggccctacacctattcacaca

SEQ ID NO: 990506 - DNA, 120 bp, Artificial Sequence
  ENSG00000280587_25 (sequence is synthesized)
cctgccatttgccttcagaatcctgttcccagtgggtaatgggtttaaaagcccatagctgagtttatccacattggatccgacccacattccaatgctctttagacaaccgggtttcac

SEQ ID NO: 990507 - DNA, 76 bp, Artificial Sequence
  ENSG00000280587_26 (sequence is synthesized)
cgtgttatcgacctcacaaagtgcttggattacaggtgtgagctactgtgccaggccagaaaaaataaaataaaat

SEQ ID NO: 990508 - DNA, 120 bp, Artificial Sequence
  ENSG00000280580_0 (sequence is synthesized)
ttacctttgcccatgaagccataaaaatatataaatcccaagaatgacatttcttaacgaattatcaacattcacaacatttctatgaggttggctgtggctttccactgggctatggat

SEQ ID NO: 990509 - DNA, 120 bp, Artificial Sequence
  ENSG00000280580_1 (sequence is synthesized)
cagttctcagctctctcccagttactgaatgtggaaggcaaggtacttctatggaagggtgtgctctcacagatggagcaatgatttttctcttcaaactttttaaacatgtcttggctt

SEQ ID NO: 990510 - DNA, 120 bp, Artificial Sequence
  ENSG00000280580_2 (sequence is synthesized)
agttcttctgcttgattttccaaaagaacaagcttctttggataagatggaatatttgatccattccaaccaggcgcttgcatcttggtgtcctgtcttaattgccaaaggctgactgtt

SEQ ID NO: 990511 - DNA, 120 bp, Artificial Sequence
  ENSG00000269514_0 (sequence is synthesized)
gaggaatggggaaggagggtggaggaaggagcttgtaaatgagcagctggtttgcagcaaaaccgcacctcactctgcacctttggatccctctcagcctgaggttagcacagccaatgt

SEQ ID NO: 990512 - DNA, 120 bp, Artificial Sequence
  ENSG00000269514_1 (sequence is synthesized)
cctcaccagcgtctgccaaagcccatggagaaggccagcaggagcatatcactgtgacttacaacccttctctagtctgctacaatggaatcttaaacaagaaaattttatattttgact

SEQ ID NO: 990513 - DNA, 120 bp, Artificial Sequence
  ENSG00000269514_2 (sequence is synthesized)
tgcatcattgagaaaaacactgccaacctgatcgtggttcctttgaagagcatggaaggaagcaatgaaaaaagcctcactcctggttgcacacctgggattctgtacctgacggacacc

SEQ ID NO: 990514 - DNA, 120 bp, Artificial Sequence
  ENSG00000269514_3 (sequence is synthesized)
atccatccttttagatgatgcattgagtcctaactattcccttcccaagaaagttcaagccaggagatcaatctgcttgggatggaaagcttaaatcaagaataattagaaaccctgaac

SEQ ID NO: 990515 - DNA, 120 bp, Artificial Sequence
  ENSG00000269514_4 (sequence is synthesized)
agaacaataacaagcagcaagattgaaatggtaatacaaaagttaccaaggaaaaaaaagtccaggaccagatgtattcacggctaaattctatcagacattcaaagaattggtaacaat

SEQ ID NO: 990516 - DNA, 120 bp, Artificial Sequence
  ENSG00000269514_5 (sequence is synthesized)
ccaattgacattattccacaaggtagagaaagagggaatccttcctaaattattctatgaagccactatcaccctaataccaaaaccaggaaaggacatgacaaaaaagaaaactacaga

SEQ ID NO: 990517 - DNA, 66 bp, Artificial Sequence
  ENSG00000269514_6 (sequence is synthesized)
acacagatgcaaaaatgcatgatcgagtgggttgcatgccagggatgcagggatggtttaacatac

SEQ ID NO: 990518 - DNA, 68 bp, Artificial Sequence
  ENSG00000269514_7 (sequence is synthesized)
ggaagcatttgacaaaatccagcgtctctttatgattaaaaccttcagcaaaattggcataccaggga

SEQ ID NO: 990519 - DNA, 74 bp, Artificial Sequence
  ENSG00000269514_8 (sequence is synthesized)
aatagatgcagaagaagcatttgacaaaatccagcgtctctttatgattaaaaccttcagcaaaattggcatac

SEQ ID NO: 990520 - DNA, 120 bp, Artificial Sequence
  ENSG00000269514_9 (sequence is synthesized)
agaaaaccctaaaaactcatccagaaagctcctagaacttataaataaattcagcaaagttttaagatacaaaattaatgtatacaaatcagtagctctgctatacaccagcagcaacca

SEQ ID NO: 990521 - DNA, 120 bp, Artificial Sequence
  ENSG00000269514_10 (sequence is synthesized)
caaatcagtagctctgctatacaccagcagcaaccaaactgagaatcaaattaagaactcaaccccttttacaatagccacaaaacaaacaaacaaacttaggaatatacctaaccaagg

SEQ ID NO: 990522 - DNA, 120 bp, Artificial Sequence
  ENSG00000269514_11 (sequence is synthesized)
tgctgaaagaaatcatagacaccacaaacaaatggaaacacatctcatgctcacggatgggtaaaatcaattattgtgaaaatgaccattctgccaaaggcaatctacaaattcaatgca

SEQ ID NO: 990523 - DNA, 65 bp, Artificial Sequence
  ENSG00000269514_12 (sequence is synthesized)
ccatcaaaatatcaaagagcccaaatagccaaagcaagcctaagcaaaaagaacaaatctggagg

SEQ ID NO: 990524 - DNA, 120 bp, Artificial Sequence
  ENSG00000269514_13 (sequence is synthesized)
tactataaggctatagtcaccaaaacagtatggtactggtataaaaataggcacatcaaccaatagaacagaatagagaatccagaaataaacccaaatacatacagccaactgatcgtt

SEQ ID NO: 990525 - DNA, 120 bp, Artificial Sequence
  ENSG00000269514_14 (sequence is synthesized)
caaccaatagaacagaatagagaatccagaaataaacccaaatacatacagccaactgatcgttgacaaagcaaacaaaaacataaaatggggaaaggacactcttttcaacaaatggtg

SEQ ID NO: 990526 - DNA, 120 bp, Artificial Sequence
  ENSG00000269514_15 (sequence is synthesized)
cttatacaaaaatcaactcaagatgaatgaaggacttaaatctaagacctgaaactataaaagttctagcagataacattggacaaacactcctagagattggtttaggcaaatacttca

SEQ ID NO: 990527 - DNA, 74 bp, Artificial Sequence
  ENSG00000269514_16 (sequence is synthesized)
caaaagcaaatgcaacaaaaacaaagatgaatagctcagacttactaaagagcttttccacagcaaaaggaaga

SEQ ID NO: 990528 - DNA, 77 bp, Artificial Sequence
  ENSG00000269514_17 (sequence is synthesized)
gcaaattagcaggaaaaaatcaaacagtcccataaaaaagttggcttaaaagaagatatacaaatggccaaaaaata

SEQ ID NO: 990529 - DNA, 120 bp, Artificial Sequence
  ENSG00000269514_18 (sequence is synthesized)
aatcaaacagtcccataaaaaagttggcttaaaagaagatatacaaatggccaaaaaatatgaaaaactgctcaacatcaccaatgatcagaaaaatgcaaatcaaaaccacagtgtgat

SEQ ID NO: 990530 - DNA, 120 bp, Artificial Sequence
  ENSG00000269514_19 (sequence is synthesized)
cctcggaaatatggcgacagcttcagctttcagtgtgagggagccgagggcccagccaaaccctgcgggaggcaattcctgggtacccttcccatattttcggtctttgggctgcgccgt

SEQ ID NO: 990531 - DNA, 120 bp, Artificial Sequence
  ENSG00000269514_20 (sequence is synthesized)
ggtaacctcagagcctggttgcgtgctcaccagcgacaagtgtctttcattgggacatgaaaggggactgggaagtgccgtgcagtttcagggtggtttctggttaattacattttcatg

SEQ ID NO: 990532 - DNA, 120 bp, Artificial Sequence
  ENSG00000269514_21 (sequence is synthesized)
ggttttcgcagagtctgggggcaatttgtgtcctccagagaccagggaccagggccgaagctacggcaggggagacgcggccagggccgtggcttctagtgcgagctcggttcgcgtccg

SEQ ID NO: 990533 - DNA, 120 bp, Artificial Sequence
  ENSG00000269514_22 (sequence is synthesized)
ttcccgtctggcgcccgggcctccgggagcccagggccttgaatgagacagtgctcgtccttgaaaaagcagttctaggtcactcggcctgctttgccagcattccgggccccagctcac

SEQ ID NO: 990534 - DNA, 120 bp, Artificial Sequence
  ENSG00000269514_23 (sequence is synthesized)
cttccgccatccatgttgacaacaccagttctacgacgaagcgggcgattcctcttgcctggaatttcactcgtccccggtatcgaacccccgccccaattttctacgttacaactccag

SEQ ID NO: 990535 - DNA, 120 bp, Artificial Sequence
  ENSG00000269514_24 (sequence is synthesized)
cgtatttttaacggcgcagccagtatcacctccttggtataaagcctgcgctgtcctggaccttcttaggagtgcaggcttaggaacaggagctatgctgttctattatttttctttagt

SEQ ID NO: 990536 - DNA, 88 bp, Artificial Sequence
  ENSG00000269514_25 (sequence is synthesized)
taggaacaggagctatgctgttctattatttttctttagtttaattttttttttttagagatgggatctcgctgatagcttactgcag

SEQ ID NO: 990537 - DNA, 120 bp, Artificial Sequence
  ENSG00000269514_26 (sequence is synthesized)
tatgggattataggcgcaggcctctatgccattgtaaatgctgtggattttgagtatttgacctctatgagcctcagtttttgcatctcaacattgagataatactagtacctcataagg

SEQ ID NO: 990538 - DNA, 120 bp, Artificial Sequence
  ENSG00000269514_27 (sequence is synthesized)
ttatgtgacgattaaatggaaagctcttacaatataagtgcttaataagtatgttatcatatgtgcttccaaagtactttgtgtaggccttttataacgcttgccctttctattaccatt

SEQ ID NO: 990539 - DNA, 120 bp, Artificial Sequence
  ENSG00000269514_28 (sequence is synthesized)
atttgttcttgcctgccctactagactgagattctcaaaagctggaactgtcttgtttataatctcagcgtctgtcagtgctgggcaaatgtaaagctaagaaatgatttcttagaaaac

SEQ ID NO: 990540 - DNA, 120 bp, Artificial Sequence
  ENSG00000269514_29 (sequence is synthesized)
tttttaaaagcagtctttcttctcctttccctttcttcctttccttcactttttcctctttgagataggaattttcaaacctagagaagaagctgagaccctagggggaaagattgggac

SEQ ID NO: 990541 - DNA, 120 bp, Artificial Sequence
  ENSG00000269514_30 (sequence is synthesized)
ctttttgttgttgttctcagtggtgaccaaaagagccttaacattcacctcagcctgacaactttagacaggtttcttctggatgttagggccctgacctcccctttctttgagtgttta

SEQ ID NO: 990542 - DNA, 120 bp, Artificial Sequence
  ENSG00000269514_31 (sequence is synthesized)
ctttagaaaacttgtgattgcaaaattcttctctgctcctttgaaatgtgtataaatctccttagaagcttatgccagttttacgacctagggaatgtctttctcaaggacctgtgagcc

SEQ ID NO: 990543 - DNA, 120 bp, Artificial Sequence
  ENSG00000269514_32 (sequence is synthesized)
atccctttgaaatgtaatcatcaaggaagatagcacccctatctctcagtctctgtgggagggtgggagcctaacctcctgtgggtgccttgtttggaattgtaaaactacagcttgttt

SEQ ID NO: 990544 - DNA, 120 bp, Artificial Sequence
  ENSG00000269514_33 (sequence is synthesized)
tgaagatacaagaaagtgtccttttcctttgcagttagcaaacacagatgtcatgtgatttcccgtacagcagctcttaaaaacttcccagacccttgtttgagtagtgttgagtttaat

SEQ ID NO: 990545 - DNA, 120 bp, Artificial Sequence
  ENSG00000269514_34 (sequence is synthesized)
gatgcaaattttgacaatggaaattttaggttctgcatttatcgtttcttcccaattacagtggtttctcctttctccttgttaagaagagcttctcacatcctctgatttctggagaaa

SEQ ID NO: 990546 - DNA, 86 bp, Artificial Sequence
  ENSG00000269514_35 (sequence is synthesized)
gttaagaagagcttctcacatcctctgatttctggagaaatcaatttggactcaaaagattggagttttgtggagtgaagctacct

SEQ ID NO: 990547 - DNA, 75 bp, Artificial Sequence
  ENSG00000269514_36 (sequence is synthesized)
ttgagctaatcacaggtgtgagccaccacgtgctgccagaagctactgttttaagtcatcattgcaaagggtagt

SEQ ID NO: 990548 - DNA, 120 bp, Artificial Sequence
  ENSG00000269514_37 (sequence is synthesized)
ccagaagctactgttttaagtcatcattgcaaagggtagtgtgtgatgcgcaggagtggaaagggcagtacatctatttgagagcatcccaaatgaggtccattcatattatggaagtgc

SEQ ID NO: 990549 - DNA, 120 bp, Artificial Sequence
  ENSG00000269514_38 (sequence is synthesized)
actgcgaaataaagaacaggcctacccccttgttttattatgaaggggtatgagaaaaatgcaattttcaaagaaagagaactgctgaggatgtagtaccttctcaaagaaagctgtgtt

SEQ ID NO: 990550 - DNA, 120 bp, Artificial Sequence
  ENSG00000269514_39 (sequence is synthesized)
tggttaaggtgagaagctagaggaagccacagagggcagggttacaaattgaaagacttctgcaatggtagaggtagtatgcagaagggttccttaaaatacagggatccatgtaagatg

SEQ ID NO: 990551 - DNA, 120 bp, Artificial Sequence
  ENSG00000269514_40 (sequence is synthesized)
aggaggtaaggtggagtaggattgaggtggaatgaaatgaaagatggaagagaaaaaggaaggcagtagggggagaggggagttaatttggggtatggataacagggaaggaaataggta

SEQ ID NO: 990552 - DNA, 120 bp, Artificial Sequence
  ENSG00000269514_41 (sequence is synthesized)
acctgagaagcttggtagaggcacttgccacttgcatgggaagggaaatatcatgcagacggtcctgttgctaaaggaagctagaggatttaggagaaggggtttggcacactggcctct

SEQ ID NO: 990553 - DNA, 120 bp, Artificial Sequence
  ENSG00000269514_42 (sequence is synthesized)
atcacccatccgtccccgacaacacacaacacagacaaattgagtgcactgttgacatttagtatcattctccccccatgactggtggaagctaagaagatgaagttcagggtgctgatc

SEQ ID NO: 990554 - DNA, 120 bp, Artificial Sequence
  ENSG00000269514_43 (sequence is synthesized)
aagatgaagttcagggtgctgatcttttttttttctttaactgacttttcttatgtgagtacttacccctagttccctctttcttcccttcccttccctccctccctccttccctccctt

SEQ ID NO: 990555 - DNA, 120 bp, Artificial Sequence
  ENSG00000269514_44 (sequence is synthesized)
cttcttcttcattttttttttttttaatgagacaaggtcttgctgcgttgctcaggctggagtgcagcagtgctatcattgctcgtgcagccttaacctcccaggctcaagcaatcctcc

SEQ ID NO: 990556 - DNA, 120 bp, Artificial Sequence
  ENSG00000269514_45 (sequence is synthesized)
gactacaggcatgtgccaccacacccagttcattttttaaattttttgtagagatgggtctccctatgttgcccaggcaggtctcaaactccatcctcagcctcccaaagtgctgagatt

SEQ ID NO: 990557 - DNA, 120 bp, Artificial Sequence
  ENSG00000269514_46 (sequence is synthesized)
agtgctgagattacagtcatgagccactgcgcccagccctttttttcttgcttctttacctacttttcacaggaattgggtagatgagggtagacccaggaagtgagagtggaatttgag

SEQ ID NO: 990558 - DNA, 120 bp, Artificial Sequence
  ENSG00000269514_47 (sequence is synthesized)
aaagaaaaacagtaaaatgaagagctgaaaaataaaagagtttatttctaaatgtatgtacgaaactcaggttgggggactagcatgtaaaggtatatacaaataaaatggagttaagtg

SEQ ID NO: 990559 - DNA, 120 bp, Artificial Sequence
  ENSG00000269514_48 (sequence is synthesized)
gggtagtttgcaagtgcgtcgcggagccggcctcggaaatatggcgacagcttcagctttcagtgtgagggagccgagggcccagccaaaccctgcgggaggcaattcctggaatttata

SEQ ID NO: 990560 - DNA, 89 bp, Artificial Sequence
  ENSG00000269514_49 (sequence is synthesized)
cccagccaaaccctgcgggaggcaattcctggaatttatagagacaggtactcactatgtcacctgtgctggtcttgaacttctggctt

SEQ ID NO: 990561 - DNA, 67 bp, Artificial Sequence
  ENSG00000269514_50 (sequence is synthesized)
gctatggaaaacagcatggagattccttaaagaactaatagtagaactgccatttgatccagcaatc

SEQ ID NO: 990562 - DNA, 120 bp, Artificial Sequence
  ENSG00000269514_51 (sequence is synthesized)
attcgtaatttcaagaatatggaaccagcccaaaggtccctcattcaatgagtggatgaagaagttgtgagatatatatacatatatatacgtatatatatatgtatatatatgtgtata

SEQ ID NO: 990563 - DNA, 120 bp, Artificial Sequence
  ENSG00000269514_52 (sequence is synthesized)
catatacatatatatatatatatatataaaatggaatactactcagtcataaaaaggattgaattaatggcattcatagcaacctggatggaactggagactattattctaagtaaagta

SEQ ID NO: 990564 - DNA, 65 bp, Artificial Sequence
  ENSG00000269514_53 (sequence is synthesized)
agggtactcagaggaaagagtgggtgggggtgaggtataaaagactacaaataagtgcagtgtat

SEQ ID NO: 990565 - DNA, 120 bp, Artificial Sequence
  ENSG00000269514_54 (sequence is synthesized)
gggggtgaggtataaaagactacaaataagtgcagtgtatcctgctcaggtgatgagtgcatcaaaatctcacaaatcactactaaagaacttactcatgtaaccaagtaccacctgttc

SEQ ID NO: 990566 - DNA, 120 bp, Artificial Sequence
  ENSG00000262434_0 (sequence is synthesized)
agtgagccggtcaatcagcgctggggctgtagtggcacaggaggtgggaggtgggcaggccaacacggaggaggcctcctatgggaagctgaggagtttggcattttatcagaagacagt

SEQ ID NO: 990567 - DNA, 120 bp, Artificial Sequence
  ENSG00000262434_1 (sequence is synthesized)
atcatgccattgagggatcttaagcaaagcagtgacagaatcagatctatagtttcatcaagacccattgggcttcaacgttcagtctgcaccggagcagggaacactctagagatgagg

SEQ ID NO: 990568 - DNA, 120 bp, Artificial Sequence
  ENSG00000262434_2 (sequence is synthesized)
ggaaaccagagataggcccaggcgtgtgagaggagcggccgaggctgacccctctgcctggaggggagaagggaaaggggaaaggcgagactcctcccgtcatcctcatgtcctggatac

SEQ ID NO: 990569 - DNA, 120 bp, Artificial Sequence
  ENSG00000262434_3 (sequence is synthesized)
tgggcaccacaccaagtatttcctaccttctttccctatttcttacaccccagccatcagtatcaatgtgaaaaccacaatgcttggattatttagatttatttccaaatcccacaacag

SEQ ID NO: 990570 - DNA, 120 bp, Artificial Sequence
  ENSG00000281189_0 (sequence is synthesized)
agccaccgcaaggtaccagagagccgcccaatctgcgctggcctcctttatctgtttgctgtgtgaccctccggacagctctgtgggacctggaggaaactgtgagccctacagataaag

SEQ ID NO: 990571 - DNA, 120 bp, Artificial Sequence
  ENSG00000281189_1 (sequence is synthesized)
tctgtgcttccagcgtcggtaaatcccagcaagcgccactacctggaggctgacactttcccatcttggcagtcagctccctacagaggtgcttctcccactgcccaagatccctgcctc

SEQ ID NO: 990572 - DNA, 120 bp, Artificial Sequence
  ENSG00000281189_2 (sequence is synthesized)
ctccttaaaccccaactgatagaacagaaaccaccacctaaggaacgtgaaggggaagcatctgaaacaccagaagatcttggattgttcctgaggacttcagaatctacagggacaaaa

SEQ ID NO: 990573 - DNA, 120 bp, Artificial Sequence
  ENSG00000281189_3 (sequence is synthesized)
ggcagaagcaggaagtccgaagtaaagatgactaagaaaaggcgggtggaaaagatttctgtgaaagtgtcagaggcaaagctctgaaagacctgaaactcatgccgaaagcaaagaaca

SEQ ID NO: 990574 - DNA, 120 bp, Artificial Sequence
  ENSG00000281189_4 (sequence is synthesized)
gcaaaaagacagtagggatgtgtctggagcaacaaggatcgggctgttcctggggcagccgaattcacagctctgttttactcctaatggaggatcttcctgctgcagcggcgagtagac

SEQ ID NO: 990575 - DNA, 120 bp, Artificial Sequence
  ENSG00000281189_5 (sequence is synthesized)
cttactgtaaaggtgcaggcaaggggaggggaagggcaggcagctgcccattggagttcacatctccaagcctgagaaaatgtgttcctggatgccccaagccaatggaaaagcagaatc

SEQ ID NO: 990576 - DNA, 120 bp, Artificial Sequence
  ENSG00000281189_6 (sequence is synthesized)
attgactatgtttgactccttctggtacctagcacagtatctgggacacagcaggtgctatgtaaatgtgttgagtgaatgaatgaatgaatgccattgaggagaatgaataaccccaga

SEQ ID NO: 990577 - DNA, 120 bp, Artificial Sequence
  ENSG00000281189_7 (sequence is synthesized)
tagaatggattattttaagaacaaagcaggtaaacattggcagccaacttgaaattaataagaaaaaggtgtgcgccagaatagttttatttccttttgtttttcattgtacagcttgat

SEQ ID NO: 990578 - DNA, 120 bp, Artificial Sequence
  ENSG00000281189_8 (sequence is synthesized)
ttgactaagttgtttatacctttcactctgcctttgcatgcactgggggtgatctagtctactatgtggactggaagtccacccagtggccaggctcagaggcagggaaggggggttggt

SEQ ID NO: 990579 - DNA, 120 bp, Artificial Sequence
  ENSG00000281189_9 (sequence is synthesized)
gccattctgggagaggaggtttctggggctgtttctcagccagatcctgtctcatctgtttccaacaaccccacaaatgaagacactgaagctgactaatcaaattgactgatgccccaa

SEQ ID NO: 990580 - DNA, 120 bp, Artificial Sequence
  ENSG00000281189_10 (sequence is synthesized)
taggtgtcatgatatgcagtgagaatccggcaggcattagagatgaacagcacgggctgcagccacattatctcagcttgagtcctagttttcaccagctactagctagctatctctggt

SEQ ID NO: 990581 - DNA, 120 bp, Artificial Sequence
  ENSG00000281189_11 (sequence is synthesized)
caagtcacttaccttgcttgagcctcagtttctccatctagaaaatggtcataatcgaagtatctatcttatagggtgttgggaagattaactgagaagccacatagagtttactggcac

SEQ ID NO: 990582 - DNA, 120 bp, Artificial Sequence
  ENSG00000281189_12 (sequence is synthesized)
agattaactgagaagccacatagagtttactggcacattaaaaaaagaaactataagaatgttagctgtccttttgcacggcaaaaggaacagtaagcagagtaaacagacaacccacag

SEQ ID NO: 990583 - DNA, 120 bp, Artificial Sequence
  ENSG00000281189_13 (sequence is synthesized)
tcttcccaatctatacatccgacaaaggactaacatccagaatctacgaggaactcaaattagcaagaaaaaaacaatcccatcaaaaactggcctaaggacatgaatagacaattctca

SEQ ID NO: 990584 - DNA, 63 bp, Artificial Sequence
  ENSG00000281189_14 (sequence is synthesized)
tggccaacaaacatatgaaaaagattactcctgcaagaatggccataataaaaaaaaaatcaa

SEQ ID NO: 990585 - DNA, 120 bp, Artificial Sequence
  ENSG00000281183_0 (sequence is synthesized)
ttcctgtgaagggggaagctgctgatggagacttgtatctgcagtacttcaggttcccagctggctccccatccccaccctataacatgaccggcgtacagaaattaattggccgactgt

SEQ ID NO: 990586 - DNA, 120 bp, Artificial Sequence
  ENSG00000281183_1 (sequence is synthesized)
taccaccactagtctgtccctggctagactagacagatgggtgtgcccctgggctcagtggtagcctacccggggtgatggtggggttgccagctgtagtccagctgttctggggcctgt

SEQ ID NO: 990587 - DNA, 120 bp, Artificial Sequence
  ENSG00000281183_2 (sequence is synthesized)
gtttgtgcacctgtggtgctgtatcctgccccacagagctggctgtccagtggagaatacaaagtgacatctggtgctccctcagaaagaatgtggccccagaggcatgccagtggcttt

SEQ ID NO: 990588 - DNA, 120 bp, Artificial Sequence
  ENSG00000281183_3 (sequence is synthesized)
agactctctgggaggacatgtttgagagcaacagccccttccccatcttttcctttcttctcagcagttataaatctctctgcctgcagtaagtagagtgagtggctggtgaggaggttt

SEQ ID NO: 990589 - DNA, 120 bp, Artificial Sequence
  ENSG00000281183_4 (sequence is synthesized)
gttgatgacactgacaatatctggtgactccctccagatgtgcactcagcagtgagctgggcagaggcgtgggaaggacgttggctgggagcagacggcctctgcaaatgaatctctagt

SEQ ID NO: 990590 - DNA, 120 bp, Artificial Sequence
  ENSG00000281183_5 (sequence is synthesized)
ttcctgcaacctgggagtgtccccatgagttttactttcctactttatgaagtgaacctgctttctttgggatttcatgtactcctaatgctttttctctccaggtatttctttcctgct

SEQ ID NO: 990591 - DNA, 120 bp, Artificial Sequence
  ENSG00000281183_6 (sequence is synthesized)
acatattaggactcccaaggcaagagtgcacctttatttagacctgggagtaaagggaaagagttgcctgtctttcgtgtgttttcagctttggctctgtgggatcagttatgcctcatt

SEQ ID NO: 990592 - DNA, 120 bp, Artificial Sequence
  ENSG00000281183_7 (sequence is synthesized)
cctgaaaagggcctttttatccccccagaatgcttttgctttgccaataccaccttcctcagcctgccttttggaaaggttgagaagctaaaaagtcaggtaagagaaggcagagatgga

SEQ ID NO: 990593 - DNA, 120 bp, Artificial Sequence
  ENSG00000281183_8 (sequence is synthesized)
cttcagaacctgatttttaaattttaaggcaaggctggctgccactggtgagagtgatgcagcagcctagcgtgttcccagcagaggtctagtctttgccctaagaagtcaccgcgctta

SEQ ID NO: 990594 - DNA, 120 bp, Artificial Sequence
  ENSG00000281183_9 (sequence is synthesized)
ggttgctatcacagtgcatgtggtaggttagatttgagaaatggttaggattgttctgttggataagtgcagacacctgcccagggaagcagctctttttttgtaagagttttcttggtt

SEQ ID NO: 990595 - DNA, 120 bp, Artificial Sequence
  ENSG00000281183_10 (sequence is synthesized)
actgaaatcaaatgggggaccagtttgttataggagacatctgtggccagcaaatctgaacagcttcctagagggaaagtacctcttttaaactaagttattatagacagtgaatgaatc

SEQ ID NO: 990596 - DNA, 120 bp, Artificial Sequence
  ENSG00000281183_11 (sequence is synthesized)
ctacccttaaaagagatgacggcagggtaagtgcaaagtaaaacctccttgctctagtctcttgggagagtattgtaatgaaagcagcgtttacttcgttgttgttgcattggggtgaaa

SEQ ID NO: 990597 - DNA, 120 bp, Artificial Sequence
  ENSG00000281183_12 (sequence is synthesized)
aatctgagatgctggaatgatggcaatgtttgccttctctccttcccttcctgacagccagtgtgggccaggctccactctccatcttcacaccctgcccttgctccagtatttccattc

SEQ ID NO: 990598 - DNA, 120 bp, Artificial Sequence
  ENSG00000281183_13 (sequence is synthesized)
tgtttttctcctctgtctctttctgtctttctctcaaactccatcctgcttccacccctgcccgcttttcttctcctttcctggaagtaatcattaaacaaaagaaaaagttgaatgttc

SEQ ID NO: 990599 - DNA, 120 bp, Artificial Sequence
  ENSG00000281183_14 (sequence is synthesized)
tttggtgagtttccttcttctctgccttttccttctttagccagttcccctcaacccctgtgcactccataggaaggacaaacttacctgtctgcttccttcccatgtgcttctccccaa

SEQ ID NO: 990600 - DNA, 120 bp, Artificial Sequence
  ENSG00000281183_15 (sequence is synthesized)
attttcatatagatatatacgtacactccttttggaataaacgaagaggtacattatatttgacacaaacttgggagtgttaagaggtcataagtgtttacctatcagataaccatctgt

SEQ ID NO: 990601 - DNA, 120 bp, Artificial Sequence
  ENSG00000281183_16 (sequence is synthesized)
ggctctgtgttggattttttttataccattaggaaaatgggaatttttttataggcctgccatacttctactttgccaaatagcactttattatcaagatacacccatggctcatttcag

SEQ ID NO: 990602 - DNA, 120 bp, Artificial Sequence
  ENSG00000281183_17 (sequence is synthesized)
actcactgaactttttttatatgaatgcacagtcgtcatattttgggcagtctgtgagttcttggtaactcatccccttactacaaaagcactaagtgaacaatacaaaagtataaaagc

SEQ ID NO: 990603 - DNA, 120 bp, Artificial Sequence
  ENSG00000281183_18 (sequence is synthesized)
acaaatttgaacttacatagtttagtttaagtatgtttcactagaaaatcaaatatttagatttctcacattgaaaatgcttaggattgaggtttagctgcttcctttaaaaaaaaaaaa

SEQ ID NO: 990604 - DNA, 120 bp, Artificial Sequence; identical to SEQ ID NO: 962524
  ENSG00000281181_0 (sequence is synthesized)

SEQ ID NO: 990605 - DNA, 120 bp, Artificial Sequence; identical to SEQ ID NO: 962525
  ENSG00000281181_1 (sequence is synthesized)

SEQ ID NO: 990606 - DNA, 120 bp, Artificial Sequence; identical to SEQ ID NO: 878226
  ENSG00000281181_2 (sequence is synthesized)

SEQ ID NO: 990607 - DNA, 87 bp, Artificial Sequence; identical to SEQ ID NO: 878227
  ENSG00000281181_3 (sequence is synthesized)

SEQ ID NO: 990608 - DNA, 120 bp, Artificial Sequence; identical to SEQ ID NO: 878228
  ENSG00000281181_4 (sequence is synthesized)

SEQ ID NO: 990609 - DNA, 120 bp, Artificial Sequence; identical to SEQ ID NO: 878229
  ENSG00000281181_5 (sequence is synthesized)

SEQ ID NO: 990610 - DNA, 71 bp, Artificial Sequence; identical to SEQ ID NO: 878230
  ENSG00000281181_6 (sequence is synthesized)

SEQ ID NO: 990611 - DNA, 120 bp, Artificial Sequence
  ENSG00000281186_0 (sequence is synthesized)
attcacccaacaacatttttgatgcatgatgcatatggtgctaaatgctgggaatgcaaacctgagtaagtgtctatttcaaatcaataggagtacttgaagattctccctgcttacaat

SEQ ID NO: 990612 - DNA, 120 bp, Artificial Sequence
  ENSG00000281186_1 (sequence is synthesized)
gtaaacatcatgaagaaagagatgtgttggacttgttcatcgctatatttcctggctcagatcctggcactgagtagacatcaagaaatatttaaatgaatgaaagaatgaatgaatgaa

SEQ ID NO: 990613 - DNA, 120 bp, Artificial Sequence
  ENSG00000281186_2 (sequence is synthesized)
cactgtatttccatcatcgcttttaatgagacttctttgcaaatatgtatggtatcttttaaaatacctgataaccagccagcaggggtggtcagctgctacactggtagccacaaacag

SEQ ID NO: 990614 - DNA, 120 bp, Artificial Sequence
  ENSG00000281186_3 (sequence is synthesized)
aatccaagacacagaacttcatacggtgtcacagcttcattttccaggctacagctcccactgcccacatcagaaccatctgcaggtccataagctgtgagtttctttgggagttggggg

SEQ ID NO: 990615 - DNA, 120 bp, Artificial Sequence
  ENSG00000281186_4 (sequence is synthesized)
agtgtcttttggatgtttataacttatgcatcttaatattgaatgtgcacttaatacatggaacttcatagtacttgattttttatgcaaaaatgacttaattaaaatttcttgaagaaa

SEQ ID NO: 990616 - DNA, 120 bp, Artificial Sequence
  ENSG00000273119_0 (sequence is synthesized)
aaataggtgctctgagaggttaaataacttttcttaaggttaatcagttaagtgatgaagctggaatttgaatccaattatgtctgactgccaaattgattccttttttgctatgccatg

SEQ ID NO: 990617 - DNA, 120 bp, Artificial Sequence
  ENSG00000273119_1 (sequence is synthesized)
ctgcctttaattcatagtgattgttacttcaaaatcaatcttgctgcagtatatatggactggactagctccgtcatgctctttcagcttgctatttacccgtattactttcactaggta

SEQ ID NO: 990618 - DNA, 120 bp, Artificial Sequence
  ENSG00000273119_2 (sequence is synthesized)
gttggaaacctaagcaatccaagaaatcgctgtccctacagaagttaaacaataggatactttctctcctgctttaataaatggttgttatcttgctctgaagataattgaagcagtgga

SEQ ID NO: 990619 - DNA, 120 bp, Artificial Sequence
  ENSG00000273119_3 (sequence is synthesized)
catctcatatccttttctacttattgggctagagtcagagtcaccctgactctgacttattttttaattgataagctcttcaagtcagagagaacttggtgcaactccaggctctcctaa

SEQ ID NO: 990620 - DNA, 120 bp, Artificial Sequence
  ENSG00000273119_4 (sequence is synthesized)
ttatttatggaaataaataaatatggacaagtccattactaagtctgtaaaatcgagaaaatatgataaaccatgcatgattatattgagtatttaataaaggatctttggtaccaggca

SEQ ID NO: 990621 - DNA, 120 bp, Artificial Sequence
  ENSG00000228718_0 (sequence is synthesized)
attgtgtattcgtgcagcagaaacacaccagatagaaaaagctgggagcaaaacgacctaacaaggggcagaaacatcaaggggcatgacaatgccacaagacctgagacagaatttcca

SEQ ID NO: 990622 - DNA, 120 bp, Artificial Sequence
  ENSG00000228718_1 (sequence is synthesized)
gagtgactttacattctgaagatccacccaggctcaggggactcctcagctctacttatggaagtgaaaactcacccttggagctgcccaggaagcaaatgcagtggctttttccccctg

SEQ ID NO: 990623 - DNA, 120 bp, Artificial Sequence
  ENSG00000228718_2 (sequence is synthesized)
gaaaatcgacccatgttgaagtttgccatacaatgagtatagcagcatgctgccattcatttaattaaaaatagcaaaaatgcaccgggctctcaatcatctatgttcccaacaagaaac

SEQ ID NO: 990624 - DNA, 120 bp, Artificial Sequence
  ENSG00000228718_3 (sequence is synthesized)
tgcgctgagacaatcttcaaaatggcacatccctcaccgccgagattatctctattcctgaacatgaatggcaaagaaaagaagccaaggccagaaggaaaagggaaacccttcagacca

SEQ ID NO: 990625 - DNA, 120 bp, Artificial Sequence
  ENSG00000228718_4 (sequence is synthesized)
agatggaagtggcaaggatcccgctcacccgaggagagttggcctggagagctgcctgacccagcctttaatgagcaagagaggccatcctgatgagtacgaggtggtagagctgcctgc

SEQ ID NO: 990626 - DNA, 120 bp, Artificial Sequence
  ENSG00000228718_5 (sequence is synthesized)
tttttgattaatgtgacgatcacaccctctgcctgggagttttacagactggtgatgactttttgtggcatctcaggaaagaacataacttcgtggacgtccttagtcagaatctactca

SEQ ID NO: 990627 - DNA, 120 bp, Artificial Sequence
  ENSG00000228718_6 (sequence is synthesized)
gtgtatctactcagtataggctcacatgagccctcaccttcccagggagtcacaacctctactatacttcttctttctgctctgccccccacaaacggccctgccagccctcaccaccta

SEQ ID NO: 990628 - DNA, 120 bp, Artificial Sequence
  ENSG00000228718_7 (sequence is synthesized)
gagggagattgggagccggtagaggaaagacaccctgaatccccgaggtcaagcaaagccctggggaggcgccgtgggatccctgcctcgggcctgcctagacagtatgtgaatgagtat

SEQ ID NO: 990629 - DNA, 120 bp, Artificial Sequence
  ENSG00000228718_8 (sequence is synthesized)
cccagagattctccccgctgtgacctcgagggccagcctgcctgtgtggccgtgagctgctttcttcccagaggaacttgcttgcggcagcaggactccacagcctcaggggcagcttgg

SEQ ID NO: 990630 - DNA, 120 bp, Artificial Sequence
  ENSG00000228718_9 (sequence is synthesized)
gggggcggggaatctgctgaggaacggcgctttataaatcaaaagataataataacagagcttacggtgagcaccggaggctggaaacggggtggcatccgctcggggcggggcggcgtc

SEQ ID NO: 990631 - DNA, 120 bp, Artificial Sequence
  ENSG00000228718_10 (sequence is synthesized)
gccagcgaatgacaacactgccccctggtggccgatgcggccaggcccgagagagcgcaggccgggtgcgagccaggcttcctcaccacgcggcttccccactcatcccatagaaaccgt

SEQ ID NO: 990632 - DNA, 120 bp, Artificial Sequence
  ENSG00000228718_11 (sequence is synthesized)
aactgagcaaatgacggattactacacttagcaggatgtcccccaggctcatgcacgttgtagcgtgtcagggtttccctccctgttaagaggccatcctgatgagtacgaggtggtaga

SEQ ID NO: 990633 - DNA, 120 bp, Artificial Sequence
  ENSG00000228718_12 (sequence is synthesized)
ctagagagatgacatgccaaaaacggaaacctcacaggagctttttgtccacctgcaagcgaggtgcagacacgtttgagatggtggatggacttttttttttctcttttctctctttcc

SEQ ID NO: 990634 - DNA, 120 bp, Artificial Sequence
  ENSG00000228718_13 (sequence is synthesized)
aaaatctggacacaccatggcccagtgatggagaagaagtcgaggacctgtcaaggatcttctttcttaggagtggcggagggctgaccagtctcaataaagcacagggggagcccctgt

SEQ ID NO: 990635 - DNA, 120 bp, Artificial Sequence
  ENSG00000228719_0 (sequence is synthesized)
gccggggtggggagaatgtgctggattacccacccacgagccaggagtcggggtgggaggaatcagccttcctccaggacggcgcagcccaccgggcgcctgctaagtgcccagcactga

SEQ ID NO: 990636 - DNA, 120 bp, Artificial Sequence
  ENSG00000228719_1 (sequence is synthesized)
aaaagaaatctacctatgccacgatgcggagcatactaataagcccagggaagaagagtcagacccagtgccagcgcaggggaaacgcatctaatccagaacagcagacacagctcctct

SEQ ID NO: 990637 - DNA, 120 bp, Artificial Sequence
  ENSG00000228719_2 (sequence is synthesized)
cccatggaacacccagagcagacattgccagtcgatcccagcaccctttccccgggagcctgggctcagcctcaagactttgcttccgcttcacaaagctctgcacagccagttctcatc

SEQ ID NO: 990638 - DNA, 120 bp, Artificial Sequence
  ENSG00000231201_0 (sequence is synthesized)
actgaactcccaatctgcttcaagatctgtcttaggattggtgaattatgttcatttttaaaaagggatgtgatagacaacatctagagaaacaggcaaggagtatatatctgaaaagga

SEQ ID NO: 990639 - DNA, 120 bp, Artificial Sequence
  ENSG00000231201_1 (sequence is synthesized)
caaggcgctttgaaactgacagctcatcaacaggttcatggatgaacctggaaatatttataaatattgattccagatttcagagacggggtttcgaaatgttgcccaggttggtctaga

SEQ ID NO: 990640 - DNA, 120 bp, Artificial Sequence
  ENSG00000231201_2 (sequence is synthesized)
actcccggactcaagtgatcccccgaccaggcctcccaaagtgctgggattatcggtgtgagccaccaacccctgcagagtctacatctgaaataaaccacagaagcaaggatatcactt

SEQ ID NO: 990641 - DNA, 120 bp, Artificial Sequence
  ENSG00000231201_3 (sequence is synthesized)
tcaagcttttaaaataaaaaacttaaactattcccctcaccccccaaaaagtctaactataaagatgggtttgctacaaaataattagcaaaactgatttaccaagtaagatgtcctccc

SEQ ID NO: 990642 - DNA, 120 bp, Artificial Sequence
  ENSG00000231201_4 (sequence is synthesized)
gctcactgccccccagaaatacgtatactgtaggaatactcctaggaagtgacacaagtgaaagaaagaatattctttcaatatgctaaaaacatctacagtgcactaaaaaaaagtccc

SEQ ID NO: 990643 - DNA, 120 bp, Artificial Sequence
  ENSG00000231201_5 (sequence is synthesized)
taaatttggcaatacatttcttccaaaaatgttattcaataacataaacattatgaagtagaactggctgtcccatatgttcagaataaaagggttaagtggagtcctgcataactagca

SEQ ID NO: 990644 - DNA, 120 bp, Artificial Sequence
  ENSG00000228714_0 (sequence is synthesized)
aggaccatgtcatcaaatttagagaaacttgaactattcttgctttgacatgataatgagaaaacaatcagtccaaaatgagtcttagagaggaatcagcacctttgaaaacaaatgtct

SEQ ID NO: 990645 - DNA, 120 bp, Artificial Sequence
  ENSG00000228714_1 (sequence is synthesized)
ccaacaggaaaaagcatgtttatacctgcttcttgaaaggagatattctacagcctcattaagagaaaagcacgttacacagcagaaaagagatgggattcttctgtggctgtgctgctc

SEQ ID NO: 990646 - DNA, 120 bp, Artificial Sequence
  ENSG00000228714_2 (sequence is synthesized)
actcaagggagtctgaaccattttgaccaggaaaagccaaaggaaaggccactgccaagggcagaccacacattgcctgaagtcattgttctccattccagccccaagaactctgcgaga

SEQ ID NO: 990647 - DNA, 120 bp, Artificial Sequence
  ENSG00000228714_3 (sequence is synthesized)
tgagaaataaaagtcatgagaaaattttacaaattagctagctttcatttcctgttggcttttccagcacatgcttggcaccagatgagagtaatgtggtaatgcagtaaaatatccctg

SEQ ID NO: 990648 - DNA, 120 bp, Artificial Sequence
  ENSG00000228714_4 (sequence is synthesized)
tgagacactatctgcttagagacaggaggcagtgagatgctttagcccttgatgtcctaagggcctgtctggacatcgtgaggttttctcagaagccaatgtaatagactttttgtcata

SEQ ID NO: 990649 - DNA, 120 bp, Artificial Sequence
  ENSG00000228714_5 (sequence is synthesized)
tcaagtttgttttttagggaatttcaaggcatcaacattatctatatttccactgccggctctgatttggaaatgccagtaaagttggtgtgctttatatttacttgatctctaaaaaaa

SEQ ID NO: 990650 - DNA, 120 bp, Artificial Sequence
  ENSG00000228714_6 (sequence is synthesized)
atggcgcatgcttgcttcccaaagctaaggagggctctgtgcaggcgggcagcccaccctaagggaagaatcatgggaaagagatggggaactgcgacatgaagaagttaacttacctaa

SEQ ID NO: 990651 - DNA, 120 bp, Artificial Sequence
  ENSG00000228714_7 (sequence is synthesized)
gaccatgtcatcaaatttagagaaacttgaactatgaaaacatcatggccactgagcctggctgcttcctttggaaaggcctttgggggaagatagagtttgtaaagtgataggagaaga

SEQ ID NO: 990652 - DNA, 120 bp, Artificial Sequence
  ENSG00000228714_8 (sequence is synthesized)
agtaagttcaggaaagtatccacttccaagtggtctttgtttcctatttggacatcacggcagtgcatctacatctggacgatgatgtctcttacaggaatacagctctctcatcaaaat

SEQ ID NO: 990653 - DNA, 120 bp, Artificial Sequence
  ENSG00000228714_9 (sequence is synthesized)
tcggcagactgcataaccagggctggggcattgtaaagagttcagggccttacaattctctcccccagctcccctttccaaacactttgctcttgtcaacacaggaaaagttaaatcatt

SEQ ID NO: 990654 - DNA, 120 bp, Artificial Sequence
  ENSG00000228714_10 (sequence is synthesized)
ctgtatttccagacccattattgaagaaggtagaaaaataactctgatgattaggttctttgacattttacattgtttaaagatctatcttgagaaataaaggtctcattatctaaagaa

SEQ ID NO: 990655 - DNA, 120 bp, Artificial Sequence
  ENSG00000228714_11 (sequence is synthesized)
gggcatgccaataacgcctttaacacatggcgcatgcttgcttcccaaagctaaggagggctctgtgcaggcgggcagcccaccctaagggaagaatcatgggaaagagctctggccttg

SEQ ID NO: 990656 - DNA, 120 bp, Artificial Sequence
  ENSG00000228714_12 (sequence is synthesized)
cagcctgtttcttcatctgaaaaaaagaaggaaaaataataccaaactcagaaagacttcatgaggatcgagtctgtttgaattgcttttcattgcaccttctaaatatggggaactgcg

SEQ ID NO: 990657 - DNA, 120 bp, Artificial Sequence
  ENSG00000228714_13 (sequence is synthesized)
acatgaagaagttaacttacctaagatcagagaatgagtcaaggacagaacaggaccatgtcatcaaatttagagaaacttgaactatgagtttgaacctgctcttcccaattcatgaat

SEQ ID NO: 990658 - DNA, 120 bp, Artificial Sequence
  ENSG00000228714_14 (sequence is synthesized)
agacaaatcctgatttaatttcaactttacaccctcagatctacaatgttcctggtgtcaggatgcccattatggaagcttacactgttgtgggagaattaagtcttggcataacccaag

SEQ ID NO: 990659 - DNA, 120 bp, Artificial Sequence
  ENSG00000228714_15 (sequence is synthesized)
atcacaaaactgaggccaagagggaggaagcgatttgcccaagatcacacagggaattgggagcagaattagatcttaaatgcaagcatctcaactgctacttagtcttttcttttatat

SEQ ID NO: 990660 - DNA, 120 bp, Artificial Sequence
  ENSG00000228714_16 (sequence is synthesized)
atatcaagttacatattttttcttccaaatatacttcctgtatactttgtaaaacgaagtaaggataagagatgtgcagttttcatatttcaatgttagggattaaagatttcttcaagc

SEQ ID NO: 990661 - DNA, 120 bp, Artificial Sequence
  ENSG00000228714_17 (sequence is synthesized)
atctgattgctgattggctaagaaacacacgccagtatttgtggatatgtaagaataaaaaaagatttcttatggtatatactttcaatgaatttgaagtaataaagaagcatttgtttc

SEQ ID NO: 990662 - DNA, 120 bp, Artificial Sequence
  ENSG00000228714_18 (sequence is synthesized)
caactctcagtaacttcattggcgctgctatcgagactatctgcagtgatgtggataatttcctctgcatctacagccttcatccacttcagaaactcatgatggggaactgcgacatga

SEQ ID NO: 990663 - DNA, 120 bp, Artificial Sequence
  ENSG00000228714_19 (sequence is synthesized)
tggaaacaaggaggattccagcaaaggaaactcaaaagaatagtgacagaaaacaaaggcagtcatttggttcaggtgcaagtgaccaggtaaaggatttcagggcataaatttggcaga

SEQ ID NO: 990664 - DNA, 120 bp, Artificial Sequence
  ENSG00000228714_20 (sequence is synthesized)
gcaaaccatgggaagtttgaaggacctggaatctcaaacctgggagtttataatctcttctatagttgcttggaaaggatggactaattttgattgagacttgaccagaactgggatata

SEQ ID NO: 990665 - DNA, 120 bp, Artificial Sequence
  ENSG00000228714_21 (sequence is synthesized)
aaaagattcatctggcaaagtatagcatgaaattaagacagaaaaaacaagaggtggacctaaacataagacctgaatctataaaaatcctaaaagaaaacatagagaatactcttctgg

SEQ ID NO: 990666 - DNA, 120 bp, Artificial Sequence
  ENSG00000225391_0 (sequence is synthesized)
gaggtctccccagccatgtggaactgggaagaatggaaggcaacgcctccgaattaaattttgggacccccagtaaaatttcaggaaagcccagaactgatctgagaatgcacaaacttg

SEQ ID NO: 990667 - DNA, 120 bp, Artificial Sequence
  ENSG00000225391_1 (sequence is synthesized)
gaaagcccagaactgatctgagaatgcacaaacttggcatgtctttgacagagaaggctctgggatttcagcgcgttcattgccctccactaaggagctgctcagcaaaggggcttccct

SEQ ID NO: 990668 - DNA, 120 bp, Artificial Sequence
  ENSG00000225391_2 (sequence is synthesized)
ctgctctgctctcgggttcggaatccggagcgagtttccagtgagcggcgcccgctgagcgagtgggaaagcatcgcgcgtgcctttccccgcgcgcgtctgcggatcagcgcaggcgag

SEQ ID NO: 990669 - DNA, 120 bp, Artificial Sequence
  ENSG00000225391_3 (sequence is synthesized)
gtgggtgggaatgcagatgtgaggctggaggcagtagagccatctcgcaatcatgcagcaacaagcaaggcagagctggcatgttgttgactgataacatcgagaagctgctatattaat

SEQ ID NO: 990670 - DNA, 120 bp, Artificial Sequence
  ENSG00000225391_4 (sequence is synthesized)
cctggactgccaatctctgaacttcttggtatattgggaacataaactcttttggttaggcactgcgtcagatttctactacatgcagccaaatgcaatctagattgaaataccccttta

SEQ ID NO: 990671 - DNA, 120 bp, Artificial Sequence
  ENSG00000225391_5 (sequence is synthesized)
tgtgctccacccacagcatatgagatcccttttgcccacagcaccctccctcagtgtgatgtcgtcccccaaccagtatttgcaggttttttgttttttttttttaatcacaaaactgct

SEQ ID NO: 990672 - DNA, 120 bp, Artificial Sequence
  ENSG00000225391_6 (sequence is synthesized)
tgcaggttttttgttttttttttttaatcacaaaactgctctcagtctgccaaatctgttggccctagagccagaagtgctatctcctgggaattttttttttttttgagacaggatctt

SEQ ID NO: 990673 - DNA, 120 bp, Artificial Sequence
  ENSG00000225391_7 (sequence is synthesized)
gctcaagcgatcctcctgcttcagccttccgagtggttgggactataggtgagtgccaccactcccagctaattgtttttattttttgtagagatggggatgggcagggatcttactttt

SEQ ID NO: 990674 - DNA, 71 bp, Artificial Sequence
  ENSG00000225391_8 (sequence is synthesized)
cctgccttgagatctattcttaacccttgccctagtcagggtggtcttcctgcaggattaagagttagact

SEQ ID NO: 990675 - DNA, 120 bp, Artificial Sequence
  ENSG00000225391_9 (sequence is synthesized)
ctagtcagggtggtcttcctgcaggattaagagttagactctgagactctgatatcacaccctggcttggccttcccttccctgtcctacctccccaccctgctaccagtttcttctgga

SEQ ID NO: 990676 - DNA, 120 bp, Artificial Sequence
  ENSG00000225391_10 (sequence is synthesized)
gatatttcctgatagactacagtagtcctcccttacctgaggtttaactttctgcagtttcagttattggcagtcaacttaggtctgaaaatactaaataaaatatccagaaataaaaaa

SEQ ID NO: 990677 - DNA, 120 bp, Artificial Sequence
  ENSG00000225393_0 (sequence is synthesized)
cacggtgtcttggaaaatggaaagaattgggagccttcctaccgctggtgaaatctaggagtggcagttgagggcttctgttcacaaagtctggccatgtttctgtagggctgctgtact

SEQ ID NO: 990678 - DNA, 120 bp, Artificial Sequence
  ENSG00000225393_1 (sequence is synthesized)
ttgctgggcttcttctccagttcctagtctccttggattttccagtacctggagctatcaccagtgaaggctgtgaaacagcaaagatgtcagcctgcctcttcctctgggagctccggc

SEQ ID NO: 990679 - DNA, 120 bp, Artificial Sequence
  ENSG00000225393_2 (sequence is synthesized)
tcacccagtcaggaggaacgggatcagggaactgcttaaagaagcagtctgtccatgctttcacagatcagctgtgctgtgctggggcactgcttccacccctggttggtgtgggctctc

SEQ ID NO: 990680 - DNA, 120 bp, Artificial Sequence
  ENSG00000225393_3 (sequence is synthesized)
caaagcctggaggccggaacagctaagtcgcccaaacagcaaagatggtggcccctccctccctccgggagctctgtcccagggagaattcaaatctctgtcagccagagaacaccagta

SEQ ID NO: 990681 - DNA, 82 bp, Artificial Sequence
  ENSG00000225399_0 (sequence is synthesized)
actaaaaatacaaaaattaggtgggtctggtggcacgtgcctgtagtcccagctgtcttaaaggttgcagtgagccgagatc

SEQ ID NO: 990682 - DNA, 120 bp, Artificial Sequence
  ENSG00000225399_1 (sequence is synthesized)
gacagagtgagactctttctcaaaaataaaaaaaaaaaagaagatatgaaaatcagatacataccatctttttagttcctaaggctctcacaagattattttgaataaacaccacccatt

SEQ ID NO: 990683 - DNA, 120 bp, Artificial Sequence
  ENSG00000225399_2 (sequence is synthesized)
cacaagattattttgaataaacaccacccattcaaactggtttttccctttcctgtattatatgaaggggaaaatcctcatgggatggatagtttccagaatttgcccatttccaagcca

SEQ ID NO: 990684 - DNA, 120 bp, Artificial Sequence
  ENSG00000225399_3 (sequence is synthesized)
gtacagtaaatgacactggggccgctgagtggaccactgtagaaagcaatggttcttgtttcttattttttacattattttcagggatgtgtgtcccatcaaagtctcattatggaggag

SEQ ID NO: 990685 - DNA, 120 bp, Artificial Sequence
  ENSG00000225399_4 (sequence is synthesized)
gggctgccagacaccagcctaaactgctctcactctcatttccagaccaagggcctctggtggcctgtagggagccatgggcaatcacagcaaccctctctgaggccaaggaagttcagg

SEQ ID NO: 990686 - DNA, 120 bp, Artificial Sequence
  ENSG00000225399_5 (sequence is synthesized)
tatgagctgtacctgaggctgccctggcctctcctctcccgtcagtcctcactgggtgtcttctcaccctgccctctgccagctccactgctttccctgctgggtttcattgcttgtgca

SEQ ID NO: 990687 - DNA, 120 bp, Artificial Sequence
  ENSG00000225399_6 (sequence is synthesized)
aggaagatacggaagccacacaatgggttggttctttctagcccttcccagactgactataggccagcggggtctgtatctagaaatcttttattactctaagttgaacagtttaatgat

SEQ ID NO: 990688 - DNA, 120 bp, Artificial Sequence
  ENSG00000225399_7 (sequence is synthesized)
tagtcattttaatttagagttgagattccattagtatttgactgtggccttcttattgagaactctgttcaactttgaaatgccaaagcaggagcctttgttctttgatcctgccgtgag

SEQ ID NO: 990689 - DNA, 120 bp, Artificial Sequence
  ENSG00000225399_8 (sequence is synthesized)
ttaagaaattctgtatttcttcagaagtgtttcattttgtgtaatgaagtcaagggttagagtgactcagtgttccatgagttaagtgtctttgtagaatgaacagtaaacttatctcct

SEQ ID NO: 990690 - DNA, 120 bp, Artificial Sequence
  ENSG00000286323_0 (sequence is synthesized)
gcataattacaggctgcagacaggctggacaataaaatatctcggctcgatatttttggaagccttttgtgatggtgcctggaataaataacaaccgctttctatgtcctcagccatcta

SEQ ID NO: 990691 - DNA, 120 bp, Artificial Sequence
  ENSG00000286323_1 (sequence is synthesized)
actgcagccaccgttatttcagaacacccccaccccacctcggaggggcagaagtgggggacttcagcggaagggtgcggtcgcctgaagaggtctcctgagcctcgggtgcgtgtgggc

SEQ ID NO: 990692 - DNA, 120 bp, Artificial Sequence
  ENSG00000286323_2 (sequence is synthesized)
ttggaggactggaataagaagaaaatatgttccaagccctgagggccctcttcctcattagaggcacacaagtggggccctctaggccccacaccctctgggcgcgtgccctccctgact

SEQ ID NO: 990693 - DNA, 120 bp, Artificial Sequence
  ENSG00000286323_3 (sequence is synthesized)
aagactaaaaaatttgaagactcagaccacatgttcctacctcacaatctctctaaaaagagcctctctatactgaaccggctcctgtcacctgagaaatctgctggaaaagaaagctgg

SEQ ID NO: 990694 - DNA, 120 bp, Artificial Sequence
  ENSG00000286323_4 (sequence is synthesized)
atattgaagcagcaagacccagaggaagaagctgctgtcctctttggagctcgatggggtggccctgggcctggcccccacccaggcctgacagaggcaggagggtatggcgggggccta

SEQ ID NO: 990695 - DNA, 120 bp, Artificial Sequence
  ENSG00000286323_5 (sequence is synthesized)
gggctttgccccagaccttggaccccgcagcgtctgccaggagacgtcggaggaaacgcttttaccacctgggcgaccttgactgcagccgattaaagtttaatccgaggtgtgtgctca

SEQ ID NO: 990696 - DNA, 120 bp, Artificial Sequence
  ENSG00000286322_0 (sequence is synthesized)
cccagcgctggggagagctgtgcagaataggactggaggtggaagtgttggagattaacagccaggtggaggggacgggggaggccctgggtcagtcctcagggaacccccattgtgaag

SEQ ID NO: 990697 - DNA, 120 bp, Artificial Sequence
  ENSG00000286322_1 (sequence is synthesized)
ggggactgagaggtggagaagacacagtcccatctgtctcacggcagagacaggtttgggggcacacgtgaaggtttgacatatagtaaacacatgtcatggtggtttgttgtacagatt

SEQ ID NO: 990698 - DNA, 120 bp, Artificial Sequence
  ENSG00000286322_2 (sequence is synthesized)
agtgctcctgctgaccttccgtgtctgcagcccggctttggactgtggagatgccctcagcctctactcagtggctccagcctcatatttgcgtgctatacctttaacctcaagtcctct

SEQ ID NO: 990699 - DNA, 120 bp, Artificial Sequence
  ENSG00000286322_3 (sequence is synthesized)
tgctgctaacttaagctgcgactgtccaggacctgcacacacacacacatgcacgcatgcacacacacacacacagaaggtgaacacacaggatgaggccctgaaaactcatttcacccg

SEQ ID NO: 990700 - DNA, 120 bp, Artificial Sequence
  ENSG00000286322_4 (sequence is synthesized)
tgtacctcacccaaaaattcccctttgtactcctatctttatctctaactgacagcatgaagccctgactgccgaaaccctccagccccagctccagcccctcaggaggggactgcgtgg

SEQ ID NO: 990701 - DNA, 120 bp, Artificial Sequence
  ENSG00000286322_5 (sequence is synthesized)
acccccatggtctgctgacagcccagctcagtgcatccctgccatctctgctctaccgctggtcctcccaacaaccaacttacaggtttgggggcacacgtgaaggtttgacatatagta

SEQ ID NO: 990702 - DNA, 120 bp, Artificial Sequence
  ENSG00000286322_6 (sequence is synthesized)
cacgtgaaggtttgacatatagtaaacacatgtcatggtggtttgttgtacagattattacatcacccagggtttcactcccgtcacccagactggagtacaatggtgcgatctcagctc

SEQ ID NO: 990703 - DNA, 75 bp, Artificial Sequence
  ENSG00000286322_7 (sequence is synthesized)
taagtggaattataggtgtgagccaccacgccggccctgatgtatcaatattaaaacattttcttcagcctacaa

SEQ ID NO: 990704 - DNA, 120 bp, Artificial Sequence
  ENSG00000286322_8 (sequence is synthesized)
ctatccctgtgtccccagtccagagcctgcctctcagctctcccagggcggcctcgagcgctgctcctgctcctccaggggagaggtttgggggcacacgtgaaggtttgacatatagta

SEQ ID NO: 990705 - DNA, 120 bp, Artificial Sequence
  ENSG00000286322_9 (sequence is synthesized)
ctcaccctgtctgtcctcctgattctctagcccagttccctctagctccagcacagactcttatctccagccctgactgccgaaaccctccagccccagctccagcccctcaggagggga

SEQ ID NO: 990706 - DNA, 120 bp, Artificial Sequence
  ENSG00000286321_0 (sequence is synthesized)
agaacctttaggagagaaagtcataaggtacagttttattgactacttgccaaacaacacggacccatgcaccgtaagcttgttttgctcttggagagctcccttggttacgacagtctt

SEQ ID NO: 990707 - DNA, 120 bp, Artificial Sequence
  ENSG00000286321_1 (sequence is synthesized)
aaagatctcctgttacataaatttgacagtaagttatcaacattacaactaagaagcctaaccatttggaatttaaaactcctgtatcagtctgccctggagtcattctgggatgagtca

SEQ ID NO: 990708 - DNA, 120 bp, Artificial Sequence
  ENSG00000286321_2 (sequence is synthesized)
ttcagtgatggccaagtgacgcatgctgggagggctcaacctctacgcctggaaacttggctctttgggaagatgtggcaatgcaaatttgttgaagatgaaggatatatcactcttctg

SEQ ID NO: 990709 - DNA, 120 bp, Artificial Sequence
  ENSG00000286321_3 (sequence is synthesized)
gaatgaatggaatgaatggaatgtctagccagagacctttcagaaatcttaataattgtggcaatttttttttcttaactgttcacttctcttaacaaaagaaaagccactgcaatgccc

SEQ ID NO: 990710 - DNA, 120 bp, Artificial Sequence
  ENSG00000286320_0 (sequence is synthesized)
aggaggaatagaactttctccaggaacccagggacttatccagggatgacaatctaactttttagggtctgattgaaagatctgcatccttgtggacaagaacttaactctacagaggag

SEQ ID NO: 990711 - DNA, 120 bp, Artificial Sequence
  ENSG00000286320_1 (sequence is synthesized)
attcctcctgccacaggattacacctggaaagattttaacattcttttcctttgtcaagtccccaaaggatacattcctgatagggaatcctagagtttattctcccttgaatgactaag

SEQ ID NO: 990712 - DNA, 120 bp, Artificial Sequence
  ENSG00000286320_2 (sequence is synthesized)
gccctaggcaaagctgaagaggagtctggattctgtgagaatgaacaaggcagctgctcggagtcggctgctgagggggccatctgtttaagcaacgagaagtacggagctaaagaggca

SEQ ID NO: 990713 - DNA, 120 bp, Artificial Sequence
  ENSG00000286320_3 (sequence is synthesized)
cacggtattcaaacatgtgagttccctgcaccagggcttctggtcagttcttcaatcaggagagaaaatgatgcttaggtgttaaaggttcagggggagccgaaatgacttcaattgcca

SEQ ID NO: 990714 - DNA, 120 bp, Artificial Sequence
  ENSG00000286320_4 (sequence is synthesized)
aaataaacagaattgcttaattaatctaactaaaaaatcctgttcagcattggattaaaaaaatcatgttgatgctgcccctgtttatttggctgaatcctggactgagagggtatattt

SEQ ID NO: 990715 - DNA, 120 bp, Artificial Sequence
  ENSG00000286320_5 (sequence is synthesized)
agcctcagtgtgcttgcaggattgcatcttgcagctcaacaggaaatatctggagtcacagctaaagatatctctgcatgttcagaaatttacgagcagctgtaaaagtggagctatggt

SEQ ID NO: 990716 - DNA, 120 bp, Artificial Sequence
  ENSG00000286320_6 (sequence is synthesized)
gggcagagtgctggaacagtctccctttcaaatgagagaggccgctgaattaaacacttgaatataccaagttcatggcaggcagagggcacctgacatgctaaaaatagccaaagtgga

SEQ ID NO: 990717 - DNA, 120 bp, Artificial Sequence
  ENSG00000286320_7 (sequence is synthesized)
agtgcttctgttgctaaaataatactgaactggtatgctccttttctcaacccacaagaaatgggtgaaggggtagagggtaggctctgagattccaaaaagtgtgtcagaagctatgcc

SEQ ID NO: 990718 - DNA, 120 bp, Artificial Sequence
  ENSG00000286320_8 (sequence is synthesized)
aagtgaaagtcatttcctcattttgccacttttcaaaaataaatagctttcttaagctgagcaaactgaagtagcagtaatcaatatattattttttaataacacgagacagaaatggta

SEQ ID NO: 990719 - DNA, 120 bp, Artificial Sequence
  ENSG00000286320_9 (sequence is synthesized)
gcagcaaaaagacactgcatacctggatctgtagtcctgctgacaagcaatcctgctgacgagcaaaccttttccatcatgggcaagactcatttatttttaaacatccttttgctagac

SEQ ID NO: 990720 - DNA, 120 bp, Artificial Sequence
  ENSG00000286320_10 (sequence is synthesized)
tcccttatcagcaactccacgccctgctcaccaatgcccggctggaaaggtccctacttactcctgtgcacatgcctggcaaggctgcttgctaaacagcatggacaaggggacgtctgt

SEQ ID NO: 990721 - DNA, 120 bp, Artificial Sequence
  ENSG00000286320_11 (sequence is synthesized)
gcccctgcatgttgccgggcagaggaggctacgaccttttcccgaatggccattaggtccaagagccactgaactttcattctgtgaccgaggacattgtctcatctttccaagtctcac

SEQ ID NO: 990722 - DNA, 120 bp, Artificial Sequence
  ENSG00000286320_12 (sequence is synthesized)
ttgcccttttgcctgatgtggggctaatagagattaccctggtggcctcctgaagttgctgtgcagatctagtgagctaatgcatgcgagagcactttgtgactcccaaaagcctgaaac

SEQ ID NO: 990723 - DNA, 120 bp, Artificial Sequence
  ENSG00000286320_13 (sequence is synthesized)
ctgatggaggatgtggttgctgttgttattgggcattctactggaaacgcggggaaagaacagcaacatctcccggtgataagggagtgctgtgcacagacattgagtgtgttctctttt

SEQ ID NO: 990724 - DNA, 120 bp, Artificial Sequence
  ENSG00000286320_14 (sequence is synthesized)
tccacatcccactgagagcagcaggggccacaggaagtccgcttgctttcaatgagcttggcatggctcactgccggcatcgcggccacactcctgcttcagtgactgcacctactctgg

SEQ ID NO: 990725 - DNA, 120 bp, Artificial Sequence
  ENSG00000286320_15 (sequence is synthesized)
gcagctcccaatgcagggctgggcctgggttcacggggaagcaggggctgagacagaggtgataacataggatgtgactgtttaaattcacctggcttcggtcaacattgacagaaggtg

SEQ ID NO: 990726 - DNA, 120 bp, Artificial Sequence
  ENSG00000286320_16 (sequence is synthesized)
tacatgactctacgggaatggggaaatggcagcaccaggggctgactgagccccagtcctgactgtgactgctttggtaacaacaaggtgtttaggaagaacagtcccagtccttttcca

SEQ ID NO: 990727 - DNA, 120 bp, Artificial Sequence
  ENSG00000286320_17 (sequence is synthesized)
aaggtcgcctcctggtgtttactaaaggaactctgagtctcagcagaagcagaagtcctaccattagcttgcagaacccttcaggatgggaaagaagacttgggcttcagtgactcagcc

SEQ ID NO: 990728 - DNA, 120 bp, Artificial Sequence
  ENSG00000286320_18 (sequence is synthesized)
tggagctgggaacaggcaggcagggatacagagtgggtgttcttctcctacaggaggagagatgcatccctcatgcccagagaggctctggggtccccgaatccagaggtagtagaagaa

SEQ ID NO: 990729 - DNA, 120 bp, Artificial Sequence
  ENSG00000286320_19 (sequence is synthesized)
gagtcaaaacacactctcctgagaacacatctcaggtgcatggaacacaagacacgctgctttgattagggtgctctcttgtccattttgttctataatccacaagagaagaccatctgc

SEQ ID NO: 990730 - DNA, 120 bp, Artificial Sequence
  ENSG00000286320_20 (sequence is synthesized)
acagcagtgacatgctctagttgaccatgatgagcctttcctagggaaactattttgagtggtatatcttacaggagactgcaaggctcaatagtacagtcaccaggaaaatctacatgt

SEQ ID NO: 990731 - DNA, 120 bp, Artificial Sequence
  ENSG00000286320_21 (sequence is synthesized)
aaatatgacacttatgaaccggcaataaaatatggtgagtctaaagaccttccatgtcaaagttctttttcttttttttttttgacggagtttcactttagttgcccaggctggagtgca

SEQ ID NO: 990732 - DNA, 120 bp, Artificial Sequence
  ENSG00000286320_22 (sequence is synthesized)
gcctcttttttttttttttttttttaaagacacagtctccctctgttgcccagtccggagtgcagtggcacaatcaaggttcactgcagcctcaaactcctgggttcaggcgatcctcct

SEQ ID NO: 990733 - DNA, 120 bp, Artificial Sequence
  ENSG00000286320_23 (sequence is synthesized)
ctcctgagtagctgggaccacaggtgtatactaccatgtctcagctagttttttattttttaattttatttttgtagagacagggcctcactatgttgcccaggttggtctcaatcttct

SEQ ID NO: 990734 - DNA, 89 bp, Artificial Sequence
  ENSG00000286320_24 (sequence is synthesized)
aaagtacgggcggctccttgtctgtgaggaggattcagagacatcttagaaattttcattacctttgcctatgaattaagtatatagta

SEQ ID NO: 990735 - DNA, 120 bp, Artificial Sequence
  ENSG00000286320_25 (sequence is synthesized)
aaattttcattacctttgcctatgaattaagtatatagtatcggcaaaaaatatttggacacttctggcttaaatggatggaagctttaagagttcaaccgttgttcccatggacagggc

SEQ ID NO: 990736 - DNA, 120 bp, Artificial Sequence
  ENSG00000286327_0 (sequence is synthesized)
acacccagaaagtacaggaaaggcagacgacaactgtgctccgcagagcgggaggtggggggaacggcggaatattaaggtgggagctcaagaagcagagactctacctgccctaggcgt

SEQ ID NO: 990737 - DNA, 120 bp, Artificial Sequence
  ENSG00000286327_1 (sequence is synthesized)
tcgtgaagagaagcagctgttgctattggaggaggtgggtgcaaggacggcagatgccatccctgagaggcggtgactgagactagatgcgggtacaggtagtgcctcggatccccgggc

SEQ ID NO: 990738 - DNA, 120 bp, Artificial Sequence
  ENSG00000286327_2 (sequence is synthesized)
tgcctcctgccttttgaacatcccaggggtcccaacccagcgccctgtgtttctatgtgtgggtgggagaggtgggcatatggatggagttggcttcaggggagcccagagaggggaaat

SEQ ID NO: 990739 - DNA, 120 bp, Artificial Sequence
  ENSG00000286327_3 (sequence is synthesized)
ggtgaagtgacaattcgtgaacacgtgtggtgctggatcaggaaaggtaagggtggggatgggaaccatggactatgctactgctgtcttcctcccaccaagtaggcactcactctgctc

SEQ ID NO: 990740 - DNA, 120 bp, Artificial Sequence
  ENSG00000286327_4 (sequence is synthesized)
tctgtctgtctgtttactggcagtattcaggcagtggggatggctgataccagctcaaaactggcggagggtggaggagggcagaagagaacacatacatctgccttttgctccaaggct

SEQ ID NO: 990741 - DNA, 120 bp, Artificial Sequence
  ENSG00000286327_5 (sequence is synthesized)
ccagctggctggggatgcaagagaggaatgaacctcaatccaggcagttctaggaaaagaaggaggagacatagactcgaggggaggaaacctagatgctgtgggcccttcacttaggat

SEQ ID NO: 990742 - DNA, 120 bp, Artificial Sequence
  ENSG00000286327_6 (sequence is synthesized)
ttctcattaggatactccaagcttctcgacccccaaggggattcctggatctcagccccatgcagcaggatctcattcccattgagggacacaaagtgggttgctgctccatgtgatgct

SEQ ID NO: 990743 - DNA, 120 bp, Artificial Sequence
  ENSG00000286327_7 (sequence is synthesized)
ctctctccctgctgtcttgggccttagaggagggtctggggaccacctacagaaactgcttcatggatagtctcataggttcccctctgcataccctttgctctcttgtgttgtgatctc

SEQ ID NO: 990744 - DNA, 120 bp, Artificial Sequence
  ENSG00000286327_8 (sequence is synthesized)
tgctcattccttaggacgtgtttctttggtcccattccaggtagcagccccatggtaagtccttctcctctttcacattgagtattctcctttccccctgccccatgcatccactgggta

SEQ ID NO: 990745 - DNA, 120 bp, Artificial Sequence
  ENSG00000286327_9 (sequence is synthesized)
ccaagtgaaagaaaatggttcctctacccacaatacttctgggatagaatgtgtggatttttcacaccaagcaattcttttattctttgaggacaccagctaggtatcctacaatttaat

SEQ ID NO: 990746 - DNA, 120 bp, Artificial Sequence
  ENSG00000286327_10 (sequence is synthesized)
tcaattctgacactacccagagttagtgcagacttctctggttaagggctcattcccataagactgccctcccccacttcagacaacagtcacaagtaatggatctccatgtcacccaca

SEQ ID NO: 990747 - DNA, 120 bp, Artificial Sequence
  ENSG00000286327_11 (sequence is synthesized)
cttctgtctgacttagctactagttgggagttctcacaaccccctcctcaggttcaataatttgctataagggcccacagaactcagggaaatgctacttcctattattggttcattata

SEQ ID NO: 990748 - DNA, 120 bp, Artificial Sequence
  ENSG00000286327_12 (sequence is synthesized)
aagaatataaattaaaagccagatgaagaggtacatatggcaaggtccagaagggtcccaaatgcagaagctgccatccatgtggatttggggtacaccaccttcccagaatatgaatga

SEQ ID NO: 990749 - DNA, 120 bp, Artificial Sequence
  ENSG00000286327_13 (sequence is synthesized)
ctccagcccctgtcctctccttggaggtcaaggggtgaggctgaaagttccaaccctctaatcatgtcttagtgggggagggggaacatggacatccaccttttgctccaaggctctagc

SEQ ID NO: 990750 - DNA, 120 bp, Artificial Sequence
  ENSG00000286327_14 (sequence is synthesized)
tggctgggaatccaagggaggaatgaacctcaattttcagctctagggaagaaaggaggaaacagagactcaagaggagggaacctaaatgctttgggttcttcacataggaattttcat

SEQ ID NO: 990751 - DNA, 120 bp, Artificial Sequence
  ENSG00000286327_15 (sequence is synthesized)
tgcgatactctatgtttctcaacccccaagtagatttctggatctcagcctcaggcagcagcatcctgaggatctgccctggatatgaggtcctgaaaggacccagtctcaaactgtgct

SEQ ID NO: 990752 - DNA, 120 bp, Artificial Sequence
  ENSG00000286327_16 (sequence is synthesized)
ctcaacagttcgttttcatctaatgacaagggttgctgctccatctgatgccccctcctcctaaagtccagggcctcagaagagggtctttctgagaaccacctacagagactgtcttac

SEQ ID NO: 990753 - DNA, 120 bp, Artificial Sequence
  ENSG00000286327_17 (sequence is synthesized)
agattcccctctgtagaccctttgctgtcttccttgtttcagttttatagccaatgctttagacttggtgatttgcacctattcttggtgacatctcctagttggtgttgaagcctttgg

SEQ ID NO: 990754 - DNA, 120 bp, Artificial Sequence
  ENSG00000286327_18 (sequence is synthesized)
tcatagctcaggtctatgagatagccacatgataccaaattcttttaggataatatattagaaaaaataaattatattggtcctattaacctctatatttgttgcattttacagatttga

SEQ ID NO: 990755 - DNA, 120 bp, Artificial Sequence
  ENSG00000286327_19 (sequence is synthesized)
agccaactcataaatgtcttccacattattttttacagctgcatagtactttattgtgtcactaccataatttatttactcactttcctatgagtggacatttgtttctaatattaagct

SEQ ID NO: 990756 - DNA, 120 bp, Artificial Sequence
  ENSG00000286327_20 (sequence is synthesized)
ggtacaaataatactggaaggaataaccttgtgaaaatatacagtatttttgtatgtttggacgtgtatcttcacagattcctagatctggtgctggtaggtcaaataataagtgcatgt

SEQ ID NO: 990757 - DNA, 120 bp, Artificial Sequence
  ENSG00000286327_21 (sequence is synthesized)
gcgtagttttattaggtattctcaaatttccctggaaaggggtactataagtatttactgccaccagcaatatatgtgagtatctgttttactacatccttgttaatcagtttcttatta

SEQ ID NO: 990758 - DNA, 120 bp, Artificial Sequence
  ENSG00000286327_22 (sequence is synthesized)
ttcttttgacgtttgtagagtatctgatgatttaacctctctcattcctgatgttactaattgtgtcttctccttctctctctttttaaaaatttttctgcctagagggttatcaatttt

SEQ ID NO: 990759 - DNA, 120 bp, Artificial Sequence
  ENSG00000286327_23 (sequence is synthesized)
attgaccatctcaatgaactagcgtttagtcttattgattttctttattgttttactgttttctatttccttggtttttcccttcatatatattattttttttgtttacttggtgtttaa

SEQ ID NO: 990760 - DNA, 120 bp, Artificial Sequence
  ENSG00000286327_24 (sequence is synthesized)
gttactctactttttctggtcacttaaactagaaactgaggccattgatttgagacctttcttcttttctaatatagggattttagtactgcaaattcccctctaatactactttaacta

SEQ ID NO: 990761 - DNA, 120 bp, Artificial Sequence
  ENSG00000286327_25 (sequence is synthesized)
tatctcacaatttttgatgtgttgtgttttcatttttcttcagtttgaaattacttactgatttctctttgagtttgttctttgatgcaagagttagttatttagatgtatgctgtgtag

SEQ ID NO: 990762 - DNA, 120 bp, Artificial Sequence
  ENSG00000286327_26 (sequence is synthesized)
ttctcaagtatttggggacttttccagttattgatttctaatttaattacgttgtagccagagaacatacttcgtgtaacttgaatccttttaatttactgagacttcatttatggtcca

SEQ ID NO: 990763 - DNA, 120 bp, Artificial Sequence
  ENSG00000286326_0 (sequence is synthesized)
ccaagatgctggccaagagtgttgaggtggggagaatgaaagtgagatgagggaagatctcagacttacacctgccctgccccgcctggctgattctccagccccagccggagagccact

SEQ ID NO: 990764 - DNA, 120 bp, Artificial Sequence
  ENSG00000286326_1 (sequence is synthesized)
caccattttgatgggccggaaggacatgagccgatcactgcggtagctgctcgaccatgtgttccagcgagggtactcgcccttctccaggatgaacatctccccgcggaagttggactg

SEQ ID NO: 990765 - DNA, 120 bp, Artificial Sequence
  ENSG00000286326_2 (sequence is synthesized)
ctcaaaggcgacccagctggatacaagaaggaccatgaggcagacaggagacatatgcgcccacacagacccaggcccccggaccacaggcccgtttccatgcccatcaggcacggctcc

SEQ ID NO: 990766 - DNA, 120 bp, Artificial Sequence
  ENSG00000286326_3 (sequence is synthesized)
aaggcacacgtcagacaccagctgcatctttgtttgaggagaaatactctgggtttgagtcactggtaccaaaaaaagcctgaaaacccatgctggccacatccggtagcttctgcttcc

SEQ ID NO: 990767 - DNA, 120 bp, Artificial Sequence
  ENSG00000286326_4 (sequence is synthesized)
agctgggttttggggctgagggtggagctgaggctgcgttgaccacactgagggtgcaggaggtagaaatggtcccgggtagcctccaggataagttggctaaattcaccgggcagggag

SEQ ID NO: 990768 - DNA, 120 bp, Artificial Sequence
  ENSG00000286326_5 (sequence is synthesized)
ctgtatgatctccctcagacctcagcataatcctgtgaggagtggtgagggccatccttctccccatttcaaagatggggaaactgaggcttgcacactgaacaaggcaaacaggggaag

SEQ ID NO: 990769 - DNA, 120 bp, Artificial Sequence
  ENSG00000286326_6 (sequence is synthesized)
tcaggactcaaacccaggcttgtctgacctcaaagctcatctcggaatgggctcagaatacaggatgactggaacccttgcaggctttcaaagtgggggagacaagagcaaacgagctgc

SEQ ID NO: 990770 - DNA, 120 bp, Artificial Sequence
  ENSG00000286326_7 (sequence is synthesized)
gtggatcttgtcctggggctgcccctccaccctgacctcagcacacacaggctggacatagggcaaccactctgcccaaggatgactatccctgttttatatgggagtcactaaggccca

SEQ ID NO: 990771 - DNA, 120 bp, Artificial Sequence
  ENSG00000286326_8 (sequence is synthesized)
gagacacccacagagacaggaacaggcagtgaagcatggtgattaagagctttaggaatgaactcaatcaacctgagttgaatcctggctgtgccacttaccaataggtgaccttgggta

SEQ ID NO: 990772 - DNA, 120 bp, Artificial Sequence
  ENSG00000286326_9 (sequence is synthesized)
agagactcaccccctctgagcctcagtctttccatctgtcaagtgggcataagaatagcctctgcctcctacagcactgtgaatcatctaggtgtggtcccgagtcagtgcctggcacct

SEQ ID NO: 990773 - DNA, 120 bp, Artificial Sequence
  ENSG00000286326_10 (sequence is synthesized)
ggtgggtgtgccacagatgcttatcattactcccaggcagctggacgcccaggagaggggacagcgagtggacacttcactctttgacctctctcagccctcggtaatgggctagagttt

SEQ ID NO: 990774 - DNA, 120 bp, Artificial Sequence
  ENSG00000286324_0 (sequence is synthesized)
atgcttctgaaatgcattttaaaataagccaaactggtcatgtggcacctgtgatattatctagaaaagtgtgacttgagggaatttctccagaatcaaagatgtctgaacgtgtctgca

SEQ ID NO: 990775 - DNA, 120 bp, Artificial Sequence
  ENSG00000286324_1 (sequence is synthesized)
tgaacagaacccaggacgctccttactaagcaggctctgcagaacaaacgcaagccaggaggaaaagaggaaaacgtagcacctggttaccatgattctactgtctgcttctatgagtta

SEQ ID NO: 990776 - DNA, 120 bp, Artificial Sequence
  ENSG00000286324_2 (sequence is synthesized)
aaaaaaaaaaaaaaaagacagagaaaaagcttcctgactttggccttggcaataattttctaagtatgaccacgaaagcacaggcaacaaaagcaaagataggcaaattggatttcatca

SEQ ID NO: 990777 - DNA, 120 bp, Artificial Sequence
  ENSG00000286324_3 (sequence is synthesized)
agataggcaaattggatttcatcaaactataaaggctctgtacagcaaaggaaacaaccaacgaaaggaaaatgcaacctacagaatgggagaagatatttgaaaatcatatatttgata

SEQ ID NO: 990778 - DNA, 120 bp, Artificial Sequence
  ENSG00000286324_4 (sequence is synthesized)
gaagattaatattcatagtatctgaggaacttttacaactcaatagcagaaaaacaaaataaccagattgaaaaccgggcaaagaaatggaatacgcatttctccaaagaagacatacaa

SEQ ID NO: 990779 - DNA, 120 bp, Artificial Sequence
  ENSG00000286324_5 (sequence is synthesized)
atggccagcatgtatatgaaacagttgatatcacactcatcatcagggaaatacaaatcagaactcagaaccatgatgaaatttatttcacatcccttagagtgactatttcatatgtgt

SEQ ID NO: 990780 - DNA, 120 bp, Artificial Sequence
  ENSG00000286324_6 (sequence is synthesized)
tacacatagatacatatatataagtaaaaaaatgttggcgaagatgtggagaaattggaactcttgtacactgttggtaggaatggaaaatggtacaagcattatggaaaacagcatgga

SEQ ID NO: 990781 - DNA, 120 bp, Artificial Sequence
  ENSG00000286324_7 (sequence is synthesized)
gtttcctcaaaaaattaaaaatagaactgccatgtgacccagcaatcccactactgggtatatatgcaaaggaattgaaatcagcatgttgaagagataccttctctcctgtgtttatcg

SEQ ID NO: 990782 - DNA, 120 bp, Artificial Sequence
  ENSG00000286324_8 (sequence is synthesized)
cagcgttattcacaacagccaagatatggaatcatgtcttttgatggatgaatggataaagaaaatgtagtatttaaatataatggaatattatctagttttaaaaaaagaagaagaatc

SEQ ID NO: 990783 - DNA, 120 bp, Artificial Sequence
  ENSG00000286324_9 (sequence is synthesized)
tgccatttgtgacaacaccaatgatcctagaagacattatgctaagtgaaatagggcagacacagaagaacaaatactacaggttctcgcttatatgaaaaagacatttgcttttcaaaa

SEQ ID NO: 990784 - DNA, 120 bp, Artificial Sequence
  ENSG00000286324_10 (sequence is synthesized)
aagatcttgagattgttatttaatagcccaagagtaacttaagattaatcattgcaacttggccccgttctggggaaaaggcatttatttgaagttattgtgtagataaccaatgtcatt

SEQ ID NO: 990785 - DNA, 120 bp, Artificial Sequence
  ENSG00000286324_11 (sequence is synthesized)
tgatggttttgagtgatttataatcctggggatttccgttctcctctgatttgaaacaacaagcatattcaggagactttgccccattctgactgtttctatcacagctatggtgcctgg

SEQ ID NO: 990786 - DNA, 120 bp, Artificial Sequence
  ENSG00000286324_12 (sequence is synthesized)
gtattctacctttccaacaccagcctctcgctgcgtgtgtgagagaaagagatcaaagcaggaacaacaaaatccagatgcaaatttactacataaataaatgctttaatagtctgaaaa

SEQ ID NO: 990787 - DNA, 120 bp, Artificial Sequence
  ENSG00000184441_0 (sequence is synthesized)
ctcctgaccatggggtcaggccctgtgccggatggcagatgcctaacagagatcacatcccgatgcccccaccacaggcaccagcagcgggtgtgatctgccaagcaggagagaagtgcc

SEQ ID NO: 990788 - DNA, 120 bp, Artificial Sequence
  ENSG00000184441_1 (sequence is synthesized)
cagcttctgtcaaatgcgttcgtgacccgctgccaactgccctgggaggcgccggcgtctcactgcagagtcagccctgtggcccctccacggcccccaggcccaaggccatacgggcac

SEQ ID NO: 990789 - DNA, 120 bp, Artificial Sequence
  ENSG00000184441_2 (sequence is synthesized)
tgatggccgtgcccacaaaccattccagtcactgtggccctaggccaccccccccaccaggggctccctgcacctcacgagctctggtgctgtgagccttctctgtgccagggcacgggg

SEQ ID NO: 990790 - DNA, 120 bp, Artificial Sequence
  ENSG00000184441_3 (sequence is synthesized)
cctggctcaccccctctcctgctccctggcacatccgctgttgggcaaaacatggacctgccactgaaatcactacctgggcactgagtcactcccagagaatatggatgagaacagaca

SEQ ID NO: 990791 - DNA, 120 bp, Artificial Sequence
  ENSG00000184441_4 (sequence is synthesized)
ctccccccggataatccctgtccctcacttcccagagacgcagctcacgggaagccccattcactccccgtgggaggaccctgggggacagggatgggctgcggagtccccgctgccctc

SEQ ID NO: 990792 - DNA, 120 bp, Artificial Sequence
  ENSG00000184441_5 (sequence is synthesized)
cagcctcacgttgcctcctcctcgctgtccagcgggtcccggccagtctcagcagcggagctgagggagctcagtgtgcagcatagcttggggccgccgtggcctgtgccctctctctct

SEQ ID NO: 990793 - DNA, 120 bp, Artificial Sequence
  ENSG00000184441_6 (sequence is synthesized)
ggggccgcagtgatctcctctccctcactcagtgcacgggacagctcctcctccgtcacagctttgggatgaaagacagaagacagcatgagtggcctcacccacgtgcaggccacatgc

SEQ ID NO: 990794 - DNA, 120 bp, Artificial Sequence
  ENSG00000184441_7 (sequence is synthesized)
actgcagctcccgtcctcactgtggcttcaggcacagtctgcttgtgaaatgcatgcacgtgtatccacctccagggacaactcccagagtagcagccggttcctcactgtcccatcccc

SEQ ID NO: 990795 - DNA, 120 bp, Artificial Sequence
  ENSG00000184441_8 (sequence is synthesized)
agcctggcacaggctgacacacaacagatggtggagggctgctcaggaatctcaacaccagccttggccagaagcaaatactcctcaaaacctcaactaagacacaatagaaaaaggaac

SEQ ID NO: 990796 - DNA, 120 bp, Artificial Sequence
  ENSG00000184441_9 (sequence is synthesized)
agaccatattgaatttattccatttctctcatatatcaatttccctgaagtttatattattaatatcaataaaattgtctgggagaaaatagtggtgtctgtatacctgacaaggatgag

SEQ ID NO: 990797 - DNA, 120 bp, Artificial Sequence
  ENSG00000184441_10 (sequence is synthesized)
acactagtgtgctgagaatgccaaggatgaacaaacagcatgaaaccacagcctggaaaactgtgtcggtgctggcgctggctagaggaggcacgagtgcctccaataggtggagcgcag

SEQ ID NO: 990798 - DNA, 120 bp, Artificial Sequence
  ENSG00000184441_11 (sequence is synthesized)
cagcaggcactgcggtgctgggacggcccctccccacggcaggggcgcgatggcaccgccaccctaggttcacagtggcccgtggagcctgcccagtccctgtggaccagtgcgatgctg

SEQ ID NO: 990799 - DNA, 120 bp, Artificial Sequence
  ENSG00000184441_12 (sequence is synthesized)
cttgccagatactgacgcccccgctcgccatggcgcatggcgatggtcagagcagggctgctactcacagaagcaaaagaaggaacccttttgctttgctaccaggtcctgcggtcgttg

SEQ ID NO: 990800 - DNA, 120 bp, Artificial Sequence
  ENSG00000184441_13 (sequence is synthesized)
ggggatacccaaactgtcagtcccaggagggaccctacgctgcgctgctgcattcgggtggcgggatcaagaggagacacagaagccaggggaacagcctctggaggagacttcacagga

SEQ ID NO: 990801 - DNA, 120 bp, Artificial Sequence
  ENSG00000184441_14 (sequence is synthesized)
cacatctatgtcccgccagaccaggtacagctcactcaggcgctggcaccggctcacaggctccagggtggagatgctgttgacactgcacggagaccagcacagtcagcgagggacgtg

SEQ ID NO: 990802 - DNA, 120 bp, Artificial Sequence
  ENSG00000184441_15 (sequence is synthesized)
gccagggcccccagggccacctctcaatccccacccccagtaaaaggcactcatgggacctgtgtccctgccctctcctgagaagcctaaatcggatgtcacaagtcacgtgcagcagga

SEQ ID NO: 990803 - DNA, 120 bp, Artificial Sequence
  ENSG00000184441_16 (sequence is synthesized)
cctgggccgaggagagagctgtaggaaggccaggccctgaactcaaaggcggactggggtggaccccaccagcaacagccccttggcccgacgctccacatcagctcctcagggcgctag

SEQ ID NO: 990804 - DNA, 120 bp, Artificial Sequence
  ENSG00000184441_17 (sequence is synthesized)
agtgcgggaggtgggggatgtggccctccttcacaggtgaggaaaattaaggcctctcaggggacatatcatgttgccccaaagcagggagcggccagaaaaactcatggcaaaaactag

SEQ ID NO: 990805 - DNA, 120 bp, Artificial Sequence
  ENSG00000184441_18 (sequence is synthesized)
accttccaaacccccacttgagggcggcaacactggggatgggcctcatttccattctacagaacgtggacgcgtcagagaagagaaacagcaggcctggagcggggacctgcaggcttt

SEQ ID NO: 990806 - DNA, 120 bp, Artificial Sequence
  ENSG00000184441_19 (sequence is synthesized)
accctgcagcgtggggtccgtcccctccacaagcgaacacgcggagccgctcccgcaggccctcaaaggcgcggagccagggccccctgcctggagggctgcactcgcgtccggcaggcg

SEQ ID NO: 990807 - DNA, 120 bp, Artificial Sequence
  ENSG00000184441_20 (sequence is synthesized)
cctcagaagggcggtcaccaggcccccatgggcagcctgccgtcctgagcccccctccccatgccatcccttcactcggggtttcccaggtctcatgcagctcctagctatgaggccgcc

SEQ ID NO: 990808 - DNA, 120 bp, Artificial Sequence
  ENSG00000184441_21 (sequence is synthesized)
ccattttaccaagagcaaaactccggctgtgggactctttccaggatggggtctgcctcaggcacaggcagcagcgtgatgtaccgaccgcgtccgcggcctcgaggcttcctgctccgc

SEQ ID NO: 990809 - DNA, 120 bp, Artificial Sequence
  ENSG00000184441_22 (sequence is synthesized)
tccagtgcagtcaggcgtgcaggcaccacgcacctgagctcggtcaacacccctggggtcctgtccctcccgagatgtgacagaaatggccccacacacgagcggcctgatgctcggagg

SEQ ID NO: 990810 - DNA, 120 bp, Artificial Sequence
  ENSG00000184441_23 (sequence is synthesized)
ccctgtggcccctgggtgactcagtgagcggcagggatagggctggatccacagccccgccccaagcttcctgccaccgtgggaaccacaagctccacgtttccctgtcaggtaagcctt

SEQ ID NO: 990811 - DNA, 120 bp, Artificial Sequence
  ENSG00000184441_24 (sequence is synthesized)
tcggaggcaggcctgaaatcccagcctcactgtgtcgcctgactagtgaaacgagccccgcggcaggcacgcgcaccccccctcaacctctgggcgggcacgcgcacccccccccccccc

SEQ ID NO: 990812 - DNA, 120 bp, Artificial Sequence
  ENSG00000184441_25 (sequence is synthesized)
ccgctcaacctctgggcgggcacgcgcacccctgctcaacctctggactcgggctccatctcctcctcatctccctgtggggtgggcacttgtaatacctccatgttacagaaaggaaac

SEQ ID NO: 990813 - DNA, 120 bp, Artificial Sequence
  ENSG00000184441_26 (sequence is synthesized)
tgaggcacagagagggccatgcctcgcccaaggttagccagccaatagatgggagggctgagatttgacccatgagcatgcctccaagcccatttcattcattcagcaaggctcgggcag

SEQ ID NO: 990814 - DNA, 120 bp, Artificial Sequence
  ENSG00000184441_27 (sequence is synthesized)
gacaggctggtgcccgcgctggggatgcctgaacaccagatggactggcctcagcccatggcgggcagcaggctgggcacgggcatcaacatggcaatgccaacctcagagggcattacg

SEQ ID NO: 990815 - DNA, 120 bp, Artificial Sequence
  ENSG00000184441_28 (sequence is synthesized)
gaggatgggcaggggctggcctaccccgtggctgcctgtgagatcaagaaggtaggtcacagtcagggaccaggggcctgcaatacccactctcagagggcaagccctagagacttctga

SEQ ID NO: 990816 - DNA, 120 bp, Artificial Sequence
  ENSG00000184441_29 (sequence is synthesized)
gctgccagaggggtgggccttccccacagggtttaaacccttgtgagcttttaaatgcggaaacccacagaaggcgcccatccagcgtctggtgggcagtggtgagccatgagcgtctgc

SEQ ID NO: 990817 - DNA, 120 bp, Artificial Sequence
  ENSG00000184441_30 (sequence is synthesized)
tccctccgtgggtcccacagtaggcaggagggaattcagggataaagggagctcttctcttccccagagcccccaaatacaccccaactgcctgaaagtccagtaacatttgttcattca

SEQ ID NO: 990818 - DNA, 120 bp, Artificial Sequence
  ENSG00000184441_31 (sequence is synthesized)
agcttcccttagtctgctgggagggcagtgaccccagaagacgggcacaggtcatggggtgcagagaaactggtaggcagtggtggcactggggggcagaagaggccaggactctggggg

SEQ ID NO: 990819 - DNA, 120 bp, Artificial Sequence
  ENSG00000184441_32 (sequence is synthesized)
tcccagggcagatgtggccaccgtgggggcggccagggcgggccaccgtgaatccttaggagggctccaccaccgactggcccagtgaacacagcaatggcttatcggagcacacaggcc

SEQ ID NO: 990820 - DNA, 120 bp, Artificial Sequence
  ENSG00000184441_33 (sequence is synthesized)
aagggtgggcaggcgtacagcagggcaggcaggggacaggagccatcaggaggcccaggtgaggctctgaggaaggagggctgaacatgggggccacagggtaggcccagctctcgctgt

SEQ ID NO: 990821 - DNA, 120 bp, Artificial Sequence
  ENSG00000184441_34 (sequence is synthesized)
cccggcccctccccttctggaagccgccctcagtctgtgttggaggtttccaggttatgtcacagtgctgggtcccactggagggacgtgaggctctgccccggcttccaggccccaggc

SEQ ID NO: 990822 - DNA, 120 bp, Artificial Sequence
  ENSG00000184441_35 (sequence is synthesized)
tgagcatgacagcaggagcgaggtacctgagcgtgatcacctccaggctgggcatctcctggcaaatggagatctaggaggaaaagaacatgactagcaagcatggcacagcagggcatc

SEQ ID NO: 990823 - DNA, 120 bp, Artificial Sequence
  ENSG00000287008_0 (sequence is synthesized)
tatcctggactgtgtctgagagtctgctcctaaataaggctcatttcttttaaaaccatggattaatttcattaagcatgcaagagttctttagaaactttcttgtgtgggctgtagctc

SEQ ID NO: 990824 - DNA, 120 bp, Artificial Sequence
  ENSG00000287008_1 (sequence is synthesized)
attttcattactgtgtttttctccccccgaccactgcatcacttaggacaattcattagaaaatccaacagaatttatttgaagtaaccaattaatcctttgagatgcaacaattaatat

SEQ ID NO: 990825 - DNA, 120 bp, Artificial Sequence
  ENSG00000287008_2 (sequence is synthesized)
gcaaattgtatcacattaagaatctcaggaggaatgaattaaattgaaaaatacaacccttcagaaattaaaaaagatattgtttttccatctacagattttcagacttcatttgatttt

SEQ ID NO: 990826 - DNA, 120 bp, Artificial Sequence
  ENSG00000287008_3 (sequence is synthesized)
tcttctatggttcattttattatctccttgcctagaagtaccaaaacaaatgaccatgcctgtcttaaatgcattacatcaggatactaatagaaggatattaaacatgatagccatatt

SEQ ID NO: 990827 - DNA, 120 bp, Artificial Sequence
  ENSG00000287008_4 (sequence is synthesized)
gacaaaagacctgatgaggcaaataaccatatacataaatatgaatttgtaacagaataattacatcaaaaagtaaacaattttcattgccatttccttcttagaaatgttcacagggaa

SEQ ID NO: 990828 - DNA, 120 bp, Artificial Sequence
  ENSG00000287008_5 (sequence is synthesized)
ataaaggactaaggtcattttgagaacattactaaacagacaacctctttactcatgcaagtaaattctgtgttacagttaggttttaaatgggtttctctgatgactgcataatgtcag

SEQ ID NO: 990829 - DNA, 120 bp, Artificial Sequence
  ENSG00000287008_6 (sequence is synthesized)
ggagatatgaatattgccaataaaacaacttttaaatagtgtctaagactcactgagtgctttctatatacaatttgctattctaggcccatagcatgtcatctgagcctcacaatggct

SEQ ID NO: 990830 - DNA, 120 bp, Artificial Sequence
  ENSG00000287008_7 (sequence is synthesized)
ctgtgaaattgggactgtcattgcaatcttgtaactgcccaatgggctctccttgcccgctgtctaggcagagccaatatatcaacgcaggggaattgcaatagagaaagaataattcat

SEQ ID NO: 990831 - DNA, 120 bp, Artificial Sequence
  ENSG00000287008_8 (sequence is synthesized)
tattattactcaaatcagtctccctgaaatcttggggattgggattttaaaggataatttggtgggtagggggtaggaaagtggggagtgctgattaaccaatcagagatgaaatcatag

SEQ ID NO: 990832 - DNA, 84 bp, Artificial Sequence
  ENSG00000287008_9 (sequence is synthesized)
tccacaagaccaggggagccagtttatcaacctggatggtgccagttgattcaatgagtgcagggtctgcaaaatatctcaagc

SEQ ID NO: 990833 - DNA, 120 bp, Artificial Sequence
  ENSG00000287008_10 (sequence is synthesized)
tctcaagcactgatcttaggttttataatagtgaagttatcctgaagagcaatttgggaggcttagaatcttacagcttccagctgcatgattcctaaaccataatttctaatttgtagc

SEQ ID NO: 990834 - DNA, 120 bp, Artificial Sequence
  ENSG00000287008_11 (sequence is synthesized)
ctaatttgtagcgaatttgttagacctgtaaaggcagtctagtcccccaagcaggaagggggttcgttttgggaaagggctgttatctttgtttcacagttaaactataaactaagtccc

SEQ ID NO: 990835 - DNA, 120 bp, Artificial Sequence
  ENSG00000287008_12 (sequence is synthesized)
tcccgtagttagtttggccttcacccagaaatgagtaaggacagcttggaggttatagaagcaagatggaatcagttaggtcagatctcttttacgatcataattttctcagttataatt

SEQ ID NO: 990836 - DNA, 120 bp, Artificial Sequence
  ENSG00000287008_13 (sequence is synthesized)
tttgtaaggtttgtttcaatcttacaggacaggaaccagagggtaaagtgctttacctgaggctgccagaaagctgggccaggatctcagcccaagcatttcatgctagggatcatgttt

SEQ ID NO: 990837 - DNA, 120 bp, Artificial Sequence
  ENSG00000287008_14 (sequence is synthesized)
ctcaccattgtgccatctctgagaaaggaattccagaagaatggaatacagaaaagcaaagggagaaaattaccaaggaaataatagaagacagtttctcaagactcaagaatgacatag

SEQ ID NO: 990838 - DNA, 120 bp, Artificial Sequence
  ENSG00000287008_15 (sequence is synthesized)
atttttaatttgaaagaggaccattgagagccatgtggaatgaagggagacatctagacacagcaacaagggtaagagaagtgacaaaatacctgatgaaggaaagtaaaacataactta

SEQ ID NO: 990839 - DNA, 120 bp, Artificial Sequence
  ENSG00000287008_16 (sequence is synthesized)
aaacaaacaaaaagtacctaatctttcttactagcagcagcagtcctccaggttctgaagaattatttgaaatttaaaatgtgatggcctgtgaaataaatcaggtatcacaaattaata

SEQ ID NO: 990840 - DNA, 120 bp, Artificial Sequence
  ENSG00000287008_17 (sequence is synthesized)
aattaataaacaggtgtccttttcagacacacaggtaagtactcagaaagtttatgtcctggagactttgctgagaatgttccccagaaaaaccaaacaaataactaaaaaaaaaaaaaa

SEQ ID NO: 990841 - DNA, 120 bp, Artificial Sequence
  ENSG00000286328_0 (sequence is synthesized)
ggcttttgaattgggaagtctgaaagagcaaatcgcttctgaagcaaatacgcacgacagtactatagatttcaagataattaggcatgagaaatggtgatacactggcttcccctttgc

SEQ ID NO: 990842 - DNA, 120 bp, Artificial Sequence
  ENSG00000286328_1 (sequence is synthesized)
tttccaccatgattgtaagcttcctgatgccctcaccagacgcagatgctggagccgtgcttatacatcctatagaactagagatgactcatggcccaggtgaaattcaggtccaagctc

SEQ ID NO: 990843 - DNA, 120 bp, Artificial Sequence
  ENSG00000286328_2 (sequence is synthesized)
tggagagtgtgtggggactggtgaaaagacatggttttattgttatctgtttagttcctgctgcggaagatgagactctcgctctctttgtcatttccccacatgcacagaaacacacat

SEQ ID NO: 990844 - DNA, 120 bp, Artificial Sequence
  ENSG00000286328_3 (sequence is synthesized)
atttctacttttctcatcctctcaacaggctatcataactttggttaaatcaatagtcagtgtttgtatattattattggataaatattacttacagtggaacccattttgtgtatgatt

SEQ ID NO: 990845 - DNA, 120 bp, Artificial Sequence
  ENSG00000286328_4 (sequence is synthesized)
agatattctttcttgtagaactttatgtttatccaggagttaatacttatctgattattttcagttgcttaatgtcctatacacctgttattaatttatgctgaactctccaacagaaac

SEQ ID NO: 990846 - DNA, 120 bp, Artificial Sequence
  ENSG00000286328_5 (sequence is synthesized)
atttatgtataattctcctagggctttccatcttcctgctctagtctaaactggttgttctctaggccagtggcaatgttatcatcctgatattctccttcaccatcagcctgggagttc

SEQ ID NO: 990847 - DNA, 120 bp, Artificial Sequence
  ENSG00000286328_6 (sequence is synthesized)
tgttggtttttctcctgtatggaatcctctatttcctgttatttttaaaaacttggtgtcaaccctaattttcatgggtatatttatgcaataacttttcagaaaaagatacaaaaaaag

SEQ ID NO: 990848 - DNA, 120 bp, Artificial Sequence
  ENSG00000286328_7 (sequence is synthesized)
caacattttttttcctgtgattttgcttacttgaaaatatctttattccatgggtcagccaactataggctgtaggctaaaatcctcccattttagtgaataaggttttattagaataca

SEQ ID NO: 990849 - DNA, 120 bp, Artificial Sequence
  ENSG00000286328_8 (sequence is synthesized)
gccacatccatttgtttacttattatatattatgccacaatggaagatttgagaaattgcaataaagaacatttagatgataaaatctacaacatttattatctggacctttacgaagca

SEQ ID NO: 990850 - DNA, 120 bp, Artificial Sequence
  ENSG00000286328_9 (sequence is synthesized)
aatatttgctaacacttgctttattctatgttcacacaaaattgttaattttgctagatatagaattttaaagggctttttttttatcttctagcttccagagtgaatgtttaatagcct

SEQ ID NO: 990851 - DNA, 120 bp, Artificial Sequence
  ENSG00000242147_0 (sequence is synthesized)
gtccatccatcacttgcagaaaacaaaagagagcaagagagaagacagtgggtgaagtcctggttccagactcccctttttgccgggatatgatggatctgtcagctggtgcctagagtc

SEQ ID NO: 990852 - DNA, 120 bp, Artificial Sequence
  ENSG00000242147_1 (sequence is synthesized)
ctagagagctagagatggagggaaattcagatcatctaaacccttcagcccttcactggacagaagaggaaactgaggctccatctgcatgacgttcccagagtcacggcacaaattcat

SEQ ID NO: 990853 - DNA, 120 bp, Artificial Sequence
  ENSG00000242147_2 (sequence is synthesized)
tgctagtaatgacaatcatgttatgtttgtttctgtagctttggaaatcactccttccacttgagtttcaggtcccaactgtccacacctgcaggagtgaggttttgctgagactgataa

SEQ ID NO: 990854 - DNA, 120 bp, Artificial Sequence
  ENSG00000242147_3 (sequence is synthesized)
ggcactcacattttgtgggagttgaattgtctctgtagcctagaatctagatttttttccctcctctgctctcagtgaacggagaattccatctcggtacaatctgtgaaccattctgca

SEQ ID NO: 990855 - DNA, 120 bp, Artificial Sequence
  ENSG00000242147_4 (sequence is synthesized)
gtaagattgtcatcgtctcattcatactacctggtcggtaacacaaagggctgtaattgatgtggttcagagactcacatccaagcaataaaaatgaatcccttatggtggtctgcagca

SEQ ID NO: 990856 - DNA, 120 bp, Artificial Sequence
  ENSG00000242147_5 (sequence is synthesized)
gagtcccaggtagagttttgcccttgagcagcttcatgaggtcaaggaggggcgctcactccactctgcacggaaacactgagtggaatgaaaatacaaccggagagaatgtcctcccca

SEQ ID NO: 990857 - DNA, 120 bp, Artificial Sequence
  ENSG00000242147_6 (sequence is synthesized)
agagaggtgagtcatccattcttcatggcacagctgtcgccttcctgaaactcacattagacacgcgctcatagaatcaaatgtaccacatgcagccattacagacgggcacaccaaccc

SEQ ID NO: 990858 - DNA, 120 bp, Artificial Sequence
  ENSG00000267058_0 (sequence is synthesized)
caaatgaacagtgttgtgtacctgtgtgaattgtcactgtgactccaggctctaggctctgcagattcctcagccctatcgcctcacagacacttgggatgtgcagcaggtaaaagagag

SEQ ID NO: 990859 - DNA, 120 bp, Artificial Sequence
  ENSG00000267058_1 (sequence is synthesized)
aagccagattcatggaggcgtgaaggatcccagcaagaaaacacagacttgatcttgagacgagatttttgaaattggttgcggcctcaaggcaggctctgagaagactcgataaagagt

SEQ ID NO: 990860 - DNA, 120 bp, Artificial Sequence
  ENSG00000267058_2 (sequence is synthesized)
gatatttcccccttggaagcgccgaggagccagctctatgtttgtaaccatagcatttctaaagctccagccccaggaacctgctgtgaattagagacagattccaccctaggcatcact

SEQ ID NO: 990861 - DNA, 120 bp, Artificial Sequence
  ENSG00000267058_3 (sequence is synthesized)
gatcttggcctctcttgtattgggaaggtcaacactgttccagtttctctcctactcccatctggttgtgctcggtgaagtagtgctacccttctgttaaaaaaaaaaaaaaaaaaaaga

SEQ ID NO: 990862 - DNA, 120 bp, Artificial Sequence
  ENSG00000267058_4 (sequence is synthesized)
gagctgctgtagcccctacgtggtgagtagatcgtctccacagaaatcagcggaggcttccacagtccctggttggaatggaaccggcggtgaggatgagaggcgctgaagaccagaaga

SEQ ID NO: 990863 - DNA, 120 bp, Artificial Sequence
  ENSG00000267058_5 (sequence is synthesized)
cccagggcgtgaacggggcgtgtcatccctggagtttcagtagaatttcaggcctgtctgcttgagcagcagaggaggagtttctgtgtgcctgtgagagactgtgtgtgtgtgtgtgtg

SEQ ID NO: 990864 - DNA, 120 bp, Artificial Sequence
  ENSG00000267058_6 (sequence is synthesized)
gaaagctaaagtccagttgaactccagaggagaacacagcccaggtaacccctcgtttgcagcctgtgagaccagcctgaggacagcacccagctaaactccaggtccatggaaactgtg

SEQ ID NO: 990865 - DNA, 120 bp, Artificial Sequence
  ENSG00000267058_7 (sequence is synthesized)
agattttatatatttatgttgttttaagctaaattcgtggtaattggttatggtagcaactgaaaattaatgcagtaagaaagtctaaggagatcggaagagactaaagagaaataacag

SEQ ID NO: 990866 - DNA, 120 bp, Artificial Sequence
  ENSG00000267058_8 (sequence is synthesized)
ggaaaagaaaaaggacattaatgggaaaacatatttgaataagatgtgcaaatttttcgtattgtaccaatgttaatttcctggttttgataattatcctttggttatgtaagataaacg

SEQ ID NO: 990867 - DNA, 120 bp, Artificial Sequence
  ENSG00000267058_9 (sequence is synthesized)
ctagaatgaagggtatatgagaaccctctgtactactcttgcaacttttctctaagtctaaaataagtggaaattaaaagttaaaacaaaaaaaaaggaaaattttatctatcccaagac

SEQ ID NO: 990868 - DNA, 120 bp, Artificial Sequence
  ENSG00000267058_10 (sequence is synthesized)
cacaaagttatttttctgtttcttcctccagaatctttattgtttgttttcacacttagacctatgatccatcttgaatttatatctgtgtatgtagtgggatgaagttcaaaatcattt

SEQ ID NO: 990869 - DNA, 120 bp, Artificial Sequence
  ENSG00000267058_11 (sequence is synthesized)
ttttcatacagatatccaagtgcactggcaccgtttgttaaaaacactggccttctcttaagctgcagtcagacttttactgtaaagcatgggcccatatatgtgcaggagtctttctac

SEQ ID NO: 990870 - DNA, 120 bp, Artificial Sequence
  ENSG00000267058_12 (sequence is synthesized)
ttttccgttggtcctctttgtcaatctttgtgccagcacctccattttaattcctgtagctttatattatatcttgataatctggtaatataagttgaagaacaactttgttcttcaaaa

SEQ ID NO: 990871 - DNA, 120 bp, Artificial Sequence
  ENSG00000267058_13 (sequence is synthesized)
tcactttgtctattccaggttctttgcattgctctataattttagaatgagttaattaattttctcaaaacaaacaaaacgccctgctgacattttgttggcagtacattgaatcagtag

SEQ ID NO: 990872 - DNA, 120 bp, Artificial Sequence
  ENSG00000267058_14 (sequence is synthesized)
ataaatttagagagaattatctcaaaattgagtcttacagttcatgaacatggaatacatttccatttattgaattcatctttaatttctttccttaaggttttgttgtttcctgtctaa

SEQ ID NO: 990873 - DNA, 120 bp, Artificial Sequence
  ENSG00000267058_15 (sequence is synthesized)
aggtcttgcacatctgttaaatttattcctgttttacattttttatgtttttacaaactgttaaggttttaaaaattttatttttcagtagctttgctttaatataattgttttatactt

SEQ ID NO: 990874 - DNA, 120 bp, Artificial Sequence
  ENSG00000267058_16 (sequence is synthesized)
ttaccctttattcagcaataaattatttaatttaaagcttgtggaattaaaaaatatttttatgtacataatcatgtaatctacactatctgcaaataaagatcattttacttccttcca

SEQ ID NO: 990875 - DNA, 120 bp, Artificial Sequence
  ENSG00000242145_0 (sequence is synthesized)
aaagtcatctatgtttcctgataaaggggacaattatttgccatggcactaagatgtgtcatctttgtgaatatgatctagaagaaaaagcacaattatttaaatatggcccattttggt

SEQ ID NO: 990876 - DNA, 120 bp, Artificial Sequence
  ENSG00000242145_1 (sequence is synthesized)
ttctgatagatttgtttgacaccttttcttattttgaggtgtagtatgcttccatgtacctttccagtataaattcaggtcctaccatctggagtgactcaaagtaaggttggacttctt

SEQ ID NO: 990877 - DNA, 120 bp, Artificial Sequence
  ENSG00000242145_2 (sequence is synthesized)
aaatattgctgcgaaaggccatcatggcatgttcatcatatggcatcccctgctatgtctcttcctggttgggaggaaatggggtccttcacctgctgcccaagacgggtgcgtgcaagt

SEQ ID NO: 990878 - DNA, 120 bp, Artificial Sequence
  ENSG00000242145_3 (sequence is synthesized)
catctcctgtgtcgactgtgggacgagacccgctgatcataagaaactgaactgatactcactgttgaaactgggctttctctgtttcttctatatgatagtaaagcattgttccatcca

SEQ ID NO: 990879 - DNA, 120 bp, Artificial Sequence
  ENSG00000267054_0 (sequence is synthesized)
ccccagaagcagttcctcttcctgcctcttctatggatctgggtttattgtttttgtttgtttgtttatttctgtcgttttctagtcaattctcgcgcttttgtatcttggttgtttttg

SEQ ID NO: 990880 - DNA, 120 bp, Artificial Sequence
  ENSG00000267054_1 (sequence is synthesized)
gaaagcttgtaaggagactttgacgttttgcagtgctgataggagcgttcacctggatccaattagggatgaatttattggaaactgggcttgctgcagtggtgtgatctctgctcactg

SEQ ID NO: 990881 - DNA, 120 bp, Artificial Sequence
  ENSG00000239944_0 (sequence is synthesized)
atgctgggatcacccagatgccaagatatcacattgtacagaagaaagagatgatcctggaatgtgctcaggttaggaacagtgttctgatatcgacaagacccaagacgggggctgaag

SEQ ID NO: 990882 - DNA, 120 bp, Artificial Sequence
  ENSG00000239944_1 (sequence is synthesized)
aggaccaaagttgatgtcacagaggggtactgtgtctcttgaaacaagcttgagcatttccccaatcctggcatccaccagcaccagccagacctatctgtaccactgtggcagcacatc

SEQ ID NO: 990883 - DNA, 120 bp, Artificial Sequence
  ENSG00000239946_0 (sequence is synthesized)
gaaatacaaaagcttggtttctaaggctgaatatcatgagaaactatcatgttatcctgtgtgagtgagctccacgaggccaggttaaagaaattatgaaaactgaaagcctgtctttat

SEQ ID NO: 990884 - DNA, 120 bp, Artificial Sequence
  ENSG00000239946_1 (sequence is synthesized)
tcttaccattatttggacatttccagaaatcaagatccacttcagtttgtgaagatgagctgtgcttagacataggcttaaaaagaaaagcaggctgaggcagaaggatcgcttgagccc

SEQ ID NO: 990885 - DNA, 89 bp, Artificial Sequence
  ENSG00000239946_2 (sequence is synthesized)
cagaaggatcgcttgagcccaacagttcaaggctgcagtaagctaagaaggtgccactacactcctgtaaaataagataaaataaaaat

SEQ ID NO: 990886 - DNA, 120 bp, Artificial Sequence
  ENSG00000239941_0 (sequence is synthesized)
cctgccagaggcactgcagggtgtagtcactttcagcactcctgtctgacaactcccagacttttcctgctttaatctcttcaatgcccaactcagagataaatcttcctaaaataacat

SEQ ID NO: 990887 - DNA, 120 bp, Artificial Sequence
  ENSG00000239941_1 (sequence is synthesized)
ctaaaataacattctcaccatgttgctttcctggtcaagaacctacaggctctcctcatagattactgcatcaagatcccaatactcagctgggcatgatggctcatgcctgtaatccta

SEQ ID NO: 990888 - DNA, 87 bp, Artificial Sequence
  ENSG00000239941_2 (sequence is synthesized)
ttgcagtgagctgaaattgcaccactacactccagcccaagtgatagagtgaaagactctgtcactcaaattctgtacttgaaattc

SEQ ID NO: 990889 - DNA, 120 bp, Artificial Sequence
  ENSG00000267051_0 (sequence is synthesized)
cagcttcctctgcggaacttcatcgcgggttccccaggactgcccaggcctccccaggactgcacaggcctcccctgggccggcggagccgctctcaccttccacacttcgccgccctcc

SEQ ID NO: 990890 - DNA, 120 bp, Artificial Sequence
  ENSG00000267051_1 (sequence is synthesized)
tgcgctcaggcagcattctggacacgggatgtacaagcttctcctgtacctgcagtttctcacgataatcagctcacaatagtccttatgccaaagaggcatgtgtggaggtgccatatt

SEQ ID NO: 990891 - DNA, 120 bp, Artificial Sequence
  ENSG00000267051_2 (sequence is synthesized)
ctggtctcctacaacattcagtaatggtcaagatggttgatgcaggaaacagatggaggggcagaagttgatactcatctcattagatccaaagaagccaaatggtggccatcacctgtg

SEQ ID NO: 990892 - DNA, 120 bp, Artificial Sequence
  ENSG00000267051_3 (sequence is synthesized)
gagagaataggagtgaggcgggcaaaggaagcagaagccattgtgaactgccctagagaaaccttgggcatctttttgttgggcaaagtggtagaggctgaaacggggaatagcatgtaa

SEQ ID NO: 990893 - DNA, 120 bp, Artificial Sequence
  ENSG00000267051_4 (sequence is synthesized)
cattttatttgactgaaataaacagctgtttgttttttttttctttcatatgtaagatagacaaaaggtgtttgacagataaggattggggcaatgttggtatgagttcagctttttagt

SEQ ID NO: 990894 - DNA, 120 bp, Artificial Sequence
  ENSG00000267051_5 (sequence is synthesized)
ttgttctttaaaagtggccatcaagatgtgggtgtaaggtatttcacagtgatttgcattcattctcattgctgtcaccatcaaggcccagttactcaatatccaagtttgtttttgttg

SEQ ID NO: 990895 - DNA, 120 bp, Artificial Sequence
  ENSG00000267052_0 (sequence is synthesized)
agcttctgaaaaacttctctgagagacagatgacaagtgccttctgtcctctattctttattcgtttttgtacttcacatgctgcctagggccacacccttttggtggtgagtggggagc

SEQ ID NO: 990896 - DNA, 120 bp, Artificial Sequence
  ENSG00000267052_1 (sequence is synthesized)
tggaaggagccaggttcttgaggactttataggagaagaaaagcaactcggagataagaaactccacacccttttgaggagagaacttgacatctgaattttcatgtttgtgttctttga

SEQ ID NO: 990897 - DNA, 120 bp, Artificial Sequence
  ENSG00000267052_2 (sequence is synthesized)
acaaacatcattaaagcataccaaatctacacccagtaaaagttttggatgaagacagacaaaaatgtgaatggactacaatggaagatgcacagacatatattaaccaggtacagtaag

SEQ ID NO: 990898 - DNA, 120 bp, Artificial Sequence
  ENSG00000267052_3 (sequence is synthesized)
ctcgagcacatcaggaaatagagttcaaccaagttggaaggtcggccttggaagacactgagttcctgaccctggaggacaggctgtgttcattcaggacctggaggttttcaaactctc

SEQ ID NO: 990899 - DNA, 120 bp, Artificial Sequence
  ENSG00000267052_4 (sequence is synthesized)
tcaatgccctgctgctgcatttgaactgtatacaagtccacttcctgtgtctttgaagaggaaatttctcatctgctatcaagggtgttgctaataatttaaagatcgggttttttttct

SEQ ID NO: 990900 - DNA, 120 bp, Artificial Sequence
  ENSG00000267052_5 (sequence is synthesized)
gcattttagtctggcacatctgggactcaagtttcaagtgctgagtcttgtaaggactgttctgcagccaaaaaccaggaaaggggaaacagaagcaaaaaaccaatcacaagtgaaaaa

SEQ ID NO: 990901 - DNA, 120 bp, Artificial Sequence
  ENSG00000267052_6 (sequence is synthesized)
tggccacctggaaggggaaacacccttttcatcctgtcattcatttcttagctaaataatgggttcaatatacataattccaaaaccaaaattagaatttttggaagacgcccccaatat

SEQ ID NO: 990902 - DNA, 120 bp, Artificial Sequence
  ENSG00000267052_7 (sequence is synthesized)
ttaggcattttatctcctgaccagtttgtcttggaaggtattccaggccaggaaattctaatgtatttctctatgttaaaagacatataggagatttttatttattggtcaaggtggata

SEQ ID NO: 990903 - DNA, 120 bp, Artificial Sequence
  ENSG00000267052_8 (sequence is synthesized)
cgtgggaacacctgctttaaaatgctcaagactgggattatgactctgatcaagtaaaactctagagcctcaagatctgttgaaatggagaagataaaaactgctgggtccctgcttgcc

SEQ ID NO: 990904 - DNA, 120 bp, Artificial Sequence
  ENSG00000267052_9 (sequence is synthesized)
cttccccacccaaaatttcttggccctgaccctgatcctcctccctcagaccacctgtagatgaaggtggagtagccttccactgagacatcatgaggctctctggctgtcataaggagg

SEQ ID NO: 990905 - DNA, 120 bp, Artificial Sequence
  ENSG00000267052_10 (sequence is synthesized)
gcatcaaccgactgtggaaatatagttttgtatttcatcagcatcatagaatatcatctcaaactcactgagggccaacagtgtttatagactcagttatgaagaattctgttttaagga

SEQ ID NO: 990906 - DNA, 120 bp, Artificial Sequence
  ENSG00000267052_11 (sequence is synthesized)
gaattacctgaaagagatgtaatcctgatactttaaaatttatctttgggtttgtagaccctcagcgagcagcctacatgggccactcagttctggctccccactgacttactgagccca

SEQ ID NO: 990907 - DNA, 120 bp, Artificial Sequence
  ENSG00000267052_12 (sequence is synthesized)
gctttggcattctgctatttgcacacttgggtggggggtggggggagtagaaagctgtgccaagaaatgtgatgttgtacttactctaattgttataaagttttggtgccgcaaaagaaa

SEQ ID NO: 990908 - DNA, 120 bp, Artificial Sequence
  ENSG00000267052_13 (sequence is synthesized)
cttttggtggtgagtggggagctggaaggagccaggttcttgaggactttatagggtgatgctgatgcacttggttccagcgccctgctttgagaagcaagactcaagagaatgggtatg

SEQ ID NO: 990909 - DNA, 120 bp, Artificial Sequence
  ENSG00000267053_0 (sequence is synthesized)
cggtggctcgtagtcgcgtaaagcagaagtagcagtttcagcggctgacactaagaacaatgcatactggcaaagtgaggtgtctcacatctttaatcccagcagtttgggaggctgagg

SEQ ID NO: 990910 - DNA, 120 bp, Artificial Sequence
  ENSG00000267053_1 (sequence is synthesized)
aggggatcacaccagcctaaccaacatgatgaaactccgcgtctactaaaaaaaagtaccagacagttagcgcggtgtggtggcatatgcctgtaaatcccagctatttgggaggctgag

SEQ ID NO: 990911 - DNA, 90 bp, Artificial Sequence
  ENSG00000267053_2 (sequence is synthesized)
aggctgaggcaggagaatcggttgaaccagtgtggccgaggttgcagtgagtgtagattgcaccactgcactctagcctgggtaacaagc

SEQ ID NO: 990912 - DNA, 120 bp, Artificial Sequence
  ENSG00000267053_3 (sequence is synthesized)
tgcagagttaggccagattcattttcagagtaggagggaatttcaaattatgggtgaaatgtcccaactgccggaaggtgaaagtgttctgtgatgtaaaatttaggtcacactctataa

SEQ ID NO: 990913 - DNA, 120 bp, Artificial Sequence
  ENSG00000267053_4 (sequence is synthesized)
agcttctccttattctatgtgtgaacagctagtctgtatcttcacctatgcatatttaaaaatcaaccttacgaaggctcttggccaccataatccttcctaccctgtagcaagagccca

SEQ ID NO: 990914 - DNA, 120 bp, Artificial Sequence
  ENSG00000267053_5 (sequence is synthesized)
gcctcagactatgtttccttctgcctccgagtgcaatgccttcccccgagtctccaaggtaccaaaccggtcaggggcagctgagacagctctacttgtacgagtcctccccaagccctt

SEQ ID NO: 990915 - DNA, 120 bp, Artificial Sequence
  ENSG00000267053_6 (sequence is synthesized)
gaaatcacaggcatctctgctgtccctgccctttatccacatcactgaacaattaagcacacacatctgtgtagttttatttaaactgttccatgtgtgtttgtttacaattaacaacat

SEQ ID NO: 990916 - DNA, 120 bp, Artificial Sequence
  ENSG00000267053_7 (sequence is synthesized)
gaatgactgcagtatggatgcagcagaaaggaatgctgagggaggactccagttggaatgagccacttttccaggactaggaatgaactttccccagtaccaacaaggcagcctccaggg

SEQ ID NO: 990917 - DNA, 120 bp, Artificial Sequence
  ENSG00000267053_8 (sequence is synthesized)
tcaagatggaattacagagaattctcacctcttttttgactctcaggtggaaacccccttcccatggggtgaagcgcagtctgctccagagacccactgttagggtcggggatgtcacag

SEQ ID NO: 990918 - DNA, 120 bp, Artificial Sequence
  ENSG00000267053_9 (sequence is synthesized)
aaattaacagggcagccaattcccatccagaggggcccaggatgaccccgaaccctctagctcagccccaagctcgggccagggagtgaagcctttgtccccaagcaacagagtgagggt

SEQ ID NO: 990919 - DNA, 120 bp, Artificial Sequence
  ENSG00000267053_10 (sequence is synthesized)
ctgtctctaacccggtgggctccagtgaaaggaaaatggcctggaggtgcccacaggagggcgccctagttctgagacaggtctacggctcccagactgcgtccccatgagtaacagagg

SEQ ID NO: 990920 - DNA, 120 bp, Artificial Sequence
  ENSG00000267053_11 (sequence is synthesized)
gacacgcagaggggcatactgagtgcctataggggactcacagactgcagatgcacgctgcggatccagaagccggtcaggtaatgaggtgcagaggtgtggggaagacctgggtgcttc

SEQ ID NO: 990921 - DNA, 120 bp, Artificial Sequence
  ENSG00000267053_12 (sequence is synthesized)
cctgggtgccaaccagcctaacccgccggggccaccaaacagaagtgcttctgacattaacgcgacacacagaaggtgtgtagggtgggtagtggaagtgaccgcagaggcctctgggga

SEQ ID NO: 990922 - DNA, 120 bp, Artificial Sequence
  ENSG00000267053_13 (sequence is synthesized)
ttgtagttttggagctagagaggcgggcaagcagttggcttcgcccacacggtgtgcctctcacatctgcacagcgcacacaaccaagcttaggagccgactgttaagatgccccagtga

SEQ ID NO: 990923 - DNA, 120 bp, Artificial Sequence
  ENSG00000267053_14 (sequence is synthesized)
cacggacaagtttctcctctgcaacccaatgagagctgctgaccacgagagcatcgcgggaccgccaaaggattctggaaaatgtggtcccgggtggccagtgtgcgctgaccttcacct

SEQ ID NO: 990924 - DNA, 120 bp, Artificial Sequence
  ENSG00000267053_15 (sequence is synthesized)
gaaggtacggcttgaaggaaacttctggagggtggggtggtgttgaagagaaggcacaattgtcaccattttgttcaacatgggcgttttctttgtgcattgatttgcatttttaaaggt

SEQ ID NO: 990925 - DNA, 120 bp, Artificial Sequence
  ENSG00000267053_16 (sequence is synthesized)
attccattaaaaatatgtttatctattttaatgttttttttggtgcccctttaaattctctatccacagtcctgagccttaatacgaagtgagggcctggcctctgggcatcaagcagcc

SEQ ID NO: 990926 - DNA, 120 bp, Artificial Sequence
  ENSG00000267053_17 (sequence is synthesized)
agaaagtcccttaggagctttctctgaattgttgaattgtgactgatcttttcctttcctgacttccttaatatccacaatttcctcgtaaccatccccccaaagccacacccacaaggc

SEQ ID NO: 990927 - DNA, 120 bp, Artificial Sequence
  ENSG00000267053_18 (sequence is synthesized)
acctccaagacctatcatgaagcagatattcaaagattatttgtaaatcttcacaccccaccccttccagaatgtcttccaacatcccttcgcctggagaaataaaacacaaggtttgca

SEQ ID NO: 990928 - DNA, 120 bp, Artificial Sequence
  ENSG00000267053_19 (sequence is synthesized)
ccctggggtgcccttccccaagcagatgccaggttggggcagaagcagttcagggagaagcgatgcgctcctgggactgccggtttggggggcaacatcggccctgtgtcccctagagta

SEQ ID NO: 990929 - DNA, 120 bp, Artificial Sequence; identical to SEQ ID NO: 952231
  ENSG00000267053_20 (sequence is synthesized)

SEQ ID NO: 990930 - DNA, 120 bp, Artificial Sequence; identical to SEQ ID NO: 952232
  ENSG00000267053_21 (sequence is synthesized)

SEQ ID NO: 990931 - DNA, 77 bp, Artificial Sequence; identical to SEQ ID NO: 952233
  ENSG00000267053_22 (sequence is synthesized)

SEQ ID NO: 990932 - DNA, 86 bp, Artificial Sequence; identical to SEQ ID NO: 952234
  ENSG00000267053_23 (sequence is synthesized)

SEQ ID NO: 990933 - DNA, 120 bp, Artificial Sequence
  ENSG00000267053_24 (sequence is synthesized)
ccagacaactcttggggtatggttggagcctgaggtctacagatgggtcattttatatgctgaggtctgaacaagatgattttaaccccttaaaatgatggaaacaaaataaaacagaat

SEQ ID NO: 990934 - DNA, 120 bp, Artificial Sequence
  ENSG00000263745_0 (sequence is synthesized)
aaagaatcatctgaaaggaatgtggagatcagagaaaaatgatgggaaagttaccacagcctgcaaatgagaaatgatgagagcctgcctgggacaaagaatctacaatagatcttctcc

SEQ ID NO: 990935 - DNA, 120 bp, Artificial Sequence
  ENSG00000263745_1 (sequence is synthesized)
agcagctctggaggtcagacccagctgtggagagaatcatttctaaaaaactagaaggcacgttgggagactactactttctgtggatgaatgggaaattcaagacagaaaatggatggg

SEQ ID NO: 990936 - DNA, 120 bp, Artificial Sequence
  ENSG00000263745_2 (sequence is synthesized)
cgatatggaaatacaactgttttgccaggacgattaaatatcattgatgcttctggtctacaattagtcagagaagagattaaaaaaatgatgagtattcaagaaggaaagtgtttgctt

SEQ ID NO: 990937 - DNA, 120 bp, Artificial Sequence
  ENSG00000263745_3 (sequence is synthesized)
tgtgtggaacggatatggaaacaagaccacaggagcatcgagaactgagcagaactgaaggtgacatgaaaatcagctgcaagattcacctcagggtgataatgggctgcaggtggctgc

SEQ ID NO: 990938 - DNA, 120 bp, Artificial Sequence
  ENSG00000263745_4 (sequence is synthesized)
aggaatcccgggacattctaggcactgccatattttcttaggggccagtaaggatggctatcatcagatgtacctgatgatacaaacatgggctgtcttgccttctagtattcattcttg

SEQ ID NO: 990939 - DNA, 120 bp, Artificial Sequence
  ENSG00000263745_5 (sequence is synthesized)
atgattgcatccagagctcactttggaggtgcagatcaactcttcttcaggctcatccatgcgacttgagtgggctctcatccccattcccaggggcttatgacaatcaaggtttccact

SEQ ID NO: 990940 - DNA, 120 bp, Artificial Sequence
  ENSG00000263745_6 (sequence is synthesized)
cctccatggtctcaatggtttttctccccatgggaagcacataatcccattagaggccacgggaagcttttttgttgggctttgagggaaaaaaggcttttgcagccaatgaatcgatca

SEQ ID NO: 990941 - DNA, 120 bp, Artificial Sequence
  ENSG00000263745_7 (sequence is synthesized)
ctgcaagtaaccctgaggaaaggagaagaagggaagggaaaatcacacaagaagcctggaaagtgaggaggtagtctcagatcagatgcactgtggagcctatgtctagaagtgactctc

SEQ ID NO: 990942 - DNA, 120 bp, Artificial Sequence
  ENSG00000263745_8 (sequence is synthesized)
caggggagctaaaatccatgtatttgggcacacacttgaacaatattgctagagaaatttaagcaagagcacaaagattgccggaggccagaaagtaagacaaataacagctcacctgcc

SEQ ID NO: 990943 - DNA, 120 bp, Artificial Sequence
  ENSG00000263745_9 (sequence is synthesized)
tggcttgttggagcaacaagaaactttaagagcaatcctccatttgccaggttccttggtaattagacttgtcaatagaacagatttctgtgtccataatgcataaggttaagtaagggg

SEQ ID NO: 990944 - DNA, 120 bp, Artificial Sequence
  ENSG00000263745_10 (sequence is synthesized)
gatgtatttcaaacttcccttgaactttctccagtaagtataattgtgtgcttgttgtcaacccggccttagtccttgtcattacaggttcagtagctgcaaaggtgaaatgttttgaca

SEQ ID NO: 990945 - DNA, 120 bp, Artificial Sequence
  ENSG00000263745_11 (sequence is synthesized)
aatattgaacgtcatctattttatactctggatcagcatggatgttttttagcttcttcagacggctctgtaatggagttatatttggaagtttcccagtatggtgcaaaaagcctcata

SEQ ID NO: 990946 - DNA, 120 bp, Artificial Sequence
  ENSG00000263745_12 (sequence is synthesized)
gagagaggaagtttataaactgcagttctacgcgaagaagaaagaccagatgctcatcctgcatgactcctccttgagcctttgtattttcccagctagacctttcaggcttcctattta

SEQ ID NO: 990947 - DNA, 120 bp, Artificial Sequence
  ENSG00000263745_13 (sequence is synthesized)
aggccaccccagccctgcagaactaagtgactctccaggggagctaaaatccatgtatttgggcacacacttgaacaatattgctagagaaatttaagcaagagcacaaaggcactacgt

SEQ ID NO: 990948 - DNA, 120 bp, Artificial Sequence
  ENSG00000263745_14 (sequence is synthesized)
tgtctgggatgatggaaggagctaaagtcttcagtgaatgaaggagcaggaccaggagctcaaaatacttctttgaagacaaagaagaaatgatattaccaaatggttggctcaaaagaa

SEQ ID NO: 990949 - DNA, 120 bp, Artificial Sequence
  ENSG00000263745_15 (sequence is synthesized)
catcttcctacctgggatgactgggctgagcaggaagcctaccccggggttccagccaagttggagcctgtgagtgtgtggtgtagtttaacgccctgattaaatcactaggaagccatt

SEQ ID NO: 990950 - DNA, 120 bp, Artificial Sequence
  ENSG00000263745_16 (sequence is synthesized)
tctctctctcctcccagaccagatcagacaatatgttcccttatttctactaaagccccaattggattttgtgtcttttgatactgaaagaatcttaccacaaataaaataatttgtcat

SEQ ID NO: 990951 - DNA, 120 bp, Artificial Sequence
  ENSG00000263745_17 (sequence is synthesized)
ggaggtgattggatcatgggggtggtttctgccatgctgttctcacggtagtgagggagttctgacaagagctgatggttttaagtgtggcacctccttgctcttgctctttctctctcc

SEQ ID NO: 990952 - DNA, 120 bp, Artificial Sequence
  ENSG00000263745_18 (sequence is synthesized)
attttctcaattaccctgactgtgctagatcaaaaatggccataaatttttttcagcctctcccatgaaaagctggtgtgcctttctcctcccttcaaatctgggctggctttgtaaatt

SEQ ID NO: 990953 - DNA, 120 bp, Artificial Sequence
  ENSG00000263745_19 (sequence is synthesized)
gctttgaccagtaaaatgtagtggaagtgatgtatgacttctcagcaagttcttaagaggtcttgcagttgttgctcctttccatttggaatgtttctccaccatactacaaattgagca

SEQ ID NO: 990954 - DNA, 120 bp, Artificial Sequence
  ENSG00000263745_20 (sequence is synthesized)
gtcctgccagattggctgtgtggaagaggtaattagcgttggtgttcatcatctctacggagtctttgcagtggggatggtttgagtgggaactggcaatgtggcagttagcagaagtga

SEQ ID NO: 990955 - DNA, 120 bp, Artificial Sequence
  ENSG00000263745_21 (sequence is synthesized)
tggtcttgaacaagcaatggtgcccatcgtcatccagatctggaattgctcccaatgtataaaccagtgcaaagactcccttgtatatgagtttattctgaacagctaaagatttgtaac

SEQ ID NO: 990956 - DNA, 120 bp, Artificial Sequence
  ENSG00000263745_22 (sequence is synthesized)
tatggaaaccaaagtgcaaaaataattagtgggcttaaaaaaataagttatttattaatcatattgtcttcaggtaatttacacacacagtctaactgaccataacagtgaatagctctt

SEQ ID NO: 990957 - DNA, 120 bp, Artificial Sequence
  ENSG00000263745_23 (sequence is synthesized)
tatggtctctgatgaaaagtaaacataatgaccatgaatttttgttaaaggccaggtagattcaggtgtatttaattacatgtccagctcttaataagctccaccaacagagaaatgaaa

SEQ ID NO: 990958 - DNA, 120 bp, Artificial Sequence
  ENSG00000263745_24 (sequence is synthesized)
ttatatggataaataaaataaaactatattttcacaaatagctaaattcccttaccttttgttagcacttcccatcctcaagacaaaggacacaagcaaaaaccccaaaccttttgcctt

SEQ ID NO: 990959 - DNA, 120 bp, Artificial Sequence
  ENSG00000263745_25 (sequence is synthesized)
tttcataaaccaattctagactgactgatttgagttttcttttcaagtcattcccaagtgttttcagtgaaggtttcagacaacaataaatcagtctgccatttagaaagcaaaggaacc

SEQ ID NO: 990960 - DNA, 120 bp, Artificial Sequence
  ENSG00000263745_26 (sequence is synthesized)
taacatgagggaggggggccggagaggaaagtgttacagtcttctagggtgttgtggcaggcagcttctgactggcttccgataatcactgcctcctgggacccacacttctgtgtaatt

SEQ ID NO: 990961 - DNA, 120 bp, Artificial Sequence
  ENSG00000263745_27 (sequence is synthesized)
tcctccccttgagtacaatctggacttagggacttgcttgtaaaaaacagaatggggtaaaagtgtgaggatgttgctttcatgattgggttataaaaaatgatgtcctccatctgccag

SEQ ID NO: 990962 - DNA, 120 bp, Artificial Sequence
  ENSG00000263745_28 (sequence is synthesized)
cattgtctttctcactagactatctctagctctctcacctgctctctctctctgattgaagccagctgccaagttgtgagatgctctctggaaaggcctatatggcaagcaactaaggga

SEQ ID NO: 990963 - DNA, 120 bp, Artificial Sequence
  ENSG00000263745_29 (sequence is synthesized)
ggtcttcagctcctgagtaactgagccctcaatccaacaatgttcaaagaattgattcctgccaatagccatgtgggtgatctgagaatcagatcctccccagtcaagccttcaagtaag

SEQ ID NO: 990964 - DNA, 120 bp, Artificial Sequence
  ENSG00000263745_30 (sequence is synthesized)
actgcagccctggctgaatctttaactgtggccttgtgagaaactctaatgcagagaactcagctaagctgtgaccagattcataatccacataaattgtattataataaatacatgttg

SEQ ID NO: 990965 - DNA, 120 bp, Artificial Sequence
  ENSG00000263745_31 (sequence is synthesized)
ttttaagctatgcttgggagtaatgggttacacagtaatatgtaattaatacaggagctttcaaattactctaagtgtgctcactgcccaccctttatcctagtaacttggcacagcacc

SEQ ID NO: 990966 - DNA, 120 bp, Artificial Sequence
  ENSG00000263745_32 (sequence is synthesized)
atagattttgaaacatttgaccatcctccctagtatgatcaactctcccattcttatcttctatttatttgaaagccaatggctcacctttatactaaaaaaaaaaaataagtacttaaa

SEQ ID NO: 990967 - DNA, 120 bp, Artificial Sequence
  ENSG00000263745_33 (sequence is synthesized)
gtttaccctcgatgaattgttctaggcatgtggcatacctatggcaactacaatagaagaatcgtaatttgataaaggaactaggagaggtattaagacacaacagtagaaagtgggaca

SEQ ID NO: 990968 - DNA, 120 bp, Artificial Sequence
  ENSG00000263745_34 (sequence is synthesized)
aaactggcaagataatgaaaagtggaagtgttggagttagataactcagggtttcagcatgttatgaatgtataagttctatgatttaggagaaaaacattaaactttcaaggccttcaa

SEQ ID NO: 990969 - DNA, 120 bp, Artificial Sequence
  ENSG00000263745_35 (sequence is synthesized)
agtttctcatttgtatgaagggagataggatcaactgatgtaaataagaatctgggacttgggactcagtaagtggtaaattccgtatttcttccttgcaaagacaagagcggaagaaac

SEQ ID NO: 990970 - DNA, 120 bp, Artificial Sequence
  ENSG00000263745_36 (sequence is synthesized)
tttctacatgaattcacattctttacttttccatctcataccatgctttggtttttgtggagtctgaagctcatttctcgttttcttacatctcaagttgacaagatgtagtagtcaatg

SEQ ID NO: 990971 - DNA, 120 bp, Artificial Sequence
  ENSG00000263745_37 (sequence is synthesized)
gattttgcattcattgtgaagtctaaatttaatctctgatggatggaaagtataaaccatatttgattttagaaagtcagctattttctttcccttttcatataagatgaaagtctccat

SEQ ID NO: 990972 - DNA, 120 bp, Artificial Sequence
  ENSG00000263745_38 (sequence is synthesized)
caagttgtctatattttgcacccctcctccccacctctaccttgtatctcggaggcaaggcagacatagagggagagctgacataacctggtctgtttcagctatgctgaataccagggc

SEQ ID NO: 990973 - DNA, 120 bp, Artificial Sequence
  ENSG00000263745_39 (sequence is synthesized)
tatattgtcaggaataaacttacaactgagggcaagcaaacctaaatgcattcacgtggaaatagggtttaatttagataaaggaactttctcccaaagatggctcactaattgcaagcc

SEQ ID NO: 990974 - DNA, 120 bp, Artificial Sequence
  ENSG00000263745_40 (sequence is synthesized)
caaatcttatgagtatatttgaacattgggcttttctaagtagtacattgcccattcatcctctagtaacattcaagatatgagtggatagggatgtattttagagtttttgtcagacca

SEQ ID NO: 990975 - DNA, 120 bp, Artificial Sequence
  ENSG00000263745_41 (sequence is synthesized)
ctcattgtgtcagtgagtaagtcctgtcatgcaatgggacacactgaacagtaatagtacaagcaagttgctcaaagtcagttgtttttagctaatttggagaatttctttgctacagac

SEQ ID NO: 990976 - DNA, 120 bp, Artificial Sequence
  ENSG00000263745_42 (sequence is synthesized)
atcttgagtttatccaaaaatccttgtatgttaagagcacctacttaagaaccataggctcattagtcttacttaagagactcttttgtcttaggatttgtttcaggatcccccagaagc

SEQ ID NO: 990977 - DNA, 73 bp, Artificial Sequence
  ENSG00000263745_43 (sequence is synthesized)
gggattacaggtgcacaccaacacactcggccaagctgatcttgaactcttgacctcatgatccgcccacctc

SEQ ID NO: 990978 - DNA, 120 bp, Artificial Sequence
  ENSG00000263745_44 (sequence is synthesized)
agcctcccaaagtgctgggaatacaggctttagtcactgcgtccagtgagaaccaattcttttgaatctgttttctgataacaacccttctctttggtttctggttttgtgagatgtttg

SEQ ID NO: 990979 - DNA, 120 bp, Artificial Sequence
  ENSG00000263745_45 (sequence is synthesized)
gtgagatgtttgttcagtggggcttgtgttcagcttcccagatctccttcacctgcgtggtcccttctttgaacacaggcctcctggctgtttccaggcctggacttggcttgcctctca

SEQ ID NO: 990980 - DNA, 120 bp, Artificial Sequence
  ENSG00000263745_46 (sequence is synthesized)
ccaggcagggcagagctggccaaaaagggaaataaaatcttccattcaccagttggcccagtcaaccaattcagcagggtaagactacttattgcatgtcctttgaccgaacggttgtct

SEQ ID NO: 990981 - DNA, 120 bp, Artificial Sequence
  ENSG00000263745_47 (sequence is synthesized)
atttgccttttaaaaaggtggtttatatttttacccttcctgtctctcctgtaagcttctttagatcacacctgattcatatttgtgtcttccacggtacccatcctgtttggattgtgc

SEQ ID NO: 990982 - DNA, 120 bp, Artificial Sequence
  ENSG00000263745_48 (sequence is synthesized)
agagtttaatatatgtatttcttgagagtgagagaagaaaaggaatcagcatttataggatcctgtgtgttagtattttacatatgctatctattcagtattaacaaagatccttttctt

SEQ ID NO: 990983 - DNA, 120 bp, Artificial Sequence
  ENSG00000263745_49 (sequence is synthesized)
tcatttatggaggaagaaacaatttattcaagaacaggtagctaatgtgcaacagagaagatgtagaatccaaggctctctggtacaaagcccgtataatgtcttttattcctcaccaat

SEQ ID NO: 990984 - DNA, 120 bp, Artificial Sequence
  ENSG00000263745_50 (sequence is synthesized)
attgccggaggccagaaagtaagacaaataacagctcacctgcctggcttgttggagcaacaagaaactttaagagcaatcctccatttgccaggggaagataactggaaagctgagctg

SEQ ID NO: 990985 - DNA, 120 bp, Artificial Sequence
  ENSG00000263745_51 (sequence is synthesized)
ctcagtgtagagagaagccatttaaagactgagataacatttcaagaaaacaataaaacctgacaataagggaagatgagaaaaaaggaacattcctgactgtggttctgacattcacaa

SEQ ID NO: 990986 - DNA, 120 bp, Artificial Sequence
  ENSG00000263745_52 (sequence is synthesized)
gaagtgactctccaggggagctaaaatccatgtatttgggcacacacttgaacaatattgctagagaaatttaagcaagagcacaaaggttaatgacatctcttgtggggaccactgtga

SEQ ID NO: 990987 - DNA, 120 bp, Artificial Sequence
  ENSG00000259068_0 (sequence is synthesized)
atggaaactccactgagcactctgctgctgctcctctgtgtgcagctgacctggtcaaatggacaactgccagtggaacagaatgctccttccctgaaagtcaaggaaggtgacagcgtc

SEQ ID NO: 990988 - DNA, 120 bp, Artificial Sequence
  ENSG00000259068_1 (sequence is synthesized)
tgagagagaagatcagtggaagattcacagccaggcttaaaaaaggagaccagcacatttccctgcacatacaggattcccagctccatgactcaaccacattcttctgcgcagcaagca

SEQ ID NO: 990989 - DNA, 120 bp, Artificial Sequence
  ENSG00000259069_0 (sequence is synthesized)
accaatgcctggctacaggatcccctgaaactggaacaagcccttctttgacttcaacctgcttttcagaaaccaggggagatatggcgggaggggaatacttagtttccacataggcca

SEQ ID NO: 990990 - DNA, 120 bp, Artificial Sequence
  ENSG00000259069_1 (sequence is synthesized)
ccggccaggaggaagagggcttagaatcgtgaaagagactggcccaggacctgggctggctgacaggaagggtgcctgatgcagagcccgtgccgtcagcaggaggtagtttatccccag

SEQ ID NO: 990991 - DNA, 120 bp, Artificial Sequence
  ENSG00000259069_2 (sequence is synthesized)
tcagggctaaaatctccaaaaatatactgcgggctgtggagggccatggctgccggtttcaatgggactcggcgctcctccggctgctcacgctgcctcccccgccgccgccatcttctc

SEQ ID NO: 990992 - DNA, 120 bp, Artificial Sequence
  ENSG00000259069_3 (sequence is synthesized)
ccccgcacatacacccatctatgactatttcaataactcctataacagatggaatttttgcaagttttagaataacaaataacattaaaaatcgttatgaataaacattaatttacctaa

SEQ ID NO: 990993 - DNA, 120 bp, Artificial Sequence
  ENSG00000259065_0 (sequence is synthesized)
ccctcggctgcggggtagcgggcagccctgcgctgccggccgcctagcctgcaccccccgccctgggagggaagcctcgctccagccgcgtcgtttccgcgccgaagtgcgatccggggc

SEQ ID NO: 990994 - DNA, 120 bp, Artificial Sequence
  ENSG00000259065_1 (sequence is synthesized)
cccgcgctggagtcccctgctctcaggctggtggcagttgctggagtaccagggcaccaagtggaggatgtggtagacagcctctaagatgcgccccctgccaatgatctctgcctccag

SEQ ID NO: 990995 - DNA, 120 bp, Artificial Sequence
  ENSG00000259065_2 (sequence is synthesized)
aggtgaggaaagcagcagcagcagccacaggccagtattccagagcagctttgggttcctgtcaagacctgctttgagaaggaggtggctgtggggctggagggctgggcctgttcctga

SEQ ID NO: 990996 - DNA, 120 bp, Artificial Sequence
  ENSG00000259065_3 (sequence is synthesized)
gctggctgctggcagcacagcaatgaggcaacattgagaactgcgacacgaggcccagtcctgctactaaaccaactgtgtggacttgcatagtcacttcacccctcgggcctccatttc

SEQ ID NO: 990997 - DNA, 120 bp, Artificial Sequence
  ENSG00000259065_4 (sequence is synthesized)
tccactttggaaagcagtgttgggacgatgttaagggtttgcaaccttccaacatgaagacttatttttaaaagcaaaacatttcaaagagtccacatgacagtagtgttcattttggca

SEQ ID NO: 990998 - DNA, 120 bp, Artificial Sequence
  ENSG00000259065_5 (sequence is synthesized)
aggggaaagaaaaagtttttccgtttggtgttggggctaaaagggtcatgtcagaaagcagtgtgctctatgtgttcttaatgcctaaagtgggccttaaaacaagggtccctgtcccca

SEQ ID NO: 990999 - DNA, 120 bp, Artificial Sequence
  ENSG00000259065_6 (sequence is synthesized)
cgttctctctaaaagtctgcatgatgtccctcgtcatttctacgggttataagtgagcaagacgtttaccacgtatcacacttctgggggctatttcaacgcccaagctggggctgcaga

SEQ ID NO: 991000 - DNA, 120 bp, Artificial Sequence
  ENSG00000259065_7 (sequence is synthesized)
atggtttctgttctaatcctcccccgcgatttccacctctttacactcaactcacagaaaatagagtctgatgcattctgtgtttcatcaccggtcaaaagtgactttgagggtagggtg

SEQ ID NO: 991001 - DNA, 120 bp, Artificial Sequence
  ENSG00000259065_8 (sequence is synthesized)
gaggcctgagaagggcagcttcaggcaatagtaatcctgaaatttatcattgctcaaaataaatgtgctcaccttattaaaaagtacaacggaaagccacctttaagataagtagcaacc

SEQ ID NO: 991002 - DNA, 120 bp, Artificial Sequence
  ENSG00000259065_9 (sequence is synthesized)
aagtcgttaaacagcagtcttcaaggaagaactcctgatctcataaggctggagaaaaaacggggttagcctttgctggtgaaaaaaaaaaaaaaagacattcgaaactgcagtgaaggg

SEQ ID NO: 991003 - DNA, 120 bp, Artificial Sequence
  ENSG00000259065_10 (sequence is synthesized)
ctttcataacagaaacattagcttcattgtagcttgtcgtggaaaacagggaccttttaataggtggttcaaaagcatcagttagggctcaacaattttccttttttccccaaatactgc

SEQ ID NO: 991004 - DNA, 120 bp, Artificial Sequence
  ENSG00000259065_11 (sequence is synthesized)
aaaccataaacttgagtgaaggctttgttcagaaaggtggatgtaagactgatggaaaatgacatttgggaaatgatccccaggtctgtgttaatctctcatggaaagccacagactcac

SEQ ID NO: 991005 - DNA, 120 bp, Artificial Sequence
  ENSG00000259065_12 (sequence is synthesized)
ccaaagataggcgtatgaagatcgaagctctcctagcaacatgaaatcctccacgttgcagctgctacgccctagttctgatttttactaagacattaatggcacattataaatacaaaa

SEQ ID NO: 991006 - DNA, 120 bp, Artificial Sequence
  ENSG00000259065_13 (sequence is synthesized)
tgtgcaatgcaagaaaaataatactgctttgagaaataactgcatcattagactcaataattaaagttccctgaaattcttcttacatcacgctattgtggggagatggtgaagggattg

SEQ ID NO: 991007 - DNA, 120 bp, Artificial Sequence
  ENSG00000259065_14 (sequence is synthesized)
cccatttcaattttggaataaatagaagtaattccttagtgcattctgcttaaggcaaccaatgagagaatatgttagccaggcttctaaaggcaatcatgtgatactccatatttgcta

SEQ ID NO: 991008 - DNA, 120 bp, Artificial Sequence
  ENSG00000259065_15 (sequence is synthesized)
aaacaagagctgaatattttttttgttccatatgcaattccaaattttcagtcacaatttcatgaatattcagtatttctgcatgcccaggagtaattagcagacagtgtaaatgtgtga

SEQ ID NO: 991009 - DNA, 120 bp, Artificial Sequence
  ENSG00000259067_0 (sequence is synthesized)
gcttatttctcagagcagtcatcagagtcacttcaaagctccaacagtttcatcccctgcttttacacttgggtctatatattttttaatgtgtctggtgactcttggtttaaaacgaca

SEQ ID NO: 991010 - DNA, 120 bp, Artificial Sequence
  ENSG00000259067_1 (sequence is synthesized)
gacactgtggaaaaaaagtacaatctctggatgatattgtggccatcagagaggacccgccctgtcctctgccacaaagcagggacagatcaccagtcaagtcatgactgagctgtctag

SEQ ID NO: 991011 - DNA, 120 bp, Artificial Sequence
  ENSG00000259067_2 (sequence is synthesized)
agctgaggtgaacgtgactctcatgtcgggtgagaattagccactgcctcaagaggaaaaccagcacaggaagtccggctctcttctcagatcctctattctctgaataatttccacccc

SEQ ID NO: 991012 - DNA, 120 bp, Artificial Sequence
  ENSG00000259067_3 (sequence is synthesized)
aatcctggtggtcctggcagggttgagagccaacgtctatctcctgagacttacatcattataggcaagaaagggaaatccccatatgccagaaatggagtgggaaccgcgagccaggac

SEQ ID NO: 991013 - DNA, 120 bp, Artificial Sequence
  ENSG00000259061_0 (sequence is synthesized)
tcaagggttggatcaaattttatttgcctctattttccaatacctagcagaacagaagcatatcccaacttgtccggtcaagggaatcatcctctggagtgcttttggtgaattacacaa

SEQ ID NO: 991014 - DNA, 120 bp, Artificial Sequence
  ENSG00000259061_1 (sequence is synthesized)
atcctgtgcacctgagaggcaaggaagaccacctgaaagagaagaaatatagatgccccagagagactgtcttttctacaggatttggaaaatgaaccacaaatccaaatacccccacag

SEQ ID NO: 991015 - DNA, 120 bp, Artificial Sequence
  ENSG00000259061_2 (sequence is synthesized)
aggcagaatgctaaaaaccttcatctcagattgacacagtttagagatttgaaagcccacttctccttttaccatgtcaaattataacaggaaaaataaaatgctgatttgagtctctaa

SEQ ID NO: 991016 - DNA, 120 bp, Artificial Sequence
  ENSG00000259062_0 (sequence is synthesized)
ctcccggaattccctgccggtctccgcgggcacacttggctggctgctgcgaccaaaactaccttcgcgtggcagggtcctccctcctcctcacagacaccccgacatcaccctcaaaac

SEQ ID NO: 991017 - DNA, 120 bp, Artificial Sequence
  ENSG00000259062_1 (sequence is synthesized)
tggaagggacaaccccgagtgatctaggcgatggtggatacctgaaagccacccatggaaaaggtgaagaaagtgccccctggttctcagaagagccactgctgctgttgtgagcagata

SEQ ID NO: 991018 - DNA, 120 bp, Artificial Sequence
  ENSG00000259062_2 (sequence is synthesized)
atggtgtctctggctgcatcattcgtcaaccacacatattcatatgagtgttaccctccagcactgtgccttccaaaagcccctggctgaggaagcactgcttctgagccacagagacag

SEQ ID NO: 991019 - DNA, 120 bp, Artificial Sequence
  ENSG00000259062_3 (sequence is synthesized)
ctgatttatggaccattttatcaccgcttctaaactgtggctctaaacctaacacagagggtaatggtagtgctgtatccattcattcacccaataaatatttgctgagcaccatctgca

SEQ ID NO: 991020 - DNA, 120 bp, Artificial Sequence
  ENSG00000259062_4 (sequence is synthesized)
acgcgcgctccaaaccccggggtgggagggggctggagaaaggacgcgaggaaacccgaagaacattcattttctctttcccagggaacctgggtctgggcaggaacccggtttctcgcc

SEQ ID NO: 991021 - DNA, 120 bp, Artificial Sequence
  ENSG00000259062_5 (sequence is synthesized)
ctagagaccagtgaggcagggcaggagacactcagcagtttccctcgtgcgggatctctaataagaggctggcagaaaagttcctgtgcttcccatcctctgcccagctctagggtctca

SEQ ID NO: 991022 - DNA, 120 bp, Artificial Sequence
  ENSG00000259062_6 (sequence is synthesized)
gagagaatcacctccatcccacctacctcacaggatggctgtgcacattcattcattcagtcaactattttttattgagtatctactatgtgccagacactgttttgccacagatgatgt

SEQ ID NO: 991023 - DNA, 120 bp, Artificial Sequence
  ENSG00000276627_0 (sequence is synthesized)
aattacagaaagcacacaacaccctacagtgagcagaacgcagctccttccctccacccacctccccactacagagaatgatccagcccaatgccaaaagcactgaagccgggaaccctg

SEQ ID NO: 991024 - DNA, 120 bp, Artificial Sequence
  ENSG00000276627_1 (sequence is synthesized)
actgagatctcagcttcaatgctccttcctcagagacctttctgtccctgacctttctgaggagtataccctctttttatgggccctcaaaaccccctccctgtggcatttgttttagtt

SEQ ID NO: 991025 - DNA, 120 bp, Artificial Sequence
  ENSG00000276627_2 (sequence is synthesized)
aacaattctacacttatgcatgtgaatttgtgattagcatccatctcccccatcacagttatgagggcgagagctagtttcctccctgttgtgcagggcacatagcacaacgcctggccc

SEQ ID NO: 991026 - DNA, 120 bp, Artificial Sequence
  ENSG00000276627_3 (sequence is synthesized)
cgtagtcaggctcactaaatatttgctgaaagtagaaatgaataaacaggactgtagcttctaggggcttctgtgggagccagtatcgccattcatacctggggattatgggatattttc

SEQ ID NO: 991027 - DNA, 120 bp, Artificial Sequence
  ENSG00000276627_4 (sequence is synthesized)
aacaaaaacatgcactttgcacaaagtgaaagtcagagcctggagcctgtgcaaacggtgccttgagcagctctacggcgagtgtgaggatgcagtcaggggtccttcagcaggagccgg

SEQ ID NO: 991028 - DNA, 120 bp, Artificial Sequence
  ENSG00000276627_5 (sequence is synthesized)
ggcatcctgcagaacacagggccgggatcttcagatgtgcagcagggagggggcttggcacagccccatgagtttgagaagcttgaggcattaaggtgagtttcttgtggtgcagcgcgc

SEQ ID NO: 991029 - DNA, 120 bp, Artificial Sequence
  ENSG00000276627_6 (sequence is synthesized)
cagcagtgaagggaagtggttctctctcccctcatgcacagacacgcacaatgtccaggatccaggcagagaagcttcatcaaagttgtctgtgttttgccgcagccgaataaaagctgt

SEQ ID NO: 991030 - DNA, 120 bp, Artificial Sequence
  ENSG00000276627_7 (sequence is synthesized)
aggcttttctaagaagggttataaaagggagcagccgtgaagcccgtggacaagtcatcaattacagcaattacagtagcaccataaccttcccaggcttgctggagggaggttgctgtg

SEQ ID NO: 991031 - DNA, 120 bp, Artificial Sequence
  ENSG00000276627_8 (sequence is synthesized)
tacaacgtggttcagaattaaaacataaaatgccagggccctcccccagttagcagtattggttggaaacatgtttagcagtgagtaacagaagtcccaagaaataatggctaaaacaaa

SEQ ID NO: 991032 - DNA, 120 bp, Artificial Sequence
  ENSG00000276627_9 (sequence is synthesized)
caagagtatgtgtcttcacatagtaaggtatcaagaggtggctgtcactttaagttcactttctcatggatgccatcaaacaccaggtttattcaaccttcatgcactgccatcaccttc

SEQ ID NO: 991033 - DNA, 120 bp, Artificial Sequence
  ENSG00000276627_10 (sequence is synthesized)
ccatccacggactcttccgacatctgctgaacgtcatcacaagggggctgccatagctccacccgttgtatcagcattcagggaaggaggacagtgccaacaatatgtctgctcattttt

SEQ ID NO: 991034 - DNA, 120 bp, Artificial Sequence
  ENSG00000276627_11 (sequence is synthesized)
ttaagagaggaaaagactctcctggaagtccacggcagcattatgcttacttcttacttgccagaactttgtcatatggtcagactttaaagcagagaggcctttgctgtcagtggaata

SEQ ID NO: 991035 - DNA, 120 bp, Artificial Sequence
  ENSG00000276627_12 (sequence is synthesized)
cagcaacacacaagacagacacagttgccttcccgctgaggctggacgtctacaaagaaactctggacagctatttgccaaggcgatgggcactacagatgagacgcacaaatgatatga

SEQ ID NO: 991036 - DNA, 120 bp, Artificial Sequence
  ENSG00000276627_13 (sequence is synthesized)
ctcatgggtgacgctgggcaaacctcggtggttgagtcctgttgggttttctcataggaggtgagttggaagcggagacctacaagtaggtcagataggatggtgtgaaaagagccccac

SEQ ID NO: 991037 - DNA, 120 bp, Artificial Sequence
  ENSG00000276627_14 (sequence is synthesized)
ccagcctacagggaccacatgtagggataaagaaaggagcaggataatttccaaggactagaatcccagcttggttggagttcagagcctgagagcagaattttctccaggacaaggcag

SEQ ID NO: 991038 - DNA, 120 bp, Artificial Sequence
  ENSG00000276627_15 (sequence is synthesized)
aaggaacttgcgggaagcttcccctatcacccctgctccccacacctgtagagattaaatgaagatatctgtttcttaagcacctgtacccccaccacagcctctggaatgtgataggca

SEQ ID NO: 991039 - DNA, 120 bp, Artificial Sequence
  ENSG00000276627_16 (sequence is synthesized)
tacatggtcaactagttttccacaaaggcaccaaagaatcataatgaggaaaggatggcctctccaataaatgaccttgagaaaactgtatatccacatgctaaaaaaagaaaaaaaaaa

SEQ ID NO: 991040 - DNA, 120 bp, Artificial Sequence
  ENSG00000276627_17 (sequence is synthesized)
aaaaaaaggaaattggacccttctcttccaacatgcacaaaaatcaactcaagatggactaaagacctaaatgtaacacctgaaaccataaaagtcctaaaggaaaacacacaagaaaaa

SEQ ID NO: 991041 - DNA, 120 bp, Artificial Sequence
  ENSG00000276627_18 (sequence is synthesized)
ctctatgacattggccttggcagtgatgttttggatatttcaagttaactcgtcattcactgactccacataaaatccatccctcaaatattctcagaacctatcaccaagactgtgatc

SEQ ID NO: 991042 - DNA, 120 bp, Artificial Sequence
  ENSG00000276627_19 (sequence is synthesized)
acttctttgggatgctttaaagttaattaggaaaaataaaactgggttttacctttgaaaaactttctaactgtactgatgtgctcaaatagatggacacatgaatgaaaaatccagaat

SEQ ID NO: 991043 - DNA, 120 bp, Artificial Sequence
  ENSG00000276627_20 (sequence is synthesized)
ttattctttccatgtggtctaggtccctccatatgtttctctggattttgccattcactgaatgcacacgaacactgaatttactctctattgctgtgtaacaagttattgtaaaatgta

SEQ ID NO: 991044 - DNA, 120 bp, Artificial Sequence
  ENSG00000276627_21 (sequence is synthesized)
ttggcttaaaacaacaaataccatttttgcagcttctgtggatcaggaatcatgaagcagcttagtcgggtatttcaggctcagggcctctcatgaggttgcactgtagatgtgagccaa

SEQ ID NO: 991045 - DNA, 120 bp, Artificial Sequence
  ENSG00000276627_22 (sequence is synthesized)
ggctgccgtcatctgaagactggactagggatggaagctctgcatttgggatcatactcatggctgtggcccggaggcctcattttttcacccttgggcctctccgtggggctgctgcca

SEQ ID NO: 991046 - DNA, 120 bp, Artificial Sequence
  ENSG00000276627_23 (sequence is synthesized)
cccaagaagaagaaagaaagaccaagctagaaaccaccgtgtctttcataacccaatatcaggaatgaagaagcacctcttctgtgttcttttggtctcgcagaccaaccctggtaccat

SEQ ID NO: 991047 - DNA, 120 bp, Artificial Sequence
  ENSG00000276627_24 (sequence is synthesized)
gtggaaggaaattacacaagagtgtgactatcaggaattgaggatcactggggcacctggaggctggagtctacaggtactttatggcgagtcatggcgatggtgaggaagcagctactt

SEQ ID NO: 991048 - DNA, 120 bp, Artificial Sequence
  ENSG00000276627_25 (sequence is synthesized)
agaaagctttgagaacccaggctaggtttaccagttgtttcttctgagtctaacacaaaagacatgcttattaatagctgtggaattgatttgaattacatgcaaactccctcagaaaaa

SEQ ID NO: 991049 - DNA, 120 bp, Artificial Sequence
  ENSG00000276627_26 (sequence is synthesized)
tcccagcagctccagccctcagaagtcaccggccctgaggcttcagctttgttagcctccaggtgcttccaggaacattcttgtgcaagaccgtgtgagagtatctccaagatagacaag

SEQ ID NO: 991050 - DNA, 120 bp, Artificial Sequence
  ENSG00000276627_27 (sequence is synthesized)
ggcctctttctcccaagtcctcccagggacttggcagcttcatctctaaggcctgcagaggctgtggctatggctgtccattgttctcgctccttggcttcagttcagagccatcaaatc

SEQ ID NO: 991051 - DNA, 120 bp, Artificial Sequence
  ENSG00000276627_28 (sequence is synthesized)
cctgcagctcgcacactggaacattcatattttggataagtcaacaaaacagcttctagaaaatggaaaacccagagtgtgatctaccaggagctcctggtttcaaccagttccttgctg

SEQ ID NO: 991052 - DNA, 120 bp, Artificial Sequence
  ENSG00000276627_29 (sequence is synthesized)
tacctgctgggcctgtgatacgaagaaacatcatggcttcaatggcagccttggaaatgaacttcattgaaagggaatttacactgaggtttatgattgctgctatgaaaagagtgcaca

SEQ ID NO: 991053 - DNA, 120 bp, Artificial Sequence
  ENSG00000257932_0 (sequence is synthesized)
atgggatgggagggaacctgcgaagctcagaaccgcggcagtgggccggagactcagcgggccaggtgctgtcacagttcttctggtctgagtgtgtgactctcctgagagtcggaggag

SEQ ID NO: 991054 - DNA, 120 bp, Artificial Sequence
  ENSG00000257932_1 (sequence is synthesized)
atggctgcaggagcagtggctggacccatccctgtgctgtgcttgggcgttgacaaatctgctgctactttagtcggtagcagtggtttggcagtgatttgccttaattgccatatgcgg

SEQ ID NO: 991055 - DNA, 120 bp, Artificial Sequence
  ENSG00000257932_2 (sequence is synthesized)
aacgtgaagaccttcagccattttcgattcaccccaaatctgaagatctttagccatgtctggtccaactcccttgtgtttgcaagtccaaacaacaggtctcagcagggagccccaaag

SEQ ID NO: 991056 - DNA, 120 bp, Artificial Sequence
  ENSG00000257932_3 (sequence is synthesized)
agtggtagacctggtagacctgggctggctgcagcatacctcaagatagatgggtcagttctgggagtaaggcaggattctaagtacagtgaaatttagtggtttgtttccactgaacct

SEQ ID NO: 991057 - DNA, 120 bp, Artificial Sequence
  ENSG00000205414_0 (sequence is synthesized)
actattaaagcctctccggtatctgacacaagtcagaatttccactgttccagctgagcttttatgaggagcagacttgagagaaactgccaagattttctggagtacacagggcacacg

SEQ ID NO: 991058 - DNA, 120 bp, Artificial Sequence
  ENSG00000205414_1 (sequence is synthesized)
gccagctgaacacccgcttcccccactcgctgctgctgggaagagagcaatggactccgaataccttccagccgaaagtcgtcctcctcttcctcgctgagcgtgtctctcaacacgtcg

SEQ ID NO: 991059 - DNA, 120 bp, Artificial Sequence
  ENSG00000205414_2 (sequence is synthesized)
cccacgagctcctacaagaagacagagcagaggcattgagcaggggttgggggagcccagtgctgggacgttaaaagcagtgccatgaggaccctgggctgattcttctgattggaattc

SEQ ID NO: 991060 - DNA, 120 bp, Artificial Sequence
  ENSG00000205414_3 (sequence is synthesized)
aggtcaactgaggcagatcctattgcacctgaaaagttaagtgccaaggtgggtccctcctgcccttaacataaacccacacgcatcagcacaacattcaggccaccacaggctatggct

SEQ ID NO: 991061 - DNA, 120 bp, Artificial Sequence
  ENSG00000205414_4 (sequence is synthesized)
ccactgggtcttccatcatgcctcccacatttcaccaacacacatgccttccggaaaccagcctgattccttgcacacaccctgcctgttccccaccagtgagttaaggatatctgggat

SEQ ID NO: 991062 - DNA, 120 bp, Artificial Sequence
  ENSG00000205414_5 (sequence is synthesized)
ctcatcccaaccaacctgaccaggagatgtcaagttagcgaggggagtgttgctggtccacaggctgggaaatttctaggatgtcaacaaaggccccatctgtctgacccaccctagcag

SEQ ID NO: 991063 - DNA, 120 bp, Artificial Sequence
  ENSG00000205414_6 (sequence is synthesized)
gataactccaaatatggaagaagctagaccataccttgtcaaactgtcttctgtatttattggtattctgccagaagagttctatgatcaaagaagattcttttaaacaaagttaaacaa

SEQ ID NO: 991064 - DNA, 120 bp, Artificial Sequence
  ENSG00000205414_7 (sequence is synthesized)
gatctcttacagcaggacttatcaggacttttcctatggttctaaacactgaatctccaagtgctggcatattttgcattctccaaacttatttagaccatggagcttcgtttttcaaaa

SEQ ID NO: 991065 - DNA, 120 bp, Artificial Sequence
  ENSG00000205414_8 (sequence is synthesized)
gtatcacatgatacgcgtgtcccaagaaacccactttaggaaatactcctgttatgggaggacagacaagggtttgggggatgatgatgctatggtagcggttctcaaaacacaaaatga

SEQ ID NO: 991066 - DNA, 120 bp, Artificial Sequence
  ENSG00000205414_9 (sequence is synthesized)
atgatgatgctatggtagcggttctcaaaacacaaaatgacaagcaataaaaaagcccaaactcagcagctgtcaccaacttctctttgtgaaaataaaagagaaaaaaaacaaaaacaa

SEQ ID NO: 991067 - DNA, 120 bp, Artificial Sequence
  ENSG00000205414_10 (sequence is synthesized)
tattgctgatctcatcaactggacacagctggaggtaagcctcttgcttttttttgttttttgttttaaagacaaacagctaacattttgtggctgttctctttcttctttcaaatcttt

SEQ ID NO: 991068 - DNA, 120 bp, Artificial Sequence
  ENSG00000205414_11 (sequence is synthesized)
ctagggcattacacactctttcttaaaagctgttaaaatgtggccattcagactccggtgtcccatttacttcaaaaccaggctactttattcctcgagtcaggatggcttcctctcctc

SEQ ID NO: 991069 - DNA, 120 bp, Artificial Sequence
  ENSG00000205414_12 (sequence is synthesized)
ctccaccaattattataatcatcgaacatatcctgggcttgtaaactggctgtttgtgttaacagagcccgagttgacaggggagctgggagacgatgacaggaaagggatgcacacagg

SEQ ID NO: 991070 - DNA, 120 bp, Artificial Sequence
  ENSG00000205414_13 (sequence is synthesized)
tggcatcattagatggctgggacgccccagcagccaattgaagcccatctttcatgcagaagagagacgggtgccaccgccccctgaaaggctggtaggcagagcttccccgagggaaca

SEQ ID NO: 991071 - DNA, 120 bp, Artificial Sequence
  ENSG00000205414_14 (sequence is synthesized)
ggcaacagtcttcaagagaatctgcgcacctcttcatgctgaggtcttctgcagagcggggctctgcgcctgccaccctgactgcactgcagccgggtgacagcatcaatgagacgtctg

SEQ ID NO: 991072 - DNA, 120 bp, Artificial Sequence
  ENSG00000205414_15 (sequence is synthesized)
agtactcgtgtctttttactggcacacttggaagagtttaaagactccagacatcgccaccaacaaggcagccgtgtgggaccctatgacaatgaccgcatgtgctcaaggcaccccagt

SEQ ID NO: 991073 - DNA, 120 bp, Artificial Sequence
  ENSG00000205414_16 (sequence is synthesized)
caccacctaatgacagcttcagcactccctgctcggagaaccaagctctctgacacactcagaaagcagagttctggcaagttctggcataggcctctcaccactcaacagtaccctgct

SEQ ID NO: 991074 - DNA, 120 bp, Artificial Sequence
  ENSG00000205414_17 (sequence is synthesized)
accctgctctggagaacactggaaagctccccggagccatggttcatggacgcactgtactgtgccaatgctcaactttgcaaaaattcatctccccagccaggcgcagtggctcacgcc

SEQ ID NO: 991075 - DNA, 69 bp, Artificial Sequence
  ENSG00000205414_18 (sequence is synthesized)
ggcaacctggccaacataaggtgactgtaatcccaactacttggggggctgaggcagaagaatcgcttg

SEQ ID NO: 991076 - DNA, 120 bp, Artificial Sequence
  ENSG00000205414_19 (sequence is synthesized)
caaaaaattagccaggcgtagtggcaggtgactgtaatcccaactacttggggggctgaggcagaagaatcgcttgaaactgggaggtggaggctgtggtgagctgagattgcgccactg

SEQ ID NO: 991077 - DNA, 120 bp, Artificial Sequence
  ENSG00000257935_0 (sequence is synthesized)
agcgttgctgtccggacagagcaaaaaaaacaaggcatcagtattgttgagtattagcttgtacctggttcggaggctaagtttgccggagaaggcaggggtgagccacggtggctgccc

SEQ ID NO: 991078 - DNA, 120 bp, Artificial Sequence
  ENSG00000257935_1 (sequence is synthesized)
ggctgtgcaccggcgccggagtttggaccaagacaaagacaggagctgtccgcggtgctgaatcggcggcgccgtcgccggagcaagggggcttctgtaaccagccctctgctcatttac

SEQ ID NO: 991079 - DNA, 120 bp, Artificial Sequence
  ENSG00000257935_2 (sequence is synthesized)
tcccctgaatttatttcccttttgggggactcaccttagaacctgcgccctgtacacaggtgtatatacatatatcaaagaacaaaacgattgattgaaaacggtgtcttctcctttctt

SEQ ID NO: 991080 - DNA, 120 bp, Artificial Sequence
  ENSG00000257935_3 (sequence is synthesized)
cccaaataaatgatgttagaaaggtttattttaactgtaccctaaaacggagagaaatggatatttctactcctaaataaatggaaattcatgttaaaaacaatagagctaacctataac

SEQ ID NO: 991081 - DNA, 120 bp, Artificial Sequence
  ENSG00000225979_0 (sequence is synthesized)
tgttaaattcaaacaccctgggtttggtttttgctggtgggggtggagtggagttcctggagaagcaaagcagtcctaaatcaccgagttgatgggtcttttgggtgttcccaccagtcc

SEQ ID NO: 991082 - DNA, 120 bp, Artificial Sequence
  ENSG00000225979_1 (sequence is synthesized)
ttcagccatctttcagaagagtgataacaaatgacttaatttggaagattcactcaagatccaatttgattcatcgcggacatgcctgcacctaagttcctggggccaaagtgaggaggc

SEQ ID NO: 991083 - DNA, 120 bp, Artificial Sequence
  ENSG00000225979_2 (sequence is synthesized)
agcagttctccacccaatcagaccatcatcctctttttgtaactagtatctttaacactccccttactatcctgaaaggtaatttgtggataatattacctaccaatacaaatttcaaaa

SEQ ID NO: 991084 - DNA, 120 bp, Artificial Sequence
  ENSG00000225978_0 (sequence is synthesized)
ggcggaaatggtttctatcaaaatgaaagtgtttagagattttcctcaagtttcaaatgaggcgaatcccgttttccgcgatgctgcagcgcgcgggttttaaccgcagggtcacgcgga

SEQ ID NO: 991085 - DNA, 120 bp, Artificial Sequence
  ENSG00000225978_1 (sequence is synthesized)
acgccgcgccgcgcgactgtgcctcggtctctgcgcccggctctccctccggtccgcaagaggaggaaggcccgcggcgtgccgaggtcagcggcgcggagccaccaggcgagacggtca

SEQ ID NO: 991086 - DNA, 120 bp, Artificial Sequence
  ENSG00000225978_2 (sequence is synthesized)
cggacgcctgaaccgaggtcaccgaggccacggggccgggaggccctcagcagagcccgggggctccgcacctcaaggccggccaggaagaaacagcagcaggagcccagggcgccccgg

SEQ ID NO: 991087 - DNA, 120 bp, Artificial Sequence
  ENSG00000225978_3 (sequence is synthesized)
cgagcgcccagagcggcccaggccctcgcgaggagaccggcctccccagggcggggcttccgactcgggcgcccgtgagccccggaggcggcgcgaaggggcagagtccgcgtttctaac

SEQ ID NO: 991088 - DNA, 120 bp, Artificial Sequence
  ENSG00000225978_4 (sequence is synthesized)
gcgaaggggcagagtccgcgtttctaaccagcccccgggtgggcggtggcccgcgcggcacggtgggcgcgagcgccgtgggctggggccggcctgggctttcagggcgagggctttccg

SEQ ID NO: 991089 - DNA, 80 bp, Artificial Sequence
  ENSG00000225978_5 (sequence is synthesized)
cctgggaacctgggccgggagctgcgggccgctccggggaagcgggcctgacctcccctccccaccgccgcccctgcggt

SEQ ID NO: 991090 - DNA, 120 bp, Artificial Sequence
  ENSG00000225978_6 (sequence is synthesized)
gagatcctgcctgccggggcgcaggggcccgcggttgggctccgggagacggaagaggccccacagctcgggccccacgcagtggacgctgccacttaattttggcgtaattgatgtcaa

SEQ ID NO: 991091 - DNA, 120 bp, Artificial Sequence
  ENSG00000225978_7 (sequence is synthesized)
agagctgccgcttctgatggaggctgagccggctggggaggcgtcttggccaagaaccagccccagcctcgctcagggccccaacccgcagaccatgtaattaagctgcgttctgcagcc

SEQ ID NO: 991092 - DNA, 120 bp, Artificial Sequence
  ENSG00000225978_8 (sequence is synthesized)
agggcaagagtctcagctctgaacatcttcccgcacctctgaggagccaggcctggaaaccctctaaaatagatttttctgcctcaagacagaagatgggcgttccaggcagagaagagc

SEQ ID NO: 991093 - DNA, 120 bp, Artificial Sequence
  ENSG00000225978_9 (sequence is synthesized)
tgcccagtcacgtgctctgctccacctggtcagagacccttgacctttagaagactggacctgagggcgtggctggtggacctgagggcgtggatggtggacctggccacccagctgtag

SEQ ID NO: 991094 - DNA, 120 bp, Artificial Sequence
  ENSG00000225978_10 (sequence is synthesized)
ctttttgggttcctgtggtcccatttcttgggtcaatctcacacctggcagctcccaggaagacacccccaggcccctcacactcctgggggcagctggaattggcttcagggcgggacc

SEQ ID NO: 991095 - DNA, 120 bp, Artificial Sequence
  ENSG00000225978_11 (sequence is synthesized)
aggggccccatgggtgtttggaatccctgatctgggtcaggcaccggcagcaggattccagcctggcctggactctggtgtgtcccgtttgaagaaaccccgccctgtgaaagttcaagt

SEQ ID NO: 991096 - DNA, 120 bp, Artificial Sequence
  ENSG00000225978_12 (sequence is synthesized)
ttagcatccaatgacccatttaagaggtttgctgagccacgtcacaggagggtctgggtgcaaacggaggtggcaacacacagagcgagccttgagcacccaggttacccccaggacctc

SEQ ID NO: 991097 - DNA, 120 bp, Artificial Sequence
  ENSG00000225978_13 (sequence is synthesized)
cagtctggcttgggggctcctgctgtcctgtggagcagccccctgggatcagggacggggctgagctggagagtgtgcaggattgattaatgatgtctgccacggtcaggccaactgctg

SEQ ID NO: 991098 - DNA, 120 bp, Artificial Sequence
  ENSG00000225978_14 (sequence is synthesized)
tgtttctggggcccacaagctaaaaatggttggaaaaaaatcaaaacattaatatttgtgacatatgagaatgctatgaaagtcaactttgctatccataaataaagttttattgacata

SEQ ID NO: 991099 - DNA, 120 bp, Artificial Sequence
  ENSG00000234653_0 (sequence is synthesized)
aattcacaatctctcacttggctgcttctagcaaagggtgatgtctagagcagtgatttccaaatgggagcaaaaggatccaagggaatgctcagaaatatgcaatggggtacagaaaga

SEQ ID NO: 991100 - DNA, 120 bp, Artificial Sequence
  ENSG00000234653_1 (sequence is synthesized)
agacattatttaagatttggtttacttatctcaaaaagaagtgactaaaagttcaatgggagaaatgatagaagctaattgtgataaaacagataaagtacatggcacaatgagtgtgaa

SEQ ID NO: 991101 - DNA, 120 bp, Artificial Sequence
  ENSG00000234653_2 (sequence is synthesized)
cccctggagttttacaatcatttgaaattcaaaggcaaatgctgagagcacaccatcatgagaattggcaccaatgaaaaagtttgtcaaaatcactctggcactaaaccactgaatgtt

SEQ ID NO: 991102 - DNA, 120 bp, Artificial Sequence
  ENSG00000234653_3 (sequence is synthesized)
ttcaacacaaatggaaagctgacatcatttatagacaactcatggaccaacacaaaggaaaaaatgtcagatccagtgaatttcttttcttgtaattactgtatgatttcaacattggcg

SEQ ID NO: 991103 - DNA, 120 bp, Artificial Sequence
  ENSG00000234653_4 (sequence is synthesized)
gcattattttgtttaccatgggaggtttgtcttctcccattttccttagaagttgaacacacattttcaaagcctgctagtgattttgaatttcaaaagcgattacaagcatgattcatg

SEQ ID NO: 991104 - DNA, 120 bp, Artificial Sequence
  ENSG00000234653_5 (sequence is synthesized)
caatatgactcatccctctcaaatgctctaattgtataaactatatccttcaaagcgtcttatggacacattaaatattagtaaacacattttcaagtgccaaaaggtatggttccttca

SEQ ID NO: 991105 - DNA, 120 bp, Artificial Sequence
  ENSG00000234653_6 (sequence is synthesized)
cacttgctgataagactgtaattgatcctctaatttccatgtatgattcaaaataaagctaagactgtggtaagtctcgcatttttaacattaaacttgaacacaccagttctgccactg

SEQ ID NO: 991106 - DNA, 120 bp, Artificial Sequence
  ENSG00000234653_7 (sequence is synthesized)
cagtagccacatcttgattcttaacagcagtcaccttcacctccataatttcccttttgttgcttcaaattatttgttgtactaagcacactttctctaccaataaattcatgcctctta

SEQ ID NO: 991107 - DNA, 120 bp, Artificial Sequence
  ENSG00000225970_0 (sequence is synthesized)
ctgctagcacgttttcacctctcaatacaagaagctacttcatagaagaagcaaacttagaatacatttaagtttgcgttcaaactcttcacttcccaataccagtgggaaaatgaccac

SEQ ID NO: 991108 - DNA, 120 bp, Artificial Sequence
  ENSG00000225970_1 (sequence is synthesized)
aaggcctgagacaaaacaatgttgaaattaggccaactgagagccctataatggcatctaagtgtttcagtgaaaggaagaatcacatctctcactttaaatcaaaagctaggaatcatt

SEQ ID NO: 991109 - DNA, 120 bp, Artificial Sequence
  ENSG00000225975_0 (sequence is synthesized)
cccttccaaattctcatagtgcgtggctgggatgagggcggcgctcacggtgaggaagccccgagctcccgggacgcagacagggtgtgcagggccgtagctcgggcctgtgtatgcacc

SEQ ID NO: 991110 - DNA, 120 bp, Artificial Sequence
  ENSG00000225975_1 (sequence is synthesized)
tgtgcgtgtgtgtttgatgccaggacaaggcggcggtgtgcgcggcgaggaggctgcgacagctgtatagaccccagctgcagtgaaatggccatcaaaaagggaagggataatcgagtg

SEQ ID NO: 991111 - DNA, 120 bp, Artificial Sequence
  ENSG00000225975_2 (sequence is synthesized)
tgaaggctaagagcaacttgcttgcgcattaaagatcacttggagagagaggtccagtgagcaacaacggccagaaatttcagggagaccatcttgaaccatccagcctccaccaggcca

SEQ ID NO: 991112 - DNA, 120 bp, Artificial Sequence
  ENSG00000225975_3 (sequence is synthesized)
acagctgacagctgtcacatgaatatgatcagcagaagaaccactcagctcccatgtcttgaccaactttgcattcccctccaggaccttatgggcacatgggttcctatcatttcacgg

SEQ ID NO: 991113 - DNA, 120 bp, Artificial Sequence
  ENSG00000225975_4 (sequence is synthesized)
agttctgggaagacgtcgtggggagaacctaggagtaggattccttcctcagaggctctcccttgggaactctcagaggtcaggttccatgtgatccacatcattcccagagctgtctcc

SEQ ID NO: 991114 - DNA, 120 bp, Artificial Sequence
  ENSG00000225975_5 (sequence is synthesized)
gcaggagacttaacgtgaattttgagaaagtccccagtcctggatatcagtgaccctggcctttcccttgaatactaagaagggttagcagtactcccatctcccttttacttccatctg

SEQ ID NO: 991115 - DNA, 120 bp, Artificial Sequence
  ENSG00000225975_6 (sequence is synthesized)
aaattgccaagccccccaaataataagctaattgttttttgttttaagccataaacttttgaggtggttatatagcaataaataactgaaacaggtgtttaactttctagactttttaaa

SEQ ID NO: 991116 - DNA, 120 bp, Artificial Sequence
  ENSG00000225975_7 (sequence is synthesized)
tgaccatattgatataattgtattgttcaacctgttttgtaaagtgatttctctgatacagtatcttgaaaatattccttaactattttctacaactttgcatttgtctatcttagtatt

SEQ ID NO: 991117 - DNA, 120 bp, Artificial Sequence
  ENSG00000225975_8 (sequence is synthesized)
atattacatggatatgtggtaacttatttaactactaacttccctttgcaattccttttccttgctgtctagctcccatgtcttgaccaactttgcattcccctccaggaccttatgggc

SEQ ID NO: 991118 - DNA, 120 bp, Artificial Sequence
  ENSG00000225975_9 (sequence is synthesized)
acatgggttcctatcatttcacgggtatgtagactcaggaatgtggcattgacttctgggtggagtacagatgactgacacccccaccccgattcggaggaattattcaggggtgtgata

SEQ ID NO: 991119 - DNA, 120 bp, Artificial Sequence
  ENSG00000225975_10 (sequence is synthesized)
cccccaccccgattcggaggaattattcaggggtgtgatataacacctacatacatttatttaactagccaatttggtctcccctttttttgttttgagaccgagtcttgctctgtcgcc

SEQ ID NO: 991120 - DNA, 70 bp, Artificial Sequence
  ENSG00000225975_11 (sequence is synthesized)
ggccagccgggtctccctttttacatctgttttcccctttccagttcaaattctgtattctgggaacatc

SEQ ID NO: 991121 - DNA, 120 bp, Artificial Sequence
  ENSG00000225975_12 (sequence is synthesized)
tttcccctttccagttcaaattctgtattctgggaacatcttactttcttcaccctgattgattagggaaacttcagggttcttaggtaactttctgaaggactggtttaagattcctag

SEQ ID NO: 991122 - DNA, 120 bp, Artificial Sequence
  ENSG00000225975_13 (sequence is synthesized)
agttggaaatgggcgtctctcctgtgttatttctaaagtgttatcatcctaatccttcagaatactttcttgacttctttctgcttgatgattaaggaatggtctcaattctccatagcc

SEQ ID NO: 991123 - DNA, 120 bp, Artificial Sequence
  ENSG00000225975_14 (sequence is synthesized)
acatcagaccaaaattccatttctttgcctatgtgaagggtttattattaattaccctattaatttatgtccaaaccagatgtgatttccttcttggagcaatagttcgtgaagaggttg

SEQ ID NO: 991124 - DNA, 120 bp, Artificial Sequence
  ENSG00000225975_15 (sequence is synthesized)
gttaacagcagttctgtgcccaggtaaatgagaggcaactgataagaggaactcgttgtgtataaaatcttaggattctagatttaggacctttaaggcagtatttgaattagtgctctg

SEQ ID NO: 991125 - DNA, 120 bp, Artificial Sequence
  ENSG00000225975_16 (sequence is synthesized)
tatcatacacatatctccttttattattattttttctgctctcaaagcagatttctctcattgtaaaattagtagattcttaattcagaagattggagaatattaaaaaaagcttaaagt

SEQ ID NO: 991126 - DNA, 120 bp, Artificial Sequence
  ENSG00000225975_17 (sequence is synthesized)
aaagcactttgaacactttattccaaatcacttcacctcatttgtgaataagtgcatggatataggcttataggactttttcattcaaaacagggttatataacaattgttttgaaatct

SEQ ID NO: 991127 - DNA, 120 bp, Artificial Sequence
  ENSG00000225975_18 (sequence is synthesized)
acttgtttcttctaacaaaatatagtgaacaaattttcatgtcactaaattatgaactgtgtcataatcttttaatggctgcactgttctgtttgtatatgtaagttctttccagctttt

SEQ ID NO: 991128 - DNA, 120 bp, Artificial Sequence
  ENSG00000225975_19 (sequence is synthesized)
tcccattatatgcaatgttttactgcatatgccttttctgtgcacatgtgaattgtatattttggatagtcttagatattttgctgagaatgaggttttcatagttaaaacctgtttaca

SEQ ID NO: 991129 - DNA, 120 bp, Artificial Sequence
  ENSG00000225975_20 (sequence is synthesized)
catctatatcaattgccctgattaagtttgcaccaatattcaacatactatgagaatgtctattcgctactatatggtatcattagtcttttattattattttattttattattattatt

SEQ ID NO: 991130 - DNA, 85 bp, Artificial Sequence
  ENSG00000225975_21 (sequence is synthesized)
cagtggcatgatctcggcttactgcaacccccgcctccaaggttccagcaattccgcgcatgtcaccacgcatggctaatttttg

SEQ ID NO: 991131 - DNA, 120 bp, Artificial Sequence
  ENSG00000225975_22 (sequence is synthesized)
ttacaggcgtgagccattgcacctggccatcattagtcttttaaatccaccaatccagtagaaattatatttatttaaatgaattacccatgcacaggtttcattcagtgtaataaaata

SEQ ID NO: 991132 - DNA, 120 bp, Artificial Sequence
  ENSG00000225975_23 (sequence is synthesized)
tcagtgtaataaaatatgggcttcagaaacaaaaaccagaactgaaagaaaattggttttgtaggtagaaaaatgtgatttaaaaatgcagatatgccatttattttgagggtgtatagc

SEQ ID NO: 991133 - DNA, 89 bp, Artificial Sequence
  ENSG00000225975_24 (sequence is synthesized)
aggatattgaggctgtagtgagccgtgattgtgccaatgcactccaacctgagcgttggagtgagaccatgcctcaaaaaaacaaaaac

SEQ ID NO: 991134 - DNA, 120 bp, Artificial Sequence
  ENSG00000225975_25 (sequence is synthesized)
tgagcgttggagtgagaccatgcctcaaaaaaacaaaaacaaaaaactcttaaaatcgagggaaagacccaaaaacccgatagaaaaagtgagtaaaagaaatgaacacatgaaatcaca

SEQ ID NO: 991135 - DNA, 120 bp, Artificial Sequence
  ENSG00000225975_26 (sequence is synthesized)
aaatcacacacacacagacacacacacacacaaagagagagagaggaagcacaaattttaaaattatagcgtgctggctttttaaaaaaataaacccagctgggtgtggtggctcacgcc

SEQ ID NO: 991136 - DNA, 120 bp, Artificial Sequence
  ENSG00000225975_27 (sequence is synthesized)
caaacagaaaaaggacagacctgttttcggaacgaggcttttcgagttcaagggagtattttttctcctcctgaaatgctagtcagtggttaggttactattaggcagggccttgtgagg

SEQ ID NO: 991137 - DNA, 120 bp, Artificial Sequence
  ENSG00000225974_0 (sequence is synthesized)
gcagagttatatttagcgttgagaacaatttcattgattatactataccggaattgaatggaagaaaaacactaattcctgaaagaaataaatttaaatgcaggaagacctagaaactag

SEQ ID NO: 991138 - DNA, 120 bp, Artificial Sequence
  ENSG00000225974_1 (sequence is synthesized)
ggggcaggttgtagagaaacttctggacaggttgttaacatctgacacagtgagtgagaaaaaatccagcacagtcactgggcaggtttaagaagaagtggcagcctcgggagatgaaag

SEQ ID NO: 991139 - DNA, 120 bp, Artificial Sequence
  ENSG00000229044_0 (sequence is synthesized)
ccagaaaagggtccatccacaaggagagaaacgtggaaagggcagaggcttcaccctacctttacagccacacttcttgcaggtagtgttcaagacagcctcaagggtgatcttctgccc

SEQ ID NO: 991140 - DNA, 120 bp, Artificial Sequence
  ENSG00000229044_1 (sequence is synthesized)
gatatggccagagatactacaaggatgacatatgagttcgatggaccagacctgggcacaagaagaagaaataacgtaaagcagagggcatatctggtatttatactctaaactggataa

SEQ ID NO: 991141 - DNA, 120 bp, Artificial Sequence
  ENSG00000229044_2 (sequence is synthesized)
gaaggtagctctctcctggataaacatgaccagtctagaagcgttagcagtgaaaaactggaaacaacttaaaatgattatgtggtacatctgaatgacagaataaagccattaaatgtt

SEQ ID NO: 991142 - DNA, 120 bp, Artificial Sequence
  ENSG00000229047_0 (sequence is synthesized)
aaaattcacactgcagtatgtacagtttcatgacatcacatgaagaaattaaatttctaataaaaatggcaaattatattactgagcagatcgcatcaaatttggttgtgtaaacaccag

SEQ ID NO: 991143 - DNA, 120 bp, Artificial Sequence
  ENSG00000229047_1 (sequence is synthesized)
aattcttactatgaatggtaatgtgcctatattccagtattgctaatactgggatactcttggaataatgtttgcaatgggattaaaaaattcatgaaagtagttgtgtgaattctttat

SEQ ID NO: 991144 - DNA, 120 bp, Artificial Sequence
  ENSG00000229047_2 (sequence is synthesized)
acgtcatgtccagaaatggaatactgtcatgttaggatgaacatctgatctgatttgttaagacattttgccaaatgcacagatgcacagggtttaaagaaatatatattgaaaaggatc

SEQ ID NO: 991145 - DNA, 120 bp, Artificial Sequence
  ENSG00000229047_3 (sequence is synthesized)
agggtgggacagacacattgggaaccacaaaacctcttccaagagttaaaaataaacaccttttttttttctttttagcaaaagtgaaaaatgtaagcatatatttttctaatttatttt

SEQ ID NO: 991146 - DNA, 120 bp, Artificial Sequence
  ENSG00000278156_0 (sequence is synthesized)
aggaggcggcgggtcttcgggcctaggcgagcgccaggtctcccgacggaaattaccgaaggctggcagaggcgccgaagccgggagtggtggagccggaggggatagtgggggtgggga

SEQ ID NO: 991147 - DNA, 120 bp, Artificial Sequence
  ENSG00000278156_1 (sequence is synthesized)
attccggccgaaggagcgaatccgggtcggactgcgtgattcggcccggtgggggcgggcagggtgcgcgcctgccgcgcgcccaggttaggtgtgtccgctcttttcacactcgcggcc

SEQ ID NO: 991148 - DNA, 120 bp, Artificial Sequence
  ENSG00000278156_2 (sequence is synthesized)
cacgcggcagaggagggggcgcggcgcggaagggccggcggaggcggcgggagcgccggcgcttggtgtgcgcgccttgggtggtgtcccccgcctgcggaatgggtaatgaggcttttc

SEQ ID NO: 991149 - DNA, 120 bp, Artificial Sequence
  ENSG00000278156_3 (sequence is synthesized)
atgaggcttttctccgcagcaacagcatcacgagtttcagttcccaggagcccgccgccgcggctgctgccgctgccacgacatgagtcaggctttcttccctggcgcgtggcggaaacc

SEQ ID NO: 991150 - DNA, 120 bp, Artificial Sequence
  ENSG00000278156_4 (sequence is synthesized)
tcctccccctcgccgcacctgggctcgcccccggcccttgcctcctcgggggatgccctagggccgggagctgtggggtctatggaaggccggtggctcccggtgataggtgttgtcttt

SEQ ID NO: 991151 - DNA, 120 bp, Artificial Sequence
  ENSG00000278156_5 (sequence is synthesized)
tgtgcagtgcagttgctgccatgcggtcccctcgcccttccacgggcaggggcgaggcggccgggcagatgttgcagctgtttccagttaactgcctgagctcctctgggctaggctctt

SEQ ID NO: 991152 - DNA, 120 bp, Artificial Sequence
  ENSG00000278156_6 (sequence is synthesized)
gcctttttcgttcatcgtcctggctatatcccccattggtttgactcaggaggcaaggtggtccggacatgtgagcaacacaaatgataagaatgccttttagggctagaaaagaaaaag

SEQ ID NO: 991153 - DNA, 120 bp, Artificial Sequence
  ENSG00000278156_7 (sequence is synthesized)
ccatccgaaattccagttttaaaatacacacacacacacacgttacatttcatgggtccaaatgtagttctacagaagcaatgttaggtttgattgggggcaatttactggcggttactt

SEQ ID NO: 991154 - DNA, 120 bp, Artificial Sequence
  ENSG00000278156_8 (sequence is synthesized)
tcttggtatttcatgtcaaaacctagttctaagcgtttcttaccaataatcgagaatgtaagtctttcccaggaatttaaaaatgataaagcaagccgaaaaactgtagggaggaatttt

SEQ ID NO: 991155 - DNA, 120 bp, Artificial Sequence
  ENSG00000278156_9 (sequence is synthesized)
cattttgttaaatttaggttgttaggggaatcaacgcttatggttagacctctgattcaggaagtctcaaggatttacattcctatttcagaagattgttaaagcaaaaacgattgtcat

SEQ ID NO: 991156 - DNA, 120 bp, Artificial Sequence
  ENSG00000278156_10 (sequence is synthesized)
ttgcagttttgatacacctctagttgtcagttcaactttttacctttagttttctctgaactcttccccttgttccaaggggaagctttcaaaaagtgaattatgtcaccatttgcatgt

SEQ ID NO: 991157 - DNA, 120 bp, Artificial Sequence
  ENSG00000278156_11 (sequence is synthesized)
tattgaatagaagtgcactcttaacatcccatttatccagtgtcaaagctatgatacattgttgctttatgtggggtctcccacactgaaaagaaaaacccggacttcatttatttattt

SEQ ID NO: 991158 - DNA, 120 bp, Artificial Sequence
  ENSG00000278156_12 (sequence is synthesized)
atttatttatttatttatttattactttatattgctaatgtaaacctctgctagaagtaaataggctctcgcaaatattcaaagtgatacagtaataaacatcaaatatgtttgagaaga

SEQ ID NO: 991159 - DNA, 120 bp, Artificial Sequence
  ENSG00000278156_13 (sequence is synthesized)
gggggcgcggaggagacgagtgcaatttccttctgcaccgtaatctttgtattggagacgccggagaggaaaacgggacctgacgctccgcctggcgcgattcctccttctcctcctcct

SEQ ID NO: 991160 - DNA, 120 bp, Artificial Sequence
  ENSG00000278156_14 (sequence is synthesized)
cagccaaaggcgccggtcgctcctgccttcgagagcgagcttcggaaaggaggatgaacgaggccggctcttcctcaccccgctgctcccgcgaccgggcgggagagggccgcaggcggc

SEQ ID NO: 991161 - DNA, 120 bp, Artificial Sequence
  ENSG00000278156_15 (sequence is synthesized)
ggaggcggaaaatcctcggaagatgtggcattactaccgacgccggtacctgctgcattgagagcagaggcgctgccactaccgctgccccttcgagggaacattgccgggtgcgccatc

SEQ ID NO: 991162 - DNA, 120 bp, Artificial Sequence
  ENSG00000278156_16 (sequence is synthesized)
tactttttgagcttttgttgcaagtaatatgcctggttaatcgctgccatccattgttgaaatgcaaatttgacattctttttcaatagtttttgaatggaaaatagaaactaccctaac

SEQ ID NO: 991163 - DNA, 120 bp, Artificial Sequence
  ENSG00000278156_17 (sequence is synthesized)
cgattgaaactgcaatggaatgtagatgggtggaatgtcctttctttggactgcagtatgaaagaaaatgctcttgatctctcaaaatgtagccttaagtcaaaggttttttgttttgtt

SEQ ID NO: 991164 - DNA, 120 bp, Artificial Sequence
  ENSG00000278156_18 (sequence is synthesized)
ttgttttgttttttaagtcaaagttttaaattaccccaaacagcagctgtataccctttgggccacctaaataactcaccatgattgtgctgatatgctttgacgcttaataaacacata

SEQ ID NO: 991165 - DNA, 120 bp, Artificial Sequence
  ENSG00000278156_19 (sequence is synthesized)
tattaaagtcttacccaaagctgatagagtaaaagagctgttgagatagcccctctggaagcagatacttgttctaatgaccagtagcaaagggtactgtttgagctgttttgatggggg

SEQ ID NO: 991166 - DNA, 120 bp, Artificial Sequence
  ENSG00000278156_20 (sequence is synthesized)
aggaagggttggggtgttattccctttaaaataaaggtttaaaaaaaaatccagaatttaagacgtaagaaaataagatcttttgaagtgtattaatttttgcctgccatatcactttca

SEQ ID NO: 991167 - DNA, 120 bp, Artificial Sequence
  ENSG00000278156_21 (sequence is synthesized)
tttttgcctgccatatcactttcaaactcctgcttaggctgcatcaagtcccactaagatataaagagcaagtcagccgggcgcggtggctcgtgcctataatcccagcactttaggagg

SEQ ID NO: 991168 - DNA, 120 bp, Artificial Sequence
  ENSG00000278156_22 (sequence is synthesized)
aaaagggcaactctacagttagggaaatctgagtttcaaaaatctgggtctctccccctccaaaattcttacgacagcaatatatgaacacaaatacgttgaaacaaggagaaggcacct

SEQ ID NO: 991169 - DNA, 120 bp, Artificial Sequence
  ENSG00000278156_23 (sequence is synthesized)
caagagccagattttgttatactatcatcttttaattaaaaaggtctggatttttattatataaacattaaatgccgactgctatgtataataaagtcattaaatcctttaaaccaagta

SEQ ID NO: 991170 - DNA, 120 bp, Artificial Sequence
  ENSG00000278153_0 (sequence is synthesized)
gcatcattcactgacagttcccttccatatcccctggtccctactgtttccagtgtggatcagctaatttgcaaccaccactatctgcatctgtgcctacctcagggttcgctccaaaat

SEQ ID NO: 991171 - DNA, 120 bp, Artificial Sequence
  ENSG00000278153_1 (sequence is synthesized)
cctcaactcatggctgccaggagttagtgtataaattgccccaaagctctctataaagtggttttatttttgatgtctcatttgacctatacaacaattctggaaggaagaaagttatat

SEQ ID NO: 991172 - DNA, 120 bp, Artificial Sequence
  ENSG00000278153_2 (sequence is synthesized)
taaacaaggccaacagtggagtgtaatccctgtattcttttttgttctctcatctatcccaagaatactgctcagaaaattatagatgctcaataaataattgatgaataaaggaagaaa

SEQ ID NO: 991173 - DNA, 120 bp, Artificial Sequence
  ENSG00000278158_0 (sequence is synthesized)
ggaggaggcgagaagcgcagggagacgggggccccagacggcaccccgcaggctgccattccttcaaccaagatgtagagaacgccgtggacaaaagctttaaaaaaattctgaaacctc

SEQ ID NO: 991174 - DNA, 120 bp, Artificial Sequence
  ENSG00000227533_0 (sequence is synthesized)
ctctctgcgttgggaccgcggagggcattcgctgtgtgactcagggcaagtgtgcgcacctctctgagcctccgcggccttctctagcaaaatggtggagccggtacccggctgtaaggc

SEQ ID NO: 991175 - DNA, 120 bp, Artificial Sequence
  ENSG00000227533_1 (sequence is synthesized)
aagctgggatgcgcggagtagcgggtggaaagctggactggagttctcactcggccgctgggtgacttcggtgcactagggatagtaacagtaccacctcgtagggttgtagaaagacca

SEQ ID NO: 991176 - DNA, 120 bp, Artificial Sequence
  ENSG00000227533_2 (sequence is synthesized)
agtgagttaatatttgtaaagtgtttagaacagcgtctactgcatggaaagtagtatttatttgttagagagactccaggaggtcttgcccagggattgacttctcccttccctgtctcc

SEQ ID NO: 991177 - DNA, 120 bp, Artificial Sequence
  ENSG00000227533_3 (sequence is synthesized)
accccccacattcccgtttgtgagccaagccttgcttttgcaccggccgggctctcttgcctggaaatgcatacccatctcaaacctgggctttaaaatcacctcctctgggacgccttc

SEQ ID NO: 991178 - DNA, 120 bp, Artificial Sequence
  ENSG00000227533_4 (sequence is synthesized)
ctctacttctcacagttcaggcctgttctgccccacacagcagaaaatgcccacgatgcaataccagagtctgcatgggaccatttcaacaacccttagaagctgactcagctgtctcct

SEQ ID NO: 991179 - DNA, 120 bp, Artificial Sequence
  ENSG00000227533_5 (sequence is synthesized)
ggccctgacttttctaagatgagaggagctggtaggaacaatttgggaaccctcaaaggctgagagtatcccacccacttcacagatgaagcaaactgaggcccagagaagggaaattac

SEQ ID NO: 991180 - DNA, 120 bp, Artificial Sequence
  ENSG00000227533_6 (sequence is synthesized)
ttgcccaagatcacccagcaagtaagaaacagagctggagatgagctcaggccagcacggaaccacgcaaactccttctgtaggctttgtaaaggattgatgagaaaagcagatggttaa

SEQ ID NO: 991181 - DNA, 120 bp, Artificial Sequence
  ENSG00000227533_7 (sequence is synthesized)
tgggcaacagagcaagacagagactccatctcaaaataaataaatagaaggctctccaggacattttgatgcccactgggatatgggaactcctgccatggggaggagggcgtctttaag

SEQ ID NO: 991182 - DNA, 120 bp, Artificial Sequence
  ENSG00000227533_8 (sequence is synthesized)
aaggaataggccctattgagatgccagctgtagacctctaggagttgaccatcgagcctgagaaggtaaggagagggtgtaggagacccctgactctgacctccaccctctcattcctct

SEQ ID NO: 991183 - DNA, 120 bp, Artificial Sequence
  ENSG00000227533_9 (sequence is synthesized)
ccagggcagtcccgcactctgatggccacatctggtgccaggtagtttctcgtaaagatctacactcacattacaacctagacatcccactagtaggtatttacccaagacacctgaaag

SEQ ID NO: 991184 - DNA, 120 bp, Artificial Sequence
  ENSG00000227533_10 (sequence is synthesized)
catgtgtgtacccaaagactcgtaaatgaatgcaactctatatgtaatagccaaaattagaaacaatccaaatgttcatcagcaggtgagtggtaaaacaagttgtgatatgttcataca

SEQ ID NO: 991185 - DNA, 120 bp, Artificial Sequence
  ENSG00000227533_11 (sequence is synthesized)
atgttgctactcagtaataaaaagaaatgagctacagatacagataaggaaacttggaggtgatatgttcataatcttgtttgggtcaaaggtttcagggatgtatacatgtgtcaaaac

SEQ ID NO: 991186 - DNA, 120 bp, Artificial Sequence
  ENSG00000227533_12 (sequence is synthesized)
gctgtctcctggccctgacttttctaagatgagaggagctggtaggaacaatttggctcatgcctaaggaatctacagtgtttaaagctccccagggccaggcgtggtggttcacacctg

SEQ ID NO: 991187 - DNA, 120 bp, Artificial Sequence
  ENSG00000227533_13 (sequence is synthesized)
gaaaagcagatggttaagagctctacaacttctgtgagtttctccacgttggtcaggctggcctcgaactcccaccctcaggtgatccacctgccttggcctcctaaagttctgggatta

SEQ ID NO: 991188 - DNA, 120 bp, Artificial Sequence
  ENSG00000227533_14 (sequence is synthesized)
tctattagagtctttatctctaagaagagaaatacatctgaactaaagggtaaaaaatggcatgttttaattggtaagtctaaatgcaaaacgatgacaataaaattttaaaggactgct

SEQ ID NO: 991189 - DNA, 89 bp, Artificial Sequence
  ENSG00000227533_15 (sequence is synthesized)
aagcagatggttaagagctctacaacttctgtgaggtaaagaatatctgcagggctggacgtggcggctctagtgggtggattgcttga

SEQ ID NO: 991190 - DNA, 120 bp, Artificial Sequence
  ENSG00000227533_16 (sequence is synthesized)
tctgtctctctaaaaaaaaaaaaaaaaaaaaattagctgagtgtggtgttgtgtgcttgtagtcccagctactttggaggctgaagcggaaggatcccttggcccaggaggcagaggttg

SEQ ID NO: 991191 - DNA, 120 bp, Artificial Sequence
  ENSG00000227533_17 (sequence is synthesized)
gagctgagattgtgccactgcacttcagcttgggtgacagagccagaccttatttaaaaaaaaaaaaaggatatctgtgattacaagattaccatgcaattttgaaagcctgctgttgcc

SEQ ID NO: 991192 - DNA, 120 bp, Artificial Sequence
  ENSG00000227533_18 (sequence is synthesized)
tgcccagctggacagctagagttattctcagtggtgggatggctgaactgggggcccactgtggagagctggtttcccactggagttctctgaaaaggtgcctgatttcacagctctgat

SEQ ID NO: 991193 - DNA, 120 bp, Artificial Sequence
  ENSG00000227533_19 (sequence is synthesized)
tctacagaaggaggccggacccttcacgtaattgctaccctttatttatggagctattcctctgtcgggatgccctttatatgtgtacagtctgtgctgcagtcgattcttatagtgatt

SEQ ID NO: 991194 - DNA, 120 bp, Artificial Sequence
  ENSG00000227533_20 (sequence is synthesized)
gtctccagctggttgggaccccaccctcctatcatggcccaggagtgaggcattcagggctggaccaccagcatttgtgaagcttttgccccattatcccatcagaacatcttcttggcc

SEQ ID NO: 991195 - DNA, 120 bp, Artificial Sequence
  ENSG00000227533_21 (sequence is synthesized)
ctggcaggcagccagggcagggccattctccaccttactgacaaagaagcccagggaggggaagagggtgctcccccaacacctccattgcctctgcctgcttagtccagaatgcaggat

SEQ ID NO: 991196 - DNA, 120 bp, Artificial Sequence
  ENSG00000227533_22 (sequence is synthesized)
agagaaataatgggaaaagctcccaagtgttgctggatctctgcctgccagggaagctgtgaccccagtaagggcagggtgttccttccagggaactcgaggtggggcaggatgggtagg

SEQ ID NO: 991197 - DNA, 120 bp, Artificial Sequence
  ENSG00000227533_23 (sequence is synthesized)
gagtgagatcagagggaaggccatgttgggaagatgggaaggcaagtctctgggggtttgtgggatagaggaagggaacatcatagaacaggccaggaataggagcttgacctggagatt

SEQ ID NO: 991198 - DNA, 120 bp, Artificial Sequence
  ENSG00000227533_24 (sequence is synthesized)
actttgcagcaggtttaaacaggggccatgtgagagtgtggagccctggggtcagaggttactggatgcaaattatgactctgccacttatgggaatggtgagttaggacaaatgatttc

SEQ ID NO: 991199 - DNA, 120 bp, Artificial Sequence
  ENSG00000227533_25 (sequence is synthesized)
cctgggcctcagggtcttcatgtataaaagggctgaagctcagtgggtaactggagcactgcctgggttagatcctggctccacccctttccagtgtgacctagggtgaatgagttcacc

SEQ ID NO: 991200 - DNA, 120 bp, Artificial Sequence
  ENSG00000227533_26 (sequence is synthesized)
tctctgggcatcagtgtccttgtctctaagatggacttgataataatgaaagctacccctcacagggctgtggtgaggatgaaggggtctggcagcacatgtagaattcttagagcaggc

SEQ ID NO: 991201 - DNA, 120 bp, Artificial Sequence
  ENSG00000227533_27 (sequence is synthesized)
ttttttcctgcagagtctttgttgctatcatcatcatcatcatcatcctcatcctcatcatcatctacctccagggattcttggggggcttaaacaaggcaggttgtacaaattatctgg

SEQ ID NO: 991202 - DNA, 120 bp, Artificial Sequence
  ENSG00000227533_28 (sequence is synthesized)
cacagacgtcattaaataataacagggcagagtgacgggtgctgtgatacagggaagagctgggagagacacaggaaagagaaaagacttctgtctggctgggtggaagaagggtgtgga

SEQ ID NO: 991203 - DNA, 120 bp, Artificial Sequence
  ENSG00000227533_29 (sequence is synthesized)
aggtatggaagccaagggaaaacttcccctttgccctctgaaggttcactgaaaagtcaactgacaaaaggcagatgaatagcagaaatggcatgcaaatttattaatgcgcacacaggg

SEQ ID NO: 991204 - DNA, 120 bp, Artificial Sequence
  ENSG00000227533_30 (sequence is synthesized)
agaaccacagagtgattgattactccccactctgcaatggggtgcagaagcttatatgccatcttgaggttacagaaagaatgggggcttggggcctgagcgcagtggctcatgcctgta

SEQ ID NO: 991205 - DNA, 62 bp, Artificial Sequence
  ENSG00000227533_31 (sequence is synthesized)
gtgctgctgaggttgcacgagctgagatcgcaccgctgccctccagcctgggcaacaagagc

SEQ ID NO: 991206 - DNA, 120 bp, Artificial Sequence
  ENSG00000227531_0 (sequence is synthesized)
cctcagaattctaccagtgcacctcattcagacattcatcaagaaaaaggccagctgaaggcagacagccaacaaaactcagtcgttagccacagccctggctgtcctcgtccatcaagc

SEQ ID NO: 991207 - DNA, 120 bp, Artificial Sequence
  ENSG00000227531_1 (sequence is synthesized)
ctgcccattgtgagcttccattcatcttacctgtctgttatggaagagtgaagtggaaaaggcatggaggactcagaagacctgctaccgagaagagccccattgcaatcagaagattat

SEQ ID NO: 991208 - DNA, 120 bp, Artificial Sequence
  ENSG00000227531_2 (sequence is synthesized)
ttatggaaaaaagcaaaatggagatatttaaaagacggagagagacagcagaaagctgcttaagaaattgctttgagtccacaggagggaagcacaaaggagatgggataatagtgttat

SEQ ID NO: 991209 - DNA, 120 bp, Artificial Sequence
  ENSG00000227531_3 (sequence is synthesized)
gcagagttaatgagtatcttggacaattgcaccaaatgcaatggattgggatcactaaatcaagacgtaatttgatagaaataaaggtaaggccactttattccagataccaactgcaaa

SEQ ID NO: 991210 - DNA, 120 bp, Artificial Sequence
  ENSG00000227531_4 (sequence is synthesized)
agagacaagataatagagaaagtttgggctttagcagcactaatgattgaaaaagtcacagggctttagttagtatcagtcaactttatgaatcagctacccagaaaggctaatatgatt

SEQ ID NO: 991211 - DNA, 120 bp, Artificial Sequence
  ENSG00000227531_5 (sequence is synthesized)
ttaggatgcactactataaatgaagtaactagaatgacaagaaaattgacctttattttatgccaatcattccacatcaaatgtgcctcaggttaggtgccaaactctaggaggctattc

SEQ ID NO: 991212 - DNA, 80 bp, Artificial Sequence
  ENSG00000227535_0 (sequence is synthesized)
agtttctttcttactctaggtttctaaaatcatgcatttgttttatgacaatgctttcctgttattcctgtgtccagaca

SEQ ID NO: 991213 - DNA, 120 bp, Artificial Sequence
  ENSG00000227535_1 (sequence is synthesized)
tttcctgttattcctgtgtccagacatttggcttttgaaattgctatttctctctcattaagagactttactgccttatataaagatggagggcttaagattttagattgaatttctgct

SEQ ID NO: 991214 - DNA, 120 bp, Artificial Sequence
  ENSG00000225235_0 (sequence is synthesized)
cgctcgccccagactgagcgccgtctctgttcactgacaacttctgtctgctcacctaccatcggcaccatgtgaccagaacccatgccattggctgccaattatgtgatggtgattcga

SEQ ID NO: 991215 - DNA, 120 bp, Artificial Sequence
  ENSG00000225235_1 (sequence is synthesized)
cagaagcagatgcttggacagtttgcacagaaaattcttcgctaactgcaatcgatcaatcctgccagtggcgaagacgaaaatatttcagaagcagcaaacttctttcctggcaggacg

SEQ ID NO: 991216 - DNA, 120 bp, Artificial Sequence
  ENSG00000225235_2 (sequence is synthesized)
tactcacattcctttagatccctcccccgtcttgatcagtatttgtgagttggttgctggccttgcattccacatatatctacttagaaaggaaactaaagcttaaacacagttacagtt

SEQ ID NO: 991217 - DNA, 120 bp, Artificial Sequence
  ENSG00000166770_0 (sequence is synthesized)
ggcggacagcggaaggtccgggagtgtccgccataaagtcgtttgaggtgaccgttgcgtaattgtgagtctgtgagagaagatgtgaagtatggcctcgtcccggtcatctgggcgtgc

SEQ ID NO: 991218 - DNA, 120 bp, Artificial Sequence
  ENSG00000166770_1 (sequence is synthesized)
gggtcccgggttttgatcgcgcgtttgtgtagaataaaagaaatgacagccaccatagaggaactagccaaagttaatattagtcggccagcccagagtcccttcaggagttctgtgtga

SEQ ID NO: 991219 - DNA, 120 bp, Artificial Sequence
  ENSG00000166770_2 (sequence is synthesized)
ctgggaaaggaaatctgacagcaccgggcacgtgacagtagactacagggaattcaataagagtttgactcttcgtcaacaataatctggcgcccaaacgtggggcctcagagaagactc

SEQ ID NO: 991220 - DNA, 120 bp, Artificial Sequence
  ENSG00000166770_3 (sequence is synthesized)
aggacccctaaggagttgcctgaaaccggagctaaggtaccagcaggggcccattgaagtcccactgagttcaagcttctcctccggtggaactgataataaactccaagaccttcaaaa

SEQ ID NO: 991221 - DNA, 120 bp, Artificial Sequence
  ENSG00000166770_4 (sequence is synthesized)
accaaaaggaagacttttttttcatcttacactgaagataccacattatttttatgcatggaaggggtctcagcactatttcaatgaatacagtcccaatccccatttgaaaaataagaa

SEQ ID NO: 991222 - DNA, 120 bp, Artificial Sequence
  ENSG00000166770_5 (sequence is synthesized)
aactgaggctcatagaagttatgtcatctttctgccgaaaaacagctattaaaaagttggatagtcactgtttgaatgcagacacttggagctctgaaaggagagcatttatgcaggaac

SEQ ID NO: 991223 - DNA, 120 bp, Artificial Sequence
  ENSG00000166770_6 (sequence is synthesized)
atgcaagatcatggaccttggggccatgccatgctgctataccaaaattgaagtagttaaaaatatggatactccatgggttcataggggaacctcgcaagatgctggagacttggataa

SEQ ID NO: 991224 - DNA, 120 bp, Artificial Sequence
  ENSG00000166770_7 (sequence is synthesized)
gctgacaaaactagaacacgttttaaatttgggggcgggagcattacagcctttaaaatatcttttataaaaattccactcccaaaatctgagagtacttgtcagaaacagtattttttt

SEQ ID NO: 991225 - DNA, 120 bp, Artificial Sequence
  ENSG00000166770_8 (sequence is synthesized)
aaactcggaatacaggttaaaatccaagctccttaattctgtatttaaggctgtccatgatatcgaccatgcagacgttagtagcttcatgtcttgaccacacctgactcccaaccctga

SEQ ID NO: 991226 - DNA, 120 bp, Artificial Sequence
  ENSG00000166770_9 (sequence is synthesized)
ctccaagctgtgccagctctgctctccctgtgcagtcttctgggttgtcctctgtcttggttcattggtagaatagtcacaaactttgttccataccttaatctttttaagttaacaggg

SEQ ID NO: 991227 - DNA, 120 bp, Artificial Sequence
  ENSG00000166770_10 (sequence is synthesized)
gatcctagaggccactctgcagtggtgtggcagtattccttattcttgttgtaagttgggtgctgttccaggatattgtcggtgggaattttggttcttttttgctattacaaataagaa

SEQ ID NO: 991228 - DNA, 120 bp, Artificial Sequence
  ENSG00000166770_11 (sequence is synthesized)
acatttgaatagttttgtaaatctacctttttcgtggttttgcttgtatacttttttcactggagaagggggaattctgcatgaaaatgtaaattttaagtgttagaatgtgaggatttg

SEQ ID NO: 991229 - DNA, 120 bp, Artificial Sequence
  ENSG00000166770_12 (sequence is synthesized)
caaacttatcttacacagacttgtgtcattttccttctaaccgccaacatatgagcatacctgtctacccagggtctctccactagagtgatctgaataatttgaatgctagctgtgtgg

SEQ ID NO: 991230 - DNA, 120 bp, Artificial Sequence
  ENSG00000166770_13 (sequence is synthesized)
tcttaatctcaaaatctgttcatttgttacttttcatggcaaaaatgactttgccaatgtgattaaaggatcttcaaacagggagagcaccatggactattcaggtgaaggcactgtaat

SEQ ID NO: 991231 - DNA, 120 bp, Artificial Sequence
  ENSG00000166770_14 (sequence is synthesized)
cacatgggtcattataggagggaggctgaagtgtaagaagcaaaggagacctgatgacaagagagatgcagccttgtgacaagaaatgagggcagcctgtagaacaggagtccccaaccc

SEQ ID NO: 991232 - DNA, 120 bp, Artificial Sequence
  ENSG00000166770_15 (sequence is synthesized)
ctgggccgcagaccggtaccagtctgtgacctgttagaaactaggccacacagaaggagttgagcagcgagcaaacgtcaccgcctgagctctgcttcctgtgagatgagtggcagcata

SEQ ID NO: 991233 - DNA, 120 bp, Artificial Sequence
  ENSG00000166770_16 (sequence is synthesized)
aactgcgcatgtgagggatctaggttgaacgcttcttatgagaatctaactaatgcttgatgacctgaagtggaacagtttcaccttgaaaccattgccccatccatcttccagaaatcc

SEQ ID NO: 991234 - DNA, 120 bp, Artificial Sequence
  ENSG00000166770_17 (sequence is synthesized)
cattgccccatccatcttccagaaatcccatccctggtgccaaaatggttgaggaccactgctcttgaagccagcaaaggcaagaagtagattctctcctggagcctcaggaatggcagg

SEQ ID NO: 991235 - DNA, 120 bp, Artificial Sequence
  ENSG00000166770_18 (sequence is synthesized)
cagctaggcccagacattaattttagctcataaagtatattttggaattctgaactacacaacataatttttttgttttgttttgctttaactgctatgtttatggtaatttgttacagc

SEQ ID NO: 991236 - DNA, 120 bp, Artificial Sequence
  ENSG00000166770_19 (sequence is synthesized)
ggagataaaaaaatgaatacacttctcagtatgataggtaagaaatggtatctcagtgtagtgtgaattacactcctcttattttgaatgtcataagttatcttttttaatgttcatagt

SEQ ID NO: 991237 - DNA, 120 bp, Artificial Sequence
  ENSG00000166770_20 (sequence is synthesized)
acttagaataatttgtatggacaaagcacgttgactgagcttctgttgctaactggaggtatcggatatttaacaacacttagaagtttggatggcaacattcatttaaactgtgagaca

SEQ ID NO: 991238 - DNA, 85 bp, Artificial Sequence
  ENSG00000166770_21 (sequence is synthesized)
tagaagtttggatggcaacattcatttaaactgtgagacagtaatacctgttgaggtgcagaaactccactaccccttcaagaat

SEQ ID NO: 991239 - DNA, 120 bp, Artificial Sequence
  ENSG00000166770_22 (sequence is synthesized)
ttgcctgggctggagtgcagtggtgtgactatggctcactgcagccttgaattcctgggctctagcaatcctcccacttcagccacctgagcagctgggactacaggcatgggccagcat

SEQ ID NO: 991240 - DNA, 120 bp, Artificial Sequence
  ENSG00000166770_23 (sequence is synthesized)
aggcatgggccagcatgtccagctaatttttttgatttttagaagagacgaggtcttaccattttgcccaggccagtctcaaactcctgagctgaagcagtcctcccagctcgacctccc

SEQ ID NO: 991241 - DNA, 78 bp, Artificial Sequence
  ENSG00000166770_24 (sequence is synthesized)
gaacccatatttagagtcagactcaccatatccttgaagaaaccattccaaatattatttaaatgactccgtattttt

SEQ ID NO: 991242 - DNA, 120 bp, Artificial Sequence
  ENSG00000166770_25 (sequence is synthesized)
tggcacgcacaccggtctcctaggggactggcgcctggccctgcttttcatcctctcaggagatcacgtgtggacactgaggcccttcctcgagctctttaaccaaacccaacctcccca

SEQ ID NO: 991243 - DNA, 120 bp, Artificial Sequence
  ENSG00000166770_26 (sequence is synthesized)
attcgccgccttccccgctcccacaaccacacgttcccgtgtgagggcttattgcctccagccagccagcgtccttcgcccccacattcacgaggtttggagccggcctcacccgcggag

SEQ ID NO: 991244 - DNA, 120 bp, Artificial Sequence
  ENSG00000166770_27 (sequence is synthesized)
gcggacaccgcccacccgcgcgtgcgcactacgcagtcatcctgcgacctccagaatccaccggggtgcagcgaggctgtggaaagtcccacccagaacgtgagttttaacttctagtca

SEQ ID NO: 991245 - DNA, 120 bp, Artificial Sequence
  ENSG00000166770_28 (sequence is synthesized)
tggcgaatgatcgcaggagagcacagactggaccctgctacgatctctcttggagtggatcagactgatgatcaccaacaaccaactcattcccggataaggaagaagagagtgtcacct

SEQ ID NO: 991246 - DNA, 120 bp, Artificial Sequence
  ENSG00000166770_29 (sequence is synthesized)
acttcagtgtggtttcaaccctacttctgcatcttaaagacactgtatggtttcagcagtagtgcccctgttcattagtccccctgatgttttcattcctcatctcatctttttcttagc

SEQ ID NO: 991247 - DNA, 120 bp, Artificial Sequence
  ENSG00000166770_30 (sequence is synthesized)
agcattcaatgaatccttcattctagaaacactctatatctttggttttcatgagaccattctcaccttgttttgtcctgtgacttttttgaaaaaaacaaaaacaaaaaaccctttttt

SEQ ID NO: 991248 - DNA, 120 bp, Artificial Sequence
  ENSG00000166770_31 (sequence is synthesized)
tcttaaccatgttgaaatgtgcagttagtaaagtacattcacattgtggtgcaagccatcactaccatccatcactagaacccttttcatcttgcagatctgaaactctacccattaaac

SEQ ID NO: 991249 - DNA, 120 bp, Artificial Sequence
  ENSG00000166770_32 (sequence is synthesized)
gacttcccatcttcccatccccacagctcctagcaaccaacattctactttctctatcagtttgactactctaggtacctcatatgagtagaatcatacagcatttatccttctctgcct

SEQ ID NO: 991250 - DNA, 120 bp, Artificial Sequence
  ENSG00000166770_33 (sequence is synthesized)
ggcttatttcacttgtataatgtcctcaaggttcattcatgttgtagcatgcatcagaacttcctccccttttaaaggctggataatatttcatggtatgtttagatcacattctgttta

SEQ ID NO: 991251 - DNA, 120 bp, Artificial Sequence
  ENSG00000166770_34 (sequence is synthesized)
tccattcatccatcagtgaacacttgtgctccttccaactttgggctgttgggtgtcctgccactgttgctcctagtgctcaatctcgtttattccctcctaatcaagtgtacaacgttg

SEQ ID NO: 991252 - DNA, 120 bp, Artificial Sequence
  ENSG00000166770_35 (sequence is synthesized)
gacactgtgcaggatgatgccacttcatcttggatgctaatctgccatgttgacttctgattaaccccaggcccaggaatgcctcaagatttctactttacttactgttgcttgtgtaag

SEQ ID NO: 991253 - DNA, 120 bp, Artificial Sequence
  ENSG00000166770_36 (sequence is synthesized)
ccaagacaaccttgatgttatcataaacatgtacttacctaagtcctgtcctttggcaaattatgggctatgagacacagcattcttgcctttccctgaggggtcaatttcagcgatcct

SEQ ID NO: 991254 - DNA, 120 bp, Artificial Sequence
  ENSG00000166770_37 (sequence is synthesized)
acacattccttctgaagcacttatgctctttctatatggtatgtaagctctcggtctggggagtaacagtgcagagatctacctgtcttgttgccacatgtttctaaactttccaataaa

SEQ ID NO: 991255 - DNA, 120 bp, Artificial Sequence
  ENSG00000166770_38 (sequence is synthesized)
tgaagaaggcttgggctgcgctggttctgctctgtccgggtcggagatgaactgacccgggagagcagcggagggatgtttcttttggccaacagtggggactcacctgcacgttttgcg

SEQ ID NO: 991256 - DNA, 120 bp, Artificial Sequence
  ENSG00000166770_39 (sequence is synthesized)
aagaggcccacagtcctttgcgtggcgctcggactacatttcccaacggcccctgcacgccctgggggctgttccatgcggtgttgcgcctgcgtagccggcgggctggcagtgagactg

SEQ ID NO: 991257 - DNA, 120 bp, Artificial Sequence
  ENSG00000166770_40 (sequence is synthesized)
acactctcgccagcccccttacctcggtcttcccgggctcagaccccggcggcgaccaccgagacagccgagcagggactcagcgcctgcgcactcccctccgggaccccgggaccgcgc

SEQ ID NO: 991258 - DNA, 120 bp, Artificial Sequence
  ENSG00000166770_41 (sequence is synthesized)
gctgcaccccccttcacacacgcaccacgcatgcgggcgcgtggccccgcccccaaacaaggccacgcggcgtgcgctcacccgcctctcggggacagtaccaccagccccggcctgagg

SEQ ID NO: 991259 - DNA, 120 bp, Artificial Sequence
  ENSG00000166770_42 (sequence is synthesized)
gtctctgaggcgatttttgtggttttgtacgtggcggggggcactgattttgaatatgtgtgtatgttctggacatttgtttagcttctgcatccacttctgcggaagggcagagttgag

SEQ ID NO: 991260 - DNA, 120 bp, Artificial Sequence
  ENSG00000166770_43 (sequence is synthesized)
taggtgggaacaggtactgtgtggccccacaaagcctgaactatttactgttgactctagagcccagtttttgcggtgtgtacgtctctgtggggaaccacacattttgaatatgtatac

SEQ ID NO: 991261 - DNA, 120 bp, Artificial Sequence
  ENSG00000166770_44 (sequence is synthesized)
gaatccaccggggtgcagcgaggctgtggaaagtcccacccagaacgtgagctgagtcattgaaagcagccagctacaaacagacacattccaggcagtggagaaagaggagaaaaatgc

SEQ ID NO: 991262 - DNA, 120 bp, Artificial Sequence
  ENSG00000166770_45 (sequence is synthesized)
cccctaacttctcatcagaaaaacaaaggcctaatgaaaatggaaagttgtctttaaagtgctgaagggggaaaaaaaaccttcatgctaaatatgcttcacgtatgaggatgaactcaa

SEQ ID NO: 991263 - DNA, 67 bp, Artificial Sequence
  ENSG00000166770_46 (sequence is synthesized)
ggcatgatcttggctcattgcaacctcactgcctctcaggttcaagctgcacggctaatttttttgt

SEQ ID NO: 991264 - DNA, 120 bp, Artificial Sequence
  ENSG00000166770_47 (sequence is synthesized)
gtgtgagccactgcacccagccagagatgctaagtatttttgtaacatggagcagctctgaacactttggtcaataagaaaattgaggctcgtagaagttaaaccattcttctgctgaaa

SEQ ID NO: 991265 - DNA, 120 bp, Artificial Sequence
  ENSG00000166770_48 (sequence is synthesized)
atagctagtaaaaggttgaataatcgctgtttgaatgccgacattgggacctctgagaggagagcatttatgcaggaacatgctagatcatggactttgggagcatgttatgctgctata

SEQ ID NO: 991266 - DNA, 120 bp, Artificial Sequence
  ENSG00000166770_49 (sequence is synthesized)
gcaaaaattgtactagttaaaaatatggttactccatgaattacaaggtaatctcacaagatgccagataattgcacaagctggcagaaagaaaaatgatgttttaaattttttattttt

SEQ ID NO: 991267 - DNA, 120 bp, Artificial Sequence
  ENSG00000166770_50 (sequence is synthesized)
ggcatgatagcctttaaaaataacttttatggaagtccaccctttaaaaacaatattttaaaaaattgaaatacaggttaaatttgaagctctttaatatagtgattaaagctgcacatg

SEQ ID NO: 991268 - DNA, 120 bp, Artificial Sequence
  ENSG00000166770_51 (sequence is synthesized)
atgttgaccatgcagatattagtaccttaatgccttcaccacacctaactcccatcctggttctaagctgtaccagcttttctcacctcatgcagtttcctgagtttgtccttcagcttg

SEQ ID NO: 991269 - DNA, 120 bp, Artificial Sequence
  ENSG00000166770_52 (sequence is synthesized)
gttccttggtagcctagtctacaggtttttctttatatcttattttttttaagttaacaatggatcctggaggccactgtgcggtgatgtggcagtattccctattcctgttttaagttg

SEQ ID NO: 991270 - DNA, 120 bp, Artificial Sequence
  ENSG00000166770_53 (sequence is synthesized)
ggtactattccagaatattgtcagtggcaattttggttctttcttgtttgctatttcaagtaaagaacatttgaatagttttgtaaatccatctttttttgtgtttttgcttttgtactt

SEQ ID NO: 991271 - DNA, 120 bp, Artificial Sequence
  ENSG00000166770_54 (sequence is synthesized)
cttctgtttgataagggggaattctgcatgaacatgtaactgcaggaacgtgagaatttgcaaacttttcctacatagatttatgtcattttccatctaaccaccaatatatgagcatgc

SEQ ID NO: 991272 - DNA, 120 bp, Artificial Sequence
  ENSG00000166770_55 (sequence is synthesized)
ctgtctatgagagtctcaccactagggtgattggaatgatctgaatgctagctgtggtaggcagcaggtcccccagtacacacacaccaaagatgtccatatcctaatcctcaaatctgt

SEQ ID NO: 991273 - DNA, 120 bp, Artificial Sequence
  ENSG00000166770_56 (sequence is synthesized)
gaatgtgttacttttcatagcgcaagtgactttgaaggtgtgattaaagaatcttcagatggggagattatcttggcctatccagctggagacagtgtaatcacaagggtcattttaaga

SEQ ID NO: 991274 - DNA, 120 bp, Artificial Sequence
  ENSG00000166770_57 (sequence is synthesized)
ggcaggcataagtggcaaaagcagagaaagagatgtgatgacaagaaggatgtggccatgtgacgaagtgagggcagcctctagaagctagaaaaggcaagaggtagatcctctcctgga

SEQ ID NO: 991275 - DNA, 120 bp, Artificial Sequence
  ENSG00000166770_58 (sequence is synthesized)
gcctcaggaatggcaggtagctaggcccacagattaattttagctcataagacatattttggaattctgaactgcagaacatggcagtttaaacaaaactgcttagttttaactgctgta

SEQ ID NO: 991276 - DNA, 120 bp, Artificial Sequence
  ENSG00000166770_59 (sequence is synthesized)
tttgtggtaattcatcacagcagagagaaactaatgaacctcctagtgtgataggtgagaaatggtatctcggtgtggtttgaattacacttctcttattttgagtatggtaagttgtat

SEQ ID NO: 991277 - DNA, 120 bp, Artificial Sequence
  ENSG00000166770_60 (sequence is synthesized)
ttttaaatggtcacagcacttagaataatttggagggacaaagcatgttcactgagattctgttgctaactggaggtaccagagatttaaccaacacctaggtttggagggcaaaatttg

SEQ ID NO: 991278 - DNA, 120 bp, Artificial Sequence
  ENSG00000166770_61 (sequence is synthesized)
tttaaaccatgagacagtaagacctggacgtagaaactccaccattcttctaggaacccctattttgagtcatagtcaccatgtccttgaagaaaccattcaaaatattcttcagatgac

SEQ ID NO: 991279 - DNA, 120 bp, Artificial Sequence
  ENSG00000166770_62 (sequence is synthesized)
tctggatttttgaccatccttattgctctccagaaatagtaactagaaataacagcatctctgggatttctcactatgtaaataatcgtaaatgaaaaaggggatattgagaataaatat

SEQ ID NO: 991280 - DNA, 120 bp, Artificial Sequence
  ENSG00000166770_63 (sequence is synthesized)
atccatttcctttgctccaggatttttgcaagtggataaaaaaatttaactcacattagagtctttggctgtagctcagccttctttaaatcattcatttaacaaaatgtattgagaacc

SEQ ID NO: 991281 - DNA, 120 bp, Artificial Sequence
  ENSG00000166770_64 (sequence is synthesized)
tactatgtgctagacatacagctataatggatcaatgaaagaagtctgcgtccgagtcctctgtacatttatggctaagggctgggctgtacaggcatggggcaagatcaccagaatttt

SEQ ID NO: 991282 - DNA, 120 bp, Artificial Sequence
  ENSG00000166770_65 (sequence is synthesized)
taatcttagaaacatgaaagctgtgagaatttattgctgtcagctctacacgacaacgaattctaaagtccttcagtctgtgaggaatcatagtgtatgtcaagggggaaggaaggaaga

SEQ ID NO: 991283 - DNA, 120 bp, Artificial Sequence
  ENSG00000166770_66 (sequence is synthesized)
agctgagtgtttaaagcaaaataaccccgtagacagtttttgcaatgtagataagagtgaaaattgtgagggaaatagtacaaagaaagatggtgggtaaatggaatcagttaataactc

SEQ ID NO: 991284 - DNA, 120 bp, Artificial Sequence
  ENSG00000166770_67 (sequence is synthesized)
cagattttctcctcgttcagcttgacaaagtcaccaaatcctccatctgcataactccatcagtaaacactgcatttaatctcctgggacaaccaatactttttctgtatttttctccct

SEQ ID NO: 991285 - DNA, 120 bp, Artificial Sequence
  ENSG00000166770_68 (sequence is synthesized)
gcctcaccctctttacctatctatgatatttcttaaaatagatgttttcaccaactgcaccctgggatctgatactaagctaggctgtcagtaaatgatattgtcaccacagaaaccaag

SEQ ID NO: 991286 - DNA, 120 bp, Artificial Sequence
  ENSG00000166770_69 (sequence is synthesized)
tatatgtctactctttgtcgtgcccaaatacaaatctgtaaattcccttaatatgtgggttggggtcatcttaatcatcacctttttctcaatcctgtttcagagcctgacacatgatag

SEQ ID NO: 991287 - DNA, 120 bp, Artificial Sequence
  ENSG00000166770_70 (sequence is synthesized)
gtgcataatacttaaatgtatgaaggaataaaaggcatgaatgcatacataagttaattaataatcagaagtgagtacatggaagaatcagtactgccagtttaaacacacagaaactgt

SEQ ID NO: 991288 - DNA, 120 bp, Artificial Sequence
  ENSG00000166770_71 (sequence is synthesized)
gcttcaaagacgctgcactatttgccagtagacaaaatgtggaaccaaggttcaaactggaattttctgagataaagtcacaatcatattacagagcttggtcttgggctgtttgcttgg

SEQ ID NO: 991289 - DNA, 120 bp, Artificial Sequence
  ENSG00000166770_72 (sequence is synthesized)
gctatttgttttctttttcatttattcatcctatattttcttaaatctctacaacgttttaagcactttgccaaattagtataaaacagtaaaaatagtaagataataaacatggtcttc

SEQ ID NO: 991290 - DNA, 120 bp, Artificial Sequence
  ENSG00000166770_73 (sequence is synthesized)
ataatcatggatgtcacggtaaaatgaatcagcctgacagtaagtaagccagcaaatgaaacatagcacagtagtaatacaatgtgatagcataatactgtaataccttttttttttttt

SEQ ID NO: 991291 - DNA, 74 bp, Artificial Sequence
  ENSG00000166770_74 (sequence is synthesized)
aatgtgatagcataatactgtaataccttttttttttttttccttttcttgagatggagtctctatctgttgcc

SEQ ID NO: 991292 - DNA, 120 bp, Artificial Sequence
  ENSG00000166770_75 (sequence is synthesized)
tactgggattacaggtgtgagccatcacacctggcctataatatcttgataatactgctactaccacatcacctaagatgcttcaagggagtttcatacagttttgatggttttaatgcc

SEQ ID NO: 991293 - DNA, 120 bp, Artificial Sequence
  ENSG00000166770_76 (sequence is synthesized)
tgatggttttaatgccatatgatttaaactataatctatgatgagtacacattcacattttatagcacagggtcactcaatgctagaggttttatgtagagctcctgaaatgatgcatct

SEQ ID NO: 991294 - DNA, 120 bp, Artificial Sequence
  ENSG00000166770_77 (sequence is synthesized)
gagtcctttcagctgggaaagacatggtctgaataggtaatatcatggttagaaaaacccaattgggtttcacatgtgagtaccaaacctatatttcctctcaaatagaggtactggctt

SEQ ID NO: 991295 - DNA, 120 bp, Artificial Sequence
  ENSG00000166770_78 (sequence is synthesized)
ataattgaggtgcttcccacatgggcttgtcaacattgggtgcctctgtgttgagggtgcagccaggatttataaaactgaagactgaatattctctggggcaataccaggcagattctc

SEQ ID NO: 991296 - DNA, 120 bp, Artificial Sequence
  ENSG00000166770_79 (sequence is synthesized)
ttgtatatgacattgtagcttagaacaagattttctaatctgcttactttactgaatcacattttaagtttgtttctaaaacaaagatattgagggcagtcagaaaagtagtccacatgg

SEQ ID NO: 991297 - DNA, 120 bp, Artificial Sequence
  ENSG00000166770_80 (sequence is synthesized)
agtgctgggattacaggcgtgagcaccatgcctggtggacattccattattaactcaccttggccttggaattaatgacttggagaagacctgaatggggaggggagagcagtagaagca

SEQ ID NO: 991298 - DNA, 120 bp, Artificial Sequence
  ENSG00000166770_81 (sequence is synthesized)
taggcctggaccttggatttctgtgtccatccttgctgcacccagttttagcaagaatcctgttaagtaggtttagtgagaattcccttatccttgatcaggttcctcatcttccaccct

SEQ ID NO: 991299 - DNA, 120 bp, Artificial Sequence
  ENSG00000166770_82 (sequence is synthesized)
taatgtctaagtccttggcctgcctttagcaggattctacccttaatacctaatcaagttcctgtttgtgatttcccacccattgacccccttactcttatagttggctacaaaaccaac

SEQ ID NO: 991300 - DNA, 120 bp, Artificial Sequence
  ENSG00000166770_83 (sequence is synthesized)
tgttgttgctatattggggagttgagttcactgtctctcccccattgcaattgtcttgaacagtattacttaccgtttacacacgtgtattcttttcctgtttccctcatttgcatgaga

SEQ ID NO: 991301 - DNA, 120 bp, Artificial Sequence
  ENSG00000166770_84 (sequence is synthesized)
aatggaattctgcctttacagccttgatacagagcagtgggtgttgtgtgagatacagtattgaagatgagtctcacctctgtctgtgatgaaatagattgtgaattgtgaagagaatgc

SEQ ID NO: 991302 - DNA, 120 bp, Artificial Sequence
  ENSG00000166770_85 (sequence is synthesized)
aggtagcaatgtaggagctaaacttaagtgtcctctaatttagagtcaatgactttgtcgtttctgctgtgaatctggctactctctgctatgccagaaaatgatgtacttaactgcagc

SEQ ID NO: 991303 - DNA, 120 bp, Artificial Sequence
  ENSG00000166770_86 (sequence is synthesized)
aaacacgtatctttagtttatcctccactcacacaaacctttgggacagcacatgttatcaggagttttccccctcacatctgtactctcttcagatgaatgtggctggagggtcatgtc

SEQ ID NO: 991304 - DNA, 120 bp, Artificial Sequence
  ENSG00000166770_87 (sequence is synthesized)
ccgaggaatcttattacttagatattattgatttttgcagagtggggcatctgacgtatgcacaccagtgcctcttctcttgacatttttgctctttgtatcaacagtgaacttgtttct

SEQ ID NO: 991305 - DNA, 120 bp, Artificial Sequence
  ENSG00000166770_88 (sequence is synthesized)
attgaattcctcatactcagaaatggtcaggtcacattcaggtcatgtgggcacaaaataatagaaacttacactgagacctagaaaatgaaacattcaagcagaaaactgcagagattt

SEQ ID NO: 991306 - DNA, 120 bp, Artificial Sequence
  ENSG00000166770_89 (sequence is synthesized)
agggacttctgtttgattccacaattgcagctattcctgaaaaaggtggagctcaattcctacattggattcattgaaaaagcacagtgttttctgtttcccttttgcttgaattccttg

SEQ ID NO: 991307 - DNA, 120 bp, Artificial Sequence
  ENSG00000166770_90 (sequence is synthesized)
tcatgtctaatgttgtctgcaactcagggtttggaataatccaataggagctctgattgtggacatgatctaacgttctaataaccaagtgatgtgttcaacctgatatagataataaac

SEQ ID NO: 991308 - DNA, 120 bp, Artificial Sequence
  ENSG00000287742_0 (sequence is synthesized)
gttgccagcagcccggctgcgagcccgccggcgcccggccacccgcccgctgcgtcgcctggcagcgcgcctgcagctgagtcagcctgttgcaacctgctgtatgaagaacacctttga

SEQ ID NO: 991309 - DNA, 120 bp, Artificial Sequence
  ENSG00000287742_1 (sequence is synthesized)
aggtatcagacgtatctgtcttttctcttaaatacaatgcacagcagcaggaaagggcctgctcacctgctggccagaggcttcctggctctcagcctccttgactactttttttgagac

SEQ ID NO: 991310 - DNA, 89 bp, Artificial Sequence
  ENSG00000287742_2 (sequence is synthesized)
tttgagacagggtcttgcaacacggctcactgccgcctcaacgtcccaggtgcaagtgatcatcctgcctcagcctcccaagtagctgg

SEQ ID NO: 991311 - DNA, 80 bp, Artificial Sequence
  ENSG00000287742_3 (sequence is synthesized)
gctgggactaccggcatggaccgccacacctggctattcaagctggtctcaaaaaactcctgggctcaagcgatcctcct

SEQ ID NO: 991312 - DNA, 120 bp, Artificial Sequence
  ENSG00000287742_4 (sequence is synthesized)
ctcccaatgattcccagggacctgagacagagcctccatgggcaataaacacaccatggtttgtgtttgtttgtgtttggatgtgcattgaatcctggtaactgtgattacctggggtgg

SEQ ID NO: 991313 - DNA, 120 bp, Artificial Sequence
  ENSG00000287742_5 (sequence is synthesized)
gagggcactggggatgagggaggacttttcactgtactttgctgctgtttgaatttttgtcacgtatatattacttaaaaatgtttatttaaaagcatttcagacctacaaaaaggtgtc

SEQ ID NO: 991314 - DNA, 120 bp, Artificial Sequence
  ENSG00000287742_6 (sequence is synthesized)
agaaacaaatgtgacacacagtcacgctgcctttctccccattccacaccctgcagaaatctctagctagcttcagtacttctctgaggagtgaggagtggatgaagcctcagaatgctt

SEQ ID NO: 991315 - DNA, 120 bp, Artificial Sequence
  ENSG00000287743_0 (sequence is synthesized)
agacacaaaaaggtaggcaaggaccagatcccacagggcctcggagactgcgtcagtgcatctggctttcattccaagaaggcttggaagggtcctaagcagggaaatgacacaatccaa

SEQ ID NO: 991316 - DNA, 120 bp, Artificial Sequence
  ENSG00000287743_1 (sequence is synthesized)
cgtttatcctaagaagaccatgaaagaaagcggggcaagaacaaatgtcaggagaccaggacctcacaggcaccacggcgccccctgccctgccctgccctgaagcagttccaggaacgt

SEQ ID NO: 991317 - DNA, 120 bp, Artificial Sequence
  ENSG00000287743_2 (sequence is synthesized)
cagatggtaagagaagaaacgacttacaaacgtcaagtccattttacagatggaaaatctgaagctcagataggagaaaagacttgcccaagtgcctggtatgaagagaaagactttata

SEQ ID NO: 991318 - DNA, 120 bp, Artificial Sequence
  ENSG00000287743_3 (sequence is synthesized)
atgtccctttcagacagaaggaagtagagtggccggccctgaagcccaagttaacctgcttcccctgcgctctctacttctagagcaatggttttaaacttggggcgattttgcccccca

SEQ ID NO: 991319 - DNA, 120 bp, Artificial Sequence
  ENSG00000287743_4 (sequence is synthesized)
gggaacattcgaccatgtctggagacatttttggttttcccaacgaggaggttgctactggcgtctcatgagaagagaccagggatgctgctacacgccttcaatgcacaggacagcccc

SEQ ID NO: 991320 - DNA, 120 bp, Artificial Sequence
  ENSG00000287743_5 (sequence is synthesized)
tgcgccagagaattgtcaggcccgaaatgtcagcaggtttctgaggttgagaaactctgttctagggcctggcatctgcctatataaacttccaaatagactcctggagtcctgggttct

SEQ ID NO: 991321 - DNA, 120 bp, Artificial Sequence
  ENSG00000287743_6 (sequence is synthesized)
ttgaattccacccactgacagagaggacagaataattaatatttgctggaggcatgtaaaaccagtagtctccctgctgagggcatgaattaaaatgtaaatgggagctgggtgcggtgg

SEQ ID NO: 991322 - DNA, 86 bp, Artificial Sequence
  ENSG00000287743_7 (sequence is synthesized)
gggcatgaattaaaatgtaaatgggagctgggtgcggtggctcatgcctgtaccagtgttgggagttcgagatcaacctggccaac

SEQ ID NO: 991323 - DNA, 120 bp, Artificial Sequence
  ENSG00000287743_8 (sequence is synthesized)
agtgacagggggaactctgtctcaaaaaaaagtaaatggggagtgggaaggtggggagaaaaaggaaaattattgggattaaaggatcctcctggggattgctaggaggcatagtcatcc

SEQ ID NO: 991324 - DNA, 120 bp, Artificial Sequence
  ENSG00000287743_9 (sequence is synthesized)
tacgccttcccttctcacctggtctgtgagaagcataaactgaggccctacaatgtgaaaagcctcaaagtgcgttccatagctggtcagaggtggagctggggctcctgattatattta

SEQ ID NO: 991325 - DNA, 120 bp, Artificial Sequence
  ENSG00000287743_10 (sequence is synthesized)
catattaattaaagctttgttatcagctattctacctcaggcctaggcctggactagggcctgggtggtagaatgggttactctggagcagcaagggggactagattaggggaggtggga

SEQ ID NO: 991326 - DNA, 120 bp, Artificial Sequence
  ENSG00000287743_11 (sequence is synthesized)
tggaggccagggcaggacctggaacgagggtggaggtgaggggtgggagcacagagaggaatcaggcttcctgtgtgctcctccctggcccctttcacagagacaggtaaaccaggggtt

SEQ ID NO: 991327 - DNA, 120 bp, Artificial Sequence
  ENSG00000287740_0 (sequence is synthesized)
attgtgaggcctcccagccatgtggaactctgcaaagaggatgttcaaagggcatcttggaccaggaggaggaagcccattgtgaggatggcaaagaacaataaatggaaggcccgtgga

SEQ ID NO: 991328 - DNA, 120 bp, Artificial Sequence
  ENSG00000287740_1 (sequence is synthesized)
atggaaggcccgtggaaccctgagcggctgccccatcactgtcctctccatcctttccatgcttcccatggtgcatggctctcaggctctccaagcaccatgagctcctggcgcgtatgg

SEQ ID NO: 991329 - DNA, 120 bp, Artificial Sequence
  ENSG00000287740_2 (sequence is synthesized)
cctggcccctgagtgtggagtctgtggactttaaatgtgcctttactcagccagcatctccctggctgggtgcgatgttgcgtggtgtgattcctgactgcgatcctgagggtgaaactc

SEQ ID NO: 991330 - DNA, 120 bp, Artificial Sequence
  ENSG00000287740_3 (sequence is synthesized)
tcttctgcttgcttctgccttggcccttgggtcttctgtcccacctttcctgccatcccctggtggtgacattagtggatcccatgtgagaaaagtgtccatcaagaaagtcagaggaag

SEQ ID NO: 991331 - DNA, 64 bp, Artificial Sequence
  ENSG00000287740_4 (sequence is synthesized)
cccatgtgagaaaagtgtccatcaagaaagtcagaggaagaagaagtctttttttttttttttt

SEQ ID NO: 991332 - DNA, 88 bp, Artificial Sequence
  ENSG00000287740_5 (sequence is synthesized)
cactgcaacctccacctccgggatcaagctattctcctgcctcagtgttctgagtaatctgggattacaggcatgtaccaccatgcgt

SEQ ID NO: 991333 - DNA, 120 bp, Artificial Sequence
  ENSG00000287740_6 (sequence is synthesized)
gattagaggcgtgagccactgtgcctggccaaagaagaaatcttagaaactgtttagttcaggtctttccaagaaaccttgtgtgggttttacaactgtgtcccaagagcaactacagag

SEQ ID NO: 991334 - DNA, 120 bp, Artificial Sequence
  ENSG00000287740_7 (sequence is synthesized)
aggggagagagacgtggagaacaggcctccagcatccagccaaggggagtggcaggcacactgggatttggtgtatatgttgggctttgggaaatgtgttatttctttttcttttctgaa

SEQ ID NO: 991335 - DNA, 120 bp, Artificial Sequence
  ENSG00000287740_8 (sequence is synthesized)
gaaagccttccatagtccaaaagtctcaaaaccaccaaaatctattcatttcattttacaaatgaggaaaatgggtctgggagaggttgacaggctctcaaaatcacaatggtagaacat

SEQ ID NO: 991336 - DNA, 120 bp, Artificial Sequence
  ENSG00000287740_9 (sequence is synthesized)
ggcagggccagatccaggtacctcatctattgattttgggggcttcgtcccacaaggccaacatcctaccacatgttcatctgaatgaaaccctcccaggccaaagagaatatatgagct

SEQ ID NO: 991337 - DNA, 120 bp, Artificial Sequence
  ENSG00000287740_10 (sequence is synthesized)
atggctctagaaagacagcaccataaagcctgccgtagcctggagaagaaaatcatagaaatggacttcccgtcactttcatctactgtgacctacaccaactgtgaaaataacatgaag

SEQ ID NO: 991338 - DNA, 120 bp, Artificial Sequence
  ENSG00000287740_11 (sequence is synthesized)
aggagagccatagtttttgttcagtcacacactcacgatgtatgcacatgtttctggaacacaaccaaaatgtcaaaatgccgttgagaattgcacctcactaactaacgtgggctttga

SEQ ID NO: 991339 - DNA, 120 bp, Artificial Sequence
  ENSG00000287740_12 (sequence is synthesized)
aattttagaaattacttatgccaggcagtggttagtaatgctagaatgttcgctaggttggtcgagttctaacaatctcccaacagcaaatattaacttcattaatttagctcatttgat

SEQ ID NO: 991340 - DNA, 120 bp, Artificial Sequence
  ENSG00000287740_13 (sequence is synthesized)
gtaattactattggtttttagtgtaaggcataatctcaaatcaatagaaacttcatcggttttgctcgaacgcgggaccctcctttatgaccacgattacctttggtgatggaatttatg

SEQ ID NO: 991341 - DNA, 120 bp, Artificial Sequence
  ENSG00000287740_14 (sequence is synthesized)
attcagatacaaagaccctctaacaaatttgactaaagtgctttggtcctgaaatgtcatcagtgtatgaaaatcgttatcctgtttttatttctcctgaaagtataataattattactc

SEQ ID NO: 991342 - DNA, 120 bp, Artificial Sequence
  ENSG00000287741_0 (sequence is synthesized)
ggctgggggccccgagctccagagcccagttagcatgtccctggcagtcccaagtcctagctgcaaggcggttcaaaaccaagatggaggaaaacacagacagggagccaaacatttatc

SEQ ID NO: 991343 - DNA, 120 bp, Artificial Sequence
  ENSG00000287741_1 (sequence is synthesized)
agttcagaccccgtttttctctaagatccagcttttgcaagggatggccctgacagccactttgctcagcatgagccaggagaaggagagagaaaagtgacagactaagggagagcccgg

SEQ ID NO: 991344 - DNA, 120 bp, Artificial Sequence
  ENSG00000287741_2 (sequence is synthesized)
ccaagctgagagagggacggacagaggcagggactggcaggcccgacgaagacaaaagacaaaacagcccagacagacaagagacaaacggaaaggaggagaattgaaatgctcagagat

SEQ ID NO: 991345 - DNA, 120 bp, Artificial Sequence
  ENSG00000287741_3 (sequence is synthesized)
gaaaacagacggtgacaagttgtgaacttgagaagcagatgaaagggcaggtaattttctacaatcagagacaggaaaaaaacttctgagggttttgctttgttctgtgcaaacgtccct

SEQ ID NO: 991346 - DNA, 120 bp, Artificial Sequence
  ENSG00000287741_4 (sequence is synthesized)
tcagtattcctcagccctctgcgtcatcaagagaaatggcccttctccctcggtggatgtgaagaggaaatatagagcagatgcctcccgctgggcctactgcagtacccagggcctcct

SEQ ID NO: 991347 - DNA, 120 bp, Artificial Sequence
  ENSG00000287741_5 (sequence is synthesized)
cctacagctgtcccacaaaggctctggaccaaaggagacagacaggtagaaatccagcccatgctctgattggtgcatctgcccagagggccaccttttctcatcactcagaggagccat

SEQ ID NO: 991348 - DNA, 120 bp, Artificial Sequence
  ENSG00000287741_6 (sequence is synthesized)
gaaagctagtgatggccagtgcaatgcctgcatggcatagctgaatttctactgggtcctgactctgcttgtctttgagaaacaggatgcctgcaataaaaagttccctttgtaaccaga

SEQ ID NO: 991349 - DNA, 120 bp, Artificial Sequence
  ENSG00000287741_7 (sequence is synthesized)
ccaactgagagtggttagagccaagatagcccaccctcaggcttcattctaatctcatctccttgctaaatgatgctcccaccagtgccatgacaggttgacaatcaccatgacaatgac

SEQ ID NO: 991350 - DNA, 120 bp, Artificial Sequence
  ENSG00000287741_8 (sequence is synthesized)
tggaagaagccatcaaaggacaaaaaggaaggcagcccttcagctccaaggcagttcaccacccaattccagaaaatatgggaatattcctcccctggcttttaacatccaactccttca

SEQ ID NO: 991351 - DNA, 120 bp, Artificial Sequence
  ENSG00000287741_9 (sequence is synthesized)
gttgagaggtcgatttgtgagccaggctcccgctcctccaattccatggccattgaatcagtcccgcactgcttgacactcactttcggctttgtgtatattggcttcatgacaccaaac

SEQ ID NO: 991352 - DNA, 120 bp, Artificial Sequence
  ENSG00000287741_10 (sequence is synthesized)
agggaaagaccccatctttcggaggaccagctttgtcccctggcagcacatataaccacagaccattctcctactgacagaagggggctcctccaggaggccacattctctttaaaaggg

SEQ ID NO: 991353 - DNA, 120 bp, Artificial Sequence
  ENSG00000287741_11 (sequence is synthesized)
aacgtcccatttccagccacagggttcacatgtgatgcagtgaagagcatctctcagcctcccaaagcaattctcaattctcatctacagggcctcctaagcaccgatcttggtggccac

SEQ ID NO: 991354 - DNA, 120 bp, Artificial Sequence
  ENSG00000287741_12 (sequence is synthesized)
tgccctcccttgcacatccccaattcccccatcctgtttcttcccaagtctcagagaagtgatgctctgccctgtggccatggtcatcccacacctgcacctgagcctgaagctggtctg

SEQ ID NO: 991355 - DNA, 120 bp, Artificial Sequence
  ENSG00000287741_13 (sequence is synthesized)
ctcacaggcatggggatagcgcccactaacctaggatgaaccagtccccagatccatgacgagcctcctagtctaccttcgttccattcacatttgccccgatgaatccataaggcccca

SEQ ID NO: 991356 - DNA, 120 bp, Artificial Sequence
  ENSG00000287741_14 (sequence is synthesized)
ggaagtcccccatgccctttccggagcctgacttgggttatggcaaacctggggtccagtcccagttctcctaacttactagttataagagcttggcgaagtcaattaacctttctgagc

SEQ ID NO: 991357 - DNA, 120 bp, Artificial Sequence
  ENSG00000287741_15 (sequence is synthesized)
ttgaattcctcctctacaaaataaggatgatcataaaattcactccaaggagctgccatgagaaacaagtgaaatattgcagaagaaccgcctgacagccagccacggtggttcacacct

SEQ ID NO: 991358 - DNA, 120 bp, Artificial Sequence
  ENSG00000287746_0 (sequence is synthesized)
ttggatggatgtggcgaggccagacaatggtcagccttgactttccctgtggtggattggattgaacgctccaattcttgcctcttgtctgcctccacatccttgtcacgatctcattgt

SEQ ID NO: 991359 - DNA, 120 bp, Artificial Sequence
  ENSG00000287746_1 (sequence is synthesized)
gggaagaatataccttttttgtcccttaactttgagctctgccagtgactgtgtgccatctccagctgcagccttgccctcttgccctgcagccatcgctgtgagaagagcacatcctag

SEQ ID NO: 991360 - DNA, 120 bp, Artificial Sequence
  ENSG00000287746_2 (sequence is synthesized)
cagaacccgtgatggagaggaggttgccctgcagtgaaacagagctgccccagctgcccagcctgctgtggagcctgcagcccagcccagcccaggtcatgtatctagttggactggctc

SEQ ID NO: 991361 - DNA, 120 bp, Artificial Sequence
  ENSG00000287746_3 (sequence is synthesized)
ttccactgtggagtgtcccatttgaaccagttactgatgtatggcctccaagctccagatcaacccttcctggccctgctggtgacatcagagatggactctgtaaatgttcctcccttg

SEQ ID NO: 991362 - DNA, 120 bp, Artificial Sequence
  ENSG00000287746_4 (sequence is synthesized)
cctcttgctcctgcaatactgcagctggtggggccagtgggagacccagagatgtgaaccctcctggaaggttcactgtcaccccaacaggaggcttcctggaaagtttccccagcaccc

SEQ ID NO: 991363 - DNA, 120 bp, Artificial Sequence
  ENSG00000287746_5 (sequence is synthesized)
agcaggtggttttctgcttgccagccatggtctgcagcacctcagcaaactcttatcccatccagtggccacatctttcatcaacgatgtgcatctcagccttggaggggaggcttcgtc

SEQ ID NO: 991364 - DNA, 120 bp, Artificial Sequence
  ENSG00000287746_6 (sequence is synthesized)
caagcttgtcttccttgaatattttgcctcggccctagaggtagtgttttttctctacatctgctattcctataatctgtcttgttttgttttctaattgaagtcccttactggtcctgc

SEQ ID NO: 991365 - DNA, 120 bp, Artificial Sequence
  ENSG00000287746_7 (sequence is synthesized)
ttctacgagtggcggtgaccaggtgaaaagggagaggaatcagccggcccagggagggtcacctctaccacattccactcacacacagaatggaacacacaagcacagagtcaacagtta

SEQ ID NO: 991366 - DNA, 66 bp, Artificial Sequence
  ENSG00000287746_8 (sequence is synthesized)
acacacagaatggaacacacaagcacagagtcaacagttattgtgattagaagttggtagcatggg

SEQ ID NO: 991367 - DNA, 120 bp, Artificial Sequence
  ENSG00000287747_0 (sequence is synthesized)
aggaagcctccaatcatggcggaaggcaagcggagctggcgcttcacatggttgatcgaagctggcagaggatagaagagctctgtggccgagtgagctgtttctggagccagatgagtc

SEQ ID NO: 991368 - DNA, 120 bp, Artificial Sequence
  ENSG00000287747_1 (sequence is synthesized)
tttggcagagcctgaggtcccctgctactactgggccaagacgaattgacagaacttccaaaacactttgcaaagacagcgagtgcacaaagctgcagctcacagccttgtcccgtggcc

SEQ ID NO: 991369 - DNA, 120 bp, Artificial Sequence
  ENSG00000287747_2 (sequence is synthesized)
gggagacaggatgcatgctgagctgctgggaggagggacaggaggaaaagtgcctgcagctgcaggagcacccacttgagatgcctcctgtgttcaatcaagttcagagtaattgcttcc

SEQ ID NO: 991370 - DNA, 120 bp, Artificial Sequence
  ENSG00000287747_3 (sequence is synthesized)
tcactcctcctggcaaaactgttcaacttggcacagtgacagctccttgtagagtttttccagctgatgtcattcttcctaaggtctgctagggtcccagctaacacgactgtgttgcac

SEQ ID NO: 991371 - DNA, 120 bp, Artificial Sequence
  ENSG00000287747_4 (sequence is synthesized)
tggcatccagacctccaccaggagcaattcaaaggcctatttttgtgaatatgtggcaaagatcccaggctccatggaggccttttgcactggggacatggtggaaaattaagccccaga

SEQ ID NO: 991372 - DNA, 120 bp, Artificial Sequence
  ENSG00000287747_5 (sequence is synthesized)
ccagctgattagatgacagaatgggcagatccgtggaagggattgagtgagcactaacatcgagcattcttataaactaagtgagactgcaagagtcaggggccactgtgcacaattgtg

SEQ ID NO: 991373 - DNA, 120 bp, Artificial Sequence
  ENSG00000287747_6 (sequence is synthesized)
tgagctgtgttttgcagcaggtgtctggggagctcaaatccacccacaaagggaagcctttctgacttgtacaaagggccataagtggtggctcgaacctgaggctctaccatgcagtga

SEQ ID NO: 991374 - DNA, 120 bp, Artificial Sequence
  ENSG00000287747_7 (sequence is synthesized)
accatgcagtgagtgtggagatgtggagatgggtacacaggaatggacaatctagagaggggaagagactaacatccagcagcacgttaactgtgaaagcaaactaaatatggcctgaga

SEQ ID NO: 991375 - DNA, 120 bp, Artificial Sequence
  ENSG00000287747_8 (sequence is synthesized)
ttctatatttgagtcctcgcggatggactgtaacctagcttaataggcggacaaaattgcaaacataacctggtagtatgcacctccaacaatagctaagtcttggccaaccccagtggc

SEQ ID NO: 991376 - DNA, 120 bp, Artificial Sequence
  ENSG00000287747_9 (sequence is synthesized)
catactcaaccaaccatacactgctgagtgttcaaattaggcatacgccaagcagtaaccaatccagctgttttatacttcacttctaatttctgtacatcattcccccccccccacctt

SEQ ID NO: 991377 - DNA, 120 bp, Artificial Sequence
  ENSG00000287747_10 (sequence is synthesized)
tttttgtctataaatcttctccacctggctgtgctggagtctctgtgaacctgctgtgattctgggggctgcccaattctcaaatcgatcattgctcaattaaactttaaatttaattca

SEQ ID NO: 991378 - DNA, 120 bp, Artificial Sequence
  ENSG00000287744_0 (sequence is synthesized)
cacctgacgctattggagactcctgcggtttgattcatgtccagaggaagttgaggggcccagattctctaccttcaaaacttcctaggcgcgtggagggtggcgacagaggtgcgcgcc

SEQ ID NO: 991379 - DNA, 120 bp, Artificial Sequence
  ENSG00000287744_1 (sequence is synthesized)
tcgggggagacgcgaggtgggtcctccttctgcagccgagtctgggcgagcgcgaggggagcctccacgctgcaggcttctgtgcaggggcggtaaaatccgcagcccagagctggagaa

SEQ ID NO: 991380 - DNA, 120 bp, Artificial Sequence
  ENSG00000287744_2 (sequence is synthesized)
ggagaagcagctgctgggaccccggagggaagccgggccggcgccagcggctccgagggcgctctgcccagtgctgcctccccgggaaacagttcaggacgctcaagaccagaagcggga

SEQ ID NO: 991381 - DNA, 120 bp, Artificial Sequence
  ENSG00000287744_3 (sequence is synthesized)
gcaaacccaaaaggagctccaaggaggttgtggatgagagagctgtcccatggctgggctgtttttacgtatactggctgcttacaggatatcacgctgctgaatgacgtgtacttgaag

SEQ ID NO: 991382 - DNA, 120 bp, Artificial Sequence
  ENSG00000287744_4 (sequence is synthesized)
accagcagagggtggtggatgtgcctctgcccacgctgtgtaaagatggcggcagagcggacccaacagcacccttggagtctacacaggaagataaagtcatgcatgggtaatgtcctc

SEQ ID NO: 991383 - DNA, 120 bp, Artificial Sequence
  ENSG00000287744_5 (sequence is synthesized)
tggctggttctgaaatatataaaggctgccatttttcagggacagagcaaattatcctacacctctttatcctctagaatttaatttccagttgcctaagtctgcatagctttccagtct

SEQ ID NO: 991384 - DNA, 120 bp, Artificial Sequence
  ENSG00000287744_6 (sequence is synthesized)
caggtgcaaatggccctcaagtctcctgatgtccactgaagctgtttggggtttttgtttttacccgattttaatatttttttctgtgatccatgcagagctctagcatcctcacttctt

SEQ ID NO: 991385 - DNA, 120 bp, Artificial Sequence
  ENSG00000287744_7 (sequence is synthesized)
cacgcgtctttggttttttgtggattgattttattgtttagctctcagaggatgttcttatttccaagtagctggaaattaccaaataccaatcataatatccagaagtacaaattaata

SEQ ID NO: 991386 - DNA, 120 bp, Artificial Sequence
  ENSG00000287744_8 (sequence is synthesized)
acgggatagtaataaatagtacaatttgtacttatagtttatgccgtttttctaaattacatgttgatcctttttagtggcaagcggcccatcggtattggctattgataataattgaaa

SEQ ID NO: 991387 - DNA, 120 bp, Artificial Sequence
  ENSG00000287744_9 (sequence is synthesized)
caatatgccatgcgatcccctctaactgtgcagatgtaatgaagcatacatctgccagatggaagaagttacagtataatgtaccctgacttgctgttgcagggttgctaagtacagttt

SEQ ID NO: 991388 - DNA, 120 bp, Artificial Sequence
  ENSG00000287744_10 (sequence is synthesized)
tttttcattttttttttcccagcattttcgctggtatcattgggtatagactcagtcagtagggtacctagcagtctgagcttgaatacttgagaattaatttcaacacacctttgactg

SEQ ID NO: 991389 - DNA, 120 bp, Artificial Sequence
  ENSG00000287744_11 (sequence is synthesized)
ttccctaatgttctccacttaaatgtgtcatagcgaagccaagggtaactagtgttttgtgaagaagaactgtcctttcgtgtacccacctgcaaacttgagtatacatgttgggtgttg

SEQ ID NO: 991390 - DNA, 120 bp, Artificial Sequence
  ENSG00000287744_12 (sequence is synthesized)
agtgctggagagagagaaatgatttacccctctttagagataccccatattgatgagagtgatgtgcttgggcatggcttggagaaccagtggggtgtttggaatgatggcttttgtcca

SEQ ID NO: 991391 - DNA, 120 bp, Artificial Sequence
  ENSG00000287744_13 (sequence is synthesized)
tttcaacattggaaccctgatcctatattataataagaaaggtagatacatggcagaatcaagtataaattgcttatcataacgtttgtagttctttgagatataaaaaagcctcccaat

SEQ ID NO: 991392 - DNA, 120 bp, Artificial Sequence
  ENSG00000287745_0 (sequence is synthesized)
gcacactctttaaaggaagagatctaaaaagagtttaaggagaaggtcatgattgagtaggatagtttttggatttgaggaaataagaaatagatatgtcacacaggagaattagcatgc

SEQ ID NO: 991393 - DNA, 120 bp, Artificial Sequence
  ENSG00000287745_1 (sequence is synthesized)
aaatggtctagatcagtgctgagcaatacaaacacaacgtgaatgacaaatgtaagccacatatgtaattttaaaacttctagtacccatattaaaaaagtaaaatggaacagcaaatct

SEQ ID NO: 991394 - DNA, 120 bp, Artificial Sequence
  ENSG00000287745_2 (sequence is synthesized)
caattctgcctagtcacaagagctcaacagtggggactacattgggcagcacagatccagactctaaaatctgttatttgaagataaaatttgattaaatgagagaattattttatctta

SEQ ID NO: 991395 - DNA, 120 bp, Artificial Sequence
  ENSG00000287748_0 (sequence is synthesized)
agcacaaagttactccaaaggagagggatgatagagttaatcgtctaaaccaggacacatctgagcatgaaaggaggcagtcactgcacaggatgctagaacaaacggaagtgatttgca

SEQ ID NO: 991396 - DNA, 120 bp, Artificial Sequence
  ENSG00000287748_1 (sequence is synthesized)
caaaaggtttcaaggcaaccctttagaaagtgaccttttgctttccccatttcctttgccctaagtgttaattgactttgaaaaagcagtatattatcttttcagaaaaaagaaaaggat

SEQ ID NO: 991397 - DNA, 120 bp, Artificial Sequence
  ENSG00000287748_2 (sequence is synthesized)
agaccttatttgtgaacaccaacatcctacagcatcaaagcgttgtttaaatcatcgcacagcagagctgagaacaactatccaggagagtgagatttaaaaaaaaagaaaagaaaagaa

SEQ ID NO: 991398 - DNA, 120 bp, Artificial Sequence
  ENSG00000287749_0 (sequence is synthesized)
ctcggcagaagcaactgctggggtttgtgtggatgaacactaaagggacttcctttgaaaaagctgcaggaagtcttggctgcctcagtggctgttgaggtcctcaccaggattctctgt

SEQ ID NO: 991399 - DNA, 120 bp, Artificial Sequence
  ENSG00000287749_1 (sequence is synthesized)
agagcaggccactgaggaccctggtggcagctgctgtgtggctaatatgtttcaggaaaaatgaaagctgatatctcctaccccaccatactattgacatcctgaaaatatttacaaaat

SEQ ID NO: 991400 - DNA, 120 bp, Artificial Sequence
  ENSG00000287749_2 (sequence is synthesized)
ggggaagacctgggacacacttcggcccttggacatcagaacttcaggctttttggccttaggattccaggacttacaccagcaactccctgggttctcagaggtatttggccttggcct

SEQ ID NO: 991401 - DNA, 120 bp, Artificial Sequence
  ENSG00000287749_3 (sequence is synthesized)
gaaagttacacattagctttcctggttccaaagacttcggacttggactgagccatgcttccagcattccagggtctccagcttagagatggcctaccacaggacttctcagcttccaca

SEQ ID NO: 991402 - DNA, 120 bp, Artificial Sequence
  ENSG00000287749_4 (sequence is synthesized)
atcattgtgcctccctgggatttatctatgttatgaaccataacatagcacgaaataatggctttagcaagatgctgattatgctctattctgtttcataatttcagcttttatgtctgt

SEQ ID NO: 991403 - DNA, 120 bp, Artificial Sequence
  ENSG00000287749_5 (sequence is synthesized)
agctacctcctattttccaaatatggatttttttcctgttttctggtttcttgaagtgaattgttaggttatttgtttcatattgttttatcattaagcatttggaaatttgaatttatt

SEQ ID NO: 991404 - DNA, 120 bp, Artificial Sequence
  ENSG00000287749_6 (sequence is synthesized)
ttagtgaagttcagttcactttcagtttatgtattttcaagctcattgctttctaggtaatttataactatcattttgatttattcaatgattttagaatttagaagaatcaatagtcta

SEQ ID NO: 991405 - DNA, 120 bp, Artificial Sequence
  ENSG00000287749_7 (sequence is synthesized)
agtcatttatgtttgtatttattattttgtttttaaattccagttttattgcattttttcagggatgtagagatgaatgtggaaaatcacttcagaaatatatatgaacgtagatatgga

SEQ ID NO: 991406 - DNA, 120 bp, Artificial Sequence
  ENSG00000287749_8 (sequence is synthesized)
gtagaagctatcatctaattaaaataatgtaaagggggtaaatgctgaataattttatttgtaatagtaagatgaattcatcagatgaagcactgtcattacaaactcaaacatgatatt

SEQ ID NO: 991407 - DNA, 120 bp, Artificial Sequence
  ENSG00000287749_9 (sequence is synthesized)
gcaagtatttattctgtgatttaatagaaaaatgttgacatgttttcatggaagaaaataaaaacttacacaaaagtagtgtcataggacacttgaaaaggacaaatgaaaaggacaaat

SEQ ID NO: 991408 - DNA, 120 bp, Artificial Sequence
  ENSG00000287749_10 (sequence is synthesized)
aatgtcgttgatgtgccaagaatgatgatataaaccctattacaaggcaaaagatgtgctacttaatattatgtccaacctgctatgatttcaccacgcagaacttactgaaatgttacc

SEQ ID NO: 991409 - DNA, 120 bp, Artificial Sequence
  ENSG00000287749_11 (sequence is synthesized)
actaacaccttaaacgagtgtagccaaaggccatcacttagtgcatctgagcattttaatgtagagaatcatgaaaagaactgaggttttcaggtttcagaatatacgtaacaatttgac

SEQ ID NO: 991410 - DNA, 120 bp, Artificial Sequence
  ENSG00000287749_12 (sequence is synthesized)
taacaatttgactgcataggttagttctaattatattctaatgaggctaaatataaggattcagtttttattatagtaaatgacttatagattatatttttccttcattacctcttaatt

SEQ ID NO: 991411 - DNA, 120 bp, Artificial Sequence
  ENSG00000287749_13 (sequence is synthesized)
cacaattgtcagttctaaaacagtaaaaggatatttctcattagaagatgtattggtcaatttggtcagaaatccttcactcaatttcacttacagatgtgatgtgcacatcttcagacc

SEQ ID NO: 991412 - DNA, 120 bp, Artificial Sequence
  ENSG00000287749_14 (sequence is synthesized)
aatccatttgtctgtcacaatacggcacgggagctaaaaaaggctctggttggctgatcaaatgcaacttcccatttcaagggtttataatttcattataaaaattaacttctgtctgac

SEQ ID NO: 991413 - DNA, 120 bp, Artificial Sequence
  ENSG00000287749_15 (sequence is synthesized)
tctagctagaggctctcaaaatttggaagacattatttctggatatctctaatttcaaatacactaattttatagaatttcgtactgaccaacttgagcataatagttcatataatttta

SEQ ID NO: 991414 - DNA, 120 bp, Artificial Sequence
  ENSG00000287749_16 (sequence is synthesized)
aagcttactccaattaatattctttctgaatcattttgcataagcatcctcccagtgatgtgaaacaatgttgcccagttcaaataagcattaagtgttgaggtaatgtaaaagaaacaa

SEQ ID NO: 991415 - DNA, 120 bp, Artificial Sequence
  ENSG00000287749_17 (sequence is synthesized)
ggatgaagtctgagaaattctaaggaacaagacaattttgtgatctggtaatgaaaagagcaaagagaaaaagagatcttcaaggaagataagtaatacaaattcacagcttatacttac

SEQ ID NO: 991416 - DNA, 120 bp, Artificial Sequence
  ENSG00000287749_18 (sequence is synthesized)
atagacaccagtataatgtaggtatgaataccacttaaaatttttaatcaccaaatactcagttaaatactttgggcagagaagtatttatgtccactctaagctgattatgatagtcct

SEQ ID NO: 991417 - DNA, 120 bp, Artificial Sequence
  ENSG00000287749_19 (sequence is synthesized)
gttatttttgactagggattgatttagtcatgcacatacgataaaactctgaccaatgagatgtgaggctatccgttggagagattctgagagggttctgctcactctttaaaggagaaa

SEQ ID NO: 991418 - DNA, 120 bp, Artificial Sequence
  ENSG00000287749_20 (sequence is synthesized)
taaagtacattagaattatttttacttgtaagatttccacctgctggtgacgactggaattgcagcattaatgttgaaaccctgacgggagcctcttacgctaacatgcaaaggactgca

SEQ ID NO: 991419 - DNA, 120 bp, Artificial Sequence
  ENSG00000287749_21 (sequence is synthesized)
gagaagaaaatggaaacagacaaaagaatcatgacatccctgagctattgagttaaacatacctagacccgctgtcctatgtgaacctagaagggtggctgttacgtgagataaaaattg

SEQ ID NO: 991420 - DNA, 120 bp, Artificial Sequence
  ENSG00000251523_0 (sequence is synthesized)
agtccagggagatgtaagggagcaagagcagcttagttcatgcctggcaaagagatacaaggataaaagacgactagctgcttcaaagattaaaaagtggccatgacctgcctttgagga

SEQ ID NO: 991421 - DNA, 120 bp, Artificial Sequence
  ENSG00000251523_1 (sequence is synthesized)
gaagaggagaaggaggggtagtcatcttttaggtctccatacaatcctgcaatcaagtagctgctggggaggccagcggtaccaagttccatcaggtggcactgctcacaggcagggaaa

SEQ ID NO: 991422 - DNA, 120 bp, Artificial Sequence
  ENSG00000251523_2 (sequence is synthesized)
ctacacactctggcaacagaaactggcctgtactgctatgacattcctgaatcaatgaatctcactgaattttccttcctcggcaaatagggaaaggttttccaaggtgctgggcaaaag

SEQ ID NO: 991423 - DNA, 120 bp, Artificial Sequence
  ENSG00000251523_3 (sequence is synthesized)
agaacgaccactgacaagtgagtgtacaggctcccatgagacctaggaagcacagaagcacagagttaaggctttgacttcaacccattgacatcaaacacaacccagtgaaatggctga

SEQ ID NO: 991424 - DNA, 120 bp, Artificial Sequence
  ENSG00000251527_0 (sequence is synthesized)
tctccaaaaccatgagggagaagaagtcagagaataatgaagttcttccttacgtgatgtgcttcttattcccaagctatctttgtactctggacctggctgatgttgaaagcagagcat

SEQ ID NO: 991425 - DNA, 120 bp, Artificial Sequence
  ENSG00000251527_1 (sequence is synthesized)
tcacatgagcattttctgggttctttagaggctcccctgctggaatccctcaattgtaagtttccagaagttgctgctggttttcagcagttcactacatgcagaatctctccattgaac

SEQ ID NO: 991426 - DNA, 120 bp, Artificial Sequence
  ENSG00000251527_2 (sequence is synthesized)
ctgacaccttgtattggaacttcatatcagctgtgttatgtgtccatggtggaaaattccaattaaacattaaattatatataagaaagaaaatgaagttgatttctagttccaaatgac

SEQ ID NO: 991427 - DNA, 120 bp, Artificial Sequence
  ENSG00000251527_3 (sequence is synthesized)
ctacacagaaataacagttgtatataggtttgcacatactttacaaacatttttaggtatgtagaaacaatgtatacacacacatgcacacacacattagtgcaaatgctagtgtatgca

SEQ ID NO: 991428 - DNA, 120 bp, Artificial Sequence
  ENSG00000251527_4 (sequence is synthesized)
tatccatatgtattgtatgtgtgtatatagatatacatatgtgcaaatatataatgtatatgcatatatgcagtggatgtatgtgcacatacatcttctatgtgtgtgtgtgtgtgtgtg

SEQ ID NO: 991429 - DNA, 120 bp, Artificial Sequence
  ENSG00000251526_0 (sequence is synthesized)
agagcatccgcgagaacttccttctaagctaaatatgtcatctagcacctgaaaaaatttaagtctggttctttctggataaaagaaagcgcacaggatttaagtagctgtataacattt

SEQ ID NO: 991430 - DNA, 120 bp, Artificial Sequence
  ENSG00000251526_1 (sequence is synthesized)
cacaagatgaatgtaccacaaattttaatccttctattgttgatggatttggattattaccaacttttggcctttgagccagtctaggattcacgatgtaaccatggagcagatgctttg

SEQ ID NO: 991431 - DNA, 120 bp, Artificial Sequence
  ENSG00000251526_2 (sequence is synthesized)
ctccctgtctgttcctgaggagctctggtgagtgggaaggagaagggaacactcgaagagcatggcagccttaaagaggcagtgggctgaggaggctcgctctgtgttcagaaattggaa

SEQ ID NO: 991432 - DNA, 120 bp, Artificial Sequence
  ENSG00000251526_3 (sequence is synthesized)
cagggttgtagaaaggatgctgtgtggctgttaaagtaaactccacccattttagaattttccttggaagcggcctcaatgtctagaaaagagtgggaaaaatctttccccttttcaaat

SEQ ID NO: 991433 - DNA, 120 bp, Artificial Sequence
  ENSG00000257202_0 (sequence is synthesized)
agatgccctgtcacttctatcaggggaaagcctgcctgagaatgaagccagctgagaggaggaaagagaagttggagtcctaatggcacttttagatccagcccccataaagccagttcc

SEQ ID NO: 991434 - DNA, 120 bp, Artificial Sequence
  ENSG00000257202_1 (sequence is synthesized)
actcctaaatgtctcagttacttgaggcaatatagattcccttttccccttcttgttggatttctgattcccttttctccttcttgttggatttctgattcccttttctccttcttgttg

SEQ ID NO: 991435 - DNA, 120 bp, Artificial Sequence
  ENSG00000257202_2 (sequence is synthesized)
gtgcccacgtggaaaactacatgaattaagaaagcataagccataaggtacaaggaaatgcaagttcatggatattagaaataataccaaaatccgaataagaccgggtttagaggtcgc

SEQ ID NO: 991436 - DNA, 120 bp, Artificial Sequence
  ENSG00000257202_3 (sequence is synthesized)
atggaatctgctgaatatggttgtctggagtgatttttttggccttctcagtttgccaagacagtgtaccaggaggcactctgttcattgtggcattacaaagataaagattaaggcacg

SEQ ID NO: 991437 - DNA, 120 bp, Artificial Sequence
  ENSG00000281961_0 (sequence is synthesized)
tgtgtctcttctgcgaagctgcacccacctcgtctgtctgggggtggcagccccaaatcagctgatggagttcacgcacccctgtgcagacgcagcctcccccagggcctttggctgccg

SEQ ID NO: 991438 - DNA, 120 bp, Artificial Sequence
  ENSG00000281961_1 (sequence is synthesized)
tacaccctcaggcttggtccctctcagcagccactgaatcagacagctgccccaagacctgacttgcactgtactcctgctgaagtgacccgtctcaagatatctggacgcaggtccctg

SEQ ID NO: 991439 - DNA, 120 bp, Artificial Sequence
  ENSG00000281961_2 (sequence is synthesized)
gaagtctttgtcacatagagttgggaaaactcagtccaggccctgaaagagtttactttctaactggcagggaccccgcacttaacgtcaggagcccccagtgccgaatcctgaaaagag

SEQ ID NO: 991440 - DNA, 120 bp, Artificial Sequence
  ENSG00000281961_3 (sequence is synthesized)
tactcgaatgtgcaaaagggtgtctctcagcacttcaggcagcaaagcgctttgcagagacatgaacgcgagtgtttgctgtgcgtgtggggctgctggcaccgacgggagctcaggctt

SEQ ID NO: 991441 - DNA, 120 bp, Artificial Sequence
  ENSG00000203565_0 (sequence is synthesized)
gttgattgtgcagttactatgagactcagttcactgatggagaaactaagagagcacagttaattatgataattccctatatttaacatttggatttgtttgctttgtgttttttgttgt

SEQ ID NO: 991442 - DNA, 66 bp, Artificial Sequence
  ENSG00000203565_1 (sequence is synthesized)
agctgggattacagacatgtgccaccacaaccggctaattatttgtatttcctcaaataatccacc

SEQ ID NO: 991443 - DNA, 120 bp, Artificial Sequence
  ENSG00000203565_2 (sequence is synthesized)
ctgggattacagccgtgagccactgcacctggcctgacatttgaaccttgtcttccccaatgcagcatcagttttgcatgctcagagatggttgttccaagttcttggaggtacagagta

SEQ ID NO: 991444 - DNA, 120 bp, Artificial Sequence
  ENSG00000203565_3 (sequence is synthesized)
ccaagttcttggaggtacagagtatctgggacactggacacagggcaggcagagactttccccagtgccaaccccattctctgcatctcagattcctcggtaacttcatgtcatggaatt

SEQ ID NO: 991445 - DNA, 120 bp, Artificial Sequence
  ENSG00000203565_4 (sequence is synthesized)
ctaacaagttttggctgattgatatagcaaaacaacaaagacaggcttgaaaaaagacagatggggcaaatgtggaaggtggcggccactttaaatgacagctccgcaacggacaaaaac

SEQ ID NO: 991446 - DNA, 120 bp, Artificial Sequence
  ENSG00000203565_5 (sequence is synthesized)
gggctctcctcattatgttcatggaacaccaaatatgaagaaatcaagctgctttaggactgagacccttatggcagctcatattgcattgggaaaaaatgttaacattaataagttaca

SEQ ID NO: 991447 - DNA, 120 bp, Artificial Sequence
  ENSG00000203565_6 (sequence is synthesized)
taagaaaaatgtccaagatcaacacattcaaggccattataaatactagcatatacattcagaaatgcaattacaccatcagcatgaacacgcaggaaaagaaaattcctatttgcatgg

SEQ ID NO: 991448 - DNA, 120 bp, Artificial Sequence
  ENSG00000203565_7 (sequence is synthesized)
cattttagtcaattttatctctcaatgcttttgtgtcactttttcttcaaggtctgtgcattttgctgattgaaatgctcaaacatttattcatttattcatctcaaaggcacagatcat

SEQ ID NO: 991449 - DNA, 120 bp, Artificial Sequence
  ENSG00000203565_8 (sequence is synthesized)
cattatgactttttttttttgaaaaaatagtgtcagaactttctaatgttcttttctgtctcttttctccaaatactttccctcttcataaccctctttctccccaggggactttctatt

SEQ ID NO: 991450 - DNA, 120 bp, Artificial Sequence
  ENSG00000203565_9 (sequence is synthesized)
gcttctatagggaattttttcaacgtctggtctttaaaaagaattcctctttaatcctaaagcattctatggagaaatcagtttccagaagttagaataaaattccatgtgcatgcctgg

SEQ ID NO: 991451 - DNA, 120 bp, Artificial Sequence
  ENSG00000203565_10 (sequence is synthesized)
gtctgggacagggtgcgggaaaagaagaaatgttggtatgtaatcttaaaattcaaatgctgttcagtagtggcataccatctgaactagctgcaaatggtaaataaacccagcttgtaa

SEQ ID NO: 991452 - DNA, 120 bp, Artificial Sequence
  ENSG00000203565_11 (sequence is synthesized)
cttaatgatccttgtgtttgtgtgtctgtgaatacattaagaactctcaaagaaaaaattgtggaatcataaataaaagacagcagtgaatcacagacagtcacacagaaacaagacacc

SEQ ID NO: 991453 - DNA, 120 bp, Artificial Sequence
  ENSG00000203565_12 (sequence is synthesized)
atcctcccatatgcctgtgtggatattgatgtgggttcctcaccttttcggtttgcagtggcagcatgagacccactctagatgctgtggcacagggagaggtttgatggtcttcattac

SEQ ID NO: 991454 - DNA, 120 bp, Artificial Sequence
  ENSG00000203565_13 (sequence is synthesized)
atattgtctgccctgcaaaaatcatctgctttgcttggaattgatttcaaaaccagattcatgcagtgcctgttacaccacgataaacaaataaattagctgctgcaatatggaaattta

SEQ ID NO: 991455 - DNA, 120 bp, Artificial Sequence
  ENSG00000203565_14 (sequence is synthesized)
catgattcagtgtacttaaaaactgttaactgtgaacttattaattgaaagccacaggacaataatcagcatgtccttcagtaggaaaacgaatctcttgttaaagcgaatttgtaaggc

SEQ ID NO: 991456 - DNA, 120 bp, Artificial Sequence
  ENSG00000231365_0 (sequence is synthesized)
gtagaccttaggcgagggaaggcatgtactttccctaagaagcgggaggagagaaataaatagagggcagtgggatgagaagaacctcgcgggatgggaagccgcggagggaagggccgt

SEQ ID NO: 991457 - DNA, 120 bp, Artificial Sequence
  ENSG00000231365_1 (sequence is synthesized)
ctttggttacctggagagcgggagcagctgcggatcccttatgaagtgcccggatgaagctccagcgctcacgcgctttccgcattgagtgcagcgccatcttgagaagggcggagccgt

SEQ ID NO: 991458 - DNA, 120 bp, Artificial Sequence
  ENSG00000231365_2 (sequence is synthesized)
cttgtttggaatgacgtctgttcagagagccaatcccagtctcgcgactcctgcttgctgggcgcggcttgggcctccaggctgcgcagcgcagccgctatcgggcggactgcagttctt

SEQ ID NO: 991459 - DNA, 120 bp, Artificial Sequence
  ENSG00000231365_3 (sequence is synthesized)
gccgagcaggggagcaggagagtcagtctaagaaggaaatgtgatgatggaaacagaggttggaagatggaagaggacccagagtcaaggaatgcaggtagaaaagaaaagcctggattc

SEQ ID NO: 991460 - DNA, 120 bp, Artificial Sequence
  ENSG00000231365_4 (sequence is synthesized)
tcccctaaagcctccagatggaacacagccctgcctccaccttgatttcaggacttcttaccccaagaatctcacccgggaggaaccatctatcatcctgccttgaaggtagtttctgct

SEQ ID NO: 991461 - DNA, 120 bp, Artificial Sequence
  ENSG00000231365_5 (sequence is synthesized)
ggatctggtcagacctttgtatgatggattttggaaacccagtggaaggatgttcgctcattgcccccatttgccactataggactatgcgcctcccttttatttactcaatttgctttt

SEQ ID NO: 991462 - DNA, 120 bp, Artificial Sequence
  ENSG00000231365_6 (sequence is synthesized)
atcctgatctattatgttgttgtagacccagttccagttgttacaatactgggttatcagttctaaggccctggcaagggtggtgtggaacaggtcccacataactgcccatgtcgagag

SEQ ID NO: 991463 - DNA, 120 bp, Artificial Sequence
  ENSG00000231365_7 (sequence is synthesized)
ctctaagcctaaattgggagggacaccagggacaagactcctgggttcatagcctaggggcctaaggtcgcagcatagagcttccttagatccctttggagatactaatacttgggagag

SEQ ID NO: 991464 - DNA, 65 bp, Artificial Sequence
  ENSG00000231365_8 (sequence is synthesized)
cttccttagatccctttggagatactaatacttgggagaggaagtgaaagtctgaagcattagta

SEQ ID NO: 991465 - DNA, 120 bp, Artificial Sequence
  ENSG00000231365_9 (sequence is synthesized)
gggtcagaaggaaaggtagaggcacacgcacgggtgactgttgagtagggacttctggctgcgccatgatctcaaccggctaatgccgagagtttgggatgacagctttctgcctctagt

SEQ ID NO: 991466 - DNA, 120 bp, Artificial Sequence
  ENSG00000231365_10 (sequence is synthesized)
gaagcgttgggggttgttagaaagccattccccagacagcctcacacttgagtcttaagtctggtggccgccctatcgtttttaaccgtccgacaggtgcctggtattttcctccaattc

SEQ ID NO: 991467 - DNA, 120 bp, Artificial Sequence
  ENSG00000231365_11 (sequence is synthesized)
taaggaagggtagaacagaatagcaagcgaaagcgctttggaggtcccttcatgattgccaaaatgttaccagggagtccttgttcttagagctccaaagatgatggtgggccgcttcca

SEQ ID NO: 991468 - DNA, 120 bp, Artificial Sequence
  ENSG00000231365_12 (sequence is synthesized)
gcctcttgttctctgacctggggttcctggcctcacggatactaaggaatggaatcttgggccatgcattgagtgttatagctctattcagcccaattaggatgaaccccaggcacttag

SEQ ID NO: 991469 - DNA, 120 bp, Artificial Sequence
  ENSG00000231365_13 (sequence is synthesized)
ccaggcacttagcccgcgcaggaacaatggcaagcctctagcccgattgggagcagcaatggacactgcctcgctggatcacaagtgcagcagatccacccctgccagatccagagggtt

SEQ ID NO: 991470 - DNA, 120 bp, Artificial Sequence
  ENSG00000231365_14 (sequence is synthesized)
cctgccagatccagagggttggaagtcagctgcgggtctgcaatgacggcaaacagtggtggacggcgagtgaaagctcagctcgagccataaaaaacacagaccagaagagtgtgcagt

SEQ ID NO: 991471 - DNA, 120 bp, Artificial Sequence
  ENSG00000231365_15 (sequence is synthesized)
agagctcccataaaatgggaggggacacaaagggggttgcccttcattctgtttttcataaggactgtactaatttacactcccaccaacagtgaataagggttccattttttgcacgtc

SEQ ID NO: 991472 - DNA, 120 bp, Artificial Sequence
  ENSG00000231365_16 (sequence is synthesized)
accaacagtgaataagggttccattttttgcacgtccttgccaacacatcttatcttctgtgtttttgatagtagtcattctaataggcatgaagtgatatctcattgtggttttaattt

SEQ ID NO: 991473 - DNA, 120 bp, Artificial Sequence
  ENSG00000231365_17 (sequence is synthesized)
ttttttcatatacctactagccatttgtatgtcttcatttgagaaattctattcaagtcgtctgaccagtttttaattaggttatttgctttcttactattgagttgtttcaattcctta

SEQ ID NO: 991474 - DNA, 120 bp, Artificial Sequence
  ENSG00000231365_18 (sequence is synthesized)
tatattttggatattaaccccttgtcagatgtttggtttgcaaatatattttctcattctgcaggttgtctccttactctgttcattatttttgtagttatgcagaagctttgtagtttg

SEQ ID NO: 991475 - DNA, 120 bp, Artificial Sequence
  ENSG00000231365_19 (sequence is synthesized)
atgtaatcccagttgtccaattttgcttttgttgcttgtcatttggggacatacccataattgatcttagccaaaaggctgagaagtgatttgggtcatattaaaaaatatcattgccaa

SEQ ID NO: 991476 - DNA, 120 bp, Artificial Sequence
  ENSG00000231365_20 (sequence is synthesized)
ggcttgggcctccaggctgcgcagcgcagccgctatcgggcggactgcagttcttgccgagcagctactgaaaattaccaaggagaggtaggagataagagatgcctataaaggagctga

SEQ ID NO: 991477 - DNA, 120 bp, Artificial Sequence
  ENSG00000231365_21 (sequence is synthesized)
aatctaccaggtcgcaatgatttgtatgacagctgctagcccaagagagagttccagaagagggctacctaacaggtgctgtggcatttagaagaggaatggagccattgtcaacgcaca

SEQ ID NO: 991478 - DNA, 120 bp, Artificial Sequence
  ENSG00000231365_22 (sequence is synthesized)
cgacattgaaacactcaaaggcagcctggcagcagcaagaagaaaaacattcaaaccaagttagatttcctggcatcatgttgtttgttcttaacctgaagatacatttggggaccccta

SEQ ID NO: 991479 - DNA, 120 bp, Artificial Sequence
  ENSG00000231365_23 (sequence is synthesized)
gtctggtgacactgaattagagtcagtcaaacactttcttgatgaccatggaatactgtgagctacaagagactctcccatcctcatctatggttacagtattcagcttctgatggggtt

SEQ ID NO: 991480 - DNA, 120 bp, Artificial Sequence
  ENSG00000231365_24 (sequence is synthesized)
gccacaacccagaggttctgaggtgcagccagagtatagaacctgtaatctaggtaatggctctcactggaaaacagctgtggcactggtataggagcaatgaggggctcacgcagaact

SEQ ID NO: 991481 - DNA, 120 bp, Artificial Sequence
  ENSG00000231365_25 (sequence is synthesized)
ccctgtgtgggctcacctggccttccaaaggcccagcctgaccacttgggaccaaagtgacccttactattaaaggcttctaacattcacagaaagaaagtacgtcaagggtgtgtgaaa

SEQ ID NO: 991482 - DNA, 120 bp, Artificial Sequence
  ENSG00000231365_26 (sequence is synthesized)
tcatgacagaagctcctcctcctaggaactatcacaggaaattaccctttatacctaagaataaagaccgaatagagagaagccagctctatccacaaccaacagatggcgctattgtcc

SEQ ID NO: 991483 - DNA, 120 bp, Artificial Sequence
  ENSG00000231365_27 (sequence is synthesized)
aatgccctgccatttaggtctctgccaaccacttactccttaatacttggtaatttgctgcatttgtgcatgattttgaaatgttctagaaacatttttgactccacatatctgagaagt

SEQ ID NO: 991484 - DNA, 120 bp, Artificial Sequence
  ENSG00000231365_28 (sequence is synthesized)
gcaaaagtagcaataatattaaaagtgttacttaaaaaaggagcataattatgacaaaatgaaagtagaaccatttttaaaatcagaaggcagtgagaaaataaaatgtaagtttgtaca

SEQ ID NO: 991485 - DNA, 120 bp, Artificial Sequence
  ENSG00000231365_29 (sequence is synthesized)
tgcatgtggaattaatttttagacagtaggaacaattccaaagggcagagttgatcatgaatcctgagaaaagtgttgtgcctctgcaactgacaataaagagcaagagatacggaaatg

SEQ ID NO: 991486 - DNA, 120 bp, Artificial Sequence
  ENSG00000231365_30 (sequence is synthesized)
aggtaacattgagcctgagttccttgtgagctggtagaagatgaaggaaataagaaagggtaaggaccaagcttgtcaacactgatttcaagtctccattgcttctgctgtgtacatctc

SEQ ID NO: 991487 - DNA, 120 bp, Artificial Sequence
  ENSG00000231365_31 (sequence is synthesized)
tgcaacgttctcaaggcacctctggagttgtccagcacacagagaatctctccagccatccacagcacccctcaaagcctaagctcaggaagtcagccacagcccactctgcatgccagt

SEQ ID NO: 991488 - DNA, 120 bp, Artificial Sequence
  ENSG00000231365_32 (sequence is synthesized)
gtcggccatgagtgattctctagggagagctgagttacgggatgattcgcaagtttctcatacatatatgatatatatgatatatgtatatatgagatagatatatatatataatctcac

SEQ ID NO: 991489 - DNA, 120 bp, Artificial Sequence
  ENSG00000231365_33 (sequence is synthesized)
ttaattcttgcaaccaccctatgaagtaaacattattactctctacagacaaaaaagttcaaggtggttaggaggtttgctgaaggtcacaagaagtggcaaagcagtaaggcacaatgc

SEQ ID NO: 991490 - DNA, 120 bp, Artificial Sequence
  ENSG00000231365_34 (sequence is synthesized)
tgtctaatactgaagtctttccacctcaccgtaggatctctcaaataattaatacttacactaaaatggggggcatcaaacctgggctctgtgatttaaagtctgctgctttcctaaatg

SEQ ID NO: 991491 - DNA, 120 bp, Artificial Sequence
  ENSG00000231365_35 (sequence is synthesized)
aaattcttccactataaagttaactttatcccttcatcccctataccaagataaattcatggatcagagattggaagagtgattgttccttgtaaggcatctcttaaatttatgatccta

SEQ ID NO: 991492 - DNA, 120 bp, Artificial Sequence
  ENSG00000231365_36 (sequence is synthesized)
gtaactggggacctcctgctggattagccttgcatctttcctcgcttccatcatagaggctaacaagactgttgattctttctttctaatgtttcctgtgttcactcctgtctatccagt

SEQ ID NO: 991493 - DNA, 120 bp, Artificial Sequence
  ENSG00000231365_37 (sequence is synthesized)
cccactgtcaccactctcctacattattttaatagtctcctaatttcttgcctccaaactttccttgtcttttcccattctaaatcctgctgctagataatcttctcaaaacatcatttt

SEQ ID NO: 991494 - DNA, 120 bp, Artificial Sequence
  ENSG00000231365_38 (sequence is synthesized)
gcaatgtcagctctcattcagaaaccctccattgacaccatgcagccatttaggctgataatggaaaataacagttaatgacatgatatggaaaaaatgttcagagtatgttattaagtg

SEQ ID NO: 991495 - DNA, 89 bp, Artificial Sequence
  ENSG00000231365_39 (sequence is synthesized)
acatgatatggaaaaaatgttcagagtatgttattaagtgaaaagaaaacagattacaaaatacatagaatgttaatattggtgatctg

SEQ ID NO: 991496 - DNA, 120 bp, Artificial Sequence
  ENSG00000231365_40 (sequence is synthesized)
gaaccatttacccttcacgtgcctctttttccgtgtatgtgcctctttctccttgtatgtaaaatgagtgaaagaaagaggagagctagatgataccattgtaactcttgtatttcaaga

SEQ ID NO: 991497 - DNA, 120 bp, Artificial Sequence
  ENSG00000231365_41 (sequence is synthesized)
cactcgtttctgccttgtctcagattacaatcatttagagatacagaaataggtattacagtcagaatccacgttttagagtatatctgctgaccccatgtctgtggaagatactgagat

SEQ ID NO: 991498 - DNA, 120 bp, Artificial Sequence
  ENSG00000231365_42 (sequence is synthesized)
gcaggtactgagaatgggcctcaaaatttttctgaagactgtgctccaggaagctatgctcaaccaaatgaaattggccctacttgtcatcctagcatagcaggtttcggtttatgaaag

SEQ ID NO: 991499 - DNA, 120 bp, Artificial Sequence
  ENSG00000231365_43 (sequence is synthesized)
atgttgcaactctgagatacagctagaaattctccgaataagatgctgatggtcctgcagtccaatgctgtgtgattttcactgtggccagctatacaagacttagcgtatacttctctc

SEQ ID NO: 991500 - DNA, 120 bp, Artificial Sequence
  ENSG00000231365_44 (sequence is synthesized)
tggaacaccaattgagttcaacttacaacttctactgaggacccctggaccgacgtgctggcacttcccctggcctagagagttcccctctgaaagacactacaactgcagggccccttc

SEQ ID NO: 991501 - DNA, 120 bp, Artificial Sequence
  ENSG00000231365_45 (sequence is synthesized)
agaggtgacagcgtgctggcagccctcgcaaccctcgcttgctcttggtgcctcctctgcctggctcccactttggcagcacttgaggagctcttcagcccaccgctgcactgtgggagc

SEQ ID NO: 991502 - DNA, 120 bp, Artificial Sequence
  ENSG00000231365_46 (sequence is synthesized)
cagggaggtgtggagggagaggcatgggcgggaaccagggctgcgcatggcgcttgctggccagtgagagttccgggtgggcgtgggctcggcgggtccccgcactcagagcagccagct

SEQ ID NO: 991503 - DNA, 120 bp, Artificial Sequence
  ENSG00000231365_47 (sequence is synthesized)
agctggccccgcctgccccgggcagtgaggggcttagcacctgtgccagcagctgctgtgctctacttctcgccgggccttagctgcctccccgtggggcagggcttgggacctgcagcc

SEQ ID NO: 991504 - DNA, 78 bp, Artificial Sequence
  ENSG00000231365_48 (sequence is synthesized)
ctgcagcccaccatgcctgagcctccctcgcctctgtgggcttctgtgtggcccgagcccccccgacgagcaccaccc

SEQ ID NO: 991505 - DNA, 85 bp, Artificial Sequence
  ENSG00000231365_49 (sequence is synthesized)
acactcacggcgaaggtctgcagctttactcctgaagccagcaagaccacaaacccaccgggaggaacaaacacctccagatgca

SEQ ID NO: 991506 - DNA, 120 bp, Artificial Sequence
  ENSG00000231365_50 (sequence is synthesized)
accaagaacccaccaaccagacacattaggacccctcggatagtgacagatctggaggacggttgtctgggacaggagagtaagactgagaaggccacgtcaatgtccaggagacagtta

SEQ ID NO: 991507 - DNA, 66 bp, Artificial Sequence
  ENSG00000231365_51 (sequence is synthesized)
taagactgagaaggccacgtcaatgtccaggagacagttaatctcctggccctcaatggggcaccc

SEQ ID NO: 991508 - DNA, 120 bp, Artificial Sequence
  ENSG00000231365_52 (sequence is synthesized)
tcagaggacctttgtcccctggggcagcggccttccattgagtcccttgacataaggggcacggatgaggaggcggcttacttctattctgacaatctttttaaaagtgtccttgtagac

SEQ ID NO: 991509 - DNA, 120 bp, Artificial Sequence
  ENSG00000231365_53 (sequence is synthesized)
cacactggaagcaagtcctattaggcattcaatttgcccagactttccgtgttccaaagcctccaatgtctgcttgcctaagggccatgactaaagcggtggcctttttcttatctcatt

SEQ ID NO: 991510 - DNA, 120 bp, Artificial Sequence
  ENSG00000231365_54 (sequence is synthesized)
gatctctattataaaaaaccgaggttgtgaaatcaatagggttcctaagttttgctccgggcctaaggtggacttttgatgttttttctaatgtctgcagctaactgagtgataaactta

SEQ ID NO: 991511 - DNA, 120 bp, Artificial Sequence
  ENSG00000231365_55 (sequence is synthesized)
gtaggattttcttcctttccctgtgtgatagtggacaccattgaataatgtataggcttcttcctacttttccttagtccttctagcatgcaagttagtaaatgtctgtggcaccaatct

SEQ ID NO: 991512 - DNA, 120 bp, Artificial Sequence
  ENSG00000231365_56 (sequence is synthesized)
agtaaatgtctgtggcaccaatctccatgtattctgcgtcccagtgagggtctacactgggctttttgattctgtaagtactttaagggttggccgagtgcaaacagctcccatgtttga

SEQ ID NO: 991513 - DNA, 120 bp, Artificial Sequence
  ENSG00000231365_57 (sequence is synthesized)
ttaggcaattttcctaactctgcttccgcaagagtctccctatcaattactgcatacccattgtgttttttttttttccctcagtcacccgggaggaaccatctatcatcctgccttgaa

SEQ ID NO: 991514 - DNA, 120 bp, Artificial Sequence
  ENSG00000231365_58 (sequence is synthesized)
tcctgccttgaaggtagtttctgctggatctggtcagacctttgtatggtaatgaggatttaaatcccctgttaggaaatctgctaggttaatgtaatttgctgtggttaatgttaaatc

SEQ ID NO: 991515 - DNA, 77 bp, Artificial Sequence
  ENSG00000231365_59 (sequence is synthesized)
ctgctaggttaatgtaatttgctgtggttaatgttaaatcacctttttctacctttttgctttttgacttaggatag

SEQ ID NO: 991516 - DNA, 87 bp, Artificial Sequence
  ENSG00000231365_60 (sequence is synthesized)
cgggttcctgggttaaggatttttgatagaaaggctactggttgtcagtggcttcagtgctttcgggctaggcctttgtttacactg

SEQ ID NO: 991517 - DNA, 120 bp, Artificial Sequence
  ENSG00000231365_61 (sequence is synthesized)
agaaaggctactggttgtcagtggcttcagtgctttcgggctaggcctttgtttacactgacaacaaaatggtattggagtgttatggggtcacagagaagaccttcaattatcaattat

SEQ ID NO: 991518 - DNA, 120 bp, Artificial Sequence
  ENSG00000231365_62 (sequence is synthesized)
ttcaacaaagctgatcagtttggttttggctgttaaatttgaggtgcttgtagtacttccaaaatgtgatgcccattaaatagatacatgggtctggagctcagaagagatttgaactac

SEQ ID NO: 991519 - DNA, 120 bp, Artificial Sequence
  ENSG00000231365_63 (sequence is synthesized)
caaacagatggtaattgaaaccaaggaaatccttgagaccatcagatagagtttgtggagtgaaagtagccagatgatggaaataaaggagccaagaggtgttgtagaacccaaagaatg

SEQ ID NO: 991520 - DNA, 120 bp, Artificial Sequence
  ENSG00000231365_64 (sequence is synthesized)
atgttttagaaatcactcatccaagaaaggtgacaagatactggaatagaggtatttgaaaaatattcatgggaattttagaggattgtagatggtctgaatacctgtgaagacatcatc

SEQ ID NO: 991521 - DNA, 120 bp, Artificial Sequence
  ENSG00000231365_65 (sequence is synthesized)
catctaatgtatctaaaaaccacataatgcttcatctcaatgtattttaagaattaattttgttataagctagaatttttcattttggttttaataataacatcaaaaggattttttaac

SEQ ID NO: 991522 - DNA, 120 bp, Artificial Sequence
  ENSG00000231365_66 (sequence is synthesized)
attagaaagggcatacatggagaagtaaagaagaattcttcttgggattagccaaaaattagtgagagattacatatttccttagatgaaaaatcctacaggcaaacttttaatgtcagg

SEQ ID NO: 991523 - DNA, 120 bp, Artificial Sequence
  ENSG00000231365_67 (sequence is synthesized)
gagaggaatactttattacctaataatgtagatgaaaagaatagctaagcattcttttttaaagcagtatacagaaatgagggaaaggctaagaggttaactcatttctattttgaactc

SEQ ID NO: 991524 - DNA, 120 bp, Artificial Sequence
  ENSG00000231365_68 (sequence is synthesized)
tattttttttaaaacccttgctccaaattttacttactatcttttaaatgtcatcctgctagagtgtaagtctttagttttagttgcttaataaaaattaattttttgtgacaaaaggca

SEQ ID NO: 991525 - DNA, 120 bp, Artificial Sequence
  ENSG00000231365_69 (sequence is synthesized)
tttctcaaataaatactagtcaaatctttcccaataactaagtaactaagcattcacgttttacaactgtaatgtagttttggtatgagaaaactatttcctggtctccaggatctagaa

SEQ ID NO: 991526 - DNA, 120 bp, Artificial Sequence
  ENSG00000231365_70 (sequence is synthesized)
atcttggtatgttgcctggaagtttatgtgtgttactacagcagaacaaagaattatgtaatataaagcccaacttgtttttcttttccctaccagctgtactataacttagacaaaact

SEQ ID NO: 991527 - DNA, 120 bp, Artificial Sequence
  ENSG00000231365_71 (sequence is synthesized)
caaccattttctttcattatgtacagtggctattaaaaagaaaggatgtagaaaaatttttttcaggaaacagtggaaaactaatgcgtcatgatctgcttaacaggggactgtaaatag

SEQ ID NO: 991528 - DNA, 120 bp, Artificial Sequence
  ENSG00000231365_72 (sequence is synthesized)
aagcaagtccagatcatggaaattgcttctttaaaatattttttttcaattttaaaaggaatacattcacatggtttaaaaaaacccctcaaactaaagaagaatacagaataagaagta

SEQ ID NO: 991529 - DNA, 120 bp, Artificial Sequence
  ENSG00000231365_73 (sequence is synthesized)
aaagttctaccctccaacctactaccccaactcctgaatcccactgccaagagaaacagtcatttgttgtgcatctttctagaagaattctatgcatattacagaggtgtcacaaatacc

SEQ ID NO: 991530 - DNA, 120 bp, Artificial Sequence
  ENSG00000231365_74 (sequence is synthesized)
cacatgctttcttcccttacaagctctgtgacttgatttttctctttactgtgctttaagcatctttgcatattagtaaacatatacacctcagttaaaaaaaatcaacagctgggtgta

SEQ ID NO: 991531 - DNA, 120 bp, Artificial Sequence
  ENSG00000231365_75 (sequence is synthesized)
gtggtgcatacctgtagtcccagcaatttgggaggcagagaggcaggaagatcccctgagcccaggaattctaatctaccctgggcatcttggcaagaccctgtctcttaagaaaaaaac

SEQ ID NO: 991532 - DNA, 120 bp, Artificial Sequence
  ENSG00000231364_0 (sequence is synthesized)
agcagaacaaagcttcaataaagagatattgtgacttggagagatggccttttgtcctttgttctattaccagtcagaggatggggagcacacccgagcctgagacaacagctctgctaa

SEQ ID NO: 991533 - DNA, 120 bp, Artificial Sequence
  ENSG00000231364_1 (sequence is synthesized)
gtgcccttgagagggcacggtggggtcagcaccaaagtcagaccactaaagagaaaaagagagaaagacaggattgcagaggagaaatgagaatggcagaaaaaataattttttaagcca

SEQ ID NO: 991534 - DNA, 120 bp, Artificial Sequence
  ENSG00000231364_2 (sequence is synthesized)
aaaggaatcagagaagagcagaagtgcctctaggataaagcgtagcaggcagttagggaaaaagggctgttaactaccttgaagctctgactacattagaaagcctcgcaagacagtcgt

SEQ ID NO: 991535 - DNA, 120 bp, Artificial Sequence
  ENSG00000231364_3 (sequence is synthesized)
tgcttgcacgggcaggtagagaacttttcctgtccattgttcttctgaattataaatcactgacctctttatgatttctaaagggaaaatgacttcaagcttcttagagttcccctaagg

SEQ ID NO: 991536 - DNA, 120 bp, Artificial Sequence
  ENSG00000231364_4 (sequence is synthesized)
cttatcaactaaggggtggttggcaataaggatgggtgggagagaaaaaaaaacagaatttgaggaggagagcatttaaaccatcagactgtgtgttctgtgacatcaaagactggcaac

SEQ ID NO: 991537 - DNA, 120 bp, Artificial Sequence
  ENSG00000231364_5 (sequence is synthesized)
attctaaaggaaaagcagctgtgaagtcataattatgttcacttcccactggcaactggcaagccctttatttttgtgcattcggaactcaccaagaataaataaagtccattccctcct

SEQ ID NO: 991538 - DNA, 120 bp, Artificial Sequence
  ENSG00000231364_6 (sequence is synthesized)
tgaggggctattctgccattccatctaggatttaaaagtttgccaattcctaaaacatctattgttatcaatagtcttgtgtctttcacaaagcggactttacaaaataagatgccatgt

SEQ ID NO: 991539 - DNA, 120 bp, Artificial Sequence
  ENSG00000231364_7 (sequence is synthesized)
ccagccaaataaatgagactgaacttcatggttgttgtttttacttcatcccggtcaaaagaaatgaaattaaatataaaaagcagatcaccaaataaagtccaaatgaattaagcactg

SEQ ID NO: 991540 - DNA, 120 bp, Artificial Sequence
  ENSG00000231364_8 (sequence is synthesized)
atccctgaaatttggacatgatagtatgggaggattcatgagaaaatgtgtgtggaatgatttgaacttcttgaagaatacatactcaggaatactgctatttgtgatgagatagtgtca

SEQ ID NO: 991541 - DNA, 120 bp, Artificial Sequence
  ENSG00000231364_9 (sequence is synthesized)
gatgcataaatttgggttctttgaattactggcatacaggaaaacagcaaatctaggtcaacagagacctttttctcagactgcctttactatgaataaaagacaaaggaacttttctaa

SEQ ID NO: 991542 - DNA, 120 bp, Artificial Sequence
  ENSG00000231364_10 (sequence is synthesized)
caaagtgagcacagcctacgcataaacaggattttccaagaaaaaagcattaaagtgccatagaatattaaagagcaattaaaagaatgaagatctcttcatatgctggataggcggagt

SEQ ID NO: 991543 - DNA, 120 bp, Artificial Sequence
  ENSG00000231364_11 (sequence is synthesized)
gacccagcaatcatatggacaccatccattccagtgacactcaaacttcagcgtgcatcagaatccctgcaaggcttgctaagacacagactgctgcgcctacctcagagttcctgattc

SEQ ID NO: 991544 - DNA, 120 bp, Artificial Sequence
  ENSG00000231364_12 (sequence is synthesized)
atcaagcttgaagtaaggcctgagatttttgcattactaacaagtcttcaggtgataccaatgctgctgatctggagactgcctttgagagccactattctatctctttcccaatcaact

SEQ ID NO: 991545 - DNA, 120 bp, Artificial Sequence
  ENSG00000231364_13 (sequence is synthesized)
gtcctttctcacctcccttttaaatctccagcacctgctccctcatgtttactctcaatgcacaatctttttttctccttcactgacagaagtgaaacaattaaaagagaatttccccag

SEQ ID NO: 991546 - DNA, 120 bp, Artificial Sequence
  ENSG00000231367_0 (sequence is synthesized)
agagccatgtgtctggtgcgcagtgttaacagggcagttataccttttacagacaactgtggctccaagtcaagtatgaacttacacaaacagtttatataacaagtggaggtgtgcgcc

SEQ ID NO: 991547 - DNA, 120 bp, Artificial Sequence
  ENSG00000231367_1 (sequence is synthesized)
tgcgtgccaaacttgctgactcgtgcaggcctggatacccgcctcagactattccttgaccgaagcacttccagggcaggaaactgaagctcttgggaaggtggaagttgcacgtggtct

SEQ ID NO: 991548 - DNA, 120 bp, Artificial Sequence
  ENSG00000231367_2 (sequence is synthesized)
cacagtcaactgtgccagaataggaggccaggaaccatctctgctggaggaagacccaccacgcatcccttcaagaatgccaaggtccagagcaagtgcttcccttctatgggcacagga

SEQ ID NO: 991549 - DNA, 120 bp, Artificial Sequence
  ENSG00000231367_3 (sequence is synthesized)
gggctgtgggagcccacagaatgtgcttctggccagagtgggatccccgaggaagatgttaagacctctaataatatttaagagcaaaattagcacagctccagcccatgggcaagttaa

SEQ ID NO: 991550 - DNA, 120 bp, Artificial Sequence
  ENSG00000231367_4 (sequence is synthesized)
gagacaggagtagtgtctgtggagtggaggaaagcagaggctgccgctgaccatcctgcagccctcgctctggctgctcacagctctccaccttctctggacttcgtcacttcagtatgt

SEQ ID NO: 991551 - DNA, 120 bp, Artificial Sequence
  ENSG00000231367_5 (sequence is synthesized)
ccagatgcttgctccgactcgtgttgctgctgtcttctctgtgcctcaactctgtcctctgtcactgcaggcagcttcctcccaaggtgccatgagaagacatgccttgcttctcctctt

SEQ ID NO: 991552 - DNA, 120 bp, Artificial Sequence
  ENSG00000231367_6 (sequence is synthesized)
caccttctgccatgattatctccatgggataaccacattggtttgtttagtaaacactgagaccaactccaccatccagaggcctgacagacaaatggcctgagacagggctgggaaagt

SEQ ID NO: 991553 - DNA, 120 bp, Artificial Sequence
  ENSG00000231367_7 (sequence is synthesized)
tttgcttctggttgggacttcaggaagagttttgttttgttttgttttcccccaagggaacaagcccttgaatccgggaggccaaggttgcggtgaaccgagattgcgccattgcactcc

SEQ ID NO: 991554 - DNA, 120 bp, Artificial Sequence
  ENSG00000231367_8 (sequence is synthesized)
aagagcgaaactccgtctcaaaaacataaaaagtaaaaaagatatgtacgtcaatgtcagactttctgtgctggatggaaggactctgagcctaccaaaggaagcgtatttacaaacctc

SEQ ID NO: 991555 - DNA, 120 bp, Artificial Sequence
  ENSG00000231367_9 (sequence is synthesized)
tttacaaacctctaggtactgacttgttgctgaaggtcagaaatttgcaatgacatttggatgtattcaagggtggaggggcaggtttggggaaagttcttttaaagaaaaaatgcaaaa

SEQ ID NO: 991556 - DNA, 120 bp, Artificial Sequence
  ENSG00000231367_10 (sequence is synthesized)
ggaaggtgatatatcccacctcatgaaatcaggcttcaccacaagattgctttgaccaaggggacgtgagtagaagtttgaagaaccacagactggtccatcaccttgtttcttatccct

SEQ ID NO: 991557 - DNA, 120 bp, Artificial Sequence
  ENSG00000231367_11 (sequence is synthesized)
ctgacataagcaatgtcccagactggggctgttctgttagcctggcttccagaatgaagagagctgatctacatggcatatgtaagataaataaacctttgttattacaaaccactgaaa

SEQ ID NO: 991558 - DNA, 120 bp, Artificial Sequence
  ENSG00000231367_12 (sequence is synthesized)
actctcacggtggtgcaagagcctctctgcatgttacgctgttagcccctcatctgcctcaccccagacccagctctaaggcaggaagcgggagggcagcggaaggggaaaaattccatc

SEQ ID NO: 991559 - DNA, 120 bp, Artificial Sequence
  ENSG00000231367_13 (sequence is synthesized)
ctagctgcagggctaaatctagaatttattccaagttaaatgtagatggaatgctaatatgccagtcttagcctgccttaggcagcgagtccggctcaaagaccaatgaccttgcaagcg

SEQ ID NO: 991560 - DNA, 120 bp, Artificial Sequence
  ENSG00000231367_14 (sequence is synthesized)
gagaaggccatcgctcagagccccccatggacgccgacgccgacgctgaggaatgttcagcctttctccctcccactgtagccccctgcttcaccagcctaacggagcctctgagcaaag

SEQ ID NO: 991561 - DNA, 120 bp, Artificial Sequence
  ENSG00000231367_15 (sequence is synthesized)
acactcggggggctgtaggcagttgaaagatgactttattcagcagcagctcttatcaacagctttctctcacactgtccgccctgtctcggctgcttagtctggcggctcccacacaca

SEQ ID NO: 991562 - DNA, 120 bp, Artificial Sequence
  ENSG00000231367_16 (sequence is synthesized)
gctgcgtggccggctctcccttgccttcagggtgagcagcttaactctttctctctctgggagtgagtgagctgagctgtgtcctggctcagacggacagctctgactcgctcgctcttt

SEQ ID NO: 991563 - DNA, 120 bp, Artificial Sequence
  ENSG00000231367_17 (sequence is synthesized)
aggcaaggctgagcagataagaaagggtgctctccggaatttatggtgcagagcaatgatagaatggattcctacaaacatttctctgtccaaaaattgttggcagctggcacagctaac

SEQ ID NO: 991564 - DNA, 120 bp, Artificial Sequence
  ENSG00000231367_18 (sequence is synthesized)
tgcaactaccacctctttctaggggtgaagggaactttatccacctagagccaatattatttgagaagagctcttaggagagctaagggtgaagtatgaggccagagggtggacaggggt

SEQ ID NO: 991565 - DNA, 120 bp, Artificial Sequence
  ENSG00000231367_19 (sequence is synthesized)
ggagtgaagcaggcgacagtagggtgggaatcagttggtctgaggtgccaaggtggtcagggaatcaggggtgatggaatcccagaggagagaagtgatatggtttggctctgtgtccct

SEQ ID NO: 991566 - DNA, 78 bp, Artificial Sequence
  ENSG00000231367_20 (sequence is synthesized)
ggaggaatgttgttctagtgatagtgagtgctcacaagatcgatgctttaaaagtgtttagcagtttcccactttgct

SEQ ID NO: 991567 - DNA, 120 bp, Artificial Sequence
  ENSG00000231367_21 (sequence is synthesized)
atcgatgctttaaaagtgtttagcagtttcccactttgctctctctttctctctcctgccactatgagaagaggtgccttgctttccctttgccttccaccaggattgtaagtttcctga

SEQ ID NO: 991568 - DNA, 120 bp, Artificial Sequence
  ENSG00000231367_22 (sequence is synthesized)
ggccttcccagccatgcagaacgggaagagggaaggtgagctgttttgcaataattcctccaagtcttcagactctggcaataaagaaacatgttcagaaacaaagaccacaccttcccc

SEQ ID NO: 991569 - DNA, 120 bp, Artificial Sequence
  ENSG00000231367_23 (sequence is synthesized)
atggcagctcagagaaagacgaacccggctgcctgcatcattctcttaagggcacagctgcaggatagcttcagctgcactggtctggaaactctcaaaagtgggtcaagactctcagac

SEQ ID NO: 991570 - DNA, 120 bp, Artificial Sequence
  ENSG00000231367_24 (sequence is synthesized)
tggttttagcgtagttgtatattcctgacccatttctgcagggaaagggaaggacatgaagactgcagttgcaggctttggacatatgaaaaaaccaacagatggcggcactgccaaatt

SEQ ID NO: 991571 - DNA, 120 bp, Artificial Sequence
  ENSG00000231367_25 (sequence is synthesized)
ggcttggccttccccaccacctgcttcctcttctttgacacctttcctccaggatcaaagatatgtatttgtgccaggagaaaaactgcagtagagcttggcttagttgtcagtggggca

SEQ ID NO: 991572 - DNA, 120 bp, Artificial Sequence
  ENSG00000231367_26 (sequence is synthesized)
acactcagaagactaattgccgtgacggtagcaagtgagccccagaaaaatctgggatgtaaaaccatctgagaccattcagttgaagctatctttaagagctgtcagactttatggtta

SEQ ID NO: 991573 - DNA, 120 bp, Artificial Sequence
  ENSG00000231367_27 (sequence is synthesized)
gtcctccactcctagcagagaaaagaaccttcgagcttgctatttcctctctctagtcttactgtctttgtattcccaatgtctagcaaagtggctggcatatgacggatacttagataa

SEQ ID NO: 991574 - DNA, 120 bp, Artificial Sequence
  ENSG00000231367_28 (sequence is synthesized)
tgtttgccaaaccaatccagaaggagacatttagggaaagcttcaaggccatttggaaaaatggcctttctgtttggtaggtagtgacctggaaaaaagaggagctgctaaataaaacct

SEQ ID NO: 991575 - DNA, 120 bp, Artificial Sequence
  ENSG00000231367_29 (sequence is synthesized)
tggatccacccagaaccctattttggggatggtctcttttggaggctttagatgatgctgaatgttctggggttagagtctgggaggacttcatgttgaggtaggaaaattctatagcta

SEQ ID NO: 991576 - DNA, 120 bp, Artificial Sequence
  ENSG00000231367_30 (sequence is synthesized)
aatctggagagacagaggcaagaagctccttctaaaatcagagtaggaaaaaatataatctggggacacagggatgtttttactgaaaactcaaatggtcaatagtgaggccccggtcca

SEQ ID NO: 991577 - DNA, 120 bp, Artificial Sequence
  ENSG00000231367_31 (sequence is synthesized)
actcaaatggtcaatagtgaggccccggtccagtaatgctggcagtcagacttaaggtctagggcaataagaatctagccttaaaaaatagaatcaggccgggcacggtggctcacacct

SEQ ID NO: 991578 - DNA, 120 bp, Artificial Sequence
  ENSG00000231367_32 (sequence is synthesized)
tgaaaggcgagtgatgtgtggaagaggaaagcagggcagagggaaaacctggagtgtgcctaatggctttgactttcctgacaaagttggaagggaggctgaggataggaggtcaggaaa

SEQ ID NO: 991579 - DNA, 120 bp, Artificial Sequence
  ENSG00000231367_33 (sequence is synthesized)
aggcgaggaaggggctccaggaagctgcaggagatgaaatgtcttgggcagcagtctccagtccaacagcagaggcaaacggcattgtgagcagaacgaagtaatcattcaaagcaagaa

SEQ ID NO: 991580 - DNA, 120 bp, Artificial Sequence
  ENSG00000231367_34 (sequence is synthesized)
tgcgtatgtagttaggttctgtggttttctatggccatctctttagcctgggagcaaaaactagagaatgagaggcagagagagaccccagatcagacatttgcctaagacaagggacaa

SEQ ID NO: 991581 - DNA, 120 bp, Artificial Sequence
  ENSG00000231367_35 (sequence is synthesized)
gagtgaggcacacatgagtctagacattggagcaaggggctgcccatggcatgggtagctgacaaggatttgagcagggccacagggggtgaacagaatggagacactgaactgcttgcc

SEQ ID NO: 991582 - DNA, 120 bp, Artificial Sequence
  ENSG00000231367_36 (sequence is synthesized)
ggggattggaggagtcagcaatgagatgtggccttggtggtctggggcggctatggagagagggagatttgtgaagctctccaggaacaagttgctattttattttattttactattttt

SEQ ID NO: 991583 - DNA, 120 bp, Artificial Sequence
  ENSG00000231367_37 (sequence is synthesized)
gagaactgcttttgagcaataaatcaaccagtgaggtagactcttgtggtatcacctttcaacatggtcaagctatggaaacgtgattttaatttctcaggttttttgtttgtttgtttt

SEQ ID NO: 991584 - DNA, 120 bp, Artificial Sequence
  ENSG00000255512_0 (sequence is synthesized)
atgtggtgcccctacgccacctcctggcagctaaggacactgcagggccctcttgctcccggtgtgacggctggcgtcccctactggccacctcccgaacaaactcggggcgccagttat

SEQ ID NO: 991585 - DNA, 120 bp, Artificial Sequence
  ENSG00000255512_1 (sequence is synthesized)
taagccccatcagttctgtaaattcaaactgaaacggagctattactggggagacctgatgtcccaattcttaacttggaggaaagattttcactttcctccaagaaacactctctaaga

SEQ ID NO: 991586 - DNA, 120 bp, Artificial Sequence
  ENSG00000255512_2 (sequence is synthesized)
acacagcactcagaaaagccagcctgatacctagattacacggttcacagccttacagtaagaagaaactaagtcttagcgataaccaagtggcagacgtggcagaagaaaaatttgaaa

SEQ ID NO: 991587 - DNA, 120 bp, Artificial Sequence
  ENSG00000255512_3 (sequence is synthesized)
ccagggccacattgagcctgcaggcatgtctggcctgttctgaggacagacatttcaagcacagagaggcacaggagcactgtttgagcctggagcttaaatcgcgaatccagagagccc

SEQ ID NO: 991588 - DNA, 120 bp, Artificial Sequence
  ENSG00000255512_4 (sequence is synthesized)
tctctgagcatgcgttgtgcccagagttggtttcatgtggatcaactcaggcttctatggcagggccacagacaggggctattgtctggctcgtcttcagcagatggagcacagctggtc

SEQ ID NO: 991589 - DNA, 120 bp, Artificial Sequence
  ENSG00000255512_5 (sequence is synthesized)
tcctgcacacgtggctgctgatcttgccagtgtgagagacaactttcaattatcataagcatctgcatctgcccaaattcaacctcagtgatctgtctcagtagtgttttaaacagaatt

SEQ ID NO: 991590 - DNA, 120 bp, Artificial Sequence
  ENSG00000255512_6 (sequence is synthesized)
taggactgagcccactactccaaaggcagctgtcccactgcctctggggtgtgactccctctcccattttttatgtatctgtgcaccgagcccttctcgcttctcaccctctgagacgcc

SEQ ID NO: 991591 - DNA, 120 bp, Artificial Sequence
  ENSG00000255512_7 (sequence is synthesized)
aaaagtctgtggtctcctggttccaaagtgtggggggtgctggagaggcaggtgccgctgagatgctgatcagtacccagtgaggaaacatacggcctcctgagagatgcggctgagccc

SEQ ID NO: 991592 - DNA, 120 bp, Artificial Sequence
  ENSG00000255512_8 (sequence is synthesized)
agtggtgcctcttgcccacgacaccctgttttctgtctcgtgcaccactcagtttggactattaaacatgacagtggataggagctgggggacttttaatccaagcacatgcttctctgt

SEQ ID NO: 991593 - DNA, 120 bp, Artificial Sequence
  ENSG00000255512_9 (sequence is synthesized)
gtgggtgcttcctctcaatcctcctggtgtggaagttctccctggtgtcttgccccagaacttcctgctgcagtgagagtctgcatgtcacagttgtgtctctttagggagccatctgcc

SEQ ID NO: 991594 - DNA, 120 bp, Artificial Sequence
  ENSG00000255512_10 (sequence is synthesized)
ctcacctgttggattactcagaaccttcacatgctccttcatcccatttgtgtctcacaaacaggggtctgggctggcagtctattttgtcacctgttccctcctcaccaggctcctggt

SEQ ID NO: 991595 - DNA, 120 bp, Artificial Sequence
  ENSG00000255512_11 (sequence is synthesized)
ctctcctgtctccatttggctgccctggtctagactcagtgtgctaatcaccatttgtctaattagtactgtgggaccatcacaggataaatggcacagcactcaccattgcagacttgt

SEQ ID NO: 991596 - DNA, 120 bp, Artificial Sequence
  ENSG00000255512_12 (sequence is synthesized)
gcccaggcccccagacacctgagttgggtgtcctttactgccttacatagaagcctgggctccgaggttcagggacctcccaaggacctaggtgtcactacatgtgctgctgctgactga

SEQ ID NO: 991597 - DNA, 120 bp, Artificial Sequence
  ENSG00000255512_13 (sequence is synthesized)
aagtgctgacggagttcataagctagtcaggggccgcagctttaaggctgggttctggtcacaggctgccttccaggtacccaggaggaagctgggggcttgtgtgtgctgaggaaggga

SEQ ID NO: 991598 - DNA, 120 bp, Artificial Sequence
  ENSG00000255512_14 (sequence is synthesized)
cctgaggcagaggagaggggttgccttgacagtgctgtggcacacatggcggagtccgaggcagatcttatggatgttgcatttattgcaaaattctacaataaagacttttaaaaagtt

SEQ ID NO: 991599 - DNA, 120 bp, Artificial Sequence
  ENSG00000255512_15 (sequence is synthesized)
ataatcaaagaagcttcaagtctggaagagagaggcaaaaggtgagagtcaggagaatctgaagatgctacactgctggctttgaagatgaggatgggtcatgagcctaataaaaaaggt

SEQ ID NO: 991600 - DNA, 120 bp, Artificial Sequence
  ENSG00000255516_0 (sequence is synthesized)
gtactggtgcagacagctaaaggaatgccagcaccgaacttgacctaccttgcttataacaatgaattaccctttatagaacagcctgtgtcttactcagatcccttattaaaatcctga

SEQ ID NO: 991601 - DNA, 120 bp, Artificial Sequence
  ENSG00000255516_1 (sequence is synthesized)
catccctgggtcttattaaggacctagagaagtgcctggaactcggttcagcacaggtgtgaggcctgatttcctcttgtgatcaactcacagtgtgctggcaagacctgccaatccact

SEQ ID NO: 991602 - DNA, 120 bp, Artificial Sequence
  ENSG00000255516_2 (sequence is synthesized)
tttctttagtgagtgcaagaagacttgattcagtctaccctgaaatagggtctttggttcttttgtcttcaattttgctgttcaagaattttttatttcaaattgcaacttccttggatt

SEQ ID NO: 991603 - DNA, 120 bp, Artificial Sequence
  ENSG00000255516_3 (sequence is synthesized)
ttgcagatacatatatcatcttttttttttactagctatagtagagaaatgaaaacagtttaataaatgaagaaaaggaaagtatgaatatttgaagaaatagatttggcagttaaatac

SEQ ID NO: 991604 - DNA, 120 bp, Artificial Sequence
  ENSG00000255517_0 (sequence is synthesized)
aataaatggatcaatcagtttaaaaacttagaacagtgcgtggcaaatagtgctcaagaagagtaggcttgtgaaacattcacatgcattgttttaacaaacaatgcttccccagacctc

SEQ ID NO: 991605 - DNA, 120 bp, Artificial Sequence
  ENSG00000255517_1 (sequence is synthesized)
gccatgtgaccttggacagcccctgcctctctctaggactcactcccggtccctaacctcagctctctgatctgtaccacaaggagctgccactaacacctgtgtcagaactactgtaag

SEQ ID NO: 991606 - DNA, 120 bp, Artificial Sequence
  ENSG00000255517_2 (sequence is synthesized)
gaccctttcctcctgcgagaggagaacagtgctaaacctgtctgaacgtgatagacatgctacaaactgccaaccctttaggctataaactgctcacacatgggccaagtgtcactctca

SEQ ID NO: 991607 - DNA, 120 bp, Artificial Sequence
  ENSG00000255517_3 (sequence is synthesized)
gccgcacacgcgccggaccgggtaccgctgtgcccggcctggccgcggcctagtcccggcagacgggactgacgaggtcaccaagcccaggccgagacggcgcgggtgtcagggacttgg

SEQ ID NO: 991608 - DNA, 120 bp, Artificial Sequence
  ENSG00000255517_4 (sequence is synthesized)
gaatccccctcccccagtcccgatcccgctttcctttggggtttcacctcagaggacccgacagcactcttgcagccgtctgcctgtcttcctggctcgctccctgcaggaatggtctgg

SEQ ID NO: 991609 - DNA, 120 bp, Artificial Sequence
  ENSG00000255517_5 (sequence is synthesized)
gccccagcaaccttccctaccccccattcctttttgctgcccccctccacaccaggcatgttccctgccacaccatgctgttcccctcacctgggctgccctcccaactcctctctgcct

SEQ ID NO: 991610 - DNA, 120 bp, Artificial Sequence
  ENSG00000255517_6 (sequence is synthesized)
ctggagatgctctgccattcaagacttggctcaggctccaggtcctccctgggccttctagagcccctggttctcactcctctgaacacttccagcctggctaatagcccactgcatcct

SEQ ID NO: 991611 - DNA, 120 bp, Artificial Sequence
  ENSG00000255517_7 (sequence is synthesized)
gtggccagcacaggtgtgggggccagcttccaacacaagcacgggtaggtccctctgcagaccatgggctgcaagaggcccggccttgcccactgcaggggccctgcgcagggctgggca

SEQ ID NO: 991612 - DNA, 120 bp, Artificial Sequence
  ENSG00000255517_8 (sequence is synthesized)
cgaagcaggtgggtgtccaccaatctagtatccaaaaccctgcttggttcacccccacctctgttgaaggaaagcaacactgtgatggagaggagcagctgtggattcaaatcctggctt

SEQ ID NO: 991613 - DNA, 120 bp, Artificial Sequence
  ENSG00000255517_9 (sequence is synthesized)
ggccactttctagttgtgtgacttggtgcatctgccctcatctcctcagagacaaaaatggcaacacctcccttcttgggttactatgaggattaaataacaaaacctccaagaagcaga

SEQ ID NO: 991614 - DNA, 62 bp, Artificial Sequence
  ENSG00000255517_10 (sequence is synthesized)
atcctcaagatggactgcaccttctggcatctcaagtggttcttgtgaagattaaatgaatc

SEQ ID NO: 991615 - DNA, 120 bp, Artificial Sequence
  ENSG00000255517_11 (sequence is synthesized)
acacccggggctgagtcctcggagaagccgcctgccgggtgcatcaccaggactccattggtggtcagtccatccatcaggccatctggggtccgccatttggccgctcgctcctgggac

SEQ ID NO: 991616 - DNA, 120 bp, Artificial Sequence
  ENSG00000255517_12 (sequence is synthesized)
cacatgagggatcagatcacatcccccaggggccccccagcaggccatgtgccagaggcactgcccccgctaccttcaagttcagaggcggcccagagaggactggcattgaagctgcat

SEQ ID NO: 991617 - DNA, 120 bp, Artificial Sequence
  ENSG00000255517_13 (sequence is synthesized)
gacttgagcgtctctctgggcctcactttgctcatcagttaggtggggttgctaactgccaggaccaccatttggattactgtgggctggttcatcacctcaagatgctgcacctcccaa

SEQ ID NO: 991618 - DNA, 120 bp, Artificial Sequence
  ENSG00000253585_0 (sequence is synthesized)
gggcctccagcttgcagatggcacatcacaggacttctcagcctccataactgtaaattggaagaagagtaagaactgttcctgaggctacacaactggtatgtgacaaagattggatag

SEQ ID NO: 991619 - DNA, 120 bp, Artificial Sequence
  ENSG00000253585_1 (sequence is synthesized)
agggttgctgtcaggattgaaaaagaaaatgcagggatggccctatgcattgagtgtggcctgtgttgaagagagaagacccaaagctgacaccactgtccaaaggggctttgactagtg

SEQ ID NO: 991620 - DNA, 120 bp, Artificial Sequence
  ENSG00000253585_2 (sequence is synthesized)
gaatgtctgcacctccctccactcagaggcctggagggtttggatgaggggagatggcacgcttggcctgggtggtgggcttcttgtgatgagctgtcactgtgaagagacttgctgtgc

SEQ ID NO: 991621 - DNA, 120 bp, Artificial Sequence
  ENSG00000253585_3 (sequence is synthesized)
tgaaggcagtgtggatggcagggagaagaagaggaagaacagagcaaatgtgcacggtagcaagctggttggaagcacttgtgaagcaccgctgggggctcccaggggtaaactggggct

SEQ ID NO: 991622 - DNA, 120 bp, Artificial Sequence
  ENSG00000253585_4 (sequence is synthesized)
ctctgcttaggtcccaccactagacagatggaagctaccatgtcattagacattgatttacaggtatttgtgttcacatctgtattcattggaatataaagttggcttctttaacaaaga

SEQ ID NO: 991623 - DNA, 120 bp, Artificial Sequence
  ENSG00000253584_0 (sequence is synthesized)
aagatgtgcctgcttcacctactggcgtgaatgtaaactttctgagaccttcccagccatgtggaactgtagttgggagccagggaaggagtgacactatccctagatgtagtgatatgt

SEQ ID NO: 991624 - DNA, 120 bp, Artificial Sequence
  ENSG00000253584_1 (sequence is synthesized)
tttacaggtccacagctggaaggagctttccttgattctcaaatgagactttggactttggacttttgagtcggtgctgaaacaagccacgctcttcatgcctgtgtgtttcccgcaccc

SEQ ID NO: 991625 - DNA, 120 bp, Artificial Sequence
  ENSG00000253584_2 (sequence is synthesized)
ctgggaaggcgaagggaaggagctacattgtcaagtgtggtccagcaagtaagcaggtcctgagcaccaaacatatcacaggcactcactgcttgggcccaccagtcaacaggagcctgc

SEQ ID NO: 991626 - DNA, 120 bp, Artificial Sequence
  ENSG00000253584_3 (sequence is synthesized)
tcatcacgaactccacgggcgtcaagaagcaatgggtgtggatgtagaagcagcccggattgcaactgtggtggtgtattcttgaactatattgttctattggtggtttctagctttctt

SEQ ID NO: 991627 - DNA, 120 bp, Artificial Sequence
  ENSG00000253584_4 (sequence is synthesized)
gcctttctgaccatgatacgagtagctcccttgatgggttagttctgaaggttcagagagtctctcctcaggcctacacaagctcactactgctcactttatgtgatgtgggcctacaca

SEQ ID NO: 991628 - DNA, 120 bp, Artificial Sequence
  ENSG00000253584_5 (sequence is synthesized)
agctcactgctgctgtctttctaacatgtctatatgttcttcattaactctattagatcactttctgctgaaagagatcagtgtgctttctgtttcctgaactcaaccttgggaaaaata

SEQ ID NO: 991629 - DNA, 120 bp, Artificial Sequence
  ENSG00000253584_6 (sequence is synthesized)
tttcaggtagttgggagccagggaaggagtgacactatccctagatgtagtgatatggttttcctgggagggcttgacttaatcaggtgagccctttaaatggattgggaccctcatgga

SEQ ID NO: 991630 - DNA, 120 bp, Artificial Sequence
  ENSG00000253584_7 (sequence is synthesized)
gagagtagtccgcagctaataactagcaagaaaatgaaacccaacacttagccacaagaaactgaattatgctaacaactatttgagctttgaagaggatcctgagcaccagaaagtaat

SEQ ID NO: 991631 - DNA, 120 bp, Artificial Sequence
  ENSG00000253584_8 (sequence is synthesized)
gtcgcatagcaaccacgttgattgcatccttgcaagacctcgtgatgaccactcaattaattcatgcccagattcatgcccattgaaactgtgataatacatgtatgttgttttacatta

SEQ ID NO: 991632 - DNA, 120 bp, Artificial Sequence
  ENSG00000253587_0 (sequence is synthesized)
ttcactgttgctgttttaaaaggtgtctagtgagaggtacagctcgtggagtccggagaggacccaagacaacctgggggatccctgagactctcctgtgcagactctggattaaccttc

SEQ ID NO: 991633 - DNA, 120 bp, Artificial Sequence
  ENSG00000253587_1 (sequence is synthesized)
atgcataatctttgaagagcaaattcaccatctccaaagaaaatgccaagaactcactgtatttgctaatgaacagtctgagagcagcgggcacagctgtgtgttactgtatgtgaggca

SEQ ID NO: 991634 - DNA, 120 bp, Artificial Sequence
  ENSG00000253586_0 (sequence is synthesized)
tgggcttgacaattataactctaggatgtttcatataccatacttggctacatctgttgtggaaaagagggatgatgtcatttttttcacctctttctgtaaatagaatttatgtagcac

SEQ ID NO: 991635 - DNA, 120 bp, Artificial Sequence
  ENSG00000253586_1 (sequence is synthesized)
gtactttggatgtgtgagccactgctcctggccttgcagtttttatagtataagttgtctcagtccgttttgtattgctgtaaagcaggggtccccaacccctgggcctattaggaatgg

SEQ ID NO: 991636 - DNA, 120 bp, Artificial Sequence
  ENSG00000253583_0 (sequence is synthesized)
agaactgcagctgcgaggactcctgggtgagatgaggcaagtgtggggcactgtaggtggagtagcagccgaagaggtatgaaagctttattgacgtatgattgaaaaaggaaaattgtg

SEQ ID NO: 991637 - DNA, 120 bp, Artificial Sequence
  ENSG00000253583_1 (sequence is synthesized)
tagatctaaggtgtacaatgctatgaatacatggtttcaggcctcatgtttaagtctctggtagttctttatagcaatgcaagaacggactaatacacctggacactgatctcatctggt

SEQ ID NO: 991638 - DNA, 120 bp, Artificial Sequence
  ENSG00000253583_2 (sequence is synthesized)
gaaagactgtgggtaatcaaagcatttctgcggagtggttgcaaggcatgcctgcgacgagacaggttgttggcagtgagtgagtgtagcattgttctttctcaagattgctttagctgt

SEQ ID NO: 991639 - DNA, 120 bp, Artificial Sequence
  ENSG00000253583_3 (sequence is synthesized)
ttgtggttccatgtaaattttatggtttcatacaatttttaatattactttttttgtttctgtaaataaatgtcattgaaattttaacagagattgcattcagtctgtaaattgctttgg

SEQ ID NO: 991640 - DNA, 120 bp, Artificial Sequence
  ENSG00000253583_4 (sequence is synthesized)
gtagcatggacattttaacaatattaattgttccagtccataaacataggacatctttccatttatttgtgtctacttcaaattctttcatccacgttttacagttttcagtgtacagat

SEQ ID NO: 991641 - DNA, 120 bp, Artificial Sequence
  ENSG00000253583_5 (sequence is synthesized)
ttttcacctcctttgttaaatttattctttgttactttattctttctgacactgttgtaaatggaactttataaagaataatatgtttcgggtgtttattaaatatagaaacacagctga

SEQ ID NO: 991642 - DNA, 120 bp, Artificial Sequence
  ENSG00000253582_0 (sequence is synthesized)
actttcaggactgcaggggaaagggtggacacccagcctcccgccaggaggatacaaaaatacatcagtttgcaaaccagaagaaggtcctcaccagaaaccaactatgctggcaccctg

SEQ ID NO: 991643 - DNA, 120 bp, Artificial Sequence
  ENSG00000253582_1 (sequence is synthesized)
cttctagcctccagaactgtgagaaataaatgtgtgtttataaaccagtcagtcagtctatggtgctttattatagcatctggaacgagctaagacagctgctaagtagcattccatttg

SEQ ID NO: 991644 - DNA, 120 bp, Artificial Sequence
  ENSG00000253582_2 (sequence is synthesized)
attcacactacttctgagttcaatgaaagagaggctcgcaatagaaaacttatacagtactttctatggtcagttgtgatcataaaaagagagtaagaagaaaaacaactctgaaagaca

SEQ ID NO: 991645 - DNA, 120 bp, Artificial Sequence
  ENSG00000253582_3 (sequence is synthesized)
agatttggtttctctctttcattgtacacataaaataagacttgaccatctggaaaaaggaagcctgagaatgaatatataagaagaggacataaaatggtggaaagagaaagcatggtt

SEQ ID NO: 991646 - DNA, 120 bp, Artificial Sequence
  ENSG00000203971_0 (sequence is synthesized)
cacttacctgggtgcacttgggcagctgagcaccagggcctcggtttctccatttgtaaaacagaagtgatgatagcatcaacttcctcagggctgctgttacagagaaccacagtgaac

SEQ ID NO: 991647 - DNA, 120 bp, Artificial Sequence
  ENSG00000203971_1 (sequence is synthesized)
gcaacagaaatttgttctctcacaattctggaagccagaagtccaacatcaaggtgttggcagggctggctccttctggggactgtaagagaaaatccattccacgcaactcaggaatcc

SEQ ID NO: 991648 - DNA, 120 bp, Artificial Sequence
  ENSG00000203971_2 (sequence is synthesized)
tccacgctccttggcttatggcagcgaaactccagtctgactcactgccaagtggctcctctcctgtgtgttttcatagctctgcagccctttcctctcataaaggtgccagtcactgaa

SEQ ID NO: 991649 - DNA, 120 bp, Artificial Sequence
  ENSG00000203971_3 (sequence is synthesized)
tttaggacccaccctgatccattatgatatcagctgacctaattacatttgcatttctacataagcccacattctgaggttctggggaggcatgaattttgggagggacactatctttcc

SEQ ID NO: 991650 - DNA, 120 bp, Artificial Sequence
  ENSG00000203971_4 (sequence is synthesized)
cagaacagcttctattattttgtgtgtgtgtgctcagtgcttcgtagacttgactttatcccctcctcctagccaccttatgaggaagggacaatggctaccttgcctcacatgaggagg

SEQ ID NO: 991651 - DNA, 120 bp, Artificial Sequence
  ENSG00000203971_5 (sequence is synthesized)
cgaggcacagagacttggaacctctcaggatacacgatcatctttgcccttgcttggaattcatctgattttcaaagaggcggcctgcagcagagcctcccaacctgacttttctctcca

SEQ ID NO: 991652 - DNA, 120 bp, Artificial Sequence
  ENSG00000203971_6 (sequence is synthesized)
aatggcagtccctgcacgacaatgaacaaggagaagctgggctccacagtgccctgtgttcacaggctccacagtgagacgaaatgtcctggtttaaaacggacattgatcagacctgct

SEQ ID NO: 991653 - DNA, 120 bp, Artificial Sequence
  ENSG00000203971_7 (sequence is synthesized)
gggaaggcaagcgggaggcagaaaggcacggctgcttccaagtttctgttggcagagagggcagagctgacaactcccagtgaaagatgttttcaccgtggcgcaagagcagagacaggg

SEQ ID NO: 991654 - DNA, 120 bp, Artificial Sequence
  ENSG00000203971_8 (sequence is synthesized)
ccagcgcggcaccccagccccgctcacagctctaggttgatgcttctcagagggaagagctctttctctctcaagagtttcaataatcgtatcctaacttggcacagaacctcacccttc

SEQ ID NO: 991655 - DNA, 120 bp, Artificial Sequence
  ENSG00000203971_9 (sequence is synthesized)
agtcagaggaatttgctgggtcttctctggctcggaataagtccaccaggcatctctaccttatccagaagagagtcatttattttcacaagtgcatagcggccgacaccaccagcacta

SEQ ID NO: 991656 - DNA, 120 bp, Artificial Sequence
  ENSG00000203971_10 (sequence is synthesized)
accagagtggattcttgcttcactctcggggccctcattcaaggctggtctcttcccgcaggccttctgacaagtgccacattttgttcctctaacttgggtgaagccccctcaaacact

SEQ ID NO: 991657 - DNA, 120 bp, Artificial Sequence
  ENSG00000203971_11 (sequence is synthesized)
agtctcaaagatcccttgctacaaaggtgggtgctcgggcctcaaattcaaagaccctgactcagtagatccaggttggggtcccaggactgtaatataggtggtcctggcaccacactt

SEQ ID NO: 991658 - DNA, 120 bp, Artificial Sequence
  ENSG00000203971_12 (sequence is synthesized)
ggccaaatgctgtgtagcttgcaagaaagctccagaagcaatctagagctttatatcatcactcaaaagtaaagatttgtaggaaaggtttaaaccagtgtcttcccaagtttccagctt

SEQ ID NO: 991659 - DNA, 120 bp, Artificial Sequence
  ENSG00000203971_13 (sequence is synthesized)
cttcaaccaaactgctggttgaggggaaggtgatttgagattttagggcatcgatttatacagtgtgaaaattattcccctgtggttagatcaaaggaaaattcttcatctggcactaag

SEQ ID NO: 991660 - DNA, 120 bp, Artificial Sequence
  ENSG00000203971_14 (sequence is synthesized)
agtctttagcacctcctgacacttctaagctcccttttgaacaaagagagagaggcctcaggcttgaagccatcagcaggcagcagtatctggctggaatttagcaatgctcgtttgtgg

SEQ ID NO: 991661 - DNA, 120 bp, Artificial Sequence
  ENSG00000203971_15 (sequence is synthesized)
tcaaggagctggggctaaggcaacttttgtcatcaaaaagaaggcccagatcttggagagaagcagagcatcctgagtgtctgccaagcgccaactttgcagccacaggttcaagttctt

SEQ ID NO: 991662 - DNA, 120 bp, Artificial Sequence
  ENSG00000203971_16 (sequence is synthesized)
ccctaatcccggcagatctgccttcttggtcctattggtctccatgtgtggttggcgcgatctctgggctttgctgatgtgaagccatggggaggtggagttttaagagcggtgttctca

SEQ ID NO: 991663 - DNA, 120 bp, Artificial Sequence
  ENSG00000203971_17 (sequence is synthesized)
gcgggaagagctctttctttctcaaacatttcggtaatctcatcccaacctggcatagaacctcacccttcctggggacacaggaatatttgctactttacatcaataaaatccaactcc

SEQ ID NO: 991664 - DNA, 120 bp, Artificial Sequence
  ENSG00000189229_0 (sequence is synthesized)
ggacaaccagttgctgagaggcaaagctcatcattttgaagggctaggtgaaggcccatttaatttcctccaggagaaaatgtcaccaccaccattggaagtcattaaagaagcaaccca

SEQ ID NO: 991665 - DNA, 120 bp, Artificial Sequence
  ENSG00000189229_1 (sequence is synthesized)
tggcaaaactagttattttcttaaaacagtaggaagaagaaaagctttttgaatgaatcacttctcatcttctccgaagttggaagcatcaagaatctaaataagcatttatgatggctg

SEQ ID NO: 991666 - DNA, 120 bp, Artificial Sequence
  ENSG00000189229_2 (sequence is synthesized)
gcatgaatatacaggtgaagacagaacaagaaaacaaaccaagaatttcccctcaccagccaccagctctgccagcaacttgatcttagacttcccagcctccgtaacgcctctgcttat

SEQ ID NO: 991667 - DNA, 120 bp, Artificial Sequence
  ENSG00000189229_3 (sequence is synthesized)
aatctgtcatggattggaaaactagaaaaaacagtttacagagtataacaaactttggaggagttaatcgactctaagtaaaagagtatctagcacggctgtggaacaaaggagagactc

SEQ ID NO: 991668 - DNA, 120 bp, Artificial Sequence
  ENSG00000189229_4 (sequence is synthesized)
acaaactgttgaaagaataaatgaatgaatgaattctgttcatgagctttaataaaacagctctgagtagtaacagtggatcaaatttaggcttcttgatgcaggcatggtgtagattac

SEQ ID NO: 991669 - DNA, 120 bp, Artificial Sequence
  ENSG00000189229_5 (sequence is synthesized)
tacttctgtattgtcccaggagctcagcacattcctgcagagatgataggagctcatctgatacttgtcagctttgaataaactccagtccccaagagagagaatgagaatcaccggaat

SEQ ID NO: 991670 - DNA, 120 bp, Artificial Sequence
  ENSG00000189229_6 (sequence is synthesized)
acgaaacttccctgttggacttcccaacattcttgaatgcaccaagatagcctcttgctgtgagattaataaatgaataaatgcctccatatttttcaaatctgtgaagttaacaacatg

SEQ ID NO: 991671 - DNA, 120 bp, Artificial Sequence
  ENSG00000189229_7 (sequence is synthesized)
taactgtgtcaaattgtataggtcttggccatcactggtcctgttgtgatgaaggttttttgcccttggatataatttaattttcaattcttctaattatggtacttcagaacatcaata

SEQ ID NO: 991672 - DNA, 120 bp, Artificial Sequence
  ENSG00000189229_8 (sequence is synthesized)
cttcagaacatcaatatttgagatgaacttctctagtgtcaaggactgatttgagttgtgtaaaccctgaatatctgagacaggtctcgattattttagaaagtttattttgccaaggtt

SEQ ID NO: 991673 - DNA, 120 bp, Artificial Sequence
  ENSG00000189229_9 (sequence is synthesized)
gacacggcctcgggaggtcctgaggacatgtgctcaaggtggtcagagcacagctttgctttatacattttagagagacatgagacatcaaccgacatatgtaagatgaacattggttcc

SEQ ID NO: 991674 - DNA, 78 bp, Artificial Sequence
  ENSG00000189229_10 (sequence is synthesized)
tgagacatcaaccgacatatgtaagatgaacattggttccatctggaaaggcgagacaacttcaaacgctgcattctt

SEQ ID NO: 991675 - DNA, 90 bp, Artificial Sequence
  ENSG00000189229_11 (sequence is synthesized)
ctgattagcctttccaaaggaggcaattagagtgagcaaaatgaacaaaatcaattattttgattctgaacaaaatgggaggctggtttt

SEQ ID NO: 991676 - DNA, 120 bp, Artificial Sequence
  ENSG00000189229_12 (sequence is synthesized)
atttttctttcaccgttgtatcaaactacacaggcggccttggaaaccatcacagttgagagtaggtaacgcccatttgttgcatagttttgtgctccacactcttatctacaaaattat

SEQ ID NO: 991677 - DNA, 120 bp, Artificial Sequence
  ENSG00000189229_13 (sequence is synthesized)
tgcatagttttgtgctccacactcttatctacaaaattatgaatttttttacatatattaatttcagaaaaactaaaaataaaacaaagtagtttcaaactagtattgtttttatatctt

SEQ ID NO: 991678 - DNA, 120 bp, Artificial Sequence
  ENSG00000189229_14 (sequence is synthesized)
tacacgcgtgagccaccgcgcctggcctgaagaaagctttcagacttgaactgaattataccaccaactttcctgatttcccagtttgccaacagcacatcacaggacttctcagcctcc

SEQ ID NO: 991679 - DNA, 120 bp, Artificial Sequence
  ENSG00000189229_15 (sequence is synthesized)
ggacttctcagcctccacaacattgaaattaactgttcactaagaagcagaatgatcttcactggaacaacgaaacaacggatgatctgcctttaataggataaaagccagtatttgcaa

SEQ ID NO: 991680 - DNA, 120 bp, Artificial Sequence
  ENSG00000189229_16 (sequence is synthesized)
atataaaatactattttgagatccttgtggagttcatttttgtgtatggtcagaggttattgtcagtgttcattttttgccatatagatacctggttgttctaccatttgatgaaaggta

SEQ ID NO: 991681 - DNA, 120 bp, Artificial Sequence
  ENSG00000189229_17 (sequence is synthesized)
gatcttatgtgtatcactgtgccaatataaccctaccttgattactgaatctttacagtatatcttgatatcgtctagggtaagtgatctaaatgtatacttttgtttctaagtattttt

SEQ ID NO: 991682 - DNA, 120 bp, Artificial Sequence
  ENSG00000189229_18 (sequence is synthesized)
gactttggttctttgagttctccatatacatttgataatcagtttgccaaatttctcaaaaagccctgctggatattgaatggaattatattgaatctaaatatcagtttggagataact

SEQ ID NO: 991683 - DNA, 120 bp, Artificial Sequence
  ENSG00000189229_19 (sequence is synthesized)
gacatcttaataatacatcttccaatcaaatgcatacaatatatctcatttatttagataggtttgctttaatttattttagcaatgtttgcagttatctgttcagtattttatttaaat

SEQ ID NO: 991684 - DNA, 120 bp, Artificial Sequence
  ENSG00000189229_20 (sequence is synthesized)
tattcctaaatatttcttgatttttgatgctatgggaaacagtgtattttatttttttcattaatcattacttttgtagagagagacaatggatttttatatgtgaagcttatatgctgc

SEQ ID NO: 991685 - DNA, 120 bp, Artificial Sequence
  ENSG00000189229_21 (sequence is synthesized)
gaccatgaccacgctaaactcactttttagttctgataaatttttttgtacatttcataggatttttggcatacataattgtgattatgtcacttataaataaagacaatattacttatt

SEQ ID NO: 991686 - DNA, 70 bp, Artificial Sequence
  ENSG00000189229_22 (sequence is synthesized)
gtaggaccctccgagccaggtgcgggagatagtctcctggtgcgaggatttttaagccggtcggaaaagc

SEQ ID NO: 991687 - DNA, 120 bp, Artificial Sequence
  ENSG00000189229_23 (sequence is synthesized)
ggtataaatctttgatttctatatattcttctcacacccttctctgcgaacacacctatcttccccattttttaactggctaagttctatctgcctatcatgaaaagcaaagccacctat

SEQ ID NO: 991688 - DNA, 120 bp, Artificial Sequence
  ENSG00000189229_24 (sequence is synthesized)
aacaaattccttagatttaagtaactcttttttaaattccggtgtattttttgtgccttctattggttagattttgttaaaataatgctgcataacaaacctttccaataataatttgat

SEQ ID NO: 991689 - DNA, 120 bp, Artificial Sequence
  ENSG00000189229_25 (sequence is synthesized)
acaataatttattactgtttatgtacctccaggttgccagggcgtccactggtctaaatagcactcatcttcctactgcaggtctataggtccactgatacggctttgctactctacccc

SEQ ID NO: 991690 - DNA, 84 bp, Artificial Sequence
  ENSG00000189229_26 (sequence is synthesized)
aggcttacattcttagggattactttcctcactttgttatatatcctggaagctatgaacaatgatgcttcttcatactcttca

SEQ ID NO: 991691 - DNA, 120 bp, Artificial Sequence
  ENSG00000189229_27 (sequence is synthesized)
cctggaagctatgaacaatgatgcttcttcatactcttcaacctcatcatgataccttgcacgaagcaggagctcaactaatttgggttgaggccagaatgccaatagtgagcaaaaaag

SEQ ID NO: 991692 - DNA, 120 bp, Artificial Sequence
  ENSG00000189229_28 (sequence is synthesized)
gatgatatttgacacttggcattgaatatctgaatcatgatgtccacataactacagctatgcaccacataatgatgttttactcaacaacagaccacatatacaatggtggtttcataa

SEQ ID NO: 991693 - DNA, 120 bp, Artificial Sequence
  ENSG00000189229_29 (sequence is synthesized)
ggctataaaggagctgaaaatttcttaccacctcatgtcctcatgtcatagtgcaacatattgctcttgtgtttgcagtgatgctggcataaacaaacccactgtgctttcagttgtata

SEQ ID NO: 991694 - DNA, 120 bp, Artificial Sequence
  ENSG00000189229_30 (sequence is synthesized)
atgctggcataaacaaacccactgtgctttcagttgtataaaactgtagcccatacaatcatgtacagtacataatactcaatgatgataaactaaatgactatgttactggtttatgta

SEQ ID NO: 991695 - DNA, 120 bp, Artificial Sequence
  ENSG00000189229_31 (sequence is synthesized)
aagtgtactataagacagtttcgggcaggtccctcaggtggtattccagaagaacgtattattattataggagatgacagctccatgcatgctaatcccgctaaagaattttcagtgtga

SEQ ID NO: 991696 - DNA, 120 bp, Artificial Sequence
  ENSG00000189229_32 (sequence is synthesized)
caagatatggtggtggaagacagtgatatagatgatgctgaccctgtgtaggcctagggtaatatgtctgtttgtgtctctgttttccacaaaaaaagtttaaaaagtaaaaagtaatta

SEQ ID NO: 991697 - DNA, 120 bp, Artificial Sequence
  ENSG00000189229_33 (sequence is synthesized)
atataaagaaagaaaaaatatttgtgtacagccgtatgtgtttatgttttaaactgtcattacaaaagtatcaaaaagttttaaaaagtgtataaagcaaaaagttacagtaagctaaaa

SEQ ID NO: 991698 - DNA, 120 bp, Artificial Sequence
  ENSG00000189229_34 (sequence is synthesized)
acgtcttcctcctaaaaacctgtaacctcaatctaatcatgagaaaagacatcaggcaaatcccaactgagggagattttacatagtacctgagcagtactcctcaaaactgtcaaggtc

SEQ ID NO: 991699 - DNA, 120 bp, Artificial Sequence
  ENSG00000189229_35 (sequence is synthesized)
cagtaggaagaagaaaagctttttgaatgaatcacttctcatcttctccgaagttggaagcatcaagaatctaaataagcatttatgatggctggcatgaatatgtaactttcaatcatg

SEQ ID NO: 991700 - DNA, 120 bp, Artificial Sequence
  ENSG00000189229_36 (sequence is synthesized)
gtcccaatttagtcaattctgctacagcacatgcccaggaaagatgatggatcttcattaatttaaatgaatcataggcggaagatagaatgggagtcctagttgaccttcatataattt

SEQ ID NO: 991701 - DNA, 120 bp, Artificial Sequence
  ENSG00000189229_37 (sequence is synthesized)
gaacttgaacaaggaagttgccacaacatctgtgggccagagaactatgccagaatgttatttccagattgcttcctgtatttacaaaggcggaagatagaatgggagtcctagttgacc

SEQ ID NO: 991702 - DNA, 120 bp, Artificial Sequence
  ENSG00000189229_38 (sequence is synthesized)
ctataggtccactgatacggctttgctactctaccccgacaccctgaggactaatctattaatagtatgtacttcttataatgatgagtgaggcacaaaagaggaagcagaaacgcggaa

SEQ ID NO: 991703 - DNA, 120 bp, Artificial Sequence
  ENSG00000189229_39 (sequence is synthesized)
agctctgtagccaagaccaggaagtggctgcattacaaggtacaaaacatgcccccacaacccccagctcccgacatgaggaagatgagcagagcagtttcctctaaaatctgcttggct

SEQ ID NO: 991704 - DNA, 120 bp, Artificial Sequence
  ENSG00000189229_40 (sequence is synthesized)
ttacacgcgtgagccaccgcgcctggcctgaagaaagcggaagatagaatgggagtcctagttgaccttcatataatttttagaagatggagcacttcaacttcttccactcatgaaaag

SEQ ID NO: 991705 - DNA, 120 bp, Artificial Sequence
  ENSG00000189229_41 (sequence is synthesized)
agagaactatgccagaatgttatttccagattgcttcctgtatttacaaaggtctataggtccactgatacggctttgctactctaccccgacaccctgaggactaatctattaataaca

SEQ ID NO: 991706 - DNA, 120 bp, Artificial Sequence
  ENSG00000189229_42 (sequence is synthesized)
agacagaacaagaaaacaaaccaagaatttcccctcaccagccaccagctctgccagcaacttgatcttagacttcccagcctccgtaacgctttgaataaactccagtccccaagagag

SEQ ID NO: 991707 - DNA, 90 bp, Artificial Sequence
  ENSG00000189229_43 (sequence is synthesized)
aaagtcggcccatcagttttctttgtatagctctgaacactataacaaccaggagtccctctgattgaagatttctctccttcatcgtgc

SEQ ID NO: 991708 - DNA, 120 bp, Artificial Sequence
  ENSG00000189229_44 (sequence is synthesized)
aggactaatctattaatagtatgtacttcttataatgatgagtgaggcacaaaagaggaagcagaaacgtaagagaccttctaaagcctattctcagaactgccatactgtcgtttctgc

SEQ ID NO: 991709 - DNA, 120 bp, Artificial Sequence
  ENSG00000189229_45 (sequence is synthesized)
ctctggccaaaacaggtcatcaggtacaaagtcaagagcccaaagccacatggtcctaagatgaagaaagcctgtggattcaggaacagatgaattttaggagccaacaacgcaatctac

SEQ ID NO: 991710 - DNA, 120 bp, Artificial Sequence
  ENSG00000189229_46 (sequence is synthesized)
cacttgcctctcttaagaaatatcattgtttacctatgtggtaattacctgtatacctatttttctctgctatgttagtacccatctgcattgactattttatttgtatggtgcctttca

SEQ ID NO: 991711 - DNA, 120 bp, Artificial Sequence
  ENSG00000189229_47 (sequence is synthesized)
cttggtaagttctcaacactggaaaaatatgcaagccaactaactttattccccctgcacattgccaattacatgtaagcttatatgacatggtctttctataaaggcaattatacagaa

SEQ ID NO: 991712 - DNA, 120 bp, Artificial Sequence
  ENSG00000247728_0 (sequence is synthesized)
acgaagaaaccgttctacggaagcccagttgagacaacttgagacaggattcagaaacgctgattttagtaaccttaaccctcggcctttggtgggaacttcggctctgtgggaattagt

SEQ ID NO: 991713 - DNA, 120 bp, Artificial Sequence
  ENSG00000247728_1 (sequence is synthesized)
ctttgggggactgatggtgatgctgaaatcttattgcgtaggaaattaagtacaacaaagaagacccgtcgtgagaggagagtgcggaagaaatgcgaagtctacgggaggtggcagctg

SEQ ID NO: 991714 - DNA, 120 bp, Artificial Sequence
  ENSG00000247728_2 (sequence is synthesized)
cagaagcttggtgttggatttggagttaggagaccgggaggagcccagcttccggtccagacggttatcttgttgacttgcacgactgcaaacgccctgagctgcttttgcagtctgaaa

SEQ ID NO: 991715 - DNA, 120 bp, Artificial Sequence
  ENSG00000247728_3 (sequence is synthesized)
catcagcgatcccatcaaaatattctgtttcttgggatataagaaacatcccaaggcgggctgtagagcgagagatttggactcgatttaaatacagacaaaatagtatgcatttactaa

SEQ ID NO: 991716 - DNA, 120 bp, Artificial Sequence
  ENSG00000247728_4 (sequence is synthesized)
cacccccacgaaacttggtaagggcagcaacagaactttatctgccatatgcactcctgtattcctattaccaaatagtgccagggactaagtgaatatttgcccaatgaatgagtttta

SEQ ID NO: 991717 - DNA, 120 bp, Artificial Sequence
  ENSG00000247728_5 (sequence is synthesized)
agtaggaaacgtttgcatagaatcattttgtttcttttggagttcaaatcttcggatattttacccttcccaatccaaagaaaagtctctgagtgaagagatgggaacaaaataaattaa

SEQ ID NO: 991718 - DNA, 82 bp, Artificial Sequence
  ENSG00000247728_6 (sequence is synthesized)
aaaagtctctgagtgaagagatgggaacaaaataaattaaaatgtattcagtggaactcacagtttaaaattctatgtttct

SEQ ID NO: 991719 - DNA, 120 bp, Artificial Sequence
  ENSG00000247728_7 (sequence is synthesized)
ctcggctgaatgaggtatcgcaaaagactgcatgcactttggagaaagacttgagttattgtcatacaatttccattctttttagctttttcttaaatatatgacaaatacctacacaaa

SEQ ID NO: 991720 - DNA, 120 bp, Artificial Sequence
  ENSG00000276449_0 (sequence is synthesized)
agtacacttccaaccactttccttaacaggctgtcaaactctgggtcaatatatatcagccccagtcaccccaggagcaggtatcagacatctggggacaactcctatgccctgaaatgt

SEQ ID NO: 991721 - DNA, 120 bp, Artificial Sequence
  ENSG00000276449_1 (sequence is synthesized)
gtaaaattactcaaattggccaagtatagaaagcccagaaaatctagctaacccgaatccacttgccacacacaagctgcctcctacaactccagtttgctgtattactatctatattcc

SEQ ID NO: 991722 - DNA, 120 bp, Artificial Sequence
  ENSG00000276449_2 (sequence is synthesized)
ttcacaactccggtgcagccctgaatcatgtcctctggttctgagttgtaagttacaacatgctccacctttcatctatctgtcatgtcatgtcctgacatcaagaaaacttctaaatct

SEQ ID NO: 991723 - DNA, 120 bp, Artificial Sequence
  ENSG00000276449_3 (sequence is synthesized)
taaaactacatacccagaagggtatcatgagtgcagcgaatgttggaaagtcttcagccattaacctcattcagcaccagtaaaccatcttggagaaagaccttaggaatgcaggcaggc

SEQ ID NO: 991724 - DNA, 120 bp, Artificial Sequence
  ENSG00000276449_4 (sequence is synthesized)
aaagtgcttttgccagcagataaaatagtaaagctgtggatattagcttttgtgagggagacctcaaccagaaatggaatcttacatccaaacatccacacaagggaggtttgttgtaat

SEQ ID NO: 991725 - DNA, 120 bp, Artificial Sequence
  ENSG00000276449_5 (sequence is synthesized)
tgtctgctatatgagaagcttttgtgaattaccttgcactttctgacctgcctgggatccttgccagtgttaagtcactgaaagtgtgtactacaaaagacttccatccactattagctg

SEQ ID NO: 991726 - DNA, 120 bp, Artificial Sequence
  ENSG00000276449_6 (sequence is synthesized)
atatcacagtgtgtatcaccttaaaatgcttagggagggcagatagctgtgctctctacctttatctggagttattgagtctgatcccttcgggcgaggcctcattcccacttccatggc

SEQ ID NO: 991727 - DNA, 120 bp, Artificial Sequence
  ENSG00000276449_7 (sequence is synthesized)
tggtttgggtgcagacatcatccaactttggacagaggatacaggctggcttgagctggcagcttgtaaagattttcctttcttcatgggtattattgcttgtcttataatgttggtgat

SEQ ID NO: 991728 - DNA, 120 bp, Artificial Sequence
  ENSG00000276449_8 (sequence is synthesized)
agatttttcaccttccaagctgcccaaacccagtcaatttccacgtgactatactggttttagtgatgataaagtcattgtttaagctacatttactcattgcagttttattctctgtgt

SEQ ID NO: 991729 - DNA, 120 bp, Artificial Sequence
  ENSG00000276449_9 (sequence is synthesized)
gtgtgctgtgggttgagagcaaaattggagtctgccaaaatgaaaaagtgagtggttttgtgaggttttcaattttatgtacttccaaggaaatagcaaaaacaaaaaaaccaaaaaaaa

SEQ ID NO: 991730 - DNA, 120 bp, Artificial Sequence
  ENSG00000276449_10 (sequence is synthesized)
aaaaaaacaactcaatccacaaacgcctgatgtatattgcttcagaaggttcctgggaaaaagaaggatttctatccaaaatcctttaccctgaatttgaagattatttatggttgcaca

SEQ ID NO: 991731 - DNA, 120 bp, Artificial Sequence
  ENSG00000276449_11 (sequence is synthesized)
gtcagcttgcagccaggacaattggtttgacaactgtcaggatttatggcagctgtgagagctgggtatttgtacccatgcatgtcccatattctccagtattgtttagggatagcttgc

SEQ ID NO: 991732 - DNA, 120 bp, Artificial Sequence
  ENSG00000276449_12 (sequence is synthesized)
tcctgtgatgtgccttatgagctatgtgtcttgaacccaaaaatgatgtaggttatgttcctggatgtaaaatgtaagagtgcattagtttgttgtccattgcttataaaataatacctg

SEQ ID NO: 991733 - DNA, 120 bp, Artificial Sequence
  ENSG00000276449_13 (sequence is synthesized)
agagccttcttgctggtagactgtgcaaaaagtcccaaggtggtacagggcatcacatggtgaggctgctgagtgtgctcacatgttaacgtgctagcgcaaatcattctctctcttttt

SEQ ID NO: 991734 - DNA, 69 bp, Artificial Sequence
  ENSG00000276449_14 (sequence is synthesized)
attcttcgctaagtttttatttttagtagagcagggtttctcccatgttgatcaggctggtctcgaact

SEQ ID NO: 991735 - DNA, 88 bp, Artificial Sequence
  ENSG00000276449_15 (sequence is synthesized)
ggcccctggccctttctcttcttataaaaccaccagttctcccaggataacccattagtctatcaacccataaattgattaattcatt

SEQ ID NO: 991736 - DNA, 120 bp, Artificial Sequence
  ENSG00000276449_16 (sequence is synthesized)
aacccattagtctatcaacccataaattgattaattcattcctgaggatagagccctcatgattcaatcacctcttaaaggtcgcacctctcagtactaccacactgtagattaagcttc

SEQ ID NO: 991737 - DNA, 120 bp, Artificial Sequence
  ENSG00000276449_17 (sequence is synthesized)
aatgtgacttttggaggagatggtcaaaccatagcaagcagtttgggaaccatagtctgtacagaaacagtgattgtattaatatgaagtatgagacaccagcaaactagagtggaatgg

SEQ ID NO: 991738 - DNA, 120 bp, Artificial Sequence
  ENSG00000276449_18 (sequence is synthesized)
atgagcgccttgtaaagagacatccatgaatgtttcagtaactatggctatgtgagatgagggtatacagaaactctgaggacctacagacgtgtgtatctcctgtaggcaaagtcattg

SEQ ID NO: 991739 - DNA, 120 bp, Artificial Sequence
  ENSG00000276449_19 (sequence is synthesized)
tcagagcaagtaatccaaaggtgttatggattcttgtgtctctggcgttataaaacgtatgttgaattttaattgccattttaacagtgtggagaaatgggacctttaagaggtgattag

SEQ ID NO: 991740 - DNA, 120 bp, Artificial Sequence
  ENSG00000276449_20 (sequence is synthesized)
gtcatgatggctctgcccttataaaggaatcaatgcctttatcataagagtgggtttgttaacccgagagtgacgtttttataaaatcagctgtctctgtctttcatgctcacttgccct

SEQ ID NO: 991741 - DNA, 120 bp, Artificial Sequence
  ENSG00000276449_21 (sequence is synthesized)
tctgtcatattatgacagagtaacaaggccctcaccagatgccaagcagataccagtgccatacccttggacttcccagcctccagaactgtatgaaacaaactactttataaattacgc

SEQ ID NO: 991742 - DNA, 120 bp, Artificial Sequence
  ENSG00000276449_22 (sequence is synthesized)
aatctgtggtgttttgctatagtagtggaagacagacacagacataaagcctgttaattcaaaccactactgcacaggtaggagcctcatgactgaatgaagggagattctatacttctg

SEQ ID NO: 991743 - DNA, 120 bp, Artificial Sequence
  ENSG00000276449_23 (sequence is synthesized)
agataagtcttttttttttttaaacctaaacataattcctggtgactcaggtggacataaccttccttgtctccagttcttcttccccgagattctgaatttccaacaacattgcttcca

SEQ ID NO: 991744 - DNA, 120 bp, Artificial Sequence
  ENSG00000276449_24 (sequence is synthesized)
gtttttgatactataaaatcagagttgacccacgtaagacatgaggagaggctaatgatggaatcaacacagctttgccagaggttataaaagaggattgagaaatccagattttatttg

SEQ ID NO: 991745 - DNA, 120 bp, Artificial Sequence
  ENSG00000276449_25 (sequence is synthesized)
gaatttttcttttctaacagctttattgaggtattagtgacattcagttgcacattgttaaagtgtaaaatatataaaaacaatcaccaaagtcatgataataaacatatccattgcctc

SEQ ID NO: 991746 - DNA, 120 bp, Artificial Sequence
  ENSG00000276445_0 (sequence is synthesized)
gctactcatttattaactgtctgggagttccagcagggtcagaatcaggtctgtctgtaccgtcggtgagtcctcaacatcacccagcacagggcctggcactcagtaggtgctcagtaa

SEQ ID NO: 991747 - DNA, 120 bp, Artificial Sequence
  ENSG00000276445_1 (sequence is synthesized)
ccatgcgctgaatgaatgagtaaatgaaggagtgaatgaatgattgccaacctcaatagctggacatttatcatgagggcagtaggaagccacagaagtattttaggcagaactggaccc

SEQ ID NO: 991748 - DNA, 120 bp, Artificial Sequence
  ENSG00000276445_2 (sequence is synthesized)
gccaaggctttgagtagcaaaggtgttgccctgctcttcagtacagtacaggagccactggccacatgtggctcctgggcacttgaaatgtggctcgtgtgacttgagatatattttaag

SEQ ID NO: 991749 - DNA, 120 bp, Artificial Sequence
  ENSG00000276445_3 (sequence is synthesized)
taagcataaatacccaccagagttaaagacttggtacaaaaaaaatgttttatattgatcacatactgatatggtaatattttggatatattgagttaaataaaatatattattaaaatt

SEQ ID NO: 991750 - DNA, 120 bp, Artificial Sequence
  ENSG00000230090_0 (sequence is synthesized)
tgtttctttattgagtccctactacctctacggatattctgggggcaattaaagaaaatcaccgcttcataggcagcacatatttcccatagaaatgtggaatgtaagaaaggcacataa

SEQ ID NO: 991751 - DNA, 120 bp, Artificial Sequence
  ENSG00000230090_1 (sequence is synthesized)
aatccaagttgcctgcagatatccacagcctacttcagtctcagtaatgctcttttaacctggctatatggagagttgacagaaaatacaggatcatcaatcaatgatacagtaaataca

SEQ ID NO: 991752 - DNA, 120 bp, Artificial Sequence
  ENSG00000230090_2 (sequence is synthesized)
aatgctcttttaacctggtgcatcagtttaagggaagacatgagatcatgggtttaagtgaggcttcatcatgccaagacaacgtgatcagttattcccaacctatataactcacataca

SEQ ID NO: 991753 - DNA, 120 bp, Artificial Sequence
  ENSG00000230090_3 (sequence is synthesized)
ctggaggaaatatcttcatggaattaaaaccacatggagtaacatttcacgtaagcagaattcaggaatgatttcagtaattccatcccaaacacacacaggcaaagggagtgaagattt

SEQ ID NO: 991754 - DNA, 120 bp, Artificial Sequence
  ENSG00000230090_4 (sequence is synthesized)
cgtcaaggagttgaatgtatatgtaattggagtgccagaagaagagaactgagagagaggggcagaacagctcatgagggggaaaacccactacatacaaacaagaatactgcagactcc

SEQ ID NO: 991755 - DNA, 120 bp, Artificial Sequence
  ENSG00000230090_5 (sequence is synthesized)
tcatcagaatctatgctacctgtaaaggcttgtaaaagcacagagctgctctcaccatgcagccaaagaagaaatgaggatatcggtcctataactgcaaggaactgaatgctgccaacc

SEQ ID NO: 991756 - DNA, 120 bp, Artificial Sequence
  ENSG00000230090_6 (sequence is synthesized)
acctgaacggacttgggctactgagaagaagctattctagcaaagctggaggaattccaccagactgacagaacaacacaaataagtccatgcctgacgcacagcaggggctcaaggcaa

SEQ ID NO: 991757 - DNA, 120 bp, Artificial Sequence
  ENSG00000230090_7 (sequence is synthesized)
gtttgtggactcgaagccctgttagaatggatggaatttggtcttatgaagcagatagaagaacaggagcttgactgtaaagatttgtctccacctcttaataaagcatatcatctccaa

SEQ ID NO: 991758 - DNA, 120 bp, Artificial Sequence
  ENSG00000230091_0 (sequence is synthesized)
attgtgcttgcacgacttcccccggcccgcggcctgtgagcccaggtcctggggtgaaccgagcgctcgctcgttcgtcagaccgtagcgctccagcggctgtccttactgtgtagtagc

SEQ ID NO: 991759 - DNA, 120 bp, Artificial Sequence
  ENSG00000230091_1 (sequence is synthesized)
caaagctgagggtgatgactgtgaaccagaacagactgcctcgctgaaaagtcacttggaactcttctgtggcatctgaagcagatggacgaagccaagagggccgagagtatctcagca

SEQ ID NO: 991760 - DNA, 120 bp, Artificial Sequence
  ENSG00000230091_2 (sequence is synthesized)
cctagaaatggacaaggctggttattagaacaaagatttcgcaggtggtgagtctcaaaggcgaagctgaatgatttgatatttcatgaaattcagaaataatttggagcttttcaaacc

SEQ ID NO: 991761 - DNA, 120 bp, Artificial Sequence
  ENSG00000230091_3 (sequence is synthesized)
tgggatatggaagaaactgacactcctgttctctgggaagaggcaagaatctgcatcaaagagccctggaagcaatcatggctcaactgtgatgcctttagaacatgaagtcctccaaga

SEQ ID NO: 991762 - DNA, 120 bp, Artificial Sequence
  ENSG00000230091_4 (sequence is synthesized)
agatgccataggaatggcctccatcccagggcctggagagcagccagagacaagaagagtagcccaggagggcactggcagtcagtgctacactgtggcctgtcagtctcagagccagga

SEQ ID NO: 991763 - DNA, 120 bp, Artificial Sequence
  ENSG00000230091_5 (sequence is synthesized)
tttaatcactggatctcccattaaccagtcataatgaagtaagaacaagaagatggggaagaggaagtgtaaaaccgtggcttaaatttgccaaggataagctgagtgtacttcagcagt

SEQ ID NO: 991764 - DNA, 120 bp, Artificial Sequence
  ENSG00000230091_6 (sequence is synthesized)
catttgcacagaatccttatcctaattttacaaccagggaaaaactggctggacagtctcttgtcctgtgtttgtaattgataactggtttcaaaataaaagccagaccaccacttagag

SEQ ID NO: 991765 - DNA, 120 bp, Artificial Sequence
  ENSG00000230091_7 (sequence is synthesized)
agagacacagaatgttcactgccagggaactgcatgattcctctgccaaaggccacccatttacaagaatccaggaaaaccaggtggaatctcccaatgatgaccctgagcagaacttct

SEQ ID NO: 991766 - DNA, 120 bp, Artificial Sequence
  ENSG00000230091_8 (sequence is synthesized)
tgtacccaggaagttctactgggtggagctggccactcttccgtggagacacaggggactcccaattaacatgatggctcaaataactgtagccttatggattaaaaggaaactaagctg

SEQ ID NO: 991767 - DNA, 120 bp, Artificial Sequence
  ENSG00000230091_9 (sequence is synthesized)
tgatttggagtatccaggtgatacagaaaatggcccttgtcgatgtagatcagcattatttccttatccttctgcatctcctcctcagtattctgaaagggacaagcctgagatggggga

SEQ ID NO: 991768 - DNA, 120 bp, Artificial Sequence
  ENSG00000230091_10 (sequence is synthesized)
aagccagcatgcaaggccctcccctttgtgctgtgttcatggtgtgcacggagagaggcagcagcaggaggaacagaaaggttattttctttactgactctttcaaggacatcagcagaa

SEQ ID NO: 991769 - DNA, 120 bp, Artificial Sequence
  ENSG00000230091_11 (sequence is synthesized)
tggttgggaatgtcatcatgagcagcctcagcctcagaattaccaggagaagctggtcttccaggatcaggttctaatgtatatgagtcacaggatttagggaagcaggcactttccctt

SEQ ID NO: 991770 - DNA, 120 bp, Artificial Sequence
  ENSG00000230091_12 (sequence is synthesized)
cagtcccagcagcatggttgatgttcccaagtaatggagagtccctgtgctctcagttgtggcacacacctttgcaaatagtgatcagatctccacaaacgcctcttgggtaagatatgc

SEQ ID NO: 991771 - DNA, 120 bp, Artificial Sequence
  ENSG00000230091_13 (sequence is synthesized)
gcaacatagctggctgcagagcaacccagttcccaaatccagcagctcttggatgagaagtctgcaagtgtttactgctgggaccaggactgtgtttctaggaaatggtgctaggcttca

SEQ ID NO: 991772 - DNA, 120 bp, Artificial Sequence
  ENSG00000230091_14 (sequence is synthesized)
gagagcatcatccacaggtcatcccacaaccatccacacagaagcctgaggaaaagggctctgcagagcttgcacataaagatgctgaactcaggaaggctctgtgagctgctggtctct

SEQ ID NO: 991773 - DNA, 120 bp, Artificial Sequence
  ENSG00000230091_15 (sequence is synthesized)
tctggtagggcagcagtgtcctgagaaggtggagctagagtatggagaacaaaactaacaagcaccaaggcagcaagcaaggcaacccccaaatgacagcagttgccaaatccaaagcaa

SEQ ID NO: 991774 - DNA, 120 bp, Artificial Sequence
  ENSG00000230091_16 (sequence is synthesized)
tctgtgcttcagaagacagaggctctgcacagtccctgtctcagacattgtctcctccttagaagatacctaacaacagcactgtgggaggctgaggtgggtggatcaccaggtcaggag

SEQ ID NO: 991775 - DNA, 120 bp, Artificial Sequence
  ENSG00000230091_17 (sequence is synthesized)
atcaagaccatccttgatctttagtagagacggtgaaacactgtctctactaaaaaatacaaaaaaaaattagctagccgtggcggcgggcacctgtagtctcaactatttgggaggctg

SEQ ID NO: 991776 - DNA, 120 bp, Artificial Sequence
  ENSG00000230091_18 (sequence is synthesized)
aaaaaagatacctaacaagcagtacaagaatatgaaggaccccactgcccagactttgtatggaggggtgtctaaggtggctacagcaaagctgtcatctccatcgaccgggacagcatc

SEQ ID NO: 991777 - DNA, 120 bp, Artificial Sequence
  ENSG00000230091_19 (sequence is synthesized)
tccagccatgatgtgtggcctgctggaacagcagccatgtgtcctttcacagacagcccaccaaagctctgactgtgaaggacatcccaacatcagcctagcctgcatacacttaaggca

SEQ ID NO: 991778 - DNA, 120 bp, Artificial Sequence
  ENSG00000230091_20 (sequence is synthesized)
tagaatcacctgaggcttctccgttgaagacagggactcccgatggagttgcagccccagctttgcactgtaaagagccccagggggcttctgtgctagagcaggtgtgcagacccctcc

SEQ ID NO: 991779 - DNA, 120 bp, Artificial Sequence
  ENSG00000230091_21 (sequence is synthesized)
tcacccccttcactgagagctgctgcctggaaccagtgttttgactgagtcacctctggacgtgggcccacaagatctgagagtgcccagacgagaagttgaatgccttgtgttgacctg

SEQ ID NO: 991780 - DNA, 120 bp, Artificial Sequence
  ENSG00000230091_22 (sequence is synthesized)
agtgtttggaaaaaagccccaaactttgaaacaattttcataattttgagcttcaggatgtggaatcacttctcaagtattctggagttctgtccatcagagcgggtcctgccaatgctg

SEQ ID NO: 991781 - DNA, 120 bp, Artificial Sequence
  ENSG00000230091_23 (sequence is synthesized)
ccctgtgcagcgcttcaggctgcatccctcccactagggggcgcctttcacatagtggcgcctgccttctagaggagcaacatttcctgaactgcagggttccctcggggctttgtgtaa

SEQ ID NO: 991782 - DNA, 120 bp, Artificial Sequence
  ENSG00000230091_24 (sequence is synthesized)
aacacatccactgcatagaatttgtgttatttccattttgttttcttgacaatatttaattaattacaaaatgatgtatgttatgatagtttaagcaatacagagagtaaccaaacaaaa

SEQ ID NO: 991783 - DNA, 120 bp, Artificial Sequence
  ENSG00000230096_0 (sequence is synthesized)
gagacattcatgagggatctgaccccatgacctaaacacctcccaccaggccccacactggggatggcatttcaacgtgagatttgaaggggacaaacatagaagccacgattggcacta

SEQ ID NO: 991784 - DNA, 120 bp, Artificial Sequence
  ENSG00000230096_1 (sequence is synthesized)
caattacctttattttatgaaagagaaactgagtcttagagatgaagaactttcaaggaccagccacgtagaagactgtggcacagggaaagaaagcagaaacttccattctaccaccca

SEQ ID NO: 991785 - DNA, 120 bp, Artificial Sequence
  ENSG00000230096_2 (sequence is synthesized)
tgttttctgttgtgtttttgaatgctgacccggggttggcctccaggtgcagtgttgaggaaaccatgtactggtacatggcagctgaagttatgcatttttgcttctttgcaatttctg

SEQ ID NO: 991786 - DNA, 120 bp, Artificial Sequence
  ENSG00000230096_3 (sequence is synthesized)
catttccaggcaagagacaatgctgatgctacagcactggagcttagaattcacacttcattgataacatgcataactttttgaaatatcttctaagtaaacactttttaaaatattggg

SEQ ID NO: 991787 - DNA, 120 bp, Artificial Sequence
  ENSG00000230096_4 (sequence is synthesized)
gtagaaaactatatgcagctaggcatggtggctcacacctgtaacctaaacactttgagaggccaaggcgggaggattgcttgagactaggagttcaagaccagcttggggcaacatggt

SEQ ID NO: 991788 - DNA, 120 bp, Artificial Sequence
  ENSG00000230098_0 (sequence is synthesized)
gccaaccccaccggacggccaaccccaccgggcgtcaaccccaccgggcggccaaccccacctggctaggacccagtccccggctgctcaggaccgaggctgagacgggcgaccaggacg

SEQ ID NO: 991789 - DNA, 120 bp, Artificial Sequence
  ENSG00000230098_1 (sequence is synthesized)
catgtttcactaggatgcctacagaaaagtatacagaagatctggaaaaagtttttgaaatgttgaaaacttagctacttttaaaatgaaaaaaatagctttataattatcaaagcaata

SEQ ID NO: 991790 - DNA, 120 bp, Artificial Sequence
  ENSG00000230098_2 (sequence is synthesized)
atcaaagcaatatatcccagtgtaaattttaaaataatttgctacattatagtaagcatcttatctctatgtgccctataacattatgttgtatagtttaaatatatacaataaaattta

SEQ ID NO: 991791 - DNA, 120 bp, Artificial Sequence
  ENSG00000230542_0 (sequence is synthesized)
gtctgtaacaattttaaaataaaagccagcatattggtgggaaaaaaaacaaaaatccaacaacaacaaaaataaaacacaacaaggcatatacttccaatatttccactgtataaaccc

SEQ ID NO: 991792 - DNA, 120 bp, Artificial Sequence
  ENSG00000230542_1 (sequence is synthesized)
aatccatggattatgcaaaagagataagtctcttggaaatgacagtcatttggtgacaataacaaatcagcaacagaggagactttaacgagttactcactgtttcctccctcaccaaag

SEQ ID NO: 991793 - DNA, 120 bp, Artificial Sequence
  ENSG00000230542_2 (sequence is synthesized)
gcatctgctaagtcaaagtctgcccctaaaggaaggaatcggtctgttcatagtaaagctctgagaaatgaggaaggaatgacctcggaaacagatggagaaatcaccagagacccacat

SEQ ID NO: 991794 - DNA, 120 bp, Artificial Sequence
  ENSG00000230542_3 (sequence is synthesized)
gactaaagacttttctgaatatcacactgactaggatctcatttgaaaaagtaaattcctgatcattttcacatcattcttcccccagatgaaaagagtaagagatgacagcaagagaaa

SEQ ID NO: 991795 - DNA, 120 bp, Artificial Sequence
  ENSG00000230542_4 (sequence is synthesized)
gagggagagagaaagaatgtcatttgtaaatcaactgtgctgcctggacccagttgggactctgaatctgcctgcacacaactctgtcccgttgattccccattatctcctcccaggtcc

SEQ ID NO: 991796 - DNA, 120 bp, Artificial Sequence
  ENSG00000230542_5 (sequence is synthesized)
gaccgtaagagaaataaacagaaaaatagtggacatgaaaatggattcagagtaacaaaaacaaggaaaaaacactttagaaacccattgacagaatcaacaagaggaagagacaaatcg

SEQ ID NO: 991797 - DNA, 68 bp, Artificial Sequence
  ENSG00000230542_6 (sequence is synthesized)
aaacccattgacagaatcaacaagaggaagagacaaatcgaatctcaaagaaaaagctcagggcggat

SEQ ID NO: 991798 - DNA, 75 bp, Artificial Sequence
  ENSG00000230542_7 (sequence is synthesized)
agatgaatttgccgggcatggtggtgcatgtttgtaatcctagctaattgggaggctgaggcacgagaattgctt

SEQ ID NO: 991799 - DNA, 120 bp, Artificial Sequence
  ENSG00000230542_8 (sequence is synthesized)
cactgcactccagcccgggcgacagagagagactctgtctccaaaataaaaaaaggaaagaaaataaaagaaaaaactcaacattgaaaacgtgttaccattccttcaatcaacctatgg

SEQ ID NO: 991800 - DNA, 120 bp, Artificial Sequence
  ENSG00000230542_9 (sequence is synthesized)
ttccttcaatcaacctatggtgataaacaattcaaatgaaattaaaaagaaggttttacttctctgaagagaagggacaatagcaaaatgattctcaatttaaaaggaaaaaaagttaca

SEQ ID NO: 991801 - DNA, 120 bp, Artificial Sequence
  ENSG00000230542_10 (sequence is synthesized)
aaaagcaggatatccacacaaacataagacaccataaaaaaataaacataccacttgtaaaacattcctgttaaaaatattcaaaggcaaaaataaagtgcaaaaccattttcataataa

SEQ ID NO: 991802 - DNA, 120 bp, Artificial Sequence
  ENSG00000204528_0 (sequence is synthesized)
caacccactctctgtgctatgacttcattactctttcccagcccagccctgggcaagccccttacgaagtctcaggctacctggatgaccaccctttcttatgatgctgcaaggagggca

SEQ ID NO: 991803 - DNA, 120 bp, Artificial Sequence
  ENSG00000204528_1 (sequence is synthesized)
ggtgggcagagccccgtgcatcctgggctcaggccagggacccaagagcttgggagaagctggttctcagactgaaggccagagcccagcaccttgtcaccatcccggggagcatcatgg

SEQ ID NO: 991804 - DNA, 120 bp, Artificial Sequence
  ENSG00000204528_2 (sequence is synthesized)
ctattggtcccaactgagttttttcagctggtttttcaaccaaacagcacctcatctcccagtgaggggaagggaaggctgggctgagagcagcaaggctgctcatctcacctctcccca

SEQ ID NO: 991805 - DNA, 120 bp, Artificial Sequence
  ENSG00000204528_3 (sequence is synthesized)
cccagccatgccagccgcctcacctggtggggagaggtgggcctcacctgggtcccctggcagtgctctgtgaagggtcttgacattgcactgtaataataaaggtgtgtgtgaagtatc

SEQ ID NO: 991806 - DNA, 84 bp, Artificial Sequence
  ENSG00000248762_0 (sequence is synthesized)
atccgcccgcaaaccgcgcccggcccccttcagagatggggccttgctgtgttgtccaggctggactcaaactcctgggcccaa

SEQ ID NO: 991807 - DNA, 120 bp, Artificial Sequence
  ENSG00000248762_1 (sequence is synthesized)
cgcccggcccccttcagagatggggccttgctgtgttgtccaggctggactcaaactcctgggcccaagcatttctcacacctcagtttgtggagtagctgggattacaggcatgtgtca

SEQ ID NO: 991808 - DNA, 120 bp, Artificial Sequence
  ENSG00000248762_2 (sequence is synthesized)
ctgattcccactgtgatggttttgggtaaggcctgtgggagatgattaggttgtgagggcggagcacccatgaatcggattagtgctcttaaaacagtccgaagagaccagcattcttac

SEQ ID NO: 991809 - DNA, 120 bp, Artificial Sequence
  ENSG00000248762_3 (sequence is synthesized)
cagactccagaactgagagggacaattttttattctttataagtcacttagtctatggtattttgttatagcaacctcaatggactaagacaaatgagtacgaaaagtgttaagcacatg

SEQ ID NO: 991810 - DNA, 120 bp, Artificial Sequence
  ENSG00000248762_4 (sequence is synthesized)
aatactcttaatccagcaattctaattctaggagattataaaagcagacaaaggtattgctatgggaatgttcattgtagcatcatgctagtaccaaacttggcccaacaataggaaatt

SEQ ID NO: 991811 - DNA, 120 bp, Artificial Sequence
  ENSG00000248762_5 (sequence is synthesized)
gaatcataaataccccacatttatttgttaaatactttgaaactattaaaaatatgtggtaaaatattatttaataccatggggaagtattcacaatacatgattgacttaaaaaattgt

SEQ ID NO: 991812 - DNA, 120 bp, Artificial Sequence
  ENSG00000248762_6 (sequence is synthesized)
aagacacaatgtaccgtaatagttccttttgaaaagaatgtactatcttttcaatggccactgtctcttgaactgttggccttttcacacctgaatagtaataaaacccacatttaaaaa

SEQ ID NO: 991813 - DNA, 120 bp, Artificial Sequence
  ENSG00000248764_0 (sequence is synthesized)
cattgggagtagagagtggtggagagaaagagagaaggtcagagaggtcagtaaagtccagaccatgcacagcttcaggtcaggtgaagaatgggaagctattggcagattttaagcagg

SEQ ID NO: 991814 - DNA, 120 bp, Artificial Sequence
  ENSG00000248764_1 (sequence is synthesized)
ggaatgtcatgatctaatgttttcaaaagaccactctagcaggagtgtggtggagtgagagtgggtgtgggaagagcagttatatgaccatttaagcgatcttagcagacatgatggcag

SEQ ID NO: 991815 - DNA, 120 bp, Artificial Sequence
  ENSG00000248764_2 (sequence is synthesized)
gttgtagctgatcgggcatactgatggattagaggggggtagcagtaagcaaggggtctttgaagagttcacccaggagcttcaaaatgaggaacagtgcttgcaatttccttgaatact

SEQ ID NO: 991816 - DNA, 120 bp, Artificial Sequence
  ENSG00000248764_3 (sequence is synthesized)
aagaacatccagctatttgtagacagataaaagagagcagcccccagaggtgctgatccagccaagatagctcatccagttctcaacaggactaaaggacttatcctatgcctagttttt

SEQ ID NO: 991817 - DNA, 120 bp, Artificial Sequence
  ENSG00000249490_0 (sequence is synthesized)
acaggaaaaagccgcccgtatgattcaattaccttccaccaggtgcctcccactgtaacacttgctgtctagggctttggaggtcattggtactccccgctagatgcttccgtggggctc

SEQ ID NO: 991818 - DNA, 120 bp, Artificial Sequence
  ENSG00000249490_1 (sequence is synthesized)
acagagttttgttccagctgacacccaaaagcgctcacctgcgtgccccttcccgggaagggttgagcgcccacaggttccagtgagtggagtttgcccctgccaatgctgaagcagctg

SEQ ID NO: 991819 - DNA, 120 bp, Artificial Sequence
  ENSG00000249490_2 (sequence is synthesized)
gctagctccagtgcctgcactgcagttcccacccaccaaggggtcaggggaatttcctgcttcagtatattcctcaagtctgagatttacttacttttataagtgcctaatttgtaagac

SEQ ID NO: 991820 - DNA, 120 bp, Artificial Sequence
  ENSG00000249490_3 (sequence is synthesized)
aaagctctctttcaacaaagcatcagcattctccgagttgatagatggcttacctaagtctgtcttttttttttaatttttattttactgctttgaacttgagtgttcatattacctcct

SEQ ID NO: 991821 - DNA, 120 bp, Artificial Sequence
  ENSG00000249490_4 (sequence is synthesized)
caacactcataattatttataattgccatttttacagtactgctcaagtactacactatttttatagcccagtatggacccttagatctttactccaaccaaattcacaacatgtggggg

SEQ ID NO: 991822 - DNA, 120 bp, Artificial Sequence
  ENSG00000249490_5 (sequence is synthesized)
gtcttagaacttcggatgttttattacgctaagagttctcactccttcacttatcaccataaatagccagaggacaattctgtactggaaacccattatgagaatctgccttctaggaat

SEQ ID NO: 991823 - DNA, 120 bp, Artificial Sequence
  ENSG00000249490_6 (sequence is synthesized)
attcaagtatcagtggtttattggaaggtgatatggatggtgacattgcaatgatctttcctcttgcttacttcaatgaacttgaaaatatggttgcattttaaaaggcctgtgctacct

SEQ ID NO: 991824 - DNA, 120 bp, Artificial Sequence
  ENSG00000249490_7 (sequence is synthesized)
ttatgagctgtagcactcactgcagaggtctgcggcttcactcctgaagtcaagtcggggagaccatgaaaccaccggaaggaagaaaccccggacacatctgaacatgtgaaggaacaa

SEQ ID NO: 991825 - DNA, 82 bp, Artificial Sequence
  ENSG00000249490_8 (sequence is synthesized)
gagaacccactggaaggaaccaattccagacacattatcactaattaaacctatgtctgtaccttctagcattatatataaa

SEQ ID NO: 991826 - DNA, 120 bp, Artificial Sequence
  ENSG00000249490_9 (sequence is synthesized)
aattaaacctatgtctgtaccttctagcattatatataaaaagtgcaacatagaaaacaaaatttaaatccacaactatttaatattcacaacttctggatttatctcatgttgcaaact

SEQ ID NO: 991827 - DNA, 120 bp, Artificial Sequence
  ENSG00000249490_10 (sequence is synthesized)
atttttgttaccctattctttgagaaatataaaacatcagtatttcattggtgaaatgttctttatagtagtttaaataataattgcatacaatcacgtgctatatgtatactctcctgc

SEQ ID NO: 991828 - DNA, 120 bp, Artificial Sequence
  ENSG00000249490_11 (sequence is synthesized)
aataaagaatggcatgagcataattacaagaattaatgaccttgcattagtgtagctgtaaatcaagcaaaatctgcaaattattttaattgcagcatccagttaaaatattttggtcaa

SEQ ID NO: 991829 - DNA, 120 bp, Artificial Sequence
  ENSG00000249490_12 (sequence is synthesized)
tgagcctttacaaattgtattaaaatgcgtaaaaataattttgctgtgctatatattatgctaacacacatttatgatgggagactttcaaatacaatctttcctttttttctaatagaa

SEQ ID NO: 991830 - DNA, 120 bp, Artificial Sequence
  ENSG00000249490_13 (sequence is synthesized)
tcaagtttggtaggtcagaagtcccagtgtgctcagctggccctctccttcaggttcaagactaaaccaaactattggctgtgcttcatacctttctggaggccctgaggaggaatgtgc

SEQ ID NO: 991831 - DNA, 120 bp, Artificial Sequence
  ENSG00000249490_14 (sequence is synthesized)
ttccaagcctattcaagtttgtgtccacttgaatttatttgtggttctaagactgaggtgtctgttttcttgctggctgtcagttagcgtggaggtgggggtacccctaagtcctagagg

SEQ ID NO: 991832 - DNA, 120 bp, Artificial Sequence
  ENSG00000249490_15 (sequence is synthesized)
cttccactgttctttctctcagcctgtataactgcttgcattttttcccattgttgctgcaacaaacatcacaaatgtaatggtttaaaaaatatacatattattttacagttgtcttgg

SEQ ID NO: 991833 - DNA, 120 bp, Artificial Sequence
  ENSG00000249490_16 (sequence is synthesized)
ttaagagtccaacatggatattactggcctaaagtcaacatgttggcctggctgccatttcctctagcagctcccaaagagcatccatttccctgtcttttccatctttttgaacccacc

SEQ ID NO: 991834 - DNA, 120 bp, Artificial Sequence
  ENSG00000249490_17 (sequence is synthesized)
tgcaatccttggctcatgctctccttcctccatctttgaaagccaacagtgagtgtcaggaggagtcctgcccacatcacattactcctaccttctctcctgcctccctctttcactttt

SEQ ID NO: 991835 - DNA, 120 bp, Artificial Sequence
  ENSG00000249490_18 (sequence is synthesized)
aaggatcctgtgatggcactggtcccactgagataatccaggataaacctattttgaagtcagctgattagcaacctaatatgatctgtaatcttattcccctaaagtaacctaacattc

SEQ ID NO: 991836 - DNA, 120 bp, Artificial Sequence
  ENSG00000249490_19 (sequence is synthesized)
acaaattctaggagattaggattatgggcgatttggggagaccattattcagcccaccacagtctctattcagtccattcttttattatttgtatgtaatgaataaatgacaacctagca

SEQ ID NO: 991837 - DNA, 120 bp, Artificial Sequence
  ENSG00000249490_20 (sequence is synthesized)
agacgaagcaggagcaaagaacgtttacatggcggcaggcgagagcttgtacagggaaaactacgctttataaaaccgtcagatctcgtgatacttactcactatcacgagaacagcaca

SEQ ID NO: 991838 - DNA, 120 bp, Artificial Sequence
  ENSG00000249491_0 (sequence is synthesized)
agaagataagcatgtagagaagacaggatgagtgtgagctgttgaatggcgatttggtttttttctgaagcagttactatttgcctttttaagggaaagagtcccagaagttttcagccc

SEQ ID NO: 991839 - DNA, 120 bp, Artificial Sequence
  ENSG00000249491_1 (sequence is synthesized)
gtgtcatagctgtacaggaggacaccatctcctgagtctggccgaaatgtgatctcaaattccatgaaggaaagtgtcgacctttaaacccaaggggacagaggcaaatgtaggagtcgg

SEQ ID NO: 991840 - DNA, 120 bp, Artificial Sequence
  ENSG00000249492_0 (sequence is synthesized)
ggcctcagaccgcagcgtcggccgagaggacgccgggatactggccagctccaagtcgaaaggaagcgacgcatgagttgtttggtgcgaattttaaacggaagaacgcagaagaattct

SEQ ID NO: 991841 - DNA, 120 bp, Artificial Sequence
  ENSG00000249492_1 (sequence is synthesized)
ctttatgttacctttatttagcaacaaatcaacttgactcaactgatacttactgagtgcctttaaaggtaagtgaataaaagtctaccccttgtaaatccacttcaaggaatttgtaat

SEQ ID NO: 991842 - DNA, 120 bp, Artificial Sequence
  ENSG00000249492_2 (sequence is synthesized)
caaatattgatgtttgaggataatgggccttcctgttacttcttagtactaacctagcttacactctactttcctccctaaagtttacgcaaactttacaaacctattaaaatcccattc

SEQ ID NO: 991843 - DNA, 120 bp, Artificial Sequence
  ENSG00000249492_3 (sequence is synthesized)
cttctgtgaaagaactgctctctccttccttgaattcctatagcatattaattaatcacatacttatttgtaatatcttctcttgaactatttaacttcctgctcttcctacctagattg

SEQ ID NO: 991844 - DNA, 120 bp, Artificial Sequence
  ENSG00000249492_4 (sequence is synthesized)
tttctctcagaagaaaggattttttacttttctgtacttgtgcatatattaagacctcatttatatggaactctttgggaatggatggtatgggagatccaagtttttaaatagttgaat

SEQ ID NO: 991845 - DNA, 120 bp, Artificial Sequence
  ENSG00000249492_5 (sequence is synthesized)
tacgtgtcaaaacaactattttttattaaattctttctggaatagactacctacttatttcattgtttttttaagcacagagggttaacatgatgaacattagctcttataccatgttct

SEQ ID NO: 991846 - DNA, 120 bp, Artificial Sequence
  ENSG00000249492_6 (sequence is synthesized)
atagaaagatagtgggacaactggtatggagtagagggctaatatatacgtctccagcagaacccctaagtgtgtgttctttatcctttttcttatcaagttagaatgaaatatgagcaa

SEQ ID NO: 991847 - DNA, 120 bp, Artificial Sequence
  ENSG00000249492_7 (sequence is synthesized)
tggcatacaactacaaactgtaacttgactagctctctgcaaaattaatgaagacattagtctaaaatattcaagtcaccagaaaaatcttcacagttcgtagtaggttgtgtgacttgt

SEQ ID NO: 991848 - DNA, 120 bp, Artificial Sequence
  ENSG00000249492_8 (sequence is synthesized)
ctgctttattggctttactacaacagatcacatgcacctccctgtcagcttgtactctttcccttgtactccagcctatggatggagaatgaaaagaaatatttcataattttaaacacc

SEQ ID NO: 991849 - DNA, 120 bp, Artificial Sequence
  ENSG00000249492_9 (sequence is synthesized)
tgtggcaaagaacttggatacaacttaccccaacaaccagctgattgttcattattgcaaaatatctttttttttttaaacccaacgcatttttctggatgtaagaaacaatacaacctt

SEQ ID NO: 991850 - DNA, 120 bp, Artificial Sequence
  ENSG00000249492_10 (sequence is synthesized)
tattgttattgctctcataatgaacgaactttttatgaaacgtactatttgttgactaaaaagttgaattaataagctaataatggagggtgtggcggaaaaaaaatactagaatacaac

SEQ ID NO: 991851 - DNA, 120 bp, Artificial Sequence
  ENSG00000249492_11 (sequence is synthesized)
aatcttgtttcttccttcaacctaccctctttgataagaaaaaccgaagtggagatacctaaggctttatagggggaatggagctactcctcaatttctttatcttgcctctgctgttcc

SEQ ID NO: 991852 - DNA, 120 bp, Artificial Sequence
  ENSG00000249492_12 (sequence is synthesized)
tagttgctttcacctttagctactatcaccaatctctacttgcagtttttagtgtgtattgacagcctcttctcagctttcaaataaaaaggctgatgatattttacaaactgccagcta

SEQ ID NO: 991853 - DNA, 120 bp, Artificial Sequence
  ENSG00000249492_13 (sequence is synthesized)
agcaatggtgaagtgatggttttatagacaagtacaattttccttccatcacaattgttttttgctagttactttagcaacttttctgcttccaaacaggctacagctaaaggatgaggg

SEQ ID NO: 991854 - DNA, 120 bp, Artificial Sequence
  ENSG00000249492_14 (sequence is synthesized)
atctgcaaagctggatccttaagctacctgagatattcaaataacgcttactgatatgatttgatttgttctaagaaagggcttaggaaaaggtaacaaaaattggcttaatgtttacat

SEQ ID NO: 991855 - DNA, 120 bp, Artificial Sequence
  ENSG00000249492_15 (sequence is synthesized)
tttgtttcactacactatgttaggtcacctcacaaaacttacttaaaaagcttcccaaattgttcctggtatccctgtcttcccatatattcaggttagactctcagtgacactaatctt

SEQ ID NO: 991856 - DNA, 120 bp, Artificial Sequence
  ENSG00000249492_16 (sequence is synthesized)
ctaatgacctttcttcctatcatttttccatttaggactttctaattccatcaggtctgaactcctatttattataagatccattcctagccctcaaaactcatactatatactaataga

SEQ ID NO: 991857 - DNA, 120 bp, Artificial Sequence
  ENSG00000249492_17 (sequence is synthesized)
tagcatatgttccataaaaactatcttctatctccacaggctaaaatatcctttttacttctgcccttatttcctccctaaaatgtcttatattttcacagaaagttcccttgaagccca

SEQ ID NO: 991858 - DNA, 120 bp, Artificial Sequence
  ENSG00000249492_18 (sequence is synthesized)
gttctagtaccctgcacactgaaaagcacacaggagggactaaaatacttgctttatttgatctgccagttaatttgggagaagtaactaatatgacagaaattatttaaaaatcaatgt

SEQ ID NO: 991859 - DNA, 120 bp, Artificial Sequence
  ENSG00000249492_19 (sequence is synthesized)
tttctgaaagcttatgttattaaaccttttatttccttcaacattactaaaaatttaagaatcccctttaaatttttccataaagttttcaggatgaatttgtcacataaaaagagccac

SEQ ID NO: 991860 - DNA, 120 bp, Artificial Sequence
  ENSG00000249492_20 (sequence is synthesized)
tcattttcatgttaagttttcaatgcaaggttttcttacctttaggtaaaatagaatatgatgaaatgtaataaattagatgtctgattagaaattattttcaagcttaagctatcaaaa

SEQ ID NO: 991861 - DNA, 120 bp, Artificial Sequence
  ENSG00000249492_21 (sequence is synthesized)
atactttaggagttaaacatattcaaaactaagaaagtttttttggggaaaaaagtctcagtttaccatttgacattttaattttttttaaagtattagctcttctaaacagatttaagt

SEQ ID NO: 991862 - DNA, 120 bp, Artificial Sequence
  ENSG00000249492_22 (sequence is synthesized)
ttaaaagaaaaataccaattttcttggagaacagaagatgacgaatgagtgggcatctctctgggactagtctgggtcagtctcctgcaccatgatgttactgttgtcacatatctaaag

SEQ ID NO: 991863 - DNA, 120 bp, Artificial Sequence
  ENSG00000249492_23 (sequence is synthesized)
gtcagagtgagaggagaaaagtgtctttttagtttagttttgtcaaacctgaggattcgtttttcagtttagccggagctgtgccgcaaacgtagctgccgacatccccacgacgcaccc

SEQ ID NO: 991864 - DNA, 120 bp, Artificial Sequence
  ENSG00000249492_24 (sequence is synthesized)
aagtggtggcccggaagctggggatagaaaagtggcctccccgaatgccaggcacacaggccttactaccagaagcttgagctgggagcctcggccgtcgcatctctaagaattttaaac

SEQ ID NO: 991865 - DNA, 120 bp, Artificial Sequence
  ENSG00000249492_25 (sequence is synthesized)
aagaacgcagaagaattctctttatgttacctttatttagcaacaaatcaacttgactcaactgatacttactgagtgcctttaaaggatgtgctgaaacaggtggtgacttttcaaata

SEQ ID NO: 991866 - DNA, 120 bp, Artificial Sequence
  ENSG00000249492_26 (sequence is synthesized)
aaaattcagagccacagggagaaagttgcaatgtggaaccatcaacatattgtacttgtactgaatcatcttcataaagtatcattcgcagttcagctgccattacaacggcaggataag

SEQ ID NO: 991867 - DNA, 120 bp, Artificial Sequence
  ENSG00000249494_0 (sequence is synthesized)
gagattcctgtgccaacatcatactgttctagaattactggatctcttatgctagggctgctggtcaaacctgagttcctgaaacctttaaccctactcagccaatacaaccgataacat

SEQ ID NO: 991868 - DNA, 120 bp, Artificial Sequence
  ENSG00000249494_1 (sequence is synthesized)
tcctgaagagacagagtcttgttctgtcgtgcatgctggcgtacagtgccacaatcacagctcaccgcagcttccaacttctggactcacatgatccttctgcctcagacttccaagtac

SEQ ID NO: 991869 - DNA, 120 bp, Artificial Sequence
  ENSG00000249494_2 (sequence is synthesized)
ttgggactacagtcacgaatcaccacagccagcttggagtgactttctaagggattccatccaagttaccacattatatttgttaatcacgtgttctttggcttctcttgtttgtgacag

SEQ ID NO: 991870 - DNA, 120 bp, Artificial Sequence
  ENSG00000249494_3 (sequence is synthesized)
ggagtgaagaattatgatgcccctccttgagaatggagtacttacataaattacttgggactcttctgcataggagggtcttgctcaggctggagtacactggtgcaatcatggctccct

SEQ ID NO: 991871 - DNA, 120 bp, Artificial Sequence
  ENSG00000249494_4 (sequence is synthesized)
cactatgtttcccaggctggtcttgaacgcctgggctcaaacaattcccctaccttggtttcccaaagtgctggcatgagccactgtgcccagactcattatttattaaactattttgtg

SEQ ID NO: 991872 - DNA, 120 bp, Artificial Sequence
  ENSG00000249494_5 (sequence is synthesized)
gcttggagtgactttctaagggatattgaagccatccattgctttgtcttccaagttcatcagtgcctgcacaacatggtaacaacaaagtcaaagacattccagacactcttccggaaa

SEQ ID NO: 991873 - DNA, 120 bp, Artificial Sequence
  ENSG00000249494_6 (sequence is synthesized)
aaggaaaagctaggatagccacataagaaggatctccaggatgaaaataaacaagataaaccaagttgccacctccaagctcagcttcaatagccacagttaggtatttgtggattccag

SEQ ID NO: 991874 - DNA, 120 bp, Artificial Sequence
  ENSG00000249494_7 (sequence is synthesized)
caattctatttcaaccatcaatacgatcatattcaaaaagatgaggaagatgacgaagtttgtgaagagaggacactcaaggacccatccggcccacaaagaaagaggtggcctctgagt

SEQ ID NO: 991875 - DNA, 120 bp, Artificial Sequence
  ENSG00000249494_8 (sequence is synthesized)
gcagcgcacatgaagcctgctcaacagcctctgggcatgtgaaatctgtcctatacgttgaggctttatggagaagcacactagctggtgttgatctcccaacataagtttcttctggtg

SEQ ID NO: 991876 - DNA, 120 bp, Artificial Sequence
  ENSG00000249494_9 (sequence is synthesized)
ggaaggatgaagtaactccctgatagtgtgccacggcacagcttggctcaagccttgcaaatgctagatgagaaagtatcgatgagacatgaacgaatggcatcagctaggggcagctgc

SEQ ID NO: 991877 - DNA, 120 bp, Artificial Sequence
  ENSG00000249494_10 (sequence is synthesized)
atctgcccttcttggtgataagtggccatgtctgctcagcccaggttctcttcacccactcagtcctgacttcacgcttccgcctccagctctggcgccccctgagccccgctcacccga

SEQ ID NO: 991878 - DNA, 120 bp, Artificial Sequence
  ENSG00000249494_11 (sequence is synthesized)
cgcagggctggctcagggccggctcacagcctcactgcgccccattcccagccccggccccagcccaggactgggcccagccgtgctcaggtgagctgcctcgccctactcagccaccat

SEQ ID NO: 991879 - DNA, 120 bp, Artificial Sequence
  ENSG00000249494_12 (sequence is synthesized)
gtgtagattttaagcttttatttatttatttattttttaactggaggaatctgtcacacaccaccaagaaaattgtgttctcctctgaaaaaaaaagtcatgcaaaaaaatcagattcat

SEQ ID NO: 991880 - DNA, 120 bp, Artificial Sequence
  ENSG00000249494_13 (sequence is synthesized)
aatagaaaaggaagtatacctccaaaataggcaaaaatatgttttatgttttaaaaacatgcaaaataatttcatgatgaaataccttgatttgcatgtgacttagaacttatttcatat

SEQ ID NO: 991881 - DNA, 120 bp, Artificial Sequence
  ENSG00000249494_14 (sequence is synthesized)
taaccagattcagttgctgtgataaatctattatgtgttttagaaaatctatttttaaaaaatatctatttttaagccagaagaaaaacctggcatttgtgtatccatgtgtaagctagc

SEQ ID NO: 991882 - DNA, 120 bp, Artificial Sequence
  ENSG00000249494_15 (sequence is synthesized)
ctgcttggtatcatgcagtcaaggtactaaaagattaataaaattaattttaaaaatctcctgttacagactaacaaataatatatttcctcaaattttctgggctatactactttgtat

SEQ ID NO: 991883 - DNA, 120 bp, Artificial Sequence
  ENSG00000249494_16 (sequence is synthesized)
taatgcaatctgaattttcagatacaaataccagtcaatggttgaacttaaaagcaatagggttgggaggacctttgcaatattggtcattaaatcataagtaaaattattctggaccat

SEQ ID NO: 991884 - DNA, 120 bp, Artificial Sequence
  ENSG00000249494_17 (sequence is synthesized)
agtaagtggaatgccctaacttttcttagttcaaactctgcacattgattctgaagttcataatcatgcccttttatgtgctttaagcggacatcctgactttgtggtgtatactttttg

SEQ ID NO: 991885 - DNA, 120 bp, Artificial Sequence
  ENSG00000249494_18 (sequence is synthesized)
taagagagcaggtaactccagcacagaagaaaccatgtaatgcagaaggggggaggacttcagtggcactattccatttttattgatccagactgttgctttcagtcctgcattgaggcc

SEQ ID NO: 991886 - DNA, 120 bp, Artificial Sequence
  ENSG00000249494_19 (sequence is synthesized)
tccttggacgtcggtttctaacgtatcactgaccatcatacagtccccaggttgtactttgagaagattgcagcagtaataaaatatggatggtgctggcttctctctctgctctccacc

SEQ ID NO: 991887 - DNA, 120 bp, Artificial Sequence
  ENSG00000249494_20 (sequence is synthesized)
tccaatagcgtggaaatacgactgacaggcacaaggctcaatcttctccctctggatctgtctgtccccattccttaataaaaataggcagaccttctttcaaagttcggtgagcatgac

SEQ ID NO: 991888 - DNA, 120 bp, Artificial Sequence
  ENSG00000249494_21 (sequence is synthesized)
tgacattctccagtcaattttctattggcggcaccatcttttgtttcctggactgcttcttcccaattgaagtccttagatcagtaatgcatgtactgtaaggatgaaaacattccttcc

SEQ ID NO: 991889 - DNA, 120 bp, Artificial Sequence
  ENSG00000249494_22 (sequence is synthesized)
tgagtttaacttgaactttatcacagatgatttcagccttttcttaaaatgatattttgattgtaagagctttatcacctccaacaggtctctcctgctcaccctggccatgtcgatgag

SEQ ID NO: 991890 - DNA, 120 bp, Artificial Sequence
  ENSG00000249494_23 (sequence is synthesized)
catgctgtccaggtcaaagaaagaggccagcatgtggctcatccccatagcccccatggctcccgccaccctcgcacgtgtgaggtgggcgtcccggcaatgtcttacttttaataatgt

SEQ ID NO: 991891 - DNA, 120 bp, Artificial Sequence
  ENSG00000249494_24 (sequence is synthesized)
gtgatttttttcattgatggctattacattttttatcatgttttaggttcttctatgtactgtaatgaattctcttcaacagttatctatttttttcagttgattagtcttaattatcat

SEQ ID NO: 991892 - DNA, 120 bp, Artificial Sequence
  ENSG00000249494_25 (sequence is synthesized)
atctttacatgcctatctgggaaataataaaatgctctctagaattgtgcaacatggcagccttgtttagaagaaattgacagtgttgaatttcacctaagttctgtgctcctggaaaag

SEQ ID NO: 991893 - DNA, 120 bp, Artificial Sequence
  ENSG00000249494_26 (sequence is synthesized)
agcaagatggagaaatcccccacccttttgtgtttcagaaaggccttgctgcaaagaagcaccctttcccatataatttagataaaactcatgtatactgccttgtttacctatgacaag

SEQ ID NO: 991894 - DNA, 120 bp, Artificial Sequence
  ENSG00000249494_27 (sequence is synthesized)
gccagaaacagactccaaattcccactctttgcctcataaatgattaactaagcttgtttgtactaatgatcaatgggaacaaaatgcttgttaatcacactttggttaagattctatct

SEQ ID NO: 991895 - DNA, 120 bp, Artificial Sequence
  ENSG00000249494_28 (sequence is synthesized)
atccgccaggtctctgaaccttggcccatcctcagtctgagtcagcatgtaacccttcttcaacagcatctctggagagaaggctggcttctgggtaaaacattctttaatcccattctc

SEQ ID NO: 991896 - DNA, 120 bp, Artificial Sequence
  ENSG00000249494_29 (sequence is synthesized)
ttatcccacctgcccacatccaaatctttctaatctagtttactcctctctataaaagaaaaactcttttcacctaactcttgagaagcttgcaggtattatggtcaaagagttcctgtt

SEQ ID NO: 991897 - DNA, 120 bp, Artificial Sequence
  ENSG00000249494_30 (sequence is synthesized)
attgcaatagctccccttctcctattgaaagagacccttttcctcttagaataatccttccaacaaagtctccttactaagtctgagtttgctttttgacaggacccactcattaccttt

SEQ ID NO: 991898 - DNA, 120 bp, Artificial Sequence
  ENSG00000249494_31 (sequence is synthesized)
cattaaatttttttttctttcctattctcaaataagaaaaaattattttgccatatctggcccttacctgatttaggtttttaaaaaactttttggaggtataacttacatacatacaaa

SEQ ID NO: 991899 - DNA, 120 bp, Artificial Sequence
  ENSG00000249494_32 (sequence is synthesized)
tgtatgtataacttgcatatatttaagaggtaaaatttggtgatatttgacagatgtataacccctgtgaaacttgtattacacaatgtatggcacatttctgtcacctctgttttcttg

SEQ ID NO: 991900 - DNA, 120 bp, Artificial Sequence
  ENSG00000249494_33 (sequence is synthesized)
agccactttgcatataacctcccttctgcccttggctcttcgcaaccactgatctgttctctgtcagtatatgctagtttgcattttctagaactttttatgtgtggaattatatggtgt

SEQ ID NO: 991901 - DNA, 120 bp, Artificial Sequence
  ENSG00000249494_34 (sequence is synthesized)
gtctggcttctttcaccagcataacgatttcgagattcaacaatattgttgcagttattagtagttaattcctcttttgttatcgggtattattccatttgtatagatataccatattct

SEQ ID NO: 991902 - DNA, 120 bp, Artificial Sequence
  ENSG00000249494_35 (sequence is synthesized)
ttatccactgatctattgatgaatatttcttatttttcccccagttttaaggttgctataagctgaatgtttgtgtcttcccaaaattcatatgttgaaaactaataatccctaatgtga

SEQ ID NO: 991903 - DNA, 120 bp, Artificial Sequence
  ENSG00000249494_36 (sequence is synthesized)
cggtgtttggaggtggggcctttgggagatgataggtcatatggttgttgggaggtggggcctttggagatgataggtcatatggttggaggccacatgaataggattgctgtccttata

SEQ ID NO: 991904 - DNA, 120 bp, Artificial Sequence
  ENSG00000249494_37 (sequence is synthesized)
aaaaaggcctcagagagttcctctgcctcttctgctgtatgaagaaacaatgagaagatggccatctgtctatgaaccaggaagtgggacctcaccaaaaactgaatctgcctgtggctt

SEQ ID NO: 991905 - DNA, 120 bp, Artificial Sequence
  ENSG00000249494_38 (sequence is synthesized)
aatcttggacttgccatcctccagaactgtgaggaataaatttctgttgtttataagccatgcagtatatggtatttttgttatagcagcccccactgagagggatattgcaaataaaat

SEQ ID NO: 991906 - DNA, 120 bp, Artificial Sequence
  ENSG00000249494_39 (sequence is synthesized)
gcaaaattaactgtggtcagctgacttgttaccgtatttaattttaattttggagcttgtattcaaaagctattatatgaatataagaataaatgatttttttaacaaaaaagagtattt

SEQ ID NO: 991907 - DNA, 120 bp, Artificial Sequence
  ENSG00000249497_0 (sequence is synthesized)
agttgcaatgccccagtgaggcagtagactgacctcacgtgacttttgggaatgaacactgagaccatcaaccctatcaatgagggttataaaaacaacaacgaagtaccacctgacaac

SEQ ID NO: 991908 - DNA, 120 bp, Artificial Sequence
  ENSG00000249497_1 (sequence is synthesized)
ttcaaattatttattgattcctgaaaaggaaaatgaaaggaagctggccaaagccacggagtgccagttgaataagttatcaagagtcttcttggattgacgatgcggctccatttgcag

SEQ ID NO: 991909 - DNA, 120 bp, Artificial Sequence
  ENSG00000249497_2 (sequence is synthesized)
cacttagcatcttctgccttggaggagagctcctggtgggcgctcagcccacctgcttcaactgcaagctcactgaagacagacaccccagtttagcatggtgcccggctggcaggaggg

SEQ ID NO: 991910 - DNA, 120 bp, Artificial Sequence
  ENSG00000249497_3 (sequence is synthesized)
ctcttttcctcttttgcagactgttgatgcagcctcctaagtaccctctctgcctcccatcttggctcctccagtccaccctacagtcttcctaagacactgactgatcggatcctctga

SEQ ID NO: 991911 - DNA, 120 bp, Artificial Sequence
  ENSG00000249497_4 (sequence is synthesized)
ctctgctgaaatgcctcagggactctccacagctacagcaatgacttcccaagagtgccctggggcacaacagtcccaagagatgctcctgaagaaacagcttagggccaaaataaatgt

SEQ ID NO: 991912 - DNA, 120 bp, Artificial Sequence
  ENSG00000249497_5 (sequence is synthesized)
agaaaatgctctttactgaagctccccagcccttggagattcacatgccctatgagcataatcagggatctgagaagtcctgcaaggttagcatgcagccaggttagcatatttgataca

SEQ ID NO: 991913 - DNA, 120 bp, Artificial Sequence
  ENSG00000249497_6 (sequence is synthesized)
gttttccgaagctttttccatcacaggcaatctttttgcaagcaatgtctacaaacagcccaagacatagtcccacagaacatactttgggaagcagtgagctgcatggtagagcctgaa

SEQ ID NO: 991914 - DNA, 120 bp, Artificial Sequence
  ENSG00000249497_7 (sequence is synthesized)
gagatggctcagggtgcaaaagggaaggtgctggctgtgtgcagacatgacagagacttgtgggtcaggaaagtccatcagcagctctcctctctgccttcagtctcttcatctagacac

SEQ ID NO: 991915 - DNA, 120 bp, Artificial Sequence
  ENSG00000249497_8 (sequence is synthesized)
agatgtcctgggcacgtgtgtgtttctagacctggcacatcctgagtgaatcttggcctcttaatgaacccagcagcctcctgctgcagagtcgctgagatgctgtgcagttatgacata

SEQ ID NO: 991916 - DNA, 120 bp, Artificial Sequence
  ENSG00000249497_9 (sequence is synthesized)
tcctcccaccacaaaagaacattccagcttgtccaggggatggtcacggaggccagtgctccaccggatccccagcagcaggagccttctgtggtagaaaaagcatgggcatcggaggcc

SEQ ID NO: 991917 - DNA, 120 bp, Artificial Sequence
  ENSG00000249497_10 (sequence is synthesized)
gaaaaagcatgggcatcggaggccgagtccgggattcccatcctgatccatcactgactaggtgctgtggggccttggagacgtggtttcaacacattggccaggctggtctcgaactcc

SEQ ID NO: 991918 - DNA, 120 bp, Artificial Sequence
  ENSG00000249497_11 (sequence is synthesized)
aagtgctgggtttataggcatgagccgctgcacccggcccaggttgaggtttttgaagagcatcacctttgcaggtgagaaacgctgcaggcaggaatccagccgtcattcttgacacca

SEQ ID NO: 991919 - DNA, 120 bp, Artificial Sequence
  ENSG00000249497_12 (sequence is synthesized)
tgacaccacccttatctaatcccctgccaactgctagttccagccagcatcagctctctcctggaccactgccactacctcctaacaggattcccacctccacctccgctctcattaccc

SEQ ID NO: 991920 - DNA, 120 bp, Artificial Sequence
  ENSG00000249497_13 (sequence is synthesized)
ccgatctgcagccaacttgagatgatcatatcaccccctccacacccaacacaactccaaaatgcaaagaggcttcctctgttcttggatcaagggtttaaacatgacctagaagccctc

SEQ ID NO: 991921 - DNA, 120 bp, Artificial Sequence
  ENSG00000272375_0 (sequence is synthesized)
attcaaaataaacaaatctataaagacagaaagattagtcattgacaggaaatgaacagaagaggaaattggaaggtacaaggcttccccttgggggtgaagaaaatattctggaattag

SEQ ID NO: 991922 - DNA, 120 bp, Artificial Sequence
  ENSG00000272375_1 (sequence is synthesized)
ataaggataatggttgtacaatattgtaaatataataaatatcacaaattgtatgttgcaaaatatttaaaatggtgaattttgttgctattttcaaaacatgtgtttccctggaaatcg

SEQ ID NO: 991923 - DNA, 120 bp, Artificial Sequence
  ENSG00000272375_2 (sequence is synthesized)
tctttgggaagtgattaggccatgagggctccacctccatgaatgggattagtacccttacaaagaagcttgagggagcctgcaagctcctgctgccatgtgagtacacatagaagtcac

SEQ ID NO: 991924 - DNA, 120 bp, Artificial Sequence
  ENSG00000272375_3 (sequence is synthesized)
cttctacaaggaactgaatctgctggtgcctcgatcttggacttccaagcctctagaactgtaagaattaaatttctgttgtttctaagttatcccacttaaagtcttctcctatagcaa

SEQ ID NO: 991925 - DNA, 120 bp, Artificial Sequence
  ENSG00000272375_4 (sequence is synthesized)
cccagatggactaagacatttgttaagtgaattttacctaaaaaaaaaatttctgtatcagagttgttaaagaatgatgaaactagcactcaatacctgaaataaaagagcaaaactgaa

SEQ ID NO: 991926 - DNA, 120 bp, Artificial Sequence
  ENSG00000272374_0 (sequence is synthesized)
gtgctgggattacaggcgcgagccactacacctggccacagattttttagacccctcctacagccagacttctcccaccatctaactaacccctctcccttacctccctgctcacaatgc

SEQ ID NO: 991927 - DNA, 120 bp, Artificial Sequence
  ENSG00000272374_1 (sequence is synthesized)
cacaatgcttatccctctccagcaaagagtctctgctctggaagacattatctcttcctgttccctctacaatacctaaccatcctattcctttctatgcatttgcgtattttcgttatt

SEQ ID NO: 991928 - DNA, 120 bp, Artificial Sequence
  ENSG00000272374_2 (sequence is synthesized)
cacattgcagatgcattcctcatttttctcttccagccacactatgctcagctttccattccagctcaaatttttcttcccaaaagctcttccttgtaagccccgttcctggtgagttcc

SEQ ID NO: 991929 - DNA, 120 bp, Artificial Sequence
  ENSG00000272374_3 (sequence is synthesized)
tggtccaaggggactgttctcctcagttcatttacagccgtcactgaattgctctgctaatactttaaagcgtgttcagctttcctcacctggctgggtacctgctgaggaagatgtccc

SEQ ID NO: 991930 - DNA, 120 bp, Artificial Sequence
  ENSG00000272374_4 (sequence is synthesized)
ttcaatgtttggttggagtcttttgaagcagaacagacctaagacaaagctgtgaaagagggccccaaattatacccagtatctcctccttttaccactcattcttccagagttctctcc

SEQ ID NO: 991931 - DNA, 120 bp, Artificial Sequence
  ENSG00000272374_5 (sequence is synthesized)
taccatatgtgcccacccagaatttgtccttgcaaggacccttcaacgctcacagcacagtctcatcttagcctgttctctcaggatgcaggtgcttactagctggaaaaccagttgatg

SEQ ID NO: 991932 - DNA, 120 bp, Artificial Sequence
  ENSG00000272374_6 (sequence is synthesized)
ctactgggtgtggactggtttaaaccagcggttctcaaccctggggctacacactggaattccctgggggttttgaaaaaaatgtgaatgtacagatgtcccctagaccagctgaatcag

SEQ ID NO: 991933 - DNA, 120 bp, Artificial Sequence
  ENSG00000272374_7 (sequence is synthesized)
gatctccagggtgaggctgtggctactatctgtcttcctttcccaaggtaatgccaataaactatttgcccaagctgggaagagaccagggcagccacatgacagagtagttaagagaga

SEQ ID NO: 991934 - DNA, 120 bp, Artificial Sequence
  ENSG00000272374_8 (sequence is synthesized)
ggttctggagcaacattgtcagttcaattgctagctctacctgtgtctgtgtggtcctgggccagcctctgaacttacctgttccctcctctgtatgtgggaataatattcatcatagta

SEQ ID NO: 991935 - DNA, 120 bp, Artificial Sequence
  ENSG00000272374_9 (sequence is synthesized)
cctccccatggggcttccaggaacatcagttgaattaatacccatcaagtacttaacaccacagtgtgggcatatagaaagtgctcaacaaaggtttgctatttttttctttctttttga

SEQ ID NO: 991936 - DNA, 120 bp, Artificial Sequence
  ENSG00000272374_10 (sequence is synthesized)
ttttctttctttttgaaacagagacagggtcttgctctgcttatccaggcaggaatgcaatggcatgaacatagctcactgcaacctcgaaatcctgggctcaagtgatcctcccacctc

SEQ ID NO: 991937 - DNA, 120 bp, Artificial Sequence
  ENSG00000272374_11 (sequence is synthesized)
gggctcaagtgatcctcccacctcagcctactgagtaactgggactatatgcgcgtggcatcatgctcagccaattttttaaaatttttagaggcagggtcttgctatgttgcccaagct

SEQ ID NO: 991938 - DNA, 120 bp, Artificial Sequence
  ENSG00000272374_12 (sequence is synthesized)
ccaaagtgctggtattacaggtgtgagtcgccatgcctagccaaggtttgctactattattccttctctccaaccttctccctgtattctttctgaactccctttccctatcaaagcccc

SEQ ID NO: 991939 - DNA, 120 bp, Artificial Sequence
  ENSG00000272374_13 (sequence is synthesized)
ccccatttcaggcctggtgtggggaaatgcagcaccaggtgagcatgtgttggtggggaggatttggggagacacatccccactgcttactctacctgtgctgggaactgcacaaagaat

SEQ ID NO: 991940 - DNA, 120 bp, Artificial Sequence
  ENSG00000272374_14 (sequence is synthesized)
gggggtgaagtgggtgagaggccagttgggaacccaaaagctgtcctctacaattctttttgaaggctagggagatcccactcctacttcaggccatgcattggaaccaaagttgaggtg

SEQ ID NO: 991941 - DNA, 120 bp, Artificial Sequence
  ENSG00000272374_15 (sequence is synthesized)
cctggcatgaaggcacaggtctgtaactacagcagcttttcccagtaccatctgacatttcttctgaatttgctttagcgcctagcagagcactccataaactctcctaaagtaggtagg

SEQ ID NO: 991942 - DNA, 120 bp, Artificial Sequence
  ENSG00000272374_16 (sequence is synthesized)
aagggtaggatggggtatgggatatgagggtcagagggtcagaccagaaagggtggattattataaaacaagtagtcctaagattctgaggatgggcaggtgtaccctaaaagggaagca

SEQ ID NO: 991943 - DNA, 120 bp, Artificial Sequence
  ENSG00000272374_17 (sequence is synthesized)
gtgggattcccaagtaaatacttcatctacttcacaagtttgcccaagcccagctcaggaacagtaacaaatggaaatgagcagggatgccggctgtggacaagcagaccccctaggtag

SEQ ID NO: 991944 - DNA, 120 bp, Artificial Sequence
  ENSG00000272374_18 (sequence is synthesized)
agtccaccccaccttcccattaccacaggaattattaccttaccacccataggggagggggtaattgtgggcaaatttgatgggcccagtgggacagtcagaaacagcctgcctagagcc

SEQ ID NO: 991945 - DNA, 120 bp, Artificial Sequence
  ENSG00000272374_19 (sequence is synthesized)
ctaatgtacccacccacatagctgtgacatcctcagcccagccaggctagcccaggatatatggtgtgtgtagcgcactctgctattttcctctccttgaatgtccttgaggacccagtt

SEQ ID NO: 991946 - DNA, 120 bp, Artificial Sequence
  ENSG00000272374_20 (sequence is synthesized)
caggtgcctctgctgggacactccctgtgacactaccagccttctctgatctactctttctcttgactcctaagacttactgtcaggctctctggtcacctgatcaatcccaggcttgtg

SEQ ID NO: 991947 - DNA, 120 bp, Artificial Sequence
  ENSG00000272374_21 (sequence is synthesized)
atacctcatatgctaccttgtaccattatttaacttttagttcatgtgtataattttcctactgaagcagtaggagcttgaggccatggctcctaaagctttgaaacccatgcagcaact

SEQ ID NO: 991948 - DNA, 120 bp, Artificial Sequence
  ENSG00000272374_22 (sequence is synthesized)
gaaatagagctcagcattcattcattcactcactcactcaatagttattgagcacctccaacatgcgaagcaccgtgctaggtgctggggatttggcagtgaaccagagatgaattctac

SEQ ID NO: 991949 - DNA, 120 bp, Artificial Sequence
  ENSG00000272374_23 (sequence is synthesized)
attgaagccacttagtaaatatttgttaaacagatagacgagtggatggagacatggatgcattagtagtgagtggataatgtctctatctgtggcatcccttctgctctatgttacctc

SEQ ID NO: 991950 - DNA, 120 bp, Artificial Sequence
  ENSG00000272374_24 (sequence is synthesized)
agagaaaaatctcacttctttactctccgtgatcccacaactgttctggatgggggaagtcccaggaagtttagtctcaagtggagagtagggagagaggaaactaaattcagaggggta

SEQ ID NO: 991951 - DNA, 120 bp, Artificial Sequence
  ENSG00000272374_25 (sequence is synthesized)
gtacccacttaaaggcatccatatgatgagtgctggggccagaagagactggaaccaatgagtcatagggtctcagggtcttcagacatcatatggggctgctacagggatcttttcaga

SEQ ID NO: 991952 - DNA, 120 bp, Artificial Sequence
  ENSG00000272374_26 (sequence is synthesized)
gcatccccttcaacagatgttcctcagcctccatgctaactctcaatgatggggcacctgacacaggcattccactgcttgcccctggtgatttccctcattctcacctctaagtaacat

SEQ ID NO: 991953 - DNA, 120 bp, Artificial Sequence
  ENSG00000272374_27 (sequence is synthesized)
ccaaaataaaaccagcccagccttgggccatgatatcctaacccacagcatgtgcacatgtacccacatctgcatatctgctctacctccagatcaaaatagcaaccagggagattggca

SEQ ID NO: 991954 - DNA, 120 bp, Artificial Sequence
  ENSG00000272374_28 (sequence is synthesized)
gagcctggagtaccaggctgtcttcccagtttgggactggctgaggcactgtgacttcagtgagagtctgggcccatcctcagtctagaaaaagcttatgcaaggatgagggtagcctag

SEQ ID NO: 991955 - DNA, 120 bp, Artificial Sequence
  ENSG00000272374_29 (sequence is synthesized)
agaaagtccagaaaaccacacaaatgaccacctgttgattccaaggcggagacagagcactttctccttttaaaaacagtatcctctcctctcactcaagcttagcctgctcaactgaac

SEQ ID NO: 991956 - DNA, 120 bp, Artificial Sequence
  ENSG00000272374_30 (sequence is synthesized)
agccaggaaaagctgctggtgtttggtgatttgaagggaagggggtctgaacctcagaagcttgtcacttactggggaccctgatgagtttctctctgttgtcctgccttatccctaatc

SEQ ID NO: 991957 - DNA, 120 bp, Artificial Sequence
  ENSG00000272374_31 (sequence is synthesized)
tagctccctgatcatttgaatgtaaccctaattggacaagaattttctccctttcagtatggacaaaatcaacaaccatgaatcagagacttttagaggatgggtagtgaagtgggggaa

SEQ ID NO: 991958 - DNA, 120 bp, Artificial Sequence
  ENSG00000272374_32 (sequence is synthesized)
gaacagaacattgtagagtgaggggcagagaggcaggcagtgggcatgggtaggttctggttttgtgattagtaatattatctctttaattgaaaaaaataaactcatttcagattcgta

SEQ ID NO: 991959 - DNA, 120 bp, Artificial Sequence
  ENSG00000272372_0 (sequence is synthesized)
cctcccgtcccacccctgctgcttgttttgtgccctcacaggtttgcactccatggggccactgcactggtgaccatctgtcatccatgatacctgaattcaaactggattcctctgaag

SEQ ID NO: 991960 - DNA, 120 bp, Artificial Sequence
  ENSG00000272372_1 (sequence is synthesized)
gccctggagaacttgtttctcaggttccaactgcccttcgctggggcatctagtgcttgcactccacagcagtgagactggccactcccaagtcaggccccagtgggacactgggcaaga

SEQ ID NO: 991961 - DNA, 120 bp, Artificial Sequence
  ENSG00000272372_2 (sequence is synthesized)
aagagccgtagggttgggcctgtctctgagggtagccctggcctgagggggcctactggactccatcgttgtggctgggagaggtcaggagtggctgccagagtgggctacagcctggct

SEQ ID NO: 991962 - DNA, 120 bp, Artificial Sequence
  ENSG00000272372_3 (sequence is synthesized)
ctgcccaagggccacctggggctggcctttcagggcttgtcctgtgccctcctgccctcactccatcctgcagagggcaccttctccgtggccagttccccctcccctagtttccatcct

SEQ ID NO: 991963 - DNA, 120 bp, Artificial Sequence
  ENSG00000272372_4 (sequence is synthesized)
ctgaataataccaatggcagccacagccagcacttcagtagacctggcaccaagcagctgtccttccagtcacccttggggtgggcatgattacccattgtgttgaccagattagaatga

SEQ ID NO: 991964 - DNA, 120 bp, Artificial Sequence
  ENSG00000272372_5 (sequence is synthesized)
ggcacagatgactgagcaacttgctgagctgcaggtggtctggctccagaggctacctgggctctctgccctattgggactttgctggagagcctcgagtgcagggcacagttcctggcc

SEQ ID NO: 991965 - DNA, 120 bp, Artificial Sequence
  ENSG00000272372_6 (sequence is synthesized)
ttgtgctcagaacaagctgacagcccttcttcacacactgctcccagctgtggggaagggtggggagaccagcatcgacctatgctggatgtaggcaccctgtggctgagcttggggacc

SEQ ID NO: 991966 - DNA, 120 bp, Artificial Sequence
  ENSG00000272372_7 (sequence is synthesized)
cgtgtggccctgagactgagcccatgcccaaagccttactccagggctgtcagaacatgggttcctggccgagccaacctgtgccctgacctggcggatgacaggacacctcctcctcca

SEQ ID NO: 991967 - DNA, 120 bp, Artificial Sequence
  ENSG00000272372_8 (sequence is synthesized)
tggcagggtgctggccctgtgcactctgtagtctgcaaaggcaactcctaccccagggacccctagaagcttcccagcccctagagggaccagggctgggctctggcatcccatcagtgc

SEQ ID NO: 991968 - DNA, 120 bp, Artificial Sequence
  ENSG00000272372_9 (sequence is synthesized)
tgcttttaggcattagcagtagcccagagttggcccattccacggaagccaccatccctcatccatccatttggaaagagcgtcattgagccgggtgggggggaaggtctgtgacacatt

SEQ ID NO: 991969 - DNA, 120 bp, Artificial Sequence
  ENSG00000272372_10 (sequence is synthesized)
cccctgagagcaagaagaaagccccagagaaggcagaagaaagggaggcagtgatacaggaggcttgcagatagctggagtggttggatttggggcaaagaccagggacgaaggaagaag

SEQ ID NO: 991970 - DNA, 120 bp, Artificial Sequence
  ENSG00000272372_11 (sequence is synthesized)
gggagagaggaggcgcaatggggctggggttggggagggagggcaggcacgatgtgggatgggtggagtggtctggctgggcggctgcacagagatgaagcatgttccgggcaccaaagc

SEQ ID NO: 991971 - DNA, 120 bp, Artificial Sequence
  ENSG00000272372_12 (sequence is synthesized)
agggagcagggaaagcaggtggggccaagaggcagtccaggccctgttcacaggccacgtgtccacttttcggtttcatgcaaaggtgctgtggggctctgggcaggggtgaggggaggc

SEQ ID NO: 991972 - DNA, 120 bp, Artificial Sequence
  ENSG00000272371_0 (sequence is synthesized)
ttcaattgagtaaacatttcctaattacttaagagcaaagcgttgttaggtgcctagggaaacaaagacaaatcattgcttcctgtctccaaaaagttccccattgagcaagcaggtgag

SEQ ID NO: 991973 - DNA, 120 bp, Artificial Sequence
  ENSG00000272371_1 (sequence is synthesized)
taaaagctggaccttgaagatctgtctgctgtgtgccagacacatgtctgtgattcagagggcagcattgactctggagtgtgcagaagataatgaatctggaaaagaaaactggggcca

SEQ ID NO: 991974 - DNA, 120 bp, Artificial Sequence
  ENSG00000272371_2 (sequence is synthesized)
gactgaaaatttcagtgcctctctgcccttatcccctccagatactctcttctactaccttgcttattccccaagacccagctcaacctctaccttctttattaaatcttcctgattacc

SEQ ID NO: 991975 - DNA, 120 bp, Artificial Sequence
  ENSG00000272370_0 (sequence is synthesized)
ccgcctatataaaaattaagacacaattcattatgatatattgtttatgaatgtacacatatgtagaaaagtttaaaaacacatgtggaaatagtgtttgcctctgagaaggaattcaca

SEQ ID NO: 991976 - DNA, 120 bp, Artificial Sequence
  ENSG00000272370_1 (sequence is synthesized)
gggagctcacttgtgtttgtaatgttttattttttaagtgctggatggtagatactcagttctcattttctgtacattttggaatatctgaaatatttcacaatttttttatgattatat

SEQ ID NO: 991977 - DNA, 120 bp, Artificial Sequence
  ENSG00000272370_2 (sequence is synthesized)
agtactaacaagaaccctttctatttgcttcaggaagaaggagagagcttcaaagaggaggagagggctatgattgaggtgttctgagaaaatgtcaacccactcaaatgcagagtggtc

SEQ ID NO: 991978 - DNA, 120 bp, Artificial Sequence
  ENSG00000272370_3 (sequence is synthesized)
agactcaaagccaccccaaaataagccagtgcttggaagtgtgtcccatcttcccctcaccataaaggttataatattggttttatttcagataaaacagaatttcatcttccaaactca

SEQ ID NO: 991979 - DNA, 120 bp, Artificial Sequence
  ENSG00000272379_0 (sequence is synthesized)
tttttacttttttttggtttgtttttaaagaaactgcatacatcatcagagacaaacaataatttaaataccatgcagtttctgtatgtacaaaacctaggccacagagatccagtttaa

SEQ ID NO: 991980 - DNA, 120 bp, Artificial Sequence
  ENSG00000272379_1 (sequence is synthesized)
ctcctatacaaagacaaactatgtacagacacccaggaagcaactggaaaatgcaaccggtctggggattaacagacagatagggagaaaaagtcatttaaggtgacctttgcccaccgg

SEQ ID NO: 991981 - DNA, 120 bp, Artificial Sequence
  ENSG00000272379_2 (sequence is synthesized)
ctgtgcacagggagagcctgaaattccattcatcaaagcaacacaccacgattttcattcggcaaataaaaatacatgttcataagcgggagaaaaataaacccagagcttttcatcaca

SEQ ID NO: 991982 - DNA, 120 bp, Artificial Sequence
  ENSG00000241397_0 (sequence is synthesized)
tgcacagtgtgtggagaaggagatggaagatgcaaggagtatgaatgtgggcactttttaaaaaatttcacccaagagaaatatacagtcatttgtcagaccagtgattttacactgtca

SEQ ID NO: 991983 - DNA, 120 bp, Artificial Sequence
  ENSG00000279494_0 (sequence is synthesized)
cccgacatacaaaacagtatcttcctgtgaggggccagagaataggccgcacctggctgccctgcacaatttggaaggcactaggagggacctgtcaacctgcactcactcactcaccgg

SEQ ID NO: 991984 - DNA, 120 bp, Artificial Sequence
  ENSG00000279494_1 (sequence is synthesized)
caggcccctttgggaagagctgttgctctttggccccaggaatcttctatttctgcacatgagtgccaggcaattgtggggccccattaacctactccacaaagcgtagggggccttgct

SEQ ID NO: 991985 - DNA, 120 bp, Artificial Sequence
  ENSG00000279494_2 (sequence is synthesized)
ctcggcactgggcatgctccctcagcacatacaacaaagaagtcccccctcccactgattctagcaggaggctgttggggggcagtcatgacacaggcatatacagtgtgtcagatgtgt

SEQ ID NO: 991986 - DNA, 120 bp, Artificial Sequence
  ENSG00000279494_3 (sequence is synthesized)
cagagcccggagaggggatgaggagagcgcagtgttacttcctagagcatggccccggagagcctcccactatgctgacatatgggcagccgtctgggagcttgacactggcagagggga

SEQ ID NO: 991987 - DNA, 120 bp, Artificial Sequence
  ENSG00000279494_4 (sequence is synthesized)
agagcagtccaggcagacaagaagtcagtgcgaagaccccaaagcaagcatcaaggaggctgggggctgctgcagatctgatgaggggatggcaggggcagagcaggcctgagaacactg

SEQ ID NO: 991988 - DNA, 67 bp, Artificial Sequence
  ENSG00000279494_5 (sequence is synthesized)
atgaggggatggcaggggcagagcaggcctgagaacactggcctccactctgaatgaaacagggatc

SEQ ID NO: 991989 - DNA, 88 bp, Artificial Sequence
  ENSG00000279494_6 (sequence is synthesized)
cagcctggggacagagcgagactctgtctcgggagccctttttgggtgtcagtgcctggtctcaactccatagctatggtggaaggta

SEQ ID NO: 991990 - DNA, 120 bp, Artificial Sequence
  ENSG00000279494_7 (sequence is synthesized)
catagctatggtggaaggtaaagcagtttaccttttaactacatgaacaagcatggtggtgttccagttgaactccttaggaaaccgacattttaatttaatttttttttggagacggag

SEQ ID NO: 991991 - DNA, 70 bp, Artificial Sequence
  ENSG00000279494_8 (sequence is synthesized)
cttctgcctcagtctcccgagtatctgggattacaggagcccaccaccacgtctggctaattttttattt

SEQ ID NO: 991992 - DNA, 120 bp, Artificial Sequence
  ENSG00000279494_9 (sequence is synthesized)
aggcgtgagccaccgtgcccggccgatatttgaatgtcatatacttttcatatatgctaaaatactgttttaattctcccccaacctcttaaaaacgagaaaagcattcttagctcaggc

SEQ ID NO: 991993 - DNA, 120 bp, Artificial Sequence
  ENSG00000279494_10 (sequence is synthesized)
cttagctcaggcaccatagaaaacccggctgcaggctggacgtggactttggaacagtcggcgtgcgggtgaaggggcacagccgcggggcaggggcgggctccgggcagaggcggccgt

SEQ ID NO: 991994 - DNA, 120 bp, Artificial Sequence
  ENSG00000279494_11 (sequence is synthesized)
gataactccacgctcccgctccagccggtgaccgccacgcgggctcctctcactctcacactcaggccgagaaaatgccgaaagccgtgtcaccaacgggggacctcggggccacattca

SEQ ID NO: 991995 - DNA, 120 bp, Artificial Sequence
  ENSG00000279494_12 (sequence is synthesized)
gcatgcagagtttatttggtctgctcaaacatttgtgttaggaaataacacattaaaagtgcacatttccttcagaccctgagaagcgggcgagtcccgtgcgctccgcaccgccagccc

SEQ ID NO: 991996 - DNA, 80 bp, Artificial Sequence
  ENSG00000279494_13 (sequence is synthesized)
cggccccgcgctcgcccagagggccgccctcctcccgccgacccggcttggggcttaggcgttaatcccgtcccccgggg

SEQ ID NO: 991997 - DNA, 120 bp, Artificial Sequence
  ENSG00000237019_0 (sequence is synthesized)
ctttttaattaagctattgtaattaatagctgtttacttggatcatttcttatttttgtgatgcctgccttgagactgatttctagaagtgaggttgctggtcaaaggattaagtaactc

SEQ ID NO: 991998 - DNA, 120 bp, Artificial Sequence
  ENSG00000237019_1 (sequence is synthesized)
caacttctccagaacactgagctatcgctaaagaggagctgtggacatctaatctaccaacatcaagcaatagccaccaccaggagaaacacacctgaccctgtaagattcttttacata

SEQ ID NO: 991999 - DNA, 120 bp, Artificial Sequence
  ENSG00000237019_2 (sequence is synthesized)
ggagtcacgggtgcggggaattgaagaagggggaaattggggaatgggaagtagtatcattttgtgttgtccatcatgctcaagtgcctattaaaaagcctgcttatttattggtaatga

SEQ ID NO: 992000 - DNA, 120 bp, Artificial Sequence
  ENSG00000237011_0 (sequence is synthesized)
gatctcttttgaaatatactgttagtacaatcgatggttggcatcacaaattgaagattacggcagatgaaatacccatacgccttaagtgttataaattccaaccacaaagagtttctg

SEQ ID NO: 992001 - DNA, 120 bp, Artificial Sequence
  ENSG00000237011_1 (sequence is synthesized)
aaaggaattgctactactaacatactctgcaagaaatcctgacttcaggattattattgttgcagatgtaattaaaatgaggttataataaattagagtaagcccttaactcaaaacaat

SEQ ID NO: 992002 - DNA, 120 bp, Artificial Sequence
  ENSG00000237011_2 (sequence is synthesized)
tggtgccattataagaggatgaccatgtgaagacacagacacacagaaaaaacaccatgtggtgactgaagcagagattggtgtaatgcaactacaagtcaacaagcaactatgattgac

SEQ ID NO: 992003 - DNA, 120 bp, Artificial Sequence
  ENSG00000237011_3 (sequence is synthesized)
aaggctaggaagaggagagaaaaatatatatatctcaagaaagaaaaaatccagcacctacggcataatgtaaggagagaatgctccagcaaaatctaacttgcacaataaatctgttct

SEQ ID NO: 992004 - DNA, 120 bp, Artificial Sequence
  ENSG00000237011_4 (sequence is synthesized)
gtcagatccttgaccggtatgtttatgttgacctctttccgtttgaagagagaggaaagaaactggtgttgatcaaaggttacagcagaataaaaaatatactgggacacgaaattgtga

SEQ ID NO: 992005 - DNA, 120 bp, Artificial Sequence
  ENSG00000237011_5 (sequence is synthesized)
catgtatttcccccaccagtcaggactctatgttcaatatttttatttcattatgcttacaaaagcaaatgaatgtccctttgtatttccttaagaatgaaaagatgaatgtttctttct

SEQ ID NO: 992006 - DNA, 120 bp, Artificial Sequence
  ENSG00000237011_6 (sequence is synthesized)
ttgcaagttccatggaagctaagaaccttaatactataaacattttaatgcttgataatggttctgtcttcaaaatgcaaaacgttttattctgacaaataaaaactctaaaaaaatgaa

SEQ ID NO: 992007 - DNA, 120 bp, Artificial Sequence
  ENSG00000237013_0 (sequence is synthesized)
ggaaatctcgttgagtttgggaggccttacttctgcatatttgaatctggtgaccaaattaaacattgttctaactgtagtggtctgatcattctaccaaggccatgactgtgaagagca

SEQ ID NO: 992008 - DNA, 120 bp, Artificial Sequence
  ENSG00000237013_1 (sequence is synthesized)
ctgtgggtgatggctggtggctcaccggagccggcttgtgcacggcgcccgaagccaaagaaatctgaagacccgaccttactattggcaaagacagacaaacactctacaaatagtgct

SEQ ID NO: 992009 - DNA, 120 bp, Artificial Sequence
  ENSG00000237013_2 (sequence is synthesized)
tgaaaaatgccactgtttggttcagatggtgaagaggaactcaggaaggcctggcagtctctaggaggctagggcagtggttctcaaatgatagggtgtacagaaattccctggaggact

SEQ ID NO: 992010 - DNA, 120 bp, Artificial Sequence
  ENSG00000237013_3 (sequence is synthesized)
caacaaagattgctaggcctactcccagggtttctaattcagcaggtctggggatggagctcaagtatctgcatttctaacaagtccccggtggtgctgatgctgcttgcatggaccagt

SEQ ID NO: 992011 - DNA, 120 bp, Artificial Sequence
  ENSG00000237013_4 (sequence is synthesized)
tttgagaaccatacttggagaaacacttggttaggaaaactatgtctgttacagattgatcaaagggctcttaagttccttttgtacaataaatcactgcgatatcaaatgaggtaaatg

SEQ ID NO: 992012 - DNA, 120 bp, Artificial Sequence
  ENSG00000237013_5 (sequence is synthesized)
aacatgctctttgaactcttaacttctagaccaatataaaacattctaaatatgaaatggaaacatttacaattgttattgattctcatcaatgcaatgttcaataaagataagaatcac

SEQ ID NO: 992013 - DNA, 120 bp, Artificial Sequence
  ENSG00000237015_0 (sequence is synthesized)
ggtcaaggaaaaccaaaagcagccaggggtgggcccacgccacaggccaggccccatgccaagtgtgctggccaccattccctcccgtctcctcactgtggaccagcatggaatagcgtc

SEQ ID NO: 992014 - DNA, 83 bp, Artificial Sequence
  ENSG00000237015_1 (sequence is synthesized)
gcatggaatagcgtcaccctggtcagcagcagaggctcagaaaggaaaagggatctgcctgaagctactcagccaaacagagc

SEQ ID NO: 992015 - DNA, 82 bp, Artificial Sequence
  ENSG00000237015_2 (sequence is synthesized)
agcaccatttattaaaaagaatattcttttcctcattgaatcgacttggcactcttgtcaaaataaattgactatacagtaa

SEQ ID NO: 992016 - DNA, 120 bp, Artificial Sequence
  ENSG00000237017_0 (sequence is synthesized)
tgcgccccgccaggctagcgggcctgtgtgtgtgctgtcaggcgtcgatgctgggatggtgatgtgtcccgactgcagggagaggacccgggaagctccgaggttggtgacctctcctgc

SEQ ID NO: 992017 - DNA, 120 bp, Artificial Sequence
  ENSG00000237017_1 (sequence is synthesized)
ccctcctgtgtgtctctccccatggctgatgtgcagccctcagtggattctgtgagtctttctagtgaatggtcaaacctgagggtggtcttcggagcagttgcacgctaacccgacgct

SEQ ID NO: 992018 - DNA, 120 bp, Artificial Sequence
  ENSG00000237017_2 (sequence is synthesized)
gcttgtcgtgagctaggcctgaactgtaagtgcttcatgtgcactgagccctcgtcccaactcatgaagcaggcgctgtgctcccatttgataggggaggagactgaggcacagggcgct

SEQ ID NO: 992019 - DNA, 120 bp, Artificial Sequence
  ENSG00000237017_3 (sequence is synthesized)
catgcctcttgcccacagtcacctgactggtgggtgctggagctggtctgctgcagagccctggctctcacgtcccatgccaccctgttcccagctcctgagtgctaccgtcagctgggc

SEQ ID NO: 992020 - DNA, 120 bp, Artificial Sequence
  ENSG00000237017_4 (sequence is synthesized)
cagatggtgggtggctgctcaggctgtctgggcacagcggaaggctccaggggggccgggggaggggccatgacgcagtgggctcaccggtggcagggactgcacgatgtcactgtggta

SEQ ID NO: 992021 - DNA, 120 bp, Artificial Sequence
  ENSG00000237017_5 (sequence is synthesized)
gatgtagccggtgtggggcagcactgaggtagacgagaagcccgacagcgtcttgcgctgggccccgagcagcatgatgttgcaggcgggcatcttggagaggttggtcaggccgccggc

SEQ ID NO: 992022 - DNA, 120 bp, Artificial Sequence
  ENSG00000237017_6 (sequence is synthesized)
cacacctgcggtgggagggagggaggaagggggggcggtcagaagaaagcagagaggtgggggtgagtaaatctgcctgggggctcgacgtgtgctgggcacctttacatgaagttctgg

SEQ ID NO: 992023 - DNA, 120 bp, Artificial Sequence
  ENSG00000237017_7 (sequence is synthesized)
ttggattcctcgatggccctgccaggcgggcgacctggcccattccgcaaggggcagatgcaaaggaggctcagagagggagggcagctggcctgggggtgcagggaggaggcccccaac

SEQ ID NO: 992024 - DNA, 120 bp, Artificial Sequence
  ENSG00000237017_8 (sequence is synthesized)
aggaagctgaccaccacgtttgtgctaagccacactaacgccgttccagggatggctgtgttttggaaccattttcaccaaaccaggagctccctgacaacagggcctgggtgtggtcat

SEQ ID NO: 992025 - DNA, 120 bp, Artificial Sequence
  ENSG00000237017_9 (sequence is synthesized)
ctctgggtttccggcacaggggagggagaaggagctgtgggtgagtgtttttcccacagatgaggctttgctgtgtgccaggctggctgacctctgtgatgtccagggagacggggtgct

SEQ ID NO: 992026 - DNA, 120 bp, Artificial Sequence
  ENSG00000237017_10 (sequence is synthesized)
gaggtccaggtgccaaagcccccattctacagaaaaggatgtagctttcccaaggtcacagtgtcagcagacccccgctccatgggacccagcccggggactcacccatgatcttggcgg

SEQ ID NO: 992027 - DNA, 120 bp, Artificial Sequence
  ENSG00000237017_11 (sequence is synthesized)
ccgtggatgccccgataatgatggacaggttgggtgcgatgaaggacatccgggactccacatactcgtagatgcggtgcttggaggcgttcagctccagcgccatgtcgcaggcctcct

SEQ ID NO: 992028 - DNA, 120 bp, Artificial Sequence
  ENSG00000237017_12 (sequence is synthesized)
ccagccgctccagctcctcctccgacagctgctgcctgcaggggcgggtgggcccagcctcctgggtctcccgcctgcctggtgtgcccagccccagccctctcggttctgtgtgtgtgt

SEQ ID NO: 992029 - DNA, 120 bp, Artificial Sequence
  ENSG00000237017_13 (sequence is synthesized)
gtgcatgtgtgtatgtgtgtgtgcgtgtgtacacctgcgtgtgtagctccagcctaatccccaatcccattagggcccggcgcctccctcgaagcggacatacccctgggtggtggaggc

SEQ ID NO: 992030 - DNA, 120 bp, Artificial Sequence
  ENSG00000237017_14 (sequence is synthesized)
ggtgacgctgacgaccatgatggtggcattggtgaggatctgctgcaggttctcattgttcttgcacttgtccaggctgttgcccagctcctgggggcgagcagagaagataggggaggc

SEQ ID NO: 992031 - DNA, 120 bp, Artificial Sequence
  ENSG00000237017_15 (sequence is synthesized)
tcgggaactcaggaaggctcgagaacctctcttgctcagcacctcctcaggtctcttcttagggacactgggacagtcagggtctctgcactgggggcctctcctgcctccaccgcctga

SEQ ID NO: 992032 - DNA, 120 bp, Artificial Sequence
  ENSG00000237017_16 (sequence is synthesized)
cccgggcagagtggcgtctggaaagactgtggcctcacaagcctctggcctgcgtcaagtcggagtgcaaatccgcggcctcgcttccctgcaggggcttccccaccgccatcctaatcc

SEQ ID NO: 992033 - DNA, 120 bp, Artificial Sequence
  ENSG00000237017_17 (sequence is synthesized)
tttcctggacatgcgtggggacctcctcctctccccgccctcacgcacacctgcccctcttttccgaaacccttccttggctttctcctaagacccaaaggctggacgtgatccgacctc

SEQ ID NO: 992034 - DNA, 120 bp, Artificial Sequence
  ENSG00000237017_18 (sequence is synthesized)
ttccccgtcccctccttccccgcctcacttcctccccacttgttccctctccagctctctgcacttagacgtctctctcccccaaatctccgtgtgcctgccctgtgtcaaccttcggat

SEQ ID NO: 992035 - DNA, 120 bp, Artificial Sequence
  ENSG00000237017_19 (sequence is synthesized)
gtcaactccaatgccaccggctccaaccacagcgggagcagcgtgggtcaggccagcggggaagccctctcgggagactggggttggaggggagccctgagaaagtcctgtccaggctcc

SEQ ID NO: 992036 - DNA, 120 bp, Artificial Sequence
  ENSG00000237017_20 (sequence is synthesized)
gtccctcccacgctgggcagagcagaccactgagccctcgtccactcctctccatcgtctccagaccctcaggcctctgggagggggtccgagagtgagccccgcctgccccttcacgcc

SEQ ID NO: 992037 - DNA, 120 bp, Artificial Sequence
  ENSG00000237017_21 (sequence is synthesized)
agcagaagcaccccaccttctctgcgctcaccttgaccgtgcggatgtaatccagtgcattggggaccaaggactccagttcagggaatctctttgagtacttatcccggatgaacttat

SEQ ID NO: 992038 - DNA, 120 bp, Artificial Sequence
  ENSG00000237017_22 (sequence is synthesized)
ggatgatgtctaggtaactgaagccctggcttgtggcctggcacacgggcaccagcatacagcctttctcagccgtccttaccgctaggtgtgaccaggggaattagttctggtctgtaa

SEQ ID NO: 992039 - DNA, 120 bp, Artificial Sequence
  ENSG00000237017_23 (sequence is synthesized)
aacgtgagctgcagtgacatgttcttaaagaaaagaagcgccttgctggtgggaatgcggaggtgatggctggaggtggggcagtcacctcgcaccgtgaggcaggtggccgaccaacag

SEQ ID NO: 992040 - DNA, 120 bp, Artificial Sequence
  ENSG00000237017_24 (sequence is synthesized)
gatggaaagagccggggccctacaggcagccaagcggccacaccatccccgagtgctcctcagactcatacgcgagagaacgcacttccttcttatttcagccactctgtgacagcaggt

SEQ ID NO: 992041 - DNA, 120 bp, Artificial Sequence
  ENSG00000237017_25 (sequence is synthesized)
tgttggcatccacgatgacgcggtattcaggcgcggcctccactggtcccatcactgtgaggacacggaggcatgggtcacttgtgcacctccagtaaacagggactgccacagcttgtg

SEQ ID NO: 992042 - DNA, 120 bp, Artificial Sequence
  ENSG00000237017_26 (sequence is synthesized)
agatgtttcacctctgcctcctcaaccagacaccgggtgtgacggggtctgactccatccctgagcctggcctgacatcaggaaatgtcactttctgtgtcccataaccctctggaggga

SEQ ID NO: 992043 - DNA, 120 bp, Artificial Sequence
  ENSG00000237017_27 (sequence is synthesized)
gaaattccttggcctggcatctggaactctgcaggattctctctccggatatctgaggccccgggcctgccgctgtctttccctgggcccccttctccctttctttgcctggcacatgca

SEQ ID NO: 992044 - DNA, 120 bp, Artificial Sequence
  ENSG00000237017_28 (sequence is synthesized)
ttcatgctctacagtccaattcagctatcgattcttcctgacacctggggcagggtcagccagtccctcctgtggctccggtgtccccagcttggtaccaccactgatagctgtctggaa

SEQ ID NO: 992045 - DNA, 120 bp, Artificial Sequence
  ENSG00000237017_29 (sequence is synthesized)
cctggcctgcctcttccactagaccttgagtactttgagagcaaagacctgggcgattcaactgggtgcccaggtaaacgttaaagaaagcaagcagtgagtctcccgaaactctgccct

SEQ ID NO: 992046 - DNA, 120 bp, Artificial Sequence
  ENSG00000237017_30 (sequence is synthesized)
gtctcccgaaactctgccctctcactacacttctttccccagaaacctcctatggcttcctgtcatcaacaaattccattcaagaagaatgggaaggctgggcgtagtggctcatgcctg

SEQ ID NO: 992047 - DNA, 71 bp, Artificial Sequence
  ENSG00000237017_31 (sequence is synthesized)
agccaggcatggtgttgcatacctgtaatcccagctatacataaggctgagggaggagaatcgcttgaacc

SEQ ID NO: 992048 - DNA, 62 bp, Artificial Sequence
  ENSG00000237017_32 (sequence is synthesized)
atacaaaatagccaggcatggtgttgcatacctgtaatcccagctatacatacacatcactg

SEQ ID NO: 992049 - DNA, 120 bp, Artificial Sequence
  ENSG00000277476_0 (sequence is synthesized)
ttttttttttttttttgtagaaagacctttaatacttctgtttacaaaattcaggcatacatttcagtttgccctgaaccgtgcccaaggctgtgtgctcatctctgccaggatgtctgt

SEQ ID NO: 992050 - DNA, 120 bp, Artificial Sequence
  ENSG00000277476_1 (sequence is synthesized)
gccctcatgtactgctgacgtggagggtgcagagcagagcctggggtctggaggcttcgctgggcctcagggggaggggaatgtgaatgtggcccggcccagaggaccctccatttcatc

SEQ ID NO: 992051 - DNA, 120 bp, Artificial Sequence
  ENSG00000277476_2 (sequence is synthesized)
agttttggattgggcaacagaggaagcagatgtctgggctgcagacctgctggtctgggcaggggtttgggaaccccggggttgcctgccatggtctagaggagatggctgcggctactt

SEQ ID NO: 992052 - DNA, 120 bp, Artificial Sequence
  ENSG00000277476_3 (sequence is synthesized)
cccacagggtggggtggccactaggggcttgaagatttgctcactggagcctttgtgcttggccctcagcagcacagctggggctgtggtcccgtgcaaggtgtgctgagggttgtgtag

SEQ ID NO: 992053 - DNA, 120 bp, Artificial Sequence
  ENSG00000277476_4 (sequence is synthesized)
gtggctggtggtggcagcttgtgccagagtgacacaggcttctgtgggcctggctgggggcagttaaaaagccgaaaaggtacttggctttgtgagggcaaggcttgggaggcggggccc

SEQ ID NO: 992054 - DNA, 120 bp, Artificial Sequence
  ENSG00000277476_5 (sequence is synthesized)
tgcaggacgtcatgttctctgtcctggttaggaggggggaggtgttgggggggggaaggtggggcagatcccaactggcccctgtccctgggctgcaagctgacagcaggccagggaagc

SEQ ID NO: 992055 - DNA, 120 bp, Artificial Sequence
  ENSG00000277476_6 (sequence is synthesized)
agtgaggccttctgccctggccttggggagaaggagtgcatgtgtgaggctgggatacagtggccctggagtggggctagggctcatcgccagcaccaggcgcggggaggatttaaaacc

SEQ ID NO: 992056 - DNA, 120 bp, Artificial Sequence
  ENSG00000277476_7 (sequence is synthesized)
agagtcctgtctctgagccaccccacagggacgcttgatccaagcctgttaaggccgtggaactcgagggtaggcagtgggctgggccaccgtgggttcaggatggaggtgtgggggctg

SEQ ID NO: 992057 - DNA, 120 bp, Artificial Sequence
  ENSG00000277476_8 (sequence is synthesized)
ccctggaggaacgttagtgtttctgagagcaccttagtgttgctctgcctcagccagctgggcaaggagttggggagcggggaggaggccggcgccatggagtggggaagggagccgtca

SEQ ID NO: 992058 - DNA, 120 bp, Artificial Sequence
  ENSG00000277476_9 (sequence is synthesized)
ctgttggggatcagccgctagtgtaaacgagcatctccacccacccagataagccccccacccaagtgtggagccctgctcagggagtacctcaagggccccggcctgggtggcgccagc

SEQ ID NO: 992059 - DNA, 120 bp, Artificial Sequence
  ENSG00000277476_10 (sequence is synthesized)
aggcttggacactgccctggcagcaggggccccgtggaaggcaggatacccagcagggggtgccacccagtgtggatggaggggcagggcgggggcgcccctgagtcactgggcagaggc

SEQ ID NO: 992060 - DNA, 120 bp, Artificial Sequence
  ENSG00000277476_11 (sequence is synthesized)
gacatcgccctcatggaagcccagctccctatctttctccggctccaagtcatacagcccttgcagctcggctggtctaggggcggcatgctcctgctaggagtccagatggacttgtcg

SEQ ID NO: 992061 - DNA, 120 bp, Artificial Sequence
  ENSG00000277476_12 (sequence is synthesized)
taagatcggaaagaggacgaagctgcgatcttggggactgtggtgcaggggaagccccggttggactgctcaggctttccgaggtcaaagcactcccggggcttgggcttatactcccgc

SEQ ID NO: 992062 - DNA, 120 bp, Artificial Sequence
  ENSG00000277476_13 (sequence is synthesized)
ctgggtcgtgaggaagcttcccggatcctgcacttgaacttctgggccagctggtccaggatctgcacggcctgccggtggtagtccagctgcgcctctgccaaggccgggagttgactc

SEQ ID NO: 992063 - DNA, 120 bp, Artificial Sequence
  ENSG00000277476_14 (sequence is synthesized)
acctactggatgtcggtctccaggaggttgtgcatgctggtttctgccacctccttggactcctcaaacttctccagcgcctggtgcagctcctcttcggggatcttgccctgccgcttc

SEQ ID NO: 992064 - DNA, 120 bp, Artificial Sequence
  ENSG00000277476_15 (sequence is synthesized)
ttttagtcaaagtccaggcggcggccctccagcttctgcaggtggtgctggatctccttcaggtctttctcacataggttctggagggggtcaatgaagttatgcttgacctctatgtcc

SEQ ID NO: 992065 - DNA, 120 bp, Artificial Sequence
  ENSG00000277476_16 (sequence is synthesized)
agggagtccttcacctctgccaggtgcttcatgggctcgccggcatccagcagtgcatcgctgaagttggactcgtcgcgcagctccttcccatggcggatcaggcactcgcccaggagc

SEQ ID NO: 992066 - DNA, 120 bp, Artificial Sequence
  ENSG00000277476_17 (sequence is synthesized)
ccccctgactgcaggtagccggggttcttcacctggccccggatcttgcacgcggtgttgagcatggtcagtttagcctgcgaggctgggttgggctgcgggtactcgatggtcctggac

SEQ ID NO: 992067 - DNA, 120 bp, Artificial Sequence
  ENSG00000277476_18 (sequence is synthesized)
agtacttacgtcaccgccttgctgatgacatccaccttctccatctcttcgaagtcatcatccagcttggtcccctcagcccctccgaccttctcactgaccagttggctcgccttgtag

SEQ ID NO: 992068 - DNA, 120 bp, Artificial Sequence
  ENSG00000277476_19 (sequence is synthesized)
aactgcttcttcagcccggcaaccgacatgctgcctcctgccgcggaaccttccgcccagacccccctgcccagaccccgccagcgacaggctcccgggcaccaccaaccctctgcgcgc

SEQ ID NO: 992069 - DNA, 120 bp, Artificial Sequence
  ENSG00000277476_20 (sequence is synthesized)
ctcagcggcccccatcagcaccgcctccaccacccgcttgccagctcggcgcccgccccggcgccgcctcgagttcatgattctttagtctccttcaatctagatctgttcccaggattg

SEQ ID NO: 992070 - DNA, 120 bp, Artificial Sequence
  ENSG00000277476_21 (sequence is synthesized)
tttaaaagcatactgacaaacctttgagactgtaaatgacctgaggtatacattatctttacttgagaatagtaatttttcaatatgcattaaagatcattacacatgagctaagacaaa

SEQ ID NO: 992071 - DNA, 120 bp, Artificial Sequence
  ENSG00000277475_0 (sequence is synthesized)
agaatgctaaccccctggcatgtatctagtcagcggaggcgacggctgctgctaaacaccttacaatccacgggagggcccctcccctaccccgaagtagctattccgcagaggtggaga

SEQ ID NO: 992072 - DNA, 120 bp, Artificial Sequence
  ENSG00000277475_1 (sequence is synthesized)
gactcgcgtgtagctcaatgcccacgcacttagccgatgggaaatcacgaattgatgaccagttggctcttggatgtgaggaaaaatctccagagtcagagggaactctcgaagttttgc

SEQ ID NO: 992073 - DNA, 120 bp, Artificial Sequence
  ENSG00000277475_2 (sequence is synthesized)
ccggagcaaacggaagggtggcgttgccatcgcctaagatgggaaaatggcaggtgtcacaggttgcaggggaaggtcggagaccagctgagggccccggagccttcctggaaagagttt

SEQ ID NO: 992074 - DNA, 120 bp, Artificial Sequence
  ENSG00000277475_3 (sequence is synthesized)
ctccgcgctcccgcctcctcctggcaacctggtgcgcggctccggatctggcgacccacgaccggctggtcacttgctgccacctcgcaaaggcgcatctctagtccagtggtgagctgc

SEQ ID NO: 992075 - DNA, 120 bp, Artificial Sequence
  ENSG00000277475_4 (sequence is synthesized)
ggccgggtcgctgtaactcgctccaggactcgggactcgtggccttggtgtccctcgcggagccctcggtgtgtcgcctgcaggctctttttttgaagaaagcagggagggaatggcctt

SEQ ID NO: 992076 - DNA, 120 bp, Artificial Sequence
  ENSG00000277475_5 (sequence is synthesized)
gtgagagactccaggagcaaagagcgaccctcacaaggcccaagtcctcccagagctcagggaagctgtggcttctgacggaagaagggagagaaagctccctcctgtgtgtccctggtg

SEQ ID NO: 992077 - DNA, 120 bp, Artificial Sequence
  ENSG00000271133_0 (sequence is synthesized)
cctcccgggcgcacctcggggcccgcgggccgagtgtcgctaggacgttttccgcaggcctagcaggcggaccccgcggctcggagcaagcggtgcaggggcaggagcgattcccattcg

SEQ ID NO: 992078 - DNA, 120 bp, Artificial Sequence
  ENSG00000271133_1 (sequence is synthesized)
aggagtttgacctctcattttaatacaacacccgcctcttagaggcagcagaccagtccagccaggtcaaggtgtggaccgcacaacggggtgcacaggattagttaagcaaagcaggaa

SEQ ID NO: 992079 - DNA, 120 bp, Artificial Sequence
  ENSG00000271133_2 (sequence is synthesized)
atcccaaccttagcaacataattctactggaggtgttgatatatatactaatccagaacaaccatgtagcaagaggaataaaatgaagttcagaagtctgtttcgggaaattttgaagcc

SEQ ID NO: 992080 - DNA, 120 bp, Artificial Sequence
  ENSG00000271133_3 (sequence is synthesized)
ctttagaaagaaagatttctacattttgttacatgaaattcatgcaaatatatgtcaggtgccagtgctatggagttgttgaagaataagcacaataccatttattaccacttctcagtt

SEQ ID NO: 992081 - DNA, 120 bp, Artificial Sequence
  ENSG00000271133_4 (sequence is synthesized)
gtaaagaggctgtaactctggttgtcgaaataaaataaaatgaaatctcctagatgtgacactgtgacccctgccagttatttacaaacaagttatctgcacattttgggctgtaaacat

SEQ ID NO: 992082 - DNA, 120 bp, Artificial Sequence
  ENSG00000271133_5 (sequence is synthesized)
tcaccataactcaccctttttcctatgaggaaatgtacagcatattttaaagaaatgcagtattgttatcttcgtcatattacctgaagaattctaataaaggaaaaatgtttcggaaga

SEQ ID NO: 992083 - DNA, 120 bp, Artificial Sequence
  ENSG00000269145_0 (sequence is synthesized)
catctttgtaaatacgggcttttattcactgccagctccaggatggaaggagggggtgaatcatgcacagccttggtctaccctccaacactaggcagtgctggacaggggactcagaaa

SEQ ID NO: 992084 - DNA, 120 bp, Artificial Sequence
  ENSG00000269145_1 (sequence is synthesized)
tctgacaccagaccctccattcaagctcccttgatgacaacgcccacaacagggtctggctgatgctccgttctgccacgactcctgctgggtgatcgtgggacaggtctccgcccctcg

SEQ ID NO: 992085 - DNA, 120 bp, Artificial Sequence
  ENSG00000269145_2 (sequence is synthesized)
ctggggtctcagctgctttgtctgtaaaatggaggaggctctggacttctcaggggctgggtctcttgggcccccaaggcggcggccccggccggcatccagaggccttggtgtggagtg

SEQ ID NO: 992086 - DNA, 120 bp, Artificial Sequence
  ENSG00000271138_0 (sequence is synthesized)
acggcctggattcctctcctcctcatgtccctctctcactgcacagtttccctctccagcctgtgctgactcagctgccctccctctctgcaaccccggtagcatctgccagactcccct

SEQ ID NO: 992087 - DNA, 120 bp, Artificial Sequence
  ENSG00000271138_1 (sequence is synthesized)
gatacactggagatggcagaagccagggagccctctccagcatctcctgagctaccactggcattcaaataagcaccagggctccagcgtccccagccgcttctttggaaccaaagatgc

SEQ ID NO: 992088 - DNA, 120 bp, Artificial Sequence
  ENSG00000271138_2 (sequence is synthesized)
ccctgaaaatgcagggattctttacatctctgggcccagctagagaacaaggctattactgtatgcctggaccagtgatgcttctcacagcgacacaggcaggcggggaagtgggacaaa

SEQ ID NO: 992089 - DNA, 120 bp, Artificial Sequence
  ENSG00000279727_0 (sequence is synthesized)
atttttgtccttgcaggacaagaagccagctttcagagattctccagccataaccatcatcatctgctcaatgcccaacgtctctctcccatgctgcctccctttctctcacacacacat

SEQ ID NO: 992090 - DNA, 120 bp, Artificial Sequence
  ENSG00000279727_1 (sequence is synthesized)
aaagtaaatgaaataatctctagaacttttccatcttgcaaactggaaacggcacccactgaacaccagtcccatttccccttacccacagcccctggaagccacccttctactttgtct

SEQ ID NO: 992091 - DNA, 120 bp, Artificial Sequence
  ENSG00000279727_2 (sequence is synthesized)
tactctattacctcatgtaagtagaatcatatgttgtttgtcctttggtgactggtttatttcacttaccataatgccctcaaggcccgtccctgttgtaccaggggtcagaatttccta

SEQ ID NO: 992092 - DNA, 120 bp, Artificial Sequence
  ENSG00000279727_3 (sequence is synthesized)
acttttaaaggctgaataatattccattgtatgtatataaccagcattcctacttttaagaatttatattaaagaaacatttctacaagttcccaaataaacgtttacttcaggagtgtc

SEQ ID NO: 992093 - DNA, 120 bp, Artificial Sequence
  ENSG00000279727_4 (sequence is synthesized)
taggtgacagcaggatgcggctgagtcagtgaccccagcgaaggccaaacggagcagaagaaccaccggctgagacctgcccaaatttctgacctccagaattgacaagaagccagcttt

SEQ ID NO: 992094 - DNA, 120 bp, Artificial Sequence
  ENSG00000279727_5 (sequence is synthesized)
cagagattctccagccataaccatcatcatctgctcaatgcccaacgtctctctcccatgctgcctccctttctctcacacacacataaagtaaatgaaatagtaagttctccctggcct

SEQ ID NO: 992095 - DNA, 120 bp, Artificial Sequence
  ENSG00000279727_6 (sequence is synthesized)
tctccagcagcctaatctggcatctgggatgccttaaacatgttcctggatcaataccatgtagttgtgtcccaggtctacaataccatgtagaaacctgtgtcccgggtcatctgtaag

SEQ ID NO: 992096 - DNA, 120 bp, Artificial Sequence
  ENSG00000279727_7 (sequence is synthesized)
atcatgattcgaaggatgggtaaatcaattcagcaggaaattgctctcctttctgccacaaatatctctcctagacaatggatactggcttcccctgatcttgtcactctaaatctgctt

SEQ ID NO: 992097 - DNA, 120 bp, Artificial Sequence
  ENSG00000279727_8 (sequence is synthesized)
attggagaacaaaagcccaggtgggcgcttgaggagccaccttcccctcccccaacaaccaccataatggtgcaaagtttaagaagagttcactggaaaactctgtttaacccgatagac

SEQ ID NO: 992098 - DNA, 120 bp, Artificial Sequence
  ENSG00000279727_9 (sequence is synthesized)
tttaattccttttggtagcagataaatcaggcctgccatcaacagacagctgatccttactcccacccaccacccaggaaaatgcatttctctgctcagtaagaagggataacccatcag

SEQ ID NO: 992099 - DNA, 120 bp, Artificial Sequence
  ENSG00000279727_10 (sequence is synthesized)
caaggtaccaggtgttcttgaggtgggttgtttagaaaccttcctcctggtgctgcagaattctaaccctgttcaggactttatgtcctctgtttaagactcagaatgtatcttcttatg

SEQ ID NO: 992100 - DNA, 120 bp, Artificial Sequence
  ENSG00000279727_11 (sequence is synthesized)
gatgatgtgacctgaatatctgacaggacattttagggggatgggctgcaatggggaacagggtactgtcatcacagtatctttggagcaagatctaagattaaaatgtggcttctcata

SEQ ID NO: 992101 - DNA, 120 bp, Artificial Sequence
  ENSG00000279726_0 (sequence is synthesized)
ggaaacacagaatctggcagcctagattcgtaaatcagcactctttgttcctctaccgggaacaagggcgggttgtcgttaatgtccctcacctccacgtccacatggaaaacctgcagc

SEQ ID NO: 992102 - DNA, 120 bp, Artificial Sequence
  ENSG00000279726_1 (sequence is synthesized)
ctccacgtccacatggaaaacctgcagcggcctgtccacgatcacctccaggtggatgctgcactccgcgctccgcccgcacagctcctcgcggtcgatccgagaattcacaaacaaaat

SEQ ID NO: 992103 - DNA, 120 bp, Artificial Sequence
  ENSG00000279726_2 (sequence is synthesized)
tcctcgcggtctttggaggccatcctgaacaggcgcggcaccagctccgccagctccagccccaggtcctgcgcgatccggcccacgaaggtgccgtgtttggcctcctcgggtacggag

SEQ ID NO: 992104 - DNA, 120 bp, Artificial Sequence
  ENSG00000279726_3 (sequence is synthesized)
tagtggagctggccgctccccaccttccaggctgcgaggagcagaagcgggaggagcagacattgctttcccaatctatcctccggggtaaacaccatgtcaaatacctctggttttatt

SEQ ID NO: 992105 - DNA, 120 bp, Artificial Sequence
  ENSG00000279726_4 (sequence is synthesized)
tccattagaagatcttccgcataaagataaaatactgtatgttccggaatttattaatccatttcttctgcgtccgccatcattcaacagtcagggaatgatgcagtaatagaagaaatt

SEQ ID NO: 992106 - DNA, 120 bp, Artificial Sequence
  ENSG00000279726_5 (sequence is synthesized)
tgaatgttggctagctataacttcatggtagacagcgacatcatgcggctccaaaagttccattcaagacaaaactgccattaataggatatctacattcaatggtatgatttatttcaa

SEQ ID NO: 992107 - DNA, 120 bp, Artificial Sequence
  ENSG00000279726_6 (sequence is synthesized)
cgttagtgaacaccttgaagacattttttaaagtgatatttgaaaagatgattagacaagttaaatatgaaaaatatttaaagccaaaactcgaaagttggacttacattaccagaaaga

SEQ ID NO: 992108 - DNA, 120 bp, Artificial Sequence
  ENSG00000279726_7 (sequence is synthesized)
tccaaatttgcttctggttgttcatttctttctgacgtgttaagacttggagataggcctgggctgaaggccatgaggtcggtcttgggtgggccctcgctagagcacaccctctgccgc

SEQ ID NO: 992109 - DNA, 120 bp, Artificial Sequence
  ENSG00000279726_8 (sequence is synthesized)
ctctgctgtgagttcgaccagctccccaacgcgctggagcacaccagagtgggcttgcccggcacatacgcaccctcagtgggcggcactgagcaccgcagcgccgtgtacagcagcagt

SEQ ID NO: 992110 - DNA, 120 bp, Artificial Sequence
  ENSG00000279726_9 (sequence is synthesized)
gtgagcaccagcaggctggacaccgcgcagatggcgatgatcaggtacacgttgacatccaccagcgccgcctctgggcccgcgacacccaccgacgcccgcgaagacgcctttggcgcc

SEQ ID NO: 992111 - DNA, 120 bp, Artificial Sequence
  ENSG00000279726_10 (sequence is synthesized)
tggccgctctccaccagagatacaagcacagtggccgtggctgtcagcgccggctcaccgtgatccttcactagcaccagaaggcggtagcgcgacaagtcagcctcgtccaggacacga

SEQ ID NO: 992112 - DNA, 120 bp, Artificial Sequence
  ENSG00000279726_11 (sequence is synthesized)
gtcgtgctgatctcgcccgtgtacagccccacgcggaacgggatgcgcgcgccgcctgctgccggctgcagttcataggacagccacgcgttgtagcccgagtcggcgtccactgcgcgc

SEQ ID NO: 992113 - DNA, 120 bp, Artificial Sequence
  ENSG00000279726_12 (sequence is synthesized)
accttcgccaccacatgacccgcacccaccaatcgcggcaccagctcactgactgcaccaatagtgccacccactcgaggcgccagcagcgccggcgcgttgtcgttctcgtccagcacg

SEQ ID NO: 992114 - DNA, 120 bp, Artificial Sequence
  ENSG00000279726_13 (sequence is synthesized)
cctgcagcgtcacgttgctgcccagaggcggcacgcccgcatcccgcgcgctcacctggaactgcagcagctccagctcctcgtggtccaggggctgcagtgcgtacaccttgccgctct

SEQ ID NO: 992115 - DNA, 120 bp, Artificial Sequence
  ENSG00000279726_14 (sequence is synthesized)
ctctccgcgtgcactgacacgtagttcgacagcgcgcgctcgcccacccgccgttccaccagcgaataggacaccagcgcgttctcctgcgcgtccgcgtcccgcgcagacaccgtgaag

SEQ ID NO: 992116 - DNA, 120 bp, Artificial Sequence
  ENSG00000279726_15 (sequence is synthesized)
cggacaccctggccgtggcccacagcgaaggcgagcccccgtcccgcgcggtcaccaccagctcatagaccgacaggctctcgcgatccagggcgctgtccaacaccaacgagtagtaat

SEQ ID NO: 992117 - DNA, 120 bp, Artificial Sequence
  ENSG00000279726_16 (sequence is synthesized)
tcttgaaggtggacaccagcttgaaggggacgtggggcattaaggagcaagtcacctgcccgttggcacctgagtcacggtcagacacggtgatgagggcgatgacggtgctgagtggag

SEQ ID NO: 992118 - DNA, 120 bp, Artificial Sequence
  ENSG00000279726_17 (sequence is synthesized)
cgtcctctctgataggcaaatacaatgaagtgaccgccagttctggagcattatcatttacatccagcactttcaccaaaaccttacagtgatttgacatcggaggacttcctttatcaa

SEQ ID NO: 992119 - DNA, 120 bp, Artificial Sequence
  ENSG00000279726_18 (sequence is synthesized)
ctgcctttacttgaatttcgtaggattttgtttcttcataatccagtttatcaattaacctaatttctcctgagctggaatcaactttgaatttttcttgaatgtcacgagaaataccac

SEQ ID NO: 992120 - DNA, 120 bp, Artificial Sequence
  ENSG00000279726_19 (sequence is synthesized)
tgtcaaaggaaaagacgacttcaccatttacaccttcgtcagcatcagaggcatttaatgtggtcactaatgttccatttgctgtagtctctaacaagtggactctgtatacggcctggt

SEQ ID NO: 992121 - DNA, 120 bp, Artificial Sequence
  ENSG00000279726_20 (sequence is synthesized)
caaacagtggggcgttatcattaacgtcgaggacggtgatcagcagctcaactgtaccttgcagctccggtttgcccccatcagtggcagtcagtaataagtgaagttctggtgtttctt

SEQ ID NO: 992122 - DNA, 120 bp, Artificial Sequence
  ENSG00000279726_21 (sequence is synthesized)
ctctatccaaatattttctcaattcaagccaaagagatttactcagttcatcacttgcctctacatccaaagagaaataatcactcgggctgagcgtgtacgttagaagagcgttagcac

SEQ ID NO: 992123 - DNA, 120 bp, Artificial Sequence
  ENSG00000279726_22 (sequence is synthesized)
caatgtctgcatcagcagctccttctatcggaaaacgcgaattcaggagtctagattcaggaataaatattatttgttctctgcccctgaagacgggtggattatcgttaatgtctttca

SEQ ID NO: 992124 - DNA, 120 bp, Artificial Sequence
  ENSG00000279726_23 (sequence is synthesized)
ccttcacctccacatggaaaacctgcagcggcctgtcggcgatcaactccaggtggatgctgcactccgcgctccactggcacagctcctcgcgatcgatccgagaattcacaaacaaaa

SEQ ID NO: 992125 - DNA, 120 bp, Artificial Sequence
  ENSG00000279726_24 (sequence is synthesized)
attctgcagatttacctccagaaggtccctgtgtgttttggacgccacccggaacaggcgaggcaccagctccgccagctccagtcccaggtcctgagcaacgcggccaacgaaggtgcc

SEQ ID NO: 992126 - DNA, 120 bp, Artificial Sequence
  ENSG00000279726_25 (sequence is synthesized)
tgccgtgtttggcttcctccgggatcgagtagtggagctggccgctccccacctcccaggctgcgaggagcagaagccaaagaagcagatcccgggctcccaggccccctctcctagaaa

SEQ ID NO: 992127 - DNA, 120 bp, Artificial Sequence
  ENSG00000279726_26 (sequence is synthesized)
acaccattgcaaaaggactacacctttcttatgctctcctcttacttcaaaatcatgccattttatctaatatttccaatcatttatctctttaccgtttctgtcttctctcaggcggtg

SEQ ID NO: 992128 - DNA, 120 bp, Artificial Sequence
  ENSG00000279726_27 (sequence is synthesized)
acaaaatggagcttcctccttcacttttagtgatcagtagctcccttctattgacaagactttgtggtgtacagcgacatcatgtggccaatgtaaattttagatccattcgttgatttt

SEQ ID NO: 992129 - DNA, 120 bp, Artificial Sequence
  ENSG00000279726_28 (sequence is synthesized)
caaaatgcaatctatatccgtctgcaatttgttaaatgcaatcattttcaattttatgtccttttaagacccagaacatttcaaatctcattggagagtgtgtaatccagtattttcttt

SEQ ID NO: 992130 - DNA, 120 bp, Artificial Sequence
  ENSG00000279726_29 (sequence is synthesized)
atccagtattttcttttagtaatgattacaaacatattacaattgaattagaaactttaagatctacttaacctctccttacatcattttatttaaaacgatttatcagcttatatattt

SEQ ID NO: 992131 - DNA, 120 bp, Artificial Sequence
  ENSG00000279726_30 (sequence is synthesized)
gcaactgaatgtcaaagttttaaaataaggtagtttgactgatatgattcaccttattctaggatagcttgggtgtttttttttaaatgatattatacacacacacgtacatatgcacat

SEQ ID NO: 992132 - DNA, 120 bp, Artificial Sequence
  ENSG00000279726_31 (sequence is synthesized)
attctgcagatttacctccagaaggtccccgtgtcttttggacgccacccggaacaggcgcggcaccagctccgccagctccagccccaggtcctgcgcgatgcggcccacgaaggtgcc

SEQ ID NO: 992133 - DNA, 120 bp, Artificial Sequence
  ENSG00000279726_32 (sequence is synthesized)
ggcccacgaaggtgccatgcttggcctcctcagagacggagtagtggagctggccgctccccacctccgaggctgcgaggagcagaagagaaagcagcaggcactgggctccaggatctt

SEQ ID NO: 992134 - DNA, 120 bp, Artificial Sequence
  ENSG00000279726_33 (sequence is synthesized)
ctcgccaggagaacaacattagaggatgaagcaaagcagtatctgaatacgtaatgcacgctgttatttcttttgtggagaaagaccttgtggtggacagcgacatcatgtggctaaacg

SEQ ID NO: 992135 - DNA, 120 bp, Artificial Sequence
  ENSG00000279726_34 (sequence is synthesized)
gaccactgttgacacatagaaggaattatacctagaatccagatgctagcttcaggaaacatggcttgcttgagacaatttctgcaatcatataagttccattcaagacaaaactgccat

SEQ ID NO: 992136 - DNA, 120 bp, Artificial Sequence
  ENSG00000279726_35 (sequence is synthesized)
ataatctttgttcttgtctggagaacctgggcggattgtcattgatgtccttcactgccacctccacatggaaaacctgcagcggcctgtccacgatcacctccaggtggatgctgcact

SEQ ID NO: 992137 - DNA, 76 bp, Artificial Sequence
  ENSG00000279726_36 (sequence is synthesized)
ccccgcggcccttggacgccacccggaacaggcgcggcaccagctccgccagctccagccctaggtcctgcgcgat

SEQ ID NO: 992138 - DNA, 120 bp, Artificial Sequence
  ENSG00000279726_37 (sequence is synthesized)
gcaccagctccgccagctccagccctaggtcctgcgcgatgcggccaacgaaggttccgtgtttggcttcctccgggatcgagtagtggagctggccgctccctgccttccagtaggcaa

SEQ ID NO: 992139 - DNA, 120 bp, Artificial Sequence
  ENSG00000279726_38 (sequence is synthesized)
ggagaagccagagcagcaggagccgggatcccagacttcctctccgggaatataccatctcaatctcgttccaattatgagctttctattgcatcaccacacaatgtattttgtaaattc

SEQ ID NO: 992140 - DNA, 120 bp, Artificial Sequence
  ENSG00000279726_39 (sequence is synthesized)
gaaaatctactcactgtattcctttgaggctgggaagggagaaaaaccttccggtgtccagcgacatcatgtggatgaaaggttccattcaagacaaaactgccattaataggatatcta

SEQ ID NO: 992141 - DNA, 120 bp, Artificial Sequence
  ENSG00000261544_0 (sequence is synthesized)
ctaggtgctggttatgcagcagtgaataaaacagaaaaatctgtaccctcatggaacttacaatcttgtggaaagagagagaataaataagacatatggtatgttagacaggataggaaa

SEQ ID NO: 992142 - DNA, 120 bp, Artificial Sequence
  ENSG00000261544_1 (sequence is synthesized)
atcttttgtgtgcctatatatgtctgtgtgtagtatccctcactgtctgctggggaccagttccaggaccacctgtggattccaaaatccactcaagccccacagttgcctgttgagaac

SEQ ID NO: 992143 - DNA, 120 bp, Artificial Sequence
  ENSG00000261544_2 (sequence is synthesized)
ttgtggatacaaaaagctggcctatttttgcagctttcgtgtcccacaataccatatttttgatccaagttggttgcagatgcaaaattgcccatactgagggctgacatatttattgca

SEQ ID NO: 992144 - DNA, 120 bp, Artificial Sequence
  ENSG00000236658_0 (sequence is synthesized)
ccacactccacagatgaaaggaggaagaagaaagtttccctccgggggaggccaggccaggttagacccagaacatcctgatggactatttaggtgtgaaaagcagaggctcaggggctg

SEQ ID NO: 992145 - DNA, 120 bp, Artificial Sequence
  ENSG00000236658_1 (sequence is synthesized)
ttaattcttccagctctcacgtatggtggcttgttgtgtcacgtgttttgcaattttgcattgcgcgttccatctttgtcagagctttatccgtgggaatcggtgtgtctaggctgggag

SEQ ID NO: 992146 - DNA, 120 bp, Artificial Sequence
  ENSG00000236658_2 (sequence is synthesized)
tccgtctctccctggggggtgagcttatacttccacgaggcaccagaagacactccaaacccaagactgcttgaagtttagttcccatcttgcatgtagaataaattcagatccaaaata

SEQ ID NO: 992147 - DNA, 120 bp, Artificial Sequence
  ENSG00000236651_0 (sequence is synthesized)
aacgcccggccaaggggcgggcgtcacatggtgggcgctgtggctgcggctgcggctgcagcggccccaggtgcaaacagactgccgccgaatgtgagcagcgaggcgaggggtcgaggt

SEQ ID NO: 992148 - DNA, 120 bp, Artificial Sequence
  ENSG00000236651_1 (sequence is synthesized)
agcgaggagtcagggtggcccgcagcaggaagacagaaggcgtggagacagactggcgttttgcctcagaggaagaagtggggtcccctctcccattctgtgagcaagtgccagttccag

SEQ ID NO: 992149 - DNA, 120 bp, Artificial Sequence
  ENSG00000236651_2 (sequence is synthesized)
tgattcgtactttcatgtccgagttggaaaccttggcccgacggtgatggactgcacgacttgctggactcccaagtccgaagttcctgcggcagcgcttgctttgtggcgccacctgga

SEQ ID NO: 992150 - DNA, 120 bp, Artificial Sequence
  ENSG00000236651_3 (sequence is synthesized)
gctgacgccgcgctgcgacctctcccctcgtaggagcctaacgccaacccctgcgccaggcagggatggaatcatcattctcattgtatagatggacactgaggctcgagaacggaaacg

SEQ ID NO: 992151 - DNA, 120 bp, Artificial Sequence
  ENSG00000236651_4 (sequence is synthesized)
acttcttttgagttgggtgcctctccccccttgccaggcagccgcctttctctgttgccatagcacaaatcacaagggtatttatggaacaaaagctcagaccgctgagatgttcactct

SEQ ID NO: 992152 - DNA, 120 bp, Artificial Sequence
  ENSG00000236651_5 (sequence is synthesized)
gcactttcagcagcactcacattgagatatgagaagactgcaacaagaacaaaagggttgtgccacctcctttggatgtgaagaggatgtgctgacacgtgtgctcgggagccagacttt

SEQ ID NO: 992153 - DNA, 120 bp, Artificial Sequence
  ENSG00000236651_6 (sequence is synthesized)
gtggccttggggaaaggactgaatatttctgtgcttcgtcgtttgcatctgtggaatgcaggtgatactgagctcttccttgtgggattattgcctggaaatacaccattataggttcat

SEQ ID NO: 992154 - DNA, 87 bp, Artificial Sequence
  ENSG00000236653_0 (sequence is synthesized)
aagcagatgaagaggaaagaactgagcagcagtatttcaggattctcaataaggcatcaatgaaaaaaggtcaaaactgtgatccct

SEQ ID NO: 992155 - DNA, 120 bp, Artificial Sequence
  ENSG00000236653_1 (sequence is synthesized)
aagtaacttgagtcctgttgagcctaagtaaaggacaataatggaagtttctagtctgcaaaatatgaagatgcccctcagagacacagctgtgggtgcctctcacaagacagatgttca

SEQ ID NO: 992156 - DNA, 120 bp, Artificial Sequence
  ENSG00000236653_2 (sequence is synthesized)
ggaaaactgggctgttgctctggaattttcaatgagttattttacttgtttttgcctcagtttacagaaaataaactggcaacaatatctccttgttattgtgaggataaaataaaaggt

SEQ ID NO: 992157 - DNA, 120 bp, Artificial Sequence
  ENSG00000236653_3 (sequence is synthesized)
gtgacatttctattttaaatgtataaaatgccgaaaaattggaggcaactggaaggtacagtagtggatgtgaggtagtaagggggaaaaaaggatatgtaaatcacctaagatgaaata

SEQ ID NO: 992158 - DNA, 120 bp, Artificial Sequence
  ENSG00000236653_4 (sequence is synthesized)
gacattcagaaggccgtaacgtgaagtgtgagtgacactgattcgctaaaaatcctatatagtgtcttaaaacagcagcagtaacaacaacaaagtttatttgagaggaggaattctgga

SEQ ID NO: 992159 - DNA, 120 bp, Artificial Sequence
  ENSG00000236653_5 (sequence is synthesized)
aaaaagcttctttcaaaaaaaaaaaaagagtcttctagtgctcagacagttcgttcctctgcaaaggcgggttactctgttggggtccattatagttctgaggatgaataggacaggaca

SEQ ID NO: 992160 - DNA, 120 bp, Artificial Sequence
  ENSG00000236653_6 (sequence is synthesized)
aggagatggttcctggcccctgttctcctgccacagatctgtcccacctcccaggctccatgcatacagtgacagagatggaaagcccagaaccagtccctttaatgcacttatttgcaa

SEQ ID NO: 992161 - DNA, 120 bp, Artificial Sequence
  ENSG00000236653_7 (sequence is synthesized)
aacaagatgtcactatgcagcagagtgacagtcctttcccctggaactgtcccagagttctccaagctgaagccagggctacattcaccatctcagactcctgctgagctaagtaaccac

SEQ ID NO: 992162 - DNA, 120 bp, Artificial Sequence
  ENSG00000236653_8 (sequence is synthesized)
cctctcctaccttctcttcaggagccctggcacccttgctctggggagagtttgaagagcaacctgaaagttcccacagtttttcctcaaatctgggtttccatgagcatgggccaccag

SEQ ID NO: 992163 - DNA, 120 bp, Artificial Sequence
  ENSG00000236653_9 (sequence is synthesized)
gatcttgaccttgaactggactctgtaggaagttcttaacattaaaggaagttatttatctcttttcaactaacccaagcactttctagcaccttttagcagtttaagctctatgactcc

SEQ ID NO: 992164 - DNA, 120 bp, Artificial Sequence
  ENSG00000236653_10 (sequence is synthesized)
attggataaaatgctggggagcaggacattgacacagtcacagaatatcacacacggaatcctcattcattcccccagggaaacagcacctgtagaagacaaatctggtagacactactg

SEQ ID NO: 992165 - DNA, 120 bp, Artificial Sequence
  ENSG00000236653_11 (sequence is synthesized)
tgacaggtgattttatatgtcagcttgactaggccacaggatgtgtagacatttgtcaaatttttttttatatgtctgtgaggatgtttctggatgagattaacattgaatcagtagact

SEQ ID NO: 992166 - DNA, 120 bp, Artificial Sequence
  ENSG00000236653_12 (sequence is synthesized)
gagtaaagaagaccgccctccccagtgggggtgtccctcatccaacctgtggaagccctacatagaacaaaaaggctgaacctcccccaaaatacggtgatctcaagctgcctgacttct

SEQ ID NO: 992167 - DNA, 120 bp, Artificial Sequence
  ENSG00000236653_13 (sequence is synthesized)
ggtgctggaacattgttctttttctgccttccgactcaaactgaaaatcagctcatcttgtatcctgagtctgctggcttccagactgaactatacattgactctcccaggtttccagct

SEQ ID NO: 992168 - DNA, 120 bp, Artificial Sequence
  ENSG00000236653_14 (sequence is synthesized)
ttccagcttgcaactgctggtcttgggacttctcagcctccataatcatgcattagccaatttctatatagatctagaaattcatatatatatatgtgtgtgtgtgtgtgtatgtgtgtg

SEQ ID NO: 992169 - DNA, 120 bp, Artificial Sequence
  ENSG00000236653_15 (sequence is synthesized)
tacgcatatatatacagtcatgaatcactgagcagtgggcataccttctgagaaatgtgtcattaggcactgttatcattgtgtgaacatcatagtgtacttacacacacctagacggta

SEQ ID NO: 992170 - DNA, 120 bp, Artificial Sequence
  ENSG00000236653_16 (sequence is synthesized)
tagtgtacttacacacacctagacggtatagcctacaacacacctaggctatatagtataacttgttgctggtagattacaaacctgtacaacctgttactgtactgaatactgtaggca

SEQ ID NO: 992171 - DNA, 120 bp, Artificial Sequence
  ENSG00000236653_17 (sequence is synthesized)
atctaaacatagctaaccatagaaaaggtacagtaaaaatactgtataagagataaaacatggtgtgcctgtataggttgcttaccataaataaagcttgcaggttggaagttactctgg

SEQ ID NO: 992172 - DNA, 120 bp, Artificial Sequence
  ENSG00000236653_18 (sequence is synthesized)
gtgagtcagtgagtaaatgatgagtgaatgtgaggcccttggacatcactgtaccctactgtagactttataaacactgtacacttaggttaccctaaatctattttaaaattgttttct

SEQ ID NO: 992173 - DNA, 120 bp, Artificial Sequence
  ENSG00000236653_19 (sequence is synthesized)
ttcttcaataataaattacccttagcttactgtaacatttttacttgacaaaccttttaatttttaaaattttctgactgttataataatacttagcctgaaatacaaatgaattgtcta

SEQ ID NO: 992174 - DNA, 120 bp, Artificial Sequence
  ENSG00000236653_20 (sequence is synthesized)
aaactgctgaaagttctttctaccgagaatgaataatcctcaaccaggttttcgaatacaatggtctttattaacaagtgcgagtttgcgcctttataactaggaccaggacaacttaac

SEQ ID NO: 992175 - DNA, 120 bp, Artificial Sequence
  ENSG00000236653_21 (sequence is synthesized)
agagaaagggaacgtttgatgataaggaaaaggacgaagcaactgctgaagtggcatccagtgtcaggctccagaggagtgaggggctctctgatcaagaggaggggctggtctcaaaga

SEQ ID NO: 992176 - DNA, 120 bp, Artificial Sequence
  ENSG00000236653_22 (sequence is synthesized)
ggaccacagaaaggacttatcacaagtctttgtggtagctgaggagtgccccctacagactgatatgcacaatgcaagcagatgaagaggaaagaactgagcagcagtatttcaggattc

SEQ ID NO: 992177 - DNA, 120 bp, Artificial Sequence
  ENSG00000236653_23 (sequence is synthesized)
tcaataaggcatcaatgaaaaaaggtaagaaacctttgctgaacaaaatgtgacactaaaggctaggaaatatatggacactatgaattcttgtttttacatatttgtaaacagcaagaa

SEQ ID NO: 992178 - DNA, 120 bp, Artificial Sequence
  ENSG00000236653_24 (sequence is synthesized)
tcatatcaatatttgaatacaaatgaaaatagtaaaatagtaaaaaagatattttattctgctgtgcaaaaacaactacctggattcagaaattatttacttcagatgtcggcaacaaaa

SEQ ID NO: 992179 - DNA, 120 bp, Artificial Sequence
  ENSG00000236653_25 (sequence is synthesized)
ataaaacgtaacatatctattaaaatgaagttaaatgaattctagtttgaggttttattcctttttgtaaagactccacagagaagtatttgccttctatgaatgttatcgcttaaaatg

SEQ ID NO: 992180 - DNA, 120 bp, Artificial Sequence
  ENSG00000236653_26 (sequence is synthesized)
tttgccttctatgaatgttatcgcttaaaatgtttatgtttttcaaactaaaaatcacaaaaagacatgaaaaacatatcctatgtttatgaatagatttaaaaatatataaatctataa

SEQ ID NO: 992181 - DNA, 120 bp, Artificial Sequence
  ENSG00000236653_27 (sequence is synthesized)
agtagattctgttggagatgggaggagaaagggaggaaagggagtagagaaggccacacacaatcttaaattcaatatttcactcccgttaaagataagctgtttataagctccagtgta

SEQ ID NO: 992182 - DNA, 120 bp, Artificial Sequence
  ENSG00000236653_28 (sequence is synthesized)
tcaataaggcatcaatgaaaaaagattaataaagttaaccaagtctgagaggtgaaatgacttgccaaaggtcacttagagatattggagacaagactggaaacaagaggcaccaaaatg

SEQ ID NO: 992183 - DNA, 120 bp, Artificial Sequence
  ENSG00000236653_29 (sequence is synthesized)
tatatcagaagaaattgtcattcatcatgacactttacatgtactgcattgttttaatagaaaaatctgaagtttcattatgttaatgttgagcaatgaaaataaaacatcataaaaaaa

SEQ ID NO: 992184 - DNA, 120 bp, Artificial Sequence
  ENSG00000236656_0 (sequence is synthesized)
attactgaaacatacaagcacataatcagacacatttttggagcagaatatagaatagctcagatgatttgagaagcactgatggagaagtcgagttccttattcagatattaagccaat

SEQ ID NO: 992185 - DNA, 120 bp, Artificial Sequence
  ENSG00000236656_1 (sequence is synthesized)
tgaactggttggcttccccgttttgcagatagaactacaaaaatagaatacacactcaatgggctgaccaactgattcataacatctttattggagaatgaactttctttttctctccag

SEQ ID NO: 992186 - DNA, 120 bp, Artificial Sequence
  ENSG00000236656_2 (sequence is synthesized)
gccccctgtaacccctgtctggtattttctacatgactgattcctctctagagccagaactatggaatcttaagagaatctgtatttctttaaaaagaataaatatcttatgacactctt

SEQ ID NO: 992187 - DNA, 120 bp, Artificial Sequence
  ENSG00000236656_3 (sequence is synthesized)
aatcttaaactggcattcaacagatacaaagcaatgctactccgttgggagttggcagtctagtgatgatctatgagctttttgttattggcttgtaatgagacaggtatagaaactaaa

SEQ ID NO: 992188 - DNA, 120 bp, Artificial Sequence
  ENSG00000236656_4 (sequence is synthesized)
ttatatttgtgttacttaccagtggtaagcaactattataaaatttggtattactgaaacatacaagcacataatcagacacatttttggagcagaatatagaatagctcaggtgctttt

SEQ ID NO: 992189 - DNA, 120 bp, Artificial Sequence
  ENSG00000236656_5 (sequence is synthesized)
catttcgtttttctagtagttgatttttatcatattttactgaagtattggccttctatgaaatgtaaaaagaaactggttctttactgcagatgatttgagaagcactgatggagaagt

SEQ ID NO: 992190 - DNA, 120 bp, Artificial Sequence
  ENSG00000236656_6 (sequence is synthesized)
tgcagagtagaaaactgcttcaagatattgatatatatctgctggagataaaggaacacagtggattgctatctgagctcacctgagaaatctgaatgtagaaatctgcagttactggcc

SEQ ID NO: 992191 - DNA, 120 bp, Artificial Sequence
  ENSG00000236656_7 (sequence is synthesized)
tgaaataccagtacacagagaaatatgtcagcacttcaactgactatgggtagcaaggattgtcaaaattttcttttggatcacatattgaccatttaggagaaattgtcattgtggaat

SEQ ID NO: 992192 - DNA, 120 bp, Artificial Sequence
  ENSG00000236656_8 (sequence is synthesized)
cacttaaaaataacattttgtccaataagacctttagaaaacatgggacccagataaatgttgaaacctcagaattaggaggaaactttacaagctgtcagctagaggcagattcaacca

SEQ ID NO: 992193 - DNA, 120 bp, Artificial Sequence
  ENSG00000236656_9 (sequence is synthesized)
tatcacaggaaatgtggtagaagttccgagtaaggaattatttcagcagccatgaaagctccctgcataagaaagactcagtgtgcaacatctgaaagcagtattgccagagcatgactg

SEQ ID NO: 992194 - DNA, 120 bp, Artificial Sequence
  ENSG00000236656_10 (sequence is synthesized)
tggcaatgaagcaagatgttccctccacctatccctccctccccagtataatgcttgaagggtcagtcactgaaataagtagagagaaaagtgtttgctgaaagagctaatacataagtc

SEQ ID NO: 992195 - DNA, 120 bp, Artificial Sequence
  ENSG00000236656_11 (sequence is synthesized)
aaccttcactggtaccaatgaaggcttcccagttcaaaattcaacacccagaaaaggcagaaattttagctttaaattaagtttaaattttcagttatcccagtggactaggcatttaaa

SEQ ID NO: 992196 - DNA, 120 bp, Artificial Sequence
  ENSG00000236656_12 (sequence is synthesized)
gagaaaaacatattttatgacatgcctcttaaggactcctattatttcaatgaatttgttacagttataatatgcttgtgataaaaaggcattatttattaagaaatctaaaatgtaata

SEQ ID NO: 992197 - DNA, 120 bp, Artificial Sequence
  ENSG00000236656_13 (sequence is synthesized)
atatttcaattatatagttttagagaacctttcttgcccaacacttttctgatagcaagttggacatccttgtttctgaggctataaaccatggggtttagtaatggagtgacaatcgtg

SEQ ID NO: 992198 - DNA, 120 bp, Artificial Sequence
  ENSG00000236656_14 (sequence is synthesized)
tatgtcaccgtcaccagcctgtctttgttggacacatagtttgctgtaggcctcaggtagatgaaggaagcacagccataatgaacaataacaacactgaggtgagaggcgcaggtggaa

SEQ ID NO: 992199 - DNA, 120 bp, Artificial Sequence
  ENSG00000236656_15 (sequence is synthesized)
aacgctttccgtctgccctcagctgagggaatcttcaggatagtcctcagaatgcagagataagaaacacagataaacagaaagggaaccacaagtacaagaactccacaaatgaatatc

SEQ ID NO: 992200 - DNA, 120 bp, Artificial Sequence
  ENSG00000236656_16 (sequence is synthesized)
acaaattcgttaacatctgtgttggtacaagccagaagaatgactgctgagatgtcacagaagtaatgattgactttgttggcgctacaaaaagggaggctgaaaactaaatttactact

SEQ ID NO: 992201 - DNA, 120 bp, Artificial Sequence
  ENSG00000236656_17 (sequence is synthesized)
gtaagagaggccaagaagccaccaattgcacaggcagctgccagttttccacacacctgccagctcataagagtggggtaatgcagagggtgacaaatggcagcatagcgatcataaccc

SEQ ID NO: 992202 - DNA, 120 bp, Artificial Sequence
  ENSG00000236656_18 (sequence is synthesized)
atcacacccaatagcaggcagttggtaatggcaaaaccaaggaagaagaacatttgaagagcacaacagttgaaggagattgtcctggccacagaaagtagattgatgagcatcttgggt

SEQ ID NO: 992203 - DNA, 120 bp, Artificial Sequence
  ENSG00000236656_19 (sequence is synthesized)
agaatgacaaaggtgtagaaggtctcagatgttgagagaatgccaaggaagaagtacattggtgtgtggaggcttttatccaggtggatgacactgataatggtgacattgccactaaga

SEQ ID NO: 992204 - DNA, 120 bp, Artificial Sequence
  ENSG00000236656_20 (sequence is synthesized)
atgactagatacagaaaaagaaaaactacaaagagggccagctgaatttcaccaaggctggaaaaacccagcaacaggaattcggtgaccatggtgaggttttctgccaagatctgcaaa

SEQ ID NO: 992205 - DNA, 120 bp, Artificial Sequence
  ENSG00000232790_0 (sequence is synthesized)
ccacctgcctgtctcaatggaaagaatatgtggatttggattcagggacacctttatcacctatgtgactttaggagtcaatgaagcaagttcatgagactctgaggcaaggacaccaaa

SEQ ID NO: 992206 - DNA, 120 bp, Artificial Sequence
  ENSG00000232790_1 (sequence is synthesized)
gttgtccctgagtcaatatcttaacatttattgcatcttttattttcttaacaaaaatgaaggcatttgtgactgtgttgttttccatcaaaaattgggaatcatgccctttcatacaac

SEQ ID NO: 992207 - DNA, 120 bp, Artificial Sequence
  ENSG00000232790_2 (sequence is synthesized)
acagttgtgacacaatttgttgaagtgaaagaacactggaacagaaacaagaatacctgagatggagactcacctcttaccatcaatctagtgttgactttgggtccatcttttcttctg

SEQ ID NO: 992208 - DNA, 120 bp, Artificial Sequence
  ENSG00000232790_3 (sequence is synthesized)
ctaatttcaccaaatgaatgatccctgagggataccatggatcctgctggtctaggattggctccagctttttctggatctgcatttgctgtgcaaccctgctcgggggctgagagatgc

SEQ ID NO: 992209 - DNA, 120 bp, Artificial Sequence
  ENSG00000232790_4 (sequence is synthesized)
tctggagctgtctaggctaaacgttcataagattttgacccaatggtgaatagagagacatcacaaaggacactatacctactaagtagatttaatatgtcagagaagaggaaaacagca

SEQ ID NO: 992210 - DNA, 120 bp, Artificial Sequence
  ENSG00000232790_5 (sequence is synthesized)
atctctagcctactcttgagttctcaatcagtatgatgacgcttttagttccaaaattttatagctacccatcacacctaaccattgttggctaatatatctgaccacactggctctgca

SEQ ID NO: 992211 - DNA, 120 bp, Artificial Sequence
  ENSG00000232790_6 (sequence is synthesized)
tgtcttggggcatagttcatgtctcctggcccatctcacaggattatcaggaggacgaatgagataagtgagtgcattttgtaaattgtgaagtgctaaataaatgcaaggtaatgcaat

SEQ ID NO: 992212 - DNA, 65 bp, Artificial Sequence
  ENSG00000270265_0 (sequence is synthesized)
tctgcagcttcgctcctgaagtcagaaagaccacgaacccaccgggaggaacaaacaactctgga

SEQ ID NO: 992213 - DNA, 74 bp, Artificial Sequence
  ENSG00000270265_1 (sequence is synthesized)
acaaacccaccggaaggaataccatctgtaagaactgtaacacttaccgcgagggtccgcggcttcattcttga

SEQ ID NO: 992214 - DNA, 120 bp, Artificial Sequence
  ENSG00000270265_2 (sequence is synthesized)
acagtatggttggtccacaagagaggtgaaatttggatgcagagacaagcatgcagggagaacgtcatgtgaagatttgagttatgctgccaaaagacaaggacctaccagaagctggaa

SEQ ID NO: 992215 - DNA, 120 bp, Artificial Sequence
  ENSG00000270265_3 (sequence is synthesized)
gagaagcctggaacagatccttccccagagacttcagagggaacaggaccctcccagcacattgatcttggacgtgtagtctccagaactatgagacaataaatatcagttgtttaagcc

SEQ ID NO: 992216 - DNA, 120 bp, Artificial Sequence
  ENSG00000181908_0 (sequence is synthesized)
tttgcaggtgggagtgcagggtgagcccggcgcaggggataggaggtgggggagtcgagagctggagtcaggcgccgctcacgctgggatgacggagtgttaacctcagactctgggtcc

SEQ ID NO: 992217 - DNA, 120 bp, Artificial Sequence
  ENSG00000181908_1 (sequence is synthesized)
ctttgggccgaagctttaagaaaacaggggcagcgagcccggcgtcccaaggagccttgccaaactgggcatggagaacgggcctcctggatggccacccgcccagctgccaaagaggcc

SEQ ID NO: 992218 - DNA, 120 bp, Artificial Sequence
  ENSG00000181908_2 (sequence is synthesized)
ggagagctggagccgggacttggaggatcttcttcagagaggcaggagggcggtccgaacgtgcccccacccctgacctcaagcccatgtggagagggccaacagagcctcttggagagc

SEQ ID NO: 992219 - DNA, 120 bp, Artificial Sequence
  ENSG00000181908_3 (sequence is synthesized)
tggatttgcgtcctctgcagcttgggggacacgtcgttgatggtgactgacacgccccagagatagtgacatgatgattaagagtgacagcctgagggagctgagcgcagcatggctggt

SEQ ID NO: 992220 - DNA, 120 bp, Artificial Sequence
  ENSG00000181908_4 (sequence is synthesized)
ctggcagctgctgtcggtgtcgcgaccccaccccacttccccggctccctgcctccttcgctggagaagcatcctcagccaatggagccacaatacctgacagctgaaggcagggaacag

SEQ ID NO: 992221 - DNA, 120 bp, Artificial Sequence
  ENSG00000181908_5 (sequence is synthesized)
caggaggggccccaggaagctggccccaaggacgggatgctgcaggaggatgccccgctggcccctggtgactggagcccgttgcggaggcccctggcacgaggtggcagagcagctgct

SEQ ID NO: 992222 - DNA, 120 bp, Artificial Sequence
  ENSG00000181908_6 (sequence is synthesized)
caggcctccgcctgtggtcacctgggacaggactcaggtggacggggatgcccggctcgtttaatatcactgatgttgagagacagatgggaaaatagccgtgagaaggacgtggagtgg

SEQ ID NO: 992223 - DNA, 120 bp, Artificial Sequence
  ENSG00000181908_7 (sequence is synthesized)
ggaggctgtcactgaatactactgacacttagaagagggaaaatgacaagttcagggccacgcatcaccaatttaaagcaaagtcaggattccttggcagaatttaacgaaatgcttctc

SEQ ID NO: 992224 - DNA, 120 bp, Artificial Sequence
  ENSG00000181908_8 (sequence is synthesized)
ttctatagccaggggtcagagggcagaagacaaggtgcaggactccagagaaggccaaatttccagcccagggaagtcccttctccaaagtcagggccccaaagggaagggtggggtccc

SEQ ID NO: 992225 - DNA, 120 bp, Artificial Sequence
  ENSG00000181908_9 (sequence is synthesized)
ctgtacctcctggcctgcagaagtgacccattgcctctgttggaagacagaggtcctcttttgcttaaagaccatgcagaaactaagggaagggaccttacaagataaggagttcctctc

SEQ ID NO: 992226 - DNA, 120 bp, Artificial Sequence
  ENSG00000181908_10 (sequence is synthesized)
tccagcatctgtccccacctcccctcctgaccaccaggctcaaagctggatcatatctcagcatgacctgaccaaggatgtgctttgcatgccagggaccaagagggattaacaagcaga

SEQ ID NO: 992227 - DNA, 120 bp, Artificial Sequence
  ENSG00000181908_11 (sequence is synthesized)
ggagtggtgggagcaagccagcagggaccagccgggtctagagaatgttcctagatgtggactctgaaggttctagatcaagggaggctgcatagtagctggagactggagagttaatta

SEQ ID NO: 992228 - DNA, 120 bp, Artificial Sequence
  ENSG00000181908_12 (sequence is synthesized)
attagtacagaaagactccctaacccctaaaaaggccctgggaagattctaatatgttgcttgggagggttctttttttttgagacagaatttctctctgtcgcccaggctggagtacag

SEQ ID NO: 992229 - DNA, 120 bp, Artificial Sequence
  ENSG00000181908_13 (sequence is synthesized)
cagcacttgaggcagttcttgaaagcttggaagaagtgatagtgcataggcgatgaagtggagatgtcagaacagccctggaggaaggtatgcaaagtctcagagaagtggacacgccag

SEQ ID NO: 992230 - DNA, 120 bp, Artificial Sequence
  ENSG00000181908_14 (sequence is synthesized)
aatggctcttctattgtaggttgtacaggaaaacagtgtgacaagagtgatgccatcttaaaaccgccatatgatgatgaatgtttcacccccatataccaagctgctctgcagtaagct

SEQ ID NO: 992231 - DNA, 120 bp, Artificial Sequence
  ENSG00000181908_15 (sequence is synthesized)
ctttaaacaatgcctgtaccatacataaccctttgtaaagatgcttagctaaccccctccccaagtggctatgagttttgcattaaaatcggagatatggccacctgcacatgttttacc

SEQ ID NO: 992232 - DNA, 120 bp, Artificial Sequence
  ENSG00000181908_16 (sequence is synthesized)
ctaaaagcttgctacataaaagtactttctgcagggcagatgtggggatctaccattttgtggcagcccggaacatcgcttctgctcctaagtccctattaaatatttctttacaagaaa

SEQ ID NO: 992233 - DNA, 120 bp, Artificial Sequence
  ENSG00000273409_0 (sequence is synthesized)
ctcttagcacgtctgccatctcttcctgctctgggtgtcacttagctctgaaaacataggcatcggagtgtagcagactgactcagagtcctcccaagatgcagattctactgaaatcca

SEQ ID NO: 992234 - DNA, 65 bp, Artificial Sequence
  ENSG00000273409_1 (sequence is synthesized)
actcagagtcctcccaagatgcagattctactgaaatccaaacccaaggggtctacaaaatggtg

SEQ ID NO: 992235 - DNA, 120 bp, Artificial Sequence
  ENSG00000273409_2 (sequence is synthesized)
tctttgctgacccctggatcctgaagattttcttttatttttttcctaagattttatagttttattttttcatttaagttacattcatttgaattaatttttatctgaaaaatactgttt

SEQ ID NO: 992236 - DNA, 120 bp, Artificial Sequence
  ENSG00000273409_3 (sequence is synthesized)
ttctttcactgtaggcttgtctctgtataaattcaatttgaaaatatggcaatatgtatctttgattttcaaatgaacaagctcataaatacaaaaattaaaggcataacaagaaaataa

SEQ ID NO: 992237 - DNA, 120 bp, Artificial Sequence
  ENSG00000273409_4 (sequence is synthesized)
tgtctattccagtttctccagtctaccttgcacatccataatttcccccagaaatgattgcaaatcatcaaaaaaaaaatgcctcccacagtgacttcctggcccctgatcttgttccac

SEQ ID NO: 992238 - DNA, 120 bp, Artificial Sequence
  ENSG00000273402_0 (sequence is synthesized)
aaaattggctaatcagatttttgtgctgattaatgagggaaagtttttactctttttgtggaaagtaatatacatattcatgttggaatataattattcccatttcttagattttaaatt

SEQ ID NO: 992239 - DNA, 120 bp, Artificial Sequence
  ENSG00000273402_1 (sequence is synthesized)
actacttttaaataaatacagtctcttttattaacctgtgttttttctttccaccgtgggtcttttcagtttcatgattttgctctcaaaactttttaattattgatttctgtcaaatct

SEQ ID NO: 992240 - DNA, 120 bp, Artificial Sequence
  ENSG00000273402_2 (sequence is synthesized)
tttattaaattgttttatctttttaagtcttattaatatgtactgaatttgtaacaatttggaaagtcaagtaactcctgttttatctttttcttggtttatgagtgtttttaaagtttt

SEQ ID NO: 992241 - DNA, 120 bp, Artificial Sequence
  ENSG00000273402_3 (sequence is synthesized)
acgtttcttgaagatcacagctgtagccccaattccatggttctggctacttacatttatcatacttattaatatcatgaatgtaattggaatacccctttgattttactggtgacgtat

SEQ ID NO: 992242 - DNA, 120 bp, Artificial Sequence
  ENSG00000273402_4 (sequence is synthesized)
acccactagtgtactgagacggaaaaaaaagtctttagaactcagataaatatacagttcatatttactatttatgtatgtgtgatctcattattaaattactctatcatgtttgtggaa

SEQ ID NO: 992243 - DNA, 120 bp, Artificial Sequence
  ENSG00000264177_0 (sequence is synthesized)
gggcccggaggactctggagctacctctagctgcagcactgcctctggatggggacttccccatgctgtgggctgtggctccatagcgggcactggaagttcctctctctctgcacgtgc

SEQ ID NO: 992244 - DNA, 120 bp, Artificial Sequence
  ENSG00000264177_1 (sequence is synthesized)
ggcaagagctgaaaaaggagaaagggtcactgagcaggttttctgtgtctgagccccagagttcaatctctgctgaccagacccccactgaccagacccctgagcggtggtgttcagagt

SEQ ID NO: 992245 - DNA, 120 bp, Artificial Sequence
  ENSG00000264177_2 (sequence is synthesized)
cccctaccaatggcccttctcagtccacagacctctccctcccctcatcagcacccacaggtgactgagagtcttctcgggaccggaccccaactccaggacacagggaggggcagtttg

SEQ ID NO: 992246 - DNA, 120 bp, Artificial Sequence
  ENSG00000264177_3 (sequence is synthesized)
tcccaggctccgggtgctgagcttcacgcttgtgccacaaggtcctctgggccatctcaaagggggcagtgatgtggcctcacacatctggatgcactgtctgggcctattcctgagcca

SEQ ID NO: 992247 - DNA, 120 bp, Artificial Sequence
  ENSG00000264177_4 (sequence is synthesized)
catagccagaggaacaggaagctgtttgtcaacccaggtaccccactctgctgggtctcccagggtccttcccatggaggccagatccagagacacagcacagaggcagcagggtgaccg

SEQ ID NO: 992248 - DNA, 120 bp, Artificial Sequence
  ENSG00000264177_5 (sequence is synthesized)
gcccagaacccttgagactaggctggggatgacaggaggactgtccccagacaaccagaagaccctttgctagtttcttggtacttcatttctcacctgctacccttactccaccagaaa

SEQ ID NO: 992249 - DNA, 120 bp, Artificial Sequence
  ENSG00000264177_6 (sequence is synthesized)
tccccttcatgcagagtcaatgaggagaggaagatggacacagaatctgtggaaagaaagaaaacaaaagatgggtggggagaagagttgggagtgtaacgttgtaagggtcctacacta

SEQ ID NO: 992250 - DNA, 120 bp, Artificial Sequence
  ENSG00000264177_7 (sequence is synthesized)
tgggtattatttgagggttggctgtgattaattaaaggtgtgccttgtagacaaccattacacacactataaataaattttatatatatatacatatatatgtatatatatatatatgga

SEQ ID NO: 992251 - DNA, 120 bp, Artificial Sequence
  ENSG00000264177_8 (sequence is synthesized)
gagagagagagagagacagggtcttgctccatcacccaggctgaagtgcagtggcccaaaacagctcactacagccttgacttcccaggctcaagcaatcctccccacctcagcctcctg

SEQ ID NO: 992252 - DNA, 120 bp, Artificial Sequence
  ENSG00000264177_9 (sequence is synthesized)
aatagctgggactacatgtgtgagccaccgcgacttgccagctctgtctagttgagaggtgcagtgcctctcctgtgggccggtgtgctgtgggacctcccgccctgccgccctgccgcc

SEQ ID NO: 992253 - DNA, 120 bp, Artificial Sequence
  ENSG00000264177_10 (sequence is synthesized)
ctgccgctgcccgagggctcacccggctgtagtcctccacgtgctggagctgggtctcctggcagatgcacaggttcaggaagttctgccactccatcttcagggcctcctggtgggcct

SEQ ID NO: 992254 - DNA, 120 bp, Artificial Sequence
  ENSG00000264177_11 (sequence is synthesized)
gggtaccgcagcacggagccctcggaccacgccccgcccccgcacccacgtccaccccccccttccccgcccaccacgtcccttctcactctcgccctgcccccagcgcacctggatggg

SEQ ID NO: 992255 - DNA, 120 bp, Artificial Sequence
  ENSG00000264177_12 (sequence is synthesized)
ccccaccgcggggtgccgcagctccaccatgcgcttgccgtcctcctccagctggtttacgctctgctcctggctcagcagctcgtgctgcttgaagtgctgggggcgagtcgggtgggg

SEQ ID NO: 992256 - DNA, 120 bp, Artificial Sequence
  ENSG00000264177_13 (sequence is synthesized)
agcggcggtgaggaccaggatggccctggtcgcccccgcctggccccaacctctgccagccgacctcgtattcccgccgcacgcccgcagggtcggccatgaggtcgctccagtcctgct

SEQ ID NO: 992257 - DNA, 120 bp, Artificial Sequence
  ENSG00000264177_14 (sequence is synthesized)
gcaggatgcggcgctgctgctccgccagggcgctcagctgccacgtgcagccctgcagtgcgtgtacaggctgcccaggctctgcccgcgccacgacgccgccctctgtgctcaggaccc

SEQ ID NO: 992258 - DNA, 120 bp, Artificial Sequence
  ENSG00000264177_15 (sequence is synthesized)
gccgccagcagcagggtggggagagagaaagtggggggcaaaaggcgccattgggcggcgctcaggaacactggccccgggcagggtccgggcggccacccaggcccacctgcagccacc

SEQ ID NO: 992259 - DNA, 120 bp, Artificial Sequence
  ENSG00000264177_16 (sequence is synthesized)
ctgcccgaccctccctcctgctcaccagtaggtctcggtattggctccggatggtggcggcatcctgccttgaccaaggggagaaacaagcccgtgagaggtggggcacagggagacggc

SEQ ID NO: 992260 - DNA, 120 bp, Artificial Sequence
  ENSG00000264177_17 (sequence is synthesized)
cccctaagatctgggcaagccataccccacccacccctatccccagggcccagccgatctagctccggctctgactggaaaaacaggggctggggctggccccggatgtaacatcttccc

SEQ ID NO: 992261 - DNA, 120 bp, Artificial Sequence
  ENSG00000264177_18 (sequence is synthesized)
ggctcacccaccggccccaccaggctccgcagctgctctccttggtcgttgatctccttctgcacgatgttgagctccgcgatctgttcctccagctccgccatgcccggcccatactgg

SEQ ID NO: 992262 - DNA, 120 bp, Artificial Sequence
  ENSG00000264177_19 (sequence is synthesized)
cctgcgcagaccagcttctgcaggagagccggcggctcagtcaccacaggaccagggtggagagccagagaaccccacacgtctcccacccggagaagtggacttggtcatttgggcaga

SEQ ID NO: 992263 - DNA, 120 bp, Artificial Sequence
  ENSG00000264177_20 (sequence is synthesized)
cctgcagctcacccagggtgagccattctgctctgcagggtggccactgcagaggccattctgcagtggcccctgagtcccactggttcccagacgctgggctcagcctcagaagtctcc

SEQ ID NO: 992264 - DNA, 120 bp, Artificial Sequence
  ENSG00000264177_21 (sequence is synthesized)
agctccatcctgccttgtctgtgacccagcctcagtgcttcctgcctggacacctccagccaagctctagggccctcagaacgccctgctgcacccgggcccttccccactgttcctcta

SEQ ID NO: 992265 - DNA, 120 bp, Artificial Sequence
  ENSG00000264177_22 (sequence is synthesized)
ttgtcatgatgacaccccttctgtgtggcatcaaagcacaactcctcaaccagggatcagaatgccccatgtcctggctctgcccacctggccagaaatccccacttcccatcgaatcct

SEQ ID NO: 992266 - DNA, 120 bp, Artificial Sequence
  ENSG00000264177_23 (sequence is synthesized)
aggcttcctcctggcaggtgcctttgctccttctttctggaattgtcctctcctcactacttcaccctgacccaaccgagccctctcacccctctgaggtctcttcatgtgcctcctcct

SEQ ID NO: 992267 - DNA, 120 bp, Artificial Sequence
  ENSG00000264177_24 (sequence is synthesized)
acaggaagtcttccctgactgcactgtctcctctgctgtctccctgcccagacccctgagacaccactatacactgactgttcaagcctacagtcaggccctgggttaaatgcagttccg

SEQ ID NO: 992268 - DNA, 120 bp, Artificial Sequence
  ENSG00000264177_25 (sequence is synthesized)
tatcaccctctgatcacactggggtgtgactttgagctcctgacctgtttctgctccagcacgtgtgcccagtcgaccttggatcccacgtcggggcggcagcaccatcttctcgtacag

SEQ ID NO: 992269 - DNA, 120 bp, Artificial Sequence
  ENSG00000264177_26 (sequence is synthesized)
ggcacagtactccgcacactcctgggtcacccgctcgtgcagctgctcgatgctgtcaagaaggtggccagcaggtcagggctgggcctgggtcttccccagggacccccagccctgccg

SEQ ID NO: 992270 - DNA, 120 bp, Artificial Sequence
  ENSG00000264177_27 (sequence is synthesized)
cagccccactcactccttctcagtctcctcagcctgcgggtgcttgagccgccgggccttgtccacgtccaggaagaggtccttgagcagcacctcggcctccttcaggctgctgcccgt

SEQ ID NO: 992271 - DNA, 120 bp, Artificial Sequence
  ENSG00000264177_28 (sequence is synthesized)
ctcctgctggtgctgcagggcctggctctgctcactgttcagccggtcctgtgggcaggggatgggcagacttgccagggtccagagcccccacacccctgctgcccatcattgtgggcc

SEQ ID NO: 992272 - DNA, 120 bp, Artificial Sequence
  ENSG00000264177_29 (sequence is synthesized)
tgagccccacctttgggaccccagctatgctggccaacctcgaggcccacgccaggcacagggtcaggcccagggcgtccatgaggcaggtgacaaagacacaggggagcccagcaaaga

SEQ ID NO: 992273 - DNA, 120 bp, Artificial Sequence
  ENSG00000264177_30 (sequence is synthesized)
aggaagttgagccctctctcccaccgtgtgttaggggacaggcggtgcaggacaaatgtcatctgtcccatcttcaccatcaccagggggcactcagggagtgccaggcctgatgatggg

SEQ ID NO: 992274 - DNA, 120 bp, Artificial Sequence
  ENSG00000264177_31 (sequence is synthesized)
cctcccatgccacccagcctgcccacaccctgccaactgctgccgggttctcacctgctgcagcctcttctgcgtctccaggatgtcccgctccacctggtcggcgctggcttgcatgtg

SEQ ID NO: 992275 - DNA, 120 bp, Artificial Sequence
  ENSG00000264177_32 (sequence is synthesized)
ggagatgagcagggtcagctcctgggtggcattcttggtgggtggaggggacagtgggcagctcggtggaagaggcccctctgtgccccatccaggtggcgtcccctgccctctctccac

SEQ ID NO: 992276 - DNA, 120 bp, Artificial Sequence
  ENSG00000264177_33 (sequence is synthesized)
cccatcccgcccccacagcctagcacactgccctgactttggggtctctctctgcaggaggctctgtgagctagacctggttgggggtgttagcactgccccgccacatgaggggtcaaa

SEQ ID NO: 992277 - DNA, 120 bp, Artificial Sequence
  ENSG00000264177_34 (sequence is synthesized)
aggtgagggtctcaggtctgtgtggtgctgggtgtcaggcggcctcggtgtcccagcctcagccagctgtgctggcagtgagttcccgaccccacccagctgcctgccacttcccccctg

SEQ ID NO: 992278 - DNA, 120 bp, Artificial Sequence
  ENSG00000264177_35 (sequence is synthesized)
tgagccggtagtacctgagccagcctggctgggccctgggaggggcagttgggctggctggggcagggaggcagcagcatgccccccacccccacctcctcccactccagccctgtgttc

SEQ ID NO: 992279 - DNA, 120 bp, Artificial Sequence
  ENSG00000264177_36 (sequence is synthesized)
ccctatacctcctccaccccagggagctttgccagagtgctggcttcagcagccgtctagaggagcctcacactgtcagagtcggggagcgggggcaggcgcaagagactgctgggcacc

SEQ ID NO: 992280 - DNA, 120 bp, Artificial Sequence
  ENSG00000264177_37 (sequence is synthesized)
ctaacattctccagagttgagggttcaaagcccagattgtgccctaacttgctctgagttacgtggtcagggacggaggggaaaccttgcttccaccccagggctttttctgtgcattcg

SEQ ID NO: 992281 - DNA, 120 bp, Artificial Sequence
  ENSG00000264177_38 (sequence is synthesized)
ccctgcagcctccatagagcacctgctgtgtgcatgcagtcactctgtggaggtcacaaggccaagcagacctaaaagagggcagattggtccaagccttatgagcacagtgccttatgg

SEQ ID NO: 992282 - DNA, 120 bp, Artificial Sequence
  ENSG00000264177_39 (sequence is synthesized)
gggatcattatcctggggcaggggaagccttgaactgggtcaaaggatgggcccccccaggcaacgggacagtgctggtgaaggcacagcagtctggaagaactctgtggccaagacagc

SEQ ID NO: 992283 - DNA, 120 bp, Artificial Sequence
  ENSG00000264177_40 (sequence is synthesized)
ctggtttcatctttctccatcattaatgctgtgtgaccttgggcaagttactcaacctctctgtgcctgaggttcctcactcgtaaagcaggattttaataaaaatatctatgccttagg

SEQ ID NO: 992284 - DNA, 120 bp, Artificial Sequence
  ENSG00000278456_0 (sequence is synthesized)
gatgcaaaggacctcatggcccaacgtggccctgagatgtcctctgatcactccctcatgaccagaggagggtctgaggatcctgctaaaaaatggacttacaactgatgaatgccttgg

SEQ ID NO: 992285 - DNA, 120 bp, Artificial Sequence
  ENSG00000278456_1 (sequence is synthesized)
cagctcagcctcatggggtatgctccatcaatatccccacctagggtatctagaaattactggccagcagtgcatgtaggtgaggttagaaaatgggtcttcacatgacctcattatgat

SEQ ID NO: 992286 - DNA, 120 bp, Artificial Sequence
  ENSG00000278456_2 (sequence is synthesized)
gtgcttactgcctgccagggactctgcctagaatcttaaatagatcattcttacaccactgagttatcattatcggtgacattttacatgaagaaataaatctcagagaggtttcacaac

SEQ ID NO: 992287 - DNA, 120 bp, Artificial Sequence
  ENSG00000278456_3 (sequence is synthesized)
ttgtccaaagtcacacagctagtaagtggcagagtggggatttgaacccaggtctttcctattctgaggtttcctataaccaggctatcctgccctcaccaccgctccacatatgctcgc

SEQ ID NO: 992288 - DNA, 120 bp, Artificial Sequence
  ENSG00000278456_4 (sequence is synthesized)
tactagccagttcaggggtgactgaggaatgattttaggtcacatgggaacaattttttctatgttaagtggtggcatttattttggtaagtattagaaaaataaaattagcacatcaaa

SEQ ID NO: 992289 - DNA, 120 bp, Artificial Sequence
  ENSG00000273406_0 (sequence is synthesized)
gattaaaaaaaaaaacaaacaaaaaaaaacggcaaagttagaacacacaaaagatagtatagttccttacccatccaccacttggttttgaggagaaaagggaaataagaagagttgaag

SEQ ID NO: 992290 - DNA, 120 bp, Artificial Sequence
  ENSG00000273406_1 (sequence is synthesized)
accaccatggagttcctccttgcacatctctctcccctcctgaaggcctagggtgagcccacagcattgttccagcagtgagggagtcttcactgccccctgagactctctcacggctct

SEQ ID NO: 992291 - DNA, 120 bp, Artificial Sequence
  ENSG00000273406_2 (sequence is synthesized)
taagatacctccctgaagtccctccaaagaattcaatgtgcccctagtctaaatcagtttcctccatcataaatactcatagatgatgcaacaataaaacgttaataacgataatggcaa

SEQ ID NO: 992292 - DNA, 80 bp, Artificial Sequence
  ENSG00000224559_0 (sequence is synthesized)
ctgcaagggtgtgccaggagcaggtggagcagccaccaacctcacccactcaaagaagcagggatggccaggttccaaca

SEQ ID NO: 992293 - DNA, 90 bp, Artificial Sequence
  ENSG00000224559_1 (sequence is synthesized)
gccacctgatggctgatggagcagaggcgtgaggaaaagctgatggcactgctttgtagtgctgttctttgtctctcttcatctttttca

SEQ ID NO: 992294 - DNA, 90 bp, Artificial Sequence
  ENSG00000224559_2 (sequence is synthesized)
gtaaatattcctccatccctttattttaaacctatgtgtgtctttgcgcatgagatgggtctcctgaatacaggacaccattgggtcttt

SEQ ID NO: 992295 - DNA, 86 bp, Artificial Sequence
  ENSG00000224559_3 (sequence is synthesized)
tttagtattgttacatgtgaaatttatcctgtcatgatgttgctagtttttaatttttcccattagttaatgcagtttctttatag

SEQ ID NO: 992296 - DNA, 120 bp, Artificial Sequence
  ENSG00000224559_4 (sequence is synthesized)
tcctgtcatgatgttgctagtttttaatttttcccattagttaatgcagtttctttatagtgtcaatggtctttacaatttggtatgtttttgtagtggctggtactggttgttcctttc

SEQ ID NO: 992297 - DNA, 120 bp, Artificial Sequence
  ENSG00000224559_5 (sequence is synthesized)
ggagctcttgtaacgcaagaatgtggatttatttctggtaaggtaaataagtggatttatttctcaatgctgtattctatgtcctttaccccaagaatcattactttttaaaatgcaatt

SEQ ID NO: 992298 - DNA, 120 bp, Artificial Sequence
  ENSG00000224559_6 (sequence is synthesized)
caaattagcataaaacatttacagcctaggaaaaggcttgtggcattagaatacttatttataggattattttgtgtttttttgagatacggtctttgtcatcgaggcagaagtgcagtg

SEQ ID NO: 992299 - DNA, 120 bp, Artificial Sequence
  ENSG00000224559_7 (sequence is synthesized)
gtttgatcataattcaccacagccctgaactctgagtccaagccatccttttgccttaatctcccaactagttggatctacaagcataaggcatcatgcctggctaatttttttacatgt

SEQ ID NO: 992300 - DNA, 120 bp, Artificial Sequence
  ENSG00000224559_8 (sequence is synthesized)
ttttttttttttttgtcgagattatggtatcactatgttgctctggctgatctcaaattcctgacctcaagtgatctttctgccacagcctcctaaagtgctaggattacatgcatgatg

SEQ ID NO: 992301 - DNA, 120 bp, Artificial Sequence
  ENSG00000224559_9 (sequence is synthesized)
caccatgcctagcgtagagtattacattagtttcaaagtcttattctaagagccatttattgactttggcctaaataactcaatataatatctctgaaactttttttgacaaattttggg

SEQ ID NO: 992302 - DNA, 120 bp, Artificial Sequence
  ENSG00000224559_10 (sequence is synthesized)
gcatgatgatgagagaagggggtttgaaactttctaataagaattaacttagacccatttaagaaggaaaaaacacaaattatcagaaaaatataaaagtaagatcaagtgcaaaagttc

SEQ ID NO: 992303 - DNA, 120 bp, Artificial Sequence
  ENSG00000224559_11 (sequence is synthesized)
gtgcaaaagttctgtggcaaagatgatgagagtaaagaatatatgtttgtgactcatggtggcttttactttgttcttgaatttttgagtacgagttaacatttaaagaatctacattat

SEQ ID NO: 992304 - DNA, 120 bp, Artificial Sequence
  ENSG00000224559_12 (sequence is synthesized)
attgcaagtaaatgtatttcagaatttgttattggttttgtatgagattattctcagcctatttcattatcaagctatattattttattaatgtagtttgatgatcttacagcaaagctg

SEQ ID NO: 992305 - DNA, 120 bp, Artificial Sequence
  ENSG00000224559_13 (sequence is synthesized)
gaagctgtatcttcaaaatatgtctatttgactaagaagaagttattcaacaggagttattatctatgaaaaaagtacaaccagaatataaaaaacttgaggaggataaaaagatgttgg

SEQ ID NO: 992306 - DNA, 120 bp, Artificial Sequence
  ENSG00000224559_14 (sequence is synthesized)
tggtgaagtacaaaaatataaattggatgtagaagaaagggcaatgcaggcaatagaaaaattagtagaaatccctttacaggttagtttgtaaaatcaggtaagtttatttataatgtg

SEQ ID NO: 992307 - DNA, 120 bp, Artificial Sequence
  ENSG00000224559_15 (sequence is synthesized)
tatttcactgcaaattatattttggatatatatattgtgtttcctctgcctctcttatagcaatttgccttgtagagttctagcaaaaaggtggcatctgtttttactttcaaatattta

SEQ ID NO: 992308 - DNA, 120 bp, Artificial Sequence
  ENSG00000224559_16 (sequence is synthesized)
ggcatctgtttttactttcaaatatttaaatttccatcattataacaaaatcaatttttcagagtaatgattcttactgtggagtcatttgattattaagacccattggcataagattac

SEQ ID NO: 992309 - DNA, 120 bp, Artificial Sequence
  ENSG00000224559_17 (sequence is synthesized)
atcctctgactataaaaatcgtggaagaaaacctaggaaatattcgtctggacattgcacttggcagtgaatttatggttaacctgcggacgcccaggggctcctccatctccaccgtgt

SEQ ID NO: 992310 - DNA, 120 bp, Artificial Sequence
  ENSG00000224559_18 (sequence is synthesized)
tctcctcgggctgaagcccaaagtcccacattttctcctcaaacagctctcagagccacttctgcaggcaggaggacagcgcgtggactcagtgtctgacttgggaagccacatgtgaag

SEQ ID NO: 992311 - DNA, 120 bp, Artificial Sequence
  ENSG00000224559_19 (sequence is synthesized)
gaactgctgggtgactatggtcgtaagtcaatcaaagcagactttccctggcttgctgtgctacgttgattttgttttcgtattttaaaagaagcagaagggaggttctaggaaatttgc

SEQ ID NO: 992312 - DNA, 120 bp, Artificial Sequence
  ENSG00000224559_20 (sequence is synthesized)
ccaacgtagatgctgacaagagtggtgacatgaaaaagattacccagaaggaaaacgagctattttctaaacatctgaaatctgtgtaggcttttggaaaagtgaaactagatgcaaaac

SEQ ID NO: 992313 - DNA, 120 bp, Artificial Sequence
  ENSG00000224559_21 (sequence is synthesized)
acaatgatataattctggcaatttccactgacacagaactcagtcaatctgaattaatctaagagttataaggaaaatggcactccaagaagtacctattaacatcactcagctgctgtg

SEQ ID NO: 992314 - DNA, 120 bp, Artificial Sequence
  ENSG00000224559_22 (sequence is synthesized)
aaataggcttacaggcaacatggagtgtcaattacccaatgtttaaagtcgatcatacagattggactacaatctctatggctcataaagtctttaaaggattgacagatgatttatctc

SEQ ID NO: 992315 - DNA, 120 bp, Artificial Sequence
  ENSG00000224559_23 (sequence is synthesized)
atatgtagacaatgattctcagcagttaactagcgcaacttgataatgtcaattgcttgagaaaatcagataattgcttgagaaaattaggacattgcttgaggaagttaggtagttaaa

SEQ ID NO: 992316 - DNA, 120 bp, Artificial Sequence
  ENSG00000224559_24 (sequence is synthesized)
taggtagttaaataaattactttttttaaagaatagtttaatattttggcaagtagactttaaaataggttggtaatattttaaaggctacttttaaagaagtagcaatataacatgttt

SEQ ID NO: 992317 - DNA, 120 bp, Artificial Sequence
  ENSG00000224559_25 (sequence is synthesized)
taatgttggaaacaattcaattttctatcagatcattcacaaatacagaaataccatctcaataattagaagaagtagcagcaatttctgtcatttttatgcaagttactcttagtccat

SEQ ID NO: 992318 - DNA, 120 bp, Artificial Sequence
  ENSG00000224559_26 (sequence is synthesized)
ttatttggttttaaatagtgtttttaaaatttgttttcaaacagggctaatcataaataatagaacatattttacaatagttgaaggtaacaaaaagtaagtgccatttaaaaaattgta

SEQ ID NO: 992319 - DNA, 120 bp, Artificial Sequence
  ENSG00000224559_27 (sequence is synthesized)
taaaaaattgtattagattgtttaaaaatgttgtgggtacatagtatgtgttgtgggtacatcgtatgtgttgtgggtacatagtatgtggggtccatgagatgttttgatacaggcatg

SEQ ID NO: 992320 - DNA, 120 bp, Artificial Sequence
  ENSG00000224559_28 (sequence is synthesized)
agcacatcatggggaatggggtatccctcccctcaagcatttatccttcaagttataaaaaattcaattacagtcttagttatgtcaaactgtacaattaaattattattgaatatagtc

SEQ ID NO: 992321 - DNA, 120 bp, Artificial Sequence
  ENSG00000224086_0 (sequence is synthesized)
tggcggcgcccccttggtggggccgcagagcggaggagcagcagctgccaccggccggaagcctgctggctcggccgagaacaatggccgcctgtcactgtggacagctgtctcccaggc

SEQ ID NO: 992322 - DNA, 120 bp, Artificial Sequence
  ENSG00000224086_1 (sequence is synthesized)
taaggcaaggctgcgctcccagggaatgcgggcagggagccagggcggagggcagaggacgagagcgaggaggagagcgcgggcacccactgatgctggcggcctcgggtattcgctttc

SEQ ID NO: 992323 - DNA, 120 bp, Artificial Sequence
  ENSG00000224086_2 (sequence is synthesized)
tctctcttctcccaccttgttccttttccccggatgcacgcatgcactagtaatgccgaatttagaacaacagggaaaggaaaggaaatggcaaaggaagggaaaggaaatggccgacag

SEQ ID NO: 992324 - DNA, 120 bp, Artificial Sequence
  ENSG00000224086_3 (sequence is synthesized)
gaaatggcaaggaagggaaaatccactgcaactctgctgcctgctggcctgtccagggacaactattcagctgggtgggacgttgctacccccttgtggcacccctgctgcagcctgcga

SEQ ID NO: 992325 - DNA, 120 bp, Artificial Sequence
  ENSG00000224086_4 (sequence is synthesized)
ttcttacgccctgtatttctggtctaacatcaaccaacactttggcgaaatataataaaatgaaattactaggagaatgaaagaaagtcacatgaaataaaagccctgctttttaatgat

SEQ ID NO: 992326 - DNA, 120 bp, Artificial Sequence
  ENSG00000224086_5 (sequence is synthesized)
tatatcctctgtgaaatggatctgcagccctctccatttctgggttcccctggccacaccatgcttatggctgtcccaggagcaggctgacagacaagcttccaccagcatctaaccatg

SEQ ID NO: 992327 - DNA, 120 bp, Artificial Sequence
  ENSG00000224086_6 (sequence is synthesized)
gggctcatggacaccgtagagcgtctccacccaacagaatcctgacttgggggcagctgaggcagggggcccgagcgttgaggggaccacgctgctgccccgagacctgctggcatgcca

SEQ ID NO: 992328 - DNA, 120 bp, Artificial Sequence
  ENSG00000224086_7 (sequence is synthesized)
cctggccaaccctgacttcgcctgcccgggcgcatgttaactgagttacaacactgagggcacttgaacctggctgcatgaccagagatcgatcacctgtgagatcctctgtgaaacggg

SEQ ID NO: 992329 - DNA, 120 bp, Artificial Sequence
  ENSG00000224086_8 (sequence is synthesized)
ataagcatctttaatttcctgggctgttctggaacttcagtcagacaggacacaggagggtgtctgcaccacccacccctgcctcgtgggctgactgggaactatatgacctgtggaggg

SEQ ID NO: 992330 - DNA, 120 bp, Artificial Sequence
  ENSG00000224086_9 (sequence is synthesized)
ccccaatcaatgggcttcccacaatgtcgtcaccctttgttgcctgctaagcagccctggggccacctcagaagaaacagaactcacaggtcacaggggccttttcctcctcgtcatcgt

SEQ ID NO: 992331 - DNA, 120 bp, Artificial Sequence
  ENSG00000224086_10 (sequence is synthesized)
cacaggtcacaggggccttttcctcctcgtcatcgtcctcctcctcttcttcttcctccctgggcaacttcctgaattcggaaaggtggggttttgctatgttgtccaggctggtcttga

SEQ ID NO: 992332 - DNA, 120 bp, Artificial Sequence
  ENSG00000224086_11 (sequence is synthesized)
ccaaagccctgggataatggcgtgagccgccacacctggccgcctttgcagggaggaaggacgcctgtttcccttggtcccggtgaggccaggcctcagcttcctgcccacccgccactg

SEQ ID NO: 992333 - DNA, 120 bp, Artificial Sequence
  ENSG00000224086_12 (sequence is synthesized)
ctgctggggcagggaggcagtttccggctgtggggacccagacaatgcctggccaagggccaccatcgtcctcttcctggacacagctcccgcctcatcccagggtctggcctgggacac

SEQ ID NO: 992334 - DNA, 120 bp, Artificial Sequence
  ENSG00000224086_13 (sequence is synthesized)
gccctagaggccctcagccctgagtcactgcaccatgcagatccaccctgattctggtccctgcagagcaggctcctacacaaggcaagaagatgctccagggacaagccaaggtgtatg

SEQ ID NO: 992335 - DNA, 120 bp, Artificial Sequence
  ENSG00000224086_14 (sequence is synthesized)
caaggcccaggtgcctgagaaacacgtctcaccgaccttggggcaggggctgttacaagaggcttatagtctagtggcagagacaaaaaccacactcaaatcattagtgtacggtatgca

SEQ ID NO: 992336 - DNA, 120 bp, Artificial Sequence
  ENSG00000224086_15 (sequence is synthesized)
ctgctcagggactcaaatatgtgacaggaggctccaaacaagagcggagacaaggcgtaaatagccccctgtggactggatgttctgactcctggatggcctccagaaggatgcctttta

SEQ ID NO: 992337 - DNA, 120 bp, Artificial Sequence
  ENSG00000224086_16 (sequence is synthesized)
cggtctgtgaaagagctcagggaccaagatgctcaaagcccttcatgcccaagagcccctcctcaggctgggacacgggaagcagagctcggaggtggaactcgtgactgtgtatgggca

SEQ ID NO: 992338 - DNA, 120 bp, Artificial Sequence
  ENSG00000224086_17 (sequence is synthesized)
catgtgagtgcgtgtgtgtggacagccaggcttagtgtagacaacgtgtgaggctcagaccccaagtgctgactacacctatgcacatccacacctgcgtgtgaaagaagatgctagaaa

SEQ ID NO: 992339 - DNA, 120 bp, Artificial Sequence
  ENSG00000224086_18 (sequence is synthesized)
gtctgtttgaagagggacatggcatgatcagatggggcttttaggcctctctgaccctggtgtggagggtgggctggcaagaaggggacgactgtctaaaggagagagtctaagacctgg

SEQ ID NO: 992340 - DNA, 120 bp, Artificial Sequence
  ENSG00000224086_19 (sequence is synthesized)
gctgggcagggccatggtgacaaacaggagcagacagagtcgggcagtataaatggaggggcagggacagtgttgaagtttctattctgagcaactagaaggctcgtggtacagttaatt

SEQ ID NO: 992341 - DNA, 120 bp, Artificial Sequence
  ENSG00000224086_20 (sequence is synthesized)
accctgatggggatggaagagtcaggcaggggatgggcaatgggctctgtttccacagcgacttgtgttccacggaggtcaagaggcctgagggcctgcaagaacatggtctgggcagga

SEQ ID NO: 992342 - DNA, 120 bp, Artificial Sequence
  ENSG00000224086_21 (sequence is synthesized)
gatggagctgcggaatgaatgaggatagggggctgagtcccacagggccagagcatggctagcaaagtggggatgactccaggagtggccttctgggtgccacgaaggaaatgttttaag

SEQ ID NO: 992343 - DNA, 120 bp, Artificial Sequence
  ENSG00000224086_22 (sequence is synthesized)
aagtgagattgggtcactgctttcaatgtcatagaacagagctgagcagttgaggaggcgtagtgggtagaaagggaggtcgcagcaggctgaaagcaaaccgacaggagggttagcgtc

SEQ ID NO: 992344 - DNA, 120 bp, Artificial Sequence
  ENSG00000224086_23 (sequence is synthesized)
ttttagcaggtaggcagggcagaagagagccacggggcagatcagggaaagaaacactgaagccatctgtggctgagaaggagggcagtggggaggagtgtctaaaattctgagccatcc

SEQ ID NO: 992345 - DNA, 120 bp, Artificial Sequence
  ENSG00000224086_24 (sequence is synthesized)
ctggcttttctgggcagaaggggtcgctccctcagtggccctatggcctctaacatgcattttgacccctggaatctgccttctcacccagtgggggccctggaagctggacaacacaca

SEQ ID NO: 992346 - DNA, 120 bp, Artificial Sequence
  ENSG00000224086_25 (sequence is synthesized)
ttcacccctgtgtgcctgtccctgagagtgggggtcaggggagcatgcctggggtggcgaggtgattctgcactgggccgacactcccggctttaactggaaggcgaggaccttccaaca

SEQ ID NO: 992347 - DNA, 120 bp, Artificial Sequence
  ENSG00000224086_26 (sequence is synthesized)
aacagcacaggctgacaggtcttgttccatgggggctgggcacccaaggtatctactgatggtctgaggaatctaccgggatggattcctgatttttttttttttttttctgagacggag

SEQ ID NO: 992348 - DNA, 120 bp, Artificial Sequence
  ENSG00000224086_27 (sequence is synthesized)
ccaccatgctcagcagattcgtgatttttaaaatgaaagggtgactcatgggagaagcctctggaactgcctttgaaaaacaaccagccaagacatgagaaattagttcctctgccattt

SEQ ID NO: 992349 - DNA, 120 bp, Artificial Sequence
  ENSG00000224086_28 (sequence is synthesized)
aataacttaaaaaataaatccaataagatggctggaacatataacaacttcaaatactccattttagttcaccatgtaaggtgggttcctgggggctgaggagactcgggagctctgcac

SEQ ID NO: 992350 - DNA, 120 bp, Artificial Sequence
  ENSG00000224086_29 (sequence is synthesized)
ccctcctgctcgcacccatcactaggtggctcacacagcagccgctcaacaagtctggctgctctcgcatcaaaaccaaaacccactgccctcccctgcgcccccagcactgaccccaac

SEQ ID NO: 992351 - DNA, 120 bp, Artificial Sequence
  ENSG00000224086_30 (sequence is synthesized)
actttggttcggggccctcctgggcaggtcacctgcactgcctactcactcctcagccctccaggccctcccaccttggatccttccctgggaccctgctctgcgcccttctccccctgc

SEQ ID NO: 992352 - DNA, 120 bp, Artificial Sequence
  ENSG00000224086_31 (sequence is synthesized)
ccaggaactgaaggctgatgttgtcaccccggtgctgcggcctgtccgtcttcagcacctgtgccccacgcaggcccagcaaacccctgggctctgttgttccccgggatggcttttcca

SEQ ID NO: 992353 - DNA, 120 bp, Artificial Sequence
  ENSG00000224086_32 (sequence is synthesized)
tctgatccccagcttggggctggcaccgcttggctttgcccggtcacctcatgcttgggccaaagtgcaccaacccttctgtcccgggcctggctttttgcctcaaggcagcaatggccc

SEQ ID NO: 992354 - DNA, 120 bp, Artificial Sequence
  ENSG00000224086_33 (sequence is synthesized)
catgccacctccacgaagacccagtggctgcagaactccctggtctggactcccctgctccctgcagagtgccacctgctcctctcaagaaggcagaacgtgaggcctttcctcacctcc

SEQ ID NO: 992355 - DNA, 120 bp, Artificial Sequence
  ENSG00000224086_34 (sequence is synthesized)
cgtgcattggcacccctgctgggcccactctgctccaccactgggggctgattcactttgtgccacatatctaaaatatttcctcaaaacaagccaataacaccctttgcgcatgccatg

SEQ ID NO: 992356 - DNA, 120 bp, Artificial Sequence
  ENSG00000224086_35 (sequence is synthesized)
acctcatggagcgtggtcaccggacatttcctcctgagctctaggcagctgtgggggatgctgggtggcatagcccttgcatgtggctgacacttagcaatgtttgtgcccatgttgcac

SEQ ID NO: 992357 - DNA, 120 bp, Artificial Sequence
  ENSG00000224086_36 (sequence is synthesized)
agggagagcacaagtcactgactctgctagggcctggggtcaaggaaaataggcccttggtgggtgtcaggaacagagttgattcgctgcaaggggcaaaggaagtgcacacttggggga

SEQ ID NO: 992358 - DNA, 120 bp, Artificial Sequence
  ENSG00000224086_37 (sequence is synthesized)
tactgaggcagccaccgaggatggtggctctgtcagagggagctatggctgagggcctgtcatggcttcaggtgatatttcaggtgatttgggtgatgctgggactggggaccatgcgca

SEQ ID NO: 992359 - DNA, 120 bp, Artificial Sequence
  ENSG00000224086_38 (sequence is synthesized)
catcccctcagcaagggactaggttcacagaaacagcacgcggcccaccagcctgctcacctccatgagctgtcccctgtgccagacagacagcctaactccaagaccctgtctgagcag

SEQ ID NO: 992360 - DNA, 120 bp, Artificial Sequence
  ENSG00000224086_39 (sequence is synthesized)
agagggttcgagaaaagaccttgtccttcaccatctttcatgggacaaatgcttccagaatgaatgaataaatgaaggggagggcaagggtcttccaaggaaaggacctctgagttcagc

SEQ ID NO: 992361 - DNA, 120 bp, Artificial Sequence
  ENSG00000224086_40 (sequence is synthesized)
ctaggcgacagctacacactgtctgccggtggacacccaactctctatcttccccgaaatctgctcggctagttgtgctacctctctgtgcctcagcttcctcacctgtggaagggggac

SEQ ID NO: 992362 - DNA, 120 bp, Artificial Sequence
  ENSG00000224086_41 (sequence is synthesized)
agtgccagctatctctcagatcgtggtggctggggtgccatgtggctctgccactccttgactgtaaggcctcaggccagcctcttcatctacccacctctgcctcctcgtccatcacac

SEQ ID NO: 992363 - DNA, 120 bp, Artificial Sequence
  ENSG00000224086_42 (sequence is synthesized)
ggatcggaaacaggacgtactgcttatcagctgctatgcaataaattgtgttccctaaaaggtatgttgaagccccagccccctgtggctcagaatatgatcttatttggagttaaagtc

SEQ ID NO: 992364 - DNA, 120 bp, Artificial Sequence
  ENSG00000224086_43 (sequence is synthesized)
tttgcaaatgtaattagttatgttcacatgaggtcacattggctggagtggctcatgcctgtaatcccagcatttagggaggcaaaaacatgaggatccatggagcccagaaattcgaga

SEQ ID NO: 992365 - DNA, 120 bp, Artificial Sequence
  ENSG00000224086_44 (sequence is synthesized)
ccagcctgggcagcatagcgagaccccattctccacaaaaagaaagatgagatcacactgtaggagggcagcccctggtccaaaatgcccatgtccttacaagaggaggagtcacagaca

SEQ ID NO: 992366 - DNA, 120 bp, Artificial Sequence
  ENSG00000224086_45 (sequence is synthesized)
cacagcaggcagggtggggaggtgtgaaggcacagacacacacatggggagatgccgtgtgcaacaaggccagctaggaggaatgagtctacaagccaaggacctccaggaagtcaaggc

SEQ ID NO: 992367 - DNA, 120 bp, Artificial Sequence
  ENSG00000224086_46 (sequence is synthesized)
caggcactaacagaaaggcagactcttccctgcagcctttgagagagcatggcgcagctgccaccttgatcttggactctggcctccagccctgtgaaagaatgagctttggctgtgttg

SEQ ID NO: 992368 - DNA, 120 bp, Artificial Sequence
  ENSG00000224086_47 (sequence is synthesized)
agtgcccagtgtgtggtgctttgccatagcagccacgggagttccacatggtgctgcatagggatccggggctgcagatccccgtgtggggctggacgtgtaggggagcagcagccacat

SEQ ID NO: 992369 - DNA, 120 bp, Artificial Sequence
  ENSG00000224086_48 (sequence is synthesized)
cccttgtcggccctggtgccgtgcccttactccccgtcccctttgggggtgcacaggcctacctgctgcccagaaagcccatggccagctcagccagctcgccctccacctcctcctggc

SEQ ID NO: 992370 - DNA, 120 bp, Artificial Sequence
  ENSG00000224086_49 (sequence is synthesized)
tgagcaccgtccctggggccttccatggcagagggtcctctgggttcagcagggctgggaagtcttgcaggagcgtgtccaggaagcctggggtctcctcagctccactggccattgggc

SEQ ID NO: 992371 - DNA, 120 bp, Artificial Sequence
  ENSG00000224086_50 (sequence is synthesized)
tgctcttctgtggggctccagaggacatgcccaaagcatcccgggggcctgcagctaggccagggcaagagggtctccaggcttcaccctggggagaaatgtcagagtcagcagaatcag

SEQ ID NO: 992372 - DNA, 120 bp, Artificial Sequence
  ENSG00000224086_51 (sequence is synthesized)
ggggccatggcaccagcaatgcaggtgcccacctgcaagcaccatgtggcaggtgcatggcctcatggttcagggccactagagggtggagggacaaccctggccactgttttgacatga

SEQ ID NO: 992373 - DNA, 120 bp, Artificial Sequence
  ENSG00000224086_52 (sequence is synthesized)
gtccaggtggggacttgtgggcatccagagatccggtctcaggagatggtgccaggagcagcagctgggtggacattgtcaagaagtgacagaggaggaagactgttcctggcagagggt

SEQ ID NO: 992374 - DNA, 120 bp, Artificial Sequence
  ENSG00000224086_53 (sequence is synthesized)
ggccagcgtggccagagacgagcaggacagggatgccgaggccaggcactgaggtaggtgagggggttcaacctgatcacgggtcccgagcagccaggagggctctgaggtgagggagtg

SEQ ID NO: 992375 - DNA, 120 bp, Artificial Sequence
  ENSG00000224086_54 (sequence is synthesized)
aagccaccaggtctgtgagcctggacgtggtgaccagatggcaggagggacacctgttggggctctagtggtgttcaggggaggaaagagaagggccaagatgcgggaggccggcccagg

SEQ ID NO: 992376 - DNA, 120 bp, Artificial Sequence
  ENSG00000224086_55 (sequence is synthesized)
gctgttttggagataggccagagtgggagcaggaagggatccccagaggctgctggggccacccaaggggtggccaggagagaagcagaggtttaatctgggacagacaggaggtgctgt

SEQ ID NO: 992377 - DNA, 120 bp, Artificial Sequence
  ENSG00000224086_56 (sequence is synthesized)
gggacaccatcgagcctattcaatgctctctaataggaggagggaattgtgagcctagaatggctcaggcctgctaagccctggctggaagaggggcactgtggacagttccaggcgctg

SEQ ID NO: 992378 - DNA, 120 bp, Artificial Sequence
  ENSG00000224086_57 (sequence is synthesized)
accccactgtgcggcatgtgggctcttcctccctaagtccttagggatgaccagagctgaccagccctgggagttgcccctaacaccccaggagccaggacaagcccccatttcacagat

SEQ ID NO: 992379 - DNA, 120 bp, Artificial Sequence
  ENSG00000224086_58 (sequence is synthesized)
gagaatcccaaggtttggagagggttagtccctcgcctgaggtgtcagaaggaagacagggccaaagagggatcgcaaagcctgtgccttcactccctcaccggcttctctctcactgga

SEQ ID NO: 992380 - DNA, 120 bp, Artificial Sequence
  ENSG00000224086_59 (sequence is synthesized)
aagaggcacatggtgcctcacagcctcctcccagggtggctctggctcctcttctctcctaactccgaatctccatagtcgcctccccagcctgcctgccttgcctatacccaaacagct

SEQ ID NO: 992381 - DNA, 120 bp, Artificial Sequence
  ENSG00000224086_60 (sequence is synthesized)
ctccagcgcccccccttccatgttctttgcgtcgccccggggattcacctccaggccccacacctgggcctccctgccagcacccactcagcatggacccttctctctcctgcccccttc

SEQ ID NO: 992382 - DNA, 120 bp, Artificial Sequence
  ENSG00000224086_61 (sequence is synthesized)
ctctcgggtgcctgacccctccaaaccctccccacagcggggactccaccttgggctttgtctaacactcaggctgggaaactttattcagcgagtcctacgcagtagtggatgagattg

SEQ ID NO: 992383 - DNA, 120 bp, Artificial Sequence
  ENSG00000224086_62 (sequence is synthesized)
gatccagaaaaaaataaaaaagaaatcctacacagttactaagccagggagaaaaactgcattcttttatggtgacaaacggacatgagactctgaggaacaccccgagttctagggtgg

SEQ ID NO: 992384 - DNA, 120 bp, Artificial Sequence
  ENSG00000224086_63 (sequence is synthesized)
agaatttggggaacagtttcacagcccatcaccttcatgaggacttccaggttctgaaaactgaacgaagaaggcaaggagaatcttctagaatcatcagtcttagaatagccacagact

SEQ ID NO: 992385 - DNA, 120 bp, Artificial Sequence
  ENSG00000224086_64 (sequence is synthesized)
ctgcctacaaactttgctaaaagggcggctgtggcaggggcctgaggtgcaggatgaagagagtgggaagtaagagatgcagggagctcacagcccacaagagggctgtccttatcagga

SEQ ID NO: 992386 - DNA, 120 bp, Artificial Sequence
  ENSG00000224086_65 (sequence is synthesized)
attgctaacttggaacaagccttctggaagcctaaagataaaaaacacaaaagagaatggggtgggcagagggaaaggtcccagcaccaagttaaatgtctgatcagtgagggatttgga

SEQ ID NO: 992387 - DNA, 120 bp, Artificial Sequence
  ENSG00000224086_66 (sequence is synthesized)
atgcaaggggtgaagggtggtaaattaacaaaacacaaaacccttctcttcttttagaggcagaattgaaaggtaatttatttaaagtggacacatacaaataacgtaggaataggggtg

SEQ ID NO: 992388 - DNA, 120 bp, Artificial Sequence
  ENSG00000224086_67 (sequence is synthesized)
cttgctactgaaggttctggggatagactaaatttattgctatggttcacatttactcacaagtaggagtaaatttaatgcaacccaggttacagaaggcaagcaggtaaaaggataaag

SEQ ID NO: 992389 - DNA, 120 bp, Artificial Sequence
  ENSG00000224086_68 (sequence is synthesized)
aagcaggtaaaaggataaagaacataaaacaactggcaaggcgctgtggctcaggtctatatctcagcgcttggggagggtgaggcaggaggagtgcttgaggccaggagttcaagacca

SEQ ID NO: 992390 - DNA, 120 bp, Artificial Sequence
  ENSG00000224086_69 (sequence is synthesized)
accccccccccaccccccatctctaccaaaaaagaaaaaaaaagaacataaagcaaaaaaggaaaaatcactttgagagcaggagggacactgacattcaaacgacaaagggaagactgt

SEQ ID NO: 992391 - DNA, 120 bp, Artificial Sequence
  ENSG00000224086_70 (sequence is synthesized)
gagctggagaaatgagcagaggctgggagccctagtaggtcaatgaggaggcggcacgtcctgccagccatgccccagcagagctgtaaggcattcgaagatggcgtgaatttcccagca

SEQ ID NO: 992392 - DNA, 120 bp, Artificial Sequence
  ENSG00000224086_71 (sequence is synthesized)
agcttggctgccctcaagcagtgcaagcggccaagggcccctcttctgcctgggactgccctggcccctggagcttctgggagaatgtgaacgatgcagagctgcccccagcaactgcca

SEQ ID NO: 992393 - DNA, 120 bp, Artificial Sequence
  ENSG00000224086_72 (sequence is synthesized)
gtgcctggggcctcctcccactcccttgcaattccaagtgatctggaggctctactgtctcaccacaaaatgtgctcatgtgaatttatgattaggatccaagtgagaggacagcatgct

SEQ ID NO: 992394 - DNA, 120 bp, Artificial Sequence
  ENSG00000224086_73 (sequence is synthesized)
ccccgctagagcacacagagggcccccctggagaaacccctgcccacagtgtaaagccccactgtcaagggcagaattcaagacccttcacttccaccccatttgctggtgacgtctgct

SEQ ID NO: 992395 - DNA, 120 bp, Artificial Sequence
  ENSG00000224086_74 (sequence is synthesized)
ggaccttttgggatgcaggtgcctccttcttgcctcctgaccttggggtactctttcctgtgccgtgagcccctccccacaatcggcctgttccctcagggagggtggctcctcctgtct

SEQ ID NO: 992396 - DNA, 120 bp, Artificial Sequence
  ENSG00000224086_75 (sequence is synthesized)
gcactacagaccctgattcactgtggccacctgcctgctctctctgtgccttgtgcccactatctgcacatgcctcaatggtgtctgtgccatgtgtactaagtaaggtctggggggtgt

SEQ ID NO: 992397 - DNA, 120 bp, Artificial Sequence
  ENSG00000224086_76 (sequence is synthesized)
gatgatgtgtgtgtgtgaagctctgtctgcatctgtagaggggacaggctggcttactctcagggcctgtgccaactgcctgctcttgttacaaaggcagggtgcccagggccatcttac

SEQ ID NO: 992398 - DNA, 120 bp, Artificial Sequence
  ENSG00000224086_77 (sequence is synthesized)
ttgctggggaccaagcacccttgtttctgcatcaccaacctaaggcaaggggtgaggagagaaaccaggacacagctttctctccctggagcccagatgtcgaaagggacaggaatcatt

SEQ ID NO: 992399 - DNA, 120 bp, Artificial Sequence
  ENSG00000224086_78 (sequence is synthesized)
tccttccttttcccaataagctcctgaatctgacgtacaccatggcacacccggcaggaaggagaaattcctcaccaagggaaaccagaggcagccctgggagtgcctggaggggcaggg

SEQ ID NO: 992400 - DNA, 120 bp, Artificial Sequence
  ENSG00000224086_79 (sequence is synthesized)
gacagtgctgtggttctttgagggatcaactggaagagacagcatcaggaatggcatggaggccagcggcaagccgcagggagtagggagagctgggagagcaccagaggcagcggagcc

SEQ ID NO: 992401 - DNA, 120 bp, Artificial Sequence
  ENSG00000224086_80 (sequence is synthesized)
tggtgctgggctttcctgagcagggcacaccagtgaaaaactccgaataagagggacgtgtgcatgagcctgtgcaaatcaccaagagcccggggtgggcatgggagggacattggactc

SEQ ID NO: 992402 - DNA, 120 bp, Artificial Sequence
  ENSG00000224086_81 (sequence is synthesized)
ctgcatcccagcaccgcctgcctggaccagtctgaccaaatgcgactggcagctggttcctcctggatcagggccccactgcacaccaaatgggtgctcaccctcctagaacctatttaa

SEQ ID NO: 992403 - DNA, 120 bp, Artificial Sequence
  ENSG00000224086_82 (sequence is synthesized)
ggtcccacataggtgagaaatggcaaagcaaactcatcggggggcagctgcaggggtgtggctgacggtgctgccagctgccatccgcccctgctctgagcactcttcctgggatggctt

SEQ ID NO: 992404 - DNA, 120 bp, Artificial Sequence
  ENSG00000224086_83 (sequence is synthesized)
ttagcctcccaacaacctcttgtggttatccccacttcacagggcaggctgtagcagaagagctaaggaacttgcccaaagtcccagggtggggttcatgctggggaacctgggccttaa

SEQ ID NO: 992405 - DNA, 120 bp, Artificial Sequence
  ENSG00000224086_84 (sequence is synthesized)
ctgtgatgacacctgggaagtcattctgactccttctatccctgacctgtccctcattggccaccagctctgggctttggctctctcatggctcctccttccatttctgtgtacccccca

SEQ ID NO: 992406 - DNA, 120 bp, Artificial Sequence
  ENSG00000224086_85 (sequence is synthesized)
ccctagggcagcccctcccctccttgttttgtggtgccctccttccattttgcctcccgagatctctcagatcctttgaggctttgctgaaatctccccatctttggatccagcatgctc

SEQ ID NO: 992407 - DNA, 120 bp, Artificial Sequence
  ENSG00000224086_86 (sequence is synthesized)
tctttcatgtctctatggcacttttgctcacatctgacttgtaaaaagtttttttttttttaatttaaaatatttattttcctctagtgcattagttttgactcctaagcttaacgaatg

SEQ ID NO: 992408 - DNA, 120 bp, Artificial Sequence
  ENSG00000224086_87 (sequence is synthesized)
cagggtttaacaactgcagttttttaggggacatagaaaaaatacttgttgagtcttgcttaactgcagaaccaaggtaatgaaaaaaacccagcaatccttagaaaagggaactgcacc

SEQ ID NO: 992409 - DNA, 80 bp, Artificial Sequence
  ENSG00000224086_88 (sequence is synthesized)
tgaaaaaaacccagcaatccttagaaaagggaactgcaccactatagtgtaacaaaagcatcattcatgttaactgtttt

SEQ ID NO: 992410 - DNA, 76 bp, Artificial Sequence
  ENSG00000224086_89 (sequence is synthesized)
atgagacaccacgcctggccaacctttttctaccaaaagagattcttatttctttattcataactactaatactaa

SEQ ID NO: 992411 - DNA, 120 bp, Artificial Sequence
  ENSG00000224086_90 (sequence is synthesized)
gcctggccaacctttttctaccaaaagagattcttatttctttattcataactactaatactaataatagttagatgtaaatcctagattttttttctacatatataaattttttttatt

SEQ ID NO: 992412 - DNA, 120 bp, Artificial Sequence
  ENSG00000224086_91 (sequence is synthesized)
tccttttaaccatttctaagcgtacagttccatggcattaagcatagtcacattgctgtgcaatgaccatttctttctacaggcctgactttcttgatagactgtaagctccctgtagtc

SEQ ID NO: 992413 - DNA, 120 bp, Artificial Sequence
  ENSG00000224086_92 (sequence is synthesized)
agggagcccacgatggccctttgtgtacagcaggtggtaagtgtgatggcagagggaagagtgactggcgggtggcatgggctgaggaagctacaccactctgaagggtgcagtgggcag

SEQ ID NO: 992414 - DNA, 81 bp, Artificial Sequence
  ENSG00000224086_93 (sequence is synthesized)
gctgaggaagctacaccactctgaagggtgcagtgggcagcagcgccaggtcttaaaagactcggttggcttcaggtcaga

SEQ ID NO: 992415 - DNA, 120 bp, Artificial Sequence
  ENSG00000224086_94 (sequence is synthesized)
taaaggaattccacaaatgaacttgtgtagaggttcatggctttcagaaatgcattcgttttgtttacctctcacaactacgctgagaagtacatactgtcaggctacactgcagatgaa

SEQ ID NO: 992416 - DNA, 120 bp, Artificial Sequence
  ENSG00000224086_95 (sequence is synthesized)
gaaataggttataggagggcaagcacccatttaaggtctcacacaggtgaaagggcaaagcgaactcaatcaaggtctctggatgcccaatgcctttggtatttccacctcgcgtgcagg

SEQ ID NO: 992417 - DNA, 120 bp, Artificial Sequence
  ENSG00000224086_96 (sequence is synthesized)
aggaaaagagcgaaatttgacaacagaagagactggagatggcctcagagtgctggccggccccactttctatcccccgtggtgagagctcagctgggcccagagaacttgtcccgggga

SEQ ID NO: 992418 - DNA, 120 bp, Artificial Sequence
  ENSG00000224086_97 (sequence is synthesized)
atgccaccacgacatgtgtgactctgtcccgcagggtggaaggcttcgaaggagcccgccaccatgcagtgggcctcactgtgtgtcaagcgctgtgccgaaatccctgcagccggagcc

SEQ ID NO: 992419 - DNA, 120 bp, Artificial Sequence
  ENSG00000224086_98 (sequence is synthesized)
agttcttcctgttgtacagacaggttcaggggcttgcctgaccgaacccagcggcaatgtgcccggcctccgcgcctgaggctctggctcacagacctgtggctgaagcagctgcagccc

SEQ ID NO: 992420 - DNA, 120 bp, Artificial Sequence
  ENSG00000224086_99 (sequence is synthesized)
gagcacttgtgcagctgacgctcgcttcacggacgcttgggaggccgcggagccgggggccatcaggcagactgggcccctgaaggtgcagggactggggggatatggggcaacgtgccg

SEQ ID NO: 992421 - DNA, 120 bp, Artificial Sequence
  ENSG00000224086_100 (sequence is synthesized)
gcccagaggctcctggggggtggggagaggccaaatctcggaaaatggggcgcgtccccctcagcacccgattctgcctcatagccctcggtccctaccaggccctcggctcggccacac

SEQ ID NO: 992422 - DNA, 120 bp, Artificial Sequence
  ENSG00000224086_101 (sequence is synthesized)
ccccgcctgccccccagttctgcccccttggctccccagccccccaactcccagcctcgggttcctcatgtccgcagcggcccctcttgctcctcggccccccgcactgcacccccgcac

SEQ ID NO: 992423 - DNA, 120 bp, Artificial Sequence
  ENSG00000224086_102 (sequence is synthesized)
cctttcggtgcacccatgtgagcctcgtctcggcctccttgcctccccagccctctgattccacccctccggttcctcggtcccatttcacccctgtgcgccttgggcgctcgcctgacc

SEQ ID NO: 992424 - DNA, 120 bp, Artificial Sequence
  ENSG00000224086_103 (sequence is synthesized)
ctcgtcccagccccgtcagccctctaatcccgtcccccccggcctcctcacccctggtctccgcgggcctcagctgtctcctcgcggctccgtgtcccgcaagctgctgccggccggccc

SEQ ID NO: 992425 - DNA, 120 bp, Artificial Sequence
  ENSG00000224086_104 (sequence is synthesized)
cgcgggcgccgcgggcgccgcgcaggcgcagtcgggcctccaggctggcggggccggacctctgctgccccctggcggctacgtggacggtgactgcggccctttagtggtaggcgaact

SEQ ID NO: 992426 - DNA, 120 bp, Artificial Sequence
  ENSG00000224086_105 (sequence is synthesized)
cggccctttagtggtaggcgaactgcggctccacctgggctccggagccgccccagtcaccagcctcttgcttctcttctgcagctttgggtgggcggctggatggggaaagcaatccct

SEQ ID NO: 992427 - DNA, 120 bp, Artificial Sequence
  ENSG00000224086_106 (sequence is synthesized)
aggtcacagcgcccagaaattaagcaacttctgccgtcaatagctggtaagtgacagagcagggatgcaaacccagactgcccaggcaggctcatccgtccgggaaggaggcacagtccc

SEQ ID NO: 992428 - DNA, 120 bp, Artificial Sequence
  ENSG00000224086_107 (sequence is synthesized)
aggctcattatgagttgtttgtttccacaaacgttgaggcttttgttatctttccgttctggaggtcagaagtccacttagcctcagtgggcgaagatccagggatcgccagaatgcgtt

SEQ ID NO: 992429 - DNA, 120 bp, Artificial Sequence
  ENSG00000224086_108 (sequence is synthesized)
cctttctgaggattctaggggagaaactgttcccctgccttttccagctcctaagggctccctgcataccttggctcgtggccccttcctacagcctcgaagccagcaatggccagttga

SEQ ID NO: 992430 - DNA, 120 bp, Artificial Sequence
  ENSG00000224086_109 (sequence is synthesized)
gcctttctcacactgccacctctggttccctcctctgcttccttctgctacttctaaagaccctcctgatgccattgggcccacccagatagtccagcatcatctctctaaatcagttga

SEQ ID NO: 992431 - DNA, 120 bp, Artificial Sequence
  ENSG00000224086_110 (sequence is synthesized)
ttagcaaccttaattcccctttgccccttattattattattatttttttttgacacggagtctcaccctgtcacccaggctgtactgcagtggcatgacctcgactcactgcaacctctg

SEQ ID NO: 992432 - DNA, 84 bp, Artificial Sequence
  ENSG00000224086_111 (sequence is synthesized)
caggcgtgagccactatgccgggtctgccatgtaatctaacacaggcacaggtataggacatgaacatctctgaagggccattt

SEQ ID NO: 992433 - DNA, 120 bp, Artificial Sequence
  ENSG00000224086_112 (sequence is synthesized)
ggcacaggtataggacatgaacatctctgaagggccatttttctgccaacacagaggctcttgaaaatattctttttctctctttttagagacaagctccttctctggtgcccacactgg

SEQ ID NO: 992434 - DNA, 120 bp, Artificial Sequence
  ENSG00000224086_113 (sequence is synthesized)
aactcctgggctcaagtgaccctcccctcctgcctcagccttcctagtgtctgggaacacaggcaagcaccaccacgcccagctgattaaaaaaaatttgtagagacagggtctctatgt

SEQ ID NO: 992435 - DNA, 68 bp, Artificial Sequence
  ENSG00000224086_114 (sequence is synthesized)
caagtgctgggattataggtgtgaaccattacacctggccaaaatattttattttaaaggcagaagaa

SEQ ID NO: 992436 - DNA, 120 bp, Artificial Sequence
  ENSG00000224086_115 (sequence is synthesized)
ttacacctggccaaaatattttattttaaaggcagaagaaagaaacctttatgtcaaagaaaatgttttaatatatgatattaatatattcacctttataccaatgccgttggaaagtat

SEQ ID NO: 992437 - DNA, 120 bp, Artificial Sequence
  ENSG00000224086_116 (sequence is synthesized)
aattttttaaatggaggatggggcaccagatcttatgtggctctgcccacctgaccttcaggtccgcaggcctgtgtccttgccaggaatgaatgtctctgggatgcttctctaacagga

SEQ ID NO: 992438 - DNA, 120 bp, Artificial Sequence
  ENSG00000224086_117 (sequence is synthesized)
ggaacctggagtgagaccaggaacctggagaactagcagctgggtgactggaaaggaaaccatctggggtggggttgggtctgcaaggcaggaggtgtctgggcagagaaagcagggctg

SEQ ID NO: 992439 - DNA, 120 bp, Artificial Sequence
  ENSG00000224086_118 (sequence is synthesized)
gggcggagggtcctgcctcatcccattctcctgctcactctttcctagatccctgtcagggcagtaaccatgagcaaggcttgaggctacttcttataaacagtggccctgggcacattc

SEQ ID NO: 992440 - DNA, 120 bp, Artificial Sequence
  ENSG00000224086_119 (sequence is synthesized)
cttagctcacctgagcctcagtttcttgatgagaaaaaatcgggacaatagcaaccaacctatctcagagggctgctgtgagaccctgagccactgtttctcaaactgcccctgagatca

SEQ ID NO: 992441 - DNA, 120 bp, Artificial Sequence
  ENSG00000224086_120 (sequence is synthesized)
cctacaacagaatggctgtagggtgaagtttgagaaccgcagtacaggtgaggtggtgcgtggggcaggccctcccacactgtaaagtgcagtgtggtgcggtaaaagctgatattcccg

SEQ ID NO: 992442 - DNA, 120 bp, Artificial Sequence
  ENSG00000224086_121 (sequence is synthesized)
caggcatcctcagagtgggcccaattagactcttgagcactgattccattcaaggtctgcggcttagagaggatggcaaagtgaggcaccaccaggagcttgtccctatgggctccaggc

SEQ ID NO: 992443 - DNA, 120 bp, Artificial Sequence
  ENSG00000224086_122 (sequence is synthesized)
caaggacgtgcctggagatgactcctgccttgtggcgctgtcactgcctcactgtccacattccatcacgcctcagatcctggcttccaccctggtgaaaggaatctttcaatatcaccc

SEQ ID NO: 992444 - DNA, 120 bp, Artificial Sequence
  ENSG00000224086_123 (sequence is synthesized)
acccagccacagacgcttctctgcttctctggcaaggctgcacccctggctaggtgggcagggccaggggctccttgagacagtctgcagccactgacctctccagcctccagggcagag

SEQ ID NO: 992445 - DNA, 120 bp, Artificial Sequence
  ENSG00000224086_124 (sequence is synthesized)
gtacagtcccatggagcgtggctgatctgaaggcagttctggcctaaaaggggtcttgtcccttccttgtcctcattgctcccaaggccaggttggcagcagtagcagcggggttggatg

SEQ ID NO: 992446 - DNA, 120 bp, Artificial Sequence
  ENSG00000224086_125 (sequence is synthesized)
ctattggatgggagaaggtgaatggactcggagtgcagaatcaagctgcggaagccaagggccttgaaggagggtcacacacaagggacaactgcagaggaaaataaaggaacactttgt

SEQ ID NO: 992447 - DNA, 120 bp, Artificial Sequence
  ENSG00000224086_126 (sequence is synthesized)
gattagccctgcctgtggctgaaagcgcagtgcagaagcatagtaaggaaggactgggtggtctgggtttaagacctaggaaccgtctctgctcctccaagcctgaatgagccctataac

SEQ ID NO: 992448 - DNA, 120 bp, Artificial Sequence
  ENSG00000224086_127 (sequence is synthesized)
ctaagggtcctggaggtcttgaaaccttctgcggagaaggctccaggtccactgggccctgtgggtggaagagcagagtcacagccccgcactggggacctaacaggtgtggccttgcta

SEQ ID NO: 992449 - DNA, 120 bp, Artificial Sequence
  ENSG00000224086_128 (sequence is synthesized)
gggccccagaatgggaccagagtgggtgggagggggcagaagctctgagagcaccccctccttcctgaagcctgtgcttctgagacacatcccaggaccctctatgtggttccccatgtc

SEQ ID NO: 992450 - DNA, 120 bp, Artificial Sequence
  ENSG00000224086_129 (sequence is synthesized)
tctgtattttcattcagcttcgagtagctctccaaactgtgttccagggaacccccgtgttaacctgtgagggcctccaggaagggggtccagggggggtatgcttggtgggctctgggt

SEQ ID NO: 992451 - DNA, 120 bp, Artificial Sequence
  ENSG00000224086_130 (sequence is synthesized)
ttccttacaggagctctcatataagtcctggtgcagcctgggaatctactactgagttggggcgggggcgggtctgagtccgaaacattcctgacctgcccctcaaagaaaggtcccact

SEQ ID NO: 992452 - DNA, 120 bp, Artificial Sequence
  ENSG00000224086_131 (sequence is synthesized)
gaacagtctggaaagctgttttgctgagctcccgtcatcactcaatgaggcacgggcggagtgtggagggagtttccaacacacagtggatcccgcacaggtgtctctcctcgggtggct

SEQ ID NO: 992453 - DNA, 120 bp, Artificial Sequence
  ENSG00000224086_132 (sequence is synthesized)
ggggaggggagcacaagaaggcactgaggtcagagggcagctgccaccagcacctggcaccacacggcagtctggcctacagggtattttctaaacctggcatgtgaatgggttccatgg

SEQ ID NO: 992454 - DNA, 120 bp, Artificial Sequence
  ENSG00000224086_133 (sequence is synthesized)
ggcacccagctgcctctaagaccataagggcttgttgtgagaatgggaattgcagcaggtcctgggaagctgccagacgcacacgggcaccatgtacagggcttctcagagatgggagca

SEQ ID NO: 992455 - DNA, 120 bp, Artificial Sequence
  ENSG00000224086_134 (sequence is synthesized)
gggagcaggggacggagaagtgtggggtcaagagcgtggccctgagcagggggctgcagcgaagaccaaggggattcataagccagatccggggagggggtctcccagccccacctgctc

SEQ ID NO: 992456 - DNA, 120 bp, Artificial Sequence
  ENSG00000224086_135 (sequence is synthesized)
cactagactcctctcctgccggagccacagctgtcaaggccgccttccttaaggcatcagggccactgcttgtgcacacagctaccatcagcagcacggattgagatggggtgtgagtgc

SEQ ID NO: 992457 - DNA, 120 bp, Artificial Sequence
  ENSG00000224086_136 (sequence is synthesized)
aaactgggtctattccccagggcttcagggttggggcatccctgcccgtactgccagggtgtagggatagcagggagcactctgggcacgtgtatgcaggctgaagggagacgtattggg

SEQ ID NO: 992458 - DNA, 120 bp, Artificial Sequence
  ENSG00000224086_137 (sequence is synthesized)
tttcggagagggagagagggccccacaggtgcccagggacacggtaacgctctgacatcgctgcaccagcaaaggggccccagctctggataagataaaatgcattttaatagtttgaag

SEQ ID NO: 992459 - DNA, 120 bp, Artificial Sequence
  ENSG00000224086_138 (sequence is synthesized)
tgccatgaggtgtctgcatggcactgcagcctgggtgagggaggacagggtcatcatacaaagtaggcggccagggctgacatcttgtccttgggccgtctggggttgggcttcccaggg

SEQ ID NO: 992460 - DNA, 120 bp, Artificial Sequence
  ENSG00000224086_139 (sequence is synthesized)
ggcctcctggcccggccccgccctcgaccctgccttctccctggtccaccgcggtgcatggggtggcaggaggccgcatgcttcagctccaccagctcctggaagacggggtcacaaaag

SEQ ID NO: 992461 - DNA, 120 bp, Artificial Sequence
  ENSG00000224086_140 (sequence is synthesized)
acgcagcccatgtgctgcgtctcatcgcccgggagtggggacttggccttgttgaagtccacatcaagcaaggcggcctcacagacactgcaggtgtcggcggacacccgcacgcggtgg

SEQ ID NO: 992462 - DNA, 120 bp, Artificial Sequence
  ENSG00000224086_141 (sequence is synthesized)
gcgttctcgaagcagtgcgctaccacgttgcacttgttgcaggccaccttccacttggggcccgaggtggggtccagcaccagcaccccgctctcacattccacgcactggccgatgccc

SEQ ID NO: 992463 - DNA, 120 bp, Artificial Sequence
  ENSG00000224086_142 (sequence is synthesized)
agcatgctcagcgagtgctggcaggaggggtgcgtacactcgttgcagcccatgcctggcgggagaagggagccctgtaaaggcacgcccactgtgcccacctgccctctgctgcctgct

SEQ ID NO: 992464 - DNA, 120 bp, Artificial Sequence
  ENSG00000224086_143 (sequence is synthesized)
cccaatgcctcaagctcctggatccctcgtcccagcagaaggaactcttcttggccttgctcttggggacagccttgctcatgtttcggctcctggctgccattacccctgttttctgct

SEQ ID NO: 992465 - DNA, 120 bp, Artificial Sequence
  ENSG00000224086_144 (sequence is synthesized)
tacctgaaacctcctcaactttcaaggcccctcgctggcaccatcccagtgggtttcagctgactccatcccccctttgctttgctgccagcttgttactggtaatgccacatgaccctc

SEQ ID NO: 992466 - DNA, 120 bp, Artificial Sequence
  ENSG00000224086_145 (sequence is synthesized)
atgtcactgggccacatggaaccaccctgtcagctactctggcggcagcaggagggcagggatggggtctcactcccggggcagcctgggtgcagactgaggcctgagggagctttctgc

SEQ ID NO: 992467 - DNA, 120 bp, Artificial Sequence
  ENSG00000224086_146 (sequence is synthesized)
agagcacacggtgaatgtgggcagatgcctcactcccgctgattcctggtctggctcggtgctctgtcctgcctgcctggacatgcgctccctcctccagtaatgaggacgaggatgagg

SEQ ID NO: 992468 - DNA, 120 bp, Artificial Sequence
  ENSG00000224086_147 (sequence is synthesized)
atggaggacggtggtggacgctgactgggggtgcccgctcaccgggtgggtcccccgactgctgcatcctcttgctcactcagctccagagggagcactgcacacctgtgcccaggtcct

SEQ ID NO: 992469 - DNA, 120 bp, Artificial Sequence
  ENSG00000224086_148 (sequence is synthesized)
gagggtggactagggttgcctgctcgattctgacacagagagagggtggcaccactggctgaggcctaagcagtgccccagctacatccagggtctctcgtctcagtgccaatgagtgca

SEQ ID NO: 992470 - DNA, 120 bp, Artificial Sequence
  ENSG00000224086_149 (sequence is synthesized)
ggaaaggccagggtgaggggtcccctcagagtccagcctggtgcaaggcaggggttggcactgaaaagagactgcagctacctgtggacaggagggagtggctgcactcacctttcttca

SEQ ID NO: 992471 - DNA, 120 bp, Artificial Sequence
  ENSG00000224086_150 (sequence is synthesized)
tgtctcggaagggtgggtggttgtagcagtaggggcacagcgggtagctcttgccccgagagcctgatgaccacaggaccagctcgaagtcatccagagggcagcggagctccttgtaga

SEQ ID NO: 992472 - DNA, 120 bp, Artificial Sequence
  ENSG00000224086_151 (sequence is synthesized)
gtgcaggcggcttggcttggcctgcggcaatgccaggcaggtggcgtgagggtcactggggccaccgacttggcacccacccccactcctctcataatacaaagtatgtaatctgtcatg

SEQ ID NO: 992473 - DNA, 120 bp, Artificial Sequence
  ENSG00000224086_152 (sequence is synthesized)
cagaacctgtgacacactgccaggcaaggagcatgagtctctggctcttgctccacgcgtgcagaaaaggcagttctaaaatctctgtgtgtacattaatgcccatgatggcaagtggca

SEQ ID NO: 992474 - DNA, 120 bp, Artificial Sequence
  ENSG00000224086_153 (sequence is synthesized)
tggtgttagggaaaaatgcaccatgtgtgtttgcgtggcctaatggctgtgtattctaggggacgtggggacactgggtattttttggcaaggcctctttatgttccatcattcttttgt

SEQ ID NO: 992475 - DNA, 120 bp, Artificial Sequence
  ENSG00000224086_154 (sequence is synthesized)
gacaaccaggacaaagaacatgattcctgctgatcaacgataaagctgaggcctacaggggtgaggcagcttgcctgagctagtgttccctgcacctacctggatgtacttcatgaagcg

SEQ ID NO: 992476 - DNA, 120 bp, Artificial Sequence
  ENSG00000224086_155 (sequence is synthesized)
gtggcacttcccacagcgtgagaggggcttgcctgtggccgccaggggcgagaaagacacctccatcaactcatccatgcctgcgggcaagcagagtgcaggagtcatctccctcccagt

SEQ ID NO: 992477 - DNA, 120 bp, Artificial Sequence
  ENSG00000224086_156 (sequence is synthesized)
ccccagcaaaaggctccgcaacacgtggtcaagggtctgagtgtgaaagggtccctataggcggtggtttctactgtcctggcagcacggcagggcagcagccctgtgcgtcagaggcac

SEQ ID NO: 992478 - DNA, 120 bp, Artificial Sequence
  ENSG00000224086_157 (sequence is synthesized)
gtgttcctggccatgtgtggtgttaatgcacctgctctttcaacccagccaggaggtgtcactgacctggcctacggaggcctgaagcccagatctgggagctggtcccacgtggggacc

SEQ ID NO: 992479 - DNA, 120 bp, Artificial Sequence
  ENSG00000224086_158 (sequence is synthesized)
tgggtccccaggtactggccttgctgacagagagacacccctctggtgaggggcaggccagaggcagactctaccagcaatggagtcgacaaagtagtggaacttcctcttgaacacgtc

SEQ ID NO: 992480 - DNA, 120 bp, Artificial Sequence
  ENSG00000224086_159 (sequence is synthesized)
cagggtgtggcccaggacctggcggtagtcggccttgccctgggcgatcaggttcagctgcttctccactgcactgcggatggtggggagcaccagctctgcatctgcaagtgggcaggg

SEQ ID NO: 992481 - DNA, 120 bp, Artificial Sequence
  ENSG00000224086_160 (sequence is synthesized)
ggcagatattgccctgagcactcgcacccagggccatgccaccccttcccaggcagggatactgccctgttcacccctcccgctctggcccgtcctcctggcctctgccctacccaccag

SEQ ID NO: 992482 - DNA, 120 bp, Artificial Sequence
  ENSG00000224086_161 (sequence is synthesized)
tccacagcctcagatggtaccaggctggctcttatgaccccagacctttcctgatttcccacctggaaatgtcaggcagagtggccagggatgtcctgtggctagaaccacatcacacat

SEQ ID NO: 992483 - DNA, 120 bp, Artificial Sequence
  ENSG00000224086_162 (sequence is synthesized)
gagctccaggccgcccttgggccagttttgtgctcctccctctccccttggcccctggggaacctccagggaacagggctgaggcaacttcgcctccctttttggttccctcacacatct

SEQ ID NO: 992484 - DNA, 120 bp, Artificial Sequence
  ENSG00000224086_163 (sequence is synthesized)
gttcagccttcaaacacactgagctcctgctctgggcaggtcctgggggtcctggggcagcaccccttcagcgggtgttgagggagtgtgtgtggggctgggggatcactgtagggcagg

SEQ ID NO: 992485 - DNA, 120 bp, Artificial Sequence
  ENSG00000224086_164 (sequence is synthesized)
ggcctgtctggagcgggcagcagagccaacatccagggagaagccagggagcctcggtgggccctgggggcaggactgaggaactcaccaatcttatagtagccgtgcaccaggacgatg

SEQ ID NO: 992486 - DNA, 120 bp, Artificial Sequence
  ENSG00000224086_165 (sequence is synthesized)
ccgaggttggtgggcttgagccggcgcccgctctccaccgtgacatagttgcgctggcagatgttgttgatatgcacagggatgctggcatccgtgcctgcaatgtacaaggccccaggg

SEQ ID NO: 992487 - DNA, 120 bp, Artificial Sequence
  ENSG00000224086_166 (sequence is synthesized)
ttcctggcctgccttggacatgccccactgaaccatgtgctgtatcacctgtcacggggcccctggtgctcaggccctctcactgctcccggtcacaggagggagggctgtgccctgagc

SEQ ID NO: 992488 - DNA, 120 bp, Artificial Sequence
  ENSG00000224086_167 (sequence is synthesized)
tccccctgcactgtgctgggcaccaactgcatgcatttcatgttctgccttgagaacacaagggcagccctccctgtacagggcgcctactcctgctttatggcagagacaacaggctcg

SEQ ID NO: 992489 - DNA, 120 bp, Artificial Sequence
  ENSG00000224086_168 (sequence is synthesized)
gaggttaaggaactctccaaggtcacagtgcttattctgcgcctggaaaatgtgacttctatggcttctcctgcctgggtcctgtggcacccacctgctcccggagccagagccccactc

SEQ ID NO: 992490 - DNA, 120 bp, Artificial Sequence
  ENSG00000224086_169 (sequence is synthesized)
caccagaacacggaggtgcttacaagctcactgcagagctgccctcccctaaacctggacaattctgtccacttcctgtctcccacctcctccctctctgcaaggcccgtcacgatcccc

SEQ ID NO: 992491 - DNA, 120 bp, Artificial Sequence
  ENSG00000224086_170 (sequence is synthesized)
aggggaggctcccagtccccaggattccactctcccacccagaggaagtttcctggcagaggggcgcagcggaggctgaggcgttttgactatggcgggtgccagtcagaggggcagaaa

SEQ ID NO: 992492 - DNA, 120 bp, Artificial Sequence
  ENSG00000224086_171 (sequence is synthesized)
ggaggctggggctccctgcatgctcaccagcatggacaggtgacacacaccttcccaaagtagctcggagagaatctcacatgggaagaaactggcctctgggggctaaggagcctgccg

SEQ ID NO: 992493 - DNA, 120 bp, Artificial Sequence
  ENSG00000224086_172 (sequence is synthesized)
agggcccatggctcttggcacgaggccagctctgcacccggtgtggcaggctgtgggtggcgtgtgccactaccaccccgagtctgccgggcgccatgacgcgtggtgtgggctcctctg

SEQ ID NO: 992494 - DNA, 120 bp, Artificial Sequence
  ENSG00000224086_173 (sequence is synthesized)
tggcggctctggtcaggcccttttgacacactcctgggggctcagtcacagggccaccctgaccactctcctgttcagaaggtaacaccagagccctcttcactgtcacaaacttgtatt

SEQ ID NO: 992495 - DNA, 120 bp, Artificial Sequence
  ENSG00000224086_174 (sequence is synthesized)
ggtgattgggtctggctcactggctagcatagggctgccaggagccagtgtcccatcaatgcgagagggcagaggacacgggggagcagagcccacactccacagtgggctgagggctat

SEQ ID NO: 992496 - DNA, 120 bp, Artificial Sequence
  ENSG00000224086_175 (sequence is synthesized)
ttcaggaccctggcaggtgccctggacccctgagaggagcaagcccagagctctgctctcctgccaagatcgccatggtcaccaggaccccagcctgggaagagacactccctgagagtc

SEQ ID NO: 992497 - DNA, 120 bp, Artificial Sequence
  ENSG00000224086_176 (sequence is synthesized)
cacctatatgaccactgctggagcagagcctggacacagtggctgtgacatcccacaggtctccagagcctgtcagccaggggtagtgccccagggaacaggcagtgcccagcggcgcga

SEQ ID NO: 992498 - DNA, 120 bp, Artificial Sequence
  ENSG00000224086_177 (sequence is synthesized)
gtgccacctggggagaaggctccggcagtgaggctggcccccaacatgtgagacatctcacagctccaggcctggggacttgtgaggccaccactcctgtgaggagtgtgcactggtgac

SEQ ID NO: 992499 - DNA, 120 bp, Artificial Sequence
  ENSG00000224086_178 (sequence is synthesized)
tacacttttgctttgataaactccctgggctgcccatttttgcgtggaaacttcctggtcaccctttggggagccctgtgcctgggacaggcatttctgttctctcccagggaagcagct

SEQ ID NO: 992500 - DNA, 120 bp, Artificial Sequence
  ENSG00000224086_179 (sequence is synthesized)
cctgtgagatctcatttccctgtcacctgatttcaggacagcccaggctggctgtgtggactcaggggactgccaatatgatttctatgagtcacctggcatctgggccaatcttcagcc

SEQ ID NO: 992501 - DNA, 120 bp, Artificial Sequence
  ENSG00000224086_180 (sequence is synthesized)
ttgtgggcgttagtcggtgtgtgcacaccccacagtgcacgagggcacatctgggccttcacagggaaggccaggtcctgaatggaggcctcaggaggggatgcccgctgtggacctgcc

SEQ ID NO: 992502 - DNA, 120 bp, Artificial Sequence
  ENSG00000224086_181 (sequence is synthesized)
tggctggccacacactgggtcaccagtttccagataccagcccatggaggggtgctgggctgggcacacagggctggcggggcagctttgtgagtagactcgaagcctgagtactggaga

SEQ ID NO: 992503 - DNA, 120 bp, Artificial Sequence
  ENSG00000224086_182 (sequence is synthesized)
cggagccggctctggggcctgggcaggcgcacccaccgatgccatgcttctccatgagcgtgatgagctcggcctccgtcaggtagtcgggtgggttcgtctgcttctccagcatcttca

SEQ ID NO: 992504 - DNA, 120 bp, Artificial Sequence
  ENSG00000224086_183 (sequence is synthesized)
cctcgcccacagggaaggcatcaccccgctggcaagtgggcaggctctcctccaggggcacgctctgccagggcatgacctccgtgaagcctggagagatatgcgccgccactcagggtc

SEQ ID NO: 992505 - DNA, 120 bp, Artificial Sequence
  ENSG00000224086_184 (sequence is synthesized)
cccagcctgggtggccggggcctcagaccctgggcctcccatccccagacacgatgtagaatgtttgtctgcccatgaaggcacagaggaggaaggctgggcccgtggtgtgacctggtg

SEQ ID NO: 992506 - DNA, 120 bp, Artificial Sequence
  ENSG00000224086_185 (sequence is synthesized)
agaggacggtcttcccggagcaggtgaagagctcgggcccaattctgaaggagatggtgctctgcaggtacttgcagtcatggctgaccgtggcgatgaagtgtctggtgatgtactcat

SEQ ID NO: 992507 - DNA, 120 bp, Artificial Sequence
  ENSG00000224086_186 (sequence is synthesized)
agagccgccacgcgtcaccccctgcaacaggccagggctagtcagttgggagccagctgggggctctggccgtgaggagcccccagtactctcgctcgagcagcaagctcctgcttacag

SEQ ID NO: 992508 - DNA, 120 bp, Artificial Sequence
  ENSG00000224086_187 (sequence is synthesized)
agtactctcgctcgagcagcaagctcctgcttacagagccgctgtgcaggacacactgcaaatcctggggaaggaggaaagaaaatgtgcaggaaggccgggcgtggtggctcatgcctg

SEQ ID NO: 992509 - DNA, 120 bp, Artificial Sequence
  ENSG00000224086_188 (sequence is synthesized)
aaagcaaatgcggaggaagggaacacaagcctccatgcctcagtggtttctttctggctgcggctcccaccatcctgcacaacctcctgtccctgcttctggcgggactgctcttcaggc

SEQ ID NO: 992510 - DNA, 120 bp, Artificial Sequence
  ENSG00000224086_189 (sequence is synthesized)
attggcctgtctttccattgtctcgtgacatgacaccattgcttcaaactcagactgtccacaggtggctcctgtctctacctgcactgctctcccttcctcatttgccttctcctggca

SEQ ID NO: 992511 - DNA, 120 bp, Artificial Sequence
  ENSG00000224086_190 (sequence is synthesized)
ctcggaccactggtaccaccttaggccagctgggaggtaggaggtgtgctgccccctcccccacaccgccactctctaccctggtttcattcatgtcccctgtggcgtctgcccccttgc

SEQ ID NO: 992512 - DNA, 120 bp, Artificial Sequence
  ENSG00000224086_191 (sequence is synthesized)
ctccctgcaacagcacctgctgctacctcttcactcctgtcctggtcccatagcaatggagctcatcttccaggtggccccccatccccacagccagggcaggcagaggctgaaggagcc

SEQ ID NO: 992513 - DNA, 120 bp, Artificial Sequence
  ENSG00000224086_192 (sequence is synthesized)
cccacattgccaacagggcctgcaaccttcactgtcgcagctcgcccttccctccctggaagcacaccgggtatgggatgagagcggtacctaattcggcctctgtggcagacttcatgg

SEQ ID NO: 992514 - DNA, 120 bp, Artificial Sequence
  ENSG00000224086_193 (sequence is synthesized)
gggtgatggggggatggtcgccggcgtcatggcctttccgcgggcggttgataccttctgctaacaaccgcttcacctgagggagagaagacagagcagagtctgtggctgggctcggct

SEQ ID NO: 992515 - DNA, 120 bp, Artificial Sequence
  ENSG00000224086_194 (sequence is synthesized)
gcctgcctgggtttggctgacgtaccagacctggtcccaaggcctcagtgacacacacacatgctgaggccggcccggctccactcaccgtgtcggcccagtaggggtggttggcctgct

SEQ ID NO: 992516 - DNA, 120 bp, Artificial Sequence
  ENSG00000224086_195 (sequence is synthesized)
gccgcagagagcccttcaggtcaaagttctcagggtagtgggtggtctctgtccgtgggtagctgatgtagccttgcgtgtagagccgctcagccgtctgcatggcgtgctgcggcccca

SEQ ID NO: 992517 - DNA, 120 bp, Artificial Sequence
  ENSG00000224086_196 (sequence is synthesized)
tgcctgcgagagacaggaggttctcagagggccaggtacgtggggatggccagctgcctgccctggcctatgcactcaggctcccccattgtggccggcccctcctggagggtgacggtg

SEQ ID NO: 992518 - DNA, 120 bp, Artificial Sequence
  ENSG00000224086_197 (sequence is synthesized)
gctctgagcaggcacagctggagtgcaaagctgctggccgggtgggcacctatgccacacagtcttgtatgaggctgaatcccgcacccgtaaggctgaatcctacacccaggatgggcc

SEQ ID NO: 992519 - DNA, 120 bp, Artificial Sequence
  ENSG00000224086_198 (sequence is synthesized)
tgatgggaaacgccactcactctaccccacggtgcatcctcatggggctcatggccatggggatgacacatggccttcagagcaccactccccatgcattgtccatggagccataaccat

SEQ ID NO: 992520 - DNA, 120 bp, Artificial Sequence
  ENSG00000224086_199 (sequence is synthesized)
acctcggggttggctgacgacagagttagcacgcagccccattttgagcccttgggtgtttctgtcctcacagcactttggggccactcaggggggctcgtcctgctactccctgaccag

SEQ ID NO: 992521 - DNA, 120 bp, Artificial Sequence
  ENSG00000224086_200 (sequence is synthesized)
cagaggcaggcgcttagctagcaaccactcccagcattgctgccctctgaggacgctggagccaccactcagtgtccactgagaggacactgcccatagttccctgcgggggtggggggc

SEQ ID NO: 992522 - DNA, 120 bp, Artificial Sequence
  ENSG00000224086_201 (sequence is synthesized)
accaatgcctaggggctgacagctgccagagaccaccagctttccagcccaaccccctcctcgttactaaggagaaaagactgaggagatgaggctgaggggcgacgttcacactggttc

SEQ ID NO: 992523 - DNA, 120 bp, Artificial Sequence
  ENSG00000224086_202 (sequence is synthesized)
cctgaaggtgacatctggctggggcctctcccctcaccagggatagctgctcagggactctaacatcaggaggtcccctcaggtggtgaccaactttaccacctttacaacctaaggata

SEQ ID NO: 992524 - DNA, 120 bp, Artificial Sequence
  ENSG00000224086_203 (sequence is synthesized)
agtgaaatcctcctgaggctcagatccccttgaagccttgggcaccatcctgcaaccctgggcactcgctgctccaggctgaacctgcctcaggaagccttctggtgacttgagagaaat

SEQ ID NO: 992525 - DNA, 120 bp, Artificial Sequence
  ENSG00000224086_204 (sequence is synthesized)
gtccctacatacccagagaagagctggccacacgcagcatctccacagtgttcagggccaggggcctctgcttggccttttctttcctgcttgtggcctccacctggaagacaggacagt

SEQ ID NO: 992526 - DNA, 120 bp, Artificial Sequence
  ENSG00000224086_205 (sequence is synthesized)
caatgatttggggaaggaggaagacaccaccatagagggaatcaagatgtgtggacgaagggtctggtttcattcatctggtctccctgtttctccaattcattcttcccaacagtctaa

SEQ ID NO: 992527 - DNA, 120 bp, Artificial Sequence
  ENSG00000224086_206 (sequence is synthesized)
aattcattcttcccaacagtctaaagacttgattgaatatttattcaggaccaggaaaggaaaaagaatgaaaattcttttttaaaaaaaaattttggctgggtgtggtggctcacgcct

SEQ ID NO: 992528 - DNA, 79 bp, Artificial Sequence
  ENSG00000224086_207 (sequence is synthesized)
tttgttttttttaagagacaggagagcttactgtagccctgaactcctgggacaagtgatcctcctgcctcagcctcct

SEQ ID NO: 992529 - DNA, 85 bp, Artificial Sequence
  ENSG00000224086_208 (sequence is synthesized)
tcctcctgcctcagcctcctgtgtagctgaaaccacaggcacacaccatcatgtctgaccaattttttttttcaatttcttgtac

SEQ ID NO: 992530 - DNA, 120 bp, Artificial Sequence
  ENSG00000224086_209 (sequence is synthesized)
tcttaaatgaactcctggcctcaagtaatcctctcgcctcagcttctcaaagtgctaggattacaggcacgtgccaccatgcccgtctactttttaaattatttttttcagagacagggt

SEQ ID NO: 992531 - DNA, 120 bp, Artificial Sequence
  ENSG00000224086_210 (sequence is synthesized)
ggtctcaaactcctggcctcaagtgattgaatattcttttctggagaattttctagggaaagagaaaacctggaagattgaggaggagtcagaagggctgcagatggaaatcctacagaa

SEQ ID NO: 992532 - DNA, 120 bp, Artificial Sequence
  ENSG00000224086_211 (sequence is synthesized)
cagatggaaatcctacagaagccagcatcagccaagctacagggatggcaagtggggcccgtcccaggggaagtaccactccttgttgtggggagggctgctgcctgcacctgctagtat

SEQ ID NO: 992533 - DNA, 120 bp, Artificial Sequence
  ENSG00000224086_212 (sequence is synthesized)
tgctacctcttctgatttttcaagagaagctagaaggcagaattttagtatgaaatctcgtaatttttaagtgctggtaactattctggaatttgtgtaaacaccatgcaggttagtgga

SEQ ID NO: 992534 - DNA, 120 bp, Artificial Sequence
  ENSG00000224086_213 (sequence is synthesized)
gtgcatctatgagctgtgctttgttggggtcctgccactctctacctctgctgaacacttgtcggaagagacaactctttgttttgcctatggcaaaaacaatccaaacaactcaacccc

SEQ ID NO: 992535 - DNA, 120 bp, Artificial Sequence
  ENSG00000224086_214 (sequence is synthesized)
aggccctggcccttgccaatcccacgtaggctggtcagggcagtgccttctgcattccagacagacagatgtgggtgctaacagaggccagttgttatgtgaagctgggctccccagcgt

SEQ ID NO: 992536 - DNA, 120 bp, Artificial Sequence
  ENSG00000224086_215 (sequence is synthesized)
gaggcctggaggtggcaacagtgtctctgcaggaatgtgatcaatgctgacagcctggagcagctttagaagtttcagatgcctgagacgatagcatggcgggcaacagggcactcaagg

SEQ ID NO: 992537 - DNA, 120 bp, Artificial Sequence
  ENSG00000224086_216 (sequence is synthesized)
aaggccagagaaggacaaggagaaggcggctaaggaggccaggctgtgtctcgacggatctggtagctgtcatgcctgtagcatgtttacttcaatagccacagatgtgtccccaaccca

SEQ ID NO: 992538 - DNA, 120 bp, Artificial Sequence
  ENSG00000224086_217 (sequence is synthesized)
tgcagccaggtcacctcaccgttttcctaacagccaagcagcatgtcctttcaattcatagaagccctgagtaagaaacataatcccataaaagcacgcaagctgattgcaattggaatc

SEQ ID NO: 992539 - DNA, 120 bp, Artificial Sequence
  ENSG00000224086_218 (sequence is synthesized)
tcaagactttcccctgctagctgtgaccttgggcaagttcatcagtgtgcaccaaggtccctctacagttgttagtttgaatctctgtgtgaaatggagtcctgccacacggaggtaatg

SEQ ID NO: 992540 - DNA, 120 bp, Artificial Sequence
  ENSG00000224086_219 (sequence is synthesized)
cctagcgggtcacgtggaaaggggagagtggaaggggtccgacaaggtcacaggtgtggacagtgcctggtatggagcgggcatgcagtacactgtgactattgcactgggcagaaatat

SEQ ID NO: 992541 - DNA, 120 bp, Artificial Sequence
  ENSG00000224086_220 (sequence is synthesized)
cttaggagtatatgagggagtaaccattcagctttccaaaaagatgtctgtgtttcagaaagggggagaaagacgtggactaggatcacaggctgttcctccagcgggaggcatccaagg

SEQ ID NO: 992542 - DNA, 120 bp, Artificial Sequence
  ENSG00000224086_221 (sequence is synthesized)
gccaccctcacccaaggcaactgtgatagatgtgggtggagcaggcacacctgggcttccttctccagctttgtcatgtttaaaaacatctgtgcgatctcccggtcaaacactcttact

SEQ ID NO: 992543 - DNA, 120 bp, Artificial Sequence
  ENSG00000224086_222 (sequence is synthesized)
cggtcccagtccaaaaggagagatctgtctttgtcagtgttaacctgcaggaaaaaggataaagggtgaacgcacaagaaaaagtctccaggtgagcccaacgccaggaagaaccaggac

SEQ ID NO: 992544 - DNA, 120 bp, Artificial Sequence
  ENSG00000224086_223 (sequence is synthesized)
agatgaagctggtccttgtctgggagccaaatagccctggctgtaatggctcacagctgtacctgttcaggtgggcagatacgcaagctgacatctggccctctccaccacttgccccaa

SEQ ID NO: 992545 - DNA, 120 bp, Artificial Sequence
  ENSG00000224086_224 (sequence is synthesized)
aaccaggcagccagtctcaggaaggtggcccaaagctgaggctgatgtgtccctaagaagcacctgagcccctacttctcacaccacccctgcctatccccagtgcctggccagtggtag

SEQ ID NO: 992546 - DNA, 120 bp, Artificial Sequence
  ENSG00000224086_225 (sequence is synthesized)
gtatggccaccgccagggtcccaagccccgtgtcagccacagcagctccaagacagtgtctcactgtgttgctaggctggagtgcagtggcacgatcgtagctcactgtagccttggact

SEQ ID NO: 992547 - DNA, 120 bp, Artificial Sequence
  ENSG00000224086_226 (sequence is synthesized)
caagcaatcctcttgcctcagcctcccaggttgttgggattacagacatcagtcactgtgcctagctgtattaagtcttacagtgagcttctgtggaggcttttatttgaagaaagggtt

SEQ ID NO: 992548 - DNA, 120 bp, Artificial Sequence
  ENSG00000224086_227 (sequence is synthesized)
aaagggttctaggaattttaaaaagtttgaaagccaatggtctcagtccagtgcttggacctgaccactgaagccactgattcctgtggggtgacctcaccctgcactgccagagctgaa

SEQ ID NO: 992549 - DNA, 120 bp, Artificial Sequence
  ENSG00000224086_228 (sequence is synthesized)
ctcattcccacttatccagattcagcatatacaggcccagtctcttcccactgcccccatgaaggctggggtccctcagccctaggcaccacagaccacttccaggtacagccgtccaca

SEQ ID NO: 992550 - DNA, 120 bp, Artificial Sequence
  ENSG00000224086_229 (sequence is synthesized)
cttctgccctcagcccggggcctgccggctgatgatgatggaagactctcagaatccatgccccaaacccagaaagccccagcatgaatagagaaaggcaaggaaccttggcctgcagca

SEQ ID NO: 992551 - DNA, 120 bp, Artificial Sequence
  ENSG00000224086_230 (sequence is synthesized)
cccagtaggtctctggtttgaaggactggattttatcatgtctctccacacagaatcccagggttggagtctgacacggcccaaaggagatgagagagctgtctaaatcaccgtatttcc

SEQ ID NO: 992552 - DNA, 120 bp, Artificial Sequence
  ENSG00000224086_231 (sequence is synthesized)
cctggaaatatttagtctgaaacctggagggagtggaaagatattttggtcactgattcactcaagacactattatggccacccatgtgagtccagcccaaggccaggggtggtgcatga

SEQ ID NO: 992553 - DNA, 120 bp, Artificial Sequence
  ENSG00000224086_232 (sequence is synthesized)
aggaggtggcatcaggtggtgtccccacttagaagccagtgggagcagagtgggcatagccttagggaggattcatgtgtgtacatgggtgacagagccagtgagagaggagacagaggt

SEQ ID NO: 992554 - DNA, 120 bp, Artificial Sequence
  ENSG00000224086_233 (sequence is synthesized)
ttctactgtctcaggccagggagccttctattctattccatctactgcacactctcctcaggacccccagagcacagacaaacacactttatcaagcagggcatatgtgatctctgtcag

SEQ ID NO: 992555 - DNA, 120 bp, Artificial Sequence
  ENSG00000224086_234 (sequence is synthesized)
ctaaataaacaattttctttaggtctcttttgtttttgtagagacagggtcttgctgtattgcccagcaggagtgcattaatggggattcacagatcattgcagccttgaactcctgggc

SEQ ID NO: 992556 - DNA, 70 bp, Artificial Sequence
  ENSG00000224086_235 (sequence is synthesized)
agcctcccaagtaactgggactacaggctcacaccaccacacccagctaattaaaacaaaatgtttggac

SEQ ID NO: 992557 - DNA, 89 bp, Artificial Sequence
  ENSG00000224086_236 (sequence is synthesized)
agtaaaaccctgtctctacaaaatgcataaaacacctgtagtggaaggctcaggtaggaggatctcttgagcctgggaggcagaggttg

SEQ ID NO: 992558 - DNA, 65 bp, Artificial Sequence
  ENSG00000224086_237 (sequence is synthesized)
cacacctgtagcacctgtagtggaaggctcaggtaggagttccagcctaggcaacagaacaagac

SEQ ID NO: 992559 - DNA, 120 bp, Artificial Sequence
  ENSG00000224086_238 (sequence is synthesized)
agagatggggtcttgttatgctgcccaggctggtctcaaactgccaacctcaagcaatcctcctatcctggtctcccaaagtgcagggattacaggtgttagccactgtgcctggccttc

SEQ ID NO: 992560 - DNA, 120 bp, Artificial Sequence
  ENSG00000224086_239 (sequence is synthesized)
ttcagggttggtgaaatcccctgttgctcatcctggctcgaggaggcctaggggccccggagggggaccagtagaggcaggtctctggctgagggagagtgagggtgtgcccaggactct

SEQ ID NO: 992561 - DNA, 120 bp, Artificial Sequence
  ENSG00000224086_240 (sequence is synthesized)
gcgggtgtggccagcacctggtgaatgcacagccgattcgcaggtccagctcctggcgagcatccactgagagcgcctcgttgtggtcaggctcgcctaggcaggccatggcattacaga

SEQ ID NO: 992562 - DNA, 120 bp, Artificial Sequence
  ENSG00000224086_241 (sequence is synthesized)
tgtctgtgtccgtgatggagctaaacctggcccggaacacggtcttctcgccaccatgggccttgttcatgacgggcagaacagcatcaagaacctgggggtggggagtggccagctgtg

SEQ ID NO: 992563 - DNA, 120 bp, Artificial Sequence
  ENSG00000224086_242 (sequence is synthesized)
acccacctcccagatccctgccacagctccccaccccactgtgaagcctggttccttccaggaaagaacacgtgtgctcggctccctctcctgcccctgccagaccctcctctatcccct

SEQ ID NO: 992564 - DNA, 120 bp, Artificial Sequence
  ENSG00000224086_243 (sequence is synthesized)
ttcctgcacctgccagaccctcctctatccccctgcctttccagaagccctgagcactccacaacaccccaccacatggcttcctttactcccatctagaaacatactcgaacactccct

SEQ ID NO: 992565 - DNA, 120 bp, Artificial Sequence
  ENSG00000224086_244 (sequence is synthesized)
tcttactcccgccctctcttctaatcctctgctttcatccccaccaaatcaggaaatgctactgccaagtacatgagggacctcttagtccccaaacccatcccatgtgacacgattccc

SEQ ID NO: 992566 - DNA, 120 bp, Artificial Sequence
  ENSG00000224086_245 (sequence is synthesized)
tgccttctaggagggagggtttggaggggtgggtggaaattttaagaggctgaagaaaagacagggaaggaaaaaagaatgaaggggaaaggaaatgggcaagagcaggaaggccacggg

SEQ ID NO: 992567 - DNA, 120 bp, Artificial Sequence
  ENSG00000224086_246 (sequence is synthesized)
tggtcctagcttgtggtgggggcagctcgggctaaagcacagcaggggtcctggagccgagactcactaggaaggccgtgcagtgggactagggtcgccgccggagcctggccacgcagc

SEQ ID NO: 992568 - DNA, 120 bp, Artificial Sequence
  ENSG00000224086_247 (sequence is synthesized)
ttccttactgggaataagtggcttcatttctgaagggagaaagccccatgagctgcccccattctccattcccagatgcaaaggcccccagggaggagccgccctgcaggggaggagagg

SEQ ID NO: 992569 - DNA, 120 bp, Artificial Sequence
  ENSG00000224086_248 (sequence is synthesized)
gtatctgggaagagacagagtgtgatcgcatttgctgagggtgctgtactgcaacgccaggtgcctcagctctgtctcactgaccagctcttgagccacgggtgagagctgggggtacag

SEQ ID NO: 992570 - DNA, 120 bp, Artificial Sequence
  ENSG00000224086_249 (sequence is synthesized)
gagcacgggggcgacccatagaacaacagtctgaagggcaccaagtgagaccagcagtcatggccactgtgagggcaccatggccggggcaagcatggggcatggggtgtgcacagggag

SEQ ID NO: 992571 - DNA, 120 bp, Artificial Sequence
  ENSG00000224086_250 (sequence is synthesized)
cagctgccacctgcttctctgcagggctcccagggttggctggaggcaggaggcatcctggatgaggcaggagatgagcagagcgaggcctgcaaaaggagctcagtgctgaggtcggga

SEQ ID NO: 992572 - DNA, 120 bp, Artificial Sequence
  ENSG00000224086_251 (sequence is synthesized)
atcaaccagcatcaacccaaggtccctgagaagtcacgctgggcacaagatgctgaacaccaagctgccccaagacaatcccattctgaaacctgcatccacccagacaatttggcccct

SEQ ID NO: 992573 - DNA, 120 bp, Artificial Sequence
  ENSG00000224086_252 (sequence is synthesized)
cctatgttcactcataccgttgaggcctcagcaagcggaggaacaactgaccacctttaatagagcctatgcagttaaaagtatctgtggagtttcagaataaagggaggggagaggtgt

SEQ ID NO: 992574 - DNA, 120 bp, Artificial Sequence
  ENSG00000224086_253 (sequence is synthesized)
ttttaaaccggtacagtttactccctcctttggccccaggagtgatgtgactgactgctggtgtcagtttggggctggtgtcagaaaggccaaaagtgaggaacaaagtgagcctcacac

SEQ ID NO: 992575 - DNA, 120 bp, Artificial Sequence
  ENSG00000224086_254 (sequence is synthesized)
tcacctcaaagcagatgttctccccctccttgtcgcagtccagccacagcacgatgtagtcgcagcctctgccctccacctgccacacagcacaggttcacacgtacctgctgcagaccc

SEQ ID NO: 992576 - DNA, 120 bp, Artificial Sequence
  ENSG00000224086_255 (sequence is synthesized)
ggtctgtgccacccgcccccagtgctcccatccaggacagggcttggtcccaggccctgaacctcagttaggaggactggtacctgggctgggtaaggagctggctgtgttgaggctggc

SEQ ID NO: 992577 - DNA, 120 bp, Artificial Sequence
  ENSG00000224086_256 (sequence is synthesized)
tcagccaacagaaaagaattgagtttataattgatgttttttggaccaaaaaaaaaagtataaatgcaacatgatcttataccccaaaactgcccagaagaagggttaaaatgaaataac

SEQ ID NO: 992578 - DNA, 120 bp, Artificial Sequence
  ENSG00000224086_257 (sequence is synthesized)
cctaaatgataacagcagtcgtcttgggtaatatgattatgcataatttttctgtctttctacttatctgcactttctaattttccataatctgtatgcatttgttttaaaattaaggag

SEQ ID NO: 992579 - DNA, 120 bp, Artificial Sequence
  ENSG00000224086_258 (sequence is synthesized)
aaaaaccccccgaccaaacaagctattttaaaagcagaaggcctgctctccaggactgagggttggcaatggcaactgccttgtgtgttgggggtgcctgcaggtgcctcgtgggccagc

SEQ ID NO: 992580 - DNA, 120 bp, Artificial Sequence
  ENSG00000224086_259 (sequence is synthesized)
agggggcactcacagaaaaagctagcaaaggcccccctgtccaagggggattaggactcaagcaagggtgggcaaagacatggcagctgtggagggtggggagccccggtgtgctcatgc

SEQ ID NO: 992581 - DNA, 120 bp, Artificial Sequence
  ENSG00000224086_260 (sequence is synthesized)
ccaggccagccccacgcacctgcaggaacttcaccatgttcagcttggggttagcttctttcttctccgtgggagcttggctgaacagttctgcggggtccactttgtcccatttgttgt

SEQ ID NO: 992582 - DNA, 120 bp, Artificial Sequence
  ENSG00000224086_261 (sequence is synthesized)
attttcctacaaaccagtcacagtgacattgagtcacaggagctcagcctccgagaccatcataaccccaggaggatgttggcctcatcccacaaatgaggaggggaaagcttggagaac

SEQ ID NO: 992583 - DNA, 120 bp, Artificial Sequence
  ENSG00000224086_262 (sequence is synthesized)
aatttgcccagggtcatcctgatgatcagaggcagagccaggatgtgggttcaggcctttggtaaccccctcccatccagcctcctttctgctcggctgctgagcggacccaccacaccc

SEQ ID NO: 992584 - DNA, 120 bp, Artificial Sequence
  ENSG00000224086_263 (sequence is synthesized)
cggccaaccacaggagccaagcaagctctcggggggctgccactctggcctcacttccgggactttccctgtggctgggagcaccattcctgggctgggtctctttgcctgagcactgga

SEQ ID NO: 992585 - DNA, 120 bp, Artificial Sequence
  ENSG00000224086_264 (sequence is synthesized)
ccccacaatggtgccttcattgacacttccaacctgagtttctggaactttgtccttccacccagcactctgtgggggcacacatgtgtgcagtcgttcctgttaaaggaccatcttttt

SEQ ID NO: 992586 - DNA, 120 bp, Artificial Sequence
  ENSG00000224086_265 (sequence is synthesized)
gagcctcatgcccagcacattcacctactcatctacagagacccggttcttgcatgctcagctgtctggctttcttttaggccccatttctttttttttctgagacaggggtctcgctct

SEQ ID NO: 992587 - DNA, 120 bp, Artificial Sequence
  ENSG00000224086_266 (sequence is synthesized)
atcacccaggatgaagtacagtgatacgatcacggctaactgcagtctcgacctcccagcctcagtccatcttcccacctcagcctcccaagactacaggtgcgcaccaccatgccagct

SEQ ID NO: 992588 - DNA, 120 bp, Artificial Sequence
  ENSG00000224086_267 (sequence is synthesized)
actacaggtgcgcaccaccatgccagctgatttaaaaagaattttgtttttttttttttttgtagagacaggggtctcactatgttgtccagactagtcttgaactcctgggctcaagcg

SEQ ID NO: 992589 - DNA, 120 bp, Artificial Sequence
  ENSG00000224086_268 (sequence is synthesized)
ctgggagaatggggtcagacagagccaaattcaaatcccggctccccacctgccagttggagataaaacttggggtccaaatgctcagccacacaactcagtcaccatcattgtcatcac

SEQ ID NO: 992590 - DNA, 120 bp, Artificial Sequence
  ENSG00000224086_269 (sequence is synthesized)
tgtcatcaatgagcagcaagaacaagggctgaggctttgctgtgtgtcgggccctgtgctgagtgctttgccctcactgtcacactgaatccttagccttgggaagcagatggcattgct

SEQ ID NO: 992591 - DNA, 120 bp, Artificial Sequence
  ENSG00000224086_270 (sequence is synthesized)
gtgagacccatttcactatgagaagtgtaaactcagaggccgtcattgcccacatccccagccagtgagccggcagagcagggggaaaagcctggatcagactcttgccaaccacatggc

SEQ ID NO: 992592 - DNA, 120 bp, Artificial Sequence
  ENSG00000224086_271 (sequence is synthesized)
cccaaacctacacccagcaggtcactaatactggcgcttccaaggtaattgataacagtaacaatataggaatgacaacgacagccaccaaatgaccgacagatgacggtcaacttggca

SEQ ID NO: 992593 - DNA, 120 bp, Artificial Sequence
  ENSG00000224086_272 (sequence is synthesized)
acagcagcagccttctcttaaatgcctgcacaggtcaagcccttcctaagataggtgctgccactttgtctacataggaaggcacacagggaatgcagcgactaaggggtgccgctatga

SEQ ID NO: 992594 - DNA, 120 bp, Artificial Sequence
  ENSG00000224086_273 (sequence is synthesized)
tggggacccagggctgagttccagagcctgggttctgggcaccgcaccagggaccctctcattgctacttcatgatctgctggccttatgactcatggagttgggacaaacttccctgcc

SEQ ID NO: 992595 - DNA, 120 bp, Artificial Sequence
  ENSG00000224086_274 (sequence is synthesized)
tagaggcatctcctggcttcaactggaccctggccagtgccatgcagaactcccttcagtaggatggagggtagaggggcttacccaggaaatccagggtcatcacgtgaccacagacag

SEQ ID NO: 992596 - DNA, 120 bp, Artificial Sequence
  ENSG00000224086_275 (sequence is synthesized)
acgtcatcttgaagcgcactggctggccagcaaaggtcccagtgtactcgtggactgagcaggccccgttcagccctttgtgtgaggacaggctccctggggatgaggaagcacaaagtg

SEQ ID NO: 992597 - DNA, 120 bp, Artificial Sequence
  ENSG00000224086_276 (sequence is synthesized)
actggctgcttcagctgagctgaagaccctgtggagaccccagcccggatgccacctcccagagggccagagtcctccttccccagagtggtgagtgacgacattccgcagactggtgcg

SEQ ID NO: 992598 - DNA, 120 bp, Artificial Sequence
  ENSG00000224086_277 (sequence is synthesized)
ggtagttgggcactgagaggtgggacggcgctcagggaaaacagcatctgccaacaacctagcacagagcactctcgatgcagagccccaggctgccgggagccaggagcaggcaggggt

SEQ ID NO: 992599 - DNA, 120 bp, Artificial Sequence
  ENSG00000224086_278 (sequence is synthesized)
gggctctttctctgtatttatgttttcactcttcaattccatttttgcctcacttcattgaaacgttattcatcgtttactaaaacagactccagatctactctcggttaccagggacct

SEQ ID NO: 992600 - DNA, 120 bp, Artificial Sequence
  ENSG00000224086_279 (sequence is synthesized)
tctaattatcgaattctcaccctctccactgaccatactcagctgtactttctcagcttctgggcaccgggcaccacttttggggcaccgtcccctgcggaccatgccttctcagctgaa

SEQ ID NO: 992601 - DNA, 120 bp, Artificial Sequence
  ENSG00000224086_280 (sequence is synthesized)
cgagggtctcttcccctctcaactgctggaccaaggggaggccaggtaggtgcctgtcatttctgggtacccagcatctaaaactcttcctatttggagggaattcaaagatagggggaa

SEQ ID NO: 992602 - DNA, 120 bp, Artificial Sequence
  ENSG00000224086_281 (sequence is synthesized)
acagcaccctaccaaccaccccagtggccagagttgggggtgagtggcagacattccctctcgagctccctggtgtctcagtagtgcctgtggccatagctcagtccattggctactctg

SEQ ID NO: 992603 - DNA, 120 bp, Artificial Sequence
  ENSG00000224086_282 (sequence is synthesized)
gagtgacgtgaggtccacaggacagtgggagtatccaggggtgacaatgcctggggcatagcctcatcagaccttgactggggtgtagtcctggctgcgtctccttccttccagggctgg

SEQ ID NO: 992604 - DNA, 120 bp, Artificial Sequence
  ENSG00000224086_283 (sequence is synthesized)
tttctactacctgtacctaatagccccaccaggcccagcatatggataatgactgtccttcaatttcattgtaaattgtgccttgtgccttatgggaaccccagctttggcacattgcca

SEQ ID NO: 992605 - DNA, 120 bp, Artificial Sequence
  ENSG00000224086_284 (sequence is synthesized)
ggagtggaagcaaatgcaccccactgtgacatactgagatgcttcattaccacctgccgacccgaaccaaatctaccccagccagggtggaatcacattaggaaaaaatgtcctgtaaca

SEQ ID NO: 992606 - DNA, 120 bp, Artificial Sequence
  ENSG00000224086_285 (sequence is synthesized)
cataaacgaccgtgcttacagaccaaagcagggctggtctctcctacctctagagaggattttggcaattgactgtgccaaggacggcttttcagcaaccatgagcacagtcttcatttt

SEQ ID NO: 992607 - DNA, 120 bp, Artificial Sequence
  ENSG00000224086_286 (sequence is synthesized)
gtctcggtccttcacactccagtttcggggcactggcaatgaaaaagtttagactccactcttccgcagcacagcactattaccaatgctgactcctaaagagaagaaaagacactcagg

SEQ ID NO: 992608 - DNA, 120 bp, Artificial Sequence
  ENSG00000224086_287 (sequence is synthesized)
atagcaatgctgtcaatagaacctacaccactacaaggaaaatcactttaacaaagaaaaaacaagaccaacctgaggcaagaagaagaaaaattagggaattagggaaacttgaagaca

SEQ ID NO: 992609 - DNA, 120 bp, Artificial Sequence
  ENSG00000224086_288 (sequence is synthesized)
tctgagattaaaaacaagaaaaaactaccaggtcagctgaagtggctgagatgatcctgggaatgtggctccatttgggggaaggtgaagtggccccagtgatctcaggtcaattttatt

SEQ ID NO: 992610 - DNA, 120 bp, Artificial Sequence
  ENSG00000224086_289 (sequence is synthesized)
cctaaatccatgctaggaagatgctggggcctggggatctggagtgatgggtcaggccaggtggatgcctggccctcctctctggactggctcttccacctacaggtggactcacctgga

SEQ ID NO: 992611 - DNA, 120 bp, Artificial Sequence
  ENSG00000224086_290 (sequence is synthesized)
aagaggaactatcgtggccgagagcagcacctcccgctcagcaaagcacttggacgccccaggacactttacaaaatgcagatgcccaggctgggccccccaggtccttctgatccatga

SEQ ID NO: 992612 - DNA, 120 bp, Artificial Sequence
  ENSG00000224086_291 (sequence is synthesized)
tgggcctgagaccctctggctagtcggtccagccccaagcagacatcaggactctgtcacatctatctcccacctattccactccaccttttgctttgcaggtcatgctctggccaaatt

SEQ ID NO: 992613 - DNA, 120 bp, Artificial Sequence
  ENSG00000224086_292 (sequence is synthesized)
aaatcaaatatcatcatcgaagcaaacacgcacttgaagcctctgtgcctgcgcttccctgcctgagagaaagctccgccaggcctggaggatgcagctggatggcccacaggcccagct

SEQ ID NO: 992614 - DNA, 120 bp, Artificial Sequence
  ENSG00000224086_293 (sequence is synthesized)
caagtctcccaacaccactggcagggtaagtcagccctcctgtgcccacagctcttgggctaggtctccattccaacccactcacatcatgccatcatcagcgactacttcacccccaaa

SEQ ID NO: 992615 - DNA, 120 bp, Artificial Sequence
  ENSG00000224086_294 (sequence is synthesized)
ataggacacgatgggctttgtgtctgaatcactgttggtctttgcaacagctttctgtgcctgacacatgacattcaatacctgctagccaagtaaaagaaaaccacatgaacccttttt

SEQ ID NO: 992616 - DNA, 120 bp, Artificial Sequence
  ENSG00000224086_295 (sequence is synthesized)
gttttttcagtcattataaatgtagcactgatgtttataaacatagcaccgtattaaaaaagaaaaaaaagactcgtattgagacaactgggaaatctgctgtgaaaaaaaataaagtta

SEQ ID NO: 992617 - DNA, 120 bp, Artificial Sequence
  ENSG00000224086_296 (sequence is synthesized)
gactcctgcttcctaaatcccactaaaaccgattccagatctagcaaaggtttgagtagaaacaatgaaaccagaaaatattaggaaaaacatgtgcttttaaaataaatctcacaagcc

SEQ ID NO: 992618 - DNA, 120 bp, Artificial Sequence
  ENSG00000224086_297 (sequence is synthesized)
aggtgtggtagcacatgcctatagtgtcagccactcaggaggctgaggcaagaggatcgcttgcttgaggccaggaattcaaggctgttgtgtgccatgactgcacctgtggatagaaca

SEQ ID NO: 992619 - DNA, 120 bp, Artificial Sequence
  ENSG00000224086_298 (sequence is synthesized)
gccacttcactccagcctaggtgacagcaagaccctgtctcaaaaaaagtaaaagcaaaataaaataatctcagcataaagaaaaactaccacctagatgggcacagtggctcacgcctg

SEQ ID NO: 992620 - DNA, 71 bp, Artificial Sequence
  ENSG00000224086_299 (sequence is synthesized)
gcatgagaatcgctcgaactttgtacaacagagtgagactccatctcaaacaaaaaaaaaaaaaaaaaaaa

SEQ ID NO: 992621 - DNA, 79 bp, Artificial Sequence
  ENSG00000224086_300 (sequence is synthesized)
agtgagactccccacgtaagtacctttgtggtatcacatcatgtccaacaacactcgcagaagaaactcagaactacaa

SEQ ID NO: 992622 - DNA, 120 bp, Artificial Sequence
  ENSG00000224087_0 (sequence is synthesized)
tgtcactgtctcactttgcccccagatgagaccatccagttgcagaaaaataagttcagagcttccacggattctacattatggatatgtgccgccgaagcaagcacaaagccctacttt

SEQ ID NO: 992623 - DNA, 120 bp, Artificial Sequence
  ENSG00000224087_1 (sequence is synthesized)
atggatatgtgccgccgaagcaagcacaaagccctacttttacatatgattagtgatgcgtcatggacaaggcttggctctgtgaagtccaactaacctacttgagattctgagaattct

SEQ ID NO: 992624 - DNA, 120 bp, Artificial Sequence
  ENSG00000224087_2 (sequence is synthesized)
gccaaccacagctgggagccactgctcagggcaaggttcatacgggactttctactgcccaaggttctatacaggatataaaggtgcctcacagtacagatctggtagcaaagaggaaac

SEQ ID NO: 992625 - DNA, 120 bp, Artificial Sequence
  ENSG00000224087_3 (sequence is synthesized)
caaagaggaaacagacactgacctccttctgccacattatttgaacccctctcaccctttagaacaagcccacctaacatctgccagagaaaagaccaacaacagcctcaaaggatctct

SEQ ID NO: 992626 - DNA, 120 bp, Artificial Sequence
  ENSG00000235304_0 (sequence is synthesized)
aggcagccatggtattgacagaaaaagactctggatttggattgcagctgtagcatttattaaatgcacgtcacaacctctctgagcttcgttttccccacgtttcaaatgggatgcagt

SEQ ID NO: 992627 - DNA, 120 bp, Artificial Sequence
  ENSG00000235304_1 (sequence is synthesized)
ggaccctgttgcctacccgagtgaagataagaatacctattttaaagttctgttgtgaggttcaagtgccacatatggggccaccagaagctgttggcgcccctcccacatccctgtggt

SEQ ID NO: 992628 - DNA, 120 bp, Artificial Sequence
  ENSG00000235304_2 (sequence is synthesized)
ctttggccctggaggaaccctccaccaatgagagatgggaattgttggataaaagtcccagcttccactccaaggcatgttcatgatccatgcagcctctgagaggcctcccatgggcct

SEQ ID NO: 992629 - DNA, 120 bp, Artificial Sequence
  ENSG00000235304_3 (sequence is synthesized)
gagccccagttgcccacactggtaatacacacatctgctcactctccactggctttcctctctccctttctcactgcttcaccttcccaatgtgcctcctggaccacgtcccaaataaat

SEQ ID NO: 992630 - DNA, 120 bp, Artificial Sequence
  ENSG00000235304_4 (sequence is synthesized)
gattgcactcaaatcctcgtcttggggtctgctaaggggaaatccaagtccagacattggtatgactcaagtgcttaataaatagaccatgtcactattgtagtttctagatacccaaaa

SEQ ID NO: 992631 - DNA, 120 bp, Artificial Sequence
  ENSG00000235304_5 (sequence is synthesized)
gttcttggatcattgtatggaggggttctgcccaactaggatcacccaggctggattgtcatcaaagaattgggtcctgaaagtagcatactcaatggggactgtgagcatgcatcactt

SEQ ID NO: 992632 - DNA, 120 bp, Artificial Sequence
  ENSG00000235304_6 (sequence is synthesized)
aatcagtacattggcactccactccctcctgggccagattgtatgtaggtcaacacctccagtggctgaacctccagaagggctatcacaaaggtctgagaatctgtctcccttaaggca

SEQ ID NO: 992633 - DNA, 120 bp, Artificial Sequence
  ENSG00000235304_7 (sequence is synthesized)
ctccctgtggctccatgccagtcctatgctctgcagccatagggaggattgctgtgccaatgctcacaaaccttggggctgccatccccaagactccttggactccatacaaagattgac

SEQ ID NO: 992634 - DNA, 120 bp, Artificial Sequence
  ENSG00000235304_8 (sequence is synthesized)
cttaggaggagtgagtcacaacaactccatgtgagtattgggaggctttataggttgaattatgactttccaaagagatttgtcttaaaccacaattccttaaaatgtgatcttattagg

SEQ ID NO: 992635 - DNA, 120 bp, Artificial Sequence
  ENSG00000235304_9 (sequence is synthesized)
caacagggtctttgcaaatgaaagttaagatgaagtcattagtgtggtccccaattcaacatgactggtgtccttattaaaagtggagatttggacacagaaagacacaaacaaggagaa

SEQ ID NO: 992636 - DNA, 120 bp, Artificial Sequence
  ENSG00000235304_10 (sequence is synthesized)
caccatgtgaagattgggatcatgtgaccaaaagccaaggaactaccagaaggtaagagagaagaccaggaacaaatcctttcctagtgccttcagagggagtgtgacctagttgacacc

SEQ ID NO: 992637 - DNA, 120 bp, Artificial Sequence
  ENSG00000235304_11 (sequence is synthesized)
ttgattttggacttctagcctctgaaattgtgagacaataaatgcctgttgtttaagccacccagcttgtggcactttgttacatcagccctaccagactaataaaggggaattgtcttt

SEQ ID NO: 992638 - DNA, 120 bp, Artificial Sequence
  ENSG00000235304_12 (sequence is synthesized)
tggttccttggagctatcatatgattgatcagctagatgaagttgaaagaggctccagtcaggagaagaaataagagcaaagacctggaagtttatagtgttttgaggaaaattaagcat

SEQ ID NO: 992639 - DNA, 120 bp, Artificial Sequence
  ENSG00000235304_13 (sequence is synthesized)
ttctgggtggtaagttggtgggtatataggcaccaatgagtaagataaagctacagtgctggcttcttcaaccatgatctctgcttggctctcatcacttgcctcatctgacttccctgg

SEQ ID NO: 992640 - DNA, 120 bp, Artificial Sequence
  ENSG00000235304_14 (sequence is synthesized)
acttgacttgcttcctggcaatgactcctggtctgctgaactcccacctgatctagctcttttttgatcagataaatatcaaagctatgttggcaattgttatctgaccactgaagccat

SEQ ID NO: 992641 - DNA, 120 bp, Artificial Sequence
  ENSG00000235304_15 (sequence is synthesized)
tttctcttctttctgggcactcgggtagaccataattctcagcttctcttgtggttagttttggccatgttaactgagttcaggccgaaagaacatgggtgcaagtggtgacgtgcaata

SEQ ID NO: 992642 - DNA, 120 bp, Artificial Sequence
  ENSG00000235304_16 (sequence is synthesized)
cttccagacttggattgttgaaaaccttccattccatcttccgttttttttccctctccaattggctgcaaatagagaacaacttcaaagcaactttgagagccttgtatggaagatggc

SEQ ID NO: 992643 - DNA, 120 bp, Artificial Sequence
  ENSG00000235303_0 (sequence is synthesized)
attactcgtgtttgtggtgctgctggtgtaagcaaatctgctttataaactttataaagtaaaaagattatagaaagctaaggctaatttattattgaagaaagataagtattttaaaat

SEQ ID NO: 992644 - DNA, 120 bp, Artificial Sequence
  ENSG00000235303_1 (sequence is synthesized)
taatttattattgaagaaagataagtattttaaaatactcacccagagaaacttccagtcctgcaagcttcatttatgatggagtctctctttgtcaccaggctggagtacagtggcaca

SEQ ID NO: 992645 - DNA, 88 bp, Artificial Sequence
  ENSG00000235303_2 (sequence is synthesized)
aacttgtaaaatgcaccaatcactgctctgtaaaaacgcaccagtgttctgtagctagcaagaggtttgtaaaatggaccaatcagca

SEQ ID NO: 992646 - DNA, 120 bp, Artificial Sequence
  ENSG00000235303_3 (sequence is synthesized)
aatggaccaatgagcaggagtctaaaagtaaccaatcacggggaggattgagaaaagggcattctgataggacagaaacaggaaatggggggatacaaataagggaataaaagctggcca

SEQ ID NO: 992647 - DNA, 62 bp, Artificial Sequence
  ENSG00000235303_4 (sequence is synthesized)
agctttgttctttcgctaaacactcactgcgatggtccacggctccattcttgaagtcagca

SEQ ID NO: 992648 - DNA, 88 bp, Artificial Sequence
  ENSG00000235303_5 (sequence is synthesized)
ctgcgatggtccacggctccattctaaaccaactccagacacaccaggttcaactgattatcctgcctcagcctcttgagtagctggg

SEQ ID NO: 992649 - DNA, 120 bp, Artificial Sequence
  ENSG00000235303_6 (sequence is synthesized)
tgggactacagttcagggtcatggatggcctcccatgaccctatcccagcagctcaggatgcaaggcgagaattaacgtgaacaggacgccattccatctcagggtcattcacccacaca

SEQ ID NO: 992650 - DNA, 120 bp, Artificial Sequence
  ENSG00000235303_7 (sequence is synthesized)
acactcacttagactgggaccagtgagacacaactgttcacctaatgtgcacagctttgggatatgggaggaaactggagtatccaagaaaccccatgaaggcatggggagaacatgcaa

SEQ ID NO: 992651 - DNA, 120 bp, Artificial Sequence
  ENSG00000235303_8 (sequence is synthesized)
atttcgcacagacagtgaccctggtcagaaatcaaattttttcttcatcaatttcatagcaaaacgatattgagtaaaatgacattatctgaagacctgctgtactacgatgccattgta

SEQ ID NO: 992652 - DNA, 120 bp, Artificial Sequence
  ENSG00000235303_9 (sequence is synthesized)
gaagaaactcagaggaagggaaagcaaactgaaagactgagcattgacatccccaaagagatgaagttatctttgagagactattatacactccccaggggtctgagatgctgttaatta

SEQ ID NO: 992653 - DNA, 120 bp, Artificial Sequence
  ENSG00000235303_10 (sequence is synthesized)
cttaatttaggcttttcctttggccctgatggatgaggggctaggataaatagatgttataaaaatttttaaaaatacttctcttaagatttgagaaatagagtgttcaatcattgactc

SEQ ID NO: 992654 - DNA, 120 bp, Artificial Sequence
  ENSG00000235303_11 (sequence is synthesized)
taccacacagatgtttttacaaatatcaatttgtttctcttccctcttagatagtgagcacactgtaggcagatctgatttttttttttttttacccctcagaattggtaggcactagac

SEQ ID NO: 992655 - DNA, 120 bp, Artificial Sequence
  ENSG00000235303_12 (sequence is synthesized)
acctttttagtaagtgaataaatgtgtgtctaattcagaaaggcctgaaggattgttttaaaaatacacatttggctggttaggctttgagataaacagacatgaaaagtgcaatgaaga

SEQ ID NO: 992656 - DNA, 120 bp, Artificial Sequence
  ENSG00000235303_13 (sequence is synthesized)
cacacatcttgttgagaaataaagttttaggtgaaaaggtgaatagttaagaatctgcaaatatagaaaaatcaagacgtacaagggttattgtgttgaattatattggaccttgaatct

SEQ ID NO: 992657 - DNA, 120 bp, Artificial Sequence
  ENSG00000235303_14 (sequence is synthesized)
caaatgccattaacaacaatatgggcaataagaatgttttaatcctcacttcttgtgctgtctgactcagtatttatactttttatttgatcttcaataaagctccctttgttctcattc

SEQ ID NO: 992658 - DNA, 120 bp, Artificial Sequence
  ENSG00000235300_0 (sequence is synthesized)
gagtgtggagaaaagagagagaaagggagagaagagtcatggaccctactttatggttgccatggatgcaagcctcatctccattcctttctactttgaacatagcaagtcctggaggct

SEQ ID NO: 992659 - DNA, 120 bp, Artificial Sequence
  ENSG00000235300_1 (sequence is synthesized)
gctgggtcgtcttccagccacaaggtggctcccccaatcccttctctcaagccaatcgatgtacacctttgctgagttctccaggcggactacaattcagagctaattatgatctataaa

SEQ ID NO: 992660 - DNA, 120 bp, Artificial Sequence
  ENSG00000235300_2 (sequence is synthesized)
tgccattattttcattgtgaagtaaatggcttatgaccaagaccctggtacactaagatacaatgcaaaattagtctttaaaaataggagaaagaaaaatacctttgtatttgcctaatt

SEQ ID NO: 992661 - DNA, 120 bp, Artificial Sequence
  ENSG00000235300_3 (sequence is synthesized)
ataaaaggctccagaggaacctaattttgttgtcaatgaacatagtcatagactagacaaggtcaaattttaagaaaagtatacaacttattctcacttaaactagacctacttttggat

SEQ ID NO: 992662 - DNA, 120 bp, Artificial Sequence
  ENSG00000235300_4 (sequence is synthesized)
ttgatattttaccacaagagagttttgatgagaagactttgcaaaactttcttagaagtcccacatcatgccatcattgaagaacagtgatctccaatactgcaaggctttaaaaggagt

SEQ ID NO: 992663 - DNA, 120 bp, Artificial Sequence
  ENSG00000235300_5 (sequence is synthesized)
ggaaatattacatatttcctttttgttgcttagcaaacatgttgcatatttcataaatgtgatttttatagaagacatcataattttctacagctgaaataggcatagaaagacaaatca

SEQ ID NO: 992664 - DNA, 120 bp, Artificial Sequence
  ENSG00000235300_6 (sequence is synthesized)
ttcatccaattacatggaaggtctttctaaaagtctgagtcctaatttctcacagtttttcattttctgttctggagagaagctatttaacctttgggcaagtttcgttttccttatctg

SEQ ID NO: 992665 - DNA, 120 bp, Artificial Sequence
  ENSG00000235300_7 (sequence is synthesized)
ttttctaaccaatttcgagtgcaagtgcacagtgtcagctaaagaaacacaactgcgggttttctgcagagcaaaatggttctgaaatgtcactgaatagctcacaaaggacgccaatct

SEQ ID NO: 992666 - DNA, 120 bp, Artificial Sequence
  ENSG00000235300_8 (sequence is synthesized)
acgacaacagagacataagcatataggagaaagggtccacacatcctcctttcaaagtgtggagaaaagagagagaaagggagagaagagtcatggaccctactttatggttgccatgga

SEQ ID NO: 992667 - DNA, 120 bp, Artificial Sequence
  ENSG00000235300_9 (sequence is synthesized)
gcagagttcagacaggtcaacgtgtgaccggctcaggccctggggttaaaagttcaagcagctatggaaaaaccaatatgtccacgcagagtatgctgtacaatttatttcaatttacat

SEQ ID NO: 992668 - DNA, 120 bp, Artificial Sequence
  ENSG00000235300_10 (sequence is synthesized)
caagccatgcatataaaatttagataaattccattcagatctgatgttgcctgacacacaatgtatgcaaacagatgtctgtggggctttttctgtgctttagaaaacaacattaaattt

SEQ ID NO: 992669 - DNA, 120 bp, Artificial Sequence
  ENSG00000235300_11 (sequence is synthesized)
ccacacatcctcctttcaaaggtcacagaaagcttgctgcagatcaggaaatgtcttcagtttccaaagcctctcatagcatgtggagaaaagagagagaaagggagagaagagtcatgg

SEQ ID NO: 992670 - DNA, 120 bp, Artificial Sequence
  ENSG00000235300_12 (sequence is synthesized)
cataattttaacttaaatgttttcattcttttttccaatttttttgtgtgggggtcttaataatttctcagttctcaatctactctatgtcatattaaagaggataatgtatatttacaa

SEQ ID NO: 992671 - DNA, 120 bp, Artificial Sequence
  ENSG00000286195_0 (sequence is synthesized)
ggctgctcttcccctttcccccaatggtttatttgctagaagagtcttttcctaccaactctgagcttgatgcagacagacaagacacttacctgctttcgagtcggagtttcaactctg

SEQ ID NO: 992672 - DNA, 120 bp, Artificial Sequence
  ENSG00000286195_1 (sequence is synthesized)
tcgcccaggctggagtgtagtggtgtgattgtgtctcactgaaacctcgaactccagggttcaagcaatccttccacttcagactcccaagtagttgcgattacaggctcttgtgcttca

SEQ ID NO: 992673 - DNA, 120 bp, Artificial Sequence
  ENSG00000286195_2 (sequence is synthesized)
ctgttctccggtgccctcccagggttgcccagggcaggcttgggggctgacacagtgactgacattgggtgagctacctgcggaaaagggccagttggaagctactaaaaagtctggaaa

SEQ ID NO: 992674 - DNA, 120 bp, Artificial Sequence
  ENSG00000286195_3 (sequence is synthesized)
gagtgcagtggcatgatctcagctcactggagcctggacctcccaggctcaagctatctgcccatctcagcttcccaagtagctggcactacagccagagcaggccagtttcaatatggt

SEQ ID NO: 992675 - DNA, 120 bp, Artificial Sequence
  ENSG00000286195_4 (sequence is synthesized)
ctacagccagagcaggccagtttcaatatggtggatgttgattctgaaaaggggatgctatggacacttggcaaggacgactgtcccgaagactgcaactctggccactgcttcccgaat

SEQ ID NO: 992676 - DNA, 120 bp, Artificial Sequence
  ENSG00000286195_5 (sequence is synthesized)
aaatgtctgtcaagcaccttccctaaattttgccataatccctgctctcacttccaccccacttccaaggttcttaattgttccagcaacatctttacccagctgagatatgatgaaact

SEQ ID NO: 992677 - DNA, 120 bp, Artificial Sequence
  ENSG00000286195_6 (sequence is synthesized)
ttttcagatgtatactgatgccaaaaaaacaccataaggtatcagttgactcacatgggcaggggaaagagaggagataatactgagccttgtcactacagtaaccaaaacagcatggta

SEQ ID NO: 992678 - DNA, 69 bp, Artificial Sequence
  ENSG00000286195_7 (sequence is synthesized)
catctgacaaagggctgatatccagaatgtacaaagaacttaaagaaattaacaacaacaaaaaaaact

SEQ ID NO: 992679 - DNA, 120 bp, Artificial Sequence
  ENSG00000275720_0 (sequence is synthesized)
ctctctcccccattcttctagagcccagccagcctccatgggccaccaactacatcctccatggagaatcttcaaagctctagagcccctattcccaaaccatttcctgtcttttttatt

SEQ ID NO: 992680 - DNA, 120 bp, Artificial Sequence
  ENSG00000275720_1 (sequence is synthesized)
acatggacttactccaaaaaggagcgaaagaacttgtacatgtttccattctgatcagttctttctggattttccgggcatttttgttaccaggtgtctgaaagatcctgagtgctatga

SEQ ID NO: 992681 - DNA, 120 bp, Artificial Sequence
  ENSG00000275720_2 (sequence is synthesized)
ccctcccacaacactgggcccaggggtgttgattttcttttacaaatggggcaactaaggcatgttaacagctgagcctaggtttgaacctggttccccctgtgctggtgcagagctgtt

SEQ ID NO: 992682 - DNA, 120 bp, Artificial Sequence
  ENSG00000275720_3 (sequence is synthesized)
tcccctgggatatatgtctccagtgtcactgcccttccactgggtttcctgcttttacctaacatcgactcacacggtcattttcggggtggcagggcctcctgtcttgtcgttttaatg

SEQ ID NO: 992683 - DNA, 120 bp, Artificial Sequence
  ENSG00000275720_4 (sequence is synthesized)
gccacatggcattccatcatgttgatggatcattttgtttggtcactccctcatcgttggatatgtgtgaggtgtctaatttcttgctataataaatgcaactgctgtattttgttcaaa

SEQ ID NO: 992684 - DNA, 120 bp, Artificial Sequence
  ENSG00000275728_0 (sequence is synthesized)
aacaaaatactttcctcatccaactcactgattaaacccttaccctgttaactcaccctatgactgtgtaaacctccagtaagattattgaaggcacagctccaagtaacttgcttaatt

SEQ ID NO: 992685 - DNA, 120 bp, Artificial Sequence
  ENSG00000275728_1 (sequence is synthesized)
cctgggacaaaagagggaagcgcttcaaagctgacagacagatggtagagtgtccagtcacagcaaagcaggccccgaggctcatgacagacaactccagggctgagatctcatttgtag

SEQ ID NO: 992686 - DNA, 120 bp, Artificial Sequence
  ENSG00000275728_2 (sequence is synthesized)
ctctgggataaagtccagggtttgatggcagcaggctgaagtgtaaagatgctcaacaatgcgcaccccagagacactgaatctgaaaaagcttagagtgaataaaaatctggaaatgaa

SEQ ID NO: 992687 - DNA, 120 bp, Artificial Sequence
  ENSG00000237613_0 (sequence is synthesized)
ggggtttcggggctgtggaccctgtgccaggaaaggaagggcgcagctcctgcaatgcggagcagccagggcagtgggcaccaggctttagcctccctttctcaccctacagagggcagg

SEQ ID NO: 992688 - DNA, 120 bp, Artificial Sequence
  ENSG00000237613_1 (sequence is synthesized)
cccttcagctccattctcctccaaggctgcagagggggcaggaattgggggtgacaggagagctgtaaggtctccagtgggtcattctgggcccagagatgggtgctgaagctcccacgc

SEQ ID NO: 992689 - DNA, 120 bp, Artificial Sequence
  ENSG00000237613_2 (sequence is synthesized)
ccttgggcaagttcttaaacccttcaaagcctcatttttctccaatcacaaaagggaaagatggtaatattttccccaccaaattcttgtaagtattaaacattgtatatgtattttgaa

SEQ ID NO: 992690 - DNA, 120 bp, Artificial Sequence
  ENSG00000237613_3 (sequence is synthesized)
gagattatgtacgtaaaacaccaggtgcctaacccggcacagagcaggagggctaagcgtgacatccagcacgtggtcagtggaatccagtattcctacccacctctctagtctcccctc

SEQ ID NO: 992691 - DNA, 120 bp, Artificial Sequence
  ENSG00000237613_4 (sequence is synthesized)
cacccctctccctttcagaggcaccaagctgcttgtggtcttgtctattcccactccctgcctgactgaacattttctccacctcctgatcatcagcagcagaaactggctgctcttcct

SEQ ID NO: 992692 - DNA, 120 bp, Artificial Sequence
  ENSG00000237613_5 (sequence is synthesized)
cctgggtagacagccagactgtatttcccagctgcccctgcagtgagatgtggccatcggagccagcattggccaatggactctgcatgggagtgacgcatgctgcctccaggcttgtcc

SEQ ID NO: 992693 - DNA, 120 bp, Artificial Sequence
  ENSG00000237613_6 (sequence is synthesized)
ctaaaacctcccacgtgtcctccgcctgctcttcccacctccaaggagcacggcaattgtggaagacccagattagtgatggcagaaccatagatgggaggaacctgggtccctgactta

SEQ ID NO: 992694 - DNA, 120 bp, Artificial Sequence; identical to SEQ ID NO: 826009
  ENSG00000237613_7 (sequence is synthesized)

SEQ ID NO: 992695 - DNA, 120 bp, Artificial Sequence
  ENSG00000287269_0 (sequence is synthesized)
ggcctcccggctgggtgcattcctgcttcagcagagtcatcccatctgtggcttccatggcgctccttcctcagctgcctgtcccgatccctttcccccaccaaaaaaaaaaaaaagatt

SEQ ID NO: 992696 - DNA, 120 bp, Artificial Sequence
  ENSG00000287269_1 (sequence is synthesized)
cctaaaagctgcgcaagactcccaagaccacccagggtggcagatgttcagttggggaacgcaaccctcttcaagcaactggagtgacccaagtaccctcttcctaagaaaatgggcctg

SEQ ID NO: 992697 - DNA, 120 bp, Artificial Sequence
  ENSG00000287269_2 (sequence is synthesized)
aggggcctggcgaagtgaagccggggctccacgcaccacatcacctacggccctgcctctgtgaagtgatgatggaaggtcacaaggcattgggcagagctgggagcagactcgggtctc

SEQ ID NO: 992698 - DNA, 120 bp, Artificial Sequence
  ENSG00000287269_3 (sequence is synthesized)
caatgccaacctccttggtcacggaggccagttctccgagctccttccaaccttttgttttctccatcacaagtggcctgcaccttcattgttcatgaagcagccaccatctgagggact

SEQ ID NO: 992699 - DNA, 120 bp, Artificial Sequence
  ENSG00000287269_4 (sequence is synthesized)
ctctccagtcactccaaaactggggatggatcttgtggctgaacccaaagacagggtccacataggaaccagtcatgaagagaaggctcttctcaggcactggccaaaggctatggcaca

SEQ ID NO: 992700 - DNA, 120 bp, Artificial Sequence
  ENSG00000287269_5 (sequence is synthesized)
gggaatttccaagcagcaattgactaaaggcagaacccagagggccccaacaaccacacaatggtatgcattcaaaacagctgaggccacacacaggggctcacactggaattccagcac

SEQ ID NO: 992701 - DNA, 85 bp, Artificial Sequence
  ENSG00000287269_6 (sequence is synthesized)
gccaggagttcgagaccagcctgggcaaaaaagcaagtttccatcactacaaaaaattaaaaaattaaaataaaaattagctgca

SEQ ID NO: 992702 - DNA, 120 bp, Artificial Sequence
  ENSG00000287268_0 (sequence is synthesized)
agaatgaggtgacaacagtcatctgagtgagaatgaagggctgtgtgtatctgattctgcaatgcgtctgccatgcctggggagctgttgggagagggagcaccatgaagttcaccagca

SEQ ID NO: 992703 - DNA, 120 bp, Artificial Sequence
  ENSG00000287268_1 (sequence is synthesized)
gccagaagaagattcctgagaggccaagccaagtgctacctagagaggccagcatgtgggctccacatttctgctgaagacgcctgtgcccacaataaggcctgtgttggtgtcagtctg

SEQ ID NO: 992704 - DNA, 120 bp, Artificial Sequence
  ENSG00000287268_2 (sequence is synthesized)
gaagattagagaagcgggcagtgcagagcgaagaggagacagcagtggccagaggtgaaacactgaggtagcagcagaaattcaaagaaagatgaccaggaaagaacataagacattaat

SEQ ID NO: 992705 - DNA, 120 bp, Artificial Sequence
  ENSG00000287268_3 (sequence is synthesized)
ggagctcatgtgaggtatctagaggacccaagtggtgtttttaaaagaagcttatcaatgctggcagattcctgcctcggtgtgtgtcccacgactaaaaaggaaatccaattctatttg

SEQ ID NO: 992706 - DNA, 120 bp, Artificial Sequence
  ENSG00000287268_4 (sequence is synthesized)
agaaaactgacaagacattcttttccttggagaaaatggactgggacaaattacacacaaaaagctgaaatctccaccaccagtggttgaaaaacaatcgagcctccattagcagttcct

SEQ ID NO: 992707 - DNA, 120 bp, Artificial Sequence
  ENSG00000287268_5 (sequence is synthesized)
ttgcccacagaatgctctctgaggaactacggggtttggaaaaagtgcaggcctctattcttcatccacgacacatcaaagttgtaataaaaacctgcttttctttgtgcgactaagcaa

SEQ ID NO: 992708 - DNA, 120 bp, Artificial Sequence
  ENSG00000287268_6 (sequence is synthesized)
ctgctatttcacacccacatattgctggagcttattcaattaccctcaatgactttgtttaaaatgaaaatgctttgcctcctaaggacagtgtgagaggactgattaatgttgctccct

SEQ ID NO: 992709 - DNA, 120 bp, Artificial Sequence
  ENSG00000287268_7 (sequence is synthesized)
gaagaacagaagtgtaggtacacaggcaaaaacctgaggagctagaaactactgctgggccatgtttcacaagcaattcaaacctatcttcaagtattttgtaaagaataaggactctta

SEQ ID NO: 992710 - DNA, 120 bp, Artificial Sequence
  ENSG00000287268_8 (sequence is synthesized)
caagaagtgagaaagaaaaaccaaattttgccatatggtttttcaggagaagaggaaacagttctttttttttttttttttttttccgcctgacacatggttccaaaagatctgtaacta

SEQ ID NO: 992711 - DNA, 120 bp, Artificial Sequence
  ENSG00000287268_9 (sequence is synthesized)
acgaaccaagccagcacattgctgggttctggagctctgtgactcagaagtcacttttctatccaacatattaaatgtcaagtaaaatatatccgataagagagatgaaactttttcggg

SEQ ID NO: 992712 - DNA, 120 bp, Artificial Sequence
  ENSG00000287268_10 (sequence is synthesized)
aagcttggccactgagtgagtgtctctcttttgcaaatgggccctgtatgttgcatctgtcttttaggtggattgccaacctataagagataaaacatccacccaagagctgcattaaaa

SEQ ID NO: 992713 - DNA, 120 bp, Artificial Sequence
  ENSG00000287268_11 (sequence is synthesized)
agcataaatcatgaagaccatatctagtcctctataaatcccttcaaaaagaactttatctgtaatcatagtaaaggtctgtttcatttaagaaagaaaaaaaacccaaacagaaacaca

SEQ ID NO: 992714 - DNA, 120 bp, Artificial Sequence
  ENSG00000287268_12 (sequence is synthesized)
tgcagatagaaaacagagagaaaataaaagaatcacagtggtatttttatgcatgcatagtatgcgaaatttggagatgaagagtcccgacagaatgcttaaagaatctgtaatacacaa

SEQ ID NO: 992715 - DNA, 120 bp, Artificial Sequence
  ENSG00000287268_13 (sequence is synthesized)
gaatatataggttccagggtgggcataatcaaaaagggcagtatttatccatcatctatcattggctctcattttgcaaagcttgaagattagaacccctgatgtcgaaagatctgaaaa

SEQ ID NO: 992716 - DNA, 120 bp, Artificial Sequence
  ENSG00000287268_14 (sequence is synthesized)
tatttagagctagttcttgcatggctccatgaagaaggggacgaggaaagaaagaattatatgaggactacacttcactactcttttttatagcagattgttttctttaagaggagcata

SEQ ID NO: 992717 - DNA, 120 bp, Artificial Sequence
  ENSG00000287268_15 (sequence is synthesized)
agctgtgattaaagtggcagaattttggtgcctctaacacctggaatggaagcagagtaacaagaaatacttggcaacccaattatttcatgcaggttttcatctacccagaaagctgtc

SEQ ID NO: 992718 - DNA, 120 bp, Artificial Sequence
  ENSG00000287268_16 (sequence is synthesized)
ctcaaaatagaatggaactttttctcctttatcaatctgggaggtgcctggggcaaagtaaccaagaacctaagaatattgttgatcagtattctcaacaaacaaaatctaaatacactg

SEQ ID NO: 992719 - DNA, 120 bp, Artificial Sequence
  ENSG00000234650_0 (sequence is synthesized)
gaaacacagtactcaataaatgtggtattttcttattcactgaatttccaacaggaattagaaactccacatctaacttagttgccttgaggaagcagctatggcaaccagaaagttccc

SEQ ID NO: 992720 - DNA, 120 bp, Artificial Sequence
  ENSG00000234650_1 (sequence is synthesized)
gcgttctgggagaagagattaattcaccaagtccctgcgcggcacagcaggattacggggcttttacaaaactgaagacaaaatgaagagcagcagcttctagaataaggccaagcacca

SEQ ID NO: 992721 - DNA, 120 bp, Artificial Sequence
  ENSG00000234650_2 (sequence is synthesized)
aattgaagactcggtggagactatcacttcagatgatagcatgtctccaagcaagacaaatgaaagggaaaatgaagcaaagggagagtggggagctacaataaaaaccgagctattctt

SEQ ID NO: 992722 - DNA, 120 bp, Artificial Sequence
  ENSG00000234650_3 (sequence is synthesized)
agaaaaaaaaaagtatgctgagattgctaagatctacacctaatgaggaggtgactatcatgaaggtctggtggtgaagatcttgcaagaaggtgccttgtttgagatctttcaaggaaa

SEQ ID NO: 992723 - DNA, 120 bp, Artificial Sequence
  ENSG00000234650_4 (sequence is synthesized)
cttgagacagcaagatcaagccccctcctcctcagccaactcaacgtgaagacaatgaagatcaagatctttaagatgatccacttccacttaatgaataataaatatattttgtcgtta

SEQ ID NO: 992724 - DNA, 120 bp, Artificial Sequence
  ENSG00000234650_5 (sequence is synthesized)
aaaaccagccatgaagtccttcctttagttaaaaggtgaaagttctcaagaaaaaaaaaagtatgctgagattgctaagatctacagtaagaatcaatcttctatccatgaaattgtgaa

SEQ ID NO: 992725 - DNA, 120 bp, Artificial Sequence
  ENSG00000234650_6 (sequence is synthesized)
aaaggacaaagaaatttgtgctagttttgctgctgtacctaaaactacaaaagttacagccacagtgtgggctaagtgccgagctgaaatggaaaaggcattaaagcctaatgaggaggt

SEQ ID NO: 992726 - DNA, 120 bp, Artificial Sequence
  ENSG00000287261_0 (sequence is synthesized)
gccctagaaagggaactcggaggggactcactgacgaaaggagctccagatggcggggggccaacctggggcgacccccagcgcccactttcaccatctggaccccagcaaacctccctg

SEQ ID NO: 992727 - DNA, 120 bp, Artificial Sequence
  ENSG00000287261_1 (sequence is synthesized)
tggcccttggtcccgtcttcagcagctccttctggggtcccacaccttcggagcccggccctgcccctgagtctctggagagagcgagtcagcagttcgccgccgcggggctcccgtttg

SEQ ID NO: 992728 - DNA, 120 bp, Artificial Sequence
  ENSG00000287261_2 (sequence is synthesized)
cctagcacgccagtttctgtccagtttcaccccaaatccccacctccccccacccccgaacctcacggccaccctgggaaggaggcttgacttgtgacatccacccctcttcacggctga

SEQ ID NO: 992729 - DNA, 120 bp, Artificial Sequence
  ENSG00000287261_3 (sequence is synthesized)
ggaactttggccccgagcgaggaagcgaccggcccacggccacacgcccggagtgggtaaatatctactcatgggattgctgggctgtatgggggcagcatcttctactatgtgcatcta

SEQ ID NO: 992730 - DNA, 120 bp, Artificial Sequence
  ENSG00000287261_4 (sequence is synthesized)
agcttaggttactatggagtgtgcaaaaaggtcctgtggatttagataccaccacacacaaatggtatgtaatactcacttgaagacaaatcagccagagggatctaacagcattgaccc

SEQ ID NO: 992731 - DNA, 120 bp, Artificial Sequence
  ENSG00000287261_5 (sequence is synthesized)
attctctggtcttctagcatccatcatagttttgtgctccttttccatgaaacacagctgttgttggaaggtacctgcccagataaggactgcatttcctctagcatccagatgggacca

SEQ ID NO: 992732 - DNA, 120 bp, Artificial Sequence
  ENSG00000287261_6 (sequence is synthesized)
aatgactgctggccaatagaagtgagtggaaaggactgactccagttccaggttgggcctccaactgctctgggcacgtcgatggaacagaacaccacctccaccccaataccaccaatt

SEQ ID NO: 992733 - DNA, 120 bp, Artificial Sequence
  ENSG00000287261_7 (sequence is synthesized)
caactttacatgaattataagcgagaaataacttggactgtgttaagtcattgagtttctggggtttaactgttattatagttaagaatgactttaactaatatagtcaatgacatctaa

SEQ ID NO: 992734 - DNA, 120 bp, Artificial Sequence
  ENSG00000287260_0 (sequence is synthesized)
acacccgcagcgtcccgggccccgctttccttttcaaggggcgggttgtagatcgcgcgcgcaccctggagagcccgctggtttgtgtgaggccctggccctgtgggtagcagaacactc

SEQ ID NO: 992735 - DNA, 120 bp, Artificial Sequence
  ENSG00000287260_1 (sequence is synthesized)
aaaagaaaagaaaaaaaaaaaggtaaagcctaattcccctccccatgaggatgtgactcgcttctaacagaatatggcagaagtaaagatatgtgactttgagactatgtcatgaaggac

SEQ ID NO: 992736 - DNA, 120 bp, Artificial Sequence
  ENSG00000287260_2 (sequence is synthesized)
atatgtgactttgagactatgtcatgaaggacattgtggcttctgcctatctttcttctggatcacaccccaggggagaaagccaacctccatgttgtgaggacactcaagcagcccttc

SEQ ID NO: 992737 - DNA, 120 bp, Artificial Sequence
  ENSG00000287260_3 (sequence is synthesized)
gtggaggtccgcgtggtgaggaattgaggcctcctgctgatggctcatgctaacttgctagccgtgggagtcagctaccttggaagcaatccttcatccccagtcaagcactcagatgac

SEQ ID NO: 992738 - DNA, 120 bp, Artificial Sequence
  ENSG00000287260_4 (sequence is synthesized)
ggaatgggggagataataaacatttatcgtttcaagctgttaagtttgggggtatgttatgcagcaagagataacaaatgtagaatatttcactcatttctacatgaagatttcttttct

SEQ ID NO: 992739 - DNA, 120 bp, Artificial Sequence
  ENSG00000287260_5 (sequence is synthesized)
attacacgtgtgagccactgcgcccggccctacatgatgatttctatcacataaatatacaatactatatttatcaagcactatatgttaatagattcattatcaatcctatcccgttag

SEQ ID NO: 992740 - DNA, 120 bp, Artificial Sequence
  ENSG00000287260_6 (sequence is synthesized)
agattcattatcaatcctatcccgttagaatgtaagctgcatgaaagaagaaagtttgttttgttcattgccatagacttacagtgttgataaataaataaatatttcttgaatgtgtga

SEQ ID NO: 992741 - DNA, 120 bp, Artificial Sequence
  ENSG00000287263_0 (sequence is synthesized)
caaaacaaaacaaaaggaaaagaagagaaaagaaaaagaaacgcaggcaccctgaaatcgaaacttgttaggaccaacaagccaacgacagacgaatctgcggggtcctgcgacagacac

SEQ ID NO: 992742 - DNA, 120 bp, Artificial Sequence
  ENSG00000287263_1 (sequence is synthesized)
gccagccccgccgccacagcacagggttctggaggtcgagctgttctgcgggttctgcggcggcgctgggaagagacggcgcccgggcagctcccctgtcaccggcttggaggagcggcg

SEQ ID NO: 992743 - DNA, 120 bp, Artificial Sequence
  ENSG00000287263_2 (sequence is synthesized)
ggctcccctagcccagcgccgccgccgccgcccgggaacgccaggctcaccccagctggggaagctccgaatccctcagatcggcgacctgagtgctgtcgccccgagaaaatggaggca

SEQ ID NO: 992744 - DNA, 120 bp, Artificial Sequence
  ENSG00000287263_3 (sequence is synthesized)
tcgagcaacgagctgtgctgagaccgagagacctcagttctgcgaaatgtcggtgcctggagcttgcgaatgactgcggccggcgggttgtcaaggacaacattccttatggcgcaacca

SEQ ID NO: 992745 - DNA, 120 bp, Artificial Sequence
  ENSG00000287263_4 (sequence is synthesized)
acagcgctgtcaccaagaaactggactctgagaaaaaagagggtttcggccaccgagaaactccgtgccacatgtgccgtgacagcaaaaccgcccgctccgcgccgctggtgaaagagc

SEQ ID NO: 992746 - DNA, 120 bp, Artificial Sequence
  ENSG00000287263_5 (sequence is synthesized)
taacgaacgccaggtgctgcgacagtgacaccgggactagaaggcctcggatggagaatgggacgcccagagcaagcaggaaaacgttttgtttggctcaactagcgctgtcgcaaccgg

SEQ ID NO: 992747 - DNA, 120 bp, Artificial Sequence
  ENSG00000287263_6 (sequence is synthesized)
aaaactgtcaggccagtgctgctgcggatgtgagaaaccggtgatccgaaggcggagtggcgctgggcgctggactcgctggtgtgaaaatctggctgctctaggacccggcaagcgcgg

SEQ ID NO: 992748 - DNA, 120 bp, Artificial Sequence
  ENSG00000287263_7 (sequence is synthesized)
gcaccaggcgaacgccagcgactttgccagacaaatgcatgtcttttttggtcgccattcaaagatgcagccggcagtcagccccggctctgagaaacaagtggaggtgtcagccataaa

SEQ ID NO: 992749 - DNA, 120 bp, Artificial Sequence
  ENSG00000287263_8 (sequence is synthesized)
ccctccgttcagggaaaagagagtcgctgcgacggatcgactggccgttgggtggaactttctttggtggcctagtgactagaaaataaaaacgaaaacgaaataaaaaactgctactga

SEQ ID NO: 992750 - DNA, 120 bp, Artificial Sequence
  ENSG00000287263_9 (sequence is synthesized)
cattactcccacgctccctcctcaagtcagtggcttcaggcttaagaaaacctgtatttttcttggctgatccgtgatccctaattactgagggccccgcgacccaccaagtgcgattcg

SEQ ID NO: 992751 - DNA, 120 bp, Artificial Sequence
  ENSG00000287263_10 (sequence is synthesized)
cagagggaaaggagctggaataaggatccagaatgggacggatttggctcctccaggaagaaagcaaaacaaatgcaggtcgcgaacactttacattgcaggaagctgctcttccagtgg

SEQ ID NO: 992752 - DNA, 120 bp, Artificial Sequence
  ENSG00000287263_11 (sequence is synthesized)
ccgcggctgggtccttccacaccacctctctgtcctaggccttcgtcccggttcagccctcacggattctaggctagcggtcaacaaccgcatccctccggaacctggaaactctaggtc

SEQ ID NO: 992753 - DNA, 120 bp, Artificial Sequence
  ENSG00000287263_12 (sequence is synthesized)
cgagatctcggtgaagaatgaaaggcacagcgccgctcaacccaggcttcaggcctgccccgctggtcccgtcccttccctgtgggatggaactctgtgggaatcgctccttattctgat

SEQ ID NO: 992754 - DNA, 120 bp, Artificial Sequence
  ENSG00000287263_13 (sequence is synthesized)
ggttcactcattcagatgtccttgatatttggggatatttctaaaacagctggggagaaaaatggactgcgaggctccggtgttggacgtgaaattggcagtgagacatccgcctctaag

SEQ ID NO: 992755 - DNA, 120 bp, Artificial Sequence
  ENSG00000287263_14 (sequence is synthesized)
cccagggaaaagcttaaattgtggttctctgtctctagcaccgtgatctttgaaatgcgttattgattttcttctttcttctgggaaatgcaatgcaggtgaacttgtaagtgttgaatc

SEQ ID NO: 992756 - DNA, 120 bp, Artificial Sequence
  ENSG00000287263_15 (sequence is synthesized)
ctccctctcctcactgttcaatcagactgaggcctacttcctttctgataagaaatatggaactgccattgctcagtaggaaaatgtcctttctacaagcattcatatttcaataaaaat

SEQ ID NO: 992757 - DNA, 120 bp, Artificial Sequence
  ENSG00000287263_16 (sequence is synthesized)
ctgcactttgtgagttgagccccctcaaagagacctacagaccctgccatgagcatctccatccacactcatcatttcccattttcaccacttctgctcctgtgcaaaccagtactatcc

SEQ ID NO: 992758 - DNA, 120 bp, Artificial Sequence
  ENSG00000287263_17 (sequence is synthesized)
aaggcactgccaggtcctgcatgccagtaaaactactcatgtcagctgttctgcaggatcccatgagaaggtgagtcaccagaaaatgcagtttccacatcctgatgatttcatctccct

SEQ ID NO: 992759 - DNA, 120 bp, Artificial Sequence
  ENSG00000287263_18 (sequence is synthesized)
accccaactgatcaatttctccaattttccagcctctcaccctccacaatccccttaaaaactgtagcccagaactctctggaatgatgaatttgaaggtttgctcctgtctcctcactc

SEQ ID NO: 992760 - DNA, 120 bp, Artificial Sequence
  ENSG00000287263_19 (sequence is synthesized)
agaagcctgtaatcattaaactctttctctgatgcaaactctgctgtctcagtgtaattggtatgtaagtgtgcagcaggcatatgaatctgttggtcctgtaacagttgggatgcagtg

SEQ ID NO: 992761 - DNA, 120 bp, Artificial Sequence
  ENSG00000287263_20 (sequence is synthesized)
gcacaattgtagctcactgtaatctctacctcctacacctaagggaaccttaccacctcagcactcggaatagctaggactttaggtctgtgtgctaccacccatggctaatttataaaa

SEQ ID NO: 992762 - DNA, 120 bp, Artificial Sequence
  ENSG00000287263_21 (sequence is synthesized)
taatttctttgtagagacaggatctttctatatagcctgggctggtctcaaactcctggcctcaaggtatcctccccactctgcatcacaaagagctgtcattacatgtgtgagatacca

SEQ ID NO: 992763 - DNA, 120 bp, Artificial Sequence
  ENSG00000287263_22 (sequence is synthesized)
taccctgcccatggtagaatattaacacatgggtgtgaaatgttggcttcagtctggcatgttattactttattaacagtaaagaataatatctgatcatgaaattgtttttttttgtaa

SEQ ID NO: 992764 - DNA, 120 bp, Artificial Sequence
  ENSG00000287263_23 (sequence is synthesized)
atagaatattttctatttacattgatgcttttgtaaatagaatatttgactctgatgaagacatattataatttcactatggatatgacctgaaatggaaaaaattgacttacagaaaaa

SEQ ID NO: 992765 - DNA, 120 bp, Artificial Sequence
  ENSG00000287263_24 (sequence is synthesized)
atacaccaaagaagtcaccattttatatttgttcttattacaattatctttcaagccataaaaaacaaaaattagtgattttattaccaactgagaagattattttctgccaagcaatct

SEQ ID NO: 992766 - DNA, 120 bp, Artificial Sequence
  ENSG00000287263_25 (sequence is synthesized)
ctaaacattaacttttactaggaatgtattcatgaaagggactttgtaaaataggagcaaatttgacctcttatttaatcattcagagatgaaataaaatataatacattatttgaaaag

SEQ ID NO: 992767 - DNA, 120 bp, Artificial Sequence
  ENSG00000287263_26 (sequence is synthesized)
atatccaggaagcaggaagtacagtcagggatcccaggaatgggtgtggtgatgtctgttgcaccagggcttagagggcaggatctttcctctagaaactctgtgtgtcaggcatgccta

SEQ ID NO: 992768 - DNA, 120 bp, Artificial Sequence
  ENSG00000287263_27 (sequence is synthesized)
gacaaaatacacttatatttgatgttttagcatatcaaagaggtattgcttggtttaaagatgaggctcagtgagtttacaccacagtccaagatcacaaaggtagttcatgctggagct

SEQ ID NO: 992769 - DNA, 120 bp, Artificial Sequence
  ENSG00000287263_28 (sequence is synthesized)
ggattgaagtcccaggttatcaggcattcatatcaagtagggaaatgagtaaagaaataattaggttgggttttgaaaaagaagaatcctatgccttacataaaattgtaccttaaaaat

SEQ ID NO: 992770 - DNA, 120 bp, Artificial Sequence
  ENSG00000287263_29 (sequence is synthesized)
cgacagaccgagactccatctcaaaaaacataaaaataaaaaaaagggcaaatatgttgagctaatatgatgctttttacagtattttttttcaagacccttatatgttatgtgattata

SEQ ID NO: 992771 - DNA, 120 bp, Artificial Sequence
  ENSG00000287263_30 (sequence is synthesized)
acccttatatgttatgtgattatatgcatttttttaagttattctccttcctctgttattcctacttccactgcaattcctctcatcagtaactaccagttttaacattacattatccaa

SEQ ID NO: 992772 - DNA, 120 bp, Artificial Sequence
  ENSG00000287263_31 (sequence is synthesized)
aaaagaggtggatggagtctcggctgcatatgctaatgttgcaccttggacgagtgatgtaatgccttttgccattttgcatttccaaatatattctcaaatgtattcctaacagtggtg

SEQ ID NO: 992773 - DNA, 120 bp, Artificial Sequence
  ENSG00000287263_32 (sequence is synthesized)
gagaaatcacattttggctattccccgacttgaaccaggggatagaaatcgtagtcaccggctgggcgcagcggctcatgctgtaatcctggcagtttgggaggccgaggcgggcagatt

SEQ ID NO: 992774 - DNA, 120 bp, Artificial Sequence
  ENSG00000287263_33 (sequence is synthesized)
aatcctggcagtttgggaggccgaggcgggcagattattgaggttaggagttcgagaccagcctggtcaatatgatgaaacaccgcctctagtaaaaatacaaaaattatccgggcgtgg

SEQ ID NO: 992775 - DNA, 120 bp, Artificial Sequence
  ENSG00000287263_34 (sequence is synthesized)
tcccatgagaagcctctcaccctccacaatccccttaaaaactgtagcccagaactctctggaatgatgaatttgaaggtttgctcctgtctcctcactcagaagcctgtaatcattaaa

SEQ ID NO: 992776 - DNA, 67 bp, Artificial Sequence
  ENSG00000287262_0 (sequence is synthesized)
caggcgtgagccactgtgccctgccaggataaaaaaactttgatatcaatacatggttttggttttg

SEQ ID NO: 992777 - DNA, 61 bp, Artificial Sequence
  ENSG00000287262_1 (sequence is synthesized)
atcctgcctcggcctccggagtagctgagactaccggcgcgtgccaccacacctggctaat

SEQ ID NO: 992778 - DNA, 120 bp, Artificial Sequence
  ENSG00000287262_2 (sequence is synthesized)
agtacatgttttattgggaggtgggaggatcacttgatgccgggagttcaggaccagcctgagcaacatagactctgtctctacaaaaataaaataaaacttagcgggacatgatggcct

SEQ ID NO: 992779 - DNA, 120 bp, Artificial Sequence
  ENSG00000287262_3 (sequence is synthesized)
ctgaggtgggaggatggtttgagcccagtagttccaggctattgtgtgagctgtgatgatggcaccactgcactctagctagggcaacagagccagatcctgagtcaaaaataaatgttt

SEQ ID NO: 992780 - DNA, 120 bp, Artificial Sequence
  ENSG00000287262_4 (sequence is synthesized)
ccagatcctgagtcaaaaataaatgttttaaagagtattatttccttttacaaatctccacttgtttctaggaaatttagaaatgagaaaagtattatttgcaatgtctggaatgccaga

SEQ ID NO: 992781 - DNA, 120 bp, Artificial Sequence
  ENSG00000287262_5 (sequence is synthesized)
gtctaacctcttaaatatgtgctcataacctcagatacttggtctatgcttgataattaatggttttgaattgcagtgtttattagttttgaaaatttgaccagaattaaacataaatac

SEQ ID NO: 992782 - DNA, 120 bp, Artificial Sequence
  ENSG00000287262_6 (sequence is synthesized)
cacacagcaggttcagcattatagaaaaagcctcttaaattgtttttaaataaatgaatctgttatgtatgtaattcagtcagtgtcagaaagagaagcacttttcatatacaaaaggca

SEQ ID NO: 992783 - DNA, 120 bp, Artificial Sequence
  ENSG00000287262_7 (sequence is synthesized)
acaattttgtggttacaaaatacaggacagatggaaatctgacaccagagcctatacccccaataaatgggttaagatttatatccttgcaaatgttgtttgtcttcatttttatctaac

SEQ ID NO: 992784 - DNA, 120 bp, Artificial Sequence
  ENSG00000287262_8 (sequence is synthesized)
ctcactttgtcacccaggctggaatgcagcagcaccattatggctcactgcagcctcgacccctggagctcaagctattctcccgcctcagccccacaagcagctgagactacaggcgca

SEQ ID NO: 992785 - DNA, 90 bp, Artificial Sequence
  ENSG00000287262_9 (sequence is synthesized)
cgacccctggagctcaagctattctcccgcctcagccccacaagcagctgagactacaggcgcaccccaccacaccaggctaatttttgc

SEQ ID NO: 992786 - DNA, 120 bp, Artificial Sequence
  ENSG00000287262_10 (sequence is synthesized)
cctgagctcaagctatcctcttgcctcggcctccaaaagtgctggcattacaggcatgagcctgttacaggccgaaagaatgagggtcgtgaccaactcagtataccactggaggctata

SEQ ID NO: 992787 - DNA, 120 bp, Artificial Sequence
  ENSG00000287262_11 (sequence is synthesized)
agcaggatgttggaaaactaacaactgtgtctgctgccagaagggttgctgagggcagtcacaccccaagcacagtgttccttgtgattatctataggaacatctgaagcctgttgtaca

SEQ ID NO: 992788 - DNA, 120 bp, Artificial Sequence
  ENSG00000287262_12 (sequence is synthesized)
aagaaagcaattatgtatacctgtgataaatcaagcaactgaccaactgctacctctccctccctgctctttctacctaataaatacgaagggctgtagaagctcagggcccttgctcac

SEQ ID NO: 992789 - DNA, 120 bp, Artificial Sequence
  ENSG00000287262_13 (sequence is synthesized)
tagaaggagccccctgaccccttcttccaaaaatactttttgtctttgtcttcgtttctgcattcatcccccttcgttcactcccataacaaccaacagcgacaactggcacctaggaca

SEQ ID NO: 992790 - DNA, 120 bp, Artificial Sequence
  ENSG00000287262_14 (sequence is synthesized)
gggacgtgagtgaaggtctgctggagcagagaaactgacactgacaagaagaacgagaatgagaaaccctgcgacgagtctgctgacagctaatataagtctgcaaaatcagctggacca

SEQ ID NO: 992791 - DNA, 120 bp, Artificial Sequence
  ENSG00000287262_15 (sequence is synthesized)
ccaaacggcaattgagagctgcacaacctgcaattacctttattcaattaatgcaaaaacaaaaatggggagatgttacaggccgaaagaatgaaggtcgtgaccaactcagtataccac

SEQ ID NO: 992792 - DNA, 120 bp, Artificial Sequence
  ENSG00000287262_16 (sequence is synthesized)
tgaaggctatatgagcaaacagaaaactgttctcatgaaagcaggatgttggaaaactaacaactgtgtctgccgccagaagggttgctgagggcagtcatgccccaagcgcagtgttcc

SEQ ID NO: 992793 - DNA, 120 bp, Artificial Sequence
  ENSG00000287262_17 (sequence is synthesized)
ttgtgattatctatagtaacatctgaagcctgttgtacaaaggaagcaattatgtgtacctgtgataaatcaagcagctgaccaactgttacctctccctccctgctctttctacctaat

SEQ ID NO: 992794 - DNA, 120 bp, Artificial Sequence
  ENSG00000287265_0 (sequence is synthesized)
ggcggacgcgcaggcgctgccctgaccgggcggctgcgctcgtctcggagcccgctccccggccgggggtctccagatccccctttggccttttcccctggggcgactccgggggccagt

SEQ ID NO: 992795 - DNA, 120 bp, Artificial Sequence
  ENSG00000287265_1 (sequence is synthesized)
taccagcagtcgctacccagccttggctgcctccgtgaatcaggtgctaatcagaggcctggtctctgggggctcccctgcctgggttttctgagtgcggcagatttaggctgggggatt

SEQ ID NO: 992796 - DNA, 120 bp, Artificial Sequence
  ENSG00000287265_2 (sequence is synthesized)
tcctgcggccctgccccatgcaccaagaccgagaagcctcgcctggtggggagaggtgggctacgtgactcaccccggggaggcccgacctccctaccctgggggagcagatggctggat

SEQ ID NO: 992797 - DNA, 120 bp, Artificial Sequence
  ENSG00000287265_3 (sequence is synthesized)
ctctgacctcagacctcacggccttagatgatgtgtgtcccttaatgtctgcattgtggttctgtctggaatggatcaatttctaaactgtagcagaattgttttgggtgttctatcaac

SEQ ID NO: 992798 - DNA, 120 bp, Artificial Sequence
  ENSG00000287265_4 (sequence is synthesized)
gttattaaactctgaagtttctctccagcgacagaatccttgagccagtggtttttcttcttaatttatgtatcctcaacaatgtcctgaacatagtaggtgcttaataaatatttgctg

SEQ ID NO: 992799 - DNA, 120 bp, Artificial Sequence
  ENSG00000287265_5 (sequence is synthesized)
aatgagtacatgcgtcaatctgacgtgccctggctcacccctgctgacttcattttatcttcttgctaagcgagttacacacatgctggtctcctgtctgttccttgagcctgtcaggct

SEQ ID NO: 992800 - DNA, 120 bp, Artificial Sequence
  ENSG00000287265_6 (sequence is synthesized)
tgctgggctgtgctctctatccagacacctggatccccagctctctgcatacctgcctgttatcgctgaggtatcagcccaaatgccatctctcctaagaggcttttcctaaccacccaa

SEQ ID NO: 992801 - DNA, 120 bp, Artificial Sequence
  ENSG00000287265_7 (sequence is synthesized)
ttccagcattgtccagagagaggctgcccagttgaatacctgagttctcaaggccatgcagaacagcctgaccatgaggatgggcccctgtggtatacgacctcaactcttcaaaggtca

SEQ ID NO: 992802 - DNA, 120 bp, Artificial Sequence
  ENSG00000287265_8 (sequence is synthesized)
caatttccagccttccaagcagtcttctaattatgaacgtggtttcctcctttcgctgaagagatttgcggggctcagatctcagcacggatatctggagagtgtggggtcagggaagag

SEQ ID NO: 992803 - DNA, 120 bp, Artificial Sequence
  ENSG00000287265_9 (sequence is synthesized)
cagcaagaggaatggatatccagatatagggcacactcaacagagagagagagaaagagagaggagagagagaggagagagaggagagagtccttgcacacaatgcttccgtgtattgct

SEQ ID NO: 992804 - DNA, 120 bp, Artificial Sequence
  ENSG00000287265_10 (sequence is synthesized)
gtactccaccccttggtctacagccatagccgtacttggcagagcacaagactctctgtggttctgcctcttggcatcatgttgttttttgatctttggtaagaaaccatgcctgactta

SEQ ID NO: 992805 - DNA, 120 bp, Artificial Sequence
  ENSG00000287265_11 (sequence is synthesized)
tgcatggccatcatggaagttgcttgtgttcattttccgtgtgtggaatggtctgacttggcccatctacttccctgtctctacaaaggaaggtctacctgggacaacaaactaggccct

SEQ ID NO: 992806 - DNA, 120 bp, Artificial Sequence
  ENSG00000287265_12 (sequence is synthesized)
taaaacttttcatggtttaaaaacgaaacaaaacaaaaacaacattttatggttgatgactcgagcccaaaacagttaacaaaatctgaaccacgaatacctttttaatctcaggagaat

SEQ ID NO: 992807 - DNA, 120 bp, Artificial Sequence
  ENSG00000287265_13 (sequence is synthesized)
aatcatcattttcatcagtgtttgacaggactcctgtaagacaagagcttgggcattgcttcctcagcctaacttgcctgggcggaaggagacatggccagaaggtcttaccatttgcct

SEQ ID NO: 992808 - DNA, 120 bp, Artificial Sequence
  ENSG00000287265_14 (sequence is synthesized)
tgtggtactctttctgaggtctccaactctcttaaaatcctgttcaaaatgatcatgtggactgcagtcttgtggacagcaggaaatggacccgaagtgtccctgcacagagggtcctaa

SEQ ID NO: 992809 - DNA, 120 bp, Artificial Sequence
  ENSG00000287265_15 (sequence is synthesized)
ccatctgtgcttgctgcacctgcaccgtcagctaccctctctgaggcacacttctccttcttcaaatgcctgcagggaccagggggcagcccagaagtgaagacagaagggaggacagca

SEQ ID NO: 992810 - DNA, 120 bp, Artificial Sequence
  ENSG00000287265_16 (sequence is synthesized)
agggaagccccagctcaaagaagtgactgggctagggcggccctccttaaagatgcttctgcctgcctgccgagtgtcactgttgagctcttccctagtgcagagctttgcactgctttc

SEQ ID NO: 992811 - DNA, 120 bp, Artificial Sequence
  ENSG00000287265_17 (sequence is synthesized)
atttgtttttgttattcactctttcatgcaaaactgaaattgaactggatctgaagacactgaaaaatgtctgggtagggggctgcagggagcaggggttttcctgagagaatggaatgt

SEQ ID NO: 992812 - DNA, 120 bp, Artificial Sequence
  ENSG00000287265_18 (sequence is synthesized)
cccatgagaaatttcacttaccatgagaggggaagtccatttcgtatgacatgatataacactgtcattataaactctccgttggtttcacatgtgttaatatttatcattcttttgatt

SEQ ID NO: 992813 - DNA, 120 bp, Artificial Sequence
  ENSG00000287265_19 (sequence is synthesized)
agttattcatcaagaaaaccctgtgaattctgaaaaaatcatcatgtatcaagggttcctcaggctagatgatggacccaggatcattttctctattctttgcaacagagagcttgcttt

SEQ ID NO: 992814 - DNA, 120 bp, Artificial Sequence
  ENSG00000287265_20 (sequence is synthesized)
ttatttttatttatttatttttttaaccaaacaccacttggtctgcaggtgaggagctgtccttgcccacatgagacaatctcatctgaagcaacaacctggtaccaggatatcatgttt

SEQ ID NO: 992815 - DNA, 120 bp, Artificial Sequence
  ENSG00000287265_21 (sequence is synthesized)
ctcatctgaagcaacaacctggtaccaggatatcatgtttactcatgagaataccgtcgaccattgaccttcaagtgaaggttgatctgtacttttttttttttttaagacagagtctca

SEQ ID NO: 992816 - DNA, 120 bp, Artificial Sequence
  ENSG00000287265_22 (sequence is synthesized)
tttcaccttctctgcacacctgtgtgccctttctacatggggcctcaactccagaccccgcaaacaacaactaacatgaggacaactgctgggaagaggctgaagcaattgcagcatgat

SEQ ID NO: 992817 - DNA, 120 bp, Artificial Sequence
  ENSG00000287265_23 (sequence is synthesized)
cacacaaggttgggatagatttctttctcatctctcatacacaccccttgcaaaaaaataggtgggcagaaaagtctggggctaagcttgccctgtttcatcaatgtacagtttgcatta

SEQ ID NO: 992818 - DNA, 120 bp, Artificial Sequence
  ENSG00000287265_24 (sequence is synthesized)
ctgaacagactagaacaatgtgtcaatgtaaaaacatttatatctggcttaaatgacaacagtttatctgccctccctccccaaaatacaaagcagtacctatcttacctctgatgtaat

SEQ ID NO: 992819 - DNA, 120 bp, Artificial Sequence
  ENSG00000287265_25 (sequence is synthesized)
taaagtgtccatgatggtaacttttcccaagcaaagccacagtctgtcttaaaggtgagatgagatctttatctctacagacagaaaatgttgtaacttttaaatggcagttcacctcct

SEQ ID NO: 992820 - DNA, 120 bp, Artificial Sequence
  ENSG00000287265_26 (sequence is synthesized)
gcttgttgaggtttacagggcagcttaacaggtgggtaggtgcagtggatgggcagagagataactgatatataagacagagagatatgtggacatattttcttactgtagtgcttttaa

SEQ ID NO: 992821 - DNA, 120 bp, Artificial Sequence
  ENSG00000286196_0 (sequence is synthesized)
gcccggccagctgggctgggagagacccgcgccccaggcatgtccaagcccacctagagggcgggagggtggcgggcgctctggccccaaccctggcatccgaagcatcccccgcgtttc

SEQ ID NO: 992822 - DNA, 120 bp, Artificial Sequence
  ENSG00000286196_1 (sequence is synthesized)
ctgctcctcactcagtcttcagatcccagtccggcgcccccggtacaatggggagccagggtgcccaggtcagccgcaagggccagcgtaccaggcggaggaccggcaggacgccggaga

SEQ ID NO: 992823 - DNA, 120 bp, Artificial Sequence
  ENSG00000286196_2 (sequence is synthesized)
ccccatctcccagtcccccctgccccagctctctccctcctgcggaggaggcagaaacggaccggcatctaccgcagcccagagtcccaggagtggccgccgaaccctcaccccgcggag

SEQ ID NO: 992824 - DNA, 120 bp, Artificial Sequence
  ENSG00000286196_3 (sequence is synthesized)
cgcctgggcgcccagagctctttccctgggatctacgactcacttgtggaaaatgcacctgtcaaacgcagctaaagcctgtgctgacctcacagaactcttctgagctttcgctgagct

SEQ ID NO: 992825 - DNA, 120 bp, Artificial Sequence
  ENSG00000286196_4 (sequence is synthesized)
ggtgcatcatttcatacatggagagatctcagtgaatgttcccagtcaactgcaatggcctggctccaatgcttcctcctccagaaagctttccttgatctccagctctccagctcccca

SEQ ID NO: 992826 - DNA, 120 bp, Artificial Sequence
  ENSG00000286196_5 (sequence is synthesized)
actaaaagtcatcccctacctctggagctcccacagcttctggtgatggtgagggggcagcaatctgaggacttccctcgctgctccattactagtcacttacatagagttgtgcagata

SEQ ID NO: 992827 - DNA, 120 bp, Artificial Sequence
  ENSG00000286196_6 (sequence is synthesized)
gcatctcagggtgatgaaatgtccctgcagtgaggagctaggccagcccgccctgttccaggcccaggtcgcccactcacggccacgggctcactgaagccatagcaaccctgggttgga

SEQ ID NO: 992828 - DNA, 120 bp, Artificial Sequence
  ENSG00000286196_7 (sequence is synthesized)
ggcacccctgttaccatttcacacagtcaaacacaggctcagggaggcaatgccacacccaaatccagtggcaagtaagtggcagatctcagactaaaatttgttttttagttttgtggg

SEQ ID NO: 992829 - DNA, 78 bp, Artificial Sequence
  ENSG00000286196_8 (sequence is synthesized)
ggcagatctcagactaaaatttgttttttagttttgtggggttttctatatcagcctacatcatgctttttttttaat

SEQ ID NO: 992830 - DNA, 120 bp, Artificial Sequence
  ENSG00000286196_9 (sequence is synthesized)
ggcatgagccactgtgcccagcctgagccactgggcctggcccatcatgctttgacgggactaaaatttggatttgctgggcatggtcactcgtgcttgtattcccagcactttgggagg

SEQ ID NO: 992831 - DNA, 87 bp, Artificial Sequence
  ENSG00000286196_10 (sequence is synthesized)
actccgtctcaaaaaaaaaaaaaaatttttttttttttaaattagcagtggcacacacatgtagtcccagggactttgagctcaagg

SEQ ID NO: 992832 - DNA, 120 bp, Artificial Sequence
  ENSG00000286196_11 (sequence is synthesized)
atgagctcaaggctgcagtgagagacagagcgagatcttttaagaggtggctcttaaaaaaataataataaaaataaaagttggatctgatggattgcaaaaaacaagcgcaaagcacta

SEQ ID NO: 992833 - DNA, 120 bp, Artificial Sequence
  ENSG00000286196_12 (sequence is synthesized)
tatgcttcttccatgggtcccacatggaccgggagccctttgaattcagggcctggtgctccttgccctctgcctactctcagtgctcagcacagggcgttgcttagggtgggggctcct

SEQ ID NO: 992834 - DNA, 120 bp, Artificial Sequence
  ENSG00000286196_13 (sequence is synthesized)
gggggtagaaggtcaagggctttggctatagtcctggcatcaaacttggggtgtaatcccagttcttcctcataatatcaggttggtgcaaaagtaactgtggttttcaccattaagagt

SEQ ID NO: 992835 - DNA, 71 bp, Artificial Sequence
  ENSG00000286196_14 (sequence is synthesized)
ggttggtgcaaaagtaactgtggttttcaccattaagagtatgtggtcatgggttgatgggtgcagcaaac

SEQ ID NO: 992836 - DNA, 120 bp, Artificial Sequence
  ENSG00000287267_0 (sequence is synthesized)
gctatgcagctggtttgagccttatcttcttggtgatttttggaaggtaaatcatttgggctcatgaggaacagaggagccaaaccactattgagaagattgctgttcaccattttgaca

SEQ ID NO: 992837 - DNA, 120 bp, Artificial Sequence
  ENSG00000287267_1 (sequence is synthesized)
accacacaagccacagatgatactctcagattctaaagcctgcctccattctctggctgtggccccttcctccatcttcaaatctagcaattctgcgaaaatctttcttatgatgcattt

SEQ ID NO: 992838 - DNA, 120 bp, Artificial Sequence
  ENSG00000287267_2 (sequence is synthesized)
ctctggttccaactcctctgcctcccctttcaccatttaaggaccctctgattaaactggactcacccagaaaatccagggtaatcttttcattttaacatcagctgattggcaaccttg

SEQ ID NO: 992839 - DNA, 120 bp, Artificial Sequence
  ENSG00000287267_3 (sequence is synthesized)
tagccatgtaaggtaatatattcacaagttctggagaagaagacatgtacttctttggagtgacagagggactagctactacacactggaagaatcaaatattcaatatgaggatattga

SEQ ID NO: 992840 - DNA, 120 bp, Artificial Sequence
  ENSG00000287267_4 (sequence is synthesized)
cacaaggaagaacacatacaagaattttatgtaaaaggggtctaagaatgaccaggagttaatgcggtaaagagagcatgaaagaacatttcaatccccaggaacagtgcgagcaaagga

SEQ ID NO: 992841 - DNA, 120 bp, Artificial Sequence
  ENSG00000287267_5 (sequence is synthesized)
atgaagtgaagagaggaaatcaagtctgggttatcggacttactgctgagtgattttacagcttggaagtaacacttctctggtagccaggttctccagaagtgtgcttgtgagctcaca

SEQ ID NO: 992842 - DNA, 120 bp, Artificial Sequence
  ENSG00000287267_6 (sequence is synthesized)
ggtttgtcattggttctgtttagggtccaatgttgcatgtcattcattctcttctttcctccagacgggaagttctcaattagtgttacaatgggatgggacccatatattggaaataaa

SEQ ID NO: 992843 - DNA, 120 bp, Artificial Sequence
  ENSG00000287266_0 (sequence is synthesized)
actcaaaggtgtgaatatccagaggcaaggacattggaaaccatcgtggagactggctaccacagctggtcaatagcagaactgaatagatgcaattcgacacagtctggctccagagtt

SEQ ID NO: 992844 - DNA, 120 bp, Artificial Sequence
  ENSG00000287266_1 (sequence is synthesized)
aggaagcatgaacaccctcttatactggcttagtatgatgaaaaaacaccagtgatgtggctggactccagggtgaatggccatgtcagaccccagagatgctgcatccttaaccttatt

SEQ ID NO: 992845 - DNA, 120 bp, Artificial Sequence
  ENSG00000287266_2 (sequence is synthesized)
ggaggctcctctaatgccatatcactgcaggagtcgcagaacgttggcacaattcagggaagtccccctaagttgaattgacagccattttgatgggatagagactaaaggttgaagtta

SEQ ID NO: 992846 - DNA, 120 bp, Artificial Sequence
  ENSG00000287266_3 (sequence is synthesized)
atttgatttccagaatatgaagaaattagatgttttgggcatgtataagtttatgaactgagattcaaactcacaatatcaatagtacaaagcactgtgtaataaagccaagcaatcagc

SEQ ID NO: 992847 - DNA, 120 bp, Artificial Sequence
  ENSG00000230937_0 (sequence is synthesized)
cttgaaatgggctgagtccctcttgctcacccttgacttggaaaaaccagtttctcttttattgtctgttactaatctctattctaaaaattcagctcaattctcaaccatactccaaac

SEQ ID NO: 992848 - DNA, 120 bp, Artificial Sequence
  ENSG00000230937_1 (sequence is synthesized)
tctctcttttccagctacctttactccctctccttcaattccactttcctctgcttactttttttttttttctgacagggtctcactttgtcgcccgggcaggagtgcagtggctcaatc

SEQ ID NO: 992849 - DNA, 75 bp, Artificial Sequence
  ENSG00000230937_2 (sequence is synthesized)
tctcactttgtcgcccgggcaggagtgcagtggctcaatcttgggctcactgcagcctcaacctcccagaggtaa

SEQ ID NO: 992850 - DNA, 120 bp, Artificial Sequence
  ENSG00000230937_3 (sequence is synthesized)
tttcctcaggagtcatttctgttccgcacaggcctgctgaactgggtgctttatataggacactgtcatctctcaagtacccatcttggagggtacggaccccacatgaggaaaggacca

SEQ ID NO: 992851 - DNA, 120 bp, Artificial Sequence
  ENSG00000230937_4 (sequence is synthesized)
accacaccgagctcagttatggcacacacagtgggacctagacaaagggagagggtgaccgacatcccaactagggtccccaggcaggtggctgggacactatttgcaatcagcaaggaa

SEQ ID NO: 992852 - DNA, 120 bp, Artificial Sequence
  ENSG00000230937_5 (sequence is synthesized)
ccctgctgcccttagactccccacagagcaagcagaacttgcagaatggggtaaaaacactctattaaagattttttaaacctatttatattgtaataaagtaaatgtaaataaaattta

SEQ ID NO: 992853 - DNA, 120 bp, Artificial Sequence
  ENSG00000230937_6 (sequence is synthesized)
agcagcagcagcagcagcagcaagagtaactctgacttaggaatagagacagccagagagaaatgtgatcaatgaaggagacatctggagtgtgcgtgcttcttcagagggacgggtgat

SEQ ID NO: 992854 - DNA, 120 bp, Artificial Sequence
  ENSG00000230937_7 (sequence is synthesized)
gggcagattggaaaaagcaccgcagatgggaaccttaatctttcttttctaaaattgatgctatgaaaatttgcgttttctgtaacttgtaaaaactaaaagttgcttgtctactgaaaa

SEQ ID NO: 992855 - DNA, 120 bp, Artificial Sequence
  ENSG00000230937_8 (sequence is synthesized)
gacatcccaactagatttcagtggagtgaagttcaggaggcatggagctgacaaccatgaggcctcggcagccaccgccaccaccgccgccgccaccaccgtagcagcagcagcagcagc

SEQ ID NO: 992856 - DNA, 69 bp, Artificial Sequence
  ENSG00000230937_9 (sequence is synthesized)
tctcactttgtcgcccgggcaggagtgcagtggctcaatcttgggctcactgcagcctcactacaagcg

SEQ ID NO: 992857 - DNA, 120 bp, Artificial Sequence
  ENSG00000230937_10 (sequence is synthesized)
tcattttttgttccctgtcctcaagccttaggggcaaaagaaacatccaagatttgaaatttcttttcttcttctcatctgcatggctgtagccatctctctgttctgcattatcttatg

SEQ ID NO: 992858 - DNA, 120 bp, Artificial Sequence
  ENSG00000230937_11 (sequence is synthesized)
acaaaaaaaaaaaattcttattttgaagcaaactcaaagctaggtcctgatgtctcaaggcacaggtactcgtacttaaaggtgagtctgaaatctgtggatttggggaactttggaaaa

SEQ ID NO: 992859 - DNA, 120 bp, Artificial Sequence
  ENSG00000230937_12 (sequence is synthesized)
acaaagatgagtggctagatcagggggctcattgggcaggaagaggagactggaaaatgccatattcactgcaagtcaattatcaacttcctccaaggctaaaatagctgaacctgctgc

SEQ ID NO: 992860 - DNA, 120 bp, Artificial Sequence
  ENSG00000230937_13 (sequence is synthesized)
attttaaaccaatcctcagccactttggtgttttctcaaggatttccagggatcccaggcagtaaattctgctgataataggaattggtgtgataaggtgggtgctgagcagtttaagca

SEQ ID NO: 992861 - DNA, 120 bp, Artificial Sequence
  ENSG00000230937_14 (sequence is synthesized)
ccaagattgtagctctgtctggttttgtggagatttactcaactagaagaacagagatttggctggtttttcagtcctggggtgcagggtgcacctgtactggaaaatttaggacgtggt

SEQ ID NO: 992862 - DNA, 120 bp, Artificial Sequence
  ENSG00000230937_15 (sequence is synthesized)
ttcattctttgagtctcatgttcaagttggttttaatgttatgaagacacttgggacgtaatcctgagggcagctggggggaagaaagtggtcactggatggacttaccctgtagcgagc

SEQ ID NO: 992863 - DNA, 120 bp, Artificial Sequence
  ENSG00000230937_16 (sequence is synthesized)
ccatgcatggtttgttctctgatcgtgcatgtgcttggctctagacccatgtaaccatggtgaaggccactgggggattcagttggcaaaggcatagtgggcagaagaatcttgaacaag

SEQ ID NO: 992864 - DNA, 120 bp, Artificial Sequence
  ENSG00000230937_17 (sequence is synthesized)
gagtccagagcaggtcaagtctcctgatacaggttgtgactcatggttttttgtctctgcctgtagcagctacaggtctgtaaagcaaggggagagtgataaggaaagaactcacctttc

SEQ ID NO: 992865 - DNA, 120 bp, Artificial Sequence
  ENSG00000230937_18 (sequence is synthesized)
tgcacactccagagtgaggactttaataatctagtggactgtacatgttgggaggggaagagcggggtgccgagggtctggagggagaagaattgactgccccttttgctcttggagtta

SEQ ID NO: 992866 - DNA, 120 bp, Artificial Sequence
  ENSG00000230937_19 (sequence is synthesized)
agcagaaatctaaagagaaggcaaagaatcttgccttcctggcatcatttcctcctaccatcccaggccatcatttatttattacagccaacagactggcctctttcttccctttgactg

SEQ ID NO: 992867 - DNA, 120 bp, Artificial Sequence
  ENSG00000230937_20 (sequence is synthesized)
ggaatgggtcaaaggcggtgcaggaggaggatctggtccagataattcacaagcagggtgcattttcctctcattattgagaactgtgagtgtttatcaagaaggcagagcaggagaaga

SEQ ID NO: 992868 - DNA, 120 bp, Artificial Sequence
  ENSG00000230937_21 (sequence is synthesized)
tgaaccagtcttcttcccctcactacccagatctctgcctgccaacaagccccgtgttcaccctggcaaagagtctttacattcagaccaaggagagtgtgactccttctcagcactagc

SEQ ID NO: 992869 - DNA, 120 bp, Artificial Sequence
  ENSG00000230937_22 (sequence is synthesized)
tagaaacctcaagcccttgcttaagggcctttttcagagagacccaatgcccagaaggctagatgcgtggggaggagccacatacgagaaactgcctccctgcttcgggtcagaacaagc

SEQ ID NO: 992870 - DNA, 120 bp, Artificial Sequence
  ENSG00000230937_23 (sequence is synthesized)
cccaggaagaaagtatttcaaacaacaaggtgcatctgccccaacccatccagcctgcatgttggtgctgagaacagccttttatggggcttgcactgagccatgggcatgtctgaacac

SEQ ID NO: 992871 - DNA, 120 bp, Artificial Sequence
  ENSG00000230937_24 (sequence is synthesized)
aacaaggaagaggccagagcagcaacagcacgcaaagggttgatgggcatttcttttaagacagagcagaaaactcttagatactttgcgtccttcctatttgactcagtctatgaaagc

SEQ ID NO: 992872 - DNA, 120 bp, Artificial Sequence
  ENSG00000230937_25 (sequence is synthesized)
caggttagcttgctttcttcctccctaaatcctccatcctcatgaccaacaaagaaatagttgaatcattttccaggcacatcttggggaggatgtggggccattggaggctgtccttcc

SEQ ID NO: 992873 - DNA, 120 bp, Artificial Sequence
  ENSG00000230937_26 (sequence is synthesized)
tagataagtctttaggagtgagaacaaggagtcttaccctcctctgtccacccacccccatgaatgggcctggctccagccaggagttgtggtttttcctgagctcctcacctatctctt

SEQ ID NO: 992874 - DNA, 120 bp, Artificial Sequence
  ENSG00000230937_27 (sequence is synthesized)
ctggatttcacattggcaaacggggttgcaaagtgctcttcgtgctctttggacagtgccttgtggagaggaatgcccatgcccctgcattccaaggccttggtaagcaagctcagagta

SEQ ID NO: 992875 - DNA, 120 bp, Artificial Sequence
  ENSG00000230937_28 (sequence is synthesized)
gctggatttttctaaagcaattgcagaacacctgctttttctttgtttcctctagaaaggaccaaccacaccgagctcagttatggcacacacagtgggacctagacaaagggagagggt

SEQ ID NO: 992876 - DNA, 120 bp, Artificial Sequence
  ENSG00000230937_29 (sequence is synthesized)
ccatctctctgttctgcattatcttatgacaaaaaaaaaaaattcttattttgaagcaaactcaaagctaggtcctgatgtctcaaggcacaggtactcgtacttaaagacactgtcatc

SEQ ID NO: 992877 - DNA, 120 bp, Artificial Sequence
  ENSG00000288436_0 (sequence is synthesized)
gggctcacaaaacagctacttgatgacaccattggaattcaccccacatgtggggaggtgttcacgactttggaaatcacaaagtcgtcaggactagacatcactcagaaaggctgctga

SEQ ID NO: 992878 - DNA, 120 bp, Artificial Sequence
  ENSG00000288436_1 (sequence is synthesized)
ggctaggcctgctgctgtttagttctccttgtcatattctcatttctctcaaagataagaatgctctcggataaaatgagcctgtgctcatgacagctgctctgttactcagggaccagt

SEQ ID NO: 992879 - DNA, 120 bp, Artificial Sequence
  ENSG00000288436_2 (sequence is synthesized)
gcagggctgtcttacgacacttagatgagaaagtagacaaggaaagaggacagcagtgggcatctgccttgtggtcttgctgacagcgagaagcagtgggactgcttccttgacgcctta

SEQ ID NO: 992880 - DNA, 120 bp, Artificial Sequence
  ENSG00000288436_3 (sequence is synthesized)
gcttggagccccgttatgaggtcctctcagattgcagcgggatgtttcatgaaagcctagacccggaagaataggaggataggagactgcagcagctgacctctggaagccagagctgga

SEQ ID NO: 992881 - DNA, 120 bp, Artificial Sequence
  ENSG00000288436_4 (sequence is synthesized)
agatgccactggagcctgtgagggcacgattgagtgtggggctggcttgctgctgctcccacaccactgcagaggcgtcctctctggaacatggagacaaggtttttggacaggggtttc

SEQ ID NO: 992882 - DNA, 120 bp, Artificial Sequence
  ENSG00000288436_5 (sequence is synthesized)
ccagtcccctggaagagattaagagactactgaagatctccagggcactgcaagccagatctgtaccctccacccaggagaaggcaaaatgtctttctggagagcctgggcagccagagg

SEQ ID NO: 992883 - DNA, 120 bp, Artificial Sequence
  ENSG00000288436_6 (sequence is synthesized)
ggaaaggtcaagaaacctatcctggccctgggaaagtggagggtaaggcagagccagccatgagaaaggatgatgtttgcccaggcatgaaatgtatcagcggatgatctctcacatgga

SEQ ID NO: 992884 - DNA, 120 bp, Artificial Sequence
  ENSG00000288436_7 (sequence is synthesized)
agaagccaaagcagctacacccaatggcttagcaataagaaacaccaaaccagacaaacaccactgctgctgggaaagggacctggcagaaggaaaaggctgttcagagagcagaggtat

SEQ ID NO: 992885 - DNA, 120 bp, Artificial Sequence
  ENSG00000288436_8 (sequence is synthesized)
ttcgtgtgagccttttagggcttcttgtctctttagaccacatgcacatattacttgtataaaataatgcaccagatacaaacaatgaaatacaagtgctgagttcgatagactcataca

SEQ ID NO: 992886 - DNA, 120 bp, Artificial Sequence
  ENSG00000175746_0 (sequence is synthesized)
tccttcagcaggatgtacacagagatataactttctacagcatccactgcagctctgggctccatttccctttgaaatgggatgggagaaaggggcaggtaacagactggagtgaggaga

SEQ ID NO: 992887 - DNA, 120 bp, Artificial Sequence
  ENSG00000175746_1 (sequence is synthesized)
ctgaggagaaactgtagagaataatacttaggagtacacgtgctggattctctcattaaggaaatattcatgagtcaactatccagaatcatagttattattcaagcggtgtgggtttaa

SEQ ID NO: 992888 - DNA, 120 bp, Artificial Sequence
  ENSG00000175746_2 (sequence is synthesized)
aaggagatttgatgccatggcaaacctcactgacttagactgttcttcaagttaaagagcaggatgatgtctgaagtggctgaaacacatatggcttcagtgtgtcaagaagacctgaaa

SEQ ID NO: 992889 - DNA, 120 bp, Artificial Sequence
  ENSG00000175746_3 (sequence is synthesized)
gatcccacatggaagtgaaattcattactggcaagcacggtggcaggagaccccagagggctgagccgcaaagaatttgcagagccttatggctaactccatggcctagtttgatcttga

SEQ ID NO: 992890 - DNA, 120 bp, Artificial Sequence
  ENSG00000175746_4 (sequence is synthesized)
agttactgtcttggataatcctctcaaatctgttcctgcacttaagagccactcatcacatgacggagctccctctcaggttcctttacatcgccctgtcagaaatgactttcagggaac

SEQ ID NO: 992891 - DNA, 120 bp, Artificial Sequence
  ENSG00000175746_5 (sequence is synthesized)
agacatcacatcaaatcatccaacagatgtccctttcaaataagttggagcagaaccaactatatggagaagtcataaacaaagaaacagacaacccagtgatttccagcggattgacat

SEQ ID NO: 992892 - DNA, 120 bp, Artificial Sequence
  ENSG00000175746_6 (sequence is synthesized)
tactctttgcacagaaacctcagtctcctgggtggaagaacatgagttcaacaaagcgtgtgtgcactatattggctgactcttgccgtgctcaggctcatgctgctgacaggggagaga

SEQ ID NO: 992893 - DNA, 120 bp, Artificial Sequence
  ENSG00000175746_7 (sequence is synthesized)
ggggacattttggagtccaaatcttgcatcatttcattgaagtgttcaatgtcatggctgtaagaagtaacccattttaataactggcatcaaaggatttaggagagagaaacccagtat

SEQ ID NO: 992894 - DNA, 120 bp, Artificial Sequence
  ENSG00000175746_8 (sequence is synthesized)
ccagacccatttccgtcagtgacactctcctcgtattgggaggattggccagaatcgtctgattcctgtttctgatttccttcctcactggcatcagagtatttcactataggaaaacta

SEQ ID NO: 992895 - DNA, 120 bp, Artificial Sequence
  ENSG00000175746_9 (sequence is synthesized)
atatctaactgagctccaagtgctaaataacagcatctcatgttcattccgggtcaccaagaggttcagggtgaccaagtcacaaactataaatttgaacatttgatgatttttgcagga

SEQ ID NO: 992896 - DNA, 120 bp, Artificial Sequence
  ENSG00000175746_10 (sequence is synthesized)
gactgggtgaacaaaggaaaacccgagagatacataaaggtggaaactaggatttctcatttgaattatttaacatgcctcactctaatggttataaatgtaaaggaaatgcaggttctt

SEQ ID NO: 992897 - DNA, 120 bp, Artificial Sequence
  ENSG00000175746_11 (sequence is synthesized)
caagaaggtgaaacgaagttactgaatttaagtttttttttttttaaacctactttagaataggaaacatgcttactaatatttacaaggcactacaaggcaccagccaaaaagcctgat

SEQ ID NO: 992898 - DNA, 120 bp, Artificial Sequence
  ENSG00000175746_12 (sequence is synthesized)
ttgccaactcaacactgcctacttttgaatttttattctagcaacagccgataatttattggaaattccttatgtgctgggcactacgctagacattgggagtacgaaaattaatatggt

SEQ ID NO: 992899 - DNA, 120 bp, Artificial Sequence
  ENSG00000175746_13 (sequence is synthesized)
aaagatcctggctttaaagagtctttaacattatttcagcagttttattacaggtgtatatgttggaattgacagaacacttagctcaaagcaagggttcaagcatgactttgcagagta

SEQ ID NO: 992900 - DNA, 120 bp, Artificial Sequence
  ENSG00000175746_14 (sequence is synthesized)
gatttcagctgagcttaaaggatgtgagaataagtatacacattttttaaattacccagaatgtagtgcctacagaagtgcttgagcctcagttgcttctaagagtccaacttcagaact

SEQ ID NO: 992901 - DNA, 120 bp, Artificial Sequence
  ENSG00000175746_15 (sequence is synthesized)
tgtatcttctagattgagctcattgcttaatttctagccaacatagcccatctctctcagctgaatactaagctcatcaacttctcctttgatctaggtcttgattagaatgttgaacat

SEQ ID NO: 992902 - DNA, 120 bp, Artificial Sequence
  ENSG00000175746_16 (sequence is synthesized)
gacaaggctgaaggcagaaaccatagaaacttctatccagagttacactcgtctcttaatagctgcctactgttgcaatcagaataaactcacttcttgcccaattatgacagttcattc

SEQ ID NO: 992903 - DNA, 120 bp, Artificial Sequence
  ENSG00000175746_17 (sequence is synthesized)
accttctactcaagggagactttaagaattgttgaagttgaacttctcaggttcttatacttagtgacactgttcatgcaatggctcagtatttcttgatttctcagaaccagcaaaagt

SEQ ID NO: 992904 - DNA, 120 bp, Artificial Sequence
  ENSG00000175746_18 (sequence is synthesized)
cacaaactgaatcctcaaattggaattcgtaagtgactaacttgtagcataactttattatactaggaaagatggggcaagggacagaaaaaatatctgtaacatcttatatgttcaaat

SEQ ID NO: 992905 - DNA, 120 bp, Artificial Sequence
  ENSG00000175746_19 (sequence is synthesized)
ataagcgctttatgtatatttagtcattcaaactccaaatacacattaagaagtagtcatcaatattccactctctaattctacaatttctacctttttagattccacatataagtgaga

SEQ ID NO: 992906 - DNA, 120 bp, Artificial Sequence
  ENSG00000175746_20 (sequence is synthesized)
tcatatggtatttgtcgctctgtgcctgacttatcttacttaacataatgtccttaggttcatccctgtttgaaaatggcagaattgcctgtttttttttttaaggctaaatagtatcct

SEQ ID NO: 992907 - DNA, 120 bp, Artificial Sequence
  ENSG00000175746_21 (sequence is synthesized)
attttgtatattcagcacattttaaaaaatctgttcatcagctgacggacacttaggttgattccttatcttggctcttgtgaataatgctgcaatgaacacaggagctcaaacatccct

SEQ ID NO: 992908 - DNA, 120 bp, Artificial Sequence
  ENSG00000175746_22 (sequence is synthesized)
ttgaaatactgatttaaatatctttgggtataaacccggaattggctgtggggagttagacagggaaaatgtccacattgctctacggatacaaagtttcagttaggaggaataattctg

SEQ ID NO: 992909 - DNA, 120 bp, Artificial Sequence
  ENSG00000175746_23 (sequence is synthesized)
gtgttctattgcacagcacagtgtctatagttaatagtaatgtattatatatttcaaaatagctaaacaaagagaattttaatgttcttaccgcaacgaaataattgtttcagaaaataa

SEQ ID NO: 992910 - DNA, 120 bp, Artificial Sequence
  ENSG00000175746_24 (sequence is synthesized)
atatgctaattagcctgatttgctcattccacagtgtatatacatgtatcaaaaagtcacattgtaccccataaatatacaaaattatttgtcaattacaataaaacttttttttaaaaa

SEQ ID NO: 992911 - DNA, 120 bp, Artificial Sequence
  ENSG00000175746_25 (sequence is synthesized)
tgggagaaaggggcaggtaacagactggagtgaggagactgaggagaaactgtagagaataatacttaggagtacacgtgctggattctctcattaagttaaagagcaggatgatgtctg

SEQ ID NO: 992912 - DNA, 120 bp, Artificial Sequence
  ENSG00000189223_0 (sequence is synthesized)
agcctcccgagtagcagggattacagacacatatactcacagaaatgagttatttaaagaagacggtccagattccacagtccaaaaaaaaaagaggtttgccctgcttctgaaggagtc

SEQ ID NO: 992913 - DNA, 120 bp, Artificial Sequence
  ENSG00000189223_1 (sequence is synthesized)
tctgaaggagtcagggtatgaatgcagaggtcttcctgttggctcacatatcagatcttcaacgtcaacattaaatgcgagtgatgcttccccctctgtgaatgtggctttgggtatggc

SEQ ID NO: 992914 - DNA, 120 bp, Artificial Sequence
  ENSG00000189223_2 (sequence is synthesized)
taatccacaccctgcactctggccttcagaagcccagggagagaagcctcccagaagcaaccttccagaaccttctccatcctcccaccgacctccccagcccctgtcctctctttgaat

SEQ ID NO: 992915 - DNA, 120 bp, Artificial Sequence
  ENSG00000189223_3 (sequence is synthesized)
ctcgttgtcaagttcttcccgcagacacctggctccttgaggggaggtgcagctttcatctgaccatgcaggcgtgctttgcagtgggtagagcagtgctttcctcctcccagctgcaca

SEQ ID NO: 992916 - DNA, 120 bp, Artificial Sequence
  ENSG00000189223_4 (sequence is synthesized)
ctggaatcacctggagagtccagaaacttcccgcctcagtgaaagaacatcagtgtatcagcacagcaaatattccaaatgccaggctggattccctccaattaccaggacctccaggct

SEQ ID NO: 992917 - DNA, 120 bp, Artificial Sequence
  ENSG00000189223_5 (sequence is synthesized)
tctcctcctttcaagaactttctgaccctggatccagtctaaatgttggttataaactcacctgacatccacagggcccttccaaaatactgtcaaggctgactgctggtgcctggaacc

SEQ ID NO: 992918 - DNA, 120 bp, Artificial Sequence
  ENSG00000189223_6 (sequence is synthesized)
tgcacaccctcctgggactctgcatctctgctggggctggtttctcctctgagccaccttaaggaatcccaccctgacccggtcagagctcaccatgcctccctctcctacttgctcagc

SEQ ID NO: 992919 - DNA, 120 bp, Artificial Sequence
  ENSG00000189223_7 (sequence is synthesized)
attttgtgtctatctagactgaagcctttgctttctctctgtgattatggtgaaagttcagtttgctttcctatctctagaatgtcagcacgaaggcagaggcatggtctcctgagttcc

SEQ ID NO: 992920 - DNA, 120 bp, Artificial Sequence
  ENSG00000189223_8 (sequence is synthesized)
ataaccccaaagcctaactccctgcctgccacactgaggggcttagtagacattgacttactaaattgaatagttgagtaataatgctctttgaaataatttggagttagatcttgagcc

SEQ ID NO: 992921 - DNA, 120 bp, Artificial Sequence
  ENSG00000189223_9 (sequence is synthesized)
ttgtgtggccagaggatgggtgaggacacatcataaaaactaaaggtaactgagcatgccagtggttggggtgagaaatttgcatggagcactccagacacagaggcagcaaaacccaag

SEQ ID NO: 992922 - DNA, 120 bp, Artificial Sequence
  ENSG00000189223_10 (sequence is synthesized)
tgctgggaagtcagagtgagagagtgaaggggcagtgagtgcttctttaggagctggatcaaaacctaagatgatctggccacatggtgcagactgagcacacacttgggagagaaatgg

SEQ ID NO: 992923 - DNA, 120 bp, Artificial Sequence
  ENSG00000189223_11 (sequence is synthesized)
gccaggaggagaggagagaggttcaccacaggacagtggatgactgggaatagaagccctccccatggtggaccaagaagtctgtgaagctgagagaaagacaaaagaaatcacgacttc

SEQ ID NO: 992924 - DNA, 120 bp, Artificial Sequence
  ENSG00000189223_12 (sequence is synthesized)
tgtaggtagctgggatggaaacctcaggggtgacagggtctttaaaggaaatctcaaggaaggcatcatgttctgggtgtgctccagggatgctgagtaagaaaagaccagcctttctgt

SEQ ID NO: 992925 - DNA, 120 bp, Artificial Sequence
  ENSG00000189223_13 (sequence is synthesized)
gtgtgtctttactctgccacaaggcacctgggctcctaaatgaccaatacacatgtgctatactggtgccaagaaagaagggtgttttgtaggaaagtcaaggtgagaggaggtgcccag

SEQ ID NO: 992926 - DNA, 120 bp, Artificial Sequence
  ENSG00000189223_14 (sequence is synthesized)
gacttggctcctttctttgaagggtgacggtgtaaattctccatgctggggatcctactgatggatggaggcatgtcgatctcatcatttcacagagtggggagctatggccacaacgtg

SEQ ID NO: 992927 - DNA, 120 bp, Artificial Sequence
  ENSG00000189223_15 (sequence is synthesized)
cctatcacacaagtccagcctcacgtcagctggacaccagctgttctgacacttgtcagcacatggggcacccggaagttcatggtgttctgcaaagaacgccacaaaacagtgagctca

SEQ ID NO: 992928 - DNA, 120 bp, Artificial Sequence
  ENSG00000189223_16 (sequence is synthesized)
acttcttgaaagtcataatgtgttgctaagtccgatcccagatcctaaaaataatatgaggtagtggccattgaacagaaaaaatttacatcttaaacttgaagataagtacaagtgtac

SEQ ID NO: 992929 - DNA, 120 bp, Artificial Sequence
  ENSG00000189223_17 (sequence is synthesized)
ctttttctaccactgttgttcagttttattatattgacaagcacctctgcccaccctgtggggtaaaactgtttgaaagtgtttatgaaagttttatataaatattggttgatcaaatgt

SEQ ID NO: 992930 - DNA, 120 bp, Artificial Sequence
  ENSG00000189223_18 (sequence is synthesized)
acaaaatatgcatgatggcaccatattgtgtataatagtgacaaatacagtctatgtgggtggagaaacaagctcggtgttgtgcatgcggctgtggtttgtgttcacacttctccttta

SEQ ID NO: 992931 - DNA, 120 bp, Artificial Sequence
  ENSG00000189223_19 (sequence is synthesized)
gagtgtagtagacagaacatgcctgaactgcctggggctgaggggtctcaggcgcagagtggcccaggaattctgagcaaggacagaatgttagagagaatatcctgagctgagcagaga

SEQ ID NO: 992932 - DNA, 120 bp, Artificial Sequence
  ENSG00000189223_20 (sequence is synthesized)
ggcctgcccatgctagctggcagccacctgccttcagtgcttcattcttgggggaccttgaggccagttcttgagtggatgagtcctgccgctactgctgctgcccacttggtagctctg

SEQ ID NO: 992933 - DNA, 120 bp, Artificial Sequence
  ENSG00000189223_21 (sequence is synthesized)
tcctcatctgggaagagccactgtgaaccccagagacctagtggtgctaggggctgatgcaggcaaatgactggctgcccctggatcttatgtgaaaacaagaatgctggaccaaaaggt

SEQ ID NO: 992934 - DNA, 120 bp, Artificial Sequence
  ENSG00000189223_22 (sequence is synthesized)
ctctacagggctccatgactacccatgacccgtaacttcagtgaggagctagtggccaggaggggctcatggttggacactggtattcctctactcagaccttaaaccacaggttgcaag

SEQ ID NO: 992935 - DNA, 120 bp, Artificial Sequence
  ENSG00000189223_23 (sequence is synthesized)
aacagggaggtcacatgtcagtgacctcatgcctaaatagatgcatagcacagagcagattcctggatagcttacaccctactttccccagtgcatcgattatgacttcctttctagcaa

SEQ ID NO: 992936 - DNA, 120 bp, Artificial Sequence
  ENSG00000189223_24 (sequence is synthesized)
ctgtgagtacagccgggactcatcaatcacacctgtaacttcccagctgcatttctcagggtctctgaaagcagggccttctctggtctttttaaattacccacagacctaggacagtct

SEQ ID NO: 992937 - DNA, 120 bp, Artificial Sequence
  ENSG00000189223_25 (sequence is synthesized)
tctgcacatacttctacattttaaaggcttacttttagtatgtttatgtgtgtgagatggggaatattgtattcatgtgtgcatgtatatgtctgtgagtactgtggtctgtgtgtgtaa

SEQ ID NO: 992938 - DNA, 120 bp, Artificial Sequence
  ENSG00000189223_26 (sequence is synthesized)
ctgggtatgactgtgtgtgtcatatggatacaggggactagaatgaggacagccaggtgtccaggctataagatctaaggaggcacttgctctcagggccaaccctgcccttgcgtgagc

SEQ ID NO: 992939 - DNA, 120 bp, Artificial Sequence
  ENSG00000189223_27 (sequence is synthesized)
ctgagagagagagcctcctggaattttgcaccttgagtgccttcctgcttcaccctaatccccccggttgtctgtatgtttggatgtgagtgttgtacatatgctgtgtatgtgtgtgca

SEQ ID NO: 992940 - DNA, 120 bp, Artificial Sequence
  ENSG00000189223_28 (sequence is synthesized)
tgcatgtgagtgtgcatgggtgtgtgtctgtatgtctcagcagctgtcactgggcttcccagtccctgtcagcaggcgaaggaggccccttcatttccttgggtcctgcttatgcagcac

SEQ ID NO: 992941 - DNA, 120 bp, Artificial Sequence
  ENSG00000189223_29 (sequence is synthesized)
aggccacagcaaaggctccctgggttgggtcagccctcactctaactcaacatgccctggaagtcaccacagggtcatggaaagagtcctggtgatgagatggagtgtctgctctgccac

SEQ ID NO: 992942 - DNA, 120 bp, Artificial Sequence
  ENSG00000189223_30 (sequence is synthesized)
aagggctgtgggaccagggtcggggcatacctctctgggtctcagtttcctcactggtaagatgtggcaacagaatctcatctgtgagccccctctagccttgaacaactctggatccag

SEQ ID NO: 992943 - DNA, 120 bp, Artificial Sequence
  ENSG00000189223_31 (sequence is synthesized)
gtagaccagcataatgaaagcctatgaagcttctgagatgtgcgaggcatacattgtcccaggtactcaagtaactcaagtctggaagctgcgagccacagagatcaagccttctccaaa

SEQ ID NO: 992944 - DNA, 120 bp, Artificial Sequence
  ENSG00000189223_32 (sequence is synthesized)
aattggactgcaaggcatgccgtacaaacagagtgctaggagaccttggggaggtggggaagaggaagaggaatcatggacagcttcatggggaggtggctttggagctgggatgggtga

SEQ ID NO: 992945 - DNA, 120 bp, Artificial Sequence
  ENSG00000189223_33 (sequence is synthesized)
tatgtcactgtaagcaggacccttgaaagcaggtgccacctgcaaaagggggagccctgaggcccaggcaggcctgtcacagtgtggggcacctgtctagacagccccatggccagcagt

SEQ ID NO: 992946 - DNA, 120 bp, Artificial Sequence
  ENSG00000189223_34 (sequence is synthesized)
gggggtgggccatgggccatggggaccttcctggtatggggtactgccatgtccccagggaatatggggggcccaggaaggtccccaaggctcgaaggacccaggtcttttcatactgcc

SEQ ID NO: 992947 - DNA, 120 bp, Artificial Sequence
  ENSG00000189223_35 (sequence is synthesized)
aaagagatgtaaggcctacagaggggaaagtttgcatatctgtgaaggcatggagcctaggcattggaagtgtccagtaagcattttcatttggcagaagtatctccatggcacttctac

SEQ ID NO: 992948 - DNA, 120 bp, Artificial Sequence
  ENSG00000189223_36 (sequence is synthesized)
ctacagccctgccacattttgccacaaactgtccagcagccctgagatggagccccagtgtagaccgtcatggagcacactggctctggaacaatgaggagcagactggagaaagccaga

SEQ ID NO: 992949 - DNA, 120 bp, Artificial Sequence
  ENSG00000189223_37 (sequence is synthesized)
tggggtttacctgtcaacagccacaacatagttgtgctggggtgactgttcaagaaaaatgaactttggtgctcctgccgaatgggttgttagtgttcagtccttttcctaccactgagt

SEQ ID NO: 992950 - DNA, 120 bp, Artificial Sequence
  ENSG00000189223_38 (sequence is synthesized)
tgttttgtctgatcattcttcctcctggttctgcgggtctgccttcttgaaagggaagagcaagactccagctccctgccctgtagaggtgccttctaccttgctcagtgttgaagcaaa

SEQ ID NO: 992951 - DNA, 120 bp, Artificial Sequence
  ENSG00000189223_39 (sequence is synthesized)
ggagcaaagcaaagcttaagtcagagatttggtgctcagctaatcacagagacttttaaatgtcaaccagggtttgctatcaggccaaagctggattattattacccaaagtagaaaatt

SEQ ID NO: 992952 - DNA, 120 bp, Artificial Sequence
  ENSG00000189223_40 (sequence is synthesized)
gtgagacagaggcaggtggggagggagggagagagaagaaagcagaaggtggaggatacgtggatttaattttttaaaaataaatatatgattccgtgtcaattaaaaacaagtacccca

SEQ ID NO: 992953 - DNA, 120 bp, Artificial Sequence
  ENSG00000189223_41 (sequence is synthesized)
ggcaagtcttcctgcagtcctgtcttagccgcacacacagcataactgcaaacccacttgagctcatttttgctcaaagaccaactctattaaacccttagaatgttctggatttcaaca

SEQ ID NO: 992954 - DNA, 120 bp, Artificial Sequence
  ENSG00000189223_42 (sequence is synthesized)
cacagtccacagacagccattctatcaaaagcttagtgttttccctatgactgggttttctggtaaggtgaactaaggcatccttttccatttcaggctgtggtaacagcagataacagc

SEQ ID NO: 992955 - DNA, 120 bp, Artificial Sequence
  ENSG00000189223_43 (sequence is synthesized)
cgcagaggtcatagccagcactttctatgcgtcccttcatttaatcccagtactcctaggtggtagatctattattttgtccacatgaattattgaaaagtctgtcctaaattttaaatg

SEQ ID NO: 992956 - DNA, 120 bp, Artificial Sequence
  ENSG00000189223_44 (sequence is synthesized)
gaacgaagtactgggttgcaagttactggtggctgtttcacaggaaatactacgacaatgggactttgggaatgtgttctggagactccactccttggtgactactacatggagcacaga

SEQ ID NO: 992957 - DNA, 120 bp, Artificial Sequence
  ENSG00000189223_45 (sequence is synthesized)
aaattgtcttgagtggcagctatgtgccaggtgaggagacaggttttactcacatgactccccagaagccctgcagcatccccatattttataaaggggaagtacaagcccagagagaca

SEQ ID NO: 992958 - DNA, 120 bp, Artificial Sequence
  ENSG00000189223_46 (sequence is synthesized)
tctgacttgactaagttcacacaaaaacagcaaggtctgggccaagatggaagcccgggctttgccttcttcttctgcctgcagggcaggggctttcatcctggcttcacgctgatttca

SEQ ID NO: 992959 - DNA, 120 bp, Artificial Sequence
  ENSG00000189223_47 (sequence is synthesized)
aaagcctctcattctcttgacacctcatggcccctgagtttatcccaagaataataagttctactgtcctcctggagatgccgaagaatcaaaactgcaacacacagagggcctgggtgt

SEQ ID NO: 992960 - DNA, 120 bp, Artificial Sequence
  ENSG00000189223_48 (sequence is synthesized)
gcgcgaacactgtagtacacaccgatgacagcagattaagccatttctctcttaggtgcgtcacccaaccagctcctggacccttctgctgtgctgccctgacagtcacaatatgtccta

SEQ ID NO: 992961 - DNA, 120 bp, Artificial Sequence
  ENSG00000189223_49 (sequence is synthesized)
gtggactaattagcactaactacccatgtcaccccaaggccatttaagaagacaaataaaaaagacaaaaccaatgagtattgtggctgaagatgacgaaaaaaagttaaaagcagggag

SEQ ID NO: 992962 - DNA, 120 bp, Artificial Sequence
  ENSG00000189223_50 (sequence is synthesized)
gaatgaattattttttctttctcaatctctccctctgcttaaaccaaagagaggttttcatctgagagcccgggagctaagcagctactttctacatgaaaaagtgaaaacattaaaata

SEQ ID NO: 992963 - DNA, 120 bp, Artificial Sequence
  ENSG00000189223_51 (sequence is synthesized)
aaatccctttctttcaagctaacgttctaaaactgaacctctgcagaggctccaaaagagaaatgccttgcttttaagcccctgagtgagagggatcctgaggaagtggcagaggggatg

SEQ ID NO: 992964 - DNA, 120 bp, Artificial Sequence
  ENSG00000189223_52 (sequence is synthesized)
aacctaagctttgggacataacaaccggcacctccagtggccaccactcctagctatgctgcctgtggatggggcccccagtgctggcccctaacagcatggggaagcctccccagccac

SEQ ID NO: 992965 - DNA, 120 bp, Artificial Sequence
  ENSG00000189223_53 (sequence is synthesized)
tctgaagctgttcgcatcacatccaagatgaacctaggcagggaggctgagtgtgcttgggagatgccaagttagggaagtaagttccccagggtccttcaacttgtggtgcctgaggat

SEQ ID NO: 992966 - DNA, 120 bp, Artificial Sequence
  ENSG00000189223_54 (sequence is synthesized)
agctgctttttttccagtgcagatggagacacggcagccttggggggatgtgtgaaagtaaggcctccctccctctgcctttccaagtggctgatcatctccttccttctcatagctact

SEQ ID NO: 992967 - DNA, 120 bp, Artificial Sequence
  ENSG00000189223_55 (sequence is synthesized)
tctaggagaggcatccaggcaggaaccacttctccatttcacagatgggaagactgagaaccatactggaaaggggtgtattttaattaaactggagagtggggaacactgatgaggaaa

SEQ ID NO: 992968 - DNA, 120 bp, Artificial Sequence
  ENSG00000189223_56 (sequence is synthesized)
gcaagctgatagacggaaggctctgcctgtcactgccagcacgggcacttgggccttcttatcaagggttctgatgggagtttccactaggattccaggtgtcgatcatctagtagccga

SEQ ID NO: 992969 - DNA, 120 bp, Artificial Sequence
  ENSG00000189223_57 (sequence is synthesized)
gttctgatgagctggactttgggtggttgaggtagggagcagtggaaaggggaattggagtcttatcaacctctttgaacaccagttccttcccctctcttctataaaaatgtcgtagca

SEQ ID NO: 992970 - DNA, 120 bp, Artificial Sequence
  ENSG00000189223_58 (sequence is synthesized)
atacctgcctggcagagttgtgagaattaaatgagatgatgaatacatctgctctcagcaccacaccacacctgtggcagtcctcagagagaagaatcacagctttcattcattgagagc

SEQ ID NO: 992971 - DNA, 120 bp, Artificial Sequence
  ENSG00000189223_59 (sequence is synthesized)
tcactaagtgccaggtatgctcagctcttgtgcagacgttctttttctttggatgtaaatgtgacatgggcagagcaggaggagctgtgaggctggcttggctgagccacagggattgct

SEQ ID NO: 992972 - DNA, 120 bp, Artificial Sequence
  ENSG00000189223_60 (sequence is synthesized)
ggcatcttatatggcattcaggactatggagggtccacgggaagaaacacagaaacagaacccaagtatccttcggggactcttggactttcttccccttgatcttagacatgcctcagt

SEQ ID NO: 992973 - DNA, 120 bp, Artificial Sequence
  ENSG00000189223_61 (sequence is synthesized)
aaacagatgctggtttctatcgagactcattcctggggaaggacccccaccagccaagcaaggtaaagcccagactcagttacatgaattacaggtttaagacagaagccttcctatgaa

SEQ ID NO: 992974 - DNA, 120 bp, Artificial Sequence
  ENSG00000189223_62 (sequence is synthesized)
tatttttctggccagtggcttatataagagaaatttgctcattgtatttctatctggccaacgaaggggtctagaggggctttcagcaacccaaacagtcttgtcagccctaactctgga

SEQ ID NO: 992975 - DNA, 120 bp, Artificial Sequence
  ENSG00000189223_63 (sequence is synthesized)
cctaaggaaataattatgaatcctcaagatccatttaaaagtgtcattactgtagataaacaaagacgagtggatgcttcttcctactccacctcactgcagagattccatccatcccag

SEQ ID NO: 992976 - DNA, 120 bp, Artificial Sequence
  ENSG00000189223_64 (sequence is synthesized)
ggtcactgaccactgactggatgaactaggattggtgtggcagagtggagttttcaggagccaagagactcctggattgtcatgctctgtactccttccccacgaaaggaatgtctagaa

SEQ ID NO: 992977 - DNA, 120 bp, Artificial Sequence
  ENSG00000189223_65 (sequence is synthesized)
ctcctgctgaaagtagtcattgcctgcatttcctaggcagaatgtgttagctccctccccagaagaacctgggcgaagaaggtgttccaatctgcatttggaaagaatccctcccgcaaa

SEQ ID NO: 992978 - DNA, 120 bp, Artificial Sequence
  ENSG00000189223_66 (sequence is synthesized)
gaactctacaccctctaagagaagataacgtgagggcatattctcctctcttagagggtgttttcaatactaaattctatctctgaagagaatgaggacccgaaggggggcagtgcacca

SEQ ID NO: 992979 - DNA, 120 bp, Artificial Sequence
  ENSG00000189223_67 (sequence is synthesized)
gtacacggaggcagcatggggaaaggcattgaagggcgggaccccggagccgacttgctgcagatccaaaaaggcggagctagataaagaggaaggggtggagctagaactggacacctc

SEQ ID NO: 992980 - DNA, 120 bp, Artificial Sequence
  ENSG00000189223_68 (sequence is synthesized)
gggggtttcctgctttatggcgaagggtacaaagcactgggaatacaaccttgaacaagacaagaatcctggccttcaaggaacttcgaaccttttgggggatatgataagacacattag

SEQ ID NO: 992981 - DNA, 120 bp, Artificial Sequence
  ENSG00000189223_69 (sequence is synthesized)
cggcctaggaccggaggcgcgacccctgggcccacctggcggcccggccggcacagcccgcctctcctctccaggccagggccccacaccttccgcctgacagccagccaagctcttcag

SEQ ID NO: 992982 - DNA, 120 bp, Artificial Sequence
  ENSG00000189223_70 (sequence is synthesized)
acttcttggactgataaatagagcagctttaaaatgcttagaactgaagacagaccaactgtggcgagagaaagtaaacacatccatgcaccagtcaaccctagcaagctcctcgctgag

SEQ ID NO: 992983 - DNA, 120 bp, Artificial Sequence
  ENSG00000189223_71 (sequence is synthesized)
attacaaactgcagttcctgcctgagccggagaggatgctggagcaggctgggggaccagaaccacaaaccagccctggcttagctctggcttagctagctgtgccccagaagagctggg

SEQ ID NO: 992984 - DNA, 120 bp, Artificial Sequence
  ENSG00000189223_72 (sequence is synthesized)
tcctcagggagtcttcttgcggcccggtttggatgttcctaagcatagaagactctgccagtgtgtccctcattcgtttcacatttggaaatgtaccaagagaagtgggaaccagcttta

SEQ ID NO: 992985 - DNA, 120 bp, Artificial Sequence
  ENSG00000189223_73 (sequence is synthesized)
ctctttgatctagatgggaatcctttcctttgcattcaagctctctgtgtacaggtgtaacttgccagtgagagacttgggatttctcacaaaatagaatgtgataacgacataatttga

SEQ ID NO: 992986 - DNA, 120 bp, Artificial Sequence
  ENSG00000189223_74 (sequence is synthesized)
tatgaatatttgaggaactttatctctggacaatatatactttaaacatccccctccccaagtcacacacacaaattgtttttatgagaaccaattaataaatgctaattcattgaggca

SEQ ID NO: 992987 - DNA, 120 bp, Artificial Sequence
  ENSG00000189223_75 (sequence is synthesized)
ccaaagtgttgggattacaggcatgagccgttgcacctggccagggtgtgtcttattgaaattgaacaaaatacctaatttctagagcgtataagagaagtttaaaatgctttatggatg

SEQ ID NO: 992988 - DNA, 120 bp, Artificial Sequence
  ENSG00000189223_76 (sequence is synthesized)
gagcgtataagagaagtttaaaatgctttatggatgtgttgttttgacagcaaaatatctactcagaatcctatagctatttcaaaatccaagtaacttagaaaaaaaggaaaaagaaaa

SEQ ID NO: 992989 - DNA, 120 bp, Artificial Sequence
  ENSG00000189223_77 (sequence is synthesized)
tacctgccaccacggggtaggtctggtgagtcgagaggttgcgccccagtggcgtgttggaaggggtcagggtggccttcccgtcgtccagggtgctgttgagcaagggcagcgggtaga

SEQ ID NO: 992990 - DNA, 120 bp, Artificial Sequence
  ENSG00000189223_78 (sequence is synthesized)
ggccctggggagcaaagagaagtcagcgcacagagacgatccaacaagccgaccttcctgcagaccctgagcctgtgtcttaggacttggcagccctcatctccccaggagaggtcctca

SEQ ID NO: 992991 - DNA, 120 bp, Artificial Sequence
  ENSG00000189223_79 (sequence is synthesized)
tcgcccccttcttcctttacgttctcaactccactcggcacgtttcgttcatgctcattgtcctcccgcatccctggaattcaaggccagctggtagcatgggtgcccagacgtgggata

SEQ ID NO: 992992 - DNA, 120 bp, Artificial Sequence
  ENSG00000189223_80 (sequence is synthesized)
gagagtctcagccagaggaccacaccctggttggatggctggtcggcttcctggtttcaccacactgttgggacccacagaatgcaggacggtgccaaggactggagcagtctccaaccg

SEQ ID NO: 992993 - DNA, 120 bp, Artificial Sequence
  ENSG00000189223_81 (sequence is synthesized)
gactgttcagggtccttgcatctgttaatttattcttccccagataggaaacccaggcacaaaggtttaagaaacttgtcccacttccagatgggccaaagataggattcagattcgagg

SEQ ID NO: 992994 - DNA, 120 bp, Artificial Sequence
  ENSG00000189223_82 (sequence is synthesized)
agcagcccagtgacatgggtgagtaatattatgtctgtgttttatatgtggagcctggaactcaggtaaatggcccaattttgtatagtgaaacagactaaacccgggatttttcggctg

SEQ ID NO: 992995 - DNA, 120 bp, Artificial Sequence
  ENSG00000189223_83 (sequence is synthesized)
tggacccaggtgctttacccaccacgtggatttcttcttttctctctccacatccaaacaaatagaagtgtgcaagttcggcttgaaaatggtattgagagttgtttttgttggaaacac

SEQ ID NO: 992996 - DNA, 120 bp, Artificial Sequence
  ENSG00000189223_84 (sequence is synthesized)
tctttgtcaagtacctgggggtcttcatcagtaagacctcattttagatgcctcctggcctccccttcccaggagcacagctatgaccttaggtactccttccgaaaagaacttgtttaa

SEQ ID NO: 992997 - DNA, 120 bp, Artificial Sequence
  ENSG00000189223_85 (sequence is synthesized)
ctaaaggtaagtgtacctcatcctcaccatggcctccttccactggggaagcagatagcgcagaaaaaagaacacacccattccccacataccttcacactcgtcacatacctgctacgt

SEQ ID NO: 992998 - DNA, 120 bp, Artificial Sequence
  ENSG00000189223_86 (sequence is synthesized)
gagatgtgcaaagctgaattcagggaatgctcagtagttacataacagtgccactaaaggcaattgttttcagtgatttccatcgagctgggttctgcaaagatccacagcactttccgg

SEQ ID NO: 992999 - DNA, 120 bp, Artificial Sequence
  ENSG00000189223_87 (sequence is synthesized)
ttgcatgctgggcacttttggaagctgcagtcaattctggaggccaccagggcaccattagcacatagcagcaattattgactaaatggtgctctggttccatgccttccaagggggccc

SEQ ID NO: 993000 - DNA, 120 bp, Artificial Sequence
  ENSG00000189223_88 (sequence is synthesized)
tcttcactaaattactgtttcatttaattgcagggaattttccattactaaactctcccttgctgatttttttttgcattatttatatactctttcaatttcactaatagtgaggttggt

SEQ ID NO: 993001 - DNA, 120 bp, Artificial Sequence
  ENSG00000189223_89 (sequence is synthesized)
atgtgatattatctgatgtttgtacgtcttaaatttatttttcatttaaaatatttcctcattcttgcagctccacataatcagggagaaacatcaataaaagcaggcaagattttacaa

SEQ ID NO: 993002 - DNA, 120 bp, Artificial Sequence
  ENSG00000189223_90 (sequence is synthesized)
taaatggttgaaaaaggcactggctgaaattaacctgacaggaacgcgtcctgtgtgattgtgtttctctcattccagacgtgcgtgtgtgtgcgtgtgtgtgtgtctctactttgggtt

SEQ ID NO: 993003 - DNA, 120 bp, Artificial Sequence
  ENSG00000189223_91 (sequence is synthesized)
aatgtgggaatgctttcctatatcaataagtcacaagtcgatctgtgaaaagattgtgcatacaaaatggagatgaagatcacaggggctttaataataaaataaacataaacaacactc

SEQ ID NO: 993004 - DNA, 120 bp, Artificial Sequence
  ENSG00000189223_92 (sequence is synthesized)
gaatctctttataaatcccagagcacaatgtgcgttttcttacttccttttcatggaccccagataaagactttgacagccagatatccaagatccggatcagccagcttcctaaaattc

SEQ ID NO: 993005 - DNA, 120 bp, Artificial Sequence
  ENSG00000189223_93 (sequence is synthesized)
tcctctttttttttaaggggtagaaaactgggggtatcccttggtggttaggggttgcttagagactgtggtagagatttggtgttaacaaaaatgtattttgaaagcaggatttcaatt

SEQ ID NO: 993006 - DNA, 120 bp, Artificial Sequence
  ENSG00000189223_94 (sequence is synthesized)
ttcttatattgaatggcaaaggttccatgcacctggctatcttcatttctgaaatgaatgctttcattttattctctccagctaccttctccctttctttcctttccacccccattgcct

SEQ ID NO: 993007 - DNA, 120 bp, Artificial Sequence
  ENSG00000189223_95 (sequence is synthesized)
cctttcagtgtctttctttttctccttattctttcactcctttctctctcacagcaaaatgttctggaggatgtgaatgattaaactgtttactccaaggtttaggtatgaaaaggcaag

SEQ ID NO: 993008 - DNA, 120 bp, Artificial Sequence
  ENSG00000189223_96 (sequence is synthesized)
tcactgtaagtaaagtttcacctttatacccaactccatcaataattacagaacaaggatgactattagtaaatctttcttacaattggctcttacaaaaatgatttcattttttctggg

SEQ ID NO: 993009 - DNA, 120 bp, Artificial Sequence
  ENSG00000189223_97 (sequence is synthesized)
cataccaagtttgacagattttacttttcacaaaaattatttacacagcagaggaacctgctccaaaatgaaggaagcatataaagggccgttgagtgtatccataggaaaatgaatacc

SEQ ID NO: 993010 - DNA, 120 bp, Artificial Sequence
  ENSG00000189223_98 (sequence is synthesized)
tataaaatgcatctcaataaattagagatttgaggccataaatagaacgttttgacatattatattagtagatgccctctaatttaaaccaaagtgtcccttagtaattaaaattccatg

SEQ ID NO: 993011 - DNA, 120 bp, Artificial Sequence
  ENSG00000189223_99 (sequence is synthesized)
agattgattttttatttggtttccttcacttcctttgtcttcttcaacaaaattaggcagagtccttttgggggtagactgataaaattaattaactttccttccacccccaaaaagttc

SEQ ID NO: 993012 - DNA, 120 bp, Artificial Sequence
  ENSG00000189223_100 (sequence is synthesized)
caaataaatgcttccaatagacatcaaaaaagtgtcaattagaaataattacttcttatcaatcagtggggcaattaaagtgacaaagcttaaaaagatacttatcttaaaactaattca

SEQ ID NO: 993013 - DNA, 120 bp, Artificial Sequence
  ENSG00000189223_101 (sequence is synthesized)
caaggtagctaaattatctcctaattaacttgcattgtggagggtgggggggaaccatcttgaaacaaagatgaattgatgaaccccaatacctctttatgttcctcaaagttgcttcca

SEQ ID NO: 993014 - DNA, 120 bp, Artificial Sequence
  ENSG00000189223_102 (sequence is synthesized)
tcccctgaaaccttattttcaacccaggcaggaaacctgggaagaaaacagatcctttccaaatgcatttattccactttcctcaattctaaaaccaagagttaggaatggggctttaga

SEQ ID NO: 993015 - DNA, 120 bp, Artificial Sequence
  ENSG00000189223_103 (sequence is synthesized)
tctcacatcagggaagttagagacatcgtcctctgccttgtcttattttaccacttgaatgaactattttcgggactggtgggagtgggctgcgacaagttatttaagataacttttaat

SEQ ID NO: 993016 - DNA, 120 bp, Artificial Sequence
  ENSG00000189223_104 (sequence is synthesized)
gacagccagcctgcttgcttttacaaaactctcttcctcattggtacagtattgttttcacttttatatatatggggcatttatcgtttcttctgcatctttgaatttttttaaaaatgt

SEQ ID NO: 993017 - DNA, 120 bp, Artificial Sequence
  ENSG00000189223_105 (sequence is synthesized)
ttttgctttagagaatttcgtccctgatgcaacaaaaatagcgattttaaggaacgttcagcccatcgctgacctgcgcacgttaaaatgattcgcgttcaacattcctgcagaataaag

SEQ ID NO: 993018 - DNA, 120 bp, Artificial Sequence
  ENSG00000189223_106 (sequence is synthesized)
ctgtaggaaagacaacgttaagactctctgcaaggcaagaccagccaacgacgaggcgaccccgtggcaggctgggcggcggaggccgcgcggggaggttttctcgagcgtccccggtta

SEQ ID NO: 993019 - DNA, 120 bp, Artificial Sequence
  ENSG00000189223_107 (sequence is synthesized)
ttgggaagggtgcgctcggcctcgctcccgcggaaagccgtgtggccgcctgcgtcccgggctctgctcacagaaaactcaaggggagctccctaagcacggccggtctcaggaacagag

SEQ ID NO: 993020 - DNA, 120 bp, Artificial Sequence
  ENSG00000189223_108 (sequence is synthesized)
gtgcctggggaaaagggggaacctgctaaaacccgagagataatgggcttgtaaaaaccagaggggtccgcttatgagtttagctccggttatagacaacagtgtcaggtaagctgatca

SEQ ID NO: 993021 - DNA, 120 bp, Artificial Sequence
  ENSG00000189223_109 (sequence is synthesized)
gaaagacagacggcctctccctcaggtttgccgagggagggttcagaaaagaaacagggagcgccttcagcagtctatgcggttataggccattttcttgttttattagcgtttaaatta

SEQ ID NO: 993022 - DNA, 120 bp, Artificial Sequence
  ENSG00000189223_110 (sequence is synthesized)
aactatgagaagaaagtctcatcttccctccctcgccactttgtctatttgttttggaaagagggtagaagaagcccctctgtcttcccgaaaagaagaaaggggaaaaaaattacctgg

SEQ ID NO: 993023 - DNA, 120 bp, Artificial Sequence
  ENSG00000189223_111 (sequence is synthesized)
taggtccaggggcagagggctccctcccaaaacccaagcgcgatttgcatccaagctagtgggaaagcgcgcatctcatcatctgggactgttcctgattaaaactacagtaaaaataaa

SEQ ID NO: 993024 - DNA, 120 bp, Artificial Sequence
  ENSG00000189223_112 (sequence is synthesized)
gccccttccgagcatgtcttccccgtcacagagaacttcatgttggcgcctccaaaagttgccggaggaattagggaacagggtgggggtggatgagactgaggccagagagggggctgg

SEQ ID NO: 993025 - DNA, 120 bp, Artificial Sequence
  ENSG00000189223_113 (sequence is synthesized)
acctcgggggtttcctgctttatggcgaaggcgaaaatggagagacccggaaggcgtgtgtgcgcccgcctctcccacaggagggagcgcggagacccgggagcggcctaggaccggagg

SEQ ID NO: 993026 - DNA, 88 bp, Artificial Sequence
  ENSG00000189223_114 (sequence is synthesized)
gaggcgcgacccctggcgcgacccctcggcccaccttgcgggagccgcctaggaccggaggcgcgacccctcggcccagcttgaggcc

SEQ ID NO: 993027 - DNA, 120 bp, Artificial Sequence
  ENSG00000189223_115 (sequence is synthesized)
ctaggaccggaggcgcgacccctcggcccagcttgaggcccggcctaggaccggaggcgcgacccctcggcccaccttgcgggagccgcctaggaccggaggcgcgacccctcggcccac

SEQ ID NO: 993028 - DNA, 120 bp, Artificial Sequence
  ENSG00000189223_116 (sequence is synthesized)
ccaccttgaggcccggcctaggactggaggcgcgacccctcggcccaccttacgggagccgcctagggccggaggcgcgacccctcggcccagcttgaggcccggcctaggaccggaggc

SEQ ID NO: 993029 - DNA, 82 bp, Artificial Sequence
  ENSG00000189223_117 (sequence is synthesized)
cggcccaccttacgggagccgcctagggccggaggcgcgacccctcggcccagcttgaggcccggcctaggaccggaggcgc

SEQ ID NO: 993030 - DNA, 120 bp, Artificial Sequence
  ENSG00000189223_118 (sequence is synthesized)
ggactacaggtgtgagccaccatgcctggtcccccacttgttgattttgcagaaaagatagctgtgttacaacctgtcctaaggtcaggtatgaatacttgtgcttctttcttggctccc

SEQ ID NO: 993031 - DNA, 120 bp, Artificial Sequence
  ENSG00000189223_119 (sequence is synthesized)
gaatacttgtgcttctttcttggctccccaagccagagggcattcctatgcccaggtgagagagcacggagtgttactttggcagcacagtcagttaccagaggtaggaaaagcaaaggc

SEQ ID NO: 993032 - DNA, 120 bp, Artificial Sequence
  ENSG00000189223_120 (sequence is synthesized)
caggcaggacatgaggggcccttgcactggctggttctccctgccttcaccaccctccaggtgaatgactgggtgaataatgattgactgaggaggtaatgaataatttatggacactgc

SEQ ID NO: 993033 - DNA, 120 bp, Artificial Sequence
  ENSG00000189223_121 (sequence is synthesized)
tggacctcagtctcctcatctgaaagatgagtggttggagaagtttaatggttttcaaatgctttttttttcagtcttcaaataagtgtttacgtagaagcaccatatctgaaacaggtg

SEQ ID NO: 993034 - DNA, 120 bp, Artificial Sequence
  ENSG00000189223_122 (sequence is synthesized)
acagtggaccagtctgaatgaaatgagggttggcaggcctgagctccaaaaccttctgattgcccaagccctccttgtcttgcttggattatctccacacaaatggagaaactggacaag

SEQ ID NO: 993035 - DNA, 120 bp, Artificial Sequence
  ENSG00000189223_123 (sequence is synthesized)
aaacacagagcagattccaaatatggaaatatggtgtttgcctgatggaaaattcccggggaaactttggagaaagagggcttcatacctaaaccagtcagatgaggccctcaatgcttg

SEQ ID NO: 993036 - DNA, 120 bp, Artificial Sequence
  ENSG00000189223_124 (sequence is synthesized)
tcactgacctgggtcactactgcgtcacagcgttgagctggacatttttctggctcaagccatgcattttacagttgagaacccactcaggattctttctggaaacaacctgggggactt

SEQ ID NO: 993037 - DNA, 120 bp, Artificial Sequence
  ENSG00000189223_125 (sequence is synthesized)
tgatgagaggctcaagccttctagctacctcacagtcacctaatgtcttcccaatggggtagaggcttctgaatcggacatcagaacagacgcctgaggcttcctgccatgaaagctggt

SEQ ID NO: 993038 - DNA, 120 bp, Artificial Sequence
  ENSG00000189223_126 (sequence is synthesized)
atgaggccctcaatgcttgtcactgacctgggtcactactgcgtcacagcgttgagctggacatttttctggctcaagccatgcattttacagttgagggagccctcgggatcccagagg

SEQ ID NO: 993039 - DNA, 120 bp, Artificial Sequence
  ENSG00000189223_127 (sequence is synthesized)
tttgtggtcaggaagactctcagatgtcatggattcggagtcgcgctgcagagggaagttctgccattgaaaaaccagccgcatctcagatcccttcagaagagatggattttcttccag

SEQ ID NO: 993040 - DNA, 70 bp, Artificial Sequence
  ENSG00000189223_128 (sequence is synthesized)
agataaagaggaaggggtggagctagaactggacacctcgggggtttcctgctttatggcgaatcgctta

SEQ ID NO: 993041 - DNA, 120 bp, Artificial Sequence
  ENSG00000189223_129 (sequence is synthesized)
tgctctgtagtcaagcagggtcctttggggggcttagggatggagccaggaaatggctctgggactcagcgggtgtccagagtctcatcagcagggtttctttactttcactgagtggct

SEQ ID NO: 993042 - DNA, 120 bp, Artificial Sequence
  ENSG00000189223_130 (sequence is synthesized)
tgcctgcacactgagttttgcaggcttactctcacagagtgagcttcctgcaggccccccactgcaacccctttccttcctggagctgtgtgctgactggtgcgtgagcaccccaggccc

SEQ ID NO: 993043 - DNA, 120 bp, Artificial Sequence
  ENSG00000189223_131 (sequence is synthesized)
tctccccatgctgctgatggtcagctttctctgcacgctcgtggttgccacagtcaacgctgataaaattgctgatgcagattgcctgcccagctgcgagtgctggcacgggaccagcag

SEQ ID NO: 993044 - DNA, 120 bp, Artificial Sequence
  ENSG00000189223_132 (sequence is synthesized)
cccagacggtcactggaagtggttgggctgattattggcatcatctccattgtcctactcggttcttaaaggcatatggacttgcctcactcctacagcaaatgacggcatgggcaaaga

SEQ ID NO: 993045 - DNA, 120 bp, Artificial Sequence
  ENSG00000189223_133 (sequence is synthesized)
ggggcaacagacccaccctgaagacactcctcatctggttgacttggcagggttaagggaaaaagatgtgatgactaggagctgagagcttagtggttctgccagagctgcagagtcttt

SEQ ID NO: 993046 - DNA, 120 bp, Artificial Sequence
  ENSG00000189223_134 (sequence is synthesized)
gttggcctcagggtgggacctctcacatctctgtcagcttttcacggacaccaacctgttatgattcatttcacctgtcctgagcactagcaagaaaaattcgctgtagcttgtgatgta

SEQ ID NO: 993047 - DNA, 120 bp, Artificial Sequence
  ENSG00000189223_135 (sequence is synthesized)
ttattctggatttctcaactcattcatttgttcattcattcactataccattactgtctattataaggggggcacaatggtaggtgctgggaataaaaacgatgtttaacgtttcatgag

SEQ ID NO: 993048 - DNA, 120 bp, Artificial Sequence
  ENSG00000189223_136 (sequence is synthesized)
gcttccctgtccttaaggagtccgcgtgtctttgtacctgtctgtctgctagattattaagtgacactgtgagaagctactgagagcagcatgtgggacatgcagaagggcaagaggcag

SEQ ID NO: 993049 - DNA, 120 bp, Artificial Sequence
  ENSG00000189223_137 (sequence is synthesized)
gagagatgattcatgtcggaggggcaggggaggactgacggagagggtgatgtttggctgagtcatgaaggctagtggtatttttccatgcagagaagtgggaggaaaggcattctgtgt

SEQ ID NO: 993050 - DNA, 120 bp, Artificial Sequence
  ENSG00000189223_138 (sequence is synthesized)
ggagggcacacagtgtgcaagggcagagaggtcattatgtgaaggctttgtgctactgcttcagagttgtggaacgtgatgttgcaatctgggaaagacgctgatggcaagggatagcat

SEQ ID NO: 993051 - DNA, 120 bp, Artificial Sequence
  ENSG00000189223_139 (sequence is synthesized)
catcaggttgtgctgccatccctgaaaggcccaggctcaaaggttttgggtgaaggaagccaggagggttagaaagggaggaagatgccagggcatctggtaaaataaagcatgtgtcag

SEQ ID NO: 993052 - DNA, 120 bp, Artificial Sequence
  ENSG00000189223_140 (sequence is synthesized)
gattttgtattcaatgactgaaacttcccagtgattattgggctttttagctggaattgaacttgaatcggggcagagcagcacaatgcttcagaacttcagcgactctgagccctggtt

SEQ ID NO: 993053 - DNA, 120 bp, Artificial Sequence
  ENSG00000189223_141 (sequence is synthesized)
ctgcaatgacctgccaagtagctttagtctacttgactgctctgaaccttaattttctcacctgtatgggaatcatagactctactttatgaggctgacgtaagcattacatgaaatttt

SEQ ID NO: 993054 - DNA, 120 bp, Artificial Sequence
  ENSG00000189223_142 (sequence is synthesized)
gtatacttatacataatgtgcttagcaccgaatacttggtgacagcagatgcccaatgagagttatcacagatattatttcagaatcgtgaagagtcagaagccaccaaattcttgattt

SEQ ID NO: 993055 - DNA, 120 bp, Artificial Sequence
  ENSG00000189223_143 (sequence is synthesized)
ctgtcaataaactgatattcatattctgttgattttttttgatgcatttgtaaaatagggaaacaagagctgtatgacttctagctatgtctggtcatgaaatagcaaccaggaataagg

SEQ ID NO: 993056 - DNA, 120 bp, Artificial Sequence
  ENSG00000189223_144 (sequence is synthesized)
ctagctatgtctggtcatgaaatagcaaccaggaataaggccacatgatgtttctgatgaacacttccccctgccctttttttttttttttcagatggagcctcgctctgtcacccaggc

SEQ ID NO: 993057 - DNA, 120 bp, Artificial Sequence
  ENSG00000189223_145 (sequence is synthesized)
aggagtcttctgtgagattagtgctactcttgccattttacaccactaaggaaactgtcactgactctagtctttggagtctgagccaagaagtctttttcttctaacctgggccataga

SEQ ID NO: 993058 - DNA, 120 bp, Artificial Sequence
  ENSG00000189223_146 (sequence is synthesized)
gactctatggagaatgatgggaggtgatctacacagactcctccctcactgggttgatagctctgttgggaagatgttaacatccatcaggggaaaaaaccacgagagacagctcaagct

SEQ ID NO: 993059 - DNA, 120 bp, Artificial Sequence
  ENSG00000189223_147 (sequence is synthesized)
agggaggcagagggttagcagcaaatgctaccccttctgagaactcagacattccagactcagagaccccatgagaagtttctgactcaggactgtgtaggcagtgctgcatgcatatgc

SEQ ID NO: 993060 - DNA, 120 bp, Artificial Sequence
  ENSG00000189223_148 (sequence is synthesized)
ctgccagggctcaatcagtaaaaaaaaaaaaaaaaagttctccagttctcattgtcaaggagctcagtactgtgttcaaggccaaggacatgatcaatccagtcttaaaatctggtttcc

SEQ ID NO: 993061 - DNA, 120 bp, Artificial Sequence
  ENSG00000189223_149 (sequence is synthesized)
tcagatctcttctggtatcagccagggcttggtcagaggacagaaaccttcctaggtatttcaacaaaggggctttaatatggggaattgttgtctggtgttggagggctgtaagagcac

SEQ ID NO: 993062 - DNA, 120 bp, Artificial Sequence
  ENSG00000189223_150 (sequence is synthesized)
aaaggaaacactgaaatagcccagagatagtagctacaggaagcaaccactgctcctcagcctggaggaatcaaagggaagaaactggagttatcagagctacatgtttagaggaagagc

SEQ ID NO: 993063 - DNA, 120 bp, Artificial Sequence
  ENSG00000189223_151 (sequence is synthesized)
ctgtggagctggggattggatctccgaagggctggctcatcccagctattgctgggggcatgtgaggctggctctgggagagctgagagctggaatctgattcaactactgctgctgagg

SEQ ID NO: 993064 - DNA, 120 bp, Artificial Sequence
  ENSG00000189223_152 (sequence is synthesized)
tattggctgacaagagccacatacaacaacaagaagaaagtccttccactatcctttaaacttctactacttgccgggtggcccatttatcagtccctcatatattctattattctatat

SEQ ID NO: 993065 - DNA, 66 bp, Artificial Sequence
  ENSG00000189223_153 (sequence is synthesized)
aataacacccaaactgagaggtagctttcaaatctgtcctcttgccctgatgagtgggtgaggttc

SEQ ID NO: 993066 - DNA, 120 bp, Artificial Sequence
  ENSG00000189223_154 (sequence is synthesized)
ttcaaatctgtcctcttgccctgatgagtgggtgaggttcatgtattcatttatttccattccttaaagctatatggagaagagagtcagaaacccctgcttcacctctgactaacttat

SEQ ID NO: 993067 - DNA, 120 bp, Artificial Sequence
  ENSG00000189223_155 (sequence is synthesized)
tactttggcatgaatttctgtcacttctttctgtctttccttctaagtgtgccaagtgatctaaataacatggtgcacgtgcagcacctgacacaggacctgggcttcagtagaccgtcc

SEQ ID NO: 993068 - DNA, 120 bp, Artificial Sequence
  ENSG00000189223_156 (sequence is synthesized)
acaaatgttagccattaccctcaccactgagacccaccatttccataacaggcactgttccaggttctggggacatagggggatgaagaaagatgggtctctgccctcttggaggttatg

SEQ ID NO: 993069 - DNA, 120 bp, Artificial Sequence
  ENSG00000189223_157 (sequence is synthesized)
gttttatgggaagattctttttgtaatgatttcaagttaattaacttatttattagcaaatggcaaagatcccccacccctatctgcccctcttcttgcctggattgatttctcttctct

SEQ ID NO: 993070 - DNA, 120 bp, Artificial Sequence
  ENSG00000189223_158 (sequence is synthesized)
ctcttctaaaatccttagtaatgataaaagggcagggttctgggatgcctggaggggtaggaaataatcccagctccttctttccccttctagtgcccatgactaggctgttaccgattg

SEQ ID NO: 993071 - DNA, 120 bp, Artificial Sequence
  ENSG00000189223_159 (sequence is synthesized)
ctgtgtgctggtctttggggctctgtttccctggtggggtgtctatgctctttaatgcatcccaggaggatcctaagatgtgaggccatgaggaccaacgccagctccttgtctactaca

SEQ ID NO: 993072 - DNA, 120 bp, Artificial Sequence
  ENSG00000189223_160 (sequence is synthesized)
ctctgaggctcaggcagatataagagggtcttccaatcgaatgtgatatttggcttccttagatgcttctgccttagatcagcccagagggtggctgtggtggaaggcttagcattatta

SEQ ID NO: 993073 - DNA, 120 bp, Artificial Sequence
  ENSG00000189223_161 (sequence is synthesized)
tttcatccccaatagtgagagggagctggggagggacaggggagggagatagaggatggataaagaggtttcccttggattagactctgtctgggagagaatcaaactaggctcgtattt

SEQ ID NO: 993074 - DNA, 120 bp, Artificial Sequence
  ENSG00000189223_162 (sequence is synthesized)
caccaatgctggacctaaaagaagaggaagtgggggaaggagggaggaagagctatctttagtacccagcccctcttccccattagtcaatgcctaagaataataatcatagccagtatt

SEQ ID NO: 993075 - DNA, 120 bp, Artificial Sequence
  ENSG00000189223_163 (sequence is synthesized)
atgggaggtgcttatttttgggccaagctgagtattttaaatgcatcttttcaattaattcttataataaccctttgagaaatgaagtacattatcattttattgatgagaagatgagga

SEQ ID NO: 993076 - DNA, 120 bp, Artificial Sequence
  ENSG00000189223_164 (sequence is synthesized)
acagattcggcatgtaacaggttcaaggctccacctttacaaagtggcattactgagactcaagctgagagctctcagatgccatagtgaatgctctgcactgcttacttttgcccaccc

SEQ ID NO: 993077 - DNA, 120 bp, Artificial Sequence
  ENSG00000189223_165 (sequence is synthesized)
acctccggcgccacccctggcagcagcactgtattccaggaatagccagaccccgccctaagagcgaatatgtcctttcgtcacctaccaagtatgggtgctttccaaaacacacttcca

SEQ ID NO: 993078 - DNA, 120 bp, Artificial Sequence
  ENSG00000189223_166 (sequence is synthesized)
agtcctctccagcttttcattttcttggggcctaatttttcctttttaaattttctccagtcagagagggcacctaattcctttatttccctttactcttgtgtactggctggttgtcct

SEQ ID NO: 993079 - DNA, 120 bp, Artificial Sequence
  ENSG00000189223_167 (sequence is synthesized)
ccattctctttgtttacatccatcgctgcctcctttcttcccagtctttccggctctgggtttgcatccctgccctcagtgtctcccagtttccttgctttcttttatttccctcctgat

SEQ ID NO: 993080 - DNA, 120 bp, Artificial Sequence
  ENSG00000189223_168 (sequence is synthesized)
tgctgcctccccagttcttaccagctctctgtcccagtcctttcctgtcaaagatggcagactcctccaatgccaccgctcccctacccatctgcccggagtcttcccttctctctccct

SEQ ID NO: 993081 - DNA, 120 bp, Artificial Sequence
  ENSG00000189223_169 (sequence is synthesized)
ccctgctggctcttttggccatcccccttccctgcataatctttattgcttgcatgactgctcaggttctttatcccatcttcccctcaaaggcattcgcagctccgctgttattcttgt

SEQ ID NO: 993082 - DNA, 120 bp, Artificial Sequence
  ENSG00000189223_170 (sequence is synthesized)
attagcattgaacccattaaagctaatttgtttgccctaatctccatttatttttccctagttgatattagatttccctttctattgctccagcatgattttctctttgtcttcctaatg

SEQ ID NO: 993083 - DNA, 120 bp, Artificial Sequence
  ENSG00000189223_171 (sequence is synthesized)
gtctacccccctctctcttcctctattaatctggttggcttcactgtgtggtttcaaggcctttctccgcctcccccagcccttagattaaccctgtcacctccctcccaagaagggctt

SEQ ID NO: 993084 - DNA, 120 bp, Artificial Sequence
  ENSG00000189223_172 (sequence is synthesized)
cagtgtgtggatttttagggatggagctgcttcaaatgtcaatagacctctaagctccttaagaaaagtactacttgacatgaggccctgccttttcctggagccaagctggagaccttg

SEQ ID NO: 993085 - DNA, 120 bp, Artificial Sequence
  ENSG00000189223_173 (sequence is synthesized)
ggagcacaggggccagagagcttgaggcaagtgagacacacatgggctgctctgagcctgaaggtcaccaagtccaagggttccctgggtagggttgcctttggtgctgtctcagagatt

SEQ ID NO: 993086 - DNA, 120 bp, Artificial Sequence
  ENSG00000189223_174 (sequence is synthesized)
tctggaggtctcttcacgctgtcttagatcctataaattatatcagcaatataaggtatataaagtaacagcagatgagccactttctccctctgagattgggcaccatttcccaagcag

SEQ ID NO: 993087 - DNA, 120 bp, Artificial Sequence
  ENSG00000264647_0 (sequence is synthesized)
tcggtccactccccttcaaaatgagaatctagatactacctcctggggccccagcgggaagagatgagggaggagcgggctgcctcgcccctttctcccgcctgggaggagccagctggc

SEQ ID NO: 993088 - DNA, 120 bp, Artificial Sequence
  ENSG00000264647_1 (sequence is synthesized)
caggggtcagcagagtgtcgtggctgcagccagtgcaggggagggggctggcgcggttgaggggcatctaggagtggccgggagcatgcctgtgcatttccttattaaattgtttttcga

SEQ ID NO: 993089 - DNA, 120 bp, Artificial Sequence
  ENSG00000237221_0 (sequence is synthesized)
ggagctacaatctgccattccaagaacaaaagtaaaacaaagactacacactgatgcaactccctctcatgttaaagcactgggaattgggcaaaactgatctagacagagaatggagtc

SEQ ID NO: 993090 - DNA, 120 bp, Artificial Sequence
  ENSG00000237221_1 (sequence is synthesized)
caactgtcaactagaacatttttcaatctacctataacccggaagccacgcccctcctcccccttgcttcgagttgtcctgcctttctgaactgaaccaatgtatttcttaaatgtattt

SEQ ID NO: 993091 - DNA, 120 bp, Artificial Sequence
  ENSG00000237221_2 (sequence is synthesized)
gaattctcatgtctccctaaaatgtattaattctacaattaatttttatggtttactcagtagtaagaccaaaacaaaagaatgttgtgatatgtaaataaagcaatgccaaaagctaaa

SEQ ID NO: 993092 - DNA, 120 bp, Artificial Sequence
  ENSG00000262185_0 (sequence is synthesized)
cacattccttcgtgttcaagtatacgtgtggttggctcgagcacagaagcacagagctgagcaaaatattcagcgcctttttcagagaaccctggctggtgctggtggatgttcctgccc

SEQ ID NO: 993093 - DNA, 120 bp, Artificial Sequence
  ENSG00000262185_1 (sequence is synthesized)
cttcctccaccatgaacatttttaaaaattaagggagaaacaggaaaactttgaagaatcttccagatttgcctaacgcagatgtgcatgacctgacaagatagatgtgccatttggacc

SEQ ID NO: 993094 - DNA, 89 bp, Artificial Sequence
  ENSG00000262185_2 (sequence is synthesized)
gatgtgcatgacctgacaagatagatgtgccatttggaccctttcaagagcagacagaatggaagggctgcaacctgcgcctcctgagt

SEQ ID NO: 993095 - DNA, 120 bp, Artificial Sequence
  ENSG00000262185_3 (sequence is synthesized)
tcatttcaccaaattttcaagtttgttggcttaaagttttcgataatatactcttattttgtggtgaagtcccttttttatttcttgtatttgttatttgtgccttcttttctttttttt

SEQ ID NO: 993096 - DNA, 120 bp, Artificial Sequence
  ENSG00000262185_4 (sequence is synthesized)
ggcgtgagccaccacgcccagccttttccttttctattttctttttcttttcacagatgccttttgtgaaaactgtcaaattgtttccttttaatcattctctttagggattaaccaatt

SEQ ID NO: 993097 - DNA, 120 bp, Artificial Sequence
  ENSG00000262185_5 (sequence is synthesized)
ttgtttccttttaatcattctctttagggattaaccaattttattagtggtttcagttttggctttgttgattctctccgttgtgtgtttgtttttatacttattatacattgaaatcat

SEQ ID NO: 993098 - DNA, 120 bp, Artificial Sequence
  ENSG00000262185_6 (sequence is synthesized)
ggatcatgatcgtgtccgatgatcacggacccgccggagactctcaatggagaggcgatgagtcacagccaagcgaactttctctgctcctgaacaaattgcttctcctcgtcgtcccac

SEQ ID NO: 993099 - DNA, 120 bp, Artificial Sequence
  ENSG00000262185_7 (sequence is synthesized)
tccaaacctagaggtgggacaaccccagcatcctgggcgtgaacgcacccagcttgattgtcacatggggaatagagacctcgcgcctgcctggcataggccaacccagtaatgttcatt

SEQ ID NO: 993100 - DNA, 120 bp, Artificial Sequence
  ENSG00000262185_8 (sequence is synthesized)
tcttccacaatgagaggtgacccttcacttcaccgagaaaggaaggaagaaagcataatatttcatcgcgtgaagaggccatgatttctccgttccgctgaggatcgattgagctgtttc

SEQ ID NO: 993101 - DNA, 120 bp, Artificial Sequence
  ENSG00000262185_9 (sequence is synthesized)
cagtttggggcgcgatgaacaatgccgcagtgaggattcttgtcagtgctggcgtatctcatgataggtttggaaataaattctgatgggaattaaaactggtgtaacctctataaaggg

SEQ ID NO: 993102 - DNA, 120 bp, Artificial Sequence
  ENSG00000262185_10 (sequence is synthesized)
ccatttagcaagaactgtcaaaatgtaaaaaacatgcgcccttctgggaattacttctacagatctgcccgaacatgcaaaatgtctcatgcaccaggttcttctttgcagcatttgttt

SEQ ID NO: 993103 - DNA, 120 bp, Artificial Sequence
  ENSG00000262185_11 (sequence is synthesized)
gcaaaagctgaggtgtagcaacaacctaaatatccatcaataaatatttatccatccatagactagaataccaggcagccaccagaaggaatgagaaagctcggtaccagcaggacctcc

SEQ ID NO: 993104 - DNA, 120 bp, Artificial Sequence
  ENSG00000262185_12 (sequence is synthesized)
catttgcttgtatttgcataaaatatctatgagtatagtcaagaaatagataatatgatctatgtatgcgggatgcggggaaggaagatgtttccgtgtatattccttggtaatcgttga

SEQ ID NO: 993105 - DNA, 120 bp, Artificial Sequence
  ENSG00000262185_13 (sequence is synthesized)
attttaagccatatgaatgcattgtctactcaaaaactcaatttattgtgaaaagactaaaaaccactgaactgtacacattaaaattctatggtatgtgatttagatctcagtgaaaaa

SEQ ID NO: 993106 - DNA, 78 bp, Artificial Sequence
  ENSG00000262185_14 (sequence is synthesized)
ttaaaattctatggtatgtgatttagatctcagtgaaaaatatatattgaggatctgaggcaggtggatcacttgaag

SEQ ID NO: 993107 - DNA, 120 bp, Artificial Sequence
  ENSG00000262185_15 (sequence is synthesized)
actccagcctgggcagcagagcgagactgtctcaataaacaacaacaaaaaaaattacatttaaaaaaacttaggctatggggcccagcgtggaggctcacacatgtaattccaacattt

SEQ ID NO: 993108 - DNA, 120 bp, Artificial Sequence
  ENSG00000262185_16 (sequence is synthesized)
cacatgtaattccaacattttgggaagctaatgccggagaatcgcttaagcccaggagttcaggaccagcttgagcaacagtgagattccatctgtatattaaaaaaaaaaaaaaaaaaa

SEQ ID NO: 993109 - DNA, 120 bp, Artificial Sequence
  ENSG00000262188_0 (sequence is synthesized)
gccgagcccaggcctgcaccctaggcaggcactgctccgtgatccaggaaccacctctctctacagctgggagtgagcagtcagagagggagacagccttgcccggtgctacccagcaag

SEQ ID NO: 993110 - DNA, 120 bp, Artificial Sequence
  ENSG00000262188_1 (sequence is synthesized)
ctagtcaccgagtgggcagagggaggagcggccctcaccggatgtcaagcagcctgggtccccagtccagctctgcctgtccctcgcaataacgcctcagatggggaaactgaagcccaa

SEQ ID NO: 993111 - DNA, 120 bp, Artificial Sequence
  ENSG00000262188_2 (sequence is synthesized)
tgtcacggaggtaggaaggggcagacgtagacttggaaggattctgtggcctgttcgaggttccgtgcatgagccgtgctccgtggagagccaggtctaccgttccagcctttgctctcc

SEQ ID NO: 993112 - DNA, 120 bp, Artificial Sequence
  ENSG00000262188_3 (sequence is synthesized)
caggcccctggctgtccatgtcccacaccaccctgacacctgatacttgacacccgtgtcaccaacagctacagtgcaccacggccttggaacaccgcactcagtgctctgcctggatga

SEQ ID NO: 993113 - DNA, 120 bp, Artificial Sequence
  ENSG00000262188_4 (sequence is synthesized)
gccctgtacccccatgacgaccccactgtggacattcttatgtccattttacagatgacgaaactgagacgggcggatgcagtgttgtgcacaagccacacagctggaaacgtgggctgg

SEQ ID NO: 993114 - DNA, 120 bp, Artificial Sequence
  ENSG00000262188_5 (sequence is synthesized)
ctggggactggaacccaattacccgctttggctctataatcctctttttatttttatttaatttttttatgagatggagtgtagctctgtcgcacaggctggagtgcagtgacacgatct

SEQ ID NO: 993115 - DNA, 120 bp, Artificial Sequence
  ENSG00000262188_6 (sequence is synthesized)
tgcccggccctttaatcctctttttaaaacaccttaggatatgatatatccagaataggcaaatccatagacacagaatgcagatccgtgtgccagtggctagggggtgaagaggaactg

SEQ ID NO: 993116 - DNA, 120 bp, Artificial Sequence
  ENSG00000262188_7 (sequence is synthesized)
ctgaatgagcgggcgtttcctcctggggtgaccagcatgttctgcgactgcagatgatggctgtgccaccttgtgagggtactaaatgccgccgaatggtacaccttaaactggttgatt

SEQ ID NO: 993117 - DNA, 120 bp, Artificial Sequence
  ENSG00000262188_8 (sequence is synthesized)
ggttgattttatgttatatgaacttcccttccatacattatttgaggctgggcacggtggctcacacctgttatcccaacacttttggaggccgagatgggtggatcatctgaggtcagg

SEQ ID NO: 993118 - DNA, 120 bp, Artificial Sequence
  ENSG00000262188_9 (sequence is synthesized)
gaatccgggaggcagagattgcagtgggcctagatcgtgccattgtactcctgcctaggtgacagagcaagactccgcctcaaaaataaaaaataaaaaataaattatttggaaaaaaaa

SEQ ID NO: 993119 - DNA, 120 bp, Artificial Sequence
  ENSG00000262188_10 (sequence is synthesized)
gttgggcctgggaggtgccactttacagacaggggcaccaaggggcagggtggcaggaggcccaccggacgttccccatgaagtagcagtaccagcatccacacccagcaggcaccacgc

SEQ ID NO: 993120 - DNA, 120 bp, Artificial Sequence
  ENSG00000262188_11 (sequence is synthesized)
tggcccgcagcctccctgccagcacgcctggcttcccggcctcggaacttgatctgctccctcttccggacactggggctcctgccaagtcctgggctgggcagcaactgctgaacattc

SEQ ID NO: 993121 - DNA, 120 bp, Artificial Sequence
  ENSG00000262188_12 (sequence is synthesized)
ggctgaggggaccgtggcggcaggtggcacccagagcagcactctcctggggcccaggctgttgggccagaggcaggactgtgaggcctagtgtagggcctcctgccagtggccggcacc

SEQ ID NO: 993122 - DNA, 120 bp, Artificial Sequence
  ENSG00000262188_13 (sequence is synthesized)
tacttgtggggctgggggttcccccagcaggttgggctccccacctgacacactcacagaccttgtgccttggagagccagtgttcccggggccacatagctatgccgcccaggggctgg

SEQ ID NO: 993123 - DNA, 120 bp, Artificial Sequence
  ENSG00000262188_14 (sequence is synthesized)
gcctgtcccagctctggtcccccggccccaggtcctggacgctggctccgcgcagcagcaggcggcctccggaggacacgatgtgactggctgccgctacgtcgcactcagatgagtctg

SEQ ID NO: 993124 - DNA, 120 bp, Artificial Sequence
  ENSG00000262188_15 (sequence is synthesized)
cgccggatcgacctgctgccgagtcctgccggacaggcacaggcagggagtgaaaattatctacccctttttatttcttaataactgaatgaaaataaacattggtggtttgacaaataa

SEQ ID NO: 993125 - DNA, 120 bp, Artificial Sequence
  ENSG00000220702_0 (sequence is synthesized)
ggtggagacaactttgatctcaaaggaattcatctcaaacagtgaaaccagaatcccaagaaagatgtgggagggattttccgagaaaacctccccacgttccgaagacagagacctgtc

SEQ ID NO: 993126 - DNA, 120 bp, Artificial Sequence
  ENSG00000220702_1 (sequence is synthesized)
acacagggccaaggaaaaatcatggagctgggagcaggaggcctggaaatgcaattataaccttttgcctcccctgcacctgaggcttgctacaggccaagtccatctagctatgtgctt

SEQ ID NO: 993127 - DNA, 120 bp, Artificial Sequence
  ENSG00000220702_2 (sequence is synthesized)
tccagagtggaactctcacccaccaggaggttgcctcgggagataacagtccatcgacgatccaaaggatgtccgtgacgaaactctctcccacctggagagttttcagctgctttacaa

SEQ ID NO: 993128 - DNA, 120 bp, Artificial Sequence
  ENSG00000220702_3 (sequence is synthesized)
cctagtcctgcccatgaaggtgccagcagtcaccagttttaccaccgcctggtagataaagcaccaagttagcgcacagaccccccaaacctgctcgcttcctccctgtgtgccgttcat

SEQ ID NO: 993129 - DNA, 120 bp, Artificial Sequence
  ENSG00000220702_4 (sequence is synthesized)
gttaggcccccttcaaaaagcacttgccttctgctccaaaagtcaagccttaaggcaggaagcctgtacttcttcccctaagctagcttgggaataaaaagtgactttctttatattgga

SEQ ID NO: 993130 - DNA, 120 bp, Artificial Sequence
  ENSG00000233849_0 (sequence is synthesized)
gctcagagaagaacagtgtagaaacccgcgctgtgtgaagcgaggttgggcgcaagagaagcaggcatgacctggccaacggggaggccggaagtcctcgcctttctggtctttcacgtt

SEQ ID NO: 993131 - DNA, 120 bp, Artificial Sequence
  ENSG00000233849_1 (sequence is synthesized)
gcactcttcaccatggactccaccgcctcctgcacccggagctgctgcagctcagccatggcgaccccgcgctgccccgcggcgctccgcgccggcgcccatatggaatcggcgtacggg

SEQ ID NO: 993132 - DNA, 120 bp, Artificial Sequence
  ENSG00000180769_0 (sequence is synthesized)
tgccttccagacgcgcctcttccccgccccgcgcccctctctcctctcccacccctgcccctctccgcggcgctcaccctcctcagtcccagtttctgaaaggactcagctgagaaagga

SEQ ID NO: 993133 - DNA, 120 bp, Artificial Sequence
  ENSG00000180769_1 (sequence is synthesized)
caactgggttccgctttccttaaccctacaccctttagctggatgctgtcagaggcgatggagaaacgcaaaggctactagacgcaacaatagaattaccatattgtttttcctggtttg

SEQ ID NO: 993134 - DNA, 120 bp, Artificial Sequence
  ENSG00000180769_2 (sequence is synthesized)
aaaggaccagatggaaagaaactgggcaagccaatgaaagtctctggggatcatgggaattgagtgtctatgaaaaccatattccagacaagaatatagtctaaggtttatgggactccc

SEQ ID NO: 993135 - DNA, 120 bp, Artificial Sequence
  ENSG00000180769_3 (sequence is synthesized)
cagtactctccatgtagagtctaatgtagaatccaggagtgcacagaaaagtcactggatgacacagcaagaggcaacattttggaagcagagggcaactctcactggaaaccaaatctc

SEQ ID NO: 993136 - DNA, 120 bp, Artificial Sequence
  ENSG00000180769_4 (sequence is synthesized)
ctggcaccttgatcttggattttacagcctccagaactgatagctgggaggcattacatagtcatgtgcgaggtcaaaactgagtcaccaccacaaccaagttccagctggcaagaagag

SEQ ID NO: 993137 - DNA, 120 bp, Artificial Sequence
  ENSG00000180769_5 (sequence is synthesized)
gaaaaataacacagaggagttatgaccagtgttgtaaggatctggcctagaaatggcatgcatctcttccactaatatcctattggtaaaaatgtagtcacatgggcacaccacctatct

SEQ ID NO: 993138 - DNA, 120 bp, Artificial Sequence
  ENSG00000180769_6 (sequence is synthesized)
gcatggaaggctgggaaatgttgatcggtagggcagccatatgtgtaggaaggagaaaacagaatttggtggatacctagtagtctctgccatacccttgaccagaaatttttcttctaa

SEQ ID NO: 993139 - DNA, 120 bp, Artificial Sequence
  ENSG00000180769_7 (sequence is synthesized)
agaatttaattctaaaagttatagacattcccaaagatatacctgcaagcatcacagctttgtgtataattgcaaaagttgaaatcaacatgaatgcccaaaatagtgaattatttaaac

SEQ ID NO: 993140 - DNA, 120 bp, Artificial Sequence
  ENSG00000180769_8 (sequence is synthesized)
agattattacccatattatgaagaaatactctgcaactcttaaaaataaatgtaatgtgccaggcgcaatgggatatgcctgcaggcccagctacacgggaggccaaggcaggaggatca

SEQ ID NO: 993141 - DNA, 120 bp, Artificial Sequence
  ENSG00000180769_9 (sequence is synthesized)
cttgaaatcaagagttcaagtctagcctagacaacatagtgagacttggtctctaaaaaagaaaaaaaaaaataaaactgatgtaatgaatatataattacaacaaaagaggtctaacac

SEQ ID NO: 993142 - DNA, 120 bp, Artificial Sequence
  ENSG00000180769_10 (sequence is synthesized)
tatagtagaaaagtttggggcactcatcccattcataattattttacatttaaattactgttcctacttaagtggtgagcttggtaaccattttcatatcaggtgatactgctgcagtaa

SEQ ID NO: 993143 - DNA, 120 bp, Artificial Sequence
  ENSG00000180769_11 (sequence is synthesized)
tcatagctgtttgaatcaggaataatcccaatcacattttctcttaatcgtttattatactgggcattggggttgcaagataatgcacagtccgagctcaatacatgtcttcatgtacct

SEQ ID NO: 993144 - DNA, 120 bp, Artificial Sequence
  ENSG00000180769_12 (sequence is synthesized)
gtatgtaaatcccacttttattctaaaattctttgaatattttgtttcttggaacccaatgatcctaagaaaattatgtacttttacctgaaaattaaaaccaatatttataaaaagtgt

SEQ ID NO: 993145 - DNA, 120 bp, Artificial Sequence
  ENSG00000180769_13 (sequence is synthesized)
tatgcagtatgataccacttttaaaaaaagataaatttatagaaaaaagtttatatgactgacaacaatgtctctgagtggtaggattacagttaatttttattttcttcattctactta

SEQ ID NO: 993146 - DNA, 120 bp, Artificial Sequence
  ENSG00000180769_14 (sequence is synthesized)
tattttctgaactttctacaatgaacatgttttatttttacttttgttaaaataaataacatttaatttgacggaaaattctaaaaatcaacatttggtaacttaaatattcattggcac

SEQ ID NO: 993147 - DNA, 120 bp, Artificial Sequence
  ENSG00000180769_15 (sequence is synthesized)
gcacatgattctgtgcctgtttctgggggtcattcccatgagaagagcaggtagaacttatgagaatagagcagtcgaaatattataggtttcatattttacggctttattgaaaacatt

SEQ ID NO: 993148 - DNA, 120 bp, Artificial Sequence
  ENSG00000180769_16 (sequence is synthesized)
gatatattgaatattcataaattttaatttaactttcttttataatccttaatgtgaggctaaggtataaggagaaaggagattggtaaggaagtgtgatacatattgaatcaggtgtca

SEQ ID NO: 993149 - DNA, 120 bp, Artificial Sequence
  ENSG00000180769_17 (sequence is synthesized)
aggtaccatttgtgcctggatctgaccaatagaccaaggtaaaaatctcaaagaatgagacttgtaatgagaatgccacaaacttgaataccttatgcacaaaacacaaacattgttatg

SEQ ID NO: 993150 - DNA, 120 bp, Artificial Sequence
  ENSG00000180769_18 (sequence is synthesized)
cataatgtacatgaaccctgaaacaaagataatgatttggaccacccaactgaagtggcatgttatgtttttggcatgaacaaaagaaacaagagagaaaaaaatcaaaataattaaaat

SEQ ID NO: 993151 - DNA, 120 bp, Artificial Sequence
  ENSG00000180769_19 (sequence is synthesized)
aaattgttagagaaaagttactttaaaaatagctataacgctttgcaatttcagtaacagttctgcctctgatgcaatgtaaaacatgtattagacattcaggctccacaataaatttta

SEQ ID NO: 993152 - DNA, 120 bp, Artificial Sequence
  ENSG00000180769_20 (sequence is synthesized)
atgagcactacaaatttagaatatataaaaatatcagtaacctatgaattcatcaacataactcacttttcagttaagttaggctgagttgaaattctactaagttttcccatattcttg

SEQ ID NO: 993153 - DNA, 120 bp, Artificial Sequence
  ENSG00000180769_21 (sequence is synthesized)
ataaaggctaaatttgaaataatttatttagatgactaattggcaatttgatagtagttacattttatgtaacacttgatataataacccaaattaattagctcaatattatcttctgtg

SEQ ID NO: 993154 - DNA, 120 bp, Artificial Sequence
  ENSG00000180769_22 (sequence is synthesized)
gtttattgatccaaaagtacatatttgttatgtaaacttatactatgtaaacttgaattagttttttgcttccttgaattaataaagcccattaatgcaaatctaagccttcatagactt

SEQ ID NO: 993155 - DNA, 120 bp, Artificial Sequence
  ENSG00000180769_23 (sequence is synthesized)
ttccaatccttagttaaatattaaaaactgagtattgtagttatttgctaggtataaaaggtgactcagagtagagagtaagatgtcagcaaatagacaataagatgtcagcaaaagtgc

SEQ ID NO: 993156 - DNA, 120 bp, Artificial Sequence
  ENSG00000180769_24 (sequence is synthesized)
ctcaaattttaactgcgtcaagttaagggcattgtaaatactgtagttttatgtagcttgcaacttctactgaaatgagtttaatcatgtctttcacatagctgaagtttgtgtcaagat

SEQ ID NO: 993157 - DNA, 120 bp, Artificial Sequence
  ENSG00000180769_25 (sequence is synthesized)
ttaagctgattttctcattcttatcaaagtctcacctgggggtagggaggggtaggcctacctcccacctctatactatcattttaggaacagacaggcataaatctgttcatatggtag

SEQ ID NO: 993158 - DNA, 120 bp, Artificial Sequence
  ENSG00000180769_26 (sequence is synthesized)
aacacatgatgttagagtatattttgttgaatgctatggaatattaatataattaattctaaaatatcacctaaaatatgtcaactgaagatctgactgtactaaatatgaaaaataaag

SEQ ID NO: 993159 - DNA, 120 bp, Artificial Sequence
  ENSG00000180769_27 (sequence is synthesized)
gcttcttaaatcccgccgtaactgtgaatgtttgcgatgccaccacatccccagtacaagagaactggagcatctctggctccttccataatcgaagggcttccagcgtagggcgtaggg

SEQ ID NO: 993160 - DNA, 120 bp, Artificial Sequence
  ENSG00000180769_28 (sequence is synthesized)
ggagaggcccgaagccctggagacagcgcccgagggatggaggccgcgctcggctgcgctcaggtccgggtggctccgggagctgagaccccgcaggatgcagcgggggggggccagggc

SEQ ID NO: 993161 - DNA, 63 bp, Artificial Sequence
  ENSG00000180769_29 (sequence is synthesized)
ggggtcgtggcatgttgtccaggctggatttgaactcctgggcttatgcaatcttctgatccc

SEQ ID NO: 993162 - DNA, 120 bp, Artificial Sequence
  ENSG00000180769_30 (sequence is synthesized)
ctggatttgaactcctgggcttatgcaatcttctgatcccagcctcttgggtagctgggactacaggcatgcaccataatacctggccaaaaggacacagcaagaggcaacattttggaa

SEQ ID NO: 993163 - DNA, 80 bp, Artificial Sequence
  ENSG00000180769_31 (sequence is synthesized)
gggacaggcccaggagacgggaccgcggcgggccggggctccgcgccgagggcgcacgggctacggggaaggggcgaccg

SEQ ID NO: 993164 - DNA, 120 bp, Artificial Sequence
  ENSG00000180769_32 (sequence is synthesized)
cgcgggccgggggccggggcccgagctcgattctgcggccgcgaggtatgggaaccggtccgccgggccaggcagcggtgctaggcagcaggggcagcgacgccgccgcctttcccttct

SEQ ID NO: 993165 - DNA, 120 bp, Artificial Sequence
  ENSG00000180769_33 (sequence is synthesized)
ttctcctgcccccgtccctgctccgccgcgtcctcgtcctcgctgggtccccgccgccgccgcctcagcctcggcgctcctcgggtttcttctctccatcaaggccgggccgacccgcag

SEQ ID NO: 993166 - DNA, 120 bp, Artificial Sequence
  ENSG00000180769_34 (sequence is synthesized)
ggaccatcccggaaagtgaggggttgttgccgtttcccgcagctgttggtggccatctttaatcctcctcctcctcctgctttctccacctcccgctggctgtctgactgactgactgga

SEQ ID NO: 993167 - DNA, 120 bp, Artificial Sequence
  ENSG00000180769_35 (sequence is synthesized)
tcctcctctttcccctcctgctcctcctactgagccggccgcagaaattgcagccgctcagcttctaccccctcctgcctttccttcctctttccttacttccttcccttccctcggctt

SEQ ID NO: 993168 - DNA, 120 bp, Artificial Sequence
  ENSG00000180769_36 (sequence is synthesized)
atcttggattttacagcctccagaactttctcacacttccttttgaaagctattaaaaatctatggcagaaaaatggtcaaggaataggaactacaacttcataaatgaggaaccagaaa

SEQ ID NO: 993169 - DNA, 120 bp, Artificial Sequence
  ENSG00000180769_37 (sequence is synthesized)
ggccattcattgtcacaaggcttagccagtccctgacacccaatacgctaccaataagccaccatcatcttttcctggggttttgcattcactggttgtgttacctagtattgcctatga

SEQ ID NO: 993170 - DNA, 120 bp, Artificial Sequence
  ENSG00000180769_38 (sequence is synthesized)
taatcgttagtcatcattaaggaactaagtattatgtactccttgccttggaatactctatttggagttgtgcaagtgagaagccccaaatttataagtcaatatcctcattcagagctg

SEQ ID NO: 993171 - DNA, 120 bp, Artificial Sequence
  ENSG00000180769_39 (sequence is synthesized)
ccacccttgtgactttaaattggagctcctgttttacaccactgtgtatctctatttctggccatcacttttttaatacacatgactttcctctcccagtttccagacagggctctttga

SEQ ID NO: 993172 - DNA, 120 bp, Artificial Sequence
  ENSG00000180769_40 (sequence is synthesized)
atgtatgtcaaactcagttactccagagaaaaaactgcctttcccttcaaagtgctccctcgaggttccttagtgagttttgtaccttctattttaaaagaggctttcccaaactgtgcc

SEQ ID NO: 993173 - DNA, 120 bp, Artificial Sequence
  ENSG00000180769_41 (sequence is synthesized)
atttatcaatttattgcccatcagtctccacctaccattctctgctctgctttgtgaactgaagagggaccctgtaaacatttatttattgccagctggtacaacattagactctgtcaa

SEQ ID NO: 993174 - DNA, 120 bp, Artificial Sequence
  ENSG00000180769_42 (sequence is synthesized)
gaaagggtgctggagggccacttcaagtccactgcaagagaaaggggctgctcctgatggccaggtttgctgtttccttcagcaaggctgctggcggatgtgcatgtcagagctctcata

SEQ ID NO: 993175 - DNA, 120 bp, Artificial Sequence
  ENSG00000180769_43 (sequence is synthesized)
gctctcacctcagtgacacttgacaaccagcatagggcccaccaaaccctccaagaagtttggtcaccaggtgagccacttcctgtgaacccctccagcatataccttctgataagtttc

SEQ ID NO: 993176 - DNA, 120 bp, Artificial Sequence
  ENSG00000180769_44 (sequence is synthesized)
tatgctgttggcagtctggtgttcctatagcaagcacactctccccaacaaggcatgaatctacattggttgaaggtgggacagttggtttcttctacattcttggttccatcattgttc

SEQ ID NO: 993177 - DNA, 120 bp, Artificial Sequence
  ENSG00000180769_45 (sequence is synthesized)
attcttcctcagtcccagaagtagctgctttttgcatttgttatctctgtattgattagagttcctttttattatgattaatgtaatactcctttatattaaatttttccttttcaaata

SEQ ID NO: 993178 - DNA, 120 bp, Artificial Sequence
  ENSG00000180769_46 (sequence is synthesized)
actggtgtggatcaaaggcatcctgaatctggtatgatctatctcactgttttcagatactgtagtaagaggcataaactttatgtaattttagtagatttgcagttgcaaaatatttga

SEQ ID NO: 993179 - DNA, 120 bp, Artificial Sequence
  ENSG00000180769_47 (sequence is synthesized)
gatacatttatggcaggaaaggttgaagttagaaaattatgcaattgagtaacattcttatgtaaattgtgaaaagactaccattatcccgctttagcagcataatatctttgttgagct

SEQ ID NO: 993180 - DNA, 120 bp, Artificial Sequence
  ENSG00000180769_48 (sequence is synthesized)
ctcatgactatcctgtcctgtaagagtaagcttagagaatcactgaaaccaatgaacaaaatgttgcttaatggaacgattattgagtttataaaaatatatttggttagagaataatgt

SEQ ID NO: 993181 - DNA, 120 bp, Artificial Sequence
  ENSG00000180769_49 (sequence is synthesized)
tttgtcttcagactttcagttatgggtgacccaacttctctaaaatcatttttccatactatttctgtttgtcaatttgattttctttgtttctaccattcatatttaaaatacagcatt

SEQ ID NO: 993182 - DNA, 120 bp, Artificial Sequence
  ENSG00000180769_50 (sequence is synthesized)
atctctaatttattccagcattattaaatatctactatttgcatggcactggctggggaatggaagagaatacatcttttctgctctcaaggagcaaaaaaatgtagctatagaaaaatt

SEQ ID NO: 993183 - DNA, 120 bp, Artificial Sequence
  ENSG00000180769_51 (sequence is synthesized)
gaaaaattgctcaatgtaaataactaatacttttaataatgtgactaatgttcagaaataatgtatcatcaaaatttcttacagttcattagtttgtaaatttaatgtaaatgttgagaa

SEQ ID NO: 993184 - DNA, 120 bp, Artificial Sequence
  ENSG00000180769_52 (sequence is synthesized)
ttgtcataatgtaaagccacgttcttttactttaatctctggggaaaaaaatcacaaattattattattttaagacaaggtgtgcgacagttgaataaaaagttgagtgcattaatttct

SEQ ID NO: 993185 - DNA, 120 bp, Artificial Sequence
  ENSG00000180769_53 (sequence is synthesized)
ttaattaaatctaagctataattcaaatgaactttggaaaacactaactttagtctgattagttattagtagttaactgagtatctacaaaaaccatactttcattcccaaaactgacag

SEQ ID NO: 993186 - DNA, 120 bp, Artificial Sequence
  ENSG00000180769_54 (sequence is synthesized)
tcattctcctttgtcccatgatagaaatatgaagattattccacaataccctccgtagacagaaaactttataaacccactaatgccaaagggcaaggtgataatcccctaacggaaaaa

SEQ ID NO: 993187 - DNA, 120 bp, Artificial Sequence
  ENSG00000180769_55 (sequence is synthesized)
caggaagccatgctgttcttttcttgaatgccacctttgccgtcaccatagtgctgtgatctagggtaaggcagtttgttgttgttgttgttgttgttttaaataacagaacattcagat

SEQ ID NO: 993188 - DNA, 120 bp, Artificial Sequence
  ENSG00000180769_56 (sequence is synthesized)
aaatatcctaaagcagtataaaattggaagactagtgtctctactttaattaattgcacatgcttctatgttctacataaatcaaagccttcctttaagacccgttcttaccttcattca

SEQ ID NO: 993189 - DNA, 120 bp, Artificial Sequence
  ENSG00000180769_57 (sequence is synthesized)
cgatttgctctcctctcacagtcttctggcctcggtccccttgtccagtattctcctttcttgtgtcctgacctggggagtctccagctccctccaagtgacagagaatcccgagtgctg

SEQ ID NO: 993190 - DNA, 120 bp, Artificial Sequence
  ENSG00000180769_58 (sequence is synthesized)
agactcatcaacctccccagctcaagtgatcctcccacctcagccccacaagtagctgggactacatgcacatgccatcatgcccatctagtctttgtattttttgtagagacagggttt

SEQ ID NO: 993191 - DNA, 120 bp, Artificial Sequence
  ENSG00000180769_59 (sequence is synthesized)
ggcttcccaaagtgctgggattataggccattgctcccggcctcatgataaaactttaagtaattgcttcttatggatgagcaaagaaattggaatcttgatgcagaatgtacttctggt

SEQ ID NO: 993192 - DNA, 120 bp, Artificial Sequence
  ENSG00000180769_60 (sequence is synthesized)
gagttgagaggattgacttcagttttgaaagaagttttactgtggataaaatgctatcaaataacctcacatgcttcagataaatcttttgtgaaagaaagattcaatagatgcataaac

SEQ ID NO: 993193 - DNA, 120 bp, Artificial Sequence
  ENSG00000180769_61 (sequence is synthesized)
ttcattttttttaattttaagaaattgctttagccaccccaaccttcagcaatcactaccctgatcaatcagcagccatcaacatcaaggctaaaccctccattggcaaaaagattatga

SEQ ID NO: 993194 - DNA, 120 bp, Artificial Sequence
  ENSG00000180769_62 (sequence is synthesized)
tcgctgaaggctcagatgattattagagtttttaatttaattttttattagcaataaaatatttttaaatttaaggaatgtacatttttttaaagacatagtgctatttcatacttagta

SEQ ID NO: 993195 - DNA, 120 bp, Artificial Sequence
  ENSG00000180769_63 (sequence is synthesized)
ctctacagtaatgtaaacacaacttttcaatgtactggaaaacaaaacaaacaaagtctcattttattgtgatatttgctttattgtggtggtcttgaaaaaaacccataatatttttgc

SEQ ID NO: 993196 - DNA, 120 bp, Artificial Sequence
  ENSG00000180769_64 (sequence is synthesized)
aggaccagatggaaagaaactgggcaagccaatgaaagtctctggggatcatgggaattgagtgtctatgaaaaccatattccagacaagaatatagtctaaggttgagagaggggagga

SEQ ID NO: 993197 - DNA, 120 bp, Artificial Sequence
  ENSG00000180769_65 (sequence is synthesized)
ggggaggaagctgcagaaggaaagctggaagctagcagaggttggttcatggggttgaaggaaagaagccatcttcataacataaaagtgccaggtgaagcagcaagtgctgatgtagaa

SEQ ID NO: 993198 - DNA, 120 bp, Artificial Sequence
  ENSG00000180769_66 (sequence is synthesized)
aagttatccagaagatctagctgacatcattgatgcaggtgactacataaacaacaaattttcagtgtagacgaaacagccatctattggaagaagttgtcatctaagactttcgcagct

SEQ ID NO: 993199 - DNA, 120 bp, Artificial Sequence
  ENSG00000180769_67 (sequence is synthesized)
agagaagagaagtcaatggctagcttcaaagtttccaaggacagactgactctcttgttatgggctaatgtagctggtgacattaagtgtaagtcaatgttcatttaccattccgaaaat

SEQ ID NO: 993200 - DNA, 120 bp, Artificial Sequence
  ENSG00000180769_68 (sequence is synthesized)
tctagggccctttataactgtgctaaatctattctgcctgtgctctatcaatggaacaataaagtctggatgatagcatgtctgtttacaacataggttactgaatattttaagcccact

SEQ ID NO: 993201 - DNA, 120 bp, Artificial Sequence
  ENSG00000180769_69 (sequence is synthesized)
cttgagaactactgctcaggaaaaaggattttcagaatattattgctcattgacaatgcacctgtcacccaagagctctgatggagaagtacaggggattaacattgttttcatgcctgc

SEQ ID NO: 993202 - DNA, 120 bp, Artificial Sequence
  ENSG00000180769_70 (sequence is synthesized)
taacacatcattctgtagtccatggatcaaggagtcattttgactttcaagtcttattatataagagatactgtttgtaaggctatagctgttacagacactgattcctctgatggatct

SEQ ID NO: 993203 - DNA, 120 bp, Artificial Sequence
  ENSG00000180769_71 (sequence is synthesized)
gggcaaagtaaattgataaccttctggaaataaatcaccattccagataccattaagaacattcattattcattgggtggtggtcaaaatatcaacattaacaagagtttgaaagaagtt

SEQ ID NO: 993204 - DNA, 120 bp, Artificial Sequence
  ENSG00000180769_72 (sequence is synthesized)
gattccaaccctcatgggcgactttgcggggttcaagatttcagtcaaggaaataactgcagatgtggtggaaataccaagagagaattcaagatgtgactgaactgctgcaacctaatg

SEQ ID NO: 993205 - DNA, 120 bp, Artificial Sequence
  ENSG00000180769_73 (sequence is synthesized)
agttctggcagtaaagacaaactgagtcagcagttaggagtggactcccttaaacaacagagttagagtggggaagtggtcataacatcgctgtaatcacaaacttgtttttcctaacac

SEQ ID NO: 993206 - DNA, 120 bp, Artificial Sequence
  ENSG00000263586_0 (sequence is synthesized)
tgcccaagccacaccctgtaagagcctggaaccacatatcatcctatggacaactggcctgaatctccttggggactccaagtggtaagacaggatcttgctacattgcccaagctaatc

SEQ ID NO: 993207 - DNA, 86 bp, Artificial Sequence
  ENSG00000263586_1 (sequence is synthesized)
ccgtggcccctagatgcttcaaaaggatgtgacattcacttaaagaggaattctacagttttttgagacagggtctccctctgtca

SEQ ID NO: 993208 - DNA, 120 bp, Artificial Sequence
  ENSG00000263586_2 (sequence is synthesized)
aagaggaattctacagttttttgagacagggtctccctctgtcattcagactgtgcagtggcatgatcacagctcattgcaccctctacctccaaggctcaagcaatcctcccacctcag

SEQ ID NO: 993209 - DNA, 120 bp, Artificial Sequence
  ENSG00000263586_3 (sequence is synthesized)
aaactcctgagctcaagcgaccctcctgcctgggcctcccaaagcatcgggattacaagcaggagccaccgtgctcagccttcaaaaagaagaaaaaataataaaggcaagtgaaggtat

SEQ ID NO: 993210 - DNA, 120 bp, Artificial Sequence
  ENSG00000263586_4 (sequence is synthesized)
gaagaaggaggaggagaagaaggagaagaaaagaattgagaactcttgctaaccagccactccgggtgaaattttgacccctttggtcttgcccatcactcagagccatttctgtggctt

SEQ ID NO: 993211 - DNA, 120 bp, Artificial Sequence
  ENSG00000263586_5 (sequence is synthesized)
gcaaccaggaactcccaagtgacatggaaatattactggatttaattgagtccaccctcacctagcctcaggggctcttctaccactcagatgggcattctcctccatagatcatctttt

SEQ ID NO: 993212 - DNA, 120 bp, Artificial Sequence
  ENSG00000263585_0 (sequence is synthesized)
acattgacattttaatcagtaaggcagatgccctccaagatgtgggcgggccttgtctaatcagttgaaggcctccactattccacccacagtaaccaccctcccacacaggcagggcct

SEQ ID NO: 993213 - DNA, 120 bp, Artificial Sequence
  ENSG00000263585_1 (sequence is synthesized)
ctcccagggaggtcaggagcaggaggtggtggccacagaagttcaccagcagcccaaggagccctttccccaaatgtccatgggatctgcgtgcttggcagccaagaggggctgtggccc

SEQ ID NO: 993214 - DNA, 120 bp, Artificial Sequence
  ENSG00000263585_2 (sequence is synthesized)
ttcacgctggacttgggatgcctggaccctctggcccttctcacacgggaaggagaggttgaggttggggaatccacccctgttctgggctgggaagcacttgcagaccacagagatttc

SEQ ID NO: 993215 - DNA, 120 bp, Artificial Sequence
  ENSG00000278657_0 (sequence is synthesized)
tggcctccttacccccagtggcagaagggaggaagggaggtcccctgtggcctcccatccttgtgctcccattagggtcagcatgaagcaggaatgaggctgtctatatcatcatggcat

SEQ ID NO: 993216 - DNA, 120 bp, Artificial Sequence
  ENSG00000278657_1 (sequence is synthesized)
tcccaacactaaactctgtgcccaggagaagttctgcaggctgtacaggaagcatgaattggaggcctcaggaaacttacaatcatggaggaaggacgaggggagcaagtacatcttgat

SEQ ID NO: 993217 - DNA, 120 bp, Artificial Sequence
  ENSG00000278657_2 (sequence is synthesized)
atggcagagcaggagagagagagaaggggaaatactacgcacttttaaacaaccagaactcacaagaactcactcatgatagtgaatcttaagaacagcaagaaagaaatctgcccccac

SEQ ID NO: 993218 - DNA, 120 bp, Artificial Sequence
  ENSG00000278657_3 (sequence is synthesized)
aagccatatcaattcctcaataccagggtcaggcttccctgggaaccaagtccatcatggatcaggacaggaccaggaacacagcacccactgtgtctgaccaaagagcctcaactgcca

SEQ ID NO: 993219 - DNA, 120 bp, Artificial Sequence
  ENSG00000278657_4 (sequence is synthesized)
gacgtctgtccatccacaccattcaattagcacctactatgtgccagccttaggtctaggggctcaagaaacagggtggacaagacaggaagtgtccctgtcctcatggaccagacacca

SEQ ID NO: 993220 - DNA, 120 bp, Artificial Sequence
  ENSG00000278657_5 (sequence is synthesized)
tctggtggaagagatgagacaattgagtaataatatcaatacaataagatgtcatcacttagtgaggagaggagaggagagctcagtaatggtggtagaggagccatcagagggttggac

SEQ ID NO: 993221 - DNA, 120 bp, Artificial Sequence
  ENSG00000273188_0 (sequence is synthesized)
gcatcacagctccccacagactctcagaaaccaggagctcaggccgggggcccaggagcctgagggaaggaagaaaacagccaggcgcctgcagcaccagaggcacgcaccggccaagac

SEQ ID NO: 993222 - DNA, 120 bp, Artificial Sequence
  ENSG00000273188_1 (sequence is synthesized)
ccacagagcatcggcgagacctgcgcggagcccctcgaggcggggccagggaccagcaggctgtcctgagactggccacaggccctgctgcaccatgtggctcttcctgaatgttctcag

SEQ ID NO: 993223 - DNA, 60 bp, Artificial Sequence
  ENSG00000273188_2 (sequence is synthesized)
ctcatgcatgtcctggcggatggatgtgtcaccaggcagaatcattaaaatatcccatgg

SEQ ID NO: 993224 - DNA, 74 bp, Artificial Sequence
  ENSG00000273188_3 (sequence is synthesized)
caaattagccaggcgtggtggtgcactgaacccgagaggctgaggttgcagtgagccgagatcctgtcactgca

SEQ ID NO: 993225 - DNA, 90 bp, Artificial Sequence
  ENSG00000273188_4 (sequence is synthesized)
tggggaggctgaggcaggagaatcactttgaacccgagaggctgaggttgcagtgagccgagatcctgtcactgcactccaagaaaaaaa

SEQ ID NO: 993226 - DNA, 120 bp, Artificial Sequence
  ENSG00000273186_0 (sequence is synthesized)
gggctcagggaccagagcgggattatggaaatcaaaaccaagcttgcagtggaggggagaggtatgggccactttgagaggtgcctcgtgtgggagggggtcagaatggacctcaccatt

SEQ ID NO: 993227 - DNA, 120 bp, Artificial Sequence
  ENSG00000273186_1 (sequence is synthesized)
aggccctgaggcaggaaggtgtttaggagcagaaagaaggaagcctggggcttagcatgtgctcagtacttggccaagaagcctcggcccaggggctgggagtgtgagcgcaggaaagag

SEQ ID NO: 993228 - DNA, 120 bp, Artificial Sequence
  ENSG00000273186_2 (sequence is synthesized)
gttgctggacacggcaggagagaatgggaactgggccctccaagggcagcccttccaggagatgggacatggattccttgtttgtgttctctgctatagccaaatatatgtgcacgtgta

SEQ ID NO: 993229 - DNA, 120 bp, Artificial Sequence
  ENSG00000273183_0 (sequence is synthesized)
aattcaagcagttatatttcaccatgtacagtctggaaagaagagttttctagaatcaaggaagaaaataaaagctctgttagtttgctcctgcatttgctatgcctttctaattaaatg

SEQ ID NO: 993230 - DNA, 120 bp, Artificial Sequence
  ENSG00000273183_1 (sequence is synthesized)
attggaaggacttcattattgactcctgctggccgacatgacactaaaatgatatgcatctcaatctgcatactccaagccaaaacccaacatgccatatgcattgcacatgtccttcca

SEQ ID NO: 993231 - DNA, 120 bp, Artificial Sequence
  ENSG00000273183_2 (sequence is synthesized)
catacccaagatgacgccacagcctacatgctctctcggcacctacatgctctctcggcacctacatgctctctcggcagcctacatgctctctcggcagcctacacgctctcttggcat

SEQ ID NO: 993232 - DNA, 120 bp, Artificial Sequence
  ENSG00000273183_3 (sequence is synthesized)
gtacagcaggttcttcagccgtgcccaggaggcctggggctccgtggtctatctctgagctgggttctagacctcccaccccacttccaccactgcaacttctgttttacatgttggaaa

SEQ ID NO: 993233 - DNA, 120 bp, Artificial Sequence
  ENSG00000273183_4 (sequence is synthesized)
ggggcttcttataatatgccacttaaagaaaaagactgaatttttttaaaataaaaaatatactggcctatgtcattaaaatgaaatatatcccaataaagttgtaaagcaaaaagcaaa

SEQ ID NO: 993234 - DNA, 120 bp, Artificial Sequence
  ENSG00000273181_0 (sequence is synthesized)
tagagtcataaccattcttaataatttgatgggtattcatttcttccctaaatttatatgtctagaactagagctagagtgtatgcctacatacacacacacacacacccatacatatat

SEQ ID NO: 993235 - DNA, 120 bp, Artificial Sequence
  ENSG00000273181_1 (sequence is synthesized)
attcaaacataatatatgtatatccacatgtattcaaacacagaattatgtttagataattatggttatatgctggtatgccagagccagactgcctggcttcggttccaggccctagtt

SEQ ID NO: 993236 - DNA, 120 bp, Artificial Sequence
  ENSG00000273181_2 (sequence is synthesized)
gcctctttatgcctggacttcttcatctttgaaatgggataataataatacttatcccataaagttattgtgagaattaaatgaaataatatatgaaaagcccttagaacaggcattgac

SEQ ID NO: 993237 - DNA, 120 bp, Artificial Sequence
  ENSG00000273181_3 (sequence is synthesized)
acattgtgaaggtaatgtattagctattttgatgattatgcattttgtctgcaacttgatttttatttaacatatgtgggaaagtagacaaacatagccattttcaatgattccataata

SEQ ID NO: 993238 - DNA, 120 bp, Artificial Sequence
  ENSG00000273181_4 (sequence is synthesized)
ttccatagcacgagtataccattgtttatcgaaccatttctctcttgagaaacattgcagattttttttgcagtttctacgattacaaataatgctgcaataaacatctttctacatata

SEQ ID NO: 993239 - DNA, 120 bp, Artificial Sequence
  ENSG00000273180_0 (sequence is synthesized)
tctatatttccccgtgaggatgaactgatggcccattttcatagatccaactgccacctttatgcccaggagtcccaaatctatagctctagttttactcccctgaaatccacacagact

SEQ ID NO: 993240 - DNA, 120 bp, Artificial Sequence
  ENSG00000273180_1 (sequence is synthesized)
ttccaaatgcctgctagacatcatgaggatatcttgctaatataccccccaccaagctcattgtcttttcatccagatttttcctcctgcttctcctccctcccttaatgcctttatcat

SEQ ID NO: 993241 - DNA, 120 bp, Artificial Sequence
  ENSG00000273180_2 (sequence is synthesized)
actcacttcccgaagtttcctttacttttcactctttccccattccccgctacacagacccaggattcatctcttgcctaatatttttcaatttcttcctaatgattttccctaccttgg

SEQ ID NO: 993242 - DNA, 120 bp, Artificial Sequence
  ENSG00000273180_3 (sequence is synthesized)
gtttcagatctccatttttcagggattttttcccctaaattacaaataatattttcctcttgaaatatcttactgatattttgttgcctaatttaacaaataaagccccaaattactccc

SEQ ID NO: 993243 - DNA, 120 bp, Artificial Sequence
  ENSG00000259515_0 (sequence is synthesized)
aaagatttgtcttcttcatctccatatctacaaagtgattctacatttccttggacaacactggagggcccgctcagtcttggcactgacgctggaggccatctccagctccctggcccc

SEQ ID NO: 993244 - DNA, 120 bp, Artificial Sequence
  ENSG00000259515_1 (sequence is synthesized)
tgtggcgagctggcggcttcaggtgtcacaggccggctgctccaggccttcgagggggagctggctcctgtggggggagttggggctcggtgggccgctggggttggagctattcgatgg

SEQ ID NO: 993245 - DNA, 120 bp, Artificial Sequence
  ENSG00000259515_2 (sequence is synthesized)
agttgagtgtttggtggagtccgaatcaggctgtgaacaggaagagggcagggtgagcacccgctgccctagcctggggaggcacgcgtgcccagctggatgcaaatgtttgctcaggga

SEQ ID NO: 993246 - DNA, 120 bp, Artificial Sequence
  ENSG00000259515_3 (sequence is synthesized)
caaattgatgtctaatcccactcaaaaataacatggtaattatcattacaaaagacagcaactctgtagtgaagaaatcagatggggccggacgcagtggctcctgcctgtaatcccagc

SEQ ID NO: 993247 - DNA, 120 bp, Artificial Sequence
  ENSG00000259515_4 (sequence is synthesized)
agcctgggcaacaaagtgagaccctgcctctatattattatgaaaataaaaaaaacaaaaaaattgttgttttgtgaatttcacttaaatttaaaagaacaaacaaggtcatgcagacga

SEQ ID NO: 993248 - DNA, 120 bp, Artificial Sequence
  ENSG00000259515_5 (sequence is synthesized)
tcacttaaatttaaaagaacaaacaaggtcatgcagacgagacaggcactggctgcctcaggacacagtaccctaagagggacaccatgtcctctgtataatgtgacagcctaagacaca

SEQ ID NO: 993249 - DNA, 120 bp, Artificial Sequence
  ENSG00000259517_0 (sequence is synthesized)
gaggagttaagaagggaaagcaatcagtcatttttccaaaggccagtctgcagggctgggactgagcacaggctgaaatcaaggttggactacctctcagcccttctcaagccctccagg

SEQ ID NO: 993250 - DNA, 120 bp, Artificial Sequence
  ENSG00000259517_1 (sequence is synthesized)
cctagcagtctccatctgatcctgtattggaaatgggcatggaagatgccacaacttctcaagctttccctaggaaaaggggtgggtgaacttctggcctgaagaatctgaggatggaag

SEQ ID NO: 993251 - DNA, 120 bp, Artificial Sequence
  ENSG00000259517_2 (sequence is synthesized)
tggagccccagcccactgtcacccatgccctcatctccagactcttcttccagcaactaggcttgcaaagcagggatggtggcttggagcaccagcttccgtgtcaagcagggcaggctg

SEQ ID NO: 993252 - DNA, 120 bp, Artificial Sequence
  ENSG00000259517_3 (sequence is synthesized)
cactcccagcgccctggtgcctctggctctcgaggcttgttcctcatctctagctccctcacagagttgtcctgaggctcacaatgggaacacatcaataaattacctattgcattaaaa

SEQ ID NO: 993253 - DNA, 120 bp, Artificial Sequence
  ENSG00000259517_4 (sequence is synthesized)
tggcagttccttggagaaactaggggtgattctatcataaaaaggggtgggggagagtagatcaggcagacacaatcactgaaggaggagagtacaggagatttagaggaagaagatctg

SEQ ID NO: 993254 - DNA, 77 bp, Artificial Sequence
  ENSG00000259517_5 (sequence is synthesized)
atggaaggtcaactttgctcttctcctgggttctggaaccagaccttcctaacctgctctgctcacctggagcccca

SEQ ID NO: 993255 - DNA, 120 bp, Artificial Sequence
  ENSG00000259518_0 (sequence is synthesized)
caattacctcccaacatgtttgcagcaagtaccctgtcgatggtaggcaagaggaaggtgtgacccacaaagatcaaggaatctaagccggccaaggttaagcatgaatcgaggaaagga

SEQ ID NO: 993256 - DNA, 120 bp, Artificial Sequence
  ENSG00000259518_1 (sequence is synthesized)
aacagaaatcctcttcctagtcctctttcctctgttttctcctctgggtaccagaattgcgacagagtgggacagctcaggcagctgcaggtcttggccagtgctcttcctcacccaggc

SEQ ID NO: 993257 - DNA, 120 bp, Artificial Sequence
  ENSG00000259518_2 (sequence is synthesized)
aactttccaacccagtactcagggagttttgagattttccaagatgccatcgaggaactgaaaagtgctgcccagctgcagtgagggctttttaaaggcagtttcatgtctacaccccac

SEQ ID NO: 993258 - DNA, 120 bp, Artificial Sequence
  ENSG00000259518_3 (sequence is synthesized)
tgagttcagactgtccaatgaagcactgacattgttacacatgcgtgttgtggacaacttgagaaaacacttgtctgcaggaagatgaaattaaaatcaagtgtgatcctaccaccgaaa

SEQ ID NO: 993259 - DNA, 120 bp, Artificial Sequence
  ENSG00000259518_4 (sequence is synthesized)
ccaagtgtgtggtaaaaagttaaatgacactttgtgaaagggatccttaagctacaaaaacattttcccccatcacactaagcacttggttttgtccttgtagttgcaaaaggggctgga

SEQ ID NO: 993260 - DNA, 120 bp, Artificial Sequence
  ENSG00000259518_5 (sequence is synthesized)
gtcatttgatgaattctgaatgttgtaaggctgcttttctggaagggtaaacagggaaccttttagatgccaagaccttttagaataacgacccttcagaggaaactgaagtgcaaagga

SEQ ID NO: 993261 - DNA, 120 bp, Artificial Sequence
  ENSG00000259518_6 (sequence is synthesized)
ttgaagtaaccttccagaaggtacacagctggtgagacaaagcctgtactgggtcccaagcctgcctgactccggactcccacaccccacagtgataccagaatcaccctgaaaatggga

SEQ ID NO: 993262 - DNA, 120 bp, Artificial Sequence
  ENSG00000259518_7 (sequence is synthesized)
aacatgctgcagctgctgtcctgattccagcctctgaccaggagagctggattgaccaggaagccaatgaagctaagtttcagggccccctgtctgcctaaggcctctcccaaggccctg

SEQ ID NO: 993263 - DNA, 120 bp, Artificial Sequence
  ENSG00000259518_8 (sequence is synthesized)
caccaaagtttctatttgtgactttgttttcttagaaaaaactcctcaattatgtgaattcacctctgctgacaagtaactccttagaggacgtgagttttagaaggacaagctccaaaa

SEQ ID NO: 993264 - DNA, 120 bp, Artificial Sequence
  ENSG00000259518_9 (sequence is synthesized)
gcatctctagatagcctccagaaccctgctggtgtgactctttttggaactagttctaaaggctggaaagtccaagaccaagacaccagcagattcagtgtctggtgagagcccactctc

SEQ ID NO: 993265 - DNA, 120 bp, Artificial Sequence
  ENSG00000259518_10 (sequence is synthesized)
tgattcacagaaggcttcttactgtgttgaaaagacatgactcaacccacccatcacttagcagccgtctgggttatcagattgactgtcatagcggcacagtgcttgtgttcaagcaac

SEQ ID NO: 993266 - DNA, 120 bp, Artificial Sequence
  ENSG00000259518_11 (sequence is synthesized)
gtgattccgacatgccagaaagaggctgcaaagtgcttcctgtaagcgaaaagctgaaagttctcaatgtaataaggaaagaaaaagaaatcatatgctgaggttgctaagatctatggt

SEQ ID NO: 993267 - DNA, 120 bp, Artificial Sequence
  ENSG00000259518_12 (sequence is synthesized)
attttttgttaataacattccagttttttatgtagttttggggtagcttattattttcatgtgatttcaaacttggagaaagtttccaagatgagtccaaggagctctcatatgttcctc

SEQ ID NO: 993268 - DNA, 120 bp, Artificial Sequence
  ENSG00000259518_13 (sequence is synthesized)
acccagatccaccaactggccacattttgttccatttgctttattattccttctacctctctctctctaaagtattattatatgttaaatatatcttaatataattatagttatgttaaa

SEQ ID NO: 993269 - DNA, 120 bp, Artificial Sequence
  ENSG00000259518_14 (sequence is synthesized)
atatcttaatataattatgttaaatgatgttatgaatattaaaaattataatttaaataatattctaatataggcagacatttagtttctgaaccatttgggaccatgctgaaaacatca

SEQ ID NO: 993270 - DNA, 120 bp, Artificial Sequence
  ENSG00000259518_15 (sequence is synthesized)
gtttctgaaccatttgggaccatgctgaaaacatcattttcctttacaccattttccttcagtgccagaggggaacagagcagtgagaggttgtggggggatcctgggccaggagcatcc

SEQ ID NO: 993271 - DNA, 120 bp, Artificial Sequence
  ENSG00000259518_16 (sequence is synthesized)
ccatttcctggaataagatagttctcttaaataactacagtaccaacatagaaatcaggaaatttagcattgacactattaactaatgcacagcccataaacaaatcatatcaattgttc

SEQ ID NO: 993272 - DNA, 77 bp, Artificial Sequence
  ENSG00000259518_17 (sequence is synthesized)
aactaatgcacagcccataaacaaatcatatcaattgttccaataatttgtgtttgtttgtttgttttgttttttct

SEQ ID NO: 993273 - DNA, 120 bp, Artificial Sequence
  ENSG00000259518_18 (sequence is synthesized)
cccaggctagagtgaagatttcagctcaatgcagcctggacctcctgggctcaagcgaaccttctggcctcaggccccctgagtagctgggactacagacgtatgccaccatgccctgct

SEQ ID NO: 993274 - DNA, 120 bp, Artificial Sequence
  ENSG00000259518_19 (sequence is synthesized)
aattttttgtatagacagggtttcaccatgttactcaggctgtagaaacattttaatagctgcataatttccatgatgcacaccgtgtttactaattataactcctatggttttgtcaaa

SEQ ID NO: 993275 - DNA, 120 bp, Artificial Sequence
  ENSG00000259518_20 (sequence is synthesized)
tacagaaaaccccaggcagatggactggcctttggggattaagggagatgttccagagcagctcaaatgatctctggtgcctgacttttgaacatccagtttataaacaaatccaaagtg

SEQ ID NO: 993276 - DNA, 120 bp, Artificial Sequence
  ENSG00000259519_0 (sequence is synthesized)
gctgcttggtatgctccatgaactttataatttttaaagcaatacacatttctgaggttatgtaaatcaaatttttgacaaaaacttttctgggaaatgcttctttgattttacaattca

SEQ ID NO: 993277 - DNA, 120 bp, Artificial Sequence
  ENSG00000250632_0 (sequence is synthesized)
actgcacagcagctcccgagctgcagggagagcgggagtgcacgggcaccaaactgcgcctcttgggggtgctgcagcggattttctaacagatattttcctctcctttattctaggatc

SEQ ID NO: 993278 - DNA, 120 bp, Artificial Sequence
  ENSG00000250632_1 (sequence is synthesized)
tggaagaactgtgcctcacctccgtctctctgcctctgactgctccctctactccccaggccttgctgtcagcacctgcaacagagctgtccctgctgtggtctggggaaagttccagcc

SEQ ID NO: 993279 - DNA, 120 bp, Artificial Sequence
  ENSG00000250632_2 (sequence is synthesized)
aggccctctgtggcgcatctatccctggggtggggcatccagggtattgaatctacaaaatgcatccatttcacctccaagtcagctctgtgcacaccaagccgtgtgcaggataggcta

SEQ ID NO: 993280 - DNA, 120 bp, Artificial Sequence
  ENSG00000250632_3 (sequence is synthesized)
ccctagagagcctgggtacccacgcagccttccacgaagccccacctacatggctgctgcaggttctcaccatcctgtgctcaccgggaaggctggcaggtccacaccggaaaccatggg

SEQ ID NO: 993281 - DNA, 120 bp, Artificial Sequence
  ENSG00000250632_4 (sequence is synthesized)
tgagcaagcctcaggggcgtgacaggtgctcaggagagagcaggacacatgcagaacctggagagagccagagagggaccggccacagagaagcccatcgcctgccagcactgacgtgga

SEQ ID NO: 993282 - DNA, 120 bp, Artificial Sequence
  ENSG00000250632_5 (sequence is synthesized)
cgttgggaaaaggtttctgctggtggcccagccctggctgggattcctcactcccacgcctcaagcctgagaatccttccggaaacacaaggctggacctgcacctgccaggtgaccatg

SEQ ID NO: 993283 - DNA, 120 bp, Artificial Sequence
  ENSG00000250632_6 (sequence is synthesized)
gcctcggtgtgggagcaacatggggagacctgggtccctgagtggccatgaccatcgacctggagcaatcagctcaggactgttaggtgggagcagcaatcatccagctccttcaagctg

SEQ ID NO: 993284 - DNA, 120 bp, Artificial Sequence
  ENSG00000250632_7 (sequence is synthesized)
cagcatccaggggtctcttcattccattatggatatagcctaagaaatggtgacagtaaagggtctcatacaacacgtcccatttttattaattttaataaataggagaaattgaatata

SEQ ID NO: 993285 - DNA, 120 bp, Artificial Sequence
  ENSG00000264914_0 (sequence is synthesized)
ctggagggagtcaagaagacactacctcctaattaataggcggtaaatgtctgaggaacagactcctgtcccatttcttcaaacatctggggttccggacacttaggccctctgccagga

SEQ ID NO: 993286 - DNA, 120 bp, Artificial Sequence
  ENSG00000264914_1 (sequence is synthesized)
ctcaggcattgttctgctggaaggagagaaggccaggaggcaaccctcaaaacctgggtgtgtttggccaaggccaagtagagatttaagggtcttcgagtaaagcattcaggattctta

SEQ ID NO: 993287 - DNA, 120 bp, Artificial Sequence
  ENSG00000264914_2 (sequence is synthesized)
tactctgaaagtatcattgaaactgaccgagaagagaatcctcagccagattttccatggagaaccagacctgtctaaaccagtatgagctttcattacagtaaagtaatggcaaaagaa

SEQ ID NO: 993288 - DNA, 120 bp, Artificial Sequence
  ENSG00000250634_0 (sequence is synthesized)
gagatgaagatatatattaggattttaacattctttgaatatccactttgaaaacaggagacatccgcggcaggtggggcttgcaaatgatatttctaatcagatgttcatccagaaagt

SEQ ID NO: 993289 - DNA, 120 bp, Artificial Sequence
  ENSG00000250634_1 (sequence is synthesized)
aattaactttaggaaagtaaaggccctagaggcttctgaaaagatttccttactctcaattctccctgagcattgcttgatatttgcctccccctgagctgtagagcccaaagggaagat

SEQ ID NO: 993290 - DNA, 120 bp, Artificial Sequence
  ENSG00000250634_2 (sequence is synthesized)
gagaagcaagtcctgctgatatggatgcggatcacatttgcgtgactcagagctgtggggacagtggttctttcaactgctccttatgtgaagaatttctccaggattcatcattccatc

SEQ ID NO: 993291 - DNA, 120 bp, Artificial Sequence
  ENSG00000250634_3 (sequence is synthesized)
tggatctgtataaataaagctgaagttctggtcatgaccactccctggatcactcctgcccctgtgttcctggagcctcagagttttgcgtcacatgagctcccaagctcttcctttctc

SEQ ID NO: 993292 - DNA, 120 bp, Artificial Sequence
  ENSG00000250634_4 (sequence is synthesized)
attcatctgctttggttcattcttgttgagactcactataaggaaagcacctcatcctgctacagctgggtacagaactctgatgtcttcataaaagttgctgcctcttgggagctgtga

SEQ ID NO: 993293 - DNA, 120 bp, Artificial Sequence
  ENSG00000250634_5 (sequence is synthesized)
gcattgggatcagccagtatggcacatttgctgctacctcagggcgtgagagcatgctaagctccacatgaaggcctcactttcccacactatctccactgagcactgaagtgatgatgt

SEQ ID NO: 993294 - DNA, 120 bp, Artificial Sequence
  ENSG00000250634_6 (sequence is synthesized)
tgtgtccctgtgtctcaggggtaaatggaggcagcctttttcttttcagggctgacacaaaaagtcaatggggcttggggatgaataacaacaaaggacaggccctcttgcatgaggtca

SEQ ID NO: 993295 - DNA, 120 bp, Artificial Sequence
  ENSG00000250634_7 (sequence is synthesized)
gtccctcctgctcctgccctcaaatgtatatgcaaaactattttccttgttctgtgcatgaggtcactgtctatggtcccattgatatggtttggctatggactgacctaaatctcatct

SEQ ID NO: 993296 - DNA, 120 bp, Artificial Sequence
  ENSG00000250634_8 (sequence is synthesized)
tgaattgtaataatccccatatgtcaagggtggggtcaggtggaggtaatggaatcacagggggtggcttcccccatactattctcatgatagtgaaaaagtctcacgaaatctgatagt

SEQ ID NO: 993297 - DNA, 67 bp, Artificial Sequence
  ENSG00000250634_9 (sequence is synthesized)
aaatctgatagttttatttttgctcctcatttgccttccataatgattgtgagacctccccagccat

SEQ ID NO: 993298 - DNA, 120 bp, Artificial Sequence
  ENSG00000250634_10 (sequence is synthesized)
tctttcctttataaattacccagtgttgggtatatctttattagcagtgtgggaacaggctaatacagtaattggtaccagtagagtgggattctgctgtaaagataccccaaaaatgtg

SEQ ID NO: 993299 - DNA, 120 bp, Artificial Sequence
  ENSG00000250634_11 (sequence is synthesized)
aggcagaagttggaacagtttggaggactcagaagacaggaaaatgtggaaaagtttggagctttatagagactcggagggctcataagccaggaaaatacgggaaagtttggaatttcc

SEQ ID NO: 993300 - DNA, 76 bp, Artificial Sequence
  ENSG00000250634_12 (sequence is synthesized)
aaataaagtccaggttgaggaggtctcagatggagatgaagagcaaaggtaactcttgtcatgctttagcaaaaag

SEQ ID NO: 993301 - DNA, 120 bp, Artificial Sequence
  ENSG00000250634_13 (sequence is synthesized)
gggtgctgttaaaagcattcagttttctgtattcacaaagatatggtttggaatcagaacttatgcttaaaagggaagcagagcataaaaatttagaaaatttgcaggctgatgatgcaa

SEQ ID NO: 993302 - DNA, 68 bp, Artificial Sequence
  ENSG00000250634_14 (sequence is synthesized)
atatggtttggaatcagaacttatgcttaaaagggaagcagagcataaaaatttagaaaatttgcagg

SEQ ID NO: 993303 - DNA, 120 bp, Artificial Sequence
  ENSG00000250634_15 (sequence is synthesized)
aatcaccaagaaaatgcagaaaatgtctccagggtatcacagagagatttgcagcagcccctcccatcacaggcctagaggcctaggaggaaaaaatggtttcgtgggctgggcccatgg

SEQ ID NO: 993304 - DNA, 120 bp, Artificial Sequence
  ENSG00000250634_16 (sequence is synthesized)
tgggctgggcccatggcctcgctgctctgtgcagcctagggacttggtgctctgtgtcccagccactctagctgtggctaaaagaggacaaggtacagctcaggctgtggcttcagaggg

SEQ ID NO: 993305 - DNA, 120 bp, Artificial Sequence
  ENSG00000250634_17 (sequence is synthesized)
tggcagcttccatgtggtgttgagcttgtgggtgcacagaagttaggaattgaggtttggaaacctctgcctagtttcagaagaagtatggaagcacctggatgtccaggcagaagtttg

SEQ ID NO: 993306 - DNA, 120 bp, Artificial Sequence
  ENSG00000250634_18 (sequence is synthesized)
ccgtaggggtagggtcctcatggagaacctctgctagggctgtgtgaaagagcaatgtggggtggggtcccccagacagagtccctacttgggcactgcctagtggagctgtgagaagaa

SEQ ID NO: 993307 - DNA, 120 bp, Artificial Sequence
  ENSG00000250634_19 (sequence is synthesized)
tgcctagtggagctgtgagaagaagcccaccatcccgcagactccagagtggtaggtccaccaatagcttgcaccgtgcacctggaaaagtggcagacactcaatgccagcccatgaaag

SEQ ID NO: 993308 - DNA, 120 bp, Artificial Sequence
  ENSG00000250634_20 (sequence is synthesized)
caggagggaggctgtaccctacaaagccacagaatggagctgcccaagaccatgggaacacacctcttgcatctgtatgacctggatgtgagaaatggagtcaaagaagatcattttgga

SEQ ID NO: 993309 - DNA, 120 bp, Artificial Sequence
  ENSG00000250634_21 (sequence is synthesized)
ccctggatttcaaacttggatggggtctgtagctccttcgttttggccagtttcttccatttggaacagctgtatttgaccaatgacagtaccctcattatatctaggaagcaacttact

SEQ ID NO: 993310 - DNA, 120 bp, Artificial Sequence
  ENSG00000250634_22 (sequence is synthesized)
tttgattttacaggctcataggtggaagagagtttcctggtttcagatgagactttggactgggacttttgggttaatgctgtaatgagttaagactttgggggacagttgggaaggcaa

SEQ ID NO: 993311 - DNA, 120 bp, Artificial Sequence
  ENSG00000250634_23 (sequence is synthesized)
gcaagattgttttttgaaatgtgaaagtgacatgagatttgggagggtctgggggcagaatgatgtggtttgggtgtttcccgacccaaatttcatcttgaattgtaataatccacacat

SEQ ID NO: 993312 - DNA, 120 bp, Artificial Sequence
  ENSG00000250634_24 (sequence is synthesized)
gtcaagaacagggccaggtgaagatacttgaatcatgggggtgatttcctccaaactgttctcatggtagtgaataaatctcaagagatctgatggttttataaatgggatttcctctgc

SEQ ID NO: 993313 - DNA, 120 bp, Artificial Sequence
  ENSG00000250634_25 (sequence is synthesized)
tcctctgcacaaactttctttcctgtcaccatgtaagacgtgactttgctcatcattcatcttccaccatgtttgtaaggcctccccaactatatggaactgtgagtcaattaaacctct

SEQ ID NO: 993314 - DNA, 120 bp, Artificial Sequence
  ENSG00000250634_26 (sequence is synthesized)
aggtttggacacagacactcagaagagcaccatgaaaaagcacagaggcacagacacatagagaagacagccatgtgatgacgaaggcagagattggggtgatgcttctagaagacaaag

SEQ ID NO: 993315 - DNA, 120 bp, Artificial Sequence
  ENSG00000250634_27 (sequence is synthesized)
aatgtcaaggattgctgggcaaccaccagaggccagaaagagcaacagaaaatgggctaagacatggagcaaggggcagaacgactcttgaagatgctgagcaacttctgaaagtttcaa

SEQ ID NO: 993316 - DNA, 120 bp, Artificial Sequence
  ENSG00000250634_28 (sequence is synthesized)
aatgatccctaaggtggagcaggaagctgtcaagagaggggaaaaggtgaaggattcctggaggctgctcagcaatccatctaagacaaaatgcaaaagaacctcttaaagatctttccc

SEQ ID NO: 993317 - DNA, 120 bp, Artificial Sequence
  ENSG00000250634_29 (sequence is synthesized)
tacactggtggcctggggaacaaatcacatttggagaattgaagaaatcttaaaatgcaagcatattaagcccttttcccccaaatcacttaagtctcacaagtctacctcacttagagc

SEQ ID NO: 993318 - DNA, 120 bp, Artificial Sequence
  ENSG00000250634_30 (sequence is synthesized)
acagtgcacaggacaacgccacatcaaagaataacccagtcccaaatgtcagtggtgctgatgttaagaaatcctgcattaagaccaaaaagccagatgagtttggagtcactaaggaga

SEQ ID NO: 993319 - DNA, 120 bp, Artificial Sequence
  ENSG00000250634_31 (sequence is synthesized)
ttctgtgactttgcagccccggcttggtgataatttttgtgcaggcttcttgacatggaaagcagagctccccagcacagagtgagcctccgaagggctcctgcccttaccggtgcccta

SEQ ID NO: 993320 - DNA, 120 bp, Artificial Sequence
  ENSG00000250634_32 (sequence is synthesized)
ccctccctttccctgcttgctacacttgggtccgggactcagcctccctttgcaagcttctgctcggcctgtgtgcagctgcacttagctggcagggtcaggcgttgagtagccgctccg

SEQ ID NO: 993321 - DNA, 120 bp, Artificial Sequence
  ENSG00000250634_33 (sequence is synthesized)
ctccttctgcagcctcctgcagcccccgccagctcccgggctccatccctcaccatcagttgctgattggcgccccctgcgtgcacaacggaggctggctgcacctggaggttcccagca

SEQ ID NO: 993322 - DNA, 120 bp, Artificial Sequence
  ENSG00000250634_34 (sequence is synthesized)
attccaggccggctccagcctagccaaagcagctaacttctctgctgtctcgtgggctgaacctcaccgtttcccaagaggagctgcctggcaatggtagcaggtgaaggtcatggtgaa

SEQ ID NO: 993323 - DNA, 120 bp, Artificial Sequence
  ENSG00000250634_35 (sequence is synthesized)
gaagatgcagatattggcaatttggagcattagatgaactaattacaacgttaacctaaggaacagtgcaacagaaaatgggctaagacatggagcaaggggcagaacgactcttgaaga

SEQ ID NO: 993324 - DNA, 120 bp, Artificial Sequence
  ENSG00000250634_36 (sequence is synthesized)
tgctgagcaacttctgctcagccacttgggtctcctttgccaaggagtgtcctccctctggaactcaataccagctctttcttcttctggaatcttctctcagctcttttaaggacagtg

SEQ ID NO: 993325 - DNA, 120 bp, Artificial Sequence
  ENSG00000250634_37 (sequence is synthesized)
attgcttgaggcttgctcttgggaatggtagctccctggaacttctgtccagcctgcatatctggactgtgcaggggatacttctatggccagaaaaagcccttgggcagagagaagcag

SEQ ID NO: 993326 - DNA, 120 bp, Artificial Sequence
  ENSG00000250634_38 (sequence is synthesized)
tgaatacgtcagagactctgatcatgtcagagaccgaagcagagaaacagagaacactcatcttccttctcaacctggctctggatgccaactggcaacgctgtgaaccagtttgggctt

SEQ ID NO: 993327 - DNA, 120 bp, Artificial Sequence
  ENSG00000250634_39 (sequence is synthesized)
ggagggctcagaggaagccacttttggaaggcattggaagctggtttttcagagcctactctttgctacccctttctatgttgaaaataaaaatgtaaagcctaattcatagtcacaaca

SEQ ID NO: 993328 - DNA, 120 bp, Artificial Sequence
  ENSG00000250634_40 (sequence is synthesized)
acaatgacaccaggaataaatcacagaccagagtccaaacatctggtcacgttgctcatctaccatctggtgggtctcctctcagctctgtgttctgactgccagtcatctcccttcttc

SEQ ID NO: 993329 - DNA, 120 bp, Artificial Sequence
  ENSG00000250634_41 (sequence is synthesized)
tctgtcttcactggcactattctaggtttatagttttgaaataggttcctaactggttgctctgcctccagactcttatactgtatacaggtccagtgacaaaacgatggtttgttttac

SEQ ID NO: 993330 - DNA, 120 bp, Artificial Sequence
  ENSG00000250634_42 (sequence is synthesized)
agtccacagatacattttacttatttttttaatgtccataacactctttggaataagatttaaaaattgaaaaatcagatgattttatgtaaaaatccatatttcctgtttatgctaaaa

SEQ ID NO: 993331 - DNA, 120 bp, Artificial Sequence
  ENSG00000250634_43 (sequence is synthesized)
ttatgtaaaaatccatatttcctgtttatgctaaaaaattgaatgatctgacctcactggtccacaccgagcaacaactgggtaaatcttgccattttggtttttttttttttttttttt

SEQ ID NO: 993332 - DNA, 120 bp, Artificial Sequence
  ENSG00000250634_44 (sequence is synthesized)
ttgaacttaaagacattacttcaatgctttatacagactcatttctctgaaacacgaatttgatcatgtcactctcatgtttaaaaaccttcgccagcctgcttgcctggtggataaagt

SEQ ID NO: 993333 - DNA, 120 bp, Artificial Sequence
  ENSG00000250634_45 (sequence is synthesized)
tcaaacacttgaccctagcatagaagggcctccataacctaatcttttatctctgtggctcttcctagctcacactctgcccagaagccatgctgaaaggcggtgctctgttgtacccct

SEQ ID NO: 993334 - DNA, 120 bp, Artificial Sequence
  ENSG00000250634_46 (sequence is synthesized)
ctgtcctctgcctgctctaatgtcctatttttagctgaatatcttttcttcaatttttcatctggtaaatgtcttctccttagtatcagctcatactttaaaaaagtccttctcgaactt

SEQ ID NO: 993335 - DNA, 120 bp, Artificial Sequence
  ENSG00000250634_47 (sequence is synthesized)
ttgtgctttcattacctgcttcttcttcactttctgaggaccttggaccctcctctattgcaatggtattgccaagccaattctttctccttcttcagactgtacaacccttagggctct

SEQ ID NO: 993336 - DNA, 120 bp, Artificial Sequence
  ENSG00000250634_48 (sequence is synthesized)
gagccatctttgcctttgggaatttattgcagagtaggtgaatggtgttcactgaataaatgtttcagattggaaaatttgatctttcatttccttacctataggatggaaccgtaatac

SEQ ID NO: 993337 - DNA, 120 bp, Artificial Sequence
  ENSG00000250634_49 (sequence is synthesized)
cttctgttcacatacaggagaatcattgtggggatcaaatgacacaatgtcttttgtaaaaatgttaacaaagcacttggaaactgcaaagtaatatatgagtagatggaattaatatag

SEQ ID NO: 993338 - DNA, 120 bp, Artificial Sequence
  ENSG00000250634_50 (sequence is synthesized)
aaaatgttatgttctcaacttgcttaaaataatttaactgtgttatttctagcaagaacagtgatcttgaaggcagggctatagttcttgtttatagttccaattttattgccaattagt

SEQ ID NO: 993339 - DNA, 120 bp, Artificial Sequence
  ENSG00000250634_51 (sequence is synthesized)
tggatgacttagggaaagtaattttgcctatctagacctcagtttccacagctgagctctggaaattttaaggtatttgttatgtctttcatgtttttctccagtcttcctagaagtaaa

SEQ ID NO: 993340 - DNA, 120 bp, Artificial Sequence
  ENSG00000250634_52 (sequence is synthesized)
acatttttcttgttttcaaagactttcattcttccacatttggtatggtatattaaccgtaatacaataatgaatatgcagccattcgttttttcattaaatatgcaaatcattgagaat

SEQ ID NO: 993341 - DNA, 120 bp, Artificial Sequence
  ENSG00000250635_0 (sequence is synthesized)
attctccctcccaggctctgcacgctgcgtggcccacgcggggctcgggagacagctcaaaagactccccaaggctgggaaaggagggagggaggggccgcggggcaccgtggtggtggg

SEQ ID NO: 993342 - DNA, 120 bp, Artificial Sequence
  ENSG00000250635_1 (sequence is synthesized)
ggagatactttgatggaaaaaaaaggtcaaacttcatcagcccgccgggcaccccgcgggcagcgggggcgaggagccggaggaaaaatgcagaagtagccgccgcttcttccaagtggt

SEQ ID NO: 993343 - DNA, 120 bp, Artificial Sequence
  ENSG00000250635_2 (sequence is synthesized)
gccagagatctacaagcagccgcccccgcaggctgagcgcccgcccaacgccaagagtgatctgcgaccgagcatactgcggcttagggaggcttgggtatagcagcggccaccaagcga

SEQ ID NO: 993344 - DNA, 120 bp, Artificial Sequence
  ENSG00000250635_3 (sequence is synthesized)
tcaccggcgctaggtctcccaggctccggggctccgcggcttacggtgcgggcgccccccgcccctcccaaatacggacccctccttccccgtccccggctctccgcacctgaacttcgg

SEQ ID NO: 993345 - DNA, 120 bp, Artificial Sequence
  ENSG00000237716_0 (sequence is synthesized)
cccctcgcgggccacgttggttaaatgaacggatgcaggatacagagggcctgtggatatagacggctgactgaatggaatgtgtattggagaaaaaataacagagtctggctaaagaga

SEQ ID NO: 993346 - DNA, 120 bp, Artificial Sequence
  ENSG00000237716_1 (sequence is synthesized)
tgaagagctcatgagggcgtgtctcaatttaaacaagagtagcattggcaattgttgtccttagcagcagccgacaaggcggaattggaatggtgctgctcctgactacctctactccac

SEQ ID NO: 993347 - DNA, 120 bp, Artificial Sequence
  ENSG00000237716_2 (sequence is synthesized)
gctaggcttaggggctggagtgacccaagccctcagggacctgcagcggctgaagtcctctcagcacctgcaatatcccagagggcaaagacagggccaaatactggattctggattctc

SEQ ID NO: 993348 - DNA, 120 bp, Artificial Sequence
  ENSG00000237716_3 (sequence is synthesized)
ttcattgttgtccccctgcaagtggagaggtatccaggctgggccttgtcctaagatatgacggaactgaattcttccagcaagcatgtgagcttggaagagaacaccatgcgccacacg

SEQ ID NO: 993349 - DNA, 120 bp, Artificial Sequence
  ENSG00000237716_4 (sequence is synthesized)
agaatgcatactggccaacaccctgtgcaaagatccagagaagctgtgctcagactcctgactcatgaaaatagtgaacttataaatgtatattgttttaagatgctaaatttgtggtga

SEQ ID NO: 993350 - DNA, 120 bp, Artificial Sequence
  ENSG00000237716_5 (sequence is synthesized)
tgtgttacatggcaatagaaaactaatagagataaaacttgacatttgaagtgcatcacataatgaaattagtagatgagaatctctctagaaacaagtaaaattttgagttaaaatgag

SEQ ID NO: 993351 - DNA, 120 bp, Artificial Sequence
  ENSG00000237716_6 (sequence is synthesized)
catataattcctcctccctccaaaatcccaggaaatgagtagttaaaaaaatttttttttaattttacaagataagaacaacaagcagagatacttgaagtaggggctggttcttcttca

SEQ ID NO: 993352 - DNA, 120 bp, Artificial Sequence
  ENSG00000237716_7 (sequence is synthesized)
ctccctttgttatataactgaacttcctcacacttgagaagtacatttccctgctccttgactttcaactcagccatgtggcttgctttggccaatgagttataggtagacgtgatgtga

SEQ ID NO: 993353 - DNA, 85 bp, Artificial Sequence
  ENSG00000237716_8 (sequence is synthesized)
cagatctaacttagccaactccgtcttcttccaacctgcaggctgtgcttgttcattctgggtgtaggctgaactaactttggga

SEQ ID NO: 993354 - DNA, 74 bp, Artificial Sequence
  ENSG00000237716_9 (sequence is synthesized)
accttcttcttgcctggggactagattgcctttgtaggactgacagtagccacgagattagaaattatgattta

SEQ ID NO: 993355 - DNA, 87 bp, Artificial Sequence
  ENSG00000237716_10 (sequence is synthesized)
aagcagaccttcttcttgcctggggactagattgcctttgtaggactgacagtagccacgagattagaaattatgatttaggaatcg

SEQ ID NO: 993356 - DNA, 120 bp, Artificial Sequence
  ENSG00000237716_11 (sequence is synthesized)
aactggctcatctgatcttgtggccccttacccaggaactgactcatcacaagaagacagcttcaactccctatgatttcatctttgaccaatcagcactcctggctcaccggcttccca

SEQ ID NO: 993357 - DNA, 120 bp, Artificial Sequence
  ENSG00000237716_12 (sequence is synthesized)
atgatttcatctttgaccaatcagcactcctggctcaccggcttcccacacacccaccaagttgttcttaaaaactctgctctccgaatgctcggggagactgatttgagtaataataaa

SEQ ID NO: 993358 - DNA, 120 bp, Artificial Sequence
  ENSG00000263588_0 (sequence is synthesized)
aaagctgctataaaacctcaacatatcgctgctgcacaaaaccacccaaaccatcttcagacctctgccctctggcatgtgagtggcctgcatttcaggaggtgaaagatcagacctttg

SEQ ID NO: 993359 - DNA, 120 bp, Artificial Sequence
  ENSG00000263588_1 (sequence is synthesized)
ttatttgttaaagcactcagcaacccagaactaaacatgcacgccgatgttgatttgagaactaaaggatatctttcaagtccaataaatgtgataaaaataaacaacatcctttcataa

SEQ ID NO: 993360 - DNA, 120 bp, Artificial Sequence
  ENSG00000286590_0 (sequence is synthesized)
ggagcaaaggcatggcaggaggagagaactgcgtgtgtgaggaataaaaacaacatgttgcaattgaggaaggcgtgaatttatggggagaatacagagatgaagacttaaaacgaatgg

SEQ ID NO: 993361 - DNA, 120 bp, Artificial Sequence
  ENSG00000286590_1 (sequence is synthesized)
aaggccaaggagatgaaatggaagactttggacagaacttctgggaaagctctttaaagcagtctactagactggcaagcagacattcattctcctcttctgacttagacatggtatttt

SEQ ID NO: 993362 - DNA, 120 bp, Artificial Sequence
  ENSG00000286590_2 (sequence is synthesized)
tagctccagcagccgtcctgtgaagatgggagcacacgctaagggcagcagaaaagaaagccagaaggaggttggatattgataaccaccgtggtgccatcttaccagccctcggccacc

SEQ ID NO: 993363 - DNA, 120 bp, Artificial Sequence
  ENSG00000286590_3 (sequence is synthesized)
taccccagccttccggttatgagaaagaaaaacaaaattagcttaagctactattatgtagaggtctcaattcctaagagtttaatgcatttccttaaacacatatgcatgttgcagaat

SEQ ID NO: 993364 - DNA, 120 bp, Artificial Sequence
  ENSG00000286590_4 (sequence is synthesized)
atgcatttccttaaacacatatgcatgttgcagaatgcccagctggaaattaaactttttaaaaatttattaatttatttagagaaggggaatctcactatgttgcccaggctggcctca

SEQ ID NO: 993365 - DNA, 120 bp, Artificial Sequence
  ENSG00000286590_5 (sequence is synthesized)
cccgagtaactgggactacaggcatgtaccaccatgcacggctgaaattaaactttgtgggtgtttttcaggtctggaaaaggggtaccagaaagtcaacttggctttttcacctgccta

SEQ ID NO: 993366 - DNA, 120 bp, Artificial Sequence
  ENSG00000286590_6 (sequence is synthesized)
tgctgcttaaggtttctggagacttacctgggtagccaaggctgggagagtgaggaatagctctattatctggtaaggagatttgtaatcagccccttcatgttttcagaaatccagaca

SEQ ID NO: 993367 - DNA, 120 bp, Artificial Sequence
  ENSG00000286590_7 (sequence is synthesized)
gagccctagagagagactggggaagggaatgcagttggggctctagattcatgtatttgtagggagatttctaaatattgtgtgtctactgtatgccaggcagtgtctaggcactggggt

SEQ ID NO: 993368 - DNA, 120 bp, Artificial Sequence
  ENSG00000286590_8 (sequence is synthesized)
gcagcaatgaatgaaagataagatccctgccctcatggagtttgcactctactggggcctgtggaaggaagctgagctgtgttacagaatcaccccagttgaggtgactgtgcaggtgaa

SEQ ID NO: 993369 - DNA, 120 bp, Artificial Sequence
  ENSG00000286590_9 (sequence is synthesized)
tatggagacaaaatctactctctgacctcagccagtgagggtgctacagcctgccatagagccctgcactctttcagagagggtttctctcccaggccagctgtcactctaatctgccct

SEQ ID NO: 993370 - DNA, 120 bp, Artificial Sequence
  ENSG00000286590_10 (sequence is synthesized)
ccccactgtgatcccagctggacacatggctcactggtttttctgttactttgtaagtgcagataagaactctattcctcacactttggggacagaacagagtaagctggggtacactga

SEQ ID NO: 993371 - DNA, 120 bp, Artificial Sequence
  ENSG00000286590_11 (sequence is synthesized)
gcttggagaaggggaagtacgggtctggctaaatatttataaaatcttgattttttttcctaaggacagaagtcaaatagaatatatacactgattacaaccacttattcattcattcat

SEQ ID NO: 993372 - DNA, 120 bp, Artificial Sequence
  ENSG00000286590_12 (sequence is synthesized)
tttataatgaatatagaatatgaccagcaatgtgctgggcacttgatcttattcacttccacagaaaccctgggagcaaagtactgttatcttcattttacaaacaaggagatcaatgct

SEQ ID NO: 993373 - DNA, 120 bp, Artificial Sequence
  ENSG00000235888_0 (sequence is synthesized)
ctatttgcgtcggtatcaacagaaggactagacgcttgcactaaaagaaaaagctgagggatgggggcaggaagcgggaagctgggacccaagccccaccttcctgagttggaaggtgac

SEQ ID NO: 993374 - DNA, 120 bp, Artificial Sequence
  ENSG00000235888_1 (sequence is synthesized)
aggtagactcctgcttgtttgccagagaggcctggcagaggaggtgcatcccagcacagaagggcagcacagaggcagcctgagaagattctgtcgctgccaggtcaccaggacctctgg

SEQ ID NO: 993375 - DNA, 120 bp, Artificial Sequence
  ENSG00000235888_2 (sequence is synthesized)
accacagctgggttgcgctgttttccagtttgtgaaactaggactttggggaacatcctgtgaattggtgtcattttgattttcctggaggatttttgaggtcagcgtgactgctgtcac

SEQ ID NO: 993376 - DNA, 120 bp, Artificial Sequence
  ENSG00000235888_3 (sequence is synthesized)
ccagccatgaggggacgggcgatcggacacgcttcatcacagtccctcccctttgtggtttaaacgacgatgatcggctgtcatgctaaaatagagacacgagaccgacagcacagactc

SEQ ID NO: 993377 - DNA, 120 bp, Artificial Sequence
  ENSG00000235888_4 (sequence is synthesized)
cttatggcaataagacaccaaattataagcagcacctcaggccacgccagcagctaaacacgcaccggccccgagattcaaacgactgcagctcatccacctgcagacgctggctgaccc

SEQ ID NO: 993378 - DNA, 120 bp, Artificial Sequence
  ENSG00000235888_5 (sequence is synthesized)
cgttccacagctgtgactatagctttgattggacaagaggttgatttcagtctcctgctcctcctggaacctgaatatgtatgtttggccagctcaattcagcatgaggctcctgctgca

SEQ ID NO: 993379 - DNA, 120 bp, Artificial Sequence
  ENSG00000235888_6 (sequence is synthesized)
gttccttagctggaaggagctctgcagggtgggctccagtgtgaggctctgaatcttcgccatcagctgctgggaaatacaggaccttctgccagcagggtgtcatcttgctggagggca

SEQ ID NO: 993380 - DNA, 120 bp, Artificial Sequence
  ENSG00000235888_7 (sequence is synthesized)
gaaggattccctggaacctgggggccagcaggacagaggaaacagaaagtacatgaccgatgatgtctttcgaccacagaaagggctggaagaagcaggggacctactgtttgaataaac

SEQ ID NO: 993381 - DNA, 120 bp, Artificial Sequence
  ENSG00000235888_8 (sequence is synthesized)
ccagtggaaaaacagaagccccatttcatacttgactcagctcttcaagtttaaatcttgaatctcctcaactacacggaacagtgtctctcccaagtcatctgacacccactctgttct

SEQ ID NO: 993382 - DNA, 120 bp, Artificial Sequence
  ENSG00000235888_9 (sequence is synthesized)
ctggatcattccttcctagagaacgttgctcttggagggctgtgatctgctctcacccacttgcctttctgacccactgagtgcatctcaacagtcacttggggtgatccgatctgacca

SEQ ID NO: 993383 - DNA, 120 bp, Artificial Sequence
  ENSG00000235888_10 (sequence is synthesized)
gggaagcactctcactgtggcggtccccattggtggtcatggggttgccacagtgagctacgtttctaccctcatctctctatatgttaccgtggaatctctgactgaggacccatgggc

SEQ ID NO: 993384 - DNA, 120 bp, Artificial Sequence
  ENSG00000235888_11 (sequence is synthesized)
tcacccaatgtgataaagtcctgaagctcagccgggacgtccgaccccagctgcaggactttccaatagacagatgcatagaacttgagaagaaatcgacttagaaacctgaagttggaa

SEQ ID NO: 993385 - DNA, 120 bp, Artificial Sequence
  ENSG00000235888_12 (sequence is synthesized)
aactggttgcctgacattctgtgcaagactgaatctctgagaaatgaaggctgtgtaactttgggaccatgtcttttccagcctacatagacccccaggaaactttgcagttgttcccca

SEQ ID NO: 993386 - DNA, 120 bp, Artificial Sequence
  ENSG00000235888_13 (sequence is synthesized)
agtatggatggagtcaaacttgatgtcctttcatccccccatcccatccactaatccatatcctttggaaattttagagtgccgggcctcatgtaaatacaccaaaaacaatttaagtca

SEQ ID NO: 993387 - DNA, 120 bp, Artificial Sequence
  ENSG00000235888_14 (sequence is synthesized)
gccaggtaagggtcgagccgcgcactctacacttagagaacggactctgctctcacaccacagcgtcttctttttcttcagcagctaaacacgcaccggccccgagattcaaacgactgc

SEQ ID NO: 993388 - DNA, 120 bp, Artificial Sequence
  ENSG00000235888_15 (sequence is synthesized)
gctgattatagaagctgcacacttgtatgccttcgagtccctgcctcaccttttgacgtgtagggactcattgtaatgcttttaaatgtgaagcctccaccccaaagtgaacatgggacg

SEQ ID NO: 993389 - DNA, 120 bp, Artificial Sequence
  ENSG00000235888_16 (sequence is synthesized)
catgtaacgtgcatgttcagtgggcacggctcaggactctctttgtgaatattcatagctcctcctggaacctgaatatgtatgtttggccagctcaattcagcatgaggctcctgctgc

SEQ ID NO: 993390 - DNA, 120 bp, Artificial Sequence
  ENSG00000235888_17 (sequence is synthesized)
aacaccgcctccttccaggtgcctgccagctgtttctgccagaggctgcgtctcccggcctgtcagaatggccaccctgcaggctgtaatcctttagaagaaataaagatcccctttcca

SEQ ID NO: 993391 - DNA, 120 bp, Artificial Sequence
  ENSG00000235888_18 (sequence is synthesized)
ctcctacctggacagcagcaaacactgcccccgtgacttcctggtgccatccttggctccattacgtccattctccagtggctggcagagtgagcttgaagaacgtgtgacatgcccttc

SEQ ID NO: 993392 - DNA, 120 bp, Artificial Sequence
  ENSG00000235888_19 (sequence is synthesized)
agaatgttctacttcctgttccagaaggacagcccctcatgccttcccgcgggccacacgccacctcttcctcagtgccccagcctggcatcctcttcctgcattcagccttcttttccg

SEQ ID NO: 993393 - DNA, 120 bp, Artificial Sequence
  ENSG00000235888_20 (sequence is synthesized)
aggcaacgtgagctccagctctaactctgtcccaatcagctgtgtgaccttgggcaagatgcttaacttctctgggcctcagttttctcatctgtgaaatgaagtgtcatcttgctggag

SEQ ID NO: 993394 - DNA, 120 bp, Artificial Sequence
  ENSG00000235888_21 (sequence is synthesized)
aggcagtaagggaaggctgagatgaatgcagaatggggttagcgagctgcaggttgtcatggtgcagcgattttcttaggcgatgacggggccctgcccagattccccagctgcgatgct

SEQ ID NO: 993395 - DNA, 120 bp, Artificial Sequence
  ENSG00000235888_22 (sequence is synthesized)
caggaactcagggggagaaaggtgaccaggtctcatggagaggattaatgtgcggaacacgcagccgctccagatcccctggagaggatctcgttcccgtgaagctggcagctcccggag

SEQ ID NO: 993396 - DNA, 120 bp, Artificial Sequence
  ENSG00000235888_23 (sequence is synthesized)
ggctgagtgcttgtttctgctctcactgtgttagctgcctacaagcgtccccgctggcctttgccttaccgcctcgagactactgctaccctgagcatctttcgtctcaggttggatgcc

SEQ ID NO: 993397 - DNA, 120 bp, Artificial Sequence
  ENSG00000235888_24 (sequence is synthesized)
tcagcgtgcattcccaggactttatgagatgatccactgaaggatttcagcaagaacattctggagtgtcaactgatacgtttttcagtctcagcttgctcactgtttgagtagtgtcac

SEQ ID NO: 993398 - DNA, 120 bp, Artificial Sequence
  ENSG00000235888_25 (sequence is synthesized)
atgtacatgcgtgttattagaggcgaatgcacgtttttgttactgagagagtggccctagagcagatgccagcgaactgcagcccacagcccgaatctagcctgccgcctcttttcatgt

SEQ ID NO: 993399 - DNA, 120 bp, Artificial Sequence
  ENSG00000235888_26 (sequence is synthesized)
ggctcacaagctagtcatagtattatattttaatagtgtgggaaaacatcagaagaagaacaatattttgtggaacatgaaaattatatgtttacattttagcatccataaacgtggttt

SEQ ID NO: 993400 - DNA, 120 bp, Artificial Sequence
  ENSG00000235888_27 (sequence is synthesized)
cattagaacacacttctatggtttgaatgtcctctccaaaactcatgttgaaacttagtctctaacgtcactatattaagagatagggcctttaagaagtgatgggggcatgggaactct

SEQ ID NO: 993401 - DNA, 120 bp, Artificial Sequence
  ENSG00000235888_28 (sequence is synthesized)
gccctcatgaatggattaatctattcatggattaatggattaatgcattaatggattggtggtttatcatcgcaaggaaactggcagttttgtaagaagaggaagggagacagtggcagg

SEQ ID NO: 993402 - DNA, 120 bp, Artificial Sequence
  ENSG00000235888_29 (sequence is synthesized)
gaaactggcggctttgtagcaagaggaagtgagacttgagtcctctcaccacaggttgccctgcaccaaccaccacaggactctgtagagagtcctggctagcaagaggatcttcaccag

SEQ ID NO: 993403 - DNA, 120 bp, Artificial Sequence
  ENSG00000235888_30 (sequence is synthesized)
ctcctgcttgtttgccagagaggcctggcagaggagtgacagggtttcaatctgcagtggcaacatctctgcaaccctgaactcctgggctcaagcgatccccctgctgcagcatccgga

SEQ ID NO: 993404 - DNA, 120 bp, Artificial Sequence
  ENSG00000235888_31 (sequence is synthesized)
gtagccaggactataagcacacgccaccacacccagctaattcttaatttttaaaggtttttggtacagacaggaatctgtgttttcagtgttactcataagaagtcatagttgagaaac

SEQ ID NO: 993405 - DNA, 120 bp, Artificial Sequence
  ENSG00000235888_32 (sequence is synthesized)
aggctaggtaggaaaagacatcacaggcaggtacgaggatccctgagtctgtcagtcaggttgcaggtgggggctttataaggagcaggtaactggcaaatcacggaggtcagggcccct

SEQ ID NO: 993406 - DNA, 120 bp, Artificial Sequence
  ENSG00000235888_33 (sequence is synthesized)
gcaaagggtgtaggcctggggcagcgttcagagatgcagagcagagcaggacacggaaatacccaggactgtccgaggagcagagcacagcagcagcagagatggggtggttggtgggtg

SEQ ID NO: 993407 - DNA, 120 bp, Artificial Sequence
  ENSG00000235888_34 (sequence is synthesized)
tggggaggactcagccctgctgtgggcacaaaggtggggatggaggagggtgggcaccaaggctggtcctgaggcagtagagggtgggtgggtcccttccagaaatgtccagcacggggc

SEQ ID NO: 993408 - DNA, 120 bp, Artificial Sequence
  ENSG00000235888_35 (sequence is synthesized)
atccttatccaatcccacatcagtaggctcagcgccaccctggactcattggaaatgcagattctcaggccctgcccagccctcctgaatcagaaatgctggggaggtgccccaacatct

SEQ ID NO: 993409 - DNA, 120 bp, Artificial Sequence
  ENSG00000235888_36 (sequence is synthesized)
gtgttctcacaggccccaggggattttgtggcgctcaagttgtggagccactgtcctattgtgttttcctccctcccagtcactcctcttccttctcctgagcttgtcctccccagtggt

SEQ ID NO: 993410 - DNA, 120 bp, Artificial Sequence
  ENSG00000235888_37 (sequence is synthesized)
ggtcaaggctgggtctccatgtgtctcacactcagctgtcttcccattgtgacaggccatggtgagcctctgtggcttctgagaagtcacccagatgactcaaagttaaatcacctgctt

SEQ ID NO: 993411 - DNA, 120 bp, Artificial Sequence
  ENSG00000235888_38 (sequence is synthesized)
tgcagcagagccagggggcggtgggggcatcactctttgacaacaggaagggctgttaaacaaaggctggtggccaggagttcccctacttcccaagagttcgaggaaataacttccttg

SEQ ID NO: 993412 - DNA, 120 bp, Artificial Sequence
  ENSG00000235888_39 (sequence is synthesized)
cagtgtcagggattcagggagaggaaacagactcccttctagcgtgtgatgtcaacacaggagtgacaatgggcttcccacctccaatgtccctaaagcgggtgctcatccactgcgacc

SEQ ID NO: 993413 - DNA, 120 bp, Artificial Sequence
  ENSG00000235888_40 (sequence is synthesized)
ctgtctcagggtggggaaatggacaggtggcttcgtgcagccctgcacccttccaagcatcttgtcagctccattcctgtctggaatattccaagaggaccttataagattgagaatgag

SEQ ID NO: 993414 - DNA, 120 bp, Artificial Sequence
  ENSG00000235888_41 (sequence is synthesized)
ggtctccttataaatgtaaacctcactcaggctgcagcagaaacctacggggaggccaaataaactgggggctctgtggattgtatgtccccccggcttgtcgaggtgaggaacagtttc

SEQ ID NO: 993415 - DNA, 120 bp, Artificial Sequence
  ENSG00000235888_42 (sequence is synthesized)
actcctgggctgtgccacccggtgccgagggtgagctgggccaggaatgtaacaatgatgggacgagaatagggaaacaaagctgagtttctgtagaaagtgttatctatgaggtctttc

SEQ ID NO: 993416 - DNA, 120 bp, Artificial Sequence
  ENSG00000235888_43 (sequence is synthesized)
actttattttctaatttgcaaagatacttctgattttcctgctgtcagccatcaatatcttcctcagatgttctttttccagctcgagagaacaaagggcatttgaggcaaagattgaac

SEQ ID NO: 993417 - DNA, 120 bp, Artificial Sequence
  ENSG00000235888_44 (sequence is synthesized)
ctaggaacagagaggaatgtatggtgcatgatctgcctgggcctgagtagacggacctcagcacagtggtggagactgggttgtgggcacagacagcagaagatggataaggacaagggt

SEQ ID NO: 993418 - DNA, 120 bp, Artificial Sequence
  ENSG00000235888_45 (sequence is synthesized)
ctctgggttggctgctggctccaccacttagctgcgtgtcatccctggtgagagattggacaggagagaatgaggttgtccatgtctccaggacccatccccatctgaaaccactgtctc

SEQ ID NO: 993419 - DNA, 120 bp, Artificial Sequence
  ENSG00000235888_46 (sequence is synthesized)
ctgtggctgtgacacaggcagcctccctggcctgtccctgctctgatgggaagacttggtgcaaaaaggggtgcaggctcctgatgttttttaagtgaacttaaaaaaaatcatggtaaa

SEQ ID NO: 993420 - DNA, 120 bp, Artificial Sequence
  ENSG00000235888_47 (sequence is synthesized)
atacctaacataaaatttaccattttagccctttttaagtgtacaattcagtggcactaaagacattcatactattgcctaactaccaccattatccatctccagaacttttttttatct

SEQ ID NO: 993421 - DNA, 120 bp, Artificial Sequence
  ENSG00000235888_48 (sequence is synthesized)
tgcagaactgaaactctgtacccatgacacaccaaccccctccctcccttctcctctcatctcctggtaaccacgattccattttccgtctctatgatttgattattctcagtaactcat

SEQ ID NO: 993422 - DNA, 120 bp, Artificial Sequence
  ENSG00000235888_49 (sequence is synthesized)
gtaaatggaattatacagtatttgtccttttgtgtctggcttatttcatttagcataatatcctcaaggttcatctatgttgcagcatgagtcagaagttcatttctttttaaggctgaa

SEQ ID NO: 993423 - DNA, 120 bp, Artificial Sequence
  ENSG00000235888_50 (sequence is synthesized)
taatatttcattacatgtatgtaccacattttattcatctatcgatggacatttgggttgtttctactttttggctattgtgaataatgaacactgttgtgcaaatatctgttcaagtct

SEQ ID NO: 993424 - DNA, 120 bp, Artificial Sequence
  ENSG00000235888_51 (sequence is synthesized)
ttgctttcaattttctaatgtagatatccagaagtggaatcgctgtatgatgtagtaattccatgtttaatttttcaaggaattaccatgccacagacactgtaccactttatattccta

SEQ ID NO: 993425 - DNA, 120 bp, Artificial Sequence
  ENSG00000235888_52 (sequence is synthesized)
ctagcaatgcacaagtgttcggatgtttccaaatccttgacaacgcttcttcttttctttctttctttttaaaaaatatttggtatcctatcctgtacataggaatgggcaaagatttta

SEQ ID NO: 993426 - DNA, 120 bp, Artificial Sequence
  ENSG00000235888_53 (sequence is synthesized)
aggaatgggcaaagattttatgacaaagacaccaaaagcaatcgcaacaaaagcaaaagttgacagatgggatctaattaaacctaagagcctctgcacagcaaaagaaactatcaacag

SEQ ID NO: 993427 - DNA, 66 bp, Artificial Sequence
  ENSG00000235888_54 (sequence is synthesized)
cctataaggaatttaaacagatttacagaagaaaaacaacccccttaaaaattgggcaaaggacat

SEQ ID NO: 993428 - DNA, 120 bp, Artificial Sequence
  ENSG00000235885_0 (sequence is synthesized)
cggcctttggtgcagctgtaagtcggatggaatccaccttcctgacgtcagacccacccactggaacactgctcctctgactggggcttccctgaatggaaactacatgtcatactgcaa

SEQ ID NO: 993429 - DNA, 120 bp, Artificial Sequence
  ENSG00000235885_1 (sequence is synthesized)
aagaaacagatcctaaacctgttttgttttatttttggtagtagttgtttatttttgaaaacattcaaaccacctgtattggtggctgttattatgaaataaataaactgagaaacaaca

SEQ ID NO: 993430 - DNA, 120 bp, Artificial Sequence
  ENSG00000235885_2 (sequence is synthesized)
ccactgcacccagcagaaattcttaacgaggcaaggccaacagaggccattcattcaacatcacggcaccatagtggcctctttttaagactcctcaggttccagatagatttcatcact

SEQ ID NO: 993431 - DNA, 120 bp, Artificial Sequence
  ENSG00000235885_3 (sequence is synthesized)
ttggcctctacaatttgtttagttttgactaagtatttgccttggaagaagtatgtgtacaatactcatttttaaaagatgcaacagtcacctcgttacttggagttttacttgagactt

SEQ ID NO: 993432 - DNA, 120 bp, Artificial Sequence
  ENSG00000235885_4 (sequence is synthesized)
gagtcacctaaagagccagactttaacaaagtgtttttatctagtgagagaaatgaccacaggcatcttgctatgaccagtcattaaaaacaatgtcaattgtccttttcctaaaggatg

SEQ ID NO: 993433 - DNA, 120 bp, Artificial Sequence
  ENSG00000235885_5 (sequence is synthesized)
taatttcatgcaaacctaaatgtgttaacaaaagctgagtcttctattttgttgtttttattttacatttataggctataggagtcttgaattagtgggtttttttagttactaaaacga

SEQ ID NO: 993434 - DNA, 120 bp, Artificial Sequence
  ENSG00000235885_6 (sequence is synthesized)
taataatttttagtatttctaatactcaataattcttaaagaatatgtggtgcttatttttatttcacaatttccctggaatttctgacaagataaaactttctgcaggatttggtggat

SEQ ID NO: 993435 - DNA, 120 bp, Artificial Sequence
  ENSG00000235885_7 (sequence is synthesized)
gtgtttctccttggcttggcagctctgttgatgcctcgcatgataacattttgaggttttgaggaaggaatctagatttgcccaggtgtatcttgatgggctttgtgtctggatgtgttc

SEQ ID NO: 993436 - DNA, 120 bp, Artificial Sequence
  ENSG00000235885_8 (sequence is synthesized)
agacaaacttcaatgacatttccatcaatttcttacttcctggaaggatcaaccatctttcaaaattcaattagaaacttcagtcaaattccttgcctttgttgccaaaattgtcacgaa

SEQ ID NO: 993437 - DNA, 120 bp, Artificial Sequence
  ENSG00000235885_9 (sequence is synthesized)
tacccatcagagagtgctgacaaccacgctgttctaaagtgaaaatgtctacagccttggttttggttggctttactaaatagatttttctcctttaggaaggatcattatcacatcact

SEQ ID NO: 993438 - DNA, 120 bp, Artificial Sequence
  ENSG00000235885_10 (sequence is synthesized)
actcctgtttccctcctttacagcccaaagcatgcctttgtgttatgtccccagcattccacagggtgggtgggtacacatcttgacgcacaagcatgccaccatgttttgggtacatct

SEQ ID NO: 993439 - DNA, 120 bp, Artificial Sequence
  ENSG00000235885_11 (sequence is synthesized)
gtgtccatgttttcaagaccctcctcaggcaataggggacctacgcctcacataactcacataaagaaaaatgcaaatgtaggaacccacctcccccattaaagagcagcatcctcttcc

SEQ ID NO: 993440 - DNA, 120 bp, Artificial Sequence
  ENSG00000235885_12 (sequence is synthesized)
aaggaaggctgcttgccaaagaaatagttcatattttcttgagtttaattcaggttgtcattcaatgatctttttaaattaaattttatatgataatagtagctactctaattgaggaac

SEQ ID NO: 993441 - DNA, 120 bp, Artificial Sequence
  ENSG00000235885_13 (sequence is synthesized)
ctactgagtgtttgattcctctgttttgtatcttaggtaaatgatctccaaatttcaataattctttgatgttatttgttattatttattttagtaatttttaagttttgaaataaatta

SEQ ID NO: 993442 - DNA, 120 bp, Artificial Sequence
  ENSG00000235885_14 (sequence is synthesized)
atagtaaaataaattgttttaattttttaattgtattatttatttattatttgggggcattctccatttgtgaataaacatagcctcagagaagtaaaggaattggtccaaggtcatgca

SEQ ID NO: 993443 - DNA, 120 bp, Artificial Sequence
  ENSG00000235885_15 (sequence is synthesized)
accagtaatggtgcagagtaggattgcaaacccaggatttctgagtccctgcccagtgttagattttatattgaacaacttggggtaccatcttctatgctcccagcccaccttgtaccc

SEQ ID NO: 993444 - DNA, 120 bp, Artificial Sequence
  ENSG00000235885_16 (sequence is synthesized)
cagtcacagcagtggcagccagtcttgcacagggagagcctgcagtgcctcctgcagccatatggcatagagaggtccgctgacacagtgacaggggcctggcattcacacatgggaagt

SEQ ID NO: 993445 - DNA, 120 bp, Artificial Sequence
  ENSG00000235885_17 (sequence is synthesized)
cacaagtgttgggagttcattctgtcaccacaagaagctgatcgataaaggctttctcctcccattctctgggacaattctggagtctgtctgacaactccttagaaagtgccagtggga

SEQ ID NO: 993446 - DNA, 120 bp, Artificial Sequence
  ENSG00000235885_18 (sequence is synthesized)
tcaagctcattactcatattgacagctggctcaaaaatgcacccttgaattgtttctgtcttgcagtcttatctcttatttcctagaacaacttctgaaagagaaaaaagtctttgtctc

SEQ ID NO: 993447 - DNA, 120 bp, Artificial Sequence
  ENSG00000235885_19 (sequence is synthesized)
tcctgtatctgctcgattgaaaacatgaaggtgcacattccaagctgcatatgctcaggtccgagtttccaaggaaacaagggactgctcatctatctgcaaaactgaactgacgagtca

SEQ ID NO: 993448 - DNA, 120 bp, Artificial Sequence
  ENSG00000235885_20 (sequence is synthesized)
ctttcagcttgttacaaaccttgattctgaatcaaattctagtgtgcagtctaaaaattctcactgccttgtcatttctgccgagcaaacccctgatgctatgaggctggcagttgggca

SEQ ID NO: 993449 - DNA, 120 bp, Artificial Sequence
  ENSG00000235885_21 (sequence is synthesized)
gggattttcctgggttgtgcactctaattttttcctctgcactgttagtgaaatactgtcattgagaaccagctccacactgcacctatgtgagaaaggccttggtttctatcagtaaag

SEQ ID NO: 993450 - DNA, 120 bp, Artificial Sequence
  ENSG00000235885_22 (sequence is synthesized)
tcagacagggctatgtgcatttgggatgccctggtcaaccatacaggaggaagcacagtggtcttcccagctctcacagtggccaccagctctcaggctcacaaactaggcaaagcaaag

SEQ ID NO: 993451 - DNA, 120 bp, Artificial Sequence
  ENSG00000235885_23 (sequence is synthesized)
agcaacagaacaacctacttcccaactttcattagtcactcaaatccaagtgggtgatcgtatttctgaaggtcttgaatacaggacttcctgaccattctttagcatttactgatgaaa

SEQ ID NO: 993452 - DNA, 120 bp, Artificial Sequence
  ENSG00000235885_24 (sequence is synthesized)
gtatttcagatgtgttatgttgtttggcatgtgttatgttgtttggcaatcacagtaagtgttgagatagatactatgattatcttcattctctaggaacaggcacagagaggttaagta

SEQ ID NO: 993453 - DNA, 120 bp, Artificial Sequence
  ENSG00000235885_25 (sequence is synthesized)
atttcccaaaggtcacacagtttgtaagtgataaaactgatttgaagccaaactatgtcaccccaaactcatatttttaacactttattccatcttctaaaaggctggctattctatttt

SEQ ID NO: 993454 - DNA, 120 bp, Artificial Sequence
  ENSG00000235885_26 (sequence is synthesized)
tctctaagtttcaaattagtatgcccattcccttgttcattcattcattcatccaacaaacatgtgtcaggcatctatgccaggctctgtggatatagtataataacaaacaagacagat

SEQ ID NO: 993455 - DNA, 120 bp, Artificial Sequence
  ENSG00000235885_27 (sequence is synthesized)
aagatttctcagggagcttacgttttgtagaggagactaaataaataagcaagcacaaacaatgtagagtttgtaatattacctatcccagcaaaggaaaccaacactagtgtgagaaaa

SEQ ID NO: 993456 - DNA, 120 bp, Artificial Sequence
  ENSG00000235885_28 (sequence is synthesized)
ttaaattataaaagaccctaacattttcaagatactgaaggggatgagatgaagcagaggtagagtggggctggattatgctgaaacacatagaacagactggattctattttaagtgag

SEQ ID NO: 993457 - DNA, 120 bp, Artificial Sequence
  ENSG00000235885_29 (sequence is synthesized)
gtgataaattcttaagggtttgtcatttttgaggtagaactgtcttttgttcctattgtaaagaaactacataggtaggcataaaatacacctgtatgccagagatagaaaaattcatat

SEQ ID NO: 993458 - DNA, 120 bp, Artificial Sequence
  ENSG00000235885_30 (sequence is synthesized)
aattcccaactccaattctatttctctaggataattttaattgtgtatatgaaacatatctcaatgttcttgaaagactgaaatccactctttttattatttattgacttattgatttgt

SEQ ID NO: 993459 - DNA, 120 bp, Artificial Sequence
  ENSG00000235885_31 (sequence is synthesized)
ggttaaggaaaaagtagactgaagtaaaaataaagagtgcaggagtataattgcacaagaagtgggagggagacttgttgaacaggcaacagcctaaagtgagtatccatgagtgggctc

SEQ ID NO: 993460 - DNA, 120 bp, Artificial Sequence
  ENSG00000235885_32 (sequence is synthesized)
agtatgaccctgcagctcccccatcacacttgcacccacctcaaggaatccagttcacctctatggaaaatccctgggctccacgggacagagtcttgttttgttttacatctgtgtgtc

SEQ ID NO: 993461 - DNA, 120 bp, Artificial Sequence
  ENSG00000235885_33 (sequence is synthesized)
catgcctagccagtatcttgtttagtgcagcctttccataatatttgtggagagaaagaaaaatgaaaggaagaagagagggaggggaaaaagaaagtgagaggaaagaagaaaggtaaa

SEQ ID NO: 993462 - DNA, 120 bp, Artificial Sequence
  ENSG00000235885_34 (sequence is synthesized)
aaggaagtagcactcttggttttgcttctccttggctgtttcgttattctcagtactccccaacccatcttcctgggataagaaaaaaaaaagacatctaaaatgacacttccaaaagat

SEQ ID NO: 993463 - DNA, 120 bp, Artificial Sequence
  ENSG00000235885_35 (sequence is synthesized)
taatattttcatttcaacacttctgaaagtatttcaatgaaattgctttcaaatggtttattttatattagatcattgagagatagattaatgtcataaacgtaggtactagcaagcaat

SEQ ID NO: 993464 - DNA, 120 bp, Artificial Sequence
  ENSG00000235885_36 (sequence is synthesized)
atttttgtctcctatgtgcacatattgtatatttcatatcctctgataacttgaagtcactaatttaagtcaaattagggaaagggcagtatagtaattgcaatattttcggctccttct

SEQ ID NO: 993465 - DNA, 120 bp, Artificial Sequence
  ENSG00000235885_37 (sequence is synthesized)
tggtaacaaatgcagcttcttttttcccctccacccatatatgagtcttctttttctttggctaagatataatagcactgctctacatgaacaaaactatttttactggctatgttatta

SEQ ID NO: 993466 - DNA, 120 bp, Artificial Sequence
  ENSG00000235885_38 (sequence is synthesized)
ctgttgtgatcaccaaagcaacactatccgtttaggtgctggattagaatccaggcgagtccgcagtatagtctttacacttcatcaacttccacacaggacataaattgtactaatata

SEQ ID NO: 993467 - DNA, 120 bp, Artificial Sequence
  ENSG00000235885_39 (sequence is synthesized)
gtaatatactgaaatctcagaccaactgtttgtcatcggattagaatgtgatgacacagaataaagatgtgagacagaatctgtgctgaggtctaaattcacattggaagtctgggaaga

SEQ ID NO: 993468 - DNA, 120 bp, Artificial Sequence
  ENSG00000235885_40 (sequence is synthesized)
ccataatgtaagggttcactgcactgggggacaacagaacaaagagaagcagcgccaaccgaaaacggccccagtgagaagcaacaagttgtctctgaaaatgtctcctcatctgccttt

SEQ ID NO: 993469 - DNA, 120 bp, Artificial Sequence
  ENSG00000235885_41 (sequence is synthesized)
gagtggtatggaatcactgctgagcctccactattggtgccatcaaagacctcagtgatgccaagcaatcctttggatggcagttccaatgtatgaagcaatggacacaaggatcaaaac

SEQ ID NO: 993470 - DNA, 120 bp, Artificial Sequence
  ENSG00000235885_42 (sequence is synthesized)
aacttccctgttgactctgcctctaaagacaataggtcttgggttcaagctccacgtggatctgttagtgcctttttctgttttatggccagagatgcaaattacatctatgtttattcc

SEQ ID NO: 993471 - DNA, 120 bp, Artificial Sequence
  ENSG00000235885_43 (sequence is synthesized)
tcttgctatctatgtcttttaatgtttcacactctgcataggaaaagtactttgtaacatctaattctagtcctccctgtcacaatttaaacccatccctattctgcgttgggggaggac

SEQ ID NO: 993472 - DNA, 120 bp, Artificial Sequence
  ENSG00000235885_44 (sequence is synthesized)
ggactgcctgccctggagctgattccataagatacccagtaagtaagtccctgtcaggaactggacataacacccctcacctcaactgctgtgctcactccacagctcagcacaactttg

SEQ ID NO: 993473 - DNA, 120 bp, Artificial Sequence
  ENSG00000235885_45 (sequence is synthesized)
aattattatctcaaagacttttaaaacaacaacaaaacacttccgagaaaaaaatctagcaaagtttctcatgttgtaaaacagttataggttaagtaaattaaaatatttctattttga

SEQ ID NO: 993474 - DNA, 120 bp, Artificial Sequence
  ENSG00000235885_46 (sequence is synthesized)
tatatttgagtttctggcatcatgctaggttctaaggatacaaaaatgaatgagatgctatcacctgctgtcaagaaattcacagcctagggagagagtgacatatgaccagagagggtc

SEQ ID NO: 993475 - DNA, 120 bp, Artificial Sequence
  ENSG00000235885_47 (sequence is synthesized)
caatgtggacagataatgaagaagggagtcagcagaggagattctgagaacacaaaggagaagagaggcagcaacccagcgtgggtggggtgagctgatcagagaaggcctcctggagca

SEQ ID NO: 993476 - DNA, 120 bp, Artificial Sequence
  ENSG00000235885_48 (sequence is synthesized)
atatggagttggaaagattaaaggctggatggtgatgagcagatttcatctttctgccaagaacagattgaccctgagcaaggataaaaaggccagccataaggagacatgacaaatacc

SEQ ID NO: 993477 - DNA, 120 bp, Artificial Sequence
  ENSG00000235885_49 (sequence is synthesized)
tattggggtctgtgaggggaaatccctgccagagcccctcattatcatatttttatttcattcctaagaacaacttctgaaagagaaaaaagtctttgtctcagtttctgctctccagag

SEQ ID NO: 993478 - DNA, 120 bp, Artificial Sequence
  ENSG00000235885_50 (sequence is synthesized)
ctccttgcttaactggcagaaaaatggaactgctagctgggtgacagtagagctgctgtcggattgaatgacacctgtcagagtatgatgaatgaccctgtcttccccacaatcccctgt

SEQ ID NO: 993479 - DNA, 120 bp, Artificial Sequence
  ENSG00000235885_51 (sequence is synthesized)
tctgtcactcaggtgaggcccattaatcttcatcctgggcctgtcaggctaggcacccatgacgacaaaatgtcttgaagcatttacccccaagatgcacggaacaatacgatcttctca

SEQ ID NO: 993480 - DNA, 120 bp, Artificial Sequence
  ENSG00000235885_52 (sequence is synthesized)
ttgtcagagccacgtggaattagcataatttattatgacttccatccccctcactctctacctctatcaccacccccaaaaaagcaagtgggggctagatgggattagacagatggagtg

SEQ ID NO: 993481 - DNA, 120 bp, Artificial Sequence
  ENSG00000235885_53 (sequence is synthesized)
taggaccagactgccaactaccaaaccccctgcagtgcctgatgattggggggagcatctctacaaaccaatcaaaaagctggcagttcaattacagagtaataaagggacattcatcat

SEQ ID NO: 993482 - DNA, 120 bp, Artificial Sequence
  ENSG00000235885_54 (sequence is synthesized)
atatttagtggctgagggtgagacacacaactgtgattctaacaagaatatgacactggagaggatatctatgagatgactggcagactccacaccaatgatcctgacaggtttgggttg

SEQ ID NO: 993483 - DNA, 120 bp, Artificial Sequence
  ENSG00000235885_55 (sequence is synthesized)
aatcaaatgatgaaaggaactaaataataccacagatgatacagatggcttgcaccagtgtggcaatagtttaactagtaactctacaattgctggacaatctttaatttttttgtgatg

SEQ ID NO: 993484 - DNA, 120 bp, Artificial Sequence
  ENSG00000235885_56 (sequence is synthesized)
ttgtgatgacattattattttaaagaaaagtcaaacaaatacttggttctttaagattttcacagcagcactttatatatgccctataaatttttatataatttataataaaatatgtga

SEQ ID NO: 993485 - DNA, 82 bp, Artificial Sequence
  ENSG00000235885_57 (sequence is synthesized)
atttaatgtaaagccctaatcagaggcaacgtgtaaaagcagagaaagccagatatcttggagtagggagaaaaaaagaact

SEQ ID NO: 993486 - DNA, 120 bp, Artificial Sequence
  ENSG00000235885_58 (sequence is synthesized)
agaaagccagatatcttggagtagggagaaaaaaagaacttccaacactgtgttgaataggagtggtgagattttcctgcttttttctatgcctggaggctccaggaatgagttttctgt

SEQ ID NO: 993487 - DNA, 120 bp, Artificial Sequence
  ENSG00000235885_59 (sequence is synthesized)
ggttgctggtagcttgagggtgaaaaatgaaaacagtgaatccctctgaaaagagtcaaaccaacatcaacaggcagcactggagttagaaaatatgacgcttttggaggcctcacatac

SEQ ID NO: 993488 - DNA, 120 bp, Artificial Sequence
  ENSG00000235885_60 (sequence is synthesized)
tactagtatggcaagtaggtgtgagtgaaactgacctgtttggtcacacatctagaattttctgaaatttgtctctgaaaatgtctcctcatctgcctttgagtggtatggaatcactgc

SEQ ID NO: 993489 - DNA, 120 bp, Artificial Sequence
  ENSG00000235885_61 (sequence is synthesized)
ggccatgtgaggtctcagcaagaaggccatagtctacaaaccagaaaggcagcccttaccagagaccaaccctgccagaccttgatcatggactcctagcctccagaactagacagggtc

SEQ ID NO: 993490 - DNA, 120 bp, Artificial Sequence
  ENSG00000235885_62 (sequence is synthesized)
acattgtatcatgaacccaatgtctaaactttcacatgtgtgttttgaaggatgtttttaaggaaagaaaaatttctgttgtataaattattaaaataaaagttgctgtggtgatcttta

SEQ ID NO: 993491 - DNA, 120 bp, Artificial Sequence
  ENSG00000235886_0 (sequence is synthesized)
cagggctggagagccagcctgaaggccctgggacccttctatccacatagcaggagaaaagtcagctatgccaagaaaaggctggttgggtatccgagatcacatgccaagttttgcagg

SEQ ID NO: 993492 - DNA, 120 bp, Artificial Sequence
  ENSG00000235886_1 (sequence is synthesized)
gggagccagcatttcacatggcaagagaagaggacagagaaggggagaggaaggaagcaccagaaaatttacagcttaaaacaagaaaacgtattatctcacatgatctgtagatcagga

SEQ ID NO: 993493 - DNA, 120 bp, Artificial Sequence
  ENSG00000235886_2 (sequence is synthesized)
atctggtcacagcttagatgggtcctctgtttaggatctcacaaggcttcagtcaaggtgtcatccaagttaggttttcatctgaaggctcatctgtgaaagaatctgcttccaagttca

SEQ ID NO: 993494 - DNA, 120 bp, Artificial Sequence
  ENSG00000235880_0 (sequence is synthesized)
gaagtggtttcgaagtaataagtagaaacaaaaagtaacctaacctcttcaagataagcagcagaaccagcaagagtgctgctgtgctgtgtgaggaaaatcaattatacagaaggcaat

SEQ ID NO: 993495 - DNA, 120 bp, Artificial Sequence
  ENSG00000235880_1 (sequence is synthesized)
cttaaaatgaaaatagtgaatcattccacgtggaaaagaattgcttcatatcatttgaagaacttcaaaataaaatatctctagtgaggccctacacacatattaagctagcagaaatag

SEQ ID NO: 993496 - DNA, 120 bp, Artificial Sequence
  ENSG00000235880_2 (sequence is synthesized)
gctggaatgataaaatttcatgttggtcaagctgtgggaaaaccagcatgcctcacacccctggtggggttgtatattggctctgtgtgtctggaaagtaatactgtaatatgcaaccag

SEQ ID NO: 993497 - DNA, 120 bp, Artificial Sequence
  ENSG00000235881_0 (sequence is synthesized)
tttttataaaatttactgtttcaataagaacacaaatctctttagagaaaatttcaaggaatgtaggataaggacacacaaaaaaactcaccatagtcacaatgaaaatggaaatttgta

SEQ ID NO: 993498 - DNA, 120 bp, Artificial Sequence
  ENSG00000235881_1 (sequence is synthesized)
tacttgtatattcatttctgagtctaaaaatatcacattcatatgggagaatatttggaaacctaagaaaactgtaaagaataaactcgcttatactctcaccacctagagattttaatc

SEQ ID NO: 993499 - DNA, 120 bp, Artificial Sequence
  ENSG00000235881_2 (sequence is synthesized)
gctaacattttagtaggtttccttcttgtctgtttatacattgtatataggatctttttcaaattgttaatataaacaaccccaagtatttttgtatgtaaaaaaataaatatttaaaaa

SEQ ID NO: 993500 - DNA, 120 bp, Artificial Sequence
  ENSG00000235881_3 (sequence is synthesized)
tctaagagctataaactggcaaggggatatgtaagttttttaaatattggccattaatgtcagccagacagcatatttttattcttcagctcttttgttttggctggggctacctgagtc

SEQ ID NO: 993501 - DNA, 120 bp, Artificial Sequence
  ENSG00000235881_4 (sequence is synthesized)
ctccttccagttgtccaacatcacccatccacattaccccatttcatccagaggtgataggctccagccacagtgtattgctgtgtcacctgagtcaaggtacttaacctacccaaactt

SEQ ID NO: 993502 - DNA, 120 bp, Artificial Sequence
  ENSG00000235881_5 (sequence is synthesized)
ttatattcttatctgaaaaactgaaggtaaagatagtatacttggaattgttttagggactgaatgaggcaattctttgaaaacacatagcaaagattctggcatataacaagtgtttaa

SEQ ID NO: 993503 - DNA, 120 bp, Artificial Sequence
  ENSG00000235881_6 (sequence is synthesized)
taagtattaactgttattattagacccttgatataaagagaagggtaatatcagagtgtttcagttaagactgtttatttctcagccaccccaaagagggactttggacagaggaagaaa

SEQ ID NO: 993504 - DNA, 120 bp, Artificial Sequence
  ENSG00000235881_7 (sequence is synthesized)
ctgtacagggactcccaaggttttacaagagttggatgaagaagaagagcagggagtggatcattagcgaaagtgatcaagaaaggacacaccctggggatgcagactgggcatctgact

SEQ ID NO: 993505 - DNA, 120 bp, Artificial Sequence
  ENSG00000235881_8 (sequence is synthesized)
gggcccaggagcagagcagctccaaggaggaggaagaagctgtagcacatgtgtgataaggcaaagggtcagtcacctgttgctgtgaaattagccaaatttggtagcttaaaagacaat

SEQ ID NO: 993506 - DNA, 120 bp, Artificial Sequence
  ENSG00000235881_9 (sequence is synthesized)
aaacatcttttatctcccacagtgtctgtgcatcagaaattcagaggcagtttagctaggcagttctggcctggggtctctcatgaggtggtaataaagacatcagatagtgctgcagtt

SEQ ID NO: 993507 - DNA, 120 bp, Artificial Sequence
  ENSG00000235881_10 (sequence is synthesized)
atctgaaggtttgactggggctggaggatcagcttctacggtggctcatgcaggtggctggccaaccaatcttggctgttcactggaggcctcagctccttaccacccagacctctccct

SEQ ID NO: 993508 - DNA, 120 bp, Artificial Sequence
  ENSG00000235881_11 (sequence is synthesized)
aggactgattgaatgtcctcatcatgtggcagatgtcttcccccaaagtgagcgatcctaagacggcatagcagaaacctcaatatcttttataatgtagcctaagtagtcacacagtct

SEQ ID NO: 993509 - DNA, 120 bp, Artificial Sequence
  ENSG00000235881_12 (sequence is synthesized)
catttcttcaggattctgccagtgacacggccagccatgacttagtgtggaggggactacacacgggcaggattaccaggagggaggaattggtggggcccagcttggaagctggttacc

SEQ ID NO: 993510 - DNA, 120 bp, Artificial Sequence
  ENSG00000235881_13 (sequence is synthesized)
aacacagaggtctaggaggggaagagtaagagtccacaagagcacagtgcttccggggtgggagaagagggaacacaggtcttccccagctcctgcctgacctcctagtgagaaggggga

SEQ ID NO: 993511 - DNA, 120 bp, Artificial Sequence
  ENSG00000235881_14 (sequence is synthesized)
aggtggtggtgacagactgcacatggcaggtggagggctttgagtttgtccttgtggtccagtggaggccagaggcaagagctctgtgatggaccctatccagaccagcagggtgaggag

SEQ ID NO: 993512 - DNA, 120 bp, Artificial Sequence
  ENSG00000235881_15 (sequence is synthesized)
ggaaaatggtcgcagcagtgttgctcctgtagaatggagaggtggctttcccccaggaatgagacatctggccaaaggtattgggggcagcgttgtgacagggaggcagagatcaagcct

SEQ ID NO: 993513 - DNA, 120 bp, Artificial Sequence
  ENSG00000235881_16 (sequence is synthesized)
acgtggagtgtgatgctgtgctgctctggcctaaggtgtgcagcgtctccaaggacactgctcagctcccttagtatcagggcaactgcaccaggctcaagccagagagctccaagaagg

SEQ ID NO: 993514 - DNA, 120 bp, Artificial Sequence
  ENSG00000235881_17 (sequence is synthesized)
gccaaatttcagaatggactcaagactgctgcctttccactgtcatcactgcccagactccactcagacaatctcaagagattcctttagagctcaggtgcttccttgtcttcccattta

SEQ ID NO: 993515 - DNA, 120 bp, Artificial Sequence
  ENSG00000235881_18 (sequence is synthesized)
ttgctattttctgatcatggacaaatgcagtcagttgtttgatgccaggaaaattcatctgctactaaatctctacatatatatgacttcattttttcagttttctttgcttcaaaggat

SEQ ID NO: 993516 - DNA, 120 bp, Artificial Sequence
  ENSG00000235881_19 (sequence is synthesized)
gtttatttaagttatatttgtacgctctccccctaagacatacagaacactgcgcaactgtgaactgtacttaagtaggcatttcatattccatttttacggtaaccccttgcagggaaa

SEQ ID NO: 993517 - DNA, 120 bp, Artificial Sequence
  ENSG00000235881_20 (sequence is synthesized)
gagtcagtgcagcaaatctgttttgctcaattctagcttatctctgaggatgtctggagccaggatctaagaactaaaccttggaatgttcacaaatgatgtcattctgtgcccagcaca

SEQ ID NO: 993518 - DNA, 120 bp, Artificial Sequence
  ENSG00000235881_21 (sequence is synthesized)
ttggggtaggacatactaaaccatcaacaccatttaaagcaaacatgaacctctatgatgtacacctggtgcctggtttgaggctcacaacacgagtgcttgcgtagcaggtatgcacca

SEQ ID NO: 993519 - DNA, 120 bp, Artificial Sequence
  ENSG00000235881_22 (sequence is synthesized)
gaactgtgcctgagttctctgctcttcaaagctggaaagaaaacatgtgtgtgtgtaagccatgcagaaggacaaaagcctgttcctgagcattttagccttcacctgtacgtgtatttt

SEQ ID NO: 993520 - DNA, 120 bp, Artificial Sequence
  ENSG00000235881_23 (sequence is synthesized)
tttttttctgttctggcactgtatcttttgcaataaaccttagcggtgagtagaatctgatgctgagttatgcaggttcttctagtgaattactgaaccagtgagtagtcataggccccc

SEQ ID NO: 993521 - DNA, 120 bp, Artificial Sequence
  ENSG00000235881_24 (sequence is synthesized)
agaacctgcctaattttcaaagtaaaatttttaattacttggaatgaagttcaatcctagatactacctaggaacagcaacctcaaatatctcattacagctttgctgcttttagagtaa

SEQ ID NO: 993522 - DNA, 120 bp, Artificial Sequence
  ENSG00000235881_25 (sequence is synthesized)
ataatcacagaaacttttacctcccagagcctattaattcccctctccacttctattcttcttaataacaatcacatatatactgataggaatcactggttattttgaagacatataagt

SEQ ID NO: 993523 - DNA, 120 bp, Artificial Sequence
  ENSG00000235881_26 (sequence is synthesized)
ggtaaggaacccagttccacctcctcccacagtaacaaaataaaggaggaagcaaagatatataggagcaaaagtttcgtgcactatcaagaataaattgaggctgggtgcggtggctca

SEQ ID NO: 993524 - DNA, 66 bp, Artificial Sequence
  ENSG00000235881_27 (sequence is synthesized)
atcccagcactttgggaggctcaggcaggcagacctaccaaaaaatacaaaaattagccaagcatg

SEQ ID NO: 993525 - DNA, 81 bp, Artificial Sequence
  ENSG00000235881_28 (sequence is synthesized)
cacttcagtgagccacgatcgcaccactgcactccagtcaagaccctgtctcaaaaaatttgtaaaaaaggaaaaattgat

SEQ ID NO: 993526 - DNA, 120 bp, Artificial Sequence
  ENSG00000235881_29 (sequence is synthesized)
gaccctgtctcaaaaaatttgtaaaaaaggaaaaattgatattaatttcatccagattgttataaattatgttagtcgtaacccccagggcaaacactaagaaaatgactaaaaatatat

SEQ ID NO: 993527 - DNA, 120 bp, Artificial Sequence
  ENSG00000235881_30 (sequence is synthesized)
agtaaaagaaatgaaaatggaatcaaaatggtactgtaaaaaatatctttctgtgtacactgacagacaacaccaaaaaaagaaataaaatatatttttaatacaaaagaagggaataac

SEQ ID NO: 993528 - DNA, 120 bp, Artificial Sequence
  ENSG00000235881_31 (sequence is synthesized)
aggaactgaggaacaaaaaatatgtaagacatttagaaaacaaaaataaaatgcagaagtaatgatcagtaatcacgttaaataaaaatagattaaactcttcatttaaaaaccagatat

SEQ ID NO: 993529 - DNA, 120 bp, Artificial Sequence
  ENSG00000235881_32 (sequence is synthesized)
tggcagaatgggtgaacatttcccaattataccccagctacaagatactcatttttgtttcaagtcacacataggttgaaaatgagaggacacaaaaagatattccatgaaaatagtaac

SEQ ID NO: 993530 - DNA, 120 bp, Artificial Sequence
  ENSG00000235881_33 (sequence is synthesized)
ccaaagagagctggagtggctactaatgtcagacaaaatagactttaagacaaaaattgttacaagaggcaaggagggcatttatataatgataaaagggtcaatttattaagatatata

SEQ ID NO: 993531 - DNA, 120 bp, Artificial Sequence
  ENSG00000235881_34 (sequence is synthesized)
acaggtataaacatatgcactcaataacagagtctcaaaatatatgaagcaaaaactaacagaattgaagtgagaaatagacagttaaataataaaagttgaaaaattcaacaccctcct

SEQ ID NO: 993532 - DNA, 120 bp, Artificial Sequence
  ENSG00000233067_0 (sequence is synthesized)
acaactgcagcgagagaagaggctggcagcatgggtggcaggaggcttggcagcctcacaggatgcctgcaaatacctttcacttatgcagtttggcagtgcagtggtgcatggagacag

SEQ ID NO: 993533 - DNA, 120 bp, Artificial Sequence
  ENSG00000233067_1 (sequence is synthesized)
cgtcttgggcctggcacccacagccacttaggaagttggagtcctggagaggagaacacagaacgtggacaactagctgtcaaattgcagtaaaagttggttcaggaaaagtggaagcta

SEQ ID NO: 993534 - DNA, 120 bp, Artificial Sequence
  ENSG00000233067_2 (sequence is synthesized)
gaagggattaatggtctcagcattcaaagcttctattctggaatagaacagctagcatactaccaagacttttcaaggagcaagaatggagctccctggagaactgactgaacatggctt

SEQ ID NO: 993535 - DNA, 120 bp, Artificial Sequence
  ENSG00000233067_3 (sequence is synthesized)
cagaggcagtatccatgtcacatttcaaaggccagatctttcccagggcttaagctgttccttggatacttttgctgatggtttacacatcttcttcccacattatattgtaactttctt

SEQ ID NO: 993536 - DNA, 120 bp, Artificial Sequence
  ENSG00000233067_4 (sequence is synthesized)
atgaaccatccaatctcctgcctcgagtattgaagcctggctactgtgactgtggggaagggattaatggtctcagcattcagccaacaacaatacctgctcactataagcattcagaaa

SEQ ID NO: 993537 - DNA, 120 bp, Artificial Sequence
  ENSG00000233067_5 (sequence is synthesized)
acagaaaagtttcaagaagcaggaagaaaagactcacctatgatcccaacacccagagataagagtcctgaagctcagatgacacagctgataacagggaagccaggacagaatctcatt

SEQ ID NO: 993538 - DNA, 120 bp, Artificial Sequence
  ENSG00000233067_6 (sequence is synthesized)
tggatacttttggtaagtcatttatccactaatcatttagtaatcgtctctgacatgccaaacaccctgctcagggctggaaatgcagaacctgggaagccactggccttgtcctcaaga

SEQ ID NO: 993539 - DNA, 120 bp, Artificial Sequence
  ENSG00000233067_7 (sequence is synthesized)
tctctctctggctccctttgaatttgctaattcagactttcacatttcccccaggaaaaatcataaggaccaaatcatatccgttttctcaaatggcttcaaagacccatgtcatcgttt

SEQ ID NO: 993540 - DNA, 120 bp, Artificial Sequence
  ENSG00000233067_8 (sequence is synthesized)
ggcatcatgtaattctttactgatgtactttaagagtcacgttttattctctttatgcagctgtcaaggacagacacaaagagtgggggtgtcttcctcactaaatactttcccacaaca

SEQ ID NO: 993541 - DNA, 120 bp, Artificial Sequence
  ENSG00000233067_9 (sequence is synthesized)
gagagaagatgtcaaatctgaaaagcacttaaaagtatgaaacatcgagaagaactagaagatggccaaataggaacagcactggactgcagctcccagcgaaatcaatgccaaatcaat

SEQ ID NO: 993542 - DNA, 120 bp, Artificial Sequence
  ENSG00000233067_10 (sequence is synthesized)
gcagaaaggagcaaactcaagtcctgcatctcatccctgatgccccttcctcagtctactcacatgagcataactcaggaagaagagctggttgttggtgaatgtgatgcctggtagaag

SEQ ID NO: 993543 - DNA, 120 bp, Artificial Sequence
  ENSG00000233067_11 (sequence is synthesized)
aggctcctcaagtccctgccttctgtcatttatccatttcctgtaagcctggtgagagaagaagaagagatgagtctctgcaacggtcctctcatttattgattgctgtactaagtattt

SEQ ID NO: 993544 - DNA, 120 bp, Artificial Sequence
  ENSG00000233067_12 (sequence is synthesized)
gaaactgacactagcagcagggatattcagcccaggcctgggagcatgaccgaagtcgggcagaaactgccattcctaacagtggccacacgagggcggctctaagaagatgtgccagct

SEQ ID NO: 993545 - DNA, 120 bp, Artificial Sequence
  ENSG00000233067_13 (sequence is synthesized)
ggtagtgagcagccacagccttccggctgtcctctgaccagagtcctgtaggaacaacggccagtatggaggacccacggcagactggccaactggccagagggaaggcaggatgcctcc

SEQ ID NO: 993546 - DNA, 120 bp, Artificial Sequence
  ENSG00000233067_14 (sequence is synthesized)
ctaaggaggtggcctggcctttgaataaagatttgaaggaaatgggagcataaaccaggcaggtcacttggggaagttttccaagagaaagccaaccccaggtataaatgctcccagagc

SEQ ID NO: 993547 - DNA, 120 bp, Artificial Sequence
  ENSG00000233067_15 (sequence is synthesized)
gcgtgtcaggtgtgctctataaacacgaaggaggccagtgtggccggaacagaaggagggaggaagggggagagtagcaggaggtacaggcagaaagataacagaccttaaggccattat

SEQ ID NO: 993548 - DNA, 120 bp, Artificial Sequence
  ENSG00000233067_16 (sequence is synthesized)
aaataatttggctctttctctgagtgagatgggatgctgataaaagcttttgagcaaagaagtgacacgatgtgattgtaaaacgtcttaaaatcgctacaatattatatttagaataga

SEQ ID NO: 993549 - DNA, 120 bp, Artificial Sequence
  ENSG00000233067_17 (sequence is synthesized)
ctgaaggggggtaagaacaaaagcagggaggccaatgaggaggctattaccataatccaggtgggagatagtagtggtatgaacaagggtgataaattccatcccctgcattcaacactg

SEQ ID NO: 993550 - DNA, 120 bp, Artificial Sequence
  ENSG00000233067_18 (sequence is synthesized)
tagaaatgtgattaaaaccatgagattagatgttatcaccaagcaagtgagcaaagatggagagaagagaacagaaaaggtgcagactgagccttggggcatgccatcattaagagatat

SEQ ID NO: 993551 - DNA, 120 bp, Artificial Sequence
  ENSG00000233067_19 (sequence is synthesized)
gggagatgaggagaaaccagcaaggatttgagcaacagtggcccaccctccccaagacaagccaccaccaaccggaatttggtgtttgtcattctcatgaatgtctttacacttacacta

SEQ ID NO: 993552 - DNA, 120 bp, Artificial Sequence
  ENSG00000233067_20 (sequence is synthesized)
caaatggatggacctccaaaccatgtgtagaattgttctgcatgattttcaactttatttatatagtatcatacttgatatattttcccaagttgttttacttgtgaaattcatccatgt

SEQ ID NO: 993553 - DNA, 120 bp, Artificial Sequence
  ENSG00000227043_0 (sequence is synthesized)
agtgtcagagcaggggagaccagcacagacaccttacaagcaggaactggatgacaaaaagaagagccgatataaccaggaacctactctggccaccccaatggtcatggatttggatgg

SEQ ID NO: 993554 - DNA, 120 bp, Artificial Sequence
  ENSG00000227043_1 (sequence is synthesized)
tgagaagagctgagacagacggcacaggttctcaggatgcttgaggcagtacctaaccatgtgcaagagcttccacatacatgacctcatcatatcaagagttcttcaatgatacgactt

SEQ ID NO: 993555 - DNA, 120 bp, Artificial Sequence
  ENSG00000227043_2 (sequence is synthesized)
tcattcctgtgccaagtcaaagagtttcagacaaagtcaagagaccctcttgcttctacctgtggctctaagacaaccttgattcaaaccttggtcaccgtgtgctgaacccccaggtgc

SEQ ID NO: 993556 - DNA, 120 bp, Artificial Sequence
  ENSG00000227043_3 (sequence is synthesized)
cagactggaacggagatgtttggttaggacaacttatatggagaacttggagaggcgctgcactttaccattcaacatcagaacaccaccactgccactctaagaaatggaaggtcatgc

SEQ ID NO: 993557 - DNA, 120 bp, Artificial Sequence
  ENSG00000227043_4 (sequence is synthesized)
ctcgttgaaccttcctttttgttcaagaagactagaaaggtatcatcgctgcgattctacctgtaaaagaacaccttgagaagacgccattcatcactctgtctgggggtgagtataaag

SEQ ID NO: 993558 - DNA, 120 bp, Artificial Sequence
  ENSG00000227043_5 (sequence is synthesized)
atggcacccagaggaccatcaaggagagaaaactccaggagagctcatggaaatagtaacacagcaaagggagaaagagagaaaagtcgaactctgagttcctctctaggggaaaggagg

SEQ ID NO: 993559 - DNA, 120 bp, Artificial Sequence
  ENSG00000227043_6 (sequence is synthesized)
agagtttgaagatctacattgaaatcttttacctaagaaacttagtccttacccataaacccaggagaagagggggagcacgcatcagagctagtaaatatagaaaaagtcaaacattcc

SEQ ID NO: 993560 - DNA, 120 bp, Artificial Sequence
  ENSG00000227043_7 (sequence is synthesized)
tcatcaaggcctcggaagaaaccaaagaaaccaaaaaaacaccaagggagaaaatgtccactgaaacacgtgcctgcctgggtgtgaggatatcctatgacagtcactgtcgctcaggca

SEQ ID NO: 993561 - DNA, 120 bp, Artificial Sequence
  ENSG00000227043_8 (sequence is synthesized)
ggtcagcccactcctctggttatagaggagagcaagctgggccaatccaacccaccagactgatccttgagtccagcccagctttcccacaggtcagtaaaccagacacttcatgggcca

SEQ ID NO: 993562 - DNA, 120 bp, Artificial Sequence
  ENSG00000227043_9 (sequence is synthesized)
ctaaggccatccatagttcctccacccagcctgtgccactacatggaggtcagagcagactccaaggtgtggccggctcaccagatcctgagcccaggtgtccagctcttcaactcagca

SEQ ID NO: 993563 - DNA, 120 bp, Artificial Sequence
  ENSG00000227043_10 (sequence is synthesized)
gagcagcattttatttttattttttaatttaattttttgttttgtttataattgagacatgttaattgtacatgcttatgaggtacagcgtgatgttccaattcatgtctacattatata

SEQ ID NO: 993564 - DNA, 120 bp, Artificial Sequence
  ENSG00000227043_11 (sequence is synthesized)
atgatcagatcagggcagtgagcatgtccctctcaacagagcaactttccgcaaagctctcctctctccatggctgtgtaaacagaaaagcaaagaatagggagggacagagggtagaac

SEQ ID NO: 993565 - DNA, 120 bp, Artificial Sequence
  ENSG00000227043_12 (sequence is synthesized)
attgacttcagacttccagtccacagctctgctctccaaataccgccaaagtggaagctagaaatacctcattattaggaagctaaactccttatttttaaataaaaacttatttattta

SEQ ID NO: 993566 - DNA, 120 bp, Artificial Sequence
  ENSG00000227043_13 (sequence is synthesized)
gggcaggctcatcagtgtcagagcaggggagaccagcacagacaccttacaagcagaatgaccttctgtggctacagagaaaggcttcaggcaaagagatgcagctctgggccccagagt

SEQ ID NO: 993567 - DNA, 120 bp, Artificial Sequence
  ENSG00000227043_14 (sequence is synthesized)
ccgctggagcacactgaagctggagcacactgaagtggaagatggggctgcagacagagactgggcagcctctgctccagggaggcccgagagccagagagcagattccataagaagaat

SEQ ID NO: 993568 - DNA, 120 bp, Artificial Sequence
  ENSG00000227043_15 (sequence is synthesized)
aactcccattcctcatgcatgagaccctctgctaaatgcttcctgtgcaccacctccagaaatcctcccaagccaggacaccagcagtattacaggaactggatgacaaaaagaagagcc

SEQ ID NO: 993569 - DNA, 120 bp, Artificial Sequence
  ENSG00000227043_16 (sequence is synthesized)
acggcacaggttctcaggatgcttgaggcaggctgagctccacgagcagagaccaggctgatgcatgctccacatcttgcatgctttgcttaaagaatgagcgaaaggagtaaatgaaat

SEQ ID NO: 993570 - DNA, 120 bp, Artificial Sequence
  ENSG00000227043_17 (sequence is synthesized)
tggttctttcaaagcaacaagaacatttgtgacatatctgctaaggtggtgagggacaaagatgaaggactgcagagctgtctcataggctcctttgagcaaagcattcctcctccaggt

SEQ ID NO: 993571 - DNA, 120 bp, Artificial Sequence
  ENSG00000227043_18 (sequence is synthesized)
tgattgagaatcatccagggagatgggggaaattctgccttcacaaagtttcaggctcctgttgttcagtctacaaatatgcctacaatttctacagcctcagtccagcttcagcctcaa

SEQ ID NO: 993572 - DNA, 120 bp, Artificial Sequence
  ENSG00000227043_19 (sequence is synthesized)
actagcacttggctgctttctttcttccctgcctgagtttttgacagagtgacctgaattcacctctcctctgcttccttgcctcccatcgtgatctccctgagtcagattggttccaaa

SEQ ID NO: 993573 - DNA, 120 bp, Artificial Sequence
  ENSG00000227043_20 (sequence is synthesized)
aagtaaggatctaaagtccagcctcctcctccactgccctcaaggcctttcctcatgaaagcagaggttctgaatgctgatttctgttttaaagcccaataactctttaaacatcttgtg

SEQ ID NO: 993574 - DNA, 120 bp, Artificial Sequence
  ENSG00000227042_0 (sequence is synthesized)
ctctaagattatcttacttccaaaggaaaaaggagtgatgactgcagtgattgggccactgaaggagcctgtccagagaaacaagatccagattcttgccaatgcccagacagatggggg

SEQ ID NO: 993575 - DNA, 120 bp, Artificial Sequence
  ENSG00000227042_1 (sequence is synthesized)
tccctgtgtgaggaaaggagcactcagtgtgggtcctgctacctcctgaatccttttccaccttctgtggcacctgctattttgctgctgaggtttcttctgggcctatatgacatgccc

SEQ ID NO: 993576 - DNA, 120 bp, Artificial Sequence
  ENSG00000227042_2 (sequence is synthesized)
cttcctttgaagttaagaggaggtcatctgacaacttctactgaatgaattctgtgaagaaatggcatatgttatgtatgggccaaagaagtgtagaactagtgtgcctcttccatcttt

SEQ ID NO: 993577 - DNA, 120 bp, Artificial Sequence
  ENSG00000227042_3 (sequence is synthesized)
ctttttcaaccatggcaacctgggaattcacatattgagatggcagtttcaccagatggaggaggtttggatccctgagtcaccagatggaggcaagctctggccaacttgcattggagt

SEQ ID NO: 993578 - DNA, 120 bp, Artificial Sequence
  ENSG00000227042_4 (sequence is synthesized)
tcatacaaagtgattcaacaaatgaatttcgcagtaccacatctgccacctcctgatttgtgcacttcttgctgccaccatgtgaagaaggatgtgtttgttaccccttccgccatgatt

SEQ ID NO: 993579 - DNA, 120 bp, Artificial Sequence
  ENSG00000222031_0 (sequence is synthesized)
acttctgacattttggaggaaacagacttagcttctttggaactgcatacacagtggagaagaagacagaaaaggctgtggcctgatgaagcttacattcagacagacaactcacaattc

SEQ ID NO: 993580 - DNA, 120 bp, Artificial Sequence
  ENSG00000222031_1 (sequence is synthesized)
tgctggaatagttggtgtgtgtcagatattatcgtaagacttggggaaggtaatcctgggctttacaagatgagtggagagaaaatggctctatctaattggcccttacacagagaccag

SEQ ID NO: 993581 - DNA, 120 bp, Artificial Sequence
  ENSG00000222031_2 (sequence is synthesized)
cccgcttcatagttcaagatataaacctgccacacatatgaatgtaaacagctgtagatacagagtattttacaattgcacgctttcaagttattaaaatttctggatttgtttaattta

SEQ ID NO: 993582 - DNA, 120 bp, Artificial Sequence
  ENSG00000222030_0 (sequence is synthesized)
aacaaaaggcaacatttcctgagtaaagggcttgatatcaaccccagggaggatttctggactccagtgcagtgcctgctatgaagcacacacaatgcttatctgctgctccattggaaa

SEQ ID NO: 993583 - DNA, 120 bp, Artificial Sequence
  ENSG00000222030_1 (sequence is synthesized)
gccaatagcaaagaagggaaaggaccttctgattggagagtggaggaagaggcatcatctttgatcatcatcagattttacaactcattgttcccttccagtccacagggtgagagaatc

SEQ ID NO: 993584 - DNA, 120 bp, Artificial Sequence
  ENSG00000222030_2 (sequence is synthesized)
atgtaaatggtcaaacaaacacttggattatagaagacacttgatattaataatgacaataaaaatgtttacctaacttggatagattttgtgtatagataggatgtgtgtgcgcatgca

SEQ ID NO: 993585 - DNA, 120 bp, Artificial Sequence
  ENSG00000222030_3 (sequence is synthesized)
tgtgtgtgtgtctgtgtgtgtgtgtgtgtatactccccccttactgggaaaggacatatcagaagatcaggaaatgcattacacaatttttgtatgcaatattagtccatttcttggcgg

SEQ ID NO: 993586 - DNA, 120 bp, Artificial Sequence
  ENSG00000222030_4 (sequence is synthesized)
cttggcggagacccaaatctattgtggcgagaaagtaatagatgaactaactagggactcagacttactggctagtgtccaagaaacattaaaaaattgagtactgaacataacaagtag

SEQ ID NO: 993587 - DNA, 120 bp, Artificial Sequence
  ENSG00000222030_5 (sequence is synthesized)
gatggtgcatgcaaatttagatgtcttattgaaaacagcacatttattaatatattagacttgtagacgtgagggtgttttaatacctactcagaaattactcatgggtcggcttcacag

SEQ ID NO: 993588 - DNA, 120 bp, Artificial Sequence
  ENSG00000222030_6 (sequence is synthesized)
aaatatcacttgcataagtgtgagcttcagagaaatggtgccaggcatgagtgatcatggctggactaatctaaagaaaactggaatgcctgtagttaatgatactatattttacacgta

SEQ ID NO: 993589 - DNA, 120 bp, Artificial Sequence
  ENSG00000222030_7 (sequence is synthesized)
aaaatttttaagagggtagatatcatgttaactgttcttatcacaatgaaataaaaatttaaaaataaaactgattaatgggcaaaatatgttattgtcattgtcaaactgtcatctttc

SEQ ID NO: 993590 - DNA, 120 bp, Artificial Sequence
  ENSG00000222030_8 (sequence is synthesized)
atataggaactacatttttgtcagatttatttaagatagcatttatgtacagtaaaatgtaccctttaaaatgtacagcttgaggagttttgacaaatatatacagatatatgaccatca

SEQ ID NO: 993591 - DNA, 120 bp, Artificial Sequence
  ENSG00000222030_9 (sequence is synthesized)
ctacaatcaatatacaaaacttttccatcatcccagaaagttcccagctgatctctgtagtcaatgccttcctcagacccccagcctctggcaaccactgatctgatgtttgtccctgaa

SEQ ID NO: 993592 - DNA, 120 bp, Artificial Sequence
  ENSG00000222030_10 (sequence is synthesized)
gttttgccttttccaaaatgtcatataaatgaaatcatacaaaatataaccttttgtgtctgttttctttcacttagcacaatgcttttggatccatcctagttcacacctttttatcac

SEQ ID NO: 993593 - DNA, 120 bp, Artificial Sequence
  ENSG00000222030_11 (sequence is synthesized)
tgagtggtatttcatttgtttatacattattcagttgatagacttttaaattattttcaattttgtcaactatggataaagctgctgcaagtatttgtatacaggtcttgtccattgtgt

SEQ ID NO: 993594 - DNA, 120 bp, Artificial Sequence
  ENSG00000222030_12 (sequence is synthesized)
gggcttatattttcagtaggcaaatacctgggagtgagattgccaggtaatatggtaaatatatgttgaacattgtaagaaactgccagagagcttttgaaatgattctaccattttgct

SEQ ID NO: 993595 - DNA, 120 bp, Artificial Sequence
  ENSG00000222030_13 (sequence is synthesized)
ttctcaccacaatgaatgagatttttagtagatctgcatccttgttgacatcgccagtcattttaatttaagcaattctaatcaatatgtaatggtgtctcatcacagtttttccttgca

SEQ ID NO: 993596 - DNA, 120 bp, Artificial Sequence
  ENSG00000222030_14 (sequence is synthesized)
tattgctaatgactaataatgttgagtacatttgtatgtgcttatttgtcaacgaggtctcttctttggtaaagtgtgtgttctatcttttgtccatttttaaaaattgggtttttgtct

SEQ ID NO: 993597 - DNA, 120 bp, Artificial Sequence
  ENSG00000222030_15 (sequence is synthesized)
atcttactgaactcttctgtgaatttaaatattgtttcctaatgtgttaaatgaagataatgcctatctcactgttttgtgtgtgtgtgtgtgaaaataaatgaaacatatgtacaattg

SEQ ID NO: 993598 - DNA, 86 bp, Artificial Sequence
  ENSG00000242440_0 (sequence is synthesized)
cgcccgcgcctctcccgtgccttggccaggctagaaaggggctcccacagtgcaggggcgggctgaagggctcctcaagtgccacc

SEQ ID NO: 993599 - DNA, 120 bp, Artificial Sequence
  ENSG00000242440_1 (sequence is synthesized)
ggaggtgccgagagcgagcgagggctgcgaggactgccagcagctgtcacctctcgttaccatcactcctagtgaccatttcggataatccaccttgcctcatcaaaccagaaaacaatt

SEQ ID NO: 993600 - DNA, 120 bp, Artificial Sequence
  ENSG00000242440_2 (sequence is synthesized)
tccaccttgcctcatcaaaccagaaaacaattcaaacctggcctccttctaactggaagccacattttaagaacttattgtgaagaactggaaagcctccaatagaacagaagctaaaag

SEQ ID NO: 993601 - DNA, 120 bp, Artificial Sequence
  ENSG00000242440_3 (sequence is synthesized)
cagaaattataaaagctgttacacctactcagctctattacatgttggaaaaactgaaccagagaaacaattacatacactcttgtcttctggaaaagctgaattgggttttggtctgaa

SEQ ID NO: 993602 - DNA, 120 bp, Artificial Sequence
  ENSG00000242440_4 (sequence is synthesized)
aggtctttgaatctgtaacagtctccacaaagaagcagaaatggcaagaacaagatccaattcccaggacagcaatgacagtgatgacccattatacaggctgcctttccagctctccaa

SEQ ID NO: 993603 - DNA, 120 bp, Artificial Sequence
  ENSG00000242440_5 (sequence is synthesized)
tcatacttccaagaaaactgctcactctcagaaccaaggttcaagttgtacattgggatttgggtagagcacgggacctggcatggagcagcattcaaaatattgggtagaaggaaaaag

SEQ ID NO: 993604 - DNA, 120 bp, Artificial Sequence
  ENSG00000242440_6 (sequence is synthesized)
gaagaaagaagggaaggacagggaagcaaggaaataaaggaaatcaggctatatatacagtgatgcccatctacccctgagatctaaaaatctaagatgaaaacgagcacacagtcttgg

SEQ ID NO: 993605 - DNA, 120 bp, Artificial Sequence
  ENSG00000242440_7 (sequence is synthesized)
cagcattggggtaacagactatgaaagaagaaatcagattggaaaattcagtatatcaatgaagaaaataatcactcaaggagaggaataaacagcaaaacaatctatatatttaattat

SEQ ID NO: 993606 - DNA, 120 bp, Artificial Sequence
  ENSG00000242440_8 (sequence is synthesized)
ctctggctttgccttctgccatgattaaaagctcccgaggcctccccaaaagcagatgctgctatgcttcccatacagcctgtggaatcatgaatcaattaaacctctttacttatagac

SEQ ID NO: 993607 - DNA, 120 bp, Artificial Sequence
  ENSG00000242440_9 (sequence is synthesized)
caagttgtacattgggatttgggtagaggtaagaggaaacaccctcaaatagatttggatcattccagatgtcctataaatgaagtttgacatttgctcaagtatcaccacctcactgta

SEQ ID NO: 993608 - DNA, 120 bp, Artificial Sequence
  ENSG00000242440_10 (sequence is synthesized)
aaagcaacgaatctaccttcattgtgaaaatttggggactagaattaatgagtacagtaaccttatggatagaaccttcagagtttttcattatctatgtgaagagataattctaaatta

SEQ ID NO: 993609 - DNA, 120 bp, Artificial Sequence
  ENSG00000242440_11 (sequence is synthesized)
tttgagatctagtatctgtcagcttggggactggtgtctagtcccaagactagacaaaggaaacccttattagtatttttattttccatttcaaataaaaagggtatgtgttaaaaaaaa

SEQ ID NO: 993610 - DNA, 120 bp, Artificial Sequence
  ENSG00000242440_12 (sequence is synthesized)
tgggaagttcaagaaacatgacaccagcatctgcttggtttctgttgaggactttcatgcttatatcacaacatggcagaaggttaaagggggagtagacatgtgcaaataggcaaaacc

SEQ ID NO: 993611 - DNA, 120 bp, Artificial Sequence
  ENSG00000242440_13 (sequence is synthesized)
tgaggggcatcttggctttataacaacccactcttggaggactaattcattcttgagagaactaatctggtcttgccagagaaaaaattcactcactgcctactgtgagaatagcactaa

SEQ ID NO: 993612 - DNA, 120 bp, Artificial Sequence
  ENSG00000242440_14 (sequence is synthesized)
gccatccatgagagtggagccccatcactcaaacacctcccattaggctctacagcttacagattatacctcctaacattgccacagtgggaaacaaatttcaagatgagatttggtggg

SEQ ID NO: 993613 - DNA, 120 bp, Artificial Sequence
  ENSG00000242440_15 (sequence is synthesized)
gacagaccatatctaaacaaagagtaaacaagggtaaacaacttttgagaacatacttgtgatcctttatttcaacccagaatgatgccagaattttggagatggggctcagagcaaatc

SEQ ID NO: 993614 - DNA, 120 bp, Artificial Sequence
  ENSG00000242440_16 (sequence is synthesized)
agtaagttacaattctcaagtttcacagggaagtgggagtgagagacacatcatggaggaccacgcgactctcagttacactgggtgaattgtcttcattgaattcccgcaccatgcaga

SEQ ID NO: 993615 - DNA, 120 bp, Artificial Sequence
  ENSG00000242440_17 (sequence is synthesized)
ctcatttaacggtagttcttccaaagctgcttttctgctttgcttttggaatactactttatctaaattttcatctaccctttcaattcctatgcttcttgtgttgatttctcttttccg

SEQ ID NO: 993616 - DNA, 120 bp, Artificial Sequence
  ENSG00000242440_18 (sequence is synthesized)
acttctcagatttttaatctcatttttaaacatgagaattctctgaggtctatttcttgaccctttgtcctctttttaactatcccttgggaaacttgcacaatctaaatgactaactag

SEQ ID NO: 993617 - DNA, 120 bp, Artificial Sequence
  ENSG00000242440_19 (sequence is synthesized)
aacttatgagattatgagccagatctctccctgcttatgagcccatttcaattagatgtctcagcatcattgtaagttaaaatgcataaaatccaaaacaataaatttttctcaaaccaa

SEQ ID NO: 993618 - DNA, 120 bp, Artificial Sequence
  ENSG00000242440_20 (sequence is synthesized)
aatgatctgaaaaccaaagggtgtcgaattctgcagatcatatagagcaggaaaaaaaaagaaagaaaaccagagttaacatagtagtggtccctcttaccgtgtccggaattggtgggt

SEQ ID NO: 993619 - DNA, 120 bp, Artificial Sequence
  ENSG00000242440_21 (sequence is synthesized)
tcttggtttcactgactccaagaatgagactgcaaaacctcgcctgagtgttacggttcttaaaggtggcctgtccagagtttgttcgttttgatgttgggagtttcttccttctggtgg

SEQ ID NO: 993620 - DNA, 120 bp, Artificial Sequence
  ENSG00000242440_22 (sequence is synthesized)
taattatagtttggtaatgcctgaaagccagaggactcccagacaaaaaagaaaaaagtatgttgattaaatattttccccttttgagggtagatagaaagaataaaaggaatttcaaag

SEQ ID NO: 993621 - DNA, 120 bp, Artificial Sequence
  ENSG00000242440_23 (sequence is synthesized)
tctcaggttgttaggaacctgcaaaggtgatttctttttttctattccttcaccttggcaaggtgataaggcagatgaggagaagtaggaggcacagggccatgaaaatggacccaaagt

SEQ ID NO: 993622 - DNA, 120 bp, Artificial Sequence
  ENSG00000242440_24 (sequence is synthesized)
gatggggctctgttctcttgtaaatggccatccttccaggacagcctttctcacaggctgcttcagcatctactgactgatctctgaaattcgtttctctcatttcaccttcatacctca

SEQ ID NO: 993623 - DNA, 120 bp, Artificial Sequence
  ENSG00000242440_25 (sequence is synthesized)
gagtttgtaatccattccttttgtgctgttaatgataaaccacctgtaaagaccagtttaatttctaaagagatgaaaatattaattacacagactttaagaattttttttaaatttttt

SEQ ID NO: 993624 - DNA, 120 bp, Artificial Sequence
  ENSG00000242440_26 (sequence is synthesized)
ccctctcattttttttttgttgtttaaaacaaacaaacctttttcacttcttcctctcttttcctcatttatcatcttatttcttatttacagttttacttgtttgtgttagtggcagga

SEQ ID NO: 993625 - DNA, 120 bp, Artificial Sequence
  ENSG00000242440_27 (sequence is synthesized)
tgatattaatttcaaaacccttggagacatactttgttgaatctgaaagttaaaggtggctttgtgcttagctttttcctagcaagatctaatattaaaatgtaacttgctattacaaaa

SEQ ID NO: 993626 - DNA, 120 bp, Artificial Sequence
  ENSG00000222032_0 (sequence is synthesized)
agccaggcttgccagcactgctctgctggaagcatcctgcaaaagccgtgcttatttatttgcttttgtgagcttcatcagttcttccaattttcaccctgaaaatgatccttcaaactc

SEQ ID NO: 993627 - DNA, 120 bp, Artificial Sequence
  ENSG00000222032_1 (sequence is synthesized)
agccgctggataagacaccctgaaatggacatgcctaatgtgaaaccttctcggccattcgtggctgcagccagtggaaaaaggacttcaccattgcttataaaccatgaatcagtgtcc

SEQ ID NO: 993628 - DNA, 120 bp, Artificial Sequence
  ENSG00000222032_2 (sequence is synthesized)
tctcaggaggcttttaatgatgaaatttttgaattctgtggattgacatattttggtgtgacatgaagctctcctattgcaccagtgattcaaagagactcatgggaaagaggaggctca

SEQ ID NO: 993629 - DNA, 120 bp, Artificial Sequence
  ENSG00000222032_3 (sequence is synthesized)
agacactcatcagacagaagaatgagtggagaactcagcacttgcttcctttgccacctgccaacatccaatcaaattgtgaggagaaatggttttggttggcaaagcatttgttcaatg

SEQ ID NO: 993630 - DNA, 120 bp, Artificial Sequence
  ENSG00000267465_0 (sequence is synthesized)
agtccaaatgctataccggttaaactccgccattttgcctcttagtgctcatgcttgagcccgcttgcccaactcctgagatgtcatcgggaagctgctgatcagcaattacagaaccag

SEQ ID NO: 993631 - DNA, 120 bp, Artificial Sequence
  ENSG00000267465_1 (sequence is synthesized)
tggctttggttgggcactggaagtacataaagaagaagacatacatgctgtctcagggtgatcgtgggtctctagccaggagtcagatgacatcaccaccatcacaagctggtgatgcca

SEQ ID NO: 993632 - DNA, 120 bp, Artificial Sequence
  ENSG00000267465_2 (sequence is synthesized)
gagagaacacagcaagcagtcaccgtctatgaactagaaagctgattcaccagacaccgaatctgccagcaccttggtcttggacttcccagcctccagaactaggaaatgttccaacac

SEQ ID NO: 993633 - DNA, 120 bp, Artificial Sequence
  ENSG00000267465_3 (sequence is synthesized)
atctgaggaaacacatgccttcccagactggcctgttgctgtttcccaggagctgcattctggaaggtggaccatcaggtggaagaagtattcttcagagagctgccttcccaagggaat

SEQ ID NO: 993634 - DNA, 120 bp, Artificial Sequence
  ENSG00000267465_4 (sequence is synthesized)
ggtgacagcttgcgcttgccggggagtcctgctgccttccgaggtgtgaagggaaggcatgcactgtgcatatgctgtaccatacagttttgcctacaactgcttgtagcttcattgtag

SEQ ID NO: 993635 - DNA, 120 bp, Artificial Sequence
  ENSG00000267465_5 (sequence is synthesized)
ctgtgaatgctccgttcctctccttttcacccctgaagattcgcgaacatgcaggattgagctgtgcgaggcatagcattccccacatggtagacgaaggcggatgtgggtctgatggct

SEQ ID NO: 993636 - DNA, 120 bp, Artificial Sequence
  ENSG00000267465_6 (sequence is synthesized)
ctactgccgtccacccgggaggatggacgtgtgttccgggatatcagagcttgcggctgaccagcccacatgtccatgcagccctcccgctggctgtgtcgacattttgggtgtcactga

SEQ ID NO: 993637 - DNA, 120 bp, Artificial Sequence
  ENSG00000267465_7 (sequence is synthesized)
tctcaaggaagtggacatgaaagatctaaaatcagggctgcttaaaaaaagcaagcacagattaatgacctatctacatcctacacggttttaggactgcgcctagatgggcttaaagac

SEQ ID NO: 993638 - DNA, 120 bp, Artificial Sequence
  ENSG00000267465_8 (sequence is synthesized)
cctagcctaaaaactgtaaatgtgcttccgtctttgccctgtaggacaagaaagccttacgggcttgcttctaactgtgagaggaggagaggccaggaagggagagggagaaaaggagga

SEQ ID NO: 993639 - DNA, 120 bp, Artificial Sequence
  ENSG00000267465_9 (sequence is synthesized)
gaacaggagacgagaaggaggggagagtgaggagaggaggagagaggcttgtcaaaatctttttagtgcacaaaactaattttgttcatcttggatttggtgagctgggtaatattctgt

SEQ ID NO: 993640 - DNA, 120 bp, Artificial Sequence
  ENSG00000267465_10 (sequence is synthesized)
gcacggctcctaaatgaattattaaatgtcaactcaagatggcttaactaaaatactcaatttaataaccaaaagtatctaaggtaacaacaacaattttgcaggtgattgtagagttgt

SEQ ID NO: 993641 - DNA, 120 bp, Artificial Sequence
  ENSG00000267465_11 (sequence is synthesized)
caagtcaaaccattatagacaagcatttggggttttcacataatctccttccacatctcatcttctgtcactaaatacccactctggtgagcatattccatttcaataaagatcatcgct

SEQ ID NO: 993642 - DNA, 120 bp, Artificial Sequence
  ENSG00000267465_12 (sequence is synthesized)
tcggtgccagcttctttttattcagatcgagccagaaaaccttttttttttttctaaaatataaagcaaaacaagatctcagtcacaaccaccaaatctttattaatgcattccttgtgc

SEQ ID NO: 993643 - DNA, 120 bp, Artificial Sequence
  ENSG00000267465_13 (sequence is synthesized)
tacttctgaatattaataaaaattaataattaattttgcctttggcattgcaagatatactagttttaattagtgtactgtactcctatacaattaaaaaataattgatgtccatgctta

SEQ ID NO: 993644 - DNA, 120 bp, Artificial Sequence
  ENSG00000267465_14 (sequence is synthesized)
tgctcttctcacctctcattcggaatctactctcaattatatataagacggtcaataatgaaactcgtggcccatctgtccttccggtgtgccctgcactgtgctaagaacttcccatcc

SEQ ID NO: 993645 - DNA, 120 bp, Artificial Sequence
  ENSG00000267465_15 (sequence is synthesized)
gccattttgcctcttagtgctcatgcttgagcccgcttgcccaactcctgagatgtcatcgggaagctgctgatcagcaattacaggtagatgctcttctcacctctcattcggaatcta

SEQ ID NO: 993646 - DNA, 120 bp, Artificial Sequence
  ENSG00000267465_16 (sequence is synthesized)
ctgtgtattgggagactgcctttccctgtcattgatcaattatttttttagagagatacttaacaactacctcaccatcacttgatggttgcctgacattcctgattggtgagggagaga

SEQ ID NO: 993647 - DNA, 120 bp, Artificial Sequence
  ENSG00000267465_17 (sequence is synthesized)
gggagggagtcaggggggctctcctgccctgttcctgtctgactagctacctgctgtaacaattatactagtactagtgataaacctatcacttgtgcctatgacagggccttacacaag

SEQ ID NO: 993648 - DNA, 120 bp, Artificial Sequence
  ENSG00000267465_18 (sequence is synthesized)
gtagataaccaatgattatggttgaattaataaacaaggcctctcttatgcccctaaaaatgcagagatgctcttctcacctctcattcggaatctactctcaattatatataagacgca

SEQ ID NO: 993649 - DNA, 120 bp, Artificial Sequence
  ENSG00000267465_19 (sequence is synthesized)
tacagcaccacctgtcttccacattatgatgcgaagctgaagattcaccccactaggtcaatggggacactaattggggaatatttgaggtgcagagaggaggtagatgctacatcctgt

SEQ ID NO: 993650 - DNA, 120 bp, Artificial Sequence
  ENSG00000267465_20 (sequence is synthesized)
gcccaactcctgagatgtcatcgggaagctgctgatcagcaattacagagatgctcttctcacctctcattcggaatctactctcaattatatataagacgcaccacctgtcttccacat

SEQ ID NO: 993651 - DNA, 120 bp, Artificial Sequence
  ENSG00000267465_21 (sequence is synthesized)
ggaggtagatgctacatcctgtgaacctcagtaagggggatgcctctgtgtgtagggatgtcaaggccctggccccgtgtcatccccagataagccccatatcaccctgggagctctgca

SEQ ID NO: 993652 - DNA, 120 bp, Artificial Sequence
  ENSG00000267465_22 (sequence is synthesized)
aggacagaatccatgtgacattttgggaacttctaagatgctaatcagaggccttctcctctgagttctcaaacaaatgagaagtagacccaagggtcaagggttgatgaaaatagcatg

SEQ ID NO: 993653 - DNA, 120 bp, Artificial Sequence
  ENSG00000267465_23 (sequence is synthesized)
gttgtttgcagagctggattggatctgcagagagcccaagcctccctgtcttcctctgtctagtctccggccactgacagagtccaggcagagacagaaccaggccgtagacttgctgtg

SEQ ID NO: 993654 - DNA, 120 bp, Artificial Sequence
  ENSG00000267465_24 (sequence is synthesized)
gggaaggatatctgtcacatggaagcagaagccaacagcatctttcccctgtggtccctaaaggaaaaattgaggcagaccacagggaatagcaactctttcgtagcttaagacacccat

SEQ ID NO: 993655 - DNA, 120 bp, Artificial Sequence
  ENSG00000267465_25 (sequence is synthesized)
ggacatcttctcatccttcccagcagctgtccttcaggaaagagggaatggagtgggaattttccccccaatactttcagggaagaagtcatcatttgctactctctgaatgtttgtgct

SEQ ID NO: 993656 - DNA, 120 bp, Artificial Sequence
  ENSG00000267465_26 (sequence is synthesized)
ttttccccaaattcctatgttgaagttcacccctaaggtgacggccttaggaggtggggcctttggaaggtgattaagtcatggagatggagtcctaatgcacaggattggtggttttat

SEQ ID NO: 993657 - DNA, 120 bp, Artificial Sequence
  ENSG00000267465_27 (sequence is synthesized)
gccattttgcctcttagtgctcatgcttgagcccgcttgcccaactcctgagatgtcatcgggaagctgctgatcagcaattacagagaagcagtgtcacataactgtaagcaaagatga

SEQ ID NO: 993658 - DNA, 120 bp, Artificial Sequence
  ENSG00000267465_28 (sequence is synthesized)
aagaccacgattaacagggtccacatctgttcgggggaggatgcagcttgagtctctgccagcctctacctcaaagaatgtgtgcgctaggtcaataatgaaactcgtggcccatctgtc

SEQ ID NO: 993659 - DNA, 120 bp, Artificial Sequence
  ENSG00000267465_29 (sequence is synthesized)
atgctataccggttaaactccgccattttgcctcttagtgctcatgcttgagcccgcttgcccaactcctgagatgtcatcgggaagctgctgatcagcaattacaggtcaataatgaaa

SEQ ID NO: 993660 - DNA, 120 bp, Artificial Sequence
  ENSG00000267465_30 (sequence is synthesized)
accagtccaaatgctataccggttaaactccgccattttgcctcttagtgctcatgcttgagcccgcttgcccaactcctgagatgtcatcgggaagctgctgatcagcaattacagcag

SEQ ID NO: 993661 - DNA, 120 bp, Artificial Sequence
  ENSG00000267465_31 (sequence is synthesized)
atgctataccggttaaactccgccattttgcctcttagtgctcatgcttgagcccgcttgcccaactcctgagatgtcatcgggaagctgctgatcagcaattacagctcagccccacct

SEQ ID NO: 993662 - DNA, 120 bp, Artificial Sequence
  ENSG00000267465_32 (sequence is synthesized)
accagtccaaatgctataccggttaaactccgccattttgcctcttagtgctcatgcttgagcccgcttgcccaactcctgagatgtcatcgggaagctgctgatcagcaattacagttc

SEQ ID NO: 993663 - DNA, 120 bp, Artificial Sequence
  ENSG00000267466_0 (sequence is synthesized)
atagaccacagtttatttatttatccattgacagacatttgggttgttgtcagttttgggctattgtcagtagtcctgctgcgggcattcgtgtacaacatttgtttaaatagctgttcc

SEQ ID NO: 993664 - DNA, 120 bp, Artificial Sequence
  ENSG00000267466_1 (sequence is synthesized)
tgcctataatcccagcactttggaaggccgacgcgggtggatcacctgaggcctcccacagtgctggattacaggcgtgaaccactgtgctcggccagcaaatggattttgaacctgttc

SEQ ID NO: 993665 - DNA, 120 bp, Artificial Sequence
  ENSG00000267466_2 (sequence is synthesized)
aatggattttgaacctgttctgtgaagtcttacagaaaaggagagctgggaaggagatggatgtgaggcccctggagaaagacagacctgggcccaagcctgggacctgcaggttccgtc

SEQ ID NO: 993666 - DNA, 120 bp, Artificial Sequence
  ENSG00000267466_3 (sequence is synthesized)
atcgctgcgagactcggtcattcatcagcaggatggggctccccagagtagctccctggcaggattggtgaggatgaaaatagagatgcctgtcccagccagcactccagaggcgttggc

SEQ ID NO: 993667 - DNA, 120 bp, Artificial Sequence
  ENSG00000267466_4 (sequence is synthesized)
aatcactgctaaaggtgacacactatttttggtttttaggggtaaagcaagaccttagcaaggtcccaggctgcagggctgaatgctgtggtggctacaggggtgagcgagatgcctggc

SEQ ID NO: 993668 - DNA, 120 bp, Artificial Sequence
  ENSG00000267466_5 (sequence is synthesized)
tccgggatcctaaaaccagacagtgtctgtagagggaaaacatcctccatgtcactggaagggccaccatccagggtgcacgtcaccagggctacagggaagggacatggtgctctaggc

SEQ ID NO: 993669 - DNA, 120 bp, Artificial Sequence
  ENSG00000267466_6 (sequence is synthesized)
tcagagaagggagggatctccctggctcgggcggggtaggaagatccttatgaagaaatgacatttgcagaaggcctctaagaaagtggagggttttcacaaaccaaaagcaagcagaaa

SEQ ID NO: 993670 - DNA, 120 bp, Artificial Sequence
  ENSG00000267466_7 (sequence is synthesized)
gccacagacgggaatgaagtggaaggtaaggtctcaaaggcaaggctgagggacctgcccttcactccaacttgccccaggcctagcaaggtgagcagggatggtttcctggagggaaac

SEQ ID NO: 993671 - DNA, 120 bp, Artificial Sequence
  ENSG00000267466_8 (sequence is synthesized)
atcagctccgatcagagaggaaatcccaggccaccccctgcctttgtggcaggaagcactcaaggcctctggctaggatctggagcccctgaggctgaggtcaggtggcagggccagtgt

SEQ ID NO: 993672 - DNA, 120 bp, Artificial Sequence
  ENSG00000267466_9 (sequence is synthesized)
caccctcctctgccccagggtgagtgtggcactgaaccccagcaccatttgtgctttctgtccccctggatcttgggcccggctgccccccaatgcagggatgcccaccacggccgtcct

SEQ ID NO: 993673 - DNA, 120 bp, Artificial Sequence
  ENSG00000267466_10 (sequence is synthesized)
cctggatgcaatccttcccagccctcaggcatctgccagcctcctccttctctggccttcccacatctcagcctggttcctggacacagatgccgtggtgtgctggagccggctcctact

SEQ ID NO: 993674 - DNA, 120 bp, Artificial Sequence
  ENSG00000267466_11 (sequence is synthesized)
agctggcaggagtcaatctgcacatctctccccaaaaccatgatcagcgaaatcctcttagtaagcttgaagttggccatgctgggagtatttacaccatgggaagtggcaaatgctacc

SEQ ID NO: 993675 - DNA, 120 bp, Artificial Sequence
  ENSG00000267466_12 (sequence is synthesized)
agttaggtagggctactctctctcagagagccagttgttagacttactagcacacctctacacagacaatgctagccaagctggtctggattagaactcatttaaaagctgctctctctg

SEQ ID NO: 993676 - DNA, 120 bp, Artificial Sequence
  ENSG00000267466_13 (sequence is synthesized)
catgctcagggtgagcagagctgctgaaatggcagagtgagggacagctgatgagtaggagagaccctccagctgggtcactgagggtcttccaggagaaatgacactttctattcagca

SEQ ID NO: 993677 - DNA, 120 bp, Artificial Sequence
  ENSG00000267461_0 (sequence is synthesized)
tgaaccgggaaaagaggcctcaccagaaatggaatctgccagcgccctggtattggacttcttagcctccagaactaaattcctggagtcaccagaagctgaaagagataagaaatggat

SEQ ID NO: 993678 - DNA, 120 bp, Artificial Sequence
  ENSG00000267461_1 (sequence is synthesized)
acacagccttgcatacatcttgagcttggacttctggcctccagaaataagcatgagaggcagctaagtcaagtgagggcgatggctgggctggaagcactggtgcctttccctgacaac

SEQ ID NO: 993679 - DNA, 120 bp, Artificial Sequence
  ENSG00000267461_2 (sequence is synthesized)
aggaggccacaaaagccatttcatcatcatcatccacccaaacatcaaacataaatggataaggctgcatatcgataagtatcaaataacctgtaaggaatattaaagcataatcaacta

SEQ ID NO: 993680 - DNA, 120 bp, Artificial Sequence
  ENSG00000267462_0 (sequence is synthesized)
gcccgtttggtcatcagctccaggttctgctccacctgctgaaccaccaactccaagtcgtggtagtcgctttcctcgttgatcatttttgcttctaatttccgcacaagcgtcctcacc

SEQ ID NO: 993681 - DNA, 120 bp, Artificial Sequence
  ENSG00000267462_1 (sequence is synthesized)
atttctgtttgagcttcagagaagctctgaatctcattcagctttcttctcagcttagaattttcacctttcagtgcttcgtaacttatctgcagcgtccgcaggtgcctgtctcccaga

SEQ ID NO: 993682 - DNA, 120 bp, Artificial Sequence
  ENSG00000267462_2 (sequence is synthesized)
gactctccctgagccgcaaaatcggtgctaggactccctgccggagaggccggagacacgcgagaatcagtgtcactcaacgcccacgggagcagagactcgggccctgccagctctgac

SEQ ID NO: 993683 - DNA, 120 bp, Artificial Sequence
  ENSG00000267462_3 (sequence is synthesized)
ggggtggagaaaaaggaaaggccgatgttcttggtcttcagaaactctttaaaggagaatggatttgcctcttcaagatcttcaaatttgtcatctccaaaatgtgtctcgtgggctcct

SEQ ID NO: 993684 - DNA, 120 bp, Artificial Sequence
  ENSG00000267462_4 (sequence is synthesized)
gacgggctctgcttagaacatttcccctttccatagcccaaatcgtcgggaatggcgaggctccgggctcgggacagcggggtgacgccccggcggcgcgggtagctcgacatcgccgtg

SEQ ID NO: 993685 - DNA, 120 bp, Artificial Sequence
  ENSG00000267462_5 (sequence is synthesized)
ggtagctcgacatcgccgtgggccaggcggggcaggcggggcaggacctgcctagcccggcagcggcggctcaatggcccctgctctgcccgtgccgcggcccgtgtcaaccgcccccgt

SEQ ID NO: 993686 - DNA, 120 bp, Artificial Sequence
  ENSG00000267462_6 (sequence is synthesized)
ccgatcctccgaacctctcaaacaaaagaggagacattacaactgatagcacagaaatacaaagggtccttcgggaagccgaggcaggcggatgacctgagatcaggagtttgagaccag

SEQ ID NO: 993687 - DNA, 61 bp, Artificial Sequence
  ENSG00000267462_7 (sequence is synthesized)
ggaagttgaagtgagccaagatcgtgtcattgcagtccagcctgggtgacagagcaaaact

SEQ ID NO: 993688 - DNA, 120 bp, Artificial Sequence
  ENSG00000267462_8 (sequence is synthesized)
aaaaaaaaaaaaaagaaatacaaagggtcacaagaaactaccatgagcaattataccccaataaattggataacttaaaagaaatgggtaaattcctagacacatataacctgccaagac

SEQ ID NO: 993689 - DNA, 120 bp, Artificial Sequence
  ENSG00000267462_9 (sequence is synthesized)
acctgccaagactgaatcatgaagaaatagaaaatctgaatagaccaataatagataagtagattcaatcagtaagaaaaagtctcccattaggctgaggcaggagaatggcgtcaacat

SEQ ID NO: 993690 - DNA, 120 bp, Artificial Sequence
  ENSG00000267462_10 (sequence is synthesized)
ctcaggactgattggcttcacagatgaattctaccaaacatttaaaaaagtactaatgctaatccttttcaaactcttcaaaaaaaattgaagagaaaggaatattttcaaattcatttt

SEQ ID NO: 993691 - DNA, 120 bp, Artificial Sequence
  ENSG00000267462_11 (sequence is synthesized)
atgaggccagcattaccctgatactaaaactggacacagacactacaagaaaagaaagttacaggccaaagtccccgatgaacatagatgcaaaaatactcaacaaaatactggcaatgc

SEQ ID NO: 993692 - DNA, 120 bp, Artificial Sequence
  ENSG00000267462_12 (sequence is synthesized)
gaattcaatagcacattaaaaagatcattcactatggtcaaatgggatttatccctgggattcaaaactattgcaacatatgcagatcaataaatgtgatactctatatgtggttttgat

SEQ ID NO: 993693 - DNA, 120 bp, Artificial Sequence
  ENSG00000267469_0 (sequence is synthesized)
gaagcttctcacatctttattggaaaggcacagctaagcccacccttgatacagcattttccacttctctctgtagagatcagacgattgaacacgagataagctgactatatacagaca

SEQ ID NO: 993694 - DNA, 120 bp, Artificial Sequence
  ENSG00000267469_1 (sequence is synthesized)
gacacaggtgtgggtgttgcttttttttaaaaacacttttgtctttttttttttttaatatcccctttcttaaaagacaagctagtatactggaaaaagaaaaaaataataataaaataa

SEQ ID NO: 993695 - DNA, 120 bp, Artificial Sequence
  ENSG00000267469_2 (sequence is synthesized)
tcagctaagctcgtccctcgtgcccccccttttgtgggcgatgggagaggaccaggtgggcgtggaggtgtctggaactagcagaggtggtgagtggggcaggtatccacctaaccaggc

SEQ ID NO: 993696 - DNA, 120 bp, Artificial Sequence
  ENSG00000267469_3 (sequence is synthesized)
tgcaggggaggaggagggaagccgggaatggggtaggaagaaagctagaggtggcctgcaagctgggctggggcccccgccggcggccaccataaatactatgggagtttagccaatccc

SEQ ID NO: 993697 - DNA, 120 bp, Artificial Sequence; identical to SEQ ID NO: 906595
  ENSG00000223966_0 (sequence is synthesized)

SEQ ID NO: 993698 - DNA, 120 bp, Artificial Sequence; identical to SEQ ID NO: 906596
  ENSG00000223966_1 (sequence is synthesized)

SEQ ID NO: 993699 - DNA, 120 bp, Artificial Sequence
  ENSG00000272646_0 (sequence is synthesized)
cgctgattagcgcggctggttagagccaggactaatgaggctgaggtcacggactcggccccgtagcccaggtagcccggccaccctccaaacggccgctccgcctggtcagctgcctca

SEQ ID NO: 993700 - DNA, 120 bp, Artificial Sequence
  ENSG00000272646_1 (sequence is synthesized)
tgtttaaaaccaaacaaaataaaaacaggttctctaatgtaccaccccctgtgatcctctctaggaatatcagacttaatgatttaaatttaatttgttagccatttggtggttaatttt

SEQ ID NO: 993701 - DNA, 120 bp, Artificial Sequence
  ENSG00000272646_2 (sequence is synthesized)
gccatttggtggttaattttttttattaaaaaaactaatgatttattagcattcttataataagcaacatttaatatctattcatgagagttcaaatggatcaactatttaattttgtaa

SEQ ID NO: 993702 - DNA, 120 bp, Artificial Sequence
  ENSG00000286593_0 (sequence is synthesized)
ggcggggatgggcccgtgcggctccgggtgtgggacgtaccctcagagcgcccggggttattcccactgactcccgggaggtgggtgtgcgcccttcgctccctgccgggtctgtggggg

SEQ ID NO: 993703 - DNA, 120 bp, Artificial Sequence
  ENSG00000286593_1 (sequence is synthesized)
tccattgttgccggagactggaggtcgggggccatgggagccccggggcgaacggtgcggacatgggccttgtggaaaggaggagtgaccgcccgagcgtgcagcaggacgtcctcctga

SEQ ID NO: 993704 - DNA, 120 bp, Artificial Sequence
  ENSG00000286593_2 (sequence is synthesized)
cctggtaatagttagatccttcactgaattcaacccagtctactcaacagttcaccaagagtcttgctatctccaatttcaggatatgctttccatcaccaatacccagtctatgtcttc

SEQ ID NO: 993705 - DNA, 120 bp, Artificial Sequence
  ENSG00000286593_3 (sequence is synthesized)
acagaaaattatcactgcaaagctgagcggtttctggagaatcttggctcattcactgaattctttgggaagggctggttccctttgcgcatcttcactaaacttggacctttttgatga

SEQ ID NO: 993706 - DNA, 120 bp, Artificial Sequence
  ENSG00000286593_4 (sequence is synthesized)
ctctcattttctatcaccaccatagtctttagatgtccagtggagcagggaaactgatggtttcctgcacaggttgctcggggcaaaaatggaagttggaagtaaggaaaagcatggagt

SEQ ID NO: 993707 - DNA, 120 bp, Artificial Sequence
  ENSG00000286593_5 (sequence is synthesized)
tggaattggatgctgaatgctgaagcaaaagagtactcaacgtctctatggttttgctttgtgctgggccttcctaaaccttgtgaacacctgataaatgttcatttgattatgtcaagc

SEQ ID NO: 993708 - DNA, 120 bp, Artificial Sequence
  ENSG00000286593_6 (sequence is synthesized)
tctttggagcagtagctttcaaccctgattaggatgtcagaatcctttggaagaattttttaaaagtctatgggcatggaacccatccatcagtatttttaaaaatttcccaggtggttt

SEQ ID NO: 993709 - DNA, 120 bp, Artificial Sequence
  ENSG00000286593_7 (sequence is synthesized)
ccatgagtagctaaggttgagaaccgtggttttggatttcccacttgatgattttaaaccgtaacatcactttgcctatttttcgaaatattcctctttctacagtcagctttcaaaagt

SEQ ID NO: 993710 - DNA, 120 bp, Artificial Sequence
  ENSG00000286593_8 (sequence is synthesized)
cagactacaactgaatcaaagaattacacaagaaaagggaaactgagtcatccttcagcaactccaggaacaaatcaaggtacatataatgatggggtagtaaatgctaataccatctat

SEQ ID NO: 993711 - DNA, 120 bp, Artificial Sequence
  ENSG00000286593_9 (sequence is synthesized)
ctccttcccttgtatccatccctgtttttgttcccctctttccactctggcttcctattctccctttttggcaaaatatccactatccttgaagaaagcgaaccagcaaacctgctaata

SEQ ID NO: 993712 - DNA, 120 bp, Artificial Sequence
  ENSG00000286593_10 (sequence is synthesized)
actttgaggaacatttgcatttccaaagaaattatctgaagacaaaaatgtctaattcaatgggctgaaatgcaaattgtaatatttcaggctagaaagatatctaacccaaggaacttc

SEQ ID NO: 993713 - DNA, 120 bp, Artificial Sequence
  ENSG00000286593_11 (sequence is synthesized)
cttatcatgctctgagagacagtaggctgcctcatggaaggccgttatagatgtccaactaaacattgcaaaaaaacaggtatagaagcattggcttgggactgagaaatgatattcatt

SEQ ID NO: 993714 - DNA, 120 bp, Artificial Sequence
  ENSG00000286593_12 (sequence is synthesized)
tggtgcaaaagtaattgtgattttttgcccttgaaaatgatggttaaaactgcaatgacttttgcatcaacctatggattagtaattgatacacaaagacatgacacatgagaataccaa

SEQ ID NO: 993715 - DNA, 120 bp, Artificial Sequence
  ENSG00000286593_13 (sequence is synthesized)
gtgcactgcttggcacatggtagacattcaacaaatgcttctcactgacaacttttgctttcctcctcaatcacccactttttagaatccttgaaaaaatcttacaaatttttcaaatat

SEQ ID NO: 993716 - DNA, 120 bp, Artificial Sequence
  ENSG00000286593_14 (sequence is synthesized)
tcaggaaacttaaataacatcagatttagagaagacttattgactgtagccaatttttggacctatacattttttaaactatgtgatgggaatctcttcattttttagagcaacatggat

SEQ ID NO: 993717 - DNA, 120 bp, Artificial Sequence
  ENSG00000286593_15 (sequence is synthesized)
gcatatcaattacgaaccttgctaaatcatcctatctctgaggcaataaaattcattatcctggttagtttgaggatacacttaacccataaacaccaacagcaagtatagattcagaca

SEQ ID NO: 993718 - DNA, 120 bp, Artificial Sequence
  ENSG00000286593_16 (sequence is synthesized)
tttgtatctataatttagacagtttaaaatgcaatattaagtaattcaaaaattgttcaaagctcagtaccttttcacacattaatactttgattatcaacttccttttaaagagtgagt

SEQ ID NO: 993719 - DNA, 120 bp, Artificial Sequence
  ENSG00000286593_17 (sequence is synthesized)
agaaaagggttagtaagtagaaaagagtaaaaggcctttctttcacaatttgccaagacatgcattacttatttaaaataaaaaaaaatgctgtttgaaaaacaaggaggatggcaagaa

SEQ ID NO: 993720 - DNA, 120 bp, Artificial Sequence
  ENSG00000286593_18 (sequence is synthesized)
tgaagctccttcatgcaagatacctctgattaccctctaaagacagatactatggcatggtcatagaattactgcgggaaaaatttgtccactgaggctgcttcctccagaggtaaggtt

SEQ ID NO: 993721 - DNA, 120 bp, Artificial Sequence
  ENSG00000286593_19 (sequence is synthesized)
taacttacggtaacttgctatggatcaacagctcaagatgaagtgtgtggctggcaatttaagtgtaaaattagatttccagtataatcagtcatctgatagcccatctaaatgtattct

SEQ ID NO: 993722 - DNA, 120 bp, Artificial Sequence
  ENSG00000286593_20 (sequence is synthesized)
gcatttgcacatttaattaattatgtcttaattgataacattttgctcataacgattggttctaattttattccaaattaaattagtaggggagaaatttagtttgggaatttattgatt

SEQ ID NO: 993723 - DNA, 120 bp, Artificial Sequence
  ENSG00000279738_0 (sequence is synthesized)
tgattgtgcctactaatagatcacccagctggagtgcagtgacgcagtcacagctcacgtcagcctcaacctcctgggatcaggcgatcatcctaccttagtcttccgaatagctgggct

SEQ ID NO: 993724 - DNA, 71 bp, Artificial Sequence
  ENSG00000279738_1 (sequence is synthesized)
caggcgatcatcctaccttagtcttccgaatagctgggcttaaaggcgcacacaacaacagtcacccaggc

SEQ ID NO: 993725 - DNA, 63 bp, Artificial Sequence
  ENSG00000279738_2 (sequence is synthesized)
gaacttttaatggctagcatactcttaggagtttctgttgtgatgcctgttacctcagatcat

SEQ ID NO: 993726 - DNA, 120 bp, Artificial Sequence
  ENSG00000279738_3 (sequence is synthesized)
cttaggagtttctgttgtgatgcctgttacctcagatcattaacatcttgatgataaggacttgatgataatatcttttgtttcagttatatcctccagcagtgcctacatttatttatt

SEQ ID NO: 993727 - DNA, 120 bp, Artificial Sequence
  ENSG00000279738_4 (sequence is synthesized)
cagcatcagtatgctgagtgttcactgggttctaaatgttttgatataaggtgtggatattggtgggaaggaggatgggttcaagaattgggaggagcttcctaggcagagaatatcatg

SEQ ID NO: 993728 - DNA, 120 bp, Artificial Sequence
  ENSG00000279738_5 (sequence is synthesized)
agcaaagtggttgagacttgaaagtgtggtgatgcagccgcacaataaactgttctggctggagggcaagtaggtagtaggaattgggttattagattctgagaaccttcattaacccag

SEQ ID NO: 993729 - DNA, 120 bp, Artificial Sequence
  ENSG00000279738_6 (sequence is synthesized)
gtaaagtatagtcctgtgtcatttgatgctgcagatacattctgagaaatgcatcatttggtgattttgttgtgtgaacatcatagaatgtacttacacaaacctagatgggataaccta

SEQ ID NO: 993730 - DNA, 120 bp, Artificial Sequence
  ENSG00000279738_7 (sequence is synthesized)
ctacatacccgggctacatggtatagcctatggctccttggctacaaacgtctagaacatattactgtactgaataccataggcagttgtaacacaaaggtatttgtgtatctaagatac

SEQ ID NO: 993731 - DNA, 120 bp, Artificial Sequence
  ENSG00000279738_8 (sequence is synthesized)
agtaaaaatacaggattataatcttgcaggatcaccatcctatatgtggcccatggcccgttgttgactgaaacgctgttgcacggcacattactatttagtctatatttctgtcgtcat

SEQ ID NO: 993732 - DNA, 120 bp, Artificial Sequence
  ENSG00000279738_9 (sequence is synthesized)
caaggttgcatcaaaggttttgggtaactcgatcctaactgtgtaaaaggattgacctgctagtgatgtgtgggacaaactggagagactaagacagaggtgccagtaaggaatccagaa

SEQ ID NO: 993733 - DNA, 120 bp, Artificial Sequence
  ENSG00000279738_10 (sequence is synthesized)
gatggctaaggaggatctggagctaggatggaagttaggtagatctagagggaggattggaagagatgttggggaagttcaatggctggtatgaaacaactgggtaagtcaaagatctgt

SEQ ID NO: 993734 - DNA, 120 bp, Artificial Sequence
  ENSG00000279738_11 (sequence is synthesized)
gcagagaatggtgaggccagttggcagtggggacctcaggaagtccgtctcatttgacccagtaccactctccaccccatccccagattaacaagcagaatgagcagatgcatgcgctgc

SEQ ID NO: 993735 - DNA, 120 bp, Artificial Sequence
  ENSG00000279738_12 (sequence is synthesized)
tggccattgccctcacgatgtaccccatgcgtattgatgagagcattcacctccagctgcgggagaaatatggggacaagatgttgcgcatgcagaaaggtgacccacaagtctatgaag

SEQ ID NO: 993736 - DNA, 120 bp, Artificial Sequence
  ENSG00000279738_13 (sequence is synthesized)
aacttttcagttactcctgccccaagttcctgtcgcctgtagtgcccaactatgataatgtgcaccccaactaccacaaagagcccttcctgcagcagctgaaggtgttttctgatgaag

SEQ ID NO: 993737 - DNA, 120 bp, Artificial Sequence
  ENSG00000279738_14 (sequence is synthesized)
tacagcagcaggcccagctttcaaccatccgcagcttcctgaagctctacaccaccatgcctgtggccaagctggctggcttcctggacctcacagagcaggagttccggatccagcttc

SEQ ID NO: 993738 - DNA, 120 bp, Artificial Sequence
  ENSG00000279738_15 (sequence is synthesized)
ttgtcttcaaacacaagatgaagaacctcgtgtggaccagcggtatctcagccctggatggtgaatttcagtcagcctcagaggttgacttctacattgataaggtatgcctgtcccctg

SEQ ID NO: 993739 - DNA, 120 bp, Artificial Sequence
  ENSG00000279738_16 (sequence is synthesized)
ggcttggggtcttgtattaagtgttcagtatctttcattcactattgtgggcacatgaagtatatcggggaacaaaaagattcctggccttgtggtgctgccacaaggtgccaggtgtgg

SEQ ID NO: 993740 - DNA, 120 bp, Artificial Sequence
  ENSG00000279738_17 (sequence is synthesized)
tggccttgtggtgctgccacaaggtgccaggtgtggtggctcatgccagtaatactagtactttaggggaggctggggtgggaggatcactctagcccaggagttcaagaccagcctggg

SEQ ID NO: 993741 - DNA, 120 bp, Artificial Sequence
  ENSG00000279738_18 (sequence is synthesized)
aaaaaaaaacacaagagataaacaatagatggttttgttttggttttttttttgagatggaatttcgctctcgttgcccaggctagaatgtgatggcacgatctcggctcaccgcaacct

SEQ ID NO: 993742 - DNA, 84 bp, Artificial Sequence
  ENSG00000279738_19 (sequence is synthesized)
ctcctgagtagctgggattaccggcatgtgttaccatgcccagctaattttgtatttttcgtcaaactcccaacctcaggtgat

SEQ ID NO: 993743 - DNA, 87 bp, Artificial Sequence
  ENSG00000279738_20 (sequence is synthesized)
acaatagatgttataattaaacaatagatgttataattaaacaaactatgtagtaagaagttgccaagcactgcagagtaaaggaag

SEQ ID NO: 993744 - DNA, 120 bp, Artificial Sequence
  ENSG00000279738_21 (sequence is synthesized)
atgtagtaagaagttgccaagcactgcagagtaaaggaaggcagaggtggtgggaagcacaggttgcaatgttaaatacggtgttcagacaggctttgttgagaaagtgaagtttaagct

SEQ ID NO: 993745 - DNA, 90 bp, Artificial Sequence
  ENSG00000279738_22 (sequence is synthesized)
gtgttcagacaggctttgttgagaaagtgaagtttaagctaagctaagacttgaaggaggtgagggaggacagtcttggtctgtcgccca

SEQ ID NO: 993746 - DNA, 69 bp, Artificial Sequence
  ENSG00000279738_23 (sequence is synthesized)
tggccaggctagtctcaaactcctgacctgaagcgatccatctggtggagagttcttaatagctcacca

SEQ ID NO: 993747 - DNA, 120 bp, Artificial Sequence
  ENSG00000279738_24 (sequence is synthesized)
ggcggaggttgcagtgagctgagatcgctgcactgcactgtagcctggcaacagagcgacactccgtctcaaaaaaaaaaaaaatagctcaccagatatctggaggaagagccttccagg

SEQ ID NO: 993748 - DNA, 120 bp, Artificial Sequence
  ENSG00000279738_25 (sequence is synthesized)
tagctcaccagatatctggaggaagagccttccaggcagaggaacagttagagcaaaggccccgaagaggagtgaggccaataagtttaagggacagttgtagtatgcccgagtagcctg

SEQ ID NO: 993749 - DNA, 120 bp, Artificial Sequence
  ENSG00000279738_26 (sequence is synthesized)
agaaaggaggctgtgaagatgagattggagaaagggggatggtgctttgtatactgttggagtactttacaagtgggaagccattgtcctgctgccttctttatttttttatttttagtt

SEQ ID NO: 993750 - DNA, 120 bp, Artificial Sequence
  ENSG00000279738_27 (sequence is synthesized)
ttttagttagcaataatcacacctcacataaccctcattggccatactgccactgcacaaagctttttttttttttttgagatggagtgtcattctgtcgtccaggctggagtgcagtgg

SEQ ID NO: 993751 - DNA, 90 bp, Artificial Sequence
  ENSG00000279738_28 (sequence is synthesized)
gtgtgatctcagctcactgcagcctcaacttcctgggttcaggtgattgtcctacctcatgtcaccacgactggctaatttttggtattt

SEQ ID NO: 993752 - DNA, 120 bp, Artificial Sequence
  ENSG00000279738_29 (sequence is synthesized)
tagagatggggtttggccatgttgcccagcctggtctcgaactctgatatgtgccactgttcccagccgattttaagtttttactttatagaaacagggtctcactttgttgcccaggct

SEQ ID NO: 993753 - DNA, 120 bp, Artificial Sequence
  ENSG00000279738_30 (sequence is synthesized)
ccttggcctcccaaaatgctgggattactggtgtgagccactgcgcctgtcctgtcctgatgtctaacatcttggattagtgctgcctgtttgtgaactttatataatggaattacacag

SEQ ID NO: 993754 - DNA, 120 bp, Artificial Sequence
  ENSG00000279738_31 (sequence is synthesized)
tatataatggaattacacagtatgtactctttaagtctggcttcttttgctcaacgttataattgagtgagtcaccgtccattgtgtgtagcagtgattccttcatgtttattgttctgt

SEQ ID NO: 993755 - DNA, 120 bp, Artificial Sequence
  ENSG00000279738_32 (sequence is synthesized)
gatagtccagcatctgctgttgttattgtactgcagtttatccattctcccattgattaacgtttggatggtttgtatattacaaaaaatacaagtaaggtttttacagagtggctagta

SEQ ID NO: 993756 - DNA, 120 bp, Artificial Sequence
  ENSG00000279738_33 (sequence is synthesized)
atacatttatatatgcctatgtatgcctcaagttctttccagaaggatacacaagcaacatagcagtagcttcctctcaggaggggaggtgggttgaagaacagtgttagttttcactgg

SEQ ID NO: 993757 - DNA, 120 bp, Artificial Sequence
  ENSG00000279738_34 (sequence is synthesized)
cacttttaagttcaagctggacattttaatgtctgatgagattttcatttttatttatttatttagagacagagtctcattgtatcactcaggctgtagtgcagtgatgtgatcttggct

SEQ ID NO: 993758 - DNA, 90 bp, Artificial Sequence
  ENSG00000279738_35 (sequence is synthesized)
tcgctgatgagctgatgaggtttttaaaagaattgttttctttttttttagactgagtcttgctcttgttgcacaggctggagtgcaatg

SEQ ID NO: 993759 - DNA, 84 bp, Artificial Sequence
  ENSG00000279738_36 (sequence is synthesized)
gctgatgaggtttttaaaagaattgttttctttttttttagactgagtcttgctcttgttgcagaacctctgcctcccgggttc

SEQ ID NO: 993760 - DNA, 64 bp, Artificial Sequence
  ENSG00000279738_37 (sequence is synthesized)
gatgtacagggcttggtcaggctggtctcgaactcccgccctcaggtgatctgcccgcctcggc

SEQ ID NO: 993761 - DNA, 120 bp, Artificial Sequence
  ENSG00000279738_38 (sequence is synthesized)
gtgctggggttacagacatgagccaccacacacggccgtcagcccaggttttctaagatcagcaaatgtccatagggcagagggggtcttctgtgcttttcttagaatggtttctttttt

SEQ ID NO: 993762 - DNA, 120 bp, Artificial Sequence
  ENSG00000279738_39 (sequence is synthesized)
ttttcccaaaatgttctgttactatcttgtcagctctttgatgctgtaagtttttttctaatatcctgcatttttaattgtttttgaaagcattttgggccaggtacagtggcttatagc

SEQ ID NO: 993763 - DNA, 68 bp, Artificial Sequence
  ENSG00000279738_40 (sequence is synthesized)
aaccaagaccctgtctctactttttaaaaagagaaaaagcatgctgggcatgatggctcacgcctgta

SEQ ID NO: 993764 - DNA, 89 bp, Artificial Sequence
  ENSG00000279738_41 (sequence is synthesized)
atggtggcacatgcctgtaatcccagtaacttgggaggctgagacaggagactcacttgagcccaagagacgcattccagcctttgtga

SEQ ID NO: 993765 - DNA, 120 bp, Artificial Sequence
  ENSG00000279738_42 (sequence is synthesized)
ccgcattccagcctttgtgacagagatgagactgcatcttgaaaaaaagagaaaaagcattttggtctaaatgtattgttggaaatagcactttttgagcagttcttaaaaatacataat

SEQ ID NO: 993766 - DNA, 90 bp, Artificial Sequence
  ENSG00000279738_43 (sequence is synthesized)
ggaaatagcactttttgagcagttcttaaaaatacataattttaggctgagtgcagtggctcatacctgtaatcctatcagaggtcagga

SEQ ID NO: 993767 - DNA, 67 bp, Artificial Sequence
  ENSG00000279738_44 (sequence is synthesized)
tactaaaaatatttaaaaaattagccgggcatggtggtgctgggaagcagaagctgcagtgagccga

SEQ ID NO: 993768 - DNA, 120 bp, Artificial Sequence
  ENSG00000279738_45 (sequence is synthesized)
gcactccagcctgggcaacagagtgagagactgtctcaaaaaaagaaaaaaacataatttttatacataatttgcatgataagccgggcgcgttggttcacgcaagtaatcccagcactt

SEQ ID NO: 993769 - DNA, 89 bp, Artificial Sequence
  ENSG00000279738_46 (sequence is synthesized)
aatttgcatgataagccgggcgcgttggttcacgcaagtaatcccagcactttgggaggccgagctaggcggaacaatatggtgaaccc

SEQ ID NO: 993770 - DNA, 66 bp, Artificial Sequence
  ENSG00000279738_47 (sequence is synthesized)
ccagcctgggcaacagagcgagactccacttcaaaaaaatgaaggtgggcggatcacttgaggtca

SEQ ID NO: 993771 - DNA, 82 bp, Artificial Sequence
  ENSG00000279738_48 (sequence is synthesized)
gcaggatataaacttcaccattttaaaatgtgcaatttggccaggtgtgatgctttacacctataatcccagcactttggga

SEQ ID NO: 993772 - DNA, 67 bp, Artificial Sequence
  ENSG00000279738_49 (sequence is synthesized)
ggtgaaaccccatctgtactaaaaatacacaaattagctgagtgtgggtagcctaggaggtggaggt

SEQ ID NO: 993773 - DNA, 74 bp, Artificial Sequence
  ENSG00000279738_50 (sequence is synthesized)
cataaataaatagaatgaatgaatgaatgaatgaagaattcagtggttattagtatgttcacagtgttttgcaa

SEQ ID NO: 993774 - DNA, 120 bp, Artificial Sequence
  ENSG00000279738_51 (sequence is synthesized)
agaattcagtggttattagtatgttcacagtgttttgcaaccatctccactgtctaattccaaaacatttctgtccccccaaaaagaaactccctacccactagcagtcactcgcagttc

SEQ ID NO: 993775 - DNA, 120 bp, Artificial Sequence
  ENSG00000279738_52 (sequence is synthesized)
cccagttccccctttctgccatcccctagcaaacccctaatctgctttggtctctctgcatttgacatttcagataaatggaatcatgtaatatatggacttttgtgtttgggtcctttc

SEQ ID NO: 993776 - DNA, 120 bp, Artificial Sequence
  ENSG00000279738_53 (sequence is synthesized)
actgagcatgtcttcaagtttcatccatattatagcatgtgtcagtacattccttttatagctgaataatatcccatgtattaatgtactgcattttgtttatccatttgttgttgcaca

SEQ ID NO: 993777 - DNA, 120 bp, Artificial Sequence
  ENSG00000279738_54 (sequence is synthesized)
tttggggtttttggtttttgggggttttttgttccttttttcactttttggcttatgaatagtgctgctgtgaatattcatctagaagttattgtgtgaacatatgtttttaattttcag

SEQ ID NO: 993778 - DNA, 120 bp, Artificial Sequence
  ENSG00000279738_55 (sequence is synthesized)
atatatatctagttgtggaatttctaggtcagtttgggtagtttgtttttgaaagttcattttgctttaaaataaatactctcatttcatttttatggcttctggaagacttggtttttg

SEQ ID NO: 993779 - DNA, 120 bp, Artificial Sequence
  ENSG00000279738_56 (sequence is synthesized)
ccataagttagctagcccgatacaaacagatttgccaaaagtaataacacgtcagtagtggaagttttccagtgttttaaatcatgcttttataaatcaaagaaaactgagccaggcttc

SEQ ID NO: 993780 - DNA, 120 bp, Artificial Sequence
  ENSG00000279738_57 (sequence is synthesized)
tttataaatcaaagaaaactgagccaggcttcgtagcgtgtacttgtagtcccagctatgggagagagtcccttatagcccctgccttaggacgctgaggcaggaggatggcttgagccc

SEQ ID NO: 993781 - DNA, 120 bp, Artificial Sequence
  ENSG00000279738_58 (sequence is synthesized)
accactgcagtgcagcctgggtaacaaagtgagaccctgcctctaaaaataaataaatatataaataaataaaaataaagaaaactttctcccttgccaggatcatgtcaagcctttttt

SEQ ID NO: 993782 - DNA, 73 bp, Artificial Sequence
  ENSG00000279738_59 (sequence is synthesized)
cctccagttgctcccgggggctcaggtgatcctcctatctcagcttctcaagtagctgggactacaggactgc

SEQ ID NO: 993783 - DNA, 120 bp, Artificial Sequence
  ENSG00000279738_60 (sequence is synthesized)
gctcactgcagcctcaactcccgggggctcaggtgatcctcctatctcagcttctcaagtagctgggactacaggactgcaccaccacatcttgctaatttttgtattttttgtagagat

SEQ ID NO: 993784 - DNA, 82 bp, Artificial Sequence
  ENSG00000279738_61 (sequence is synthesized)
agttttttctcaatacctgacatatatacgttctttggcaattatagtagcctcctgcattcctctgtcacctcttaattac

SEQ ID NO: 993785 - DNA, 120 bp, Artificial Sequence
  ENSG00000279738_62 (sequence is synthesized)
tatagtagcctcctgcattcctctgtcacctcttaattaccagcctagctattctcaactaatctgggtagtttaacaaaacatttctcctaagaattggctatttgattattatttaat

SEQ ID NO: 993786 - DNA, 120 bp, Artificial Sequence
  ENSG00000279738_63 (sequence is synthesized)
tgcatgttttactgttattcctctgttgctggttcaggtttgtctttggcaaagtgcttcttttttttttcctttttgactcttcattcttaacttgaaagaaatcctatcagagattta

SEQ ID NO: 993787 - DNA, 120 bp, Artificial Sequence
  ENSG00000279738_64 (sequence is synthesized)
gaacgttcttagatcttaacctaggggatatagaaaattttaaagtaaaatggtgttcaaaatattttcagctaaaaacaaaacttaaagattggactaatttgcaattttatcaacagt

SEQ ID NO: 993788 - DNA, 70 bp, Artificial Sequence
  ENSG00000279738_65 (sequence is synthesized)
tcttgaattccgcataaacatctttattcccaaaataaaaaagacgaggctgggcacggtggctcacgcc

SEQ ID NO: 993789 - DNA, 120 bp, Artificial Sequence
  ENSG00000279738_66 (sequence is synthesized)
aaaaaaaaaaaagactagaaaataaaagacaaaaaaaaagtctagaaaataaaagtacaaatgaattgataaaaaaaatatatataaactaggccgggcacattggctcatgcctgtaat

SEQ ID NO: 993790 - DNA, 120 bp, Artificial Sequence
  ENSG00000279738_67 (sequence is synthesized)
tctcaaaaaaaaaaagaaaagaaaaactctctagaaagagtgagttactgttaactggtggtgtttttccagtggtcttttccccacctttacatctaacactcaccatcattatcactt

SEQ ID NO: 993791 - DNA, 120 bp, Artificial Sequence
  ENSG00000279738_68 (sequence is synthesized)
gcaagtccatggtggctcctgggttagatggccctgctcctccacctggctgctcttccctgactgtgctttcccccacaggacatgatccacatcgcggacaccaaggtcgccaggcgt

SEQ ID NO: 993792 - DNA, 120 bp, Artificial Sequence
  ENSG00000279738_69 (sequence is synthesized)
tatggggatttcttcatccgtcagatccacaaatttgaggaggtgagagatctgagagaagaggggtttgttggctcaggacagagcttaggaactgaatcgagagtttactttttttta

SEQ ID NO: 993793 - DNA, 120 bp, Artificial Sequence
  ENSG00000279738_70 (sequence is synthesized)
aactgaatcgagagtttacttttttttaatttttattcctttatttattttgagatggagtcttgtgctgtcacccatgctggagtgcagcgacgtgatcttagctcactgcaacctctg

SEQ ID NO: 993794 - DNA, 70 bp, Artificial Sequence
  ENSG00000279738_71 (sequence is synthesized)
acacccagctaatttttgtatttagcctcaagtgatccagtccgtctcagcttcccaaagtgttgggatt

SEQ ID NO: 993795 - DNA, 120 bp, Artificial Sequence
  ENSG00000279738_72 (sequence is synthesized)
acaggcatgagccaccatgcctggccttttaaatttttcatttctgttattaagaaagcctactgccctccagcctgggcaaccgagcaagaccctgtctcaagaaaaaaaaaaaagaaa

SEQ ID NO: 993796 - DNA, 77 bp, Artificial Sequence
  ENSG00000279738_73 (sequence is synthesized)
tttctgttattaagaaagcctactgccctccagcctgggcaaccgagcaagaccctgtctcaagaaaaaaaaaaaag

SEQ ID NO: 993797 - DNA, 78 bp, Artificial Sequence
  ENSG00000279738_74 (sequence is synthesized)
tcatgtctactaaaaatttctacgcagaaggctgaggcaggagaatgatttgaacctgggagatggaggctgcagtga

SEQ ID NO: 993798 - DNA, 120 bp, Artificial Sequence
  ENSG00000279738_75 (sequence is synthesized)
tgcagtgagcagagatcatgccactgcaaaagaaagcttgaggttggccctttaaattttcaagctagactggctggctgcttggggtttggggagtggggttgggcctgtaggaattgc

SEQ ID NO: 993799 - DNA, 120 bp, Artificial Sequence
  ENSG00000279738_76 (sequence is synthesized)
tgtaggaattgctgcatcagccttctccagagcatctctttccaagatctccctctgcgggtggccagctctcctctccctccctggtatttcctaatatgggtggattcactgcctgct

SEQ ID NO: 993800 - DNA, 120 bp, Artificial Sequence
  ENSG00000279738_77 (sequence is synthesized)
cttgcccatccctccccgtttggcattgttttccaacttagacaggtctggctagttcctgtaggctggaggacaggaagctctgttttgacatacttggtgcattccttgtcttgccct

SEQ ID NO: 993801 - DNA, 120 bp, Artificial Sequence
  ENSG00000279738_78 (sequence is synthesized)
aggagaggtcttgtgggtcaggccaaacactgtaagggtgtgggtctctctttgtggccattgctagggctactgtgtcctggtgctttgagttctccagcagaggtcaggctcttcctg

SEQ ID NO: 993802 - DNA, 120 bp, Artificial Sequence
  ENSG00000279738_79 (sequence is synthesized)
caggatcataacagccctgctgctctttttactttctggctgtttagatcacatctgtcagggtggtgggctagggctgtcttctaacaaggatcctgttcaaagcttctcattcttccc

SEQ ID NO: 993803 - DNA, 120 bp, Artificial Sequence
  ENSG00000279738_80 (sequence is synthesized)
ctaactgaactagtaaccttgaaacgtctggccagtctgaatcctttttctgtcagatggatagagcagtgttgtgtatgggtttgttgagtgtgaagggcagataaaagaataatccgc

SEQ ID NO: 993804 - DNA, 120 bp, Artificial Sequence
  ENSG00000279738_81 (sequence is synthesized)
gtgaactgtgcagggccatatgaatgtcacggctttgcacacacatagtggacacccacatcagaaacttcctttcttggcttcagaggggcagctgggaatctgacctagtgatcatac

SEQ ID NO: 993805 - DNA, 120 bp, Artificial Sequence
  ENSG00000279738_82 (sequence is synthesized)
acactgtaggaaaggggttggggaaatccccgtatgtaactttgcttttctttctcttctagcttaatcgaaccctgaagaagatgggacagagaccttgatgatattcacacacattca

SEQ ID NO: 993806 - DNA, 120 bp, Artificial Sequence
  ENSG00000279738_83 (sequence is synthesized)
ggaacctgttttgatgtattataggcaggaagtgtttttgctaccgtgaaacctttacctagatcagccatcagcctgtcaactcagttaacaagttaaggaccgaagtgtttcaagtgg

SEQ ID NO: 993807 - DNA, 120 bp, Artificial Sequence
  ENSG00000279738_84 (sequence is synthesized)
atctcagtaaaggatctttggagccagatttgtcgtctcattattgtaggagagaatttgtgggttgtggcagtaatacatttcccatgtgtcctgatgctttcaggatacatcagttgt

SEQ ID NO: 993808 - DNA, 76 bp, Artificial Sequence
  ENSG00000279738_85 (sequence is synthesized)
tttcccatgtgtcctgatgctttcaggatacatcagttgttagtgtttaaattgagttatttttattttgtgcagc

SEQ ID NO: 993809 - DNA, 87 bp, Artificial Sequence; identical to SEQ ID NO: 111166
  ENSG00000279738_86 (sequence is synthesized)

SEQ ID NO: 993810 - DNA, 62 bp, Artificial Sequence
  ENSG00000279738_87 (sequence is synthesized)
atttcctgacctcgtgatctgcccatctctgcctcctaaagtactgggattacaggcgtgag

SEQ ID NO: 993811 - DNA, 120 bp, Artificial Sequence
  ENSG00000279738_88 (sequence is synthesized)
tacaggcgtgagccaccgtgcccagccctaaattgaattcttaaatccctcttgttcataaagcagtatatttggtttacaggacattttcacgttcagtattttgtttgtgcgtcacaa

SEQ ID NO: 993812 - DNA, 120 bp, Artificial Sequence
  ENSG00000279738_89 (sequence is synthesized)
gatcctatgaactttaaatgacctataattttcatgacatatttgtggcagtgctgggtcctggaaggaaactattgaacacctcctactgccaggaactgtgcaaagagggatccatat

SEQ ID NO: 993813 - DNA, 120 bp, Artificial Sequence
  ENSG00000279738_90 (sequence is synthesized)
acattacttacaccttacaactcaggtttagtagtagttcctcatcttattgatgaggaaatgaacccacagtagttagtgacttgatcaaggtcacattaggcagctgctggagctgag

SEQ ID NO: 993814 - DNA, 120 bp, Artificial Sequence
  ENSG00000279738_91 (sequence is synthesized)
ctaaatggtttcctgcctacccacagtattaatgctatgcctgtcaccctatagtgggtacttggactggaagcccctgcttgcaagttgtctcacatctctgcctggttccttgtatat

SEQ ID NO: 993815 - DNA, 65 bp, Artificial Sequence
  ENSG00000279738_92 (sequence is synthesized)
ttgcaagttgtctcacatctctgcctggttccttgtatataaaataaggttgggcggatcacaag

SEQ ID NO: 993816 - DNA, 120 bp, Artificial Sequence
  ENSG00000279738_93 (sequence is synthesized)
gagccaagagatcgtgccgctggaccccagcctgggttacagagcgagactccgtctaaaaaaaataaaaaataagtgtagcagaacctggctcactgggcagtggtgacgaataaatga

SEQ ID NO: 993817 - DNA, 120 bp, Artificial Sequence
  ENSG00000279738_94 (sequence is synthesized)
gaatgctattttgagtgcccagtgcagtgcctggcctataatggatgttcagttactgtttccccacacttggaattcgtaagcttttcagtatgctctttttccccattggtttgataa

SEQ ID NO: 993818 - DNA, 120 bp, Artificial Sequence
  ENSG00000279738_95 (sequence is synthesized)
ttattattgggaactgaatggtggttcccaagaagacatgtccatatcctaagccctggatgccatcagcatgaccttatttgtttggctggcatgcagtggcacgatctctgttcactg

SEQ ID NO: 993819 - DNA, 89 bp, Artificial Sequence
  ENSG00000279738_96 (sequence is synthesized)
ttgtttggctggcatgcagtggcacgatctctgttattctacctcagcctcccaagtagttgcatgccaccatgcctggctaatttttt

SEQ ID NO: 993820 - DNA, 61 bp, Artificial Sequence
  ENSG00000279738_97 (sequence is synthesized)
acaggtgcacgccaccacgcctggctaatgtttgtagttttaatagagacgaggtttcgcg

SEQ ID NO: 993821 - DNA, 74 bp, Artificial Sequence
  ENSG00000279738_98 (sequence is synthesized)
cgtgagccactgcgcctggtgggtctcaaactcctgacctcagatgatcacccatctcggcctcccaaagtgct

SEQ ID NO: 993822 - DNA, 70 bp, Artificial Sequence
  ENSG00000279738_99 (sequence is synthesized)
tgagtagctgggactacaggcacccacgaccacaccttgctaatttttatatttttttagtagagatggt

SEQ ID NO: 993823 - DNA, 120 bp, Artificial Sequence
  ENSG00000279738_100 (sequence is synthesized)
gcgtgagccactgtgcccagccagcatgaccttatttggaagaaggtcttaatggttgtaagttaaagatctcaaaattagatcattgtgcttgctttagcagcacatgtaccaaaattg

SEQ ID NO: 993824 - DNA, 120 bp, Artificial Sequence
  ENSG00000279738_101 (sequence is synthesized)
acatgtaccaaaattggaatgatgcagtttagcatggcccctgtgcaaggatgacatgcaaatttgtgaagtgttcccatgtattaaaaatacatttttaaaaatgagatcattctggat

SEQ ID NO: 993825 - DNA, 120 bp, Artificial Sequence
  ENSG00000279738_102 (sequence is synthesized)
tatccaggtaggcactaaatccaatgacaagtgtcatgagagacactgaggaaagagacaggaggagaaggccacgtgaagacaggctgatggagttagcaggcacaagctaaagaatgt

SEQ ID NO: 993826 - DNA, 120 bp, Artificial Sequence
  ENSG00000279738_103 (sequence is synthesized)
gcggggccactgggagctggaagaggcagggatggcttctcccctggagcctctggttttggactcgtggcttctggaaccgtaagaggagaaatctctgttgtttaagtcccaagtctg

SEQ ID NO: 993827 - DNA, 120 bp, Artificial Sequence
  ENSG00000279738_104 (sequence is synthesized)
tgatagagcagccccaggcaggaattgaatgcattgcctcctgtgtatcaagccattggaggattcagggacagaaagctgggtccttttctacgagcaaaccagccaggcactgatagg

SEQ ID NO: 993828 - DNA, 120 bp, Artificial Sequence
  ENSG00000279738_105 (sequence is synthesized)
caagggggaagtcgggacgtgggaaaagaccgaattcctgtcttcagactcaaattctaatggttgaagacaggtgataagccatatttagtgtgttggatggtggtatgtgttgtagag

SEQ ID NO: 993829 - DNA, 120 bp, Artificial Sequence
  ENSG00000279738_106 (sequence is synthesized)
aaaaatcgaaggcaggagtttctattgtgaataggatagtcagggaccacactgattggcgtcatttgagcagagacctgaagacattaggagggggatggtgcaagtatgtgaggcaag

SEQ ID NO: 993830 - DNA, 120 bp, Artificial Sequence
  ENSG00000279738_107 (sequence is synthesized)
agctctccaggaaaaaaactgcaagtacaaaggtcctgaggccacagcatgttttatatgtggagcaaatggagcaagaaggccagctggagcagaaggtagcaaggaggaagaggccag

SEQ ID NO: 993831 - DNA, 120 bp, Artificial Sequence
  ENSG00000279738_108 (sequence is synthesized)
atcctggaatgaggctccaggttgtatgtaaggccttgtagaagacaggaaggaccgactttgaatctcagtgaggtgggaagccatccttcaccagagaggttgcagaacttgtccaag

SEQ ID NO: 993832 - DNA, 120 bp, Artificial Sequence
  ENSG00000279738_109 (sequence is synthesized)
ttcccagagctaaaggatggagccaggattttatttattttttgggacaagagtttcgctctattacccagactggagtgcagtggcacaagcttggcgcactgcagtgcaacctctgcc

SEQ ID NO: 993833 - DNA, 79 bp, Artificial Sequence
  ENSG00000279738_110 (sequence is synthesized)
aatatagttttgtttgtatagatggtgttttgccatgttgcccagactgctcttgaactgagcttaagcagtccacctg

SEQ ID NO: 993834 - DNA, 71 bp, Artificial Sequence
  ENSG00000279738_111 (sequence is synthesized)
ttttatagttttgtttgtatagatggtgttttgccatgttgcccagactgctcttgaactgagcttaagca

SEQ ID NO: 993835 - DNA, 120 bp, Artificial Sequence
  ENSG00000279738_112 (sequence is synthesized)
agttataagtccaaacatttgtagagctcttggtagctttccaagccgtccttcatctgttgccttgttggaaccgaatgagtggcccagtgccagccagggctccttaccccccactcc

SEQ ID NO: 993836 - DNA, 120 bp, Artificial Sequence
  ENSG00000279738_113 (sequence is synthesized)
ctggctaccacatggttccttggtgcagggaggttgctgtgcattgattcctcctaaagaatgtctcatgctttgtccactatgccctgacatttggtgatggtggcttgcaggaactcc

SEQ ID NO: 993837 - DNA, 120 bp, Artificial Sequence
  ENSG00000279738_114 (sequence is synthesized)
gactcaactgggcagccccctgggttaatgtgttttgaattcaatgccagtttcatagttcatgtcatagttctctatcattacaattatgccaggtccaagtgtgttgtctgacacggc

SEQ ID NO: 993838 - DNA, 120 bp, Artificial Sequence
  ENSG00000279738_115 (sequence is synthesized)
tcttggcactctttttgctgtgaggccattgcaggcactctgggtcacacagacccagtgtgtatgagtgcctggcttggggccatctcccagcagcttggtccaggctcagcagccagg

SEQ ID NO: 993839 - DNA, 120 bp, Artificial Sequence
  ENSG00000279738_116 (sequence is synthesized)
ccaggcagctagcaacccctgtgagggggcaggcacagctggactctgcctggcaccactcgcggaatgcacagcattcatcagctgtggccagctcaggatttttattccatcagagca

SEQ ID NO: 993840 - DNA, 120 bp, Artificial Sequence
  ENSG00000279738_117 (sequence is synthesized)
gaataaccaggttcatgatcccccccatgctaaggagagcaagggctttgttatcggggaatggggagctctgggtggtaccagtttccagaagtttctccaccagcaagagaagggggc

SEQ ID NO: 993841 - DNA, 120 bp, Artificial Sequence
  ENSG00000279738_118 (sequence is synthesized)
agagcaaagtgtgtaggcttggacttccttggaccctggtctgagtcctgactgccacataccagctgagccaagttgcgtagttttcagtgcctcacctttctctaaaatggggttagc

SEQ ID NO: 993842 - DNA, 120 bp, Artificial Sequence
  ENSG00000279738_119 (sequence is synthesized)
gcctgcctcagaattgttctgtgcaccaaattatgtaaagttcttagcaaatcacctggcagtagtgtgtgataaggggaggagggccttactaaaacacttgggtagagtgtgtgataa

SEQ ID NO: 993843 - DNA, 120 bp, Artificial Sequence
  ENSG00000279738_120 (sequence is synthesized)
ggggagggaggccattgttacctggccatgaccttggcctccagagccgtagagctatagatgactgaggcaggtcatgtgtggaacagcccggctacttcctggtggagctgggactgg

SEQ ID NO: 993844 - DNA, 120 bp, Artificial Sequence
  ENSG00000279738_121 (sequence is synthesized)
aaacctccagactcccccctggggctctcttaactgctccaaggaccaaagagaaggcctgtttagacagtgtggaggcccattcacagaggccagggcacttgtctagagcagccagcc

SEQ ID NO: 993845 - DNA, 120 bp, Artificial Sequence
  ENSG00000279738_122 (sequence is synthesized)
acggaggagctgggccccacgcacagtgtcggcagcaggcatgaggggagaattggagagattgggaggttgcagaggacaggacttggatgtggcagctgagtggatgtggaggctgta

SEQ ID NO: 993846 - DNA, 120 bp, Artificial Sequence
  ENSG00000279738_123 (sequence is synthesized)
gggaagtgagatgcccagttctcaggctgtctgagatgggggttggtggctggagcaggtttgggactggaggaggtaagtgcaagtgggtaaggaacaggagtttgaggagcctgtggg

SEQ ID NO: 993847 - DNA, 120 bp, Artificial Sequence
  ENSG00000279738_124 (sequence is synthesized)
acgtccaggtggaggtgcccagggcctaacaatttgggcagaggcaatgaacagctggggctggaaccctggtctccaggcccctaggctagagctggttcctcctcagacaagtccctg

SEQ ID NO: 993848 - DNA, 74 bp, Artificial Sequence
  ENSG00000279738_125 (sequence is synthesized)
gcttggcaccctgttgcgcaggctggagtgcaatatcatgatctcagctcactgcaacgtccacctcccaggtt

SEQ ID NO: 993849 - DNA, 71 bp, Artificial Sequence
  ENSG00000279738_126 (sequence is synthesized)
gcttggcacacttctttccacacagtccccctctctgcatccttctcctacactggattgtgagtccaagt

SEQ ID NO: 993850 - DNA, 120 bp, Artificial Sequence
  ENSG00000279738_127 (sequence is synthesized)
tctctgcatccttctcctacactggattgtgagtccaagttgggggcgtggggtgcttttcctcctatgatcgccttgaccataggtggctccggatggcttcatcttctaaatgaggca

SEQ ID NO: 993851 - DNA, 120 bp, Artificial Sequence
  ENSG00000279738_128 (sequence is synthesized)
gtgggactagccgctgtctgggggctgcagccctgcattctagaattctgggtgacatcctaaggatctaaatggatctaataggaggaaagaggcagcacttgggagcaatgacccttt

SEQ ID NO: 993852 - DNA, 120 bp, Artificial Sequence
  ENSG00000279738_129 (sequence is synthesized)
cggtaaagcgattctgttgaatgaatggtgaatgcaagaggaagtaagtgaataaggattgaatgcaacaatatcagtataggaataaggctggagtgtgccttaaatcctgtctggaat

SEQ ID NO: 993853 - DNA, 120 bp, Artificial Sequence
  ENSG00000279738_130 (sequence is synthesized)
gtagcggcacagatgaattgatgaatggatgtactctccagcccagcctttagccagggaaagccgtggtgcccacgctggctcttgctaacagtggcctcccgtccccacccccagcct

SEQ ID NO: 993854 - DNA, 120 bp, Artificial Sequence
  ENSG00000279738_131 (sequence is synthesized)
gccctgcagactggatataggctggagtggctgtggcccgggtcaggaactggcctccaatgtgggggaagggcatcaagaagaagctgagagggaggcaagggaaaggtccaaagcctg

SEQ ID NO: 993855 - DNA, 120 bp, Artificial Sequence
  ENSG00000279738_132 (sequence is synthesized)
atcagcaagttcctgagattttcccgaaggagagggctaggggaagcagcaacttgtcttggttcctgtggctccacattcctgtcaagcctgcagctgaaagacctggcttttctttct

SEQ ID NO: 993856 - DNA, 120 bp, Artificial Sequence
  ENSG00000279738_133 (sequence is synthesized)
ttctggccccaccctgcccctatccagccacttgattaagatcaagttatctccttcacgccctgactcccacccctactttcttacctggggccagtggatcctgagagggtggacttc

SEQ ID NO: 993857 - DNA, 120 bp, Artificial Sequence
  ENSG00000279738_134 (sequence is synthesized)
actctctagtcatggttgggaagtggaagggagtctaggttcaaaccctgacgctgccccttgaaactggaaaattccaggcacttggcttaacttctctgagcctctgctttgtcatag

SEQ ID NO: 993858 - DNA, 120 bp, Artificial Sequence
  ENSG00000272644_0 (sequence is synthesized)
cttcctatatctcccttcctggtcagcaatatagcccattctctggagcttcccgtggggatttttcttcccagtgaattcttcctattagttatctaagtggtttaactgttgaaatgt

SEQ ID NO: 993859 - DNA, 120 bp, Artificial Sequence
  ENSG00000272644_1 (sequence is synthesized)
atgcatacctcttaggttctcacagccaggagctatttcctaagttgtctttctggtggaaagctcagctcctactaagcagtccttgcttcaaaatggctttgatgaatgacccaaagg

SEQ ID NO: 993860 - DNA, 120 bp, Artificial Sequence
  ENSG00000272644_2 (sequence is synthesized)
agccaggccagtccctgagtcatcacagagcaccctaggtgagaaaccctgaagtgttctctgctgttgctccacccctaccctatatgaacagattaaatcgtttcgtttggcacagtt

SEQ ID NO: 993861 - DNA, 120 bp, Artificial Sequence
  ENSG00000223344_0 (sequence is synthesized)
agattcaagtacaaaatcaacaaaccaaagtataggtggaaaatataccacgtgagtttctcagacaccgtttgaatggagactggcatctctttaagaactacttccctttctccacag

SEQ ID NO: 993862 - DNA, 120 bp, Artificial Sequence
  ENSG00000223344_1 (sequence is synthesized)
cttaacatcagaaacttgaaggtcactcccaagggtgaacactctggagagaaagatttgctctcagtgctgatttatgaactgcagcgtcacaaaccagcattaatttgtagttaattt

SEQ ID NO: 993863 - DNA, 120 bp, Artificial Sequence
  ENSG00000223344_2 (sequence is synthesized)
cgtttacttacagtcatctcttatccctgaaaaaacaaaacacgtatattattgtgctttatactttcctaaagaagaaaaaaattctaagaaaattatatttagtaacttattgtctta

SEQ ID NO: 993864 - DNA, 120 bp, Artificial Sequence
  ENSG00000223344_3 (sequence is synthesized)
agaaaataactgcaaaatatctgtctagtgtgataaattatacgtgtaagtttattttttttcagaagcagaaaacatcatttctctagtaagttcacaaagataattaagatacccaga

SEQ ID NO: 993865 - DNA, 120 bp, Artificial Sequence
  ENSG00000223344_4 (sequence is synthesized)
tgaaattctacaaatggctttaaaagttgatggggaactgaatgtttagtattaatgtatcataattgaaataaaataaagataatagagaaataaaataaagatgctataaccctcaaa

SEQ ID NO: 993866 - DNA, 120 bp, Artificial Sequence
  ENSG00000223344_5 (sequence is synthesized)
aaatcagaagacaagctaagatgcaagaaaatgtgacccttgataaagatggaaaacaggaaatgaaagtgtaccaggagagccacaaaagttccaggagttccagatgttctttttctt

SEQ ID NO: 993867 - DNA, 120 bp, Artificial Sequence
  ENSG00000223342_0 (sequence is synthesized)
gtgctttgaaattgcaaaggcttattgtgcagatggcggtgaggaggagatctcggctaccccacatgaaagaccagcgcagtggaggatacctctctccacacccacacacacgctcct

SEQ ID NO: 993868 - DNA, 120 bp, Artificial Sequence
  ENSG00000223342_1 (sequence is synthesized)
gctcagcctgcagttgctcattctctagagaatcctccccagggagttcacacctgcctttgcaagatgcttccatgcacggattgatggccccaggactcctggaagatgatatgtggc

SEQ ID NO: 993869 - DNA, 120 bp, Artificial Sequence
  ENSG00000223342_2 (sequence is synthesized)
aataactgtcacccagagccaccaaagcacttcacctgccctgccttgtagcctgccctgccttgtagcgcttctgccgggtgtcactgctatttgtatgttaattagactgggggttcc

SEQ ID NO: 993870 - DNA, 120 bp, Artificial Sequence
  ENSG00000223342_3 (sequence is synthesized)
ttgaaggagtaagctaaggccagctaactgctctcaagcgcctttaattatggtctttggtgccctcttaccgcttcatcttatttatcactcttttcctgagaccttctaatatagaat

SEQ ID NO: 993871 - DNA, 120 bp, Artificial Sequence
  ENSG00000223342_4 (sequence is synthesized)
gcagacacgaacatgtgtgcatgcacacacacgcacgctggcttaatatatgcacagtggaagctgaatacaacatctcgctgggacacttccacacttgttaagacagttcccaaaaca

SEQ ID NO: 993872 - DNA, 120 bp, Artificial Sequence
  ENSG00000223342_5 (sequence is synthesized)
cattaaaaaatgatggattgtgccgtcccggctccttgttcattttagcacgatagaatttcttgatagtgtctgatttcagagcacacctgtagacctagtgacagcctgcgctcctgg

SEQ ID NO: 993873 - DNA, 120 bp, Artificial Sequence
  ENSG00000223342_6 (sequence is synthesized)
gtgggtttggaaaagcgcttatttgttctgaagctaaaattaaactgcaagtttttacatgttgtttagcggcagcagctgatgcaaatctttgtcaacacggaacttttcacacctcag

SEQ ID NO: 993874 - DNA, 120 bp, Artificial Sequence
  ENSG00000223343_0 (sequence is synthesized)
aagcgtagacgcggacaagagcggcaccattaaggcatacactagtgggagcttctcggtgcctgcgtgaagacgccctcttgcctccgggaaaagtatcgtctgcatcttcttgctcca

SEQ ID NO: 993875 - DNA, 120 bp, Artificial Sequence
  ENSG00000223343_1 (sequence is synthesized)
ggagcgggggtggggagcgcagcgcggaggaggcagcgctgagatgactcaacagtgcggcatttgggggcgccgcggaggctgggactgcgtaagcggcgatagggtaggacccacagc

SEQ ID NO: 993876 - DNA, 120 bp, Artificial Sequence
  ENSG00000223343_2 (sequence is synthesized)
ctcctcgcaggcattcttggagctcggttccgcggtcggtccggatctcccgggaagtctcgccggagtcaggcaggccttaggaagaagctgcctgatgtgcaaggtttcataggccgt

SEQ ID NO: 993877 - DNA, 120 bp, Artificial Sequence
  ENSG00000223343_3 (sequence is synthesized)
ggaatgaaccagtgctcagggcagaaaaattctgcctgacctttcccatcttcctgatgatgttaacaaacgacagccactgagggcacaggagggggctctacacaggccaagagctac

SEQ ID NO: 993878 - DNA, 120 bp, Artificial Sequence
  ENSG00000223343_4 (sequence is synthesized)
aggctacagtctgagcacagaaaaccctccagctccagcatccagggccacagctggacacaagtacagaacctggcagccctgcagcccagacaatgcccagggtgtgatttagggtgc

SEQ ID NO: 993879 - DNA, 120 bp, Artificial Sequence
  ENSG00000223343_5 (sequence is synthesized)
agagctgcaactcagatcctgtgccatggcagtatcacaggaaggacttgacggagaggtgaaggctccagacgccaggatatttattccctgtgccaatacagcattcacacctgacct

SEQ ID NO: 993880 - DNA, 80 bp, Artificial Sequence
  ENSG00000260115_0 (sequence is synthesized)
agcactgagtggttccctgattcagtggaagccagacatcctatctaaacctctagaacaccagggtcccggctgctgag

SEQ ID NO: 993881 - DNA, 120 bp, Artificial Sequence
  ENSG00000260115_1 (sequence is synthesized)
ctatctaaacctctagaacaccagggtcccggctgctgagaactccaggcacacgaggctgcttgggaaagactggagaagtgccaggaggattaattacagcagttaatgtttccattt

SEQ ID NO: 993882 - DNA, 120 bp, Artificial Sequence
  ENSG00000260115_2 (sequence is synthesized)
tggctagaattggcttctgaatatgtgtgctccttatcaaggccacagtttacagctttgctagggagagctatggtaatgaactacttgatctttttttttttttttttttgagacgga

SEQ ID NO: 993883 - DNA, 120 bp, Artificial Sequence
  ENSG00000260111_0 (sequence is synthesized)
accagacccgccttcttccatcatgcccatttcagaacaatgaaggactagacagttttttgttccttttaattcagaaagggaaggaaataaaaaagtgtgtttaaattactattgcag

SEQ ID NO: 993884 - DNA, 120 bp, Artificial Sequence
  ENSG00000260111_1 (sequence is synthesized)
aggaaataaaaaagtgtgtttaaattactattgcagaaaatctggctggatgctgggacctacctcttccaggatggggattcatgatttaatttttttgagacagggtcttgctctgtc

SEQ ID NO: 993885 - DNA, 120 bp, Artificial Sequence
  ENSG00000260111_2 (sequence is synthesized)
cgtaggggtcgcaaagctcctactgtggctgtggggtcctctggcgctgggaacagctgctgttcagcggggcactgtgtccaataccatctgggtcaggcgagcttgtgctgagctccc

SEQ ID NO: 993886 - DNA, 120 bp, Artificial Sequence
  ENSG00000260111_3 (sequence is synthesized)
taccagggtccaggtctccttcctaatactcctggcccaggttctgcccatccccactcccccggggccagcctatcctgctgtgagctcacagtaatcccctggcaggttccccttcac

SEQ ID NO: 993887 - DNA, 120 bp, Artificial Sequence
  ENSG00000260118_0 (sequence is synthesized)
cagcacccctgcctcattaaccagatggctgggataagactcttgattttgaaaattcaacaaccagagttcagctatttgcagtgatttgcagtcatttgtcactatcaaaaaggaaaa

SEQ ID NO: 993888 - DNA, 120 bp, Artificial Sequence
  ENSG00000260118_1 (sequence is synthesized)
taactaaaatgtggtgtgttggcattagttacttactaatgagcaagatcagcacctgcatttcagcttggctctgtcattttctatttattggaagaatggtgttgtggttaagtgtgt

SEQ ID NO: 993889 - DNA, 120 bp, Artificial Sequence
  ENSG00000260118_2 (sequence is synthesized)
ggtgtgtagaggaagactatttgtttttttgtcttgttttgtttttattgaaatatagcatgcatactgaaaaatgcacaaatcatatgtgcagagctcactgaatttcacagaatgaat

SEQ ID NO: 993890 - DNA, 120 bp, Artificial Sequence
  ENSG00000260118_3 (sequence is synthesized)
acacccatgcaatagcactcagatcaagagacagaacattagcagcacccccagaaggaccacccccaggatcccttccagtaaccacaccccctccagtagaaactattatccttactt

SEQ ID NO: 993891 - DNA, 120 bp, Artificial Sequence
  ENSG00000260118_4 (sequence is synthesized)
ctaacatcacagattacttttgcttggttttgtaacttatataaatgaaatcacaccatatctactcttcgtgattattttcactcaacattatgtttgtgatatccattcgtattgtta

SEQ ID NO: 993892 - DNA, 120 bp, Artificial Sequence
  ENSG00000260118_5 (sequence is synthesized)
ttggcaattatgaataatgctgctataaccatttctttatattctttgtagtgaacatgcatgtatttctgttgttatatatttaggaatgaaactgctgtgtcattttgtgtgcatata

SEQ ID NO: 993893 - DNA, 120 bp, Artificial Sequence
  ENSG00000260118_6 (sequence is synthesized)
ttcaaatataatagttgttgccaaacactttttcaaagtggttgtaccactttgcatttccaccagcagtgtatgagtgttctagttgctctaaattctcaccaacacttggcattttgg

SEQ ID NO: 993894 - DNA, 120 bp, Artificial Sequence
  ENSG00000260118_7 (sequence is synthesized)
tattttttattttagccaatgtggtgatcatgtggtgacctctcattatggtttccttttgcatttctctgatgactaatgaaattgagaatcttttcaatatatgttgactggccattg

SEQ ID NO: 993895 - DNA, 120 bp, Artificial Sequence
  ENSG00000260118_8 (sequence is synthesized)
tacatcttgttttgtttgtcttttagatgtcttttgtcattgatttgtaagggctctttatgtattctggatatgaatcttttgtcaaatatatgcattgcaaatatatacttttttact

SEQ ID NO: 993896 - DNA, 120 bp, Artificial Sequence
  ENSG00000260118_9 (sequence is synthesized)
tattgatatctttaatttgttttaagaaaatttttaatttttatggaaattttatagaaatgctgaaaatcaaacgttatctgcagtggtaacagtctgacttctaaactgctatatgta

SEQ ID NO: 993897 - DNA, 120 bp, Artificial Sequence
  ENSG00000260118_10 (sequence is synthesized)
atagaagaacaatacataattgttgtatatatttatgaggtacatgtaatattttgatacaagcataaaatatgtaatgattgttgatctcttttaatgaacagaattccttaatcataa

SEQ ID NO: 993898 - DNA, 120 bp, Artificial Sequence
  ENSG00000266983_0 (sequence is synthesized)
cgcgcggcccgaggcgggtcttgaagcactcgttttcccactcgttttccggggttcccccgcggtgggacagtgagcagttcagggcgccgcagccgaggccttcctccaggaaaggtt

SEQ ID NO: 993899 - DNA, 120 bp, Artificial Sequence
  ENSG00000266983_1 (sequence is synthesized)
tgctggctcctgccttagaagatgagaaagtttgtgatggatggagaagaggatcttccagaaaataaccagggctttccagccactggatccaaagactatgctctccctgagggtgga

SEQ ID NO: 993900 - DNA, 120 bp, Artificial Sequence
  ENSG00000266983_2 (sequence is synthesized)
ctggagatgtctcaagcctggcagcagagaaagactgtccaaggaggcagcaggagccaaggccagtgacaccacatctcaaggagccaaatgacgatgcggattttcaggctaaaactg

SEQ ID NO: 993901 - DNA, 120 bp, Artificial Sequence
  ENSG00000266983_3 (sequence is synthesized)
tgaggccagattttgcgggcggtgagctggaaggagcactggactaggagtcctgagaggttagagtataagactccatccaccaggaggacatactggctcacacataaaaagaaagtt

SEQ ID NO: 993902 - DNA, 120 bp, Artificial Sequence
  ENSG00000266983_4 (sequence is synthesized)
ttggaacagatgatccttctgctgtttacccccgaacccccaggctatttaagagtagaatcctttgcttgggtaattacgttgacattgacactaaaaggatgcatagttgtcttgaca

SEQ ID NO: 993903 - DNA, 120 bp, Artificial Sequence
  ENSG00000234877_0 (sequence is synthesized)
aatacgctagatacactgcaggaagcctaagagtaagaaatgcaacagcccaattagatgctggtgaatgctcaatcccttttcctggagagaagccattaagcctgctctgctgagctc

SEQ ID NO: 993904 - DNA, 120 bp, Artificial Sequence
  ENSG00000234877_1 (sequence is synthesized)
atgttattaaacttcgtctttgccattcacctgagacactaacttataggcaatccaagaatgagttgtgacagcctgtctctctacccaggtggtaatgcttagtgccattcccaatgt

SEQ ID NO: 993905 - DNA, 120 bp, Artificial Sequence
  ENSG00000234877_2 (sequence is synthesized)
acataaaggagatgtctctgttgtggtatcttaatagatcctgtagttcccacatgttttggtaactgtttgatataattactgtgtctcataaaaaataaattttttttaatacagtaa

SEQ ID NO: 993906 - DNA, 120 bp, Artificial Sequence
  ENSG00000236519_0 (sequence is synthesized)
ccctttttcccataatggctgtagtgagtgggtgtgctttcccgattgacccgctgtgagaaatgtggtttacagcttctatcaggattagcttcagcttcaagtgacaaaagtcacttg

SEQ ID NO: 993907 - DNA, 120 bp, Artificial Sequence
  ENSG00000236519_1 (sequence is synthesized)
aaatatgagttgctgaaacaagatggcagtctctcccctcaacaggactgttacaacaccttatcttcagagaaccaggctctctgcaacatttcagggacgtcgttcagtaccttatgt

SEQ ID NO: 993908 - DNA, 120 bp, Artificial Sequence
  ENSG00000236519_2 (sequence is synthesized)
ggaattcaagcttagctgggcatcctatgttttaactggctaactcgtggaactctcaacttggatcaagtggtagtggagtcccagggactctgagcagccagtgtgtgatactgcagg

SEQ ID NO: 993909 - DNA, 120 bp, Artificial Sequence
  ENSG00000236519_3 (sequence is synthesized)
gcagcacaccctggggaggccaactgtacagaataaaattaatgctttctatctttagcaactaaagttctgaaatataaaaaggacctcacagcttaacccatgttatacggtggggtt

SEQ ID NO: 993910 - DNA, 120 bp, Artificial Sequence
  ENSG00000236519_4 (sequence is synthesized)
gggagtgggggttcctgggatgtgaacctttcggtgcaaaaactggagaagttccagttgggaccccaggcatagatactaggataaatagggcctctctcctccaggagcatcaattta

SEQ ID NO: 993911 - DNA, 120 bp, Artificial Sequence
  ENSG00000236519_5 (sequence is synthesized)
acccaaagattcttggagtcagtttcacataagtaatcttgttgaaaatagtaatcccaacagatctatttttccaaatgcaccatttgcataaatctcagaaaaaagacaacttcaaga

SEQ ID NO: 993912 - DNA, 120 bp, Artificial Sequence
  ENSG00000236519_6 (sequence is synthesized)
caccatggctcatgcctgtaatcccaactacttggcaggctgaggcacgaggatcacttgaggccaggagtctgagatcagcttgggcaactgatttatggtttggatttgtgtccatgc

SEQ ID NO: 993913 - DNA, 63 bp, Artificial Sequence
  ENSG00000236519_7 (sequence is synthesized)
caggagtctgagatcagcttgggcaactgatttatggtttggatttgtgtccatgcccttcct

SEQ ID NO: 993914 - DNA, 120 bp, Artificial Sequence
  ENSG00000236514_0 (sequence is synthesized)
cttcgggccagtgcgcattgcctaccccgtgctacaggacttcgctgagcgccaggcgcagggactggacgcatacggacccccgggagccccggaactcgcgttcccacgccagacctc

SEQ ID NO: 993915 - DNA, 120 bp, Artificial Sequence
  ENSG00000236514_1 (sequence is synthesized)
atccccttctgacagagacgccctcgtcccaccgtcgccgcaggcgccaggggtccctccccaccgccgaggtctagccgccgcccgcccgccttcagggcagcgcggggaccccctggc

SEQ ID NO: 993916 - DNA, 120 bp, Artificial Sequence
  ENSG00000236514_2 (sequence is synthesized)
cctcgcccagtgctccggggctcacccgccgctcctcgccgcctccggaggcgagggattgtttcccacaagggactggagtccagggaaggactcgcctggagcgggaggcggggatgc

SEQ ID NO: 993917 - DNA, 120 bp, Artificial Sequence
  ENSG00000236514_3 (sequence is synthesized)
gttgtaaaatgaggctgatagtgcctacctagcaggggttttatgagaattggaggcgcttacgttgtaaaagcatttaaaccggtgtctgacacataaattgttcagtatatttctcac

SEQ ID NO: 993918 - DNA, 120 bp, Artificial Sequence
  ENSG00000236514_4 (sequence is synthesized)
aattatatatcatgctggtcatcataaggctctcctgcaaaacagccttgtatagtgggttgagagattactgtctcagttacccactcctgcttggaaccaggattctgtcagtgtccc

SEQ ID NO: 993919 - DNA, 120 bp, Artificial Sequence
  ENSG00000236514_5 (sequence is synthesized)
cagaggttgtggatcaaatcaatgtgcctgttagacacaagccaagagaaggaaaggtgtgcttgaattcattcacgatcatgcatgcaaccaatcaaggatattgtcaccgggggtcct

SEQ ID NO: 993920 - DNA, 120 bp, Artificial Sequence
  ENSG00000236513_0 (sequence is synthesized)
caccatataagaagtgcctttcaccttccaccatgattctgaggcctccccatccatgtggaactaaatggaatctttctctgttgcccaggccagagtgcattggcaccatcacagcaa

SEQ ID NO: 993921 - DNA, 120 bp, Artificial Sequence
  ENSG00000236513_1 (sequence is synthesized)
agtgcagcctcaacctcctgggcttggctaaagcaatcctcccacttcaacctcctgagtagctgggactgcaggaatggggacaaagctattgaaaacttctccttctcaggctcactt

SEQ ID NO: 993922 - DNA, 120 bp, Artificial Sequence
  ENSG00000236513_2 (sequence is synthesized)
cgccaacatctgtggctgaatgtagacattcccccttttaggcaaatttctttaaattcatagcaaggtatgaccaagaacattaaaacaatgcttcattgcttatgcctgacgttgaag

SEQ ID NO: 993923 - DNA, 120 bp, Artificial Sequence
  ENSG00000236513_3 (sequence is synthesized)
agcaaaatttacatctgctacacagttcaaggtttccatggccttagtagaggtcatgaaatgtacagttttaaaacttattggagtatctttatgaacgattttaatggactagagtga

SEQ ID NO: 993924 - DNA, 120 bp, Artificial Sequence
  ENSG00000236513_4 (sequence is synthesized)
tttgtagttttcctccataaatatattttccacatcaactgctctgagctgagttgctggaacattttcaattctttataagtacatattttggctgagttcagaaaccttggactaggc

SEQ ID NO: 993925 - DNA, 120 bp, Artificial Sequence
  ENSG00000236513_5 (sequence is synthesized)
actgtcctttgagtgagacgtcaggattgaggtagcataggcacaagaccaaattttagttcatgatggagtattgccagcttgtgagcctctggtgctttcaaggaagcacaggtgatg

SEQ ID NO: 993926 - DNA, 120 bp, Artificial Sequence
  ENSG00000236513_6 (sequence is synthesized)
gaaatcaaataaaaacagagccaggaaaacatctggtgtggaaagtagctcattgcataaaatgctaaaaacaaaaagttgagaaaattaagcctcttctactttttaaaagaaaaattt

SEQ ID NO: 993927 - DNA, 120 bp, Artificial Sequence
  ENSG00000236513_7 (sequence is synthesized)
gactctaccaattataaccacaaggaatgttctccagacttgaatattttaagtgaaagattaatatccagccatttataaacctccaaatcctttccccaactttattcataccatttt

SEQ ID NO: 993928 - DNA, 120 bp, Artificial Sequence
  ENSG00000236513_8 (sequence is synthesized)
ttattataaattttcaaaaaatttactgatctagtttggaaaaatcatgtccttgaactgttgaaccatatttgtaatctgtttcaataaaaatatagatataatacttagaaaaacaga

SEQ ID NO: 993929 - DNA, 120 bp, Artificial Sequence
  ENSG00000236511_0 (sequence is synthesized)
gtactgcaggcgcgcggggacccgggccggagccggggtcgcagccatggtccaagcgcctctgctcctgagccctagcagtgcctcccccgcgctgctctgggcaccgagaaactgctg

SEQ ID NO: 993930 - DNA, 120 bp, Artificial Sequence
  ENSG00000236511_1 (sequence is synthesized)
gggcaagggggagggatttggaagcgcgcaccaccttccccagctcccgttgcaagttcagtcttcgacctccgagacgcccggtgacttctgctggcacctgctgccctcggcatcacc

SEQ ID NO: 993931 - DNA, 120 bp, Artificial Sequence
  ENSG00000236511_2 (sequence is synthesized)
tccctcatccccctggagggcacgctggaaagctgcaactccccaccctccgcacaggagcgccccgtagacgcgcagatgggcccagccacccagcggggcggcagccctgagcacaca

SEQ ID NO: 993932 - DNA, 120 bp, Artificial Sequence
  ENSG00000236511_3 (sequence is synthesized)
agtttggagagcgcgcgaggcacctgaaagtggttggggtttggaagcaaaagggtgacacctgctgttcgctgggaccgctctgcgggtgtgggcgtcggtttggaaacgtcctttgcc

SEQ ID NO: 993933 - DNA, 120 bp, Artificial Sequence
  ENSG00000236511_4 (sequence is synthesized)
tgagctctgcttggctgtgtgccccattcttattactctatctcagtgggtctcaatcccggctacacattggaatcacttggaaagctttaaaaataaaaccaaacctgtgcttgggct

SEQ ID NO: 993934 - DNA, 120 bp, Artificial Sequence
  ENSG00000236511_5 (sequence is synthesized)
ccaccataggtgttcaccacagctgtcagtaagtatctgcagcaaattagatcggtgagcacttagcctaaatggaagaaagagcagcagaaatggcttaagataggttaggattgctga

SEQ ID NO: 993935 - DNA, 120 bp, Artificial Sequence
  ENSG00000236511_6 (sequence is synthesized)
atgctgtgtctccgtttccctcagcgcctgcatttaaatactcacaagtcctatgaactgaatctcctgaaatagagctccttagaggccacaagtcctgggcattaatgtgcactatcc

SEQ ID NO: 993936 - DNA, 120 bp, Artificial Sequence
  ENSG00000236511_7 (sequence is synthesized)
catttgattttcacaactactcagaggggccatttccccattttttctagggagggaaactaaaactcatacaaggggattaatgagccgtaagtcagcagagtcagtgctcaaaaactg

SEQ ID NO: 993937 - DNA, 120 bp, Artificial Sequence
  ENSG00000236511_8 (sequence is synthesized)
gaaatcttagactcgaaattccattctctttccacactgccccatcaaactcctctcttttacatgatttttccggtcagttttccagactgctttgcataacagtagtctcaacacaca

SEQ ID NO: 993938 - DNA, 120 bp, Artificial Sequence
  ENSG00000236511_9 (sequence is synthesized)
ccttcttaattcttaggccaggttaatcagattccactttcttcatcatttttaggcagaattatactgcccagaaatccatgcaccatacactttccaccccaccccctactccatgcc

SEQ ID NO: 993939 - DNA, 120 bp, Artificial Sequence
  ENSG00000236511_10 (sequence is synthesized)
tcctaagggggtctcacttaccctttgggatgtttctggtatttcggttcttcataaaccggaagtctgttttctctacattctctatttagttagtgcagggttgacatattcgcatgt

SEQ ID NO: 993940 - DNA, 120 bp, Artificial Sequence
  ENSG00000236511_11 (sequence is synthesized)
atgtctttcctccgcctcctaaatcagtgcctccagggcccctgaagtacttttagcaatcttctctcaaatctttccagcctcttgcatgcaattgagaggctcagaactcaacacagc

SEQ ID NO: 993941 - DNA, 120 bp, Artificial Sequence
  ENSG00000236511_12 (sequence is synthesized)
cagccaggtgtggtctccagagaactccatagcgattattactacagtgagaagagaactcattaattcaaaataaagcggagcaggaacaaagtcatgtcagaatgactgaaatttcta

SEQ ID NO: 993942 - DNA, 120 bp, Artificial Sequence
  ENSG00000236511_13 (sequence is synthesized)
gggctccagctggtgtttggtgagggttggttgggggagggagaagaggatacaaaccaccagcagaacacaatattgacacgatgcgagaccctcggtcagattgctgaaggcgctgta

SEQ ID NO: 993943 - DNA, 120 bp, Artificial Sequence
  ENSG00000236511_14 (sequence is synthesized)
agagcaaaatatccacaccggctgcttgttttttctcttgggttgggattgggtggattaagtaggtggatttgttcatttttatttaactttcaacaattgcacaagtactccataaag

SEQ ID NO: 993944 - DNA, 120 bp, Artificial Sequence
  ENSG00000236511_15 (sequence is synthesized)
aaagtaggagctacagaaagtaaagcgaagcaaataaaagtcataattcatgcatccagggacaatcattgttaatattttgatgcatatcctctagatatttttcctatatgcctgtgt

SEQ ID NO: 993945 - DNA, 120 bp, Artificial Sequence
  ENSG00000236511_16 (sequence is synthesized)
gcagtcctaagtgctgagttctttcctcactgacagggtcgagagagcagcagcaacgtgataggaaagcccgcagacatttgtcaactggctgggcccaaaagaccatattcgtcttcc

SEQ ID NO: 993946 - DNA, 120 bp, Artificial Sequence
  ENSG00000236511_17 (sequence is synthesized)
attacttaacttgggattgaaggtttactcgctgctgtattgtgaaccatttccctagaagtgggccagcagagccagggactcttgtcccaaagttgatgccgatctctagcagctacc

SEQ ID NO: 993947 - DNA, 120 bp, Artificial Sequence
  ENSG00000236511_18 (sequence is synthesized)
cagcatagtctctcggctccagcttaaaaggttgggctctccaagctctgagtaaccgattcgcaggtccttagtcctctttgcagagaaactgatctgctgcagagttaagaaaagaag

SEQ ID NO: 993948 - DNA, 120 bp, Artificial Sequence
  ENSG00000236511_19 (sequence is synthesized)
cagttcttcttttgacaagaatcccccacacttacagattcatgtgccataaacggaccttttcttcaaaagctgaactgctttctgtgtgcccccagtctgtgacctcctaatggaatg

SEQ ID NO: 993949 - DNA, 120 bp, Artificial Sequence
  ENSG00000236511_20 (sequence is synthesized)
catcttggttccattcttcatcatttgctggtagctaaattatgttgtcctgaacacctgcggaggtattttgtgcaggatggtttaccacattggccttgggagttgaggaagcaccag

SEQ ID NO: 993950 - DNA, 120 bp, Artificial Sequence
  ENSG00000236511_21 (sequence is synthesized)
cttaggttctgccacgtgctctttcctgacagcgagtgctgctggctgctgacgcctagaatctcagcacgggagctgcctttgtcacagaccttggttccccattcaatcgagcacctg

SEQ ID NO: 993951 - DNA, 120 bp, Artificial Sequence
  ENSG00000236511_22 (sequence is synthesized)
tgcagttgccctgtggtctagcatcccaggctcagcagtgacagctcctgatgggctttcacctgactttctaaatcagtgctgttctaaatctgtgctaaatctggtgaccagccagag

SEQ ID NO: 993952 - DNA, 120 bp, Artificial Sequence
  ENSG00000236511_23 (sequence is synthesized)
cctggtcacccctgcatggagtaggagtgaagcttatgaaaaggtgaggtgccaaacacacagaggagaacacggaggaggccatattgtaataaagagaaagcaagcagtcagaagtca

SEQ ID NO: 993953 - DNA, 120 bp, Artificial Sequence
  ENSG00000236511_24 (sequence is synthesized)
ccccataaaacaccttccaccctctgagcatgaccagcaaagcggtttcttcttgcggacactgcatcagcccagctcaaagtgcattccattctgatgaacatccacaaacagttatga

SEQ ID NO: 993954 - DNA, 120 bp, Artificial Sequence
  ENSG00000236511_25 (sequence is synthesized)
aatttgtccacatgctaaatatcccagcacacaagagaaaaagcagcatgtacttggataagacaaacctagggcttccttcgagttaaggaacagtcttggaagtcttgttatagttaa

SEQ ID NO: 993955 - DNA, 120 bp, Artificial Sequence
  ENSG00000236511_26 (sequence is synthesized)
tggttttttgagtggatgagcaaatgaatgaatatacaaatggttatgcacacaattaagcaaactacttgatcacattcctccttttggttttgcttcctctacctgtcagttgtcctg

SEQ ID NO: 993956 - DNA, 120 bp, Artificial Sequence
  ENSG00000236511_27 (sequence is synthesized)
tccaaaagcttgtatgtgaagaaacatggcttatgagtcagatgtcagagaatcatagatccttcagaaacagtgggcatcttaaaggtcacatggttcaaagcccttgccatagaggaa

SEQ ID NO: 993957 - DNA, 120 bp, Artificial Sequence
  ENSG00000236511_28 (sequence is synthesized)
gaagacaggaggactactagctcttgtctattttcatacagtattgcaggggtggaaagtcctcattcatcataagggtcacagacaacactcctataagaaaagacaggttaacatgag

SEQ ID NO: 993958 - DNA, 120 bp, Artificial Sequence
  ENSG00000236511_29 (sequence is synthesized)
aaaatcataacaaatttatttaatcaaaatttcacttgacatgggaaacttcagaaatgaagacccaaagacccagggaatactgtctatttttatgcttaggttcaatgaagaatgacc

SEQ ID NO: 993959 - DNA, 120 bp, Artificial Sequence
  ENSG00000236511_30 (sequence is synthesized)
agccacgtagaaatgtaagtggacgaaagttatgatctcgtggtaatagactgaggggagtatcccagcaaggactgtgcattcagattcttcctggcctctctgtgtagcattccttct

SEQ ID NO: 993960 - DNA, 120 bp, Artificial Sequence
  ENSG00000236511_31 (sequence is synthesized)
tcctgggtatggggaaggacctctctggaatgagtctttaagggcaaagagaggagggagagagtgacccttttaggttttgtcttgctttggggtctagtttctatgacccactttggg

SEQ ID NO: 993961 - DNA, 120 bp, Artificial Sequence
  ENSG00000236511_32 (sequence is synthesized)
gaagaggaattcttgtttctatgactcacttcaaaggaggaaggacaggtgagagacaggagagcaggagaaggtcagagaaagagacttttcttctgagcctacttctgtgaccttccc

SEQ ID NO: 993962 - DNA, 120 bp, Artificial Sequence
  ENSG00000236511_33 (sequence is synthesized)
acatggatgctctttggccagtcacagaacccgttgatccctcgctaagcatatgtgttatctcatttaatcttcacattgctcttatgttgtggcttccattatcatcccaattttgca

SEQ ID NO: 993963 - DNA, 120 bp, Artificial Sequence
  ENSG00000236511_34 (sequence is synthesized)
gattataaaactgaactttagaaaagtgatttcatggctacattagcagatggcatagcaggaatggaggcagaaaactggactggagaactgacttctttcctctcctccataactata

SEQ ID NO: 993964 - DNA, 120 bp, Artificial Sequence
  ENSG00000236511_35 (sequence is synthesized)
ttattggtggtacccatgagcatttcagcaggagcaatcaggaatgtttggtttcccacaacactcctcttcctcaacacagatgaagcagtgatgactattcagagaagcatatggcac

SEQ ID NO: 993965 - DNA, 120 bp, Artificial Sequence
  ENSG00000236511_36 (sequence is synthesized)
tgggaattgacctttgaatagctatttccagaaggtcgaccttctgaagttcctgccatcatgcaatctcagggagtcaacagttacctgtcaagtcggccaagtgtttaaaatagcact

SEQ ID NO: 993966 - DNA, 120 bp, Artificial Sequence
  ENSG00000236511_37 (sequence is synthesized)
tgaccgatatttattgtcacccgaaaacagggattaataatagaaactatcccacaggcttgtcgggaaaactaaatgagttaatatgtcttttatattacccccagaaagcaagcagtc

SEQ ID NO: 993967 - DNA, 120 bp, Artificial Sequence
  ENSG00000236510_0 (sequence is synthesized)
atgctcaggtgggggtgggagaggagaatcaccaggtttagggaaggaattccacagatgctcaggtaggggtgggagatgagaatcatgaggtttagggaagggattccacagatgctc

SEQ ID NO: 993968 - DNA, 120 bp, Artificial Sequence
  ENSG00000236510_1 (sequence is synthesized)
aggtggggatgggagaagagaatcaggaggcttagggaagggattccacagatgctcaggtgggggtgggagaggagaatcaccaggtttagggaagggactccacagatgctcaggtgg

SEQ ID NO: 993969 - DNA, 120 bp, Artificial Sequence
  ENSG00000236510_2 (sequence is synthesized)
gggtggagacaagaatcacgaggtttacggaaggaattccacagttgctcaggtgggagtgggagaggagaatcaccaggtttagggaaaggattccacagatgctcaggtaggggtggg

SEQ ID NO: 993970 - DNA, 120 bp, Artificial Sequence
  ENSG00000236510_3 (sequence is synthesized)
gtttagggaaaggattccacagatgttcaggtagatgagaatcatgaggtttagggaagggattccacagatgctcaggtaggggtgggagacaagaatcatgagccttcaggaagggat

SEQ ID NO: 993971 - DNA, 120 bp, Artificial Sequence
  ENSG00000236510_4 (sequence is synthesized)
tccacagatgctcaggtaggggtggagaggagaatcatgagatttagcgaaaggattccacagatgctcaggtagggttggagatgagaatcacaaggcttcgggaagggattccacaga

SEQ ID NO: 993972 - DNA, 120 bp, Artificial Sequence
  ENSG00000236510_5 (sequence is synthesized)
tgctcaggtaggggagagagcaggtgggttcccacagtgactttcacagttagatgtaaaatctatttggcaaatgacctcacacatattctttttgaaaaagcacaacaatagtatttg

SEQ ID NO: 993973 - DNA, 120 bp, Artificial Sequence
  ENSG00000236510_6 (sequence is synthesized)
ctcctgatgaatttttatctgagtgcaaccactggatggcataaatatctgacttctggcctaagcttatagcatttcatgattcttctggaaatgttcagccttgaaacctttatgttt

SEQ ID NO: 993974 - DNA, 120 bp, Artificial Sequence
  ENSG00000283959_0 (sequence is synthesized)
cgcagcgcctgcccgccccgcccatccttcctcctgggcaacccagaggatggcgtgaggactcctggaagcccagaggaccggaccaggggcgtggtggggagccgtagacccgagttt

SEQ ID NO: 993975 - DNA, 120 bp, Artificial Sequence
  ENSG00000283959_1 (sequence is synthesized)
ttatccttctctggcgccgacactcggctgcggaatcgagtttgagctcggtgtagctgaagtttaaattgtagctgtttcaaaggtagaccccacctcacccccacccctggaccaaga

SEQ ID NO: 993976 - DNA, 120 bp, Artificial Sequence
  ENSG00000283959_2 (sequence is synthesized)
cctctggaagcgtcctgcctggaagccgcttgtggggagggctctcctagggtctccaggctcccgctggagcacgcctggagatgccttgggagtctgaggaaccccagattcagcacc

SEQ ID NO: 993977 - DNA, 120 bp, Artificial Sequence
  ENSG00000283959_3 (sequence is synthesized)
cctgcttaacctgcttttaagaagaaaaaaatggaacttgataaacttcactcaaaggagagacccactaataactccacacacctcacaccgagtgaagacgctgagacaatgtatgtg

SEQ ID NO: 993978 - DNA, 120 bp, Artificial Sequence
  ENSG00000283959_4 (sequence is synthesized)
tgctccaggaatgactggatgaaacaaaaagagagtctggatgccattaaaatgtttgactattggattcccacggtttgggatgggaagcagaactcggtgaaactgtaggttctgtgt

SEQ ID NO: 993979 - DNA, 120 bp, Artificial Sequence
  ENSG00000283959_5 (sequence is synthesized)
ccgggccaagcgttgctgaaaggtggaagaattcatggaaagaaggttataccagaaaccaagatctgctttttaaaagggaacatgtacgctcatgttttggcttgaattcactgcctt

SEQ ID NO: 993980 - DNA, 120 bp, Artificial Sequence
  ENSG00000283959_6 (sequence is synthesized)
tcacctatgtgtggtccctcctgtgccgagtcagcatggagttcagcaggtggtggaagacaaacagctcagagctggactcagaacttggcagagtcctgctttcaactacatgcagcc

SEQ ID NO: 993981 - DNA, 120 bp, Artificial Sequence
  ENSG00000283959_7 (sequence is synthesized)
agaaaactctggaaaactgaactgtttattggggtcaaactttggtaagtccgataaagtctggctccaggtgtcaatctagtctcttgaaagaattgcccagaagctcactgctgactg

SEQ ID NO: 993982 - DNA, 120 bp, Artificial Sequence
  ENSG00000283959_8 (sequence is synthesized)
caggagctagagctaggggcttgcagccaaggaggagataagtccaggggagccctgcaggctatcaaaccatctgccagctggactcgctccaggccactggtgacccttgccatgaca

SEQ ID NO: 993983 - DNA, 120 bp, Artificial Sequence
  ENSG00000283959_9 (sequence is synthesized)
ccggacaccagtagcaagaaagcctgcaatccagtatgcttctcttttcctttctacaggactcctagagtggagctagctcccgtccttccaaatgcagcaatgacattaaggacattc

SEQ ID NO: 993984 - DNA, 120 bp, Artificial Sequence
  ENSG00000283959_10 (sequence is synthesized)
gttcacatggttcacagttggtgttgggaagttgtcctacctggacattgctgtcagagccatggactaaaatactcaattctggcctaaataaagcaagctctcggtgttaaagacttt

SEQ ID NO: 993985 - DNA, 61 bp, Artificial Sequence
  ENSG00000283959_11 (sequence is synthesized)
agctgggattacaggtgcacgccaccatacctgctaatttttgtattattagccacccgcc

SEQ ID NO: 993986 - DNA, 120 bp, Artificial Sequence
  ENSG00000283959_12 (sequence is synthesized)
acaggcgtgagccacagtgcctggcctttttgaggattattataagtaaaagaaaattcagaccacgaacatagcattcctttaggtgttttgcatagatatagttttttgctttactgt

SEQ ID NO: 993987 - DNA, 120 bp, Artificial Sequence
  ENSG00000283959_13 (sequence is synthesized)
ggtgttttgcatagatatagttttttgctttactgtgggtccactgggaaaaggtttgtggaaatctgagcagctgatgtttgtgtgctcagattctttgggacctatctataagacttg

SEQ ID NO: 993988 - DNA, 120 bp, Artificial Sequence
  ENSG00000283959_14 (sequence is synthesized)
gcgaggcaatacggcttccaccatttccccagggaaaaagttactcaaggttactgaactcatgaaaccatgtggatttccagcatgtgttattataatctcactaaccttccgatttta

SEQ ID NO: 993989 - DNA, 120 bp, Artificial Sequence
  ENSG00000283959_15 (sequence is synthesized)
aaacgctgtaactctgtaatttttttctgtggtcagcccttcccaaaggtatccaccttccagtttgtcctgtggagcacgctcttggcagagtttggcattgtttgttatcagggggtt

SEQ ID NO: 993990 - DNA, 120 bp, Artificial Sequence
  ENSG00000226835_0 (sequence is synthesized)
cgcgcgcagaacgcggcggtcagctgcgcccggcctgaagttgtcccaaccgcggccgcgtcggtcgcccttttgacttgcagcagggcgggcagagcgacttagaggaaaagtgacttt

SEQ ID NO: 993991 - DNA, 120 bp, Artificial Sequence
  ENSG00000226835_1 (sequence is synthesized)
ttgtaccctcctgcagggagcaggttctctgtccttgtttaattagacatttctcaggtgggcactttgaattccttccagtcaagactcaggtgttcaacttgttttgtcggccgtctt

SEQ ID NO: 993992 - DNA, 120 bp, Artificial Sequence
  ENSG00000226835_2 (sequence is synthesized)
tcttcctccacccttcttctcccattcaaaacaaaaagaatcctgcctctgctctgaagcctttctgttcgctccagtgaaaattagtcatccaccgggcgcggtggctcacgcctgcaa

SEQ ID NO: 993993 - DNA, 120 bp, Artificial Sequence
  ENSG00000226835_3 (sequence is synthesized)
agtccttggactccctggactgcggctgtccttgacctcactgctggggcatgtaaaaggaacgactcagagtctaacaggccacagtctgggcttgatgttcaccgattttccctcagc

SEQ ID NO: 993994 - DNA, 120 bp, Artificial Sequence
  ENSG00000226835_4 (sequence is synthesized)
tccgactgtggctcctctcagctgactctgaccctgctctcagccgggctgcatctgcccatctcagcacatcaataaacagcagagggaaactaccaccttggaaggagccaggcagtt

SEQ ID NO: 993995 - DNA, 120 bp, Artificial Sequence
  ENSG00000226835_5 (sequence is synthesized)
tctgctgggtaggccgcagcctggaacatggaagtagcttcttccatcctacactggaaaccacccagcatcccgggccctccagagaagagccagactcccttccctgggaagagacta

SEQ ID NO: 993996 - DNA, 120 bp, Artificial Sequence
  ENSG00000226835_6 (sequence is synthesized)
tagtcctatctgtatcctccgtggtcattgcccctcagtcacagcaatgaagagcaaattacctgttttctgtatgttcctctgacaacaactgccacagagtaaatatgaaaggttctg

SEQ ID NO: 993997 - DNA, 72 bp, Artificial Sequence
  ENSG00000226835_7 (sequence is synthesized)
ctggaactgtctgggcttgatgttcaccgattttccctcagctccgactgtggctcctctcagctgactctg

SEQ ID NO: 993998 - DNA, 120 bp, Artificial Sequence
  ENSG00000226835_8 (sequence is synthesized)
ttgcatgataattctcaagcctgttctttacataaatacaaaaaggagaaagtgaaatagtagaggaaccgaccgatttgaaggagctgccactatttgattcctcctgttaggacatct

SEQ ID NO: 993999 - DNA, 120 bp, Artificial Sequence
  ENSG00000226835_9 (sequence is synthesized)
gaatgaccccaagttcctgttcttgaggctgttgtatcatattcttaaaagctatgcatgcattctgctttgaatgtgtccctcagcctcattcttctccacttgctgggggccatcccg

SEQ ID NO: 994000 - DNA, 120 bp, Artificial Sequence
  ENSG00000226835_10 (sequence is synthesized)
ccccacgggaaggtaagttcaggctcagaaggaaagacacgacaaaaaaatcttgcttttatttttgttgtctaaaatcatgtttcatgctcttctttgaataaaatccaggactccaga

SEQ ID NO: 994001 - DNA, 120 bp, Artificial Sequence
  ENSG00000226835_11 (sequence is synthesized)
caagaagtgataactgggactgctacctggagctatcaggtaactgcactatcttatgtagtttcatgagatcacaactagataaatagtttctttgtaaataaactctctttggtttat

SEQ ID NO: 994002 - DNA, 120 bp, Artificial Sequence
  ENSG00000226835_12 (sequence is synthesized)
gcaatcccagcactttgggaggccgagattctcctcaaccatgatgaataatgcctgggagaggggaagaagtaatggaagcctgcacgggtggccccaaggcaggcagtccttggactc

SEQ ID NO: 994003 - DNA, 120 bp, Artificial Sequence
  ENSG00000226835_13 (sequence is synthesized)
atcccagcactttgggaggccgaggttcttgctctgttgcccaggctggggtctagtggtacaatcatggctcactgcagcattgacctcctgagctcaagccgtcttctcacctcagcc

SEQ ID NO: 994004 - DNA, 120 bp, Artificial Sequence
  ENSG00000226835_14 (sequence is synthesized)
gataactgggactgctacctggagctatcagagagaaaggcctgtgcttctttttgccttcactggggttggtagatggcttcctgacttttgatcatcaaagcttagactgaaactgag

SEQ ID NO: 994005 - DNA, 120 bp, Artificial Sequence
  ENSG00000226835_15 (sequence is synthesized)
gttcaaggaaactaaaaagatcctgacagaggctggaggagagaggggttctttagctgaatagtgcacaggtcagctgaacgcctaggtctgaagatctcagcctcaccccaaaacttc

SEQ ID NO: 994006 - DNA, 120 bp, Artificial Sequence
  ENSG00000226835_16 (sequence is synthesized)
atacccctttcatgtcatagaaggaaccatgaaggctggggcaatgacagttcagtcacagctagtgcacacagatgattaataaatggaacggactccataatgccctagagatgtatg

SEQ ID NO: 994007 - DNA, 120 bp, Artificial Sequence
  ENSG00000226835_17 (sequence is synthesized)
agaccccagaactttgacataattcttaaagtggaaaagcctgagaagattgggttttttgtttcatatttaaatttcattttcaaatgtaattggttcaacaaatgatgctgggacagc

SEQ ID NO: 994008 - DNA, 120 bp, Artificial Sequence
  ENSG00000226835_18 (sequence is synthesized)
tggatatccacatgccaaagagtgacactgggcactcacttcacacaatatgcaaaaattgatacaaaagggatcaaagacttaaatgaaagaggtaaaactacaaaactaagaagaaaa

SEQ ID NO: 994009 - DNA, 120 bp, Artificial Sequence
  ENSG00000226835_19 (sequence is synthesized)
gcaatcccagcactttgggaggccgagaggtccatggccctgaggttttcttctggatgatgagaggggaagcctggcagcttagagagctatggactgcttcatactgcagaagaagaa

SEQ ID NO: 994010 - DNA, 120 bp, Artificial Sequence
  ENSG00000226835_20 (sequence is synthesized)
gcagaagaagaaccaagaatgggccatgcttaagctgattaagatgattcccttctctatgtggtttgtctccaggcaaaaataaggactttagatctgagtgaatctaaataactcaag

SEQ ID NO: 994011 - DNA, 120 bp, Artificial Sequence
  ENSG00000226835_21 (sequence is synthesized)
tctagttcaaattagtgtttctccctctgtgagtaaggaaggatgtctttccctcctatccctcctactctctcttgagagtcttggccctagtatttagagctttatagataaatacca

SEQ ID NO: 994012 - DNA, 120 bp, Artificial Sequence
  ENSG00000226835_22 (sequence is synthesized)
agttataaagtttagcaaagacacagaccaacagtcagcaacatttttttaaccttaaggaaaaaaaatacataaaaccattattctaaactgccaacgccaactctgtaagatttttta

SEQ ID NO: 994013 - DNA, 120 bp, Artificial Sequence
  ENSG00000226835_23 (sequence is synthesized)
ttttgtagcaagtaaccagccattagtttgaacggccacctgggtaccattgctttctatcttctaaacactgtgccatcattaaggatattctgcacaagatgacattgctgaggggta

SEQ ID NO: 994014 - DNA, 120 bp, Artificial Sequence
  ENSG00000226835_24 (sequence is synthesized)
acctggttaccatgcacacatggctcacagggctgctgagtggtttagagaagtcttggaaggtgctacccttgtgactcccaagcaccactcctgtccctgacttcaaatgaggtatat

SEQ ID NO: 994015 - DNA, 120 bp, Artificial Sequence
  ENSG00000226835_25 (sequence is synthesized)
aatagatttcaaagacttattttaaaatgcccccagttcaataattattttttaaaaaatcatatttgataactcaaatggttaccaaatatttaaaagaactagaatcgattacctcat

SEQ ID NO: 994016 - DNA, 120 bp, Artificial Sequence
  ENSG00000226835_26 (sequence is synthesized)
ggaaagaatgttcaactctgcatatagaatttcttttagtcattctagggagagtgatgaaaaagcagtaaattattattgcactcagtttttagtggatgaatctggaagcaatattac

SEQ ID NO: 994017 - DNA, 120 bp, Artificial Sequence
  ENSG00000226835_27 (sequence is synthesized)
caggatcagtgtaactctgtatgttaagtcataccatcatgctctttgctgttgcataatttagcagaaaatggtatgaagtttaacaaacaaacaaggtgcatttaaaaataaatattg

SEQ ID NO: 994018 - DNA, 120 bp, Artificial Sequence
  ENSG00000226835_28 (sequence is synthesized)
ctaaaatgtagctataaacttagaaaatcagtggatactatcaaatgatagcataaagtcccaatcccatttccaaacatctttatcggtacccagagattttctggatggggaatagag

SEQ ID NO: 994019 - DNA, 120 bp, Artificial Sequence
  ENSG00000226835_29 (sequence is synthesized)
ctagtttctagtgatgcaattaagtgtgaaaaatggtcttgtactcagttgcttacttgtttgaaaaacagatcttgaacatgaaaaaaatgaacaataaatcacagaattttcacccaa

SEQ ID NO: 994020 - DNA, 120 bp, Artificial Sequence
  ENSG00000258254_0 (sequence is synthesized)
ggagcagagagaaacagtcttcaccaagccctgcccaggttgtacatctatgagcaaaatgctattgttgctatttgaagccactaagttttaaggcagcttgccacaaagataaggata

SEQ ID NO: 994021 - DNA, 120 bp, Artificial Sequence
  ENSG00000258254_1 (sequence is synthesized)
acactatgtgtcaagtcactgggcagagacatcatctaatttaatctttaaaacagctgctttggaagatatccctgctttatagatgcagaattaggacttgaaggaccaagatcacat

SEQ ID NO: 994022 - DNA, 120 bp, Artificial Sequence
  ENSG00000258254_2 (sequence is synthesized)
tgcaaggaagaagagaacaaatcagttggaagaaacagaatgagcaaagtcaagaagacgtaaaagcaaggtgcatctgactttacaattcaatagaataaaaaacacaacaatgacgaa

SEQ ID NO: 994023 - DNA, 120 bp, Artificial Sequence
  ENSG00000231681_0 (sequence is synthesized)
cccattgtgcttttgaatcaatgtgttgtagtcagggataatcacaattatgcttggaaattttcaaagaaaaagtttgttaattgacttaaagcaaggttaatcaaccagacgggagtg

SEQ ID NO: 994024 - DNA, 120 bp, Artificial Sequence
  ENSG00000231681_1 (sequence is synthesized)
acctctttggggccttctctctattccagagagaagtggtgtgttggttgaatccactgatgtgaaactcacatataccaagggccaactgcagaaagcatagagcctcgtggagggaga

SEQ ID NO: 994025 - DNA, 120 bp, Artificial Sequence
  ENSG00000231681_2 (sequence is synthesized)
tggagattaaccaaagtatcacataaatgactgtatggttacaactgagaatattatgaaggcgaggaacctatcatacaagaccatagaacagaggagctttactcggcccaggagcca

SEQ ID NO: 994026 - DNA, 120 bp, Artificial Sequence
  ENSG00000231681_3 (sequence is synthesized)
gccaggcttcactgcggaagatggtgtatgacagtagatagtgtcagaggtgagcatacaagagcagaagaatgcaatgtggctttggggctctcccatcaagaagtggggtccatttcc

SEQ ID NO: 994027 - DNA, 120 bp, Artificial Sequence
  ENSG00000231681_4 (sequence is synthesized)
tgatccctggagtctggactcaggagcagcctgtgacttgcactgacatcaatggataatgaaatggatggagacagagttgtgcaaattccagaagctacgccttgagggctcttgcag

SEQ ID NO: 994028 - DNA, 120 bp, Artificial Sequence
  ENSG00000231681_5 (sequence is synthesized)
cctatctggttttctggaggaagagagtcacatggagaagaactgaggcagccaccaactgccagacatgtgaccaccagctctgctgaccccacagctcaaagaagctgcacagatgag

SEQ ID NO: 994029 - DNA, 120 bp, Artificial Sequence
  ENSG00000231681_6 (sequence is synthesized)
ctgaggccacactcttcagggaacaatccgcacagtcctgagagacagcaactccttgctcttctgagccactaggctttggaacagttcattgcctcttttacatgacatactctaatt

SEQ ID NO: 994030 - DNA, 120 bp, Artificial Sequence
  ENSG00000231681_7 (sequence is synthesized)
gcatcatcttgttcaatgctcacaacaaccctgcaaggttcttattaattttccattttacagataagaaaactgagcctcacagagtagatgcaaaaccgttaagtggcaggactggaa

SEQ ID NO: 994031 - DNA, 120 bp, Artificial Sequence
  ENSG00000231681_8 (sequence is synthesized)
tttgcactcacatctatgtggccctaaaggccaccctctccccatttcactggcccatcaaaaaccacagagaccagataacaagagcttgtcatagtgctgacagcagagctgaggtcc

SEQ ID NO: 994032 - DNA, 120 bp, Artificial Sequence
  ENSG00000231681_9 (sequence is synthesized)
caaactgcagcatgctctgcattcttctggtcacagggcaaaggccatcaaaagggatcaagagaagacacaggagcttccaggatgtcagagaaaaaggatgggcttgaacttctattg

SEQ ID NO: 994033 - DNA, 120 bp, Artificial Sequence
  ENSG00000231681_10 (sequence is synthesized)
acttcattgagtcaacacaggagtcaaaaactgttgtgactggggactcacaccctgtctattcttgttgatctttggacaaaccattgcagcagacagaaacattcaaataaagcttag

SEQ ID NO: 994034 - DNA, 120 bp, Artificial Sequence
  ENSG00000213121_0 (sequence is synthesized)
gctaaactgagggatgggcagagaagggcaaactgtaactacagtttattttagctcatgtttaaatacaggatatactctgttttccttctgtacaggagagggaactcttcacagatg

SEQ ID NO: 994035 - DNA, 120 bp, Artificial Sequence
  ENSG00000213121_1 (sequence is synthesized)
ggaagcatttcctgtgagcctgtaattgtataagctgggagtaaagaggatgcccaggtacacatttttggctatgtttttgctggtggtgatcatggaggtggcttttgtttctttcag

SEQ ID NO: 994036 - DNA, 78 bp, Artificial Sequence
  ENSG00000213121_2 (sequence is synthesized)
tgctggtggtgatcatggaggtggcttttgtttctttcagccataaggctagtgagaattttttctcctaattaaagt

SEQ ID NO: 994037 - DNA, 120 bp, Artificial Sequence
  ENSG00000238058_0 (sequence is synthesized)
ccccgtgccagaggcggaacatgtatgaaatgccaggtgcccagaggacccaggcagtccgtcattcacataccaacccacgtgcaggcttcaattcaaccttgaagccatttgggcctg

SEQ ID NO: 994038 - DNA, 120 bp, Artificial Sequence
  ENSG00000238058_1 (sequence is synthesized)
ggcttttttgatgacttatttgattcatagttttttggttactaattgagtctcttcacttgttataggtctgttgagattgtctattttttcttgagtcagccgtctgaaaagaacacg

SEQ ID NO: 994039 - DNA, 120 bp, Artificial Sequence
  ENSG00000238058_2 (sequence is synthesized)
gcgggacgtgggcgtcgagggcattaaaagcattatctgaatctcaaagaaaagtccaagacctgatggtttcctggtgaattctaccaaacgtgtaaagaagaactaatacgagccctt

SEQ ID NO: 994040 - DNA, 120 bp, Artificial Sequence
  ENSG00000238058_3 (sequence is synthesized)
cataaacatttccaaaaaactgaagagaagggaacacttcttaacgcattctatgaggccagcattaccctggtaccaaagccagacatacacatgacaagaaaagaaaactacagacca

SEQ ID NO: 994041 - DNA, 120 bp, Artificial Sequence
  ENSG00000238058_4 (sequence is synthesized)
atattccttatgaacactgatgcaaaaaacctcaacaaagtactggcaaacttcagcggcatattgaaaggattatacactatgaccaaggagatttattcctggaattcaaggatggct

SEQ ID NO: 994042 - DNA, 120 bp, Artificial Sequence
  ENSG00000238058_5 (sequence is synthesized)
gccctggtccgcgcctgccccgttgctttcctcaggctctaaggcccgcggtgtggagcgcggcgtctgttgagattgtctattttttcttgagtcagccgtctgaaaagaacacgaggt

SEQ ID NO: 994043 - DNA, 120 bp, Artificial Sequence
  ENSG00000238058_6 (sequence is synthesized)
ggcgtcgaggacatcctgaggttcccaccaagtggacattggcttattctacaagcaacaggatgaggcccctggactcctcactagcaaaatagtgcagtgacagcaacaccccccccc

SEQ ID NO: 994044 - DNA, 120 bp, Artificial Sequence
  ENSG00000238054_0 (sequence is synthesized)
tggatgatagtgcagccatatctacctctctaagttttttcccagcagaaatgatggttggctactgcagaggcaagagtttctggtgtcctctgccgaggagttcactggtgactatgg

SEQ ID NO: 994045 - DNA, 120 bp, Artificial Sequence
  ENSG00000238054_1 (sequence is synthesized)
agacaagcatggcgaagaaaggatatctctgccaagcagccaggaacatcctgaggcctgtcagcagccctttccgtgaaactggaaatggatcttccccttgtgatgactacagtccca

SEQ ID NO: 994046 - DNA, 120 bp, Artificial Sequence
  ENSG00000238054_2 (sequence is synthesized)
actgagagcttgactgcaacctcatgagcagccctgagccagagacactgagctaatttctgcctgaattcctgattcatggaaattatgggctaataaatatatctcattttaagctac

SEQ ID NO: 994047 - DNA, 120 bp, Artificial Sequence
  ENSG00000238054_3 (sequence is synthesized)
agagtggctatggaaatgaggcttggagcacaggcacaggtggtgacactacagctctgggaccagaacaataattgcactggatcccagggcacagacacccctactaccaccttgcag

SEQ ID NO: 994048 - DNA, 120 bp, Artificial Sequence
  ENSG00000238054_4 (sequence is synthesized)
actctactcaggaccatgcaaaatttaagactcaaaaattgcttaatcgtgtaatttttcacttaccatgagtaactgaaactatggaaagtgaaaccgcagataagacagggctactat

SEQ ID NO: 994049 - DNA, 120 bp, Artificial Sequence
  ENSG00000238054_5 (sequence is synthesized)
gtctccatttctttgggatcagctacttggttcttacattggattcatttatcttataatggtgggtaactgcaggtgcagaccttaatctatagtacatgtcaagcaattcaatttttt

SEQ ID NO: 994050 - DNA, 120 bp, Artificial Sequence
  ENSG00000238054_6 (sequence is synthesized)
attgtactgtgatggcattgctctgctttttgggaggacttccagcattgctaatggcattttgtatgggtcccctggtgttacttgaggttttaacatattgcactaaacatgatgaaa

SEQ ID NO: 994051 - DNA, 120 bp, Artificial Sequence
  ENSG00000238054_7 (sequence is synthesized)
aaggattactggcacatgacattttaagtggatatttgcaagacttgagatcaccaccacaacaacaggcttcaaaattattatagtattacgcaagctgccatgctgttggtagcattt

SEQ ID NO: 994052 - DNA, 120 bp, Artificial Sequence
  ENSG00000238057_0 (sequence is synthesized)
ggcactgtctcttcctccccccaccctcgcccccaaattaagatttcccgttttacgccgcaatgataaatataattataagcctctttggacactgtcctttaccccaccccccctcgc

SEQ ID NO: 994053 - DNA, 120 bp, Artificial Sequence
  ENSG00000238057_1 (sequence is synthesized)
cactttgacaatatttacttaagtatttccccccacctcactcacacacatgctcccccacactggttcccttaaatagttccagtagaattttttttttcccttaagaaaggaaagaga

SEQ ID NO: 994054 - DNA, 120 bp, Artificial Sequence
  ENSG00000238057_2 (sequence is synthesized)
aagtccaaccactacggcaatacttttaagctctactaaatgatcgtatcctttctggcttcgaaacttttgtacctaaaaatcgagagaggcgctgcattttttcagttgaaactgtca

SEQ ID NO: 994055 - DNA, 120 bp, Artificial Sequence
  ENSG00000238057_3 (sequence is synthesized)
aaacttggagaagggggacctcggaggcaggcaggagaggaggagaatcctgaaaactcggtggaggttgggaagatgctgtgcctcgaggattagtttaaacagggggctataaaagat

SEQ ID NO: 994056 - DNA, 120 bp, Artificial Sequence
  ENSG00000238057_4 (sequence is synthesized)
gtaacagatgcaaactgtaacacaagggccattaaccctttctctgccgggcacactcagtccccacgccccacacctattgtctcctgtgctagaagctttgcagaaaacctggaaatt

SEQ ID NO: 994057 - DNA, 120 bp, Artificial Sequence
  ENSG00000238057_5 (sequence is synthesized)
ttggccagaaatggtgagaagaaaaagcatgaagaagccgcgaagtgtgggggagaaaaaggtggaagcgaagaaacagctcccggagcaaactgtacaaaaacctcgccaagagtgtcg

SEQ ID NO: 994058 - DNA, 120 bp, Artificial Sequence
  ENSG00000238057_6 (sequence is synthesized)
gaagcgccctgagcgtgagcatcatgtgaaaacgtgatcgccaagtttctctctgggaaaggatctgggatagattataccttgaagtctccgcaaacgctttagtggaagaaatgaaat

SEQ ID NO: 994059 - DNA, 120 bp, Artificial Sequence
  ENSG00000238057_7 (sequence is synthesized)
gcaaacgctttagtggaagaaatgaaattccacctccctcccttcctcctctccctccctttcgccttcgcctccctcccccctccctcccttctccccccctccacccccccctccccg

SEQ ID NO: 994060 - DNA, 120 bp, Artificial Sequence
  ENSG00000238057_8 (sequence is synthesized)
catcactaaatcctacagagtacagggcggaaaacggtgcacaccattcacagaactggagaactccaaggggcgaaagttaaagggaaagatcccgggtcctcaatccagatagtctct

SEQ ID NO: 994061 - DNA, 120 bp, Artificial Sequence
  ENSG00000238057_9 (sequence is synthesized)
tcttatacagatatctctaatgaccagatttgagatgcacatcaaattgtgtaggtatctcagtacagcttctggaacaaagttctctgccctttctcttattgttatttttttcttttt

SEQ ID NO: 994062 - DNA, 120 bp, Artificial Sequence
  ENSG00000238057_10 (sequence is synthesized)
aggtaccagagccagaaaaaaaaatgctgcatgggagctgcatcttagggcatgtgtattagggtgtgtgcatgatgaatttctggactggatcccaatattaaaaagtagtttggcatt

SEQ ID NO: 994063 - DNA, 120 bp, Artificial Sequence
  ENSG00000238057_11 (sequence is synthesized)
ttaataaagggtctctaagtaaattaaaatagaacactcggttggccgatctctgaatctctctacacctcggggagacctcactacaaagtaagggagagtgtgtagggaggcaggagg

SEQ ID NO: 994064 - DNA, 120 bp, Artificial Sequence
  ENSG00000238057_12 (sequence is synthesized)
agaaacgagaaaggccatagagaaacttagcagggaagggagagcatgatattaaacggcatggggtctaagttttggagtatatattttttgatattacaattaaagtaagattaaaaa

SEQ ID NO: 994065 - DNA, 120 bp, Artificial Sequence
  ENSG00000238057_13 (sequence is synthesized)
cctgagacacacgactgcatataaatacatgtttaataaagtatttgccaagtcctaattgctgaatataatgaattggaactagatgcgaaaatagagcaggacctctccccttgatga

SEQ ID NO: 994066 - DNA, 120 bp, Artificial Sequence
  ENSG00000238057_14 (sequence is synthesized)
atataattctcaataaaacttttcctgggctggatagcaaaggacacctttggttacctgaatgaacaggtacaggggaaattatttgggggagggaaaaaggagagaaaagcaaggaga

SEQ ID NO: 994067 - DNA, 120 bp, Artificial Sequence
  ENSG00000238057_15 (sequence is synthesized)
gagagtgtgagtgtaagagaaagcgaagaagccactcttgagaaaagcttgccataaaggagctaaacccacctgaaattcctacccacggacaccccttctcacttcagactcacatcc

SEQ ID NO: 994068 - DNA, 120 bp, Artificial Sequence
  ENSG00000238057_16 (sequence is synthesized)
actccacctttgctctgaagggattggttatgcaaatatggaagggatttcctggagaatacagctttctactgtatggttaattaaataatcactcaaaagcttccaacgtgacgcttc

SEQ ID NO: 994069 - DNA, 120 bp, Artificial Sequence
  ENSG00000238057_17 (sequence is synthesized)
tgtcgtaatccaatcaggttacataggtcctaaacaagaaagatattttccacatctggaagtcagcaatttagcaagtactgcacattattaaccaattcagagcccacttcccagggg

SEQ ID NO: 994070 - DNA, 120 bp, Artificial Sequence
  ENSG00000238057_18 (sequence is synthesized)
aatttttttgaagtttaagtgttcttaaccaatgctctgctgttttgttaatcaaaaagctggtttacactgcacataattggaactaatatagaagtaaataaagacagccaaatttga

SEQ ID NO: 994071 - DNA, 120 bp, Artificial Sequence
  ENSG00000238057_19 (sequence is synthesized)
atgaaataaagaaatgaaactcgctaagcagacaaaaacagacaactttctgcttagaaaacagccttctcggtgggagaggatgaactgccatgtctaagagaaagacttgcccccgaa

SEQ ID NO: 994072 - DNA, 120 bp, Artificial Sequence
  ENSG00000238057_20 (sequence is synthesized)
tgtgtgtatgtgtcttctattaaatccatgtctatattactttgccactaaaaatacaattttaaaagttatcctaatttaaaaccctgatatcctgacagcagttttcttcccagctgt

SEQ ID NO: 994073 - DNA, 120 bp, Artificial Sequence
  ENSG00000238057_21 (sequence is synthesized)
aaacagacaactttctgcttagaaaacagccttctcggtgggagaggatgaactgccatgtctaagagaaagacttgcccccgaatttgtagactcacatccccactcaaaatgagaaaa

SEQ ID NO: 994074 - DNA, 120 bp, Artificial Sequence
  ENSG00000238057_22 (sequence is synthesized)
tcggccactccaggaaacacaaacctggggacggactgacgtgttacgcctcttctaatgacatttttttctttttcttttctgtaggagagagacgagagaccctgaaacacgcgccac

SEQ ID NO: 994075 - DNA, 120 bp, Artificial Sequence
  ENSG00000253634_0 (sequence is synthesized)
ggagcctgagcatttcttaagaagaatacctagaaacatctggggtccttctatttcattgtcttacaattattaggctttgtgtaaacgctcgcagattgaatgacgaaataaaagaag

SEQ ID NO: 994076 - DNA, 120 bp, Artificial Sequence
  ENSG00000253634_1 (sequence is synthesized)
aaactacagcacagtcaattttctccatgacagcctgagagatgtagctggtgctgccacttttccttcatttttccctgccttgaatatggtggtgatgcctggagcttcagcagccat

SEQ ID NO: 994077 - DNA, 120 bp, Artificial Sequence
  ENSG00000253634_2 (sequence is synthesized)
aagaaatctgggtcactggtgatatcaatggatagctgaagcagtgctgctctggatggaaaatgccctgggttctccgagacttaacaccccgccttgtgaacgcgagcaagattattc

SEQ ID NO: 994078 - DNA, 120 bp, Artificial Sequence
  ENSG00000253634_3 (sequence is synthesized)
tctctgagcagctcttttcacatgtgataagcttggcaagttgccctggattgaattctcacccactgtcttcacccaacccagcagagaagaaggcttgtgactgtgtaaggtgaaaat

SEQ ID NO: 994079 - DNA, 120 bp, Artificial Sequence
  ENSG00000253634_4 (sequence is synthesized)
ggatataccatttctgggaagagaaaagaagccaattaaaagtggggcatgtcattacactgaccagaaatgaacgtacctttttagaaataaagaatctgtatattcctgtggctctga

SEQ ID NO: 994080 - DNA, 120 bp, Artificial Sequence
  ENSG00000253634_5 (sequence is synthesized)
cgtttctgaatgaaggctctaggggagaatctgcttcattttccagtttgtggaggctgcccacattccttggctcatggcctgcttcctacctcttcaaagccagcaacactgcgtcgc

SEQ ID NO: 994081 - DNA, 120 bp, Artificial Sequence
  ENSG00000253634_6 (sequence is synthesized)
tctgtgccttctttccacgatcacatctccttctgactctctgctccctcttccacttttaaggacctttgtgattatattgggccactcacataattaaaaataattttctcatttcaa

SEQ ID NO: 994082 - DNA, 120 bp, Artificial Sequence
  ENSG00000253634_7 (sequence is synthesized)
tcgcctaaaaagtcatgtgggggtatgcggtggcaagctgtcaagaggcaagataaggcatttgcaattggcagtgtttcaaaggactccagatttctccaaagaacctagatttcccag

SEQ ID NO: 994083 - DNA, 120 bp, Artificial Sequence
  ENSG00000253634_8 (sequence is synthesized)
gtactgaacatgtgcaaaatagaaacaaacattcaagatgagtgagtgatgagttctgcctgtggtcagaagaaaacaacactcccaactctgcaacctgatcacttccctacttagtcc

SEQ ID NO: 994084 - DNA, 120 bp, Artificial Sequence
  ENSG00000253634_9 (sequence is synthesized)
ttggatggcaatcctatgaaacagcagacatctcactgactactgtatcctcagactggagtaaggcattgcacacaacagattcctgatacttgtgcgttaccattgcaaatagtgcat

SEQ ID NO: 994085 - DNA, 120 bp, Artificial Sequence
  ENSG00000253634_10 (sequence is synthesized)
cacacagacaatgaggtcctccaccagtgcttcctagaacctggggacaacacagttgttatgcagccaatccatgccctggatgcaagtttcgcaggctccagtatcattctggtcatt

SEQ ID NO: 994086 - DNA, 120 bp, Artificial Sequence
  ENSG00000253634_11 (sequence is synthesized)
cctctgcaaaacactactgaaaaagcaattccaggaaatatgtaaatttgttgctgaactgttataaaaatatggaaatttaagccgcagacatcaaagcattttttcctaaaaaaaaca

SEQ ID NO: 994087 - DNA, 120 bp, Artificial Sequence
  ENSG00000253634_12 (sequence is synthesized)
ccacgttaataaactgaagagttacactacattatggtgtcaggataaattccttactctagaccttccctgttctctcttctgtgctctgggcgcagcatctggtactcacattttcca

SEQ ID NO: 994088 - DNA, 120 bp, Artificial Sequence
  ENSG00000253634_13 (sequence is synthesized)
cgttgccattaggagaaagtgaatatcattaaaccactaaaggaattgacaaagggattgtgacctgatgcttcacaatgagaaccctgttgtgattaaatggttaagttgaaagttaat

SEQ ID NO: 994089 - DNA, 120 bp, Artificial Sequence
  ENSG00000253634_14 (sequence is synthesized)
ggaagctgcaaagtgtttgccttctgtatctgcaatggaaaccccacctgctgtcttcttggtgtttttgttccttgtctttaagacctggtctcaaattcagaagttcaataccagcgt

SEQ ID NO: 994090 - DNA, 120 bp, Artificial Sequence
  ENSG00000253634_15 (sequence is synthesized)
cagtttgacttgacacaatctatggttgtagtgtattgatttcacaaattgaacctatgaaatgaaactctgtcatcaagaagctattggacacctatatggacatgcatttacctctct

SEQ ID NO: 994091 - DNA, 120 bp, Artificial Sequence
  ENSG00000253634_16 (sequence is synthesized)
gcccagtgcaattatttataaatgtctgtggaagaatagagagaggagggaggaaaggaagaatagattattctgtgtctttcaggaagagagagacaagaaaagagaaaatatgaaaaa

SEQ ID NO: 994092 - DNA, 120 bp, Artificial Sequence
  ENSG00000286825_0 (sequence is synthesized)
tgtagcgtgcgtgtgaaatggggggaggaccatgccagttggtaactcagagtgcaatgtagttagtggaagaggtttctccaacagccggaaacccgcaccttcactactccactgacc

SEQ ID NO: 994093 - DNA, 120 bp, Artificial Sequence
  ENSG00000286825_1 (sequence is synthesized)
tcaccctggccacaccgacagccttctagatgtcaaatctaacagggggagtttcctgtcattttctctaacctctgaagcatttgacgctacccatttctttatacttgacacccccat

SEQ ID NO: 994094 - DNA, 120 bp, Artificial Sequence
  ENSG00000286825_2 (sequence is synthesized)
tctggcttctcctcctgcacctctgcctctctcttctcatctgttcacctccacccctaaatgttggtgatctccagggccctttcctcacccctttttcacttcacccactgttcctgg

SEQ ID NO: 994095 - DNA, 120 bp, Artificial Sequence
  ENSG00000286825_3 (sequence is synthesized)
gagaatgtttaaatgtaagccttcaactgcttcgagttggagctcctcagagctgttttggcccacaaatctggcattacactttctctgggtgagttcatccacactcattgttttaat

SEQ ID NO: 994096 - DNA, 120 bp, Artificial Sequence
  ENSG00000286825_4 (sequence is synthesized)
tactacctgtaaattgatgacacccaaatttatatctccagcccagatgtcttgcaagcttaaataacaataaataatatacatgcacatacatattcaaacacctgttggatatcacct

SEQ ID NO: 994097 - DNA, 120 bp, Artificial Sequence
  ENSG00000286825_5 (sequence is synthesized)
tcaaactccaaaagccaaaagatgtcctgaggcaacaagaaatccttgcctggagagaggctgagaggtcaaggcagaagaagtcagcgtgggcgtcaggtgtgcgcagataatcagctg

SEQ ID NO: 994098 - DNA, 120 bp, Artificial Sequence
  ENSG00000286825_6 (sequence is synthesized)
cacaagagtgagatacgtgaggggtggaataacgatagtgtatgaagacaggaggactctggctgataagagattggaaagaattgactgtgatctgcttgccaaaagcactaacatgac

SEQ ID NO: 994099 - DNA, 120 bp, Artificial Sequence
  ENSG00000286825_7 (sequence is synthesized)
tttgggatgcactaagagagctttagtacccagaacaatggggctcataggccccagactctgtgagagtcaaaccctgtgaggagtgtgtggcccattttgagagggacagagacaaac

SEQ ID NO: 994100 - DNA, 120 bp, Artificial Sequence
  ENSG00000286825_8 (sequence is synthesized)
tgtagagtccagaggtagaaatcaggatggtgagaagagcccatgaccacagggaagacatgaagatactgaactgggagagaagattcaaggggcagatgataatggtctttcaactcc

SEQ ID NO: 994101 - DNA, 120 bp, Artificial Sequence
  ENSG00000286825_9 (sequence is synthesized)
tggaatagaaaccgaattgattctgcatatcttgagagcaaagaccaaagaccagagagtggatgtagatcctttatgaggaaggactttctaataattaaagctaattattctaccaaa

SEQ ID NO: 994102 - DNA, 120 bp, Artificial Sequence
  ENSG00000286826_0 (sequence is synthesized)
accaagagtggaagcacacagaagcaccatgggaaagaggaaagactcagtgaggacggccaaaaatgttcagagtgatggggaaaatcgacaccctgtcctcctaacacagagcatcct

SEQ ID NO: 994103 - DNA, 120 bp, Artificial Sequence
  ENSG00000286826_1 (sequence is synthesized)
gagtccccgctgactcacaggcatgaactagaaccaagcagggaagtggaggcaggaggctttccaggaggggaaacaggtgtgagcgaggcacaagaggggtgctgggtgtggcctccc

SEQ ID NO: 994104 - DNA, 120 bp, Artificial Sequence
  ENSG00000286826_2 (sequence is synthesized)
tggacatgtgctcacctctgatcactgggctctggacctgttttggcaactaaaatggtatccacctcagcctgcaccattccatagccagccttccagagtttgcatgctcttccaaag

SEQ ID NO: 994105 - DNA, 120 bp, Artificial Sequence
  ENSG00000286826_3 (sequence is synthesized)
gaatgaattttctacaaaaaaaataaccagctcccatggagaggtgttggttaaaagtgttgttgggggaagaccaaaaaaattcacacagggaaatagctggaaggtttttatggaaag

SEQ ID NO: 994106 - DNA, 120 bp, Artificial Sequence
  ENSG00000286826_4 (sequence is synthesized)
ctaagttggactcagatagtggaacattggtcacctgtgatgtttaagaattaagctgagctgtccgagtagacatttcagaaatgcagctggagctacccagtaaaaatcttaaagaag

SEQ ID NO: 994107 - DNA, 120 bp, Artificial Sequence
  ENSG00000286826_5 (sequence is synthesized)
ctttggattcctacactgtctctacaaatctatagcaaattctttaggtgctttccatgcatgtgttgtaagctttaaggaattttatggacttcaaacatcttttattcattttttaat

SEQ ID NO: 994108 - DNA, 120 bp, Artificial Sequence
  ENSG00000286826_6 (sequence is synthesized)
atcttggtgttaaatactaattatattttctctggcaagatcttacaccgtgtagagcaatattaattcacacagagaagccttgtgatggttaatattaagtgacaacttgattggatt

SEQ ID NO: 994109 - DNA, 79 bp, Artificial Sequence
  ENSG00000286826_7 (sequence is synthesized)
ctctgggtgggcaccatcccctcagctgccagtgctgctgaacaatgcaggcaaaagaaggtggaggagcagacttgct

SEQ ID NO: 994110 - DNA, 120 bp, Artificial Sequence
  ENSG00000286826_8 (sequence is synthesized)
actctgggtgggcaccatcccctcagctgccagtgctgctgaacaatgcaggcaaaagaaggtggaggagcagacttgctgagtgttccaaccctcatctttctcctgtgctggatgctt

SEQ ID NO: 994111 - DNA, 72 bp, Artificial Sequence
  ENSG00000286826_9 (sequence is synthesized)
cctttggccaatcagactggcttcctctctcctcagcttgcagatgacctattgtgggacttcaccttgtga

SEQ ID NO: 994112 - DNA, 120 bp, Artificial Sequence
  ENSG00000286826_10 (sequence is synthesized)
ctattgtgggacttcaccttgtgattgtgatatcacactggtccgttacattgatgacattatgctgactggacccagtgagcaagaagtagcaaacacactggacttatgtactgatcc

SEQ ID NO: 994113 - DNA, 87 bp, Artificial Sequence
  ENSG00000286826_11 (sequence is synthesized)
aaaaattggtgacaaagaaatttagggaaaaggtatttggatggatctctctgagtgatcaaaaactgggaagatatttggatccca

SEQ ID NO: 994114 - DNA, 120 bp, Artificial Sequence
  ENSG00000286826_12 (sequence is synthesized)
acaaagaaatttagggaaaaggtatttggatggatctctctgagtgatcaaaaactgggaagatatttggatcccatgtgagtgctcatcaatgggtgacctcagcagaggaggatttta

SEQ ID NO: 994115 - DNA, 120 bp, Artificial Sequence
  ENSG00000286826_13 (sequence is synthesized)
tgtaaaattaaaattagcattaagtgcaaagagggcagcaaaacacatccagactgttcctcttccatcagctgacacaaacttcagaaataccagctgtggctgggtgtggtggctcac

SEQ ID NO: 994116 - DNA, 120 bp, Artificial Sequence
  ENSG00000286827_0 (sequence is synthesized)
ggcgccaatcctagattcgatagggtaagttctgtggtctccagggcagaagaaatctgtggataggccgaaggtaaagccaatgacagtgggaggggggaatttagagaagtaggtgag

SEQ ID NO: 994117 - DNA, 120 bp, Artificial Sequence
  ENSG00000286827_1 (sequence is synthesized)
gtatttgattgacagcggtattggccagtatgctgggggtcgtgctctgggggatgtaattggcgctacctgttgaaggactcaagtgtgaatcaatagaatgcctgcaagcgtgcgaat

SEQ ID NO: 994118 - DNA, 120 bp, Artificial Sequence
  ENSG00000286827_2 (sequence is synthesized)
ttggacgcctggagtctgaggatgcgggaagcgttgcttaccttaggtatggctctggacagtatggtgaactgagcaagtgttttgcaccttttcacttctgcgagcctcttcccggtc

SEQ ID NO: 994119 - DNA, 120 bp, Artificial Sequence
  ENSG00000286827_3 (sequence is synthesized)
ttcaggagcatctatctggctcccatcactctcctgctacctgcactcaacttgtatctgtgattaacccctgctgttaccaataatggcttaatggttcgtatctgccaaggagaattg

SEQ ID NO: 994120 - DNA, 120 bp, Artificial Sequence
  ENSG00000286827_4 (sequence is synthesized)
tatttcaacagtttcagaatatatagccttctagagcctaaggaattgattgcttaccttgctctctacccttgggagacagatctctttccttaaacttgtacatatctgagcagaaaa

SEQ ID NO: 994121 - DNA, 120 bp, Artificial Sequence
  ENSG00000286827_5 (sequence is synthesized)
gaagcctgtctcttaaaaggattggacagaaacattttcgctagagtctcgttctttggacgtgatccaatcactacttctctacctatgagactgttgatcatctctttctcagatgag

SEQ ID NO: 994122 - DNA, 120 bp, Artificial Sequence
  ENSG00000286827_6 (sequence is synthesized)
ttctgccattaaactgaatatccaaatgtgcataaatcctgaatcctaggctattctggccaatcagcaagagaaagatttgagatttaagaaatttgcagcaacaagaattgactgatg

SEQ ID NO: 994123 - DNA, 120 bp, Artificial Sequence
  ENSG00000286827_7 (sequence is synthesized)
gcaactactatttcttaataagagtattttacttatgttctctggttcttgagattcaaaatgtattttgagaagcagcaacaggagaacatctggagagagaaggtgaaggaagacttt

SEQ ID NO: 994124 - DNA, 120 bp, Artificial Sequence
  ENSG00000286827_8 (sequence is synthesized)
ccagaagttttagaatcctgaatttatcaaagaaatgtgaaggctgaggcttacagagatcgaagagtagaggatgcattgaggccacagttgaaggaaagaagcctggatttccactga

SEQ ID NO: 994125 - DNA, 120 bp, Artificial Sequence
  ENSG00000286827_9 (sequence is synthesized)
atttgggctaaatttccactattcttcttcctcttccttaagattctgctcattgggttacccaccaacccaggaaacagacttatctccttatcctcaagttgctgaaggcaggaagaa

SEQ ID NO: 994126 - DNA, 120 bp, Artificial Sequence
  ENSG00000286827_10 (sequence is synthesized)
tgagcaaggttttgctcaaggaagagctattgtaacaaaataattgtaattagtctgatagtgcagggaaagaaactccatttcttctgaggaattcggggcattatttgcatttgaaaa

SEQ ID NO: 994127 - DNA, 120 bp, Artificial Sequence
  ENSG00000286827_11 (sequence is synthesized)
agcaatctcattagagcagtatgttatattataagacattttgcagaaaaatgtttgagaagaaccatagcagtctcttgcatgtgcatgtgtgcccacacacagacacacacacactct

SEQ ID NO: 994128 - DNA, 120 bp, Artificial Sequence
  ENSG00000286827_12 (sequence is synthesized)
gaattttccacttaaaagtacatatacttcaattaaaaagcaatttgaaaagtaatataaattgatcaggggatgttcctaaatttaaagagggaaagacttgtagaggtttaaaaataa

SEQ ID NO: 994129 - DNA, 120 bp, Artificial Sequence
  ENSG00000286827_13 (sequence is synthesized)
aaggacttggggttggaggaacaggcattagggaaagctatatggcaaggttaaaagaattgtggaattaatgctatttaaaaataattgcattagaaatctagctaatgggaattagtc

SEQ ID NO: 994130 - DNA, 120 bp, Artificial Sequence
  ENSG00000286827_14 (sequence is synthesized)
catttcattgacttagatagttataaaattaattcctttttgtgggaattttaattgggtggctacaaccagatgcacatgaggaatcccctcctggtgctagaattgcaatcaggatgt

SEQ ID NO: 994131 - DNA, 120 bp, Artificial Sequence
  ENSG00000286827_15 (sequence is synthesized)
tcaattcaacaacagagttcgattcatcaattgggtgaatctcccaatctaaaaaggttccgcatagctactatgcacctaaaattgcccccaaatggttttcttactttcatgttattc

SEQ ID NO: 994132 - DNA, 120 bp, Artificial Sequence
  ENSG00000286827_16 (sequence is synthesized)
taagttttttactcttggtgaaacctcctcacatgctaggctacttgtctattttcatccccccttagcctcacttcccaaaatattttatcattttctcttttgggtcaacaattacgg

SEQ ID NO: 994133 - DNA, 120 bp, Artificial Sequence
  ENSG00000286827_17 (sequence is synthesized)
aacttaaagtataattttaaaaaaaaagaaggggaataaaaaacaaaaataaaagaatacatttttctgacatttcaaggaatgggatctctaggtaggaggagacaactgaccacccca

SEQ ID NO: 994134 - DNA, 120 bp, Artificial Sequence
  ENSG00000286827_18 (sequence is synthesized)
aatgggatctctaggtaggaggagacaactgaccaccccaccccaactctgtgtccttggggttcaccttcccattgatgcccccattctgaatcctcaggggtctacaataaaactcca

SEQ ID NO: 994135 - DNA, 120 bp, Artificial Sequence
  ENSG00000286827_19 (sequence is synthesized)
aagggaaataaaagagtacaaaaacataaaaacaatacagtttccaagcacaggttcctgatactcctgctgtctgtcctgcatgtacctgctgtctgagaaatgtgcatagcctcaaag

SEQ ID NO: 994136 - DNA, 120 bp, Artificial Sequence
  ENSG00000286827_20 (sequence is synthesized)
tatcctcttagtaatctccaccaagagttccttttaatcatctgtagctaaactaagcaagactaggtgacttttgcttgcaatctattactgatccaatttctaatatgaaaaactttc

SEQ ID NO: 994137 - DNA, 120 bp, Artificial Sequence
  ENSG00000286827_21 (sequence is synthesized)
ctcttcccaggtactttatttctgtaataatctcgcctttcagatgagatcctaattccttaactgccaagatgtggctacatgtataaccacagcttatgagatattgtgtaaatttaa

SEQ ID NO: 994138 - DNA, 120 bp, Artificial Sequence
  ENSG00000286827_22 (sequence is synthesized)
agtttaaagtaatttaccttcaacaacaggagacttgtttcattatactacttttaataccatcagaggtataaaaagaatgagcatttggtgttagaacatccaagtttgaatcctaaa

SEQ ID NO: 994139 - DNA, 120 bp, Artificial Sequence
  ENSG00000286827_23 (sequence is synthesized)
tccatcatttactagttatttcactcaaagcaaagcagaaacttcacagatttccagtgtcctcatctggaaaatggggataataatgtcacctctgcctgcatcactataatattctac

SEQ ID NO: 994140 - DNA, 120 bp, Artificial Sequence
  ENSG00000286820_0 (sequence is synthesized)
agtacctaaaatagtaacatgacataaagaaccttttattaacacaacaatgatattttaaaaaggaagaataataatttccaagaaaaagtacaggaatttattttatgtctttttgaa

SEQ ID NO: 994141 - DNA, 120 bp, Artificial Sequence
  ENSG00000286820_1 (sequence is synthesized)
tttagacagagaattatttcatagacatcatttagacaaagttagactggcctgaatttaactgcaggtcctgagacttattattaaggtcatatttgccaatgtctggtgagaaataga

SEQ ID NO: 994142 - DNA, 120 bp, Artificial Sequence
  ENSG00000286820_2 (sequence is synthesized)
ctgggaagatgaaaagcatcaaaagatttctaagggctaccaagattattgaggggatactgaagaacatgttttttatttaaatatttcctaggactgaccttcactcttttttcagtg

SEQ ID NO: 994143 - DNA, 120 bp, Artificial Sequence
  ENSG00000286820_3 (sequence is synthesized)
aatctaccattaaaaagggtacctcatctattacactcaggagcagctacagctagagtcaccaagaagggtcgctgacatggtagttgatgctagcaggtcagctgggaggtcagctgc

SEQ ID NO: 994144 - DNA, 120 bp, Artificial Sequence
  ENSG00000286820_4 (sequence is synthesized)
ggctttctggcagagtatctacatgtggtctctctctcaaggtgacttggacttcaaacaggatggtacccatgtcccactggagaacaactcaagcatcaatattccaaaatttgtgat

SEQ ID NO: 994145 - DNA, 120 bp, Artificial Sequence
  ENSG00000286820_5 (sequence is synthesized)
ataaaatgtttcttcatgaaagcatggcaatgtcacattgcagaagtgcatgtgggaataaacatattgttgtggccaactttggaaaatataaattctcaaaatcactttggaaagggt

SEQ ID NO: 994146 - DNA, 120 bp, Artificial Sequence
  ENSG00000286820_6 (sequence is synthesized)
ttctcttttgacagaaatcaaaaggtaaccatctaaaagcacttctcctttcattctgggcacagagctggataatatttctaatttctgtaactcttaggaatggctatatcacttaca

SEQ ID NO: 994147 - DNA, 120 bp, Artificial Sequence
  ENSG00000286820_7 (sequence is synthesized)
tttagccaatggaatgcacacacaaatgtgtattccaccccctggtctgagccatagttctccgcagtgatatccctcatattatttctcttttcactttactattgtgacaatgcctag

SEQ ID NO: 994148 - DNA, 120 bp, Artificial Sequence
  ENSG00000286820_8 (sequence is synthesized)
ggaaacctagggaggcatatgttaaagttggcagaatttctgtgaccctgagtctaatttgatcctcaatgactttcatccctgtgttgagtgtgagcaaaatctatcaataggatgaga

SEQ ID NO: 994149 - DNA, 120 bp, Artificial Sequence
  ENSG00000286820_9 (sequence is synthesized)
tagtacttccatgagtacgttatagtttatagcaaatgagatttttacagtgtaattagagttggaaatcactgctttttaactgtgtcaaatgagtcattaaacttgtcctctgtgtaa

SEQ ID NO: 994150 - DNA, 120 bp, Artificial Sequence
  ENSG00000286821_0 (sequence is synthesized)
atgttatgtcagaagggggatgaggtgctacaggtggtccaggtcactgggccatgacagtgttgatggttgaacgtcaggagccaatgatgttgatagttggggatcctggatagttga

SEQ ID NO: 994151 - DNA, 120 bp, Artificial Sequence
  ENSG00000286821_1 (sequence is synthesized)
aagattttttgctgaaaacttttggaagaacattgtaatcagaagttgtccctaactcttcaaagctttgctgcagacgttctaatcctttgaccaaggtttgctgcaggtaactgaaac

SEQ ID NO: 994152 - DNA, 120 bp, Artificial Sequence
  ENSG00000286821_2 (sequence is synthesized)
catggagagcaaaactgtccataggggtaatccattgcattttcagaaacattcctaggtggttgaggagggtgacttacgacttcctctcaaagatatctaaaccaagacgtcttcaac

SEQ ID NO: 994153 - DNA, 120 bp, Artificial Sequence
  ENSG00000286821_3 (sequence is synthesized)
tttagcctgcatatgcatcacctggaaatcgaggtgtagggtgggccctgagtttgcctttctaaggagagatgctaacaagatctggaccatcagccactcaagacctttaacatgttt

SEQ ID NO: 994154 - DNA, 120 bp, Artificial Sequence
  ENSG00000286821_4 (sequence is synthesized)
catacctgtcgacaccctgatacaccttggcctctgaaatactttacaagctttgctaaagaacacgttcataatgtaccagttctttagcactgattcccttagggaaatctgttcttc

SEQ ID NO: 994155 - DNA, 120 bp, Artificial Sequence
  ENSG00000286821_5 (sequence is synthesized)
agcacagattgggagaactccgtaccttggctctataagcaacatcactgttcagagtggtcatccgaagcatgcagactggagatactatgaactctgatcacataaatgaaggattca

SEQ ID NO: 994156 - DNA, 120 bp, Artificial Sequence
  ENSG00000286821_6 (sequence is synthesized)
ctgtacttttgtaagcagacagacagggtttccagggattttaggaaatgaataatcaacctgaggaagcagcctgttttacagcctcttgccctgcagcctgtgtggaatgcagtcgcc

SEQ ID NO: 994157 - DNA, 120 bp, Artificial Sequence
  ENSG00000286821_7 (sequence is synthesized)
ttgctggttggaaccagcaactgacagaccccagcaacttatagatgaaccccagtgaagtttcttcatgccatgctaaagccctcctcccctagaggagctatagctttattatcataa

SEQ ID NO: 994158 - DNA, 120 bp, Artificial Sequence
  ENSG00000286821_8 (sequence is synthesized)
cctgtgacccatcatggcatgtagagggggggtctgggccactgggacccccccccccatacacatgccatgatgcacctctcccttctctatcactccatcaaaccctcctgtcacttt

SEQ ID NO: 994159 - DNA, 120 bp, Artificial Sequence
  ENSG00000286821_9 (sequence is synthesized)
cccttgggaagatacggctttggagaacacttcccgtgtgtgtcttacttgtgccaagtaacacaatgcctattgatcaaaatctgagttctcctggagagtcgtttgttactcaccagg

SEQ ID NO: 994160 - DNA, 120 bp, Artificial Sequence
  ENSG00000286821_10 (sequence is synthesized)
caaataagccccagtttttgggaggtaacattatgaaatattctgaagtagtcccatgaaagatttctactttccttttcaaattattgataaataaatgagcttgctttgggctatgga

SEQ ID NO: 994161 - DNA, 120 bp, Artificial Sequence
  ENSG00000286822_0 (sequence is synthesized)
attgttacaaaggagaagtgcatatgtagcctgcccggaaaggagaggaaacagatttggtgagcaatgagctggcctccggcacaggtccagggtagaatgacaacattgttggaggtc

SEQ ID NO: 994162 - DNA, 120 bp, Artificial Sequence
  ENSG00000286822_1 (sequence is synthesized)
agctgtcactctccttgttatctgcagtctggtgtgcaggctgaagaaacagccctgtgtgggacactgctggtcttctggtagaaagaaaagaaagatgatggaatcacactgtgattc

SEQ ID NO: 994163 - DNA, 120 bp, Artificial Sequence
  ENSG00000286822_2 (sequence is synthesized)
tacacggagaggatcaggacatcctgttgagcaccagaacatttccttcctcaagaaaaggaaatacaaatggatttattctcagggctacagatttaggaaaaaaaaaaaaaaaagctg

SEQ ID NO: 994164 - DNA, 120 bp, Artificial Sequence
  ENSG00000286822_3 (sequence is synthesized)
tgcttaacaccaggccactgtacaatcaccaggacttttctggatgtggagcaacttcatttggttatttcagaatgctttgtaaacacggcagacacggacaaagcgtggttgaagcat

SEQ ID NO: 994165 - DNA, 120 bp, Artificial Sequence
  ENSG00000286823_0 (sequence is synthesized)
gatgtgatgaagtccgttacaactgaaagcgacactctgatccactagattccaaacagtttaaacagtaaaaactgaccgagtaaatgtgaatattttttcacttgaacactctgatct

SEQ ID NO: 994166 - DNA, 120 bp, Artificial Sequence
  ENSG00000286823_1 (sequence is synthesized)
gtttggaacttaatttccttactcatgaaattaatataataaggctaagttggtcagtagttaaactaactaaatttggctgaagattgctatgttcactatgcaaagattagaccgtta

SEQ ID NO: 994167 - DNA, 120 bp, Artificial Sequence
  ENSG00000286823_2 (sequence is synthesized)
gttccctgagtgaagagatgctatcttggtatctccagcttccaaccgggggcttggcacagaataggggcttggtaaatgttttccaaatgaatgggatgtctgatggaaagaagacaa

SEQ ID NO: 994168 - DNA, 120 bp, Artificial Sequence
  ENSG00000286823_3 (sequence is synthesized)
ggtgaaggaattcctgggtaatatggagatgagaatctgtgagaaggatacatgtactgatgcctgtcgcggtggacacacagacgcacacattgcggaacaccaccataagaatattga

SEQ ID NO: 994169 - DNA, 120 bp, Artificial Sequence
  ENSG00000286823_4 (sequence is synthesized)
gaatatcgagaacacttcaatattccaaacttcaatggaaatatacgtaggtttcacttaactatggtcctgatggcttttttgaaaaagaaagaaagaaaaaatgttttcatcatatta

SEQ ID NO: 994170 - DNA, 120 bp, Artificial Sequence
  ENSG00000286823_5 (sequence is synthesized)
aaagctttttcatagatatatcaaacctatagaaattataatgcatttttctcctcttttgatatattgatacaatgctgcagatcttctaagattgaatgatccttgcattactgaaat

SEQ ID NO: 994171 - DNA, 120 bp, Artificial Sequence
  ENSG00000286823_6 (sequence is synthesized)
aagtattgtcatagtgtattatcattttattacagtatgcatttgatttttctggtgttttatttttgtcatttccgtctatataaagtaaaattagtctacatggggtatatgtgtgtg

SEQ ID NO: 994172 - DNA, 120 bp, Artificial Sequence
  ENSG00000286823_7 (sequence is synthesized)
catgtgcatgtgtgcatgtgtgtgtgtgtgtatttgctattttggtcaggtttgctattagcactatggaaggttataaaataagttggacagctgtctatttttttttagatgctgtaa

SEQ ID NO: 994173 - DNA, 120 bp, Artificial Sequence
  ENSG00000286823_8 (sequence is synthesized)
aatttcaaattcatgctccacttcttataaaaggtatgactttgtgaaagttgctttgttgttaaatttcttttgtcaaaattaaatacttgagcttttcccacttttgaggtacattta

SEQ ID NO: 994174 - DNA, 120 bp, Artificial Sequence
  ENSG00000286823_9 (sequence is synthesized)
agcttttcccacttttgaggtacatttaaacattttatattaatgaattttacatgtatatttataacttatgttttcctttaagaattttaaatatataaccaggtgcatataaaagat

SEQ ID NO: 994175 - DNA, 120 bp, Artificial Sequence
  ENSG00000251301_0 (sequence is synthesized)
cccttcgcactcccttctgaggatggacaggacctggagctcagctgccgctaatggagttggactcatgagtgagggagaaagtgcctgtgaatgacatcattatgcgacatcatagga

SEQ ID NO: 994176 - DNA, 120 bp, Artificial Sequence
  ENSG00000251301_1 (sequence is synthesized)
cagttttttttttcttttattcactcgtctttcttttatttcaactgatgatatcaggtggcttcttcaaatgatttttaagtatctcgatgatgatgaagaacaaagacatcaatcagg

SEQ ID NO: 994177 - DNA, 120 bp, Artificial Sequence
  ENSG00000251301_2 (sequence is synthesized)
attcaggaagacagcttttgcggaaaatgcttaaagggaagcatcaaggattggtgttgatatttgaaagtttaagagtggtatacttttattcagtcaacacatgacaaatgtaaaagg

SEQ ID NO: 994178 - DNA, 120 bp, Artificial Sequence
  ENSG00000251301_3 (sequence is synthesized)
ctcctgacgcatcttctgccgtccgaaatgactccctgctcccagatcctgtagcccttattattgacacctttcatttagaaatttagcacatgtcacattacaccattattgaataaa

SEQ ID NO: 994179 - DNA, 120 bp, Artificial Sequence
  ENSG00000251301_4 (sequence is synthesized)
taatgaataaataaataaataaagatgtatgtccttcccaagtatatcagagaactatctggacaatttctttctttcccaattctcagaatcagcagtattctgtcaagaaacatttat

SEQ ID NO: 994180 - DNA, 120 bp, Artificial Sequence
  ENSG00000251301_5 (sequence is synthesized)
cgacgatgatggcaatagtcgattaaaatcagatgaagttttatttttaaaaaaaggttgagcggagagacaaggctgaaggtttggaagttgagacaaccatcttcaataaacgttttc

SEQ ID NO: 994181 - DNA, 120 bp, Artificial Sequence
  ENSG00000251301_6 (sequence is synthesized)
tcatctaagggctgtatgtacatcattttggggaaggtagagattgaaggaggaagaacatcactggaggaagagacagcagtttgtctttcgagtttcaataaagtttcaaaaatcttg

SEQ ID NO: 994182 - DNA, 120 bp, Artificial Sequence
  ENSG00000251301_7 (sequence is synthesized)
gccagtgtgaagtgtgaatccttgagaggctgtggcaagggtccatgcctgaatgtgtagaacaagaacagctggaggctgtggctttctccaggaagaggtttctaaatctgcctctta

SEQ ID NO: 994183 - DNA, 120 bp, Artificial Sequence
  ENSG00000251301_8 (sequence is synthesized)
gaagatatcagaaagttaaagtttctcttgctgccgccgtgtaagaaggaccttttgcctcccaccatgattctaagtcctccccagccacgtggaactgctttcatttggtctcttttc

SEQ ID NO: 994184 - DNA, 120 bp, Artificial Sequence
  ENSG00000251301_9 (sequence is synthesized)
gaatcagaagacccagaaaacttggatccacttctggctctcatccctctgggcagtgtgatttggagtaaagcagctacggcttagaaaggctgaggaacttgcctgaggctatccagc

SEQ ID NO: 994185 - DNA, 120 bp, Artificial Sequence
  ENSG00000251301_10 (sequence is synthesized)
tactgagagataaactggggtgtgaattcagagagcttgactcctgaggctccacctgtgcctataattccagcatgacacctggtaatgggcactcagtatatgcttgttgatctaaac

SEQ ID NO: 994186 - DNA, 120 bp, Artificial Sequence
  ENSG00000251301_11 (sequence is synthesized)
tgtgtgtgtgtgtgtgtgtgtgtggtcttcctctcacatccaaagctactagcactgaggaagttgggcatggtgtaggaaagagaaatctttgctgttaaatctcatttccagcataac

SEQ ID NO: 994187 - DNA, 120 bp, Artificial Sequence
  ENSG00000251301_12 (sequence is synthesized)
aagagaaatctttgctgttaaatctcatttccagcataactgtcaatggagaggtggcatggaagggacaaccagttcgtgtaccaaattactctcagcttgcttgttgtcttaggcata

SEQ ID NO: 994188 - DNA, 120 bp, Artificial Sequence
  ENSG00000251301_13 (sequence is synthesized)
tgttctgggagtggccaacacctgttttacatctgtgttagtctttgcggaataaaaagcaaattagggtttaatggggactattaatcttgtcacctaattgagtagatctaataaatc

SEQ ID NO: 994189 - DNA, 120 bp, Artificial Sequence
  ENSG00000251301_14 (sequence is synthesized)
ttttcattcaaaacccaatgggaatttctagttggaaatgagtgtggggaatattcaatctcaaaaatattttcatacacaaagattatatatgagtttgtgaaagatgttgaatattca

SEQ ID NO: 994190 - DNA, 120 bp, Artificial Sequence
  ENSG00000251301_15 (sequence is synthesized)
atgaaatttaatgagtatgaattgaacacttatcctgggcctagaactgttggcagttgcttttgagagttacagagtacatttatggtaattactgcacttacgaattttgctatgtgg

SEQ ID NO: 994191 - DNA, 120 bp, Artificial Sequence
  ENSG00000251301_16 (sequence is synthesized)
tttgggagtatctgaagtatcttatagtaggtctctaaactggtaataataaaaagttcaaatatattattttgttacactccacgaggatcaaacttcatcatgacatgattataattt

SEQ ID NO: 994192 - DNA, 120 bp, Artificial Sequence
  ENSG00000251301_17 (sequence is synthesized)
gaaatatgagtaagaaatacgtagggtcatgatctctataagcccattctttgcttcttaattaaattttgcagctgatagaaacattgaaagcagagcattagcttataaataattcag

SEQ ID NO: 994193 - DNA, 120 bp, Artificial Sequence
  ENSG00000251301_18 (sequence is synthesized)
aaaatggttggtaactcccatagtatatgttttatgagttttgtttaagaagagtctatttcgtgttaggtaaagttggccattgtttagaataaagacctgcattactttctattctaa

SEQ ID NO: 994194 - DNA, 120 bp, Artificial Sequence
  ENSG00000251301_19 (sequence is synthesized)
attaaactgttaatgggagtgcttgcaaaggccttggtgcttttttttctgtttaataggagcaacatcactttggatcaattatttaatttccttatgtcagagttctttcaatttaaa

SEQ ID NO: 994195 - DNA, 120 bp, Artificial Sequence
  ENSG00000251301_20 (sequence is synthesized)
ggaaaatatttcctttcctcattcctttttctctgaggatgaaccagacattggaagttgtagcctgggattgtactggagctctcactgtggttgcattctttcttcacattcagcgtc

SEQ ID NO: 994196 - DNA, 120 bp, Artificial Sequence
  ENSG00000251301_21 (sequence is synthesized)
catttttcagttttagctattgttgcggtcatatgccaaggcttgtatgaatgaagggtctataaaaatatctgctgtggtgtgattttttttatccttgtatgagaccatagcatgaga

SEQ ID NO: 994197 - DNA, 120 bp, Artificial Sequence
  ENSG00000251301_22 (sequence is synthesized)
cagtagactggcaaattggcagggcgaggagagtgtttgtgcttacacggggcaatgaaaagagttttgattcttctttagctaaatgttataaaactttaaagcttacatttgaataat

SEQ ID NO: 994198 - DNA, 120 bp, Artificial Sequence
  ENSG00000251301_23 (sequence is synthesized)
cgttgcagatgggttagataaaatccatcaactcacaatgtttttcctgtttccattcactagtgagtaacaaggttaaaagaaggaatgttctataaaataagatatagaatttgggtt

SEQ ID NO: 994199 - DNA, 120 bp, Artificial Sequence
  ENSG00000251301_24 (sequence is synthesized)
aggtttacaagtgaagagttcctctttgccctgcccccaaattatttttaggccccaggcctctgaagccaaggtaatctgcagggcagctttcacattttatcacaagtcagtggtctc

SEQ ID NO: 994200 - DNA, 120 bp, Artificial Sequence
  ENSG00000251301_25 (sequence is synthesized)
tcctcttccttgtccctcctatcttgccggcaaatggctctgtgggaaacccattctgcttcctgtttaaactgtagaaacaattcatttaattcaatatctagcttttgattctatttg

SEQ ID NO: 994201 - DNA, 120 bp, Artificial Sequence
  ENSG00000251301_26 (sequence is synthesized)
caaaaatacagttgtaaatagttccattcattagccaattttttttttggtctgttaagcatatttgggtcattttatagttaaccttggctgagggagagaagttctttgaagctctta

SEQ ID NO: 994202 - DNA, 120 bp, Artificial Sequence
  ENSG00000251301_27 (sequence is synthesized)
cttacttacttgtgaatttttgggtctgatatggaggctttgcaggtcagaagcatggcttgactgacccaatgcccatttctggctctcttcatcctcgctgacctctacagtagagaa

SEQ ID NO: 994203 - DNA, 120 bp, Artificial Sequence
  ENSG00000251301_28 (sequence is synthesized)
aggagaagctgaatattcactgctctaacctcccttgaagcaaggggtggccttgtaacagttctggccaatgtggcataagcagaattctgctgaggtgggttttgggaacggcttttg

SEQ ID NO: 994204 - DNA, 120 bp, Artificial Sequence
  ENSG00000251301_29 (sequence is synthesized)
atttcctaataaaagaggccagaactgcaggcactattctttccacccctcttggtcttgaacatggctacaatgtctggatctatagcagtcagcttgcaactttgagacaatatgcca

SEQ ID NO: 994205 - DNA, 120 bp, Artificial Sequence
  ENSG00000251301_30 (sequence is synthesized)
atctaaaaatggtagagcagaattatagatgaacagatgaacccttggtttttattagatcatggagccccatattatacagtactgcttccctttagacatcatacatgaaaaataaat

SEQ ID NO: 994206 - DNA, 120 bp, Artificial Sequence
  ENSG00000251301_31 (sequence is synthesized)
ccctttgtggtaggtttaatacaaggccacaaattctttgacactcctcccagcaaagtctaattcaccctcccttgaatataggccagccttacccacttgattctaactagtagaatt

SEQ ID NO: 994207 - DNA, 120 bp, Artificial Sequence
  ENSG00000251301_32 (sequence is synthesized)
cagtagatgtgacactgcatgactctccatgctaggttcacaagtgatgcggtttctgcctttttcttctctctgacatgtgccttgggagctttgagctgacatgttagaagtcagtct

SEQ ID NO: 994208 - DNA, 120 bp, Artificial Sequence
  ENSG00000251301_33 (sequence is synthesized)
acattgaagctgccatgctgaagaactcatgtgggagaacacacagaaatcgagatgcctgaggagccccagctgtaccagcctctagctctctgagtcttctcagcaagaactgtcaaa

SEQ ID NO: 994209 - DNA, 120 bp, Artificial Sequence
  ENSG00000251301_34 (sequence is synthesized)
catgagagtgaagcagccttcagatgactctggccccagtcttcaagtgccctagctggtgccaagtggagcagacaagctgccacccaccaagcccttcccaaattgcagactaggaac

SEQ ID NO: 994210 - DNA, 86 bp, Artificial Sequence
  ENSG00000251301_35 (sequence is synthesized)
gtttctcttgctgccgccgtgtaagaaggaccttttgcctcccaccatgattctaagtcctccccagccacgtggaactatatcag

SEQ ID NO: 994211 - DNA, 120 bp, Artificial Sequence
  ENSG00000251301_36 (sequence is synthesized)
attactttatagtaaatcatgaccacggtgtatggcaatgaagttgcatctgaagcagccggcaccctatgtgctagctggcttttagaccaggagactgtgaatctgtggtcaggatct

SEQ ID NO: 994212 - DNA, 120 bp, Artificial Sequence
  ENSG00000251301_37 (sequence is synthesized)
ctttagggctgctaaatatatactacccactatcactcgctggagctgcagaccctagttttagagtttcacttcttaaagaccttcatccttattaaaatggtaatatccttactgtca

SEQ ID NO: 994213 - DNA, 120 bp, Artificial Sequence
  ENSG00000251301_38 (sequence is synthesized)
acatttttgcatggttcttgattgactttctggtgctctgcctggaggtctttgcttatctgtgagttgcctgagtcacatttttacatggttctggtgctctgcctgcaggtcaagaag

SEQ ID NO: 994214 - DNA, 120 bp, Artificial Sequence
  ENSG00000251301_39 (sequence is synthesized)
tgtgaaaacagactaacataattttgcattctgcaactttactgaattcatttatcagctctaaaagtttccggtagagtctttaggttattctatacatacgatcatatctacaaacag

SEQ ID NO: 994215 - DNA, 120 bp, Artificial Sequence
  ENSG00000251301_40 (sequence is synthesized)
cctgcctttccaatacctattcaggagcaaaaaccatgataaactccctttgcatcttttgtaagagagctagacaaacgccggagagtttctctgcagttgtgtgaccttgggtagttt

SEQ ID NO: 994216 - DNA, 88 bp, Artificial Sequence
  ENSG00000286828_0 (sequence is synthesized)
gggagtttaaggtgacacgtggagagcgcggcggacgtccttacctccagaggaagtggggattttgatagttcgggctgacctacgc

SEQ ID NO: 994217 - DNA, 90 bp, Artificial Sequence
  ENSG00000286828_1 (sequence is synthesized)
gaagagtttcagaagatagaattcagctgtaaatctgtcaagtcctgggatttttttggtagcaagctggataaagaatcaagacccatt

SEQ ID NO: 994218 - DNA, 67 bp, Artificial Sequence
  ENSG00000286828_2 (sequence is synthesized)
ctctgatagaattcagctgtaaatctgtcaagtcctgggatttttttggtagcaagctggataaaga

SEQ ID NO: 994219 - DNA, 87 bp, Artificial Sequence
  ENSG00000286828_3 (sequence is synthesized)
taccaagatccagtttctgataaaatagactttaaaccaacaaagatcaaaaaaagataaggaagggcattacataatggtaaaggg

SEQ ID NO: 994220 - DNA, 120 bp, Artificial Sequence
  ENSG00000286828_4 (sequence is synthesized)
attcaacatgaagagctaagtgtcctaaatatatattcatgcaatacaagagcaatcagatttataaaacaagttcttagagacctacaatgagacttagtctcccacacgatgataatg

SEQ ID NO: 994221 - DNA, 75 bp, Artificial Sequence
  ENSG00000286828_5 (sequence is synthesized)
tgagatggaaaattaacaaatatatctacagaactctccacctgaaaacaagagaatgtacattcttctcagcgc

SEQ ID NO: 994222 - DNA, 120 bp, Artificial Sequence
  ENSG00000286828_6 (sequence is synthesized)
agtggacctgatatatatctacagaactctccacctgaaaacaagagaatgtacattcttctcagcgccacatggcacttactctaaaattgatcacataattgaaagtaaaacactcct

SEQ ID NO: 994223 - DNA, 68 bp, Artificial Sequence
  ENSG00000286828_7 (sequence is synthesized)
taaaacactcctcagcaaatgcaaaagagctgaattcataacagtctctcagaccacagcacaaatca

SEQ ID NO: 994224 - DNA, 120 bp, Artificial Sequence
  ENSG00000286828_8 (sequence is synthesized)
tacatcaaaaagctagaaagatctcaaattgataccctaacatcatgactaaaagaaccagagagccaaaagcaaacaaaccccaaagctagtagaagacaagaaataactgagatcaga

SEQ ID NO: 994225 - DNA, 120 bp, Artificial Sequence
  ENSG00000286828_9 (sequence is synthesized)
agaactgaaggagatagagacatgaaaagcccttcgaaaagccaatgaatctaggagccattttttttgaaaaatattaataaaatagatagactgctagctcgaccaataaagaagaaa

SEQ ID NO: 994226 - DNA, 73 bp, Artificial Sequence
  ENSG00000286828_10 (sequence is synthesized)
taaaatagatagactgctagctcgaccaataaagaagaaaagaaagaagaatcaaatagacacaaaaaaagtg

SEQ ID NO: 994227 - DNA, 66 bp, Artificial Sequence
  ENSG00000286828_11 (sequence is synthesized)
cccaagacttgcagcaataaatagcctaccaaccaaaaatgaggattaataattagagaattagtt

SEQ ID NO: 994228 - DNA, 120 bp, Artificial Sequence
  ENSG00000286828_12 (sequence is synthesized)
agcctaccaaccaaaaatgaggattaataattagagaattagttagaatatttagaaaattaataattcacacatttaaaaatgattgattatgcatacgtttttagaataatatagtca

SEQ ID NO: 994229 - DNA, 120 bp, Artificial Sequence
  ENSG00000286828_13 (sequence is synthesized)
ctttgcctcctttaaatcttcccctaaatatccctttcctagtgagacctactttgactacccaatttgaaattataatctcaaccaccatgtacttcctatcttcccttagtctgtctt

SEQ ID NO: 994230 - DNA, 120 bp, Artificial Sequence
  ENSG00000286828_14 (sequence is synthesized)
ccctcttttaatagcacttatcatttgcaggcataccttattgctatggtttgaatgtgttccctccaagcttcatgttggaagttaatcctccttgtgatggtattaagaggtggggtc

SEQ ID NO: 994231 - DNA, 120 bp, Artificial Sequence
  ENSG00000286828_15 (sequence is synthesized)
tttgcggaagtgattaagttcatgagtggaatacccttacatccacatgaatagaatacccttacaaaagaggcttcagagacagtttgcccttttgccttcccatcccttctactatat

SEQ ID NO: 994232 - DNA, 120 bp, Artificial Sequence
  ENSG00000286828_16 (sequence is synthesized)
aagaacacctagatggagtcttctatgaggaactgaacttcccctgacactaaccctgtcagtgccttaatcttggacttcccagcttccagaactgtgagaaataagtttctgttcttt

SEQ ID NO: 994233 - DNA, 120 bp, Artificial Sequence
  ENSG00000286828_17 (sequence is synthesized)
ataaataacccagtctcaggtattttgtcatagcagcacaaacgggaaaagacacatatattatgcttattgttaattgtctgtgtaccccatgccaactataaactcctttaggagttt

SEQ ID NO: 994234 - DNA, 120 bp, Artificial Sequence
  ENSG00000286828_18 (sequence is synthesized)
tgtctgtttcatgtgcttgtcatgcaggtgcctggtgcatagtatttcagtgcattagaaggatctttgttatagggaattctagatttacgtctctgctaacagtcatttctattgttt

SEQ ID NO: 994235 - DNA, 120 bp, Artificial Sequence
  ENSG00000280798_0 (sequence is synthesized)
atcagtgagatcaaacaaaacatacccaatcagtgaagaagccaggccagtcccaaaaagccattggggggccagaagaccctcatccatataccaccagataaccagaaaaacaaaaac

SEQ ID NO: 994236 - DNA, 120 bp, Artificial Sequence
  ENSG00000280798_1 (sequence is synthesized)
actgcacagctgcgggatcaccacactggactcaaataccatagcccaatattggtatttccgagcatggatgtttttccagagctcttccaggaaccgccggtccacaaagttatcagg

SEQ ID NO: 994237 - DNA, 120 bp, Artificial Sequence
  ENSG00000280798_2 (sequence is synthesized)
aaagggctgttgctcatacaagaccctctgccactttacctccttggtgtttgttacaggttgggtacacataatcctttcattcaaactcaggctagtttaatcatccctctcacagag

SEQ ID NO: 994238 - DNA, 120 bp, Artificial Sequence
  ENSG00000280798_3 (sequence is synthesized)
gtccatgtggttcttgttgatgacattttgaaatgagacctccctggaaattccatgccttggttgatattctgctgacctttccttgttttcaaaggcagcaatccaggccaggcctac

SEQ ID NO: 994239 - DNA, 120 bp, Artificial Sequence
  ENSG00000280798_4 (sequence is synthesized)
aatagatgagtttgtctctgaggcaggatataatacagccaagttcctggggatgcgtgactgggagatggcagttgcctgcctttttccttgtaagggttttttttttttttgagatgg

SEQ ID NO: 994240 - DNA, 120 bp, Artificial Sequence
  ENSG00000280798_5 (sequence is synthesized)
gctgggattgtaggcgtgagccactgcgccctgccatgagggtacttttaaagaagataacatcttccatggtgtattcaatgaggtcgtgtctggaattgttcccttaaggtggaggct

SEQ ID NO: 994241 - DNA, 120 bp, Artificial Sequence
  ENSG00000280798_6 (sequence is synthesized)
gctctgtggccactgtgcctggcggttgtatgatcctgggttcctgggcagagaagcctcagcctcagagtgtttggggccttttcctgccgctccaaggctgaaggagaggagcttaac

SEQ ID NO: 994242 - DNA, 120 bp, Artificial Sequence
  ENSG00000280798_7 (sequence is synthesized)
cccaactgcacagcgctgatcaccacttcctgcagtcattcttcctaaatctcaaaaactcttcttttgtaagagtagattcttgcaagatatttttcccctcctgagttcttacattgc

SEQ ID NO: 994243 - DNA, 120 bp, Artificial Sequence
  ENSG00000280798_8 (sequence is synthesized)
cagagttccatttggaccgtttgaaatcttgatgcatgaataactggcttcacagactcttggccgcccactacctcggtgtccactggtggagttctgcaactggcaaaagtcaagaat

SEQ ID NO: 994244 - DNA, 120 bp, Artificial Sequence
  ENSG00000280798_9 (sequence is synthesized)
gaaggaagcaaacttcagaaccacaatattcatattgaatcattttgttgttgctctatgaagataagctaattttcttcctggaatctcataggattattactaagggccagggagatc

SEQ ID NO: 994245 - DNA, 120 bp, Artificial Sequence
  ENSG00000280798_10 (sequence is synthesized)
cacttcgttcatttagtcactcaggaagcattgctaagcatccccctgtaccttcccctacagctctccttccaaaacgaaacatcctttggagtgtgttgtcctccagaatcgaatgga

SEQ ID NO: 994246 - DNA, 120 bp, Artificial Sequence
  ENSG00000280798_11 (sequence is synthesized)
tttggcagtactttactacttgtggatagaactgagagtgaggtcagtatcaccaagcctcttggatttcttcagtagtctcatggataagtgaatgtttaaagtaactactactttgtt

SEQ ID NO: 994247 - DNA, 120 bp, Artificial Sequence
  ENSG00000280798_12 (sequence is synthesized)
tcatggataagtgaatgtttaaagtaactactactttgttggctcttggttgggtggatggattctcagtcctggtgtttttaaaaatctcattccagccgggcgcggtggctcacgcct

SEQ ID NO: 994248 - DNA, 120 bp, Artificial Sequence
  ENSG00000280798_13 (sequence is synthesized)
gtctaaagcaagctacaaaatgtgattatttatgtcacgatatgacccagccataaatgtacttcaggtaagaaggacactgacatgatatcttactgatcaaatgcagtcagtaggtat

SEQ ID NO: 994249 - DNA, 120 bp, Artificial Sequence
  ENSG00000280798_14 (sequence is synthesized)
atatgaacttttttctctgtgaagaaaagctattaataagtttgacttaataggcctatagtatgcacatactggccaagattctaaatggattattcagcggttctgtttttgtggagg

SEQ ID NO: 994250 - DNA, 120 bp, Artificial Sequence
  ENSG00000280798_15 (sequence is synthesized)
tgcttattctcatttctccaaagccttaagattcctgggaatagaggaaatgttgctgccaccagctttgctggtgaatttcaaagagaataggtgtttgctgtttgatttctagtgacc

SEQ ID NO: 994251 - DNA, 120 bp, Artificial Sequence
  ENSG00000280798_16 (sequence is synthesized)
ttttggcgagctctgatttataggtagaacatttgtgtttcttttcattttgaggccaggtggtagagtggaaagactgggagctgtcaggaaaccaaggcttggatctccactctgtta

SEQ ID NO: 994252 - DNA, 120 bp, Artificial Sequence
  ENSG00000280798_17 (sequence is synthesized)
tgtaccagctggggcaaatcagggcccattcccaactcctttaaaatgaaaggactagacttggtctttaagctcccttccgattctaacatttggtggtagcaggattgtgcacaaagc

SEQ ID NO: 994253 - DNA, 120 bp, Artificial Sequence
  ENSG00000280798_18 (sequence is synthesized)
tcctaatttagagaaagatctgggttttagtcttttctcctctatcgccgccttaccggttgtacaacattggaccagccattctccccaaggcctcggcattttcattgttaaatggga

SEQ ID NO: 994254 - DNA, 120 bp, Artificial Sequence
  ENSG00000280798_19 (sequence is synthesized)
acactcctaattcacactgttgctgtgaggattacatttggtaatgaatgatagaatgctttgtacatggaaaaggactatacctttcttttttaactacaaaggcgaacatgtaaccct

SEQ ID NO: 994255 - DNA, 120 bp, Artificial Sequence
  ENSG00000280798_20 (sequence is synthesized)
ctacctgtgggcgcacatttgctgtggtgttacgttccactggtagcgcccaacctcccttcattcaagcacattttacgggcctacagggaaggttttcttcctgtcctctcctaagac

SEQ ID NO: 994256 - DNA, 120 bp, Artificial Sequence
  ENSG00000280798_21 (sequence is synthesized)
ttgtttatgttcatcatctcttctatactagagctgcagtcttacatttgcttacttcctgacatccacccccaccccagtgatttctccccatctccacctctatattatttgaactaa

SEQ ID NO: 994257 - DNA, 120 bp, Artificial Sequence
  ENSG00000280798_22 (sequence is synthesized)
atgaattcatgaatgaacaaatgagtggatgaatgaatggtaatggataatgggctatgaagtcatatttaaaggcactatctcatttaaaaacaatctaaataaataactacaatgata

SEQ ID NO: 994258 - DNA, 120 bp, Artificial Sequence
  ENSG00000241155_0 (sequence is synthesized)
gggccccagcctagaggggcgctcgaggggaagcgagtgaagtgagggctccgccagagcagcacccccttccccgccgtccctcccggactggccggttctcgtcagagattcctttgt

SEQ ID NO: 994259 - DNA, 120 bp, Artificial Sequence
  ENSG00000241155_1 (sequence is synthesized)
cttcgacgctggtccctccacaccaagatgaagaaattgagaaacagaaagtatgatgatttgcttaagaccagatgacaattatctgcagaatgaagacaatcctgacctccatcagtg

SEQ ID NO: 994260 - DNA, 120 bp, Artificial Sequence
  ENSG00000241155_2 (sequence is synthesized)
tccccattgcatggacacagacacatgacagatgcacacatatgtgcaaaacacttatacagaacacactcctccacctccacctcactaccacgcaatcccaagacagcattgcccttc

SEQ ID NO: 994261 - DNA, 120 bp, Artificial Sequence
  ENSG00000241155_3 (sequence is synthesized)
tctggacccagccactcggtcaacacatatttacgaacattatgctaggcactggcaataaaataatgaacaccagaagacacagttcctgagtctcacagagatgacccaggatcattc

SEQ ID NO: 994262 - DNA, 120 bp, Artificial Sequence
  ENSG00000241155_4 (sequence is synthesized)
agagtctaggatgaggcagggattaggtggggatgaggatgataagagcagcgttggggaagtacaggataagatgagaacacacaccaagggcacctaactttttctctggaggaccag

SEQ ID NO: 994263 - DNA, 120 bp, Artificial Sequence
  ENSG00000259514_0 (sequence is synthesized)
ggttttgaaaaactaagagtcctcggagcaggggtctgcagtctggtgaaagcaggttgcatcctggcgccttgggctgtccagaccgtgtctctcggtactctctcataaataacaata

SEQ ID NO: 994264 - DNA, 120 bp, Artificial Sequence
  ENSG00000259514_1 (sequence is synthesized)
gaataattacgaaggcgagagagctttcggaactggaatggcctgagcatggcgcttgttctggaaccagacgcggatgacccgcgggctcaggccggtcatctccaccagctgctcctt

SEQ ID NO: 994265 - DNA, 120 bp, Artificial Sequence
  ENSG00000259514_2 (sequence is synthesized)
catgagagcgtcgggccgcgggttggcggcgtagcaggtccgcagagtgtgcagctgcttctcgttcagcacagtccgcacgcgggtcgtcttctccgtctgcttgtgcacgtgcgggcg

SEQ ID NO: 994266 - DNA, 120 bp, Artificial Sequence
  ENSG00000259514_3 (sequence is synthesized)
caggtcgcaggaccctcggaacgagcgaagccctccggaagaagtcggagtttcagaggaagaggaaagaggcttgcccaggactctggagagggaaagggaccgacgtggacccagggc

SEQ ID NO: 994267 - DNA, 120 bp, Artificial Sequence
  ENSG00000259514_4 (sequence is synthesized)
gaggcgctgcccaggggactgggtgggaggtgcgaatatgccgggggcctacgagggcccttcccctccttcagagcccatttggacagggccaggccacatgtgtagaagactcatcca

SEQ ID NO: 994268 - DNA, 120 bp, Artificial Sequence
  ENSG00000259514_5 (sequence is synthesized)
cggttatggacgggcctccagggcttgcaacagttccttcctgcccgcccttgggcttcggcccctgtctccttcctcaaggctccaggttccccagcccagtggcctcccaccgaccaa

SEQ ID NO: 994269 - DNA, 120 bp, Artificial Sequence
  ENSG00000241151_0 (sequence is synthesized)
acttggaccagactcagtgattcaaaacagtttcttggccacatcctttccaattgaagctgaaaatgggcagatgtgtaaacaaccctggacaaagaggaaagcaccaacctccatgta

SEQ ID NO: 994270 - DNA, 120 bp, Artificial Sequence
  ENSG00000241151_1 (sequence is synthesized)
cttattcaaaccagaagccaaggataatcctttagcagtgttgatcataatcctgaaaatggggagaagtaaaagacatagagctcatttggggaacatttcaagtcaagtgagagagaa

SEQ ID NO: 994271 - DNA, 120 bp, Artificial Sequence
  ENSG00000241151_2 (sequence is synthesized)
tagcaatttgcattctgagataatttaagactaacctttaactatatgtgcattaatgtatggctaaaaatatgtatcaagattttaaaattattaaaggaagcttacagatgataaaga

SEQ ID NO: 994272 - DNA, 120 bp, Artificial Sequence
  ENSG00000241151_3 (sequence is synthesized)
agataaatatttgaaagaaaaattaatctttgaatatatagtctgctcttaacaagaagcactatgtgattttattctttgatagcaaagattgttataattattaaaacactctcactc

SEQ ID NO: 994273 - DNA, 120 bp, Artificial Sequence
  ENSG00000225582_0 (sequence is synthesized)
ataggccctgggttggagaagtcaaaacaaaggtcaccatgttgttctgagcctaaggggtctttgtgagatcttgcactacaaactgcagccaaggggatcccgaatgggcaagacttg

SEQ ID NO: 994274 - DNA, 120 bp, Artificial Sequence
  ENSG00000225582_1 (sequence is synthesized)
atcctcatactggtgaaacctcctgagtccccagggaccctgtcagaccaggctccagcctccctgcggtctctgagagagaatgtggctagttctgccccacggctccctggcaggtac

SEQ ID NO: 994275 - DNA, 120 bp, Artificial Sequence
  ENSG00000225582_2 (sequence is synthesized)
cacgggcatcaggtgtaatgagaagtgacaggcgcaattgctgggggaacatcccagcttagagctgaagttgcccagagtagctggagggcttttccagctgtcaagagggtccccaaa

SEQ ID NO: 994276 - DNA, 120 bp, Artificial Sequence
  ENSG00000225582_3 (sequence is synthesized)
cacttggaggctgcagtcagtctggttttcagcattagcatctcattagcatgggctgaggccaacctggggcccggtcaacagcccagctttgtgtggagggaggggaaaccaagaacc

SEQ ID NO: 994277 - DNA, 120 bp, Artificial Sequence
  ENSG00000225582_4 (sequence is synthesized)
caggtggacagaggggaggagtttagcagtctcaccttgctccctcgtccagtccagcggtcagaagtggccacgcagaacccaacattcagcctgggtgcagacactgcctctagcctc

SEQ ID NO: 994278 - DNA, 120 bp, Artificial Sequence
  ENSG00000225582_5 (sequence is synthesized)
acagcccttgagagattgcagaaagccatcaaccttgaagataacaggagccctcccaaggaaatgtgttcaggagaccttctaagaccatgccatttcctgggtccctctcccagtggg

SEQ ID NO: 994279 - DNA, 120 bp, Artificial Sequence
  ENSG00000225582_6 (sequence is synthesized)
gaaattctcccagtagcagattctggcagacagcagagacacactctatgcccaacactaggcaccggatggatgagataatcataaatccacaaactgcaacaagataaaattatcatt

SEQ ID NO: 994280 - DNA, 120 bp, Artificial Sequence
  ENSG00000225582_7 (sequence is synthesized)
agatgaagttaaattattaattagcacctccaaaaaaagaccggcaccacctgggcttgaatcttggaagctgtctttctgaaagcaagagaaacatcaaaatagtttatcgatgctctg

SEQ ID NO: 994281 - DNA, 120 bp, Artificial Sequence
  ENSG00000225582_8 (sequence is synthesized)
tggtgtgggtatagcctatggttcccagaagcctgatggtcagaggtcccaccaggcaggcctgccccgcctgccctcttcttgcagtgttgccagaaatagccagtttggataatgtta

SEQ ID NO: 994282 - DNA, 120 bp, Artificial Sequence
  ENSG00000225582_9 (sequence is synthesized)
ctagggaaagggaagcaactaatgtgacccatttttatgactggagaaactgaggcaaaggacgaggcagaaaggccacagaagatggctcagggtgggctgaagaatttgtgtactggg

SEQ ID NO: 994283 - DNA, 120 bp, Artificial Sequence
  ENSG00000225582_10 (sequence is synthesized)
ttgggaaggggtaggtcctcagattgcctgattatctaaggactaaggaacactcattcgttcagtgcactgctattttgtgcttactatgtgccaggcacccggaatacagaggaaaaa

SEQ ID NO: 994284 - DNA, 120 bp, Artificial Sequence
  ENSG00000225582_11 (sequence is synthesized)
gtttccatcattgtcatcatcatccactaccaccaccaccaactcctacaacccatatttattcattgaatcctggaaccacagcagctaatgatgggggaggaggctttaaagaccatc

SEQ ID NO: 994285 - DNA, 120 bp, Artificial Sequence
  ENSG00000225582_12 (sequence is synthesized)
tttctagccagaacatcaatccttgctacagaattccgtgtgaattgtgatccagtagaacactcccagcaataagcagcttactcactgcctcataaatcagcccattgcatctctgga

SEQ ID NO: 994286 - DNA, 120 bp, Artificial Sequence
  ENSG00000225582_13 (sequence is synthesized)
attcagcctgggtgcagacactgcctctagcctcctccccaagcactctcctagtatggtaagagaataaactgaagtccctagaggccaagggtctcacctaagtggtcatatcctaca

SEQ ID NO: 994287 - DNA, 120 bp, Artificial Sequence
  ENSG00000225588_0 (sequence is synthesized)
aagcaacaacctactcaaaactcatctttttgtattaatgcatcatgtgactccctcgtttggacttctgcaggaacatgtcaggacaggacaatcacacaaaacaatttacaaggaaag

SEQ ID NO: 994288 - DNA, 120 bp, Artificial Sequence
  ENSG00000225588_1 (sequence is synthesized)
ttcttttcaagcgcacatggaagatgcacaatgcgggaaaataaaatgtgaatctcaaaaatatcagttactgaaattttacagaatacattctttgatcacaaaagaaactaaaagaaa

SEQ ID NO: 994289 - DNA, 120 bp, Artificial Sequence
  ENSG00000225588_2 (sequence is synthesized)
gccttgcaaatcatgagggaatcccagggaaagaaaacactcctcggactgatagtgaggtgattgtctctacatacagatgagatacatgagacactgagaaatggataccactgaggt

SEQ ID NO: 994290 - DNA, 120 bp, Artificial Sequence
  ENSG00000225588_3 (sequence is synthesized)
catggccaggaggtggcagtgcaaagattcctacccaagcttcctcatctgtgaacagaacaggaaggcctcggtaaataggtacatgttgacaagcaacaacctactcaaaactcatct

SEQ ID NO: 994291 - DNA, 120 bp, Artificial Sequence
  ENSG00000225588_4 (sequence is synthesized)
catgtgactccctcgtttggacttctgcaggaacatgtcagagacggggtcttgctatgttgcccagaatggaatgcagtgtctcttcaccggcaccatcctggcatgctatagcctcaa

SEQ ID NO: 994292 - DNA, 120 bp, Artificial Sequence
  ENSG00000225588_5 (sequence is synthesized)
actcctgggctcaagcatcatcctgcctcagcctcccaattagctgggactacagctgagttttcagtgtggactttgcttctgaattgtgtccaaggctctgagtcggttttaagacct

SEQ ID NO: 994293 - DNA, 120 bp, Artificial Sequence
  ENSG00000225588_6 (sequence is synthesized)
tacatctgcatggtgctttgccgtttaagaaggaattccacattaatcttcagctctgattattcaagttcatcccggttcctgttacagtcactgcttgaataaatgaatgaaccaaaa

SEQ ID NO: 994294 - DNA, 120 bp, Artificial Sequence
  ENSG00000225588_7 (sequence is synthesized)
ggggacggatcagaatggactggaggggattggatctgccttgcaaatcatgagggaatcccagggaaagaaaacactcctcggactgatagtgaggctcagaggacacaatctcagatc

SEQ ID NO: 994295 - DNA, 120 bp, Artificial Sequence
  ENSG00000225588_8 (sequence is synthesized)
atgtgacctaccccacattcctcaaagaagacaggaaatgagactgaaaaagatttgcatgacttcccttatttggcttggcagtcagatttatttatttatttatgtatttatgtattt

SEQ ID NO: 994296 - DNA, 120 bp, Artificial Sequence
  ENSG00000225588_9 (sequence is synthesized)
gtgatgcaatctcagctcactgcaacctccagttcttgggttcaagcaatctcctgcctcagcttcccaaggatctggaattacagagacggggtcttgctatgttgcccagaatggaat

SEQ ID NO: 994297 - DNA, 120 bp, Artificial Sequence
  ENSG00000225588_10 (sequence is synthesized)
ctaataatgtcctttctgtatgaattatcgagactcaagaaagcactttgataggggaagtgaatacactggggacaattagtgggtggatgtgtctgaagtgagagtaaggctctcttc

SEQ ID NO: 994298 - DNA, 120 bp, Artificial Sequence
  ENSG00000286798_0 (sequence is synthesized)
attgtagcagcagaattctgataagatggaggaaagaaaagccagagtgaagcagaccattagcagataattgtcataatcttgatactaaatggagaccagaattaagttgaagtcaga

SEQ ID NO: 994299 - DNA, 120 bp, Artificial Sequence
  ENSG00000286798_1 (sequence is synthesized)
aggcaaaggatcctttgatgtagtccattcagagcagaaggagaagaatgcagagtggatctgcagggacaaatagaagatgcagcgcaatggagatactgtttaatgccgcaggggacc

SEQ ID NO: 994300 - DNA, 120 bp, Artificial Sequence
  ENSG00000286798_2 (sequence is synthesized)
tgggctcttttcgtctctcctatgtaaagagaatttcctccatccaagtaaaactgatgcgatcggtcagctttctagacaacagaaataaataattctctctgtgaggaatgacaaata

SEQ ID NO: 994301 - DNA, 120 bp, Artificial Sequence
  ENSG00000286798_3 (sequence is synthesized)
ttcctatgactatgaaaactataaatctactttcaatttataatcttagaaagattcagggaaatgaaccatctatgatatagtaaaatgcaccagagactgcacattcttaataatatg

SEQ ID NO: 994302 - DNA, 120 bp, Artificial Sequence
  ENSG00000286798_4 (sequence is synthesized)
catagtgttagagttttacctttaccaattgcctctttgttttgtgggttttttgttttttgttttgttttgtttgtgtttggtatgaagaaatggaaagcagagaagcttggagattta

SEQ ID NO: 994303 - DNA, 120 bp, Artificial Sequence
  ENSG00000286798_5 (sequence is synthesized)
ccaggactgaatttcttcacagtcaacaattggctcttaaacttgcaaaatatttggagcatgtgtttttctttgcttgttagttttcccacactacagtttttctagattttgctaatc

SEQ ID NO: 994304 - DNA, 120 bp, Artificial Sequence
  ENSG00000286798_6 (sequence is synthesized)
caagtgcctggctcatttttccctcagcatccttatgcatttcctccccagatcaaattccctgcctaaattagtacacatttttgttcttgaagaaagaaccgaatcagaaagagaatc

SEQ ID NO: 994305 - DNA, 120 bp, Artificial Sequence
  ENSG00000286798_7 (sequence is synthesized)
aaaatagaccattattgtcctggcatgaagacaagcaattattgtattcttcattgcagttttttcacttaaaatcatcccagagtcgtataagagatttaataaaaatcatttatcatg

SEQ ID NO: 994306 - DNA, 120 bp, Artificial Sequence
  ENSG00000286799_0 (sequence is synthesized)
gggcacaaggggcggggatccacgccgaggctccacccctccttagggcagaaaacgggacgtgctactttaccagcacatcactgggggtaggagatgaggtcagagaactcgccaggc

SEQ ID NO: 994307 - DNA, 120 bp, Artificial Sequence
  ENSG00000286799_1 (sequence is synthesized)
ccagatcacccagcgcctgagtggctggaggttaactagcaacccaggtggcaggtggaagatggagattcacgattgcttctggaagactcgctgtgtgattccgcccaccccatggcc

SEQ ID NO: 994308 - DNA, 120 bp, Artificial Sequence
  ENSG00000286799_2 (sequence is synthesized)
tcctgagatgttcagagcaggattcctacctagtgccccgccaaacatggcccacaccccaagtcaccctggaccacacccgcccctccgtcatttcctacaggcttttcctgcagattg

SEQ ID NO: 994309 - DNA, 120 bp, Artificial Sequence
  ENSG00000286799_3 (sequence is synthesized)
agagaggaaactgggcagggagcacaccactgatgggtgaaatgatgatctcacaggaaaccagacaagctagagttgtcaccacaccctggactcagagaacttgggtacttcaccgac

SEQ ID NO: 994310 - DNA, 120 bp, Artificial Sequence
  ENSG00000286799_4 (sequence is synthesized)
ggccacctcccatcgccctttcattcttcatgggcagggccttgcaagccttggtgatggattttattccatgagatggggcagctgttgcaggaacacgatttgagttgttttttgaaa

SEQ ID NO: 994311 - DNA, 120 bp, Artificial Sequence
  ENSG00000286796_0 (sequence is synthesized)
ggaggaatgtgctggtgagagaaagacaagtttggtttgggacaaatgagtgtgagggccccagcctcttggctggccagtgaacacttccaagaaccttcatacttaatacctctatca

SEQ ID NO: 994312 - DNA, 120 bp, Artificial Sequence
  ENSG00000286796_1 (sequence is synthesized)
ctcctccactcaacaggtgaggaaacatcagtccagtgagagtggcatgtgtggggaggagcccaggcttgctctgacctctctctggggccccccactccagaaggttggaacagcatt

SEQ ID NO: 994313 - DNA, 120 bp, Artificial Sequence
  ENSG00000286796_2 (sequence is synthesized)
ctacagcattccaggatgtggagggggcagcagtgtttgtgtgcagagtggcgaggccgacctccgatgagcttcccgtaggaagggtgcagtggggggtgctcaccctgcccagggatg

SEQ ID NO: 994314 - DNA, 120 bp, Artificial Sequence
  ENSG00000286796_3 (sequence is synthesized)
ctatctgctccaggacttgtttatcagcccacggggtgatcggcatgacatcaatggatatgccaggctgcaggctacagtgccgagaaggagaagacggaggcggtggtgatgtcaccc

SEQ ID NO: 994315 - DNA, 120 bp, Artificial Sequence
  ENSG00000286796_4 (sequence is synthesized)
aaggaattaagtaagcaggggagctgataacatcgtccagccaggctcactgtgggcagggtgactcactgaagacggcctgcgatcgccaggtgattgttgttgtgcccagcctgtggg

SEQ ID NO: 994316 - DNA, 120 bp, Artificial Sequence
  ENSG00000286796_5 (sequence is synthesized)
tgacaagttcctcaccgaggcccctgctcaggggagagacctcagtacacagtgtcctccacctctgagcccggggctggctcaggaaacagcccccctctgcctgtgcgattatctttg

SEQ ID NO: 994317 - DNA, 120 bp, Artificial Sequence
  ENSG00000286796_6 (sequence is synthesized)
tccacagtgtttggtgtgtgtttgtggggtgtgtcaggtgattttcctgcccgaagcctgctgggtgctccaggtactagcgattgctcacagcagagcagtagccccctccctggttgg

SEQ ID NO: 994318 - DNA, 120 bp, Artificial Sequence
  ENSG00000286796_7 (sequence is synthesized)
acaactgtctgtggagacaacaccggatggcaaactgctaaccgcaaccacgtggcgtccttacagagggaacagcctgttcctcccgctgagggcacctgcagacctgccccattcatg

SEQ ID NO: 994319 - DNA, 120 bp, Artificial Sequence
  ENSG00000286796_8 (sequence is synthesized)
gctcccttctccctcagtccctgctgaggggatggtcccttcccacccttaagggcaccatggactgttgtccaagttgagaactgtccaactgcagggggcaccattcacttggcagtc

SEQ ID NO: 994320 - DNA, 120 bp, Artificial Sequence
  ENSG00000286796_9 (sequence is synthesized)
ttcgtgccagatgctatggctgtccacagtggccctgccccttcccttttgtaaattacttctcagttccctcctccaccagaattatcacaccaaactttcccccatgtatgcttgctt

SEQ ID NO: 994321 - DNA, 120 bp, Artificial Sequence
  ENSG00000286796_10 (sequence is synthesized)
ctttatcacctgacactctcattcattcattccacaaaaaaattgtggcgtttgtgcaaggtactattctaggcaagggaacaagacagaccctcctggagctcatggagttcatattct

SEQ ID NO: 994322 - DNA, 120 bp, Artificial Sequence
  ENSG00000286796_11 (sequence is synthesized)
tttttctttttccttctaaggaacaattcgttttggtcaaataactagagcaaaagtgactggtgtttagacacctctttccccagcctctggcagtgccattggaggaaccgtcccctg

SEQ ID NO: 994323 - DNA, 120 bp, Artificial Sequence
  ENSG00000286796_12 (sequence is synthesized)
agggtcatagaggaagctgtctggcagctcagagggttgcctcttgtccctgcccagccccaccggcttcccctggctgcctccctcacatgccaggcttgggcagcttcccatcacaga

SEQ ID NO: 994324 - DNA, 120 bp, Artificial Sequence
  ENSG00000286796_13 (sequence is synthesized)
ccgaggtccagccagagaggcctgtgctcagcccctccctggggcctctcagtctcccctctctgctgtcccgctcaaatggtggggagggggtagagtaggacaattcagagagaggaa

SEQ ID NO: 994325 - DNA, 120 bp, Artificial Sequence
  ENSG00000286796_14 (sequence is synthesized)
ctaatcccctccctcatcccactgggatgcagaggaggaggccaggctgaaagggaaccacacacatctccagtcacttctgtcattgctatactgaccctacagcacttcccatgtgcc

SEQ ID NO: 994326 - DNA, 120 bp, Artificial Sequence
  ENSG00000286796_15 (sequence is synthesized)
actgggcctgcaggtcggtattggcaagggtgaaggtgaggggacgcaaaagggaatgctaggctgtggcggggaagggctggcctgggctcccaggaggtgaggggctgagtcccaggt

SEQ ID NO: 994327 - DNA, 120 bp, Artificial Sequence
  ENSG00000286796_16 (sequence is synthesized)
catggtggccggacacagaggcgggtagaaggccagcagggctgccccatctgagcctgggagagcctgggaacccaaaggcccatcacagaggctcggaggcagctgtgtccacgcgag

SEQ ID NO: 994328 - DNA, 120 bp, Artificial Sequence
  ENSG00000286796_17 (sequence is synthesized)
caagcagcttggcctctgtccaacaggaaaccccctctgcacaaggagagagggaatgagcacagagtagaggtgccatgtgtttcccagggcttcactgcagacagcatctcctgggag

SEQ ID NO: 994329 - DNA, 120 bp, Artificial Sequence
  ENSG00000286796_18 (sequence is synthesized)
gtaaactgaggcccctgtgtgcaaagcaagaaactagggcaagccccttggggctaaaggtcaaggaactgaaggttccaatttacctgccctggtagtttctggcaagagacctccacc

SEQ ID NO: 994330 - DNA, 120 bp, Artificial Sequence
  ENSG00000286797_0 (sequence is synthesized)
gagctgttcctattcggccatcttgactcctctctgccggacttttctttaagaaaatcttctgccactgttataaaagacagcaagatcaatcactcctcttccacatcctcttactgt

SEQ ID NO: 994331 - DNA, 120 bp, Artificial Sequence
  ENSG00000286797_1 (sequence is synthesized)
tcaatcactcctcttccacatcctcttactgtgaagataataaggttgaagaccttgatgatgatctactttcacttgaacagcaaattggaccatctagttgcaggaaaacaagttcag

SEQ ID NO: 994332 - DNA, 120 bp, Artificial Sequence
  ENSG00000286797_2 (sequence is synthesized)
acattatgatgctatttctggagctgttagtcatgactagctctgcattaaaatttgactgaagctgcatgtatgtattaaatcagtgagtaccttgaactttatgttatttaagaagat

SEQ ID NO: 994333 - DNA, 120 bp, Artificial Sequence
  ENSG00000286797_3 (sequence is synthesized)
tgggaaatatgatatttcagggaataatgttaatatataattgacacacacattccaaataatatgaaggatatagttttctatagaaatttataccagtaactttgaattttcagagag

SEQ ID NO: 994334 - DNA, 120 bp, Artificial Sequence
  ENSG00000286797_4 (sequence is synthesized)
attttcagagagagtgtctagtatggattttatgatgcttaagcattattaatagcaatatttttatattaaaatgatagtaattttcagttgatcagaaattaaaatctagttaattct

SEQ ID NO: 994335 - DNA, 120 bp, Artificial Sequence
  ENSG00000286797_5 (sequence is synthesized)
gtttgtatttgtctatgtgtaatagcatgtgtgtacagtacatgcatgcacatatacacacattaacacatacactatatatatttacacacagatgtatgtggtgtacatataagaggg

SEQ ID NO: 994336 - DNA, 120 bp, Artificial Sequence
  ENSG00000286797_6 (sequence is synthesized)
gacttcaaaaatttcatagaaaaattgaattaaaagataaaaatagaaaaaatctctcaacataaagaaacatctgattaaaaaacttaatgttaagaaaacattcatgaagaaaaggaa

SEQ ID NO: 994337 - DNA, 120 bp, Artificial Sequence
  ENSG00000286797_7 (sequence is synthesized)
ttaaaagataaaaattcaaaaaacatttctcaacataaagctccgtcaagttcaaaacacttttgtagcaatgaaaccagccatttagtctatcactaaagaactgagtttcctagaaat

SEQ ID NO: 994338 - DNA, 120 bp, Artificial Sequence
  ENSG00000286797_8 (sequence is synthesized)
ttaaccatgtaaatgcaatcttttttacattatcaactgaagaacaagggcttcctttatgaatttttaagattaggaaacagaaagaattcagaaatagccaaatcatgattgcaaggt

SEQ ID NO: 994339 - DNA, 120 bp, Artificial Sequence
  ENSG00000286797_9 (sequence is synthesized)
aggtacgtaatgatatcccatcaaaattctttcaaaatggccgttgtttgatgaaagaaatgagcaggagaattgacatggtggagaaggactctctagtgaatgtttctcagccatttt

SEQ ID NO: 994340 - DNA, 120 bp, Artificial Sequence
  ENSG00000286797_10 (sequence is synthesized)
tctgctaaagttttggttaactttcttgaagcactctcataataagcatgttatgattgtttggcactccagaaagacccaatgcatttagcatccccataaaactgttgttgccaggat

SEQ ID NO: 994341 - DNA, 120 bp, Artificial Sequence
  ENSG00000286797_11 (sequence is synthesized)
cattgctcttgaccagtccacttatactttgactggaccacttccaccacttggtagccattgctttgattgtgctttgtctttaggattgtactggtaaagctgtgttacatctctcaa

SEQ ID NO: 994342 - DNA, 120 bp, Artificial Sequence
  ENSG00000286797_12 (sequence is synthesized)
ctcagctgatctgggtgcaatggtctgacactcattgaatggaaagtttgcttaactttaaatttcactcagaattatgtaagctgaacaaattgaaatgcctatggtgttgactattgc

SEQ ID NO: 994343 - DNA, 120 bp, Artificial Sequence
  ENSG00000286797_13 (sequence is synthesized)
ttctggtgttatcagttcttttcaattagggcatgaacaagatgaacttttcctcacaaattgatgtggatgatctgtcgctgcaggcttcatcttcaacattgtcttgtcccttcttag

SEQ ID NO: 994344 - DNA, 120 bp, Artificial Sequence
  ENSG00000286797_14 (sequence is synthesized)
aatggattattcatttgtatactgctaatttgggatagaggagcattttccccgtaaagcatttcataaagtatcaatgattttaccatttcttccacccaactacaccataatttgata

SEQ ID NO: 994345 - DNA, 120 bp, Artificial Sequence
  ENSG00000286797_15 (sequence is synthesized)
tttgttcttggtcaattttagcagaattcatgttgctctgacaagggcttttgtcaaactgatgtcttacccatcttagtgactcagactagatcttgtttatacatgttttaacaaggt

SEQ ID NO: 994346 - DNA, 120 bp, Artificial Sequence
  ENSG00000286797_16 (sequence is synthesized)
gtatgactttattttggtgcaaaatctttttgaaatccatgaatagtttttgtataatatgcatttttatgatatctttgaaaaccctcgtgtgtgtgtgtttgtgtctatggcatgccc

SEQ ID NO: 994347 - DNA, 120 bp, Artificial Sequence
  ENSG00000286797_17 (sequence is synthesized)
tatatatgtggaaggataaatctgtaaatgcatgcactaatatggactacagatgtgaactatatctccatgtacatatgtatctctatatacatgtgcatttatggatgaaatatttat

SEQ ID NO: 994348 - DNA, 120 bp, Artificial Sequence
  ENSG00000286797_18 (sequence is synthesized)
tgcctactgtgtgttaagtgactgtgctcttagctatgcaaatgatttcaactgatgttttttccctatcccatctatttactatcctctaacttgttccaaaaaataggatacaggata

SEQ ID NO: 994349 - DNA, 120 bp, Artificial Sequence
  ENSG00000286797_19 (sequence is synthesized)
aataactgaaattgttttttgaatgagattgcagtcgatatatgatttagaggaccaagcaggcaaagaatttgtatattcaatcaatgcctcttagttggtgatagttgtttttttttt

SEQ ID NO: 994350 - DNA, 81 bp, Artificial Sequence
  ENSG00000286797_20 (sequence is synthesized)
atagttgttttttagaattttttccccttatcacaagactgaaatgaaaattgatgcaatcacatgatggaatatttgttc

SEQ ID NO: 994351 - DNA, 120 bp, Artificial Sequence
  ENSG00000286797_21 (sequence is synthesized)
aaatgaaaattgatgcaatcacatgatggaatatttgttcaatctgacagattaatggtctaggaagaaaaaattaattttgatttcaccaaagaaaaacagtttgttgaaaatcaatca

SEQ ID NO: 994352 - DNA, 120 bp, Artificial Sequence
  ENSG00000286797_22 (sequence is synthesized)
gttctcatacatagctaagaaaatattcactgcttttcaagccatcaaatgcttttaataaatatctaaaacaaggtggttaaaatgtcaactagcacttttattaagtatttttctgga

SEQ ID NO: 994353 - DNA, 120 bp, Artificial Sequence
  ENSG00000286797_23 (sequence is synthesized)
tttaaaaagagaaatgtcatagcatatcctatcttctagatttgtattctcttggtcaagagcaagcatgagcaagcctctgaagagctgcatctctaactgcaagcatccccacgtact

SEQ ID NO: 994354 - DNA, 120 bp, Artificial Sequence
  ENSG00000286794_0 (sequence is synthesized)
tccccgagggaccaggaggttgcggaagtaaacaccgatgactcccagatctacagctccaggctgttcccttctccgtgtctcatatcagctttgccaactgtttattggacatcaccg

SEQ ID NO: 994355 - DNA, 120 bp, Artificial Sequence
  ENSG00000286794_1 (sequence is synthesized)
gaaaattctttcttctctattctgtttctctccttgttgaacccccatcatgcataggtgtgctctgttcatttttcacattacttttatttttctgctcctcggactgaataatctcaa

SEQ ID NO: 994356 - DNA, 120 bp, Artificial Sequence
  ENSG00000286794_2 (sequence is synthesized)
ttgacctattttaagttcactgattcttttgcctgcccaaacctactgttgtacccctctagtgacttttagttattgtacttttcaaataaagaatttctatttattttataatttcta

SEQ ID NO: 994357 - DNA, 120 bp, Artificial Sequence
  ENSG00000286795_0 (sequence is synthesized)
ccttcagccatgtaaggacacagtgttcttcccctctgaaggttgaggcaatgaaacaccatctcggaagcggaaagtagccctcaccagaaaactgaacctgctggtgccttgatcttg

SEQ ID NO: 994358 - DNA, 120 bp, Artificial Sequence
  ENSG00000286795_1 (sequence is synthesized)
gactacctagctccagagctgtgaacacatttctgttcttttatattacccagtctcaagtattttgttatagcagcacatatgaacttaaacagaattcaacaatgtataaaaagaatt

SEQ ID NO: 994359 - DNA, 120 bp, Artificial Sequence
  ENSG00000286795_2 (sequence is synthesized)
acatgctatgacaaagtgagatttatcccaggtatgcaaggctggtttgacaggaaaatcagtcactatagtccattacatcaatagactaactaagaaaaatcatatcaatgcagaaaa

SEQ ID NO: 994360 - DNA, 120 bp, Artificial Sequence
  ENSG00000286795_3 (sequence is synthesized)
tatttgcaaaaaacctataaccaacatcataattaatggtgagaaactatatgctttccccctcggatcagaaacaagaatgtctcctctcactacttctagtcaacattgcaggaggtt

SEQ ID NO: 994361 - DNA, 120 bp, Artificial Sequence
  ENSG00000286795_4 (sequence is synthesized)
ctagctaatacaatatgacaagaaaagaaaaggcatccagattgggaaggacgaaataaaactgtctttgttcacagatgacataattatttatataaagaaatcccaaagaaccaacaa

SEQ ID NO: 994362 - DNA, 120 bp, Artificial Sequence
  ENSG00000286795_5 (sequence is synthesized)
cccaaagaaccaacaaaaagtgatcataagaaggttgcagagacagcatctcacagtgttgcccagactggagagcagtgcactgcaacctctaactcctgggctcaagtgatccttctg

SEQ ID NO: 994363 - DNA, 120 bp, Artificial Sequence
  ENSG00000286790_0 (sequence is synthesized)
acagtggcgggagaacttatcaaaatccaccacggtcaggagcagggtcctcctctgggcctccaggaaggggatctcgaaggtgtagcgctcctcaaacacgggcttctgggtcttgcg

SEQ ID NO: 994364 - DNA, 120 bp, Artificial Sequence
  ENSG00000286790_1 (sequence is synthesized)
tttgaccccggtctgctttgagttcttctggtctggcaggagacagatcttgacgtaggggttggagtgcgccatgtcctggcgcgagccatcgtgggagatgggaggtggcaggtccct

SEQ ID NO: 994365 - DNA, 120 bp, Artificial Sequence
  ENSG00000286790_2 (sequence is synthesized)
ggcctcgatcacgcgcacggtgaggtggttgtgcagcaggtcgtactgagtgctgaagtgcagcatgcccagctggtacttggacaggatctcctcgtctgtcagagagtccacatcgtc

SEQ ID NO: 994366 - DNA, 120 bp, Artificial Sequence
  ENSG00000286790_3 (sequence is synthesized)
gctgttggagtcgagggagtacaggtggggttcgaacttcctgaaatagtcgtcggggttataggtccgtctgagcaccgaaggttggatgggctccttcttggcgctgagaacgccaaa

SEQ ID NO: 994367 - DNA, 120 bp, Artificial Sequence
  ENSG00000286790_4 (sequence is synthesized)
ctcgatgggtttaatatcgatgagtggagagctgggacgtcttgactcaagacctgagagccaccagaaataacaatgaagacagccacatacggggcagacctgggccactttgcagga

SEQ ID NO: 994368 - DNA, 120 bp, Artificial Sequence
  ENSG00000286790_5 (sequence is synthesized)
agcagagatacttttgtggagcagaaggaggttgggagcctctgggtgtttgtcctcctttttcctcctcacccaaatcatgctgtttggtcaaacacatacgccacacaacagagtgga

SEQ ID NO: 994369 - DNA, 120 bp, Artificial Sequence
  ENSG00000286790_6 (sequence is synthesized)
caaattgggtggtcaaatttgatggccacacatacattttgtttaggcttgaaagtaagaatgtttcacataaaaaaacccagattgccaatatctctttacaaagatcagacaatacgg

SEQ ID NO: 994370 - DNA, 120 bp, Artificial Sequence
  ENSG00000286790_7 (sequence is synthesized)
agcccccaatcccatacagctaccattggccagagctgagtagcagacaccctggccccctttcaatggggcatttgcttttcaattgaccgaagtccccaccctgccctagtaactctc

SEQ ID NO: 994371 - DNA, 120 bp, Artificial Sequence
  ENSG00000286790_8 (sequence is synthesized)
cagacagagcggcagctgccatttgtcactgcactcaggcaatgtttatctctatgcaacctctgcacttggccactgatgcaacccgcctagctcccaaagtcaccagaattgacaaac

SEQ ID NO: 994372 - DNA, 120 bp, Artificial Sequence
  ENSG00000286790_9 (sequence is synthesized)
cctgctatataatatagccacactcatctttcagaatctgaaatgatatacactgacaatgttaatcaattcagccaattcaatcaaacttaaaattaataaagcaaaaatcaatcaaaa

SEQ ID NO: 994373 - DNA, 120 bp, Artificial Sequence
  ENSG00000286791_0 (sequence is synthesized)
gggagaactggcccctagtgggagttgggcgcgtccctggaacctcccctcctcgagggctgggagttagcgggaagaagaagaggccgcgggcaccatgattcagacccggaaactacg

SEQ ID NO: 994374 - DNA, 120 bp, Artificial Sequence
  ENSG00000286791_1 (sequence is synthesized)
cctccaggcatggctaggagaaatgggcttcggagaccatggccacccctctccctgcctaggagcacgcctgccccagcacccgggcctgaacgcagcgagagctccagagcctgcgag

SEQ ID NO: 994375 - DNA, 120 bp, Artificial Sequence
  ENSG00000286791_2 (sequence is synthesized)
tcccagagttccagttccacatcacagtcacgcaaatgtaagagaatggagaatgcagtcctttctcagctgggcacaaagtaatgctgagtgaaacagaagttgttattgtggaagagc

SEQ ID NO: 994376 - DNA, 120 bp, Artificial Sequence
  ENSG00000286791_3 (sequence is synthesized)
ttccagtcgattttgaaaaattcagagcatgggcaagacatagcagaaaaagaaattgtgattgattggagtatttattttcctggcttcctccatgtggagttgctaaagaccggctgc

SEQ ID NO: 994377 - DNA, 120 bp, Artificial Sequence
  ENSG00000286791_4 (sequence is synthesized)
atctttcagctgcaatcacagctcctgcctggcagccttctcggtctccaggttgtaggaacctctttgtcttatctttcaggcctgtgggtggcaataatgttctttattagtactagc

SEQ ID NO: 994378 - DNA, 120 bp, Artificial Sequence
  ENSG00000286791_5 (sequence is synthesized)
tttcttttaggggcataataaagtaggaaacacatttattgtcctccagagagggcctccaagtcaactctgcatgtctgacttgccccaaccattttatggagtgcactgaagtgtttt

SEQ ID NO: 994379 - DNA, 120 bp, Artificial Sequence
  ENSG00000286791_6 (sequence is synthesized)
aaggtcctgcttcccttccagaacagcaccttccttagagtgacttcttagtgctcctcaggctcaaagccagaccatgaagatgtcatattttccctaaaactgaaagctccttgaatc

SEQ ID NO: 994380 - DNA, 120 bp, Artificial Sequence
  ENSG00000286791_7 (sequence is synthesized)
aagggaacatggatatttgactcaactgctctagtcttgtagcagacaagacgctgcttccagctacagatcttgagaaggctgcctcgcacctatttaaaataacatgaaaatcagtag

SEQ ID NO: 994381 - DNA, 120 bp, Artificial Sequence
  ENSG00000286791_8 (sequence is synthesized)
ctcacattgcaaagccgaaagaaggaaatcctccaacttcagtcacttcagctgttcaaccaaatccttaatacatagggctcttttcatctctctgttcagctgtccactagaacagca

SEQ ID NO: 994382 - DNA, 79 bp, Artificial Sequence
  ENSG00000286791_9 (sequence is synthesized)
gtccccaaccatagactggggcaggttggggggatgggttcaggatgattcaagtaaattacatttattgcgcacttta

SEQ ID NO: 994383 - DNA, 64 bp, Artificial Sequence
  ENSG00000228697_0 (sequence is synthesized)
aatagtctccataatctaatctccagaatgcactaaaccaggagaagatccacctggcagaggc

SEQ ID NO: 994384 - DNA, 74 bp, Artificial Sequence
  ENSG00000228697_1 (sequence is synthesized)
tgcagaaaggggcacccgcctgatgccagccagagctctcctgtacgagagatgccctgcccagtgaggaggaa

SEQ ID NO: 994385 - DNA, 89 bp, Artificial Sequence
  ENSG00000228697_2 (sequence is synthesized)
aggaggaatctagagaagcagtctggccatagctttgctgcactgcgcacttctccttgctgccgccatgtgaagaagacatgacattt

SEQ ID NO: 994386 - DNA, 120 bp, Artificial Sequence
  ENSG00000228697_3 (sequence is synthesized)
attgtgtgtgggatgcattcatcaatagagctggaagcaccaaccaccataggagaggaaacttttagttacaagcacatgaataaataaaatcaaactcaactggaatgacgttcctga

SEQ ID NO: 994387 - DNA, 120 bp, Artificial Sequence
  ENSG00000228697_4 (sequence is synthesized)
ggatggagatacatttttttgttgacccatctaaacttgaacagcaagtgataatcagtctccaatcagaaagtcccagaatgctgagtgctctgtatttgtaatcccattgctcctatt

SEQ ID NO: 994388 - DNA, 120 bp, Artificial Sequence
  ENSG00000228697_5 (sequence is synthesized)
gagaagttagctgttggccaaactattcctactttcaaggacttataggagcagaaatcagaagactttactccacacacttcaggtggacatgtggacaaagccatcggagaacatgac

SEQ ID NO: 994389 - DNA, 120 bp, Artificial Sequence
  ENSG00000228697_6 (sequence is synthesized)
gaccaatttgagagagaaaaggaaaaagaacccagctacaagatgcacaagtagcaggccacagccaccaacatcagcagagcaattggaggccaggaagacaaggacacttctgaagag

SEQ ID NO: 994390 - DNA, 120 bp, Artificial Sequence
  ENSG00000228697_7 (sequence is synthesized)
actgaaaaaagcagaagacagtccaagtcactgcaaggttccaaggtctcttttttcattactgttacaagtaccaagtaagccaaaatccaccctactcttcaaaaccatcttgaagag

SEQ ID NO: 994391 - DNA, 120 bp, Artificial Sequence
  ENSG00000228697_8 (sequence is synthesized)
ttgcaggtcagggttgctgcatctgagcatgtttactcacaaaaggtgacagatgctcctcaacttacaatgagattacatcctgataaatgtgtcataagttgaaagtatcttataagt

SEQ ID NO: 994392 - DNA, 120 bp, Artificial Sequence
  ENSG00000228697_9 (sequence is synthesized)
cgaaaatgcatttactacagcctaacccactgaacattgtagcttaggctagcctaccttaaaacgtgatcaggacacttccctcagcctacatttgggcaaaatcacctaacacgaagc

SEQ ID NO: 994393 - DNA, 120 bp, Artificial Sequence
  ENSG00000228697_10 (sequence is synthesized)
ctattttataatagagcattgaatagctcaaataatttattgaatactgtacattacatagaatttgtgacagttttacaccatcattatgtcaaaaaatcattaagttgagccaccata

SEQ ID NO: 994394 - DNA, 120 bp, Artificial Sequence
  ENSG00000228697_11 (sequence is synthesized)
actcagggactgtctgtatttatatttttacttcacactaagctttgaaactgaaatttttgctcctcagcagatggggtttctgagaaagaccaaattagttatagagcactagctccc

SEQ ID NO: 994395 - DNA, 120 bp, Artificial Sequence
  ENSG00000228697_12 (sequence is synthesized)
agaggaagaaggagagaaaaagcaagaaaccattatcgctccctcatctgaactgcactgcgagtaagctggggcttccaccacagtgtcctggaagccatgtttgctgcccatttctgg

SEQ ID NO: 994396 - DNA, 120 bp, Artificial Sequence
  ENSG00000228697_13 (sequence is synthesized)
actctccagccacactggcctcctttccctttctcaaacctgctgtggttcctgccacttcaagataatctcttaacaatctattccttctgcctggaatgctcttcctcccacccaacc

SEQ ID NO: 994397 - DNA, 120 bp, Artificial Sequence
  ENSG00000228697_14 (sequence is synthesized)
ccgctctgcccagctaactccattctttggcccctgcatcactttcccaaggaagccatttctggacttccctgacccctgccttccatcttcactggcccagagttccctaccctatgg

SEQ ID NO: 994398 - DNA, 120 bp, Artificial Sequence
  ENSG00000228697_15 (sequence is synthesized)
tctcattgctccctcccaggcactgctgcctcccaggactcttccctgtcggtaatatagttctgtttgattgttcagttaattttgcctcccctgaagaccataagccatgttggcaat

SEQ ID NO: 994399 - DNA, 120 bp, Artificial Sequence
  ENSG00000228697_16 (sequence is synthesized)
gatggttttgctcaccattgcacctccagtgtctaaaaaccatgggcaggtcaattcatttttgttgagtaaaggaattgttcaataagtgcacaaataaattcacattaaaacttgtcc

SEQ ID NO: 994400 - DNA, 120 bp, Artificial Sequence
  ENSG00000228697_17 (sequence is synthesized)
gaacagaaatagtctccataatctaatctccagaatgcactaaaccaggagaagatccacctggataatttcgttgtcaaaggaatggaagaatattaaggagaacaagtcctcatctct

SEQ ID NO: 994401 - DNA, 73 bp, Artificial Sequence
  ENSG00000228697_18 (sequence is synthesized)
atccccatataacaaatctgcacatgggacccctgaatgtaaaattaaagtttaaactattaaaaaaagaaaa

SEQ ID NO: 994402 - DNA, 120 bp, Artificial Sequence
  ENSG00000228697_19 (sequence is synthesized)
aaatagtctccataatctaatctccagaatgcactaaaccaggagaagatccacctggaatggaagaatattaaggagaacaagtcctcatctctccaaagacccttcatccttcatttc

SEQ ID NO: 994403 - DNA, 120 bp, Artificial Sequence
  ENSG00000228697_20 (sequence is synthesized)
gctttgctgcactgcggtcatgacattttgagcacaattgtgtgtgggatgcattcatcaatagagctggaagcaccaaccaccataggagaggccagcaagaattcctgtggatgatgg

SEQ ID NO: 994404 - DNA, 120 bp, Artificial Sequence
  ENSG00000228697_21 (sequence is synthesized)
tagtagctccccaaaggtttaaacataaagtcaccaaatgacctagatattccactcctaggtatacggccaagagaaatggaagtatatatccacacaaaaatttgcatacaattattc

SEQ ID NO: 994405 - DNA, 120 bp, Artificial Sequence
  ENSG00000228697_22 (sequence is synthesized)
atagcagcatcattcataaaagccaaaagtgtgaacgacccaaatgtccatcaactgatgaattgttaaacaaaatgtggtcctatccatgcaatggaatattactcagcaatagaaagg

SEQ ID NO: 994406 - DNA, 120 bp, Artificial Sequence
  ENSG00000228697_23 (sequence is synthesized)
aatgaagttctgatgcatgctgcaacatggatgaaccctgaaaatattataccaagtgaaagaagcctgacataaaatgccacatacagtatgattccatgcgtgtaaaatgtctacaat

SEQ ID NO: 994407 - DNA, 120 bp, Artificial Sequence
  ENSG00000228697_24 (sequence is synthesized)
agatcaatctatagagacagaaagtagattaatggttgccaggaattgggggtgagagggattagagaatgactgctaataggtagatttccttttggaatgatgaaatgttcccaaatc

SEQ ID NO: 994408 - DNA, 120 bp, Artificial Sequence
  ENSG00000228697_25 (sequence is synthesized)
aattgtggtgatggtcgcacaactctttgaatatgttaaaatctactgaactctatactttaaatgggtgaaatgttacatgaattatgtctccaaaataaagcatacttacctatgctt

SEQ ID NO: 994409 - DNA, 120 bp, Artificial Sequence
  ENSG00000228697_26 (sequence is synthesized)
tttgctgcactgcggtgagttccacccagtacaaacttcctggcagcttccttaacactgggaggggaaaaccgcctactcaagcctcagtaatcttttgtattattcttaagaacaatt

SEQ ID NO: 994410 - DNA, 120 bp, Artificial Sequence
  ENSG00000228697_27 (sequence is synthesized)
taaaaaactactactcatatttgtttagtgcttttccgtttatacaacattttccatccattttcttgtttggtacttacaacaatcctgtgagataagtaagatgagtattcttttcta

SEQ ID NO: 994411 - DNA, 120 bp, Artificial Sequence
  ENSG00000228697_28 (sequence is synthesized)
atatgaacaaatcactattcatctgtcttttttaaaaactgaagtatcttagtaaattgcaagcaacatgtcattttcccttattatacctaaaaaattaataattatctaatatcatct

SEQ ID NO: 994412 - DNA, 120 bp, Artificial Sequence
  ENSG00000228697_29 (sequence is synthesized)
cgtctataattcataatcaaatatccaccaacagtaacatgaatgttactttctcattttacagatgttacctttttgacataaccaagtaaaccaacaggcttgaagacacaccgatca

SEQ ID NO: 994413 - DNA, 120 bp, Artificial Sequence
  ENSG00000228697_30 (sequence is synthesized)
taaaaatgaatctaagaacccaggtgtaatcttctgatttctaggtcccagcgcttctcatttttaagcagagtttcatagaaatactctattcaaacaaacaaacaaaaaaaacagaaa

SEQ ID NO: 994414 - DNA, 120 bp, Artificial Sequence
  ENSG00000228697_31 (sequence is synthesized)
agccacagacctctgtaacatttaagcagaggtgtcctcttagtaaaatgtaaaatacatgtgtgaaatctgtttccaacaagctcttatgttatttttagtggcccttctcatcacctg

SEQ ID NO: 994415 - DNA, 120 bp, Artificial Sequence
  ENSG00000228697_32 (sequence is synthesized)
tggtgttttgttttgccctccctcaacccatttctattgcccccatccatactttagccaacaccattctctgatatgctgggttgcctgagtgcctcaccatgtctacctagcccatgt

SEQ ID NO: 994416 - DNA, 120 bp, Artificial Sequence
  ENSG00000228692_0 (sequence is synthesized)
aattttatatgcctgttacatttgtggtaggagtttagctagattttgctggaaaactacagcttatttataaagtacacacattattttaatcgtacaaaaatgtgtaaaatatcttac

SEQ ID NO: 994417 - DNA, 120 bp, Artificial Sequence
  ENSG00000228692_1 (sequence is synthesized)
tcaccatgtaacatgggcaccccaaagtacatgagtttcttaagaagacatatgaaatcttcaaggctataaagaggacaggaaatgactcacttcccaatgactccaggtagattaaat

SEQ ID NO: 994418 - DNA, 73 bp, Artificial Sequence
  ENSG00000228692_2 (sequence is synthesized)
aaatgactcacttcccaatgactccaggtagattaaatacgcccccccttttttttaagacagccattgcaac

SEQ ID NO: 994419 - DNA, 82 bp, Artificial Sequence
  ENSG00000228692_3 (sequence is synthesized)
ccaggcctcccaaagtgccgtcttattatttaaaagtgtgttggggtggtggtggggccttattcctaatacttaaaatcat

SEQ ID NO: 994420 - DNA, 120 bp, Artificial Sequence
  ENSG00000268266_0 (sequence is synthesized)
ggttaaaagcccagagaagaccgccaggggcgcgtggaaatggtgtccctcgtctccaaggcccagacggagcttagcttcctcttgaaggagccatatctgtatttctggtgaacgtcg

SEQ ID NO: 994421 - DNA, 120 bp, Artificial Sequence
  ENSG00000268266_1 (sequence is synthesized)
tgtttgacatcaaaggaatgtttagagacatgatttcagccttccttacgcagagaatgctcatcaaaaaataaaatggacacaccatacactgacgtcactcagatttctatggctgga

SEQ ID NO: 994422 - DNA, 120 bp, Artificial Sequence
  ENSG00000268266_2 (sequence is synthesized)
ctgatgctccagagttagtttggcgagcctcagcattttctgtcaggcacaagaaagaaaagactccagacaccatgatgtggaacgtggagtggggatgtttggtggccttgaatgcct

SEQ ID NO: 994423 - DNA, 82 bp, Artificial Sequence
  ENSG00000268266_3 (sequence is synthesized)
tggaacgtggagtggggatgtttggtggccttgaatgcctattccatattgttatgcaggctaaggcctaggcaggtagatg

SEQ ID NO: 994424 - DNA, 120 bp, Artificial Sequence
  ENSG00000264475_0 (sequence is synthesized)
gacacaaactgaaggactggcaaaatgttgtgatgactgcaattcactgaaacgaacatggtccagtgttttaaaatccccaaatctcaagggaacatcagggcaactggggctcatctc

SEQ ID NO: 994425 - DNA, 120 bp, Artificial Sequence
  ENSG00000264475_1 (sequence is synthesized)
atatttctctccatcctcctatgtggacttgaagcaagccagcaaacagcctgacatgataccctggatggatgagtgtgccctgttgacacagcttcgaagaacatcaaccatatggaa

SEQ ID NO: 994426 - DNA, 120 bp, Artificial Sequence
  ENSG00000264475_2 (sequence is synthesized)
cacccatctccctgaagacacctgggaatgatgaaagtgacaagaaatggcaccagggactccttctgtataccacttgccttcacctggtggaaatagtgagattagaatgtaaatgtg

SEQ ID NO: 994427 - DNA, 120 bp, Artificial Sequence
  ENSG00000264475_3 (sequence is synthesized)
ttcagaaagaagccagactttcccaaaggtcatcagaagaccacagctcagcagcctgtagacactcttcaatggttctgggctcacctacctgtcttaagtccagagtgattgtgaccc

SEQ ID NO: 994428 - DNA, 120 bp, Artificial Sequence
  ENSG00000264475_4 (sequence is synthesized)
agtgatattctctcccattctgaatgctgggactttgccaccagttattggtgccatctatggcatgtgatattggatggcgttctgttgaaagaaaataaaaaacatgaattcctctcg

SEQ ID NO: 994429 - DNA, 120 bp, Artificial Sequence
  ENSG00000226581_0 (sequence is synthesized)
ggtcccccgcccgttggtggcaaggcggctggactggaatcccagcaggcgacatgcgaggaggcgggcagcccaggagggttggacacggcaatgtggacctcgccgcttccacaacga

SEQ ID NO: 994430 - DNA, 120 bp, Artificial Sequence
  ENSG00000226581_1 (sequence is synthesized)
tgctggctactgatcgcgtgcacttccttgccaaagaaaagaaattaatgttatgactggatgaagacaattgtgaagaaactgcactttgaggttgtctatctctgtattctgatggaa

SEQ ID NO: 994431 - DNA, 120 bp, Artificial Sequence
  ENSG00000226581_2 (sequence is synthesized)
aagcgtggagtttagaagcactgctcactccttcagtttctaacaagtttgagactatggttaggtggtgaggaaggcaggctcagcacccaagccttggggagacgcagaaagggccca

SEQ ID NO: 994432 - DNA, 120 bp, Artificial Sequence
  ENSG00000226581_3 (sequence is synthesized)
tcccaggcactcaggtggagcagctggctggagaaagatttcagaaaggtgtgtgcctggggcacccaaaggcatgaccttcctttctccttggcataggccttacaacactgaggaaag

SEQ ID NO: 994433 - DNA, 120 bp, Artificial Sequence
  ENSG00000226581_4 (sequence is synthesized)
cccctatggatcgaaaagattgtccaaatagaagcttatataggatgttaaaaagtaaactgacaggactatgaaaattgtctcccaacagagtacagcttttttttttttttttttttt

SEQ ID NO: 994434 - DNA, 65 bp, Artificial Sequence
  ENSG00000226581_5 (sequence is synthesized)
ctatctcagccactcgagtagttgggactacaagtgcgtgccaccatgcttggctaattttttgt

SEQ ID NO: 994435 - DNA, 120 bp, Artificial Sequence
  ENSG00000226581_6 (sequence is synthesized)
gccactgtgcccggcccattttgttaaaaatacagaaatattggtaaaaccattatcaaaagcattgtggagctttctaaaaacttacaataccacattatccagcaaatccacttccag

SEQ ID NO: 994436 - DNA, 120 bp, Artificial Sequence
  ENSG00000226581_7 (sequence is synthesized)
atatataaccaaaggaaataaaactagtatctagaagagacatctgtgctcccatatttattgcagaattatttacaatgacagatgtgcaaacaacctaagtattaataaatgaatgga

SEQ ID NO: 994437 - DNA, 120 bp, Artificial Sequence
  ENSG00000226581_8 (sequence is synthesized)
ctggtataggtttccctcaaaacactgctttcaccagtttccgtggtctgtcctagagaacgttccatgtggatttgagaagaatatatattctcatgttggatgcagtgctgtgcatat

SEQ ID NO: 994438 - DNA, 120 bp, Artificial Sequence
  ENSG00000226581_9 (sequence is synthesized)
gtttgttaggtttagttgttttatgttgttgttcatgttttctattttttatcttctgtctacttgttctatccattaatataagtgaagcattaaagtctccaactattactgttgaat

SEQ ID NO: 994439 - DNA, 120 bp, Artificial Sequence
  ENSG00000226581_10 (sequence is synthesized)
tcagtattctcatagcaatttaaatttaaatgttcaaattacctctccttccctggttcagaataagtatgttgtttttctgtttgtaaaatttctgactctgggttttttcagttgggc

SEQ ID NO: 994440 - DNA, 120 bp, Artificial Sequence
  ENSG00000226581_11 (sequence is synthesized)
tttagagaggataactcccatatcgctgttgtatctatttctcttcagcatctggctgcatgtgataaagatcatagaattagacctggtcctgtatgtattttgggacaaaaattcaaa

SEQ ID NO: 994441 - DNA, 120 bp, Artificial Sequence
  ENSG00000226581_12 (sequence is synthesized)
aattcaaagtaatcaactcaagataggagtctacaactttaattcttaataaaagatttcctttgatttccccacatctttatgattcctagtgtagcaggacaagccacagacaaaacc

SEQ ID NO: 994442 - DNA, 67 bp, Artificial Sequence
  ENSG00000226581_13 (sequence is synthesized)
agatcacaacaaaacaggacagggattttcacagtgctttctatacaatgacaatgtctgtgatcta

SEQ ID NO: 994443 - DNA, 85 bp, Artificial Sequence
  ENSG00000226581_14 (sequence is synthesized)
tgcactggtaattagatcacaacaaaacaggacagggattttcacagtgctttctatacaatgacaatgtctgtggaacttaaac

SEQ ID NO: 994444 - DNA, 89 bp, Artificial Sequence
  ENSG00000226581_15 (sequence is synthesized)
gcagaaattgggcatgtagaagaaattcacccatgggtgaagcatgtggttctgttgaataatgttttgttggggatttccacatcgag

SEQ ID NO: 994445 - DNA, 120 bp, Artificial Sequence
  ENSG00000226581_16 (sequence is synthesized)
ttctgttgaataatgttttgttggggatttccacatcgagtttcatgaggcatactgttagacagggtttttttggtactgtctttccctgattctattggagagtaatactagcttcct

SEQ ID NO: 994446 - DNA, 120 bp, Artificial Sequence
  ENSG00000226581_17 (sequence is synthesized)
aaaatatattgggaaatgttctctcttcttctacttttggacaatattaaactcataatgacaagttttcttgtgaaaatgctctgaaaaaaatgtagggtgggctgggtgcagtggctc

SEQ ID NO: 994447 - DNA, 120 bp, Artificial Sequence
  ENSG00000226581_18 (sequence is synthesized)
gtctccaagtttgcttgcaaagcttctgctgaaaaatccactgataccattataaaggtttccttctatgtgaagaatttatctcttgctgttttcaagatttgtgctttatctttgtat

SEQ ID NO: 994448 - DNA, 120 bp, Artificial Sequence
  ENSG00000226581_19 (sequence is synthesized)
tttgacaatcataatgtgtccaagggcaatctttattaggttcttcttgctgaagatatttggagcttcataaaacttgatgttcatattcttttctagattcagaaagttttaagacat

SEQ ID NO: 994449 - DNA, 120 bp, Artificial Sequence
  ENSG00000226581_20 (sequence is synthesized)
gtaaatagcctgtctttgagtttgctgaatttttcttctttattattgattctcctgttaaacatttctattatattttttcagttctgccactgtttatttcagttccaggatttctgt

SEQ ID NO: 994450 - DNA, 120 bp, Artificial Sequence
  ENSG00000226581_21 (sequence is synthesized)
ttgattttttttttacttgctcaatctctttatttagtggcacacatagaatgaatgaatgagctcttagttgtgccatacttagtaagtctgatcttgcttatagaaataggatcttaa

SEQ ID NO: 994451 - DNA, 120 bp, Artificial Sequence
  ENSG00000226581_22 (sequence is synthesized)
taattcattctcagaacactttaaaacccaagacacagtttttctttcaaggatgtggaaagcattcctcattcaaatctgatttatggttttataaagtatgtacctcatttttattag

SEQ ID NO: 994452 - DNA, 120 bp, Artificial Sequence
  ENSG00000226581_23 (sequence is synthesized)
tcattatcttcatgctagattctaatattctttttgatggtggcgtgttcaatgatagaaacttacagagagaaaattccttccttctcaattttaaacaaaaattttaaaagcaacatt

SEQ ID NO: 994453 - DNA, 120 bp, Artificial Sequence
  ENSG00000226581_24 (sequence is synthesized)
tttgatgtggtaggaagacatttatatgacatacacagctactgccttaaactggcaaaaataacaaaagaaaaaattgttatttaacctttaaataatgagtatctatttgctacaaat

SEQ ID NO: 994454 - DNA, 120 bp, Artificial Sequence
  ENSG00000226581_25 (sequence is synthesized)
ctacaaatattttaaatatatttcctctactgcaataaaaattaagataaccctctgtttaacagcttttgaagatgttaattttataaggaaataaaaaagattgacttgcctcctgaa

SEQ ID NO: 994455 - DNA, 120 bp, Artificial Sequence
  ENSG00000226581_26 (sequence is synthesized)
gattctgtcctgctgcgtccgcactgtacagaactgacgctgtgcctacgcccgtttcagaagcgtggagtacttaagagttaatctaaaaaagcaaatataaaaatggattcaaaaaaa

SEQ ID NO: 994456 - DNA, 120 bp, Artificial Sequence
  ENSG00000226581_27 (sequence is synthesized)
agcgttactatggcaaccctgacaggtttgtgagcagcccccggtcccctgccgctccgtgagaaatcaaacttcaggcactgacgaagcatgaagccagcatcttaggaagaggtagtg

SEQ ID NO: 994457 - DNA, 120 bp, Artificial Sequence
  ENSG00000226581_28 (sequence is synthesized)
agggtatgcttttttgatatcattccagcatctgcaccgtgttttatatttcggactatgctgcatttcatcacaataaattcctctagctgtttggggtgacataaactactgaaagag

SEQ ID NO: 994458 - DNA, 120 bp, Artificial Sequence
  ENSG00000226581_29 (sequence is synthesized)
tgactccagaaagtgctgccatcaatatctgcaacttgtagggtgtttggatcaatgaggtgaatggcactggttattcgaatacacacacaaatctggttcatatttcccaggctttgt

SEQ ID NO: 994459 - DNA, 120 bp, Artificial Sequence
  ENSG00000226581_30 (sequence is synthesized)
cagaaaaagtgcttttgtaattgtatgtattactatggacatcctgagagatcagtctttgggatgcgttgtatctacagggaactgtatactgaataaattcgaccatcttctgagcat

SEQ ID NO: 994460 - DNA, 120 bp, Artificial Sequence
  ENSG00000226581_31 (sequence is synthesized)
gtggttttgaggaataataaaaatccagaccatcatgaatctctttgatacgaagtgtattctgatgccttccatatttcagaattaactgttccagatagtagaaagcttttttgtgca

SEQ ID NO: 994461 - DNA, 120 bp, Artificial Sequence
  ENSG00000226581_32 (sequence is synthesized)
aagtcttttgcctcacttgaatcacagccctccagaaacccttagcttctactctatggcaatctccacatatttgggactgaacagcataatccaccacaaacacttgttgaaggacag

SEQ ID NO: 994462 - DNA, 120 bp, Artificial Sequence
  ENSG00000226581_33 (sequence is synthesized)
caccattcatcacctctttctggagtcagtttaactttaaatctcttagaatggggctcagtccaaacaaagcctgcattcacaagccgttccttactcagaggggctttgaacacaaag

SEQ ID NO: 994463 - DNA, 120 bp, Artificial Sequence
  ENSG00000226581_34 (sequence is synthesized)
caagaagttccctggattctaaagcacaccgtatccaagttcctggtggctgaaaatacctttgacattgtttgtagaacaaaagtgagacttgttttggaatatcttggctgatgccca

SEQ ID NO: 994464 - DNA, 120 bp, Artificial Sequence
  ENSG00000226587_0 (sequence is synthesized)
acctggtctgtggaaaatcaaactctgggcacaagtcatgaagccagcacgttggggagacaccgtgtcacaatgacaaggaggtgccgggggtaatggtgacagcctggagcacactcc

SEQ ID NO: 994465 - DNA, 120 bp, Artificial Sequence
  ENSG00000226587_1 (sequence is synthesized)
ggaggcaggtggtgcagatggagagccctcatccctctatgcatgtagaagaataccttacacttgaagtcattctgaaaatactgtgactcaaagaggtccagagatgccaagaagctc

SEQ ID NO: 994466 - DNA, 120 bp, Artificial Sequence
  ENSG00000226587_2 (sequence is synthesized)
gacaggtgatgagatttctatgaagaaacagataccctgcaaacctgttggaaggaaccatattaggttttcttggccactacctgtgctgctaagttgaagggcaatgtcttttaggat

SEQ ID NO: 994467 - DNA, 120 bp, Artificial Sequence
  ENSG00000226587_3 (sequence is synthesized)
atttggtcacccctctatttatacacagctccgaagaaacccagcactggacaaattctctcaaacttttccccaagcttggccaccaatctgttttagatgaagactccatttggagga

SEQ ID NO: 994468 - DNA, 120 bp, Artificial Sequence
  ENSG00000247877_0 (sequence is synthesized)
agcggtcaaggatgcgtattaagaaaataactagaagtggccgcatgatgtacctctcaccaatgagatgcctgtcaagggtatacgtgggtcttttgaatctactggtaattgctttat

SEQ ID NO: 994469 - DNA, 120 bp, Artificial Sequence
  ENSG00000247877_1 (sequence is synthesized)
gaatctgggagctccagacctaggatcttattcactgatttgaagagttcatgcatcgagccagtaggctgtgcacatgggtaaaaactggctgcggctaaacaggtattgtaaatgaag

SEQ ID NO: 994470 - DNA, 120 bp, Artificial Sequence
  ENSG00000247877_2 (sequence is synthesized)
tggacttcgtggtttctttatccaccaataaattaaaagaaaacttacaggaaatggacacagccctggataaatgcaactactaagattcaaccaagaagtaaaaatcctgaacacacc

SEQ ID NO: 994471 - DNA, 120 bp, Artificial Sequence
  ENSG00000247877_3 (sequence is synthesized)
aatacaactaatggatttaatcagtaataaaaagtctctcaccaagaaacagcccaggactaaatagtttcactgctgaattctacttaactcttaaagaagaattaatattacctcttc

SEQ ID NO: 994472 - DNA, 120 bp, Artificial Sequence
  ENSG00000247877_4 (sequence is synthesized)
taaaactattccaaaacactgaagcagagagaattctttctaactcattctgtgaggtcaacataaccatgattccaaaactagataaaaacaccaccaaaaaaggaaaactacaggcca

SEQ ID NO: 994473 - DNA, 88 bp, Artificial Sequence
  ENSG00000247877_5 (sequence is synthesized)
ctagataaaaacaccaccaaaaaaggaaaactacaggccaacatccctaataaacatacaggcaaaaattctcaacaaaatattacca

SEQ ID NO: 994474 - DNA, 120 bp, Artificial Sequence
  ENSG00000247877_6 (sequence is synthesized)
atatgcaaataagtaaatgtgatacatcacatcaaccagatgaaggacaaaaagtatatgatcatttcaacaggtgtggaaaaacaattgatacaatttaacaatgatatatgataaaag

SEQ ID NO: 994475 - DNA, 120 bp, Artificial Sequence
  ENSG00000247877_7 (sequence is synthesized)
ctctaaataaattgggtttagaaggaaagtagctcagggctatgaatgtcacatatgacaaacccacagctaacctagcaaacgggggaaagctgaaagcttttcctatgagaactggaa

SEQ ID NO: 994476 - DNA, 120 bp, Artificial Sequence
  ENSG00000247877_8 (sequence is synthesized)
gaagataagaatccccactgtcaccacttctattcaacatagtactggcagtcctacccagagaaagaaataaagggaatccgtgctagaaagaaagaagtcaatttatctctgtttgca

SEQ ID NO: 994477 - DNA, 120 bp, Artificial Sequence
  ENSG00000247877_9 (sequence is synthesized)
gatgatataaacttgtgtatacaaaaacctaaagactctatcaaaaactcttagacctgacaagaaattcagcaaagtttaaggatacaaaatcaacatatgataattggtactatttct

SEQ ID NO: 994478 - DNA, 120 bp, Artificial Sequence
  ENSG00000247877_10 (sequence is synthesized)
atacatgaacaacaagctagctgaaaaagaattattttttctgaatctggttcctgctgttgcatttcttgttaaagtattattcatgctctcttattctacttagatgatcattgttta

SEQ ID NO: 994479 - DNA, 120 bp, Artificial Sequence
  ENSG00000247877_11 (sequence is synthesized)
catttattcaatttatcatttcctttctgttatttagcactgcttatttaaaattataaatttgagtcaactatttcacaagataatattcaactatatttattacagtgcagaacatgg

SEQ ID NO: 994480 - DNA, 120 bp, Artificial Sequence
  ENSG00000247877_12 (sequence is synthesized)
aaaggttcagaattttaaaaggcatatgtcttaaaggagcaaaatttaattatactctgaatattaagtacatttgagagatgtatcttcaagtttaaagttctttttctggattctaca

SEQ ID NO: 994481 - DNA, 120 bp, Artificial Sequence
  ENSG00000247877_13 (sequence is synthesized)
gaggacgtgaccgttttggaagcattgttcttttcactgttagtgaggagcggtcaaggatgcgtattaagaaagatcttattcactgatttgaagagttcatgcatcgagccagtaggc

SEQ ID NO: 994482 - DNA, 120 bp, Artificial Sequence
  ENSG00000247877_14 (sequence is synthesized)
tgtgcacatgggtaaaaactggctgcggctaaacaggcctcatcggagcacaaagttccaagtgacttcaaagggttttctgtacttggagcagctctatgggacatggaagatgagaaa

SEQ ID NO: 994483 - DNA, 120 bp, Artificial Sequence
  ENSG00000247877_15 (sequence is synthesized)
tgaaccgacaccagaggtgcaatgaaaggtaaaactcatagcatcaccacagctcttaggtaagtggcagcctaaattactgcatctggatatatgaatcttatgggttcatgatggaaa

SEQ ID NO: 994484 - DNA, 120 bp, Artificial Sequence
  ENSG00000247877_16 (sequence is synthesized)
agatgacaagcattaaggccaaaaataaatctgagtttgttcactggatgcaggaaaagttttcctaaccaaataatgtgggtaacatttcattattagcatggaaatatgtccactttc

SEQ ID NO: 994485 - DNA, 120 bp, Artificial Sequence
  ENSG00000247877_17 (sequence is synthesized)
atgtttagagaaggaaatagtaaatgaatgatcaaacataaaagcaaaatacagcattcacagtaggtatccaatgtaacatgctatttagataaaaacagtcccttcaaagtccagtat

SEQ ID NO: 994486 - DNA, 120 bp, Artificial Sequence
  ENSG00000247877_18 (sequence is synthesized)
gtttttaaaagcctgatatttacagttgtatgatttctagggaaattgagaaattaaatatatatccagcaacatacagaagaaactctgtatatccatttgtaccagcctctcttctct

SEQ ID NO: 994487 - DNA, 120 bp, Artificial Sequence
  ENSG00000247877_19 (sequence is synthesized)
ctaaaagattggccttcggaaagtgaaggaagattggattcagacactatgtcctcttacacaaattgttgcaataacttgtcataaacaggaaaatataaaattaaatgcaatgtttat

SEQ ID NO: 994488 - DNA, 120 bp, Artificial Sequence
  ENSG00000247877_20 (sequence is synthesized)
tgcaatgtttatatacatataaatgttaaaaagagcacaatattacaaaattaggtggtttatattttaggtagattgtatgtgtacttgataaaatattataaaatttgcatttttgtt

SEQ ID NO: 994489 - DNA, 120 bp, Artificial Sequence
  ENSG00000247877_21 (sequence is synthesized)
attttttctccaggatttaagatgtttattctctcttaatttaagtatcaatttaagtatttgcacttgtggactttatttctttttattttcatgaagattcccaccttacaaatatca

SEQ ID NO: 994490 - DNA, 120 bp, Artificial Sequence
  ENSG00000247877_22 (sequence is synthesized)
ctttcagggttcttagggatcatattattattttacaatttattgaaaatggcatgaggttagatatcatcagattcttttggaaagttattataaacaagaacatgtttccctttttag

SEQ ID NO: 994491 - DNA, 120 bp, Artificial Sequence
  ENSG00000247877_23 (sequence is synthesized)
ctgaatgacagtatatctgtttagcatgaatacttaaaagcagcttgaatttcattgttcatgctcatcatttacagttttctatagcaatattattttttctggaatgtgccttagaat

SEQ ID NO: 994492 - DNA, 120 bp, Artificial Sequence
  ENSG00000247877_24 (sequence is synthesized)
gcagacaataaaggctgaatgagagaaatgttaggctaggcttaacaaaacacattgcaattattgtttcttcaattatgtctaaaatgattgcttataaaacaaaattacatgataata

SEQ ID NO: 994493 - DNA, 120 bp, Artificial Sequence
  ENSG00000247877_25 (sequence is synthesized)
ttatcttaaaaccagctatattcaataattgtcttctcactatctttctaatgtgttagcactcattctatacagtttgtattaatatatcttatactctacctctatccctcttatcag

SEQ ID NO: 994494 - DNA, 120 bp, Artificial Sequence
  ENSG00000247877_26 (sequence is synthesized)
gcttcactttaactagatatttaggatattatctttacctgggaatgaaattatgtgattggaggaagagattccctataattggcaataggtttcctcctctaaaatgttaggtctttt

SEQ ID NO: 994495 - DNA, 120 bp, Artificial Sequence
  ENSG00000247877_27 (sequence is synthesized)
tgttttcttcttcttctttattctgggatgtggatgtgacctcttggtactgattgaaatttatagtgttgtataccactgtcaactttcccaatgtctgacagcttaacagggccccaa

SEQ ID NO: 994496 - DNA, 120 bp, Artificial Sequence
  ENSG00000247877_28 (sequence is synthesized)
ttgcagccactgctgcccaccttgttcttcagcttcacttcttgaaacaaccttctccacggtttcatgagagcatctgcttttcactgcatggtatttgactccaagattcacacctgc

SEQ ID NO: 994497 - DNA, 120 bp, Artificial Sequence
  ENSG00000247877_29 (sequence is synthesized)
agtgcgcacgcgcacttgtgtaaaaagcgaggacgtgaccgttttggaagcattgttcttttcactgttagtgaggagcggtcaaggatgcgtattaagaaaataactagaagtggccgc

SEQ ID NO: 994498 - DNA, 120 bp, Artificial Sequence
  ENSG00000247877_30 (sequence is synthesized)
atgatgtacctctcaccaatgagatgcctgtcaagggtatacgtgggtcttttgagatcttattcactgatttgaagagttcatgcatcgagccagtaggctgtgcacatgggtaaaaac

SEQ ID NO: 994499 - DNA, 120 bp, Artificial Sequence
  ENSG00000228521_0 (sequence is synthesized)
caggcgctctgcctccagcaagaggtggctctgggggacagctctccatgggggacagctctccatgggcttggacacccgtgctcccagacaacagcttctgccgtgctcccagatgag

SEQ ID NO: 994500 - DNA, 120 bp, Artificial Sequence
  ENSG00000228521_1 (sequence is synthesized)
gccctgcctatcgggaggccacactcatgcccaagacttctaggcctcagcagtgctcccaagggtgtggcaccaggtgaagcagggcaggtggaatgcaggagcaggcaggaaaaccca

SEQ ID NO: 994501 - DNA, 120 bp, Artificial Sequence
  ENSG00000228521_2 (sequence is synthesized)
gctcttccaagtcagacactggagagctctgcagacacgaagacaatgccatgcctccccctaaatgctttttgttttggaaaatatagctgttcgtcataaggtatttacgttgacgta

SEQ ID NO: 994502 - DNA, 120 bp, Artificial Sequence
  ENSG00000228527_0 (sequence is synthesized)
gttgtgggagccattggccgagactggagagaggagacaaggagacggattccctttgtgtgttcccagcacctaccaacataaagactgaaagctgttggactcatgctcaaaagaatc

SEQ ID NO: 994503 - DNA, 120 bp, Artificial Sequence
  ENSG00000228527_1 (sequence is synthesized)
atctggtaacatgggactgtagtctcagaatggaaaaacagctgacctttaaagataagatggcgtctctggcagccaggctggaacgcggtgggtgatctcggctcactgcaacctttg

SEQ ID NO: 994504 - DNA, 120 bp, Artificial Sequence
  ENSG00000228526_0 (sequence is synthesized)
gacccctcccccgcaccgacgtgattcggatcgcgcggtgctggcgccgccttcatgcgccctgcctggcccccacctggtcctctttccttttcaggtggaggagatgccgctgtcccg

SEQ ID NO: 994505 - DNA, 120 bp, Artificial Sequence
  ENSG00000228526_1 (sequence is synthesized)
tcggtctggggacagcccagctccccggatcccgggctggagagacgcgtcgcggccccggggcctggtggcacgagcaggaaggaggacccggcggcgggctctgcctgggcttgcctg

SEQ ID NO: 994506 - DNA, 120 bp, Artificial Sequence
  ENSG00000228526_2 (sequence is synthesized)
ggcttgttccgagccgggctgcttctcggtgaccacgcagatcgggggcatttggagattttgcgggagtcctgcagccaagctccggggcaggagaggcctggaagcctgcactacctg

SEQ ID NO: 994507 - DNA, 120 bp, Artificial Sequence
  ENSG00000228526_3 (sequence is synthesized)
ctcgccccgtcccagcatgcacccaggtgctggggagaggcaggacaggcctgtcccccgagtcccctccggatgccgtggaccggccagctgtgagtgtttctttggcagtgtcttagc

SEQ ID NO: 994508 - DNA, 120 bp, Artificial Sequence
  ENSG00000228526_4 (sequence is synthesized)
tggttgttgtgagcaatagtaaggaagcaatcagcaagtatactgccctagaagtgctgcacgttgtggggcccaagagggaagatgaagcgagagatgcccagaccagtgggagacgcc

SEQ ID NO: 994509 - DNA, 120 bp, Artificial Sequence
  ENSG00000228526_5 (sequence is synthesized)
aggacttcggaagctcttctgcgccacggtgggtggtgagggcggctgggaaagtgagctccagggccccaggagcagcctgctcgtgggtgcggaaggaaaaaggcacaggggcttggt

SEQ ID NO: 994510 - DNA, 120 bp, Artificial Sequence
  ENSG00000228526_6 (sequence is synthesized)
gtgggcggcttttggctgggagaagtttgcacgtagggagaatagtagccagtgtttgcagagcacttactatgcaggaaggcctgtcctaagtattgtaagtgtattacatcatgtaca

SEQ ID NO: 994511 - DNA, 120 bp, Artificial Sequence
  ENSG00000228526_7 (sequence is synthesized)
agtgtctgtgattaaccccgtcttgcagagaaggaaacaaaagtacaaacagaaaatgtaactaagcatgcaattaataaaaagggaccaggttttgaacgcgagcaatctggctcaaga

SEQ ID NO: 994512 - DNA, 120 bp, Artificial Sequence
  ENSG00000228526_8 (sequence is synthesized)
atctgcgcccaaccaccggctcctgttcttagagatgaacgtggagtcctggagactgctcaacattgtgacttgactgtgagcgtacgcgctccctgtccccaggagacagatttccag

SEQ ID NO: 994513 - DNA, 120 bp, Artificial Sequence
  ENSG00000228526_9 (sequence is synthesized)
tgcaatcatagaaagtgcctgtgtgggcttcgggagatgtgtctgccttggggagaattttccttttcagctagagccaggcccaggatgttgacgtcagtgagacgctggtgacgttct

SEQ ID NO: 994514 - DNA, 120 bp, Artificial Sequence
  ENSG00000228526_10 (sequence is synthesized)
ctgctccagtggctgatgagaaaagttcctccaagccagctcagttgagaagaattaagttctctgggtcccactggcttcacctacagatgccaactttgaggccagtgaactgtgagg

SEQ ID NO: 994515 - DNA, 120 bp, Artificial Sequence
  ENSG00000228526_11 (sequence is synthesized)
ccagctgggctgattgccatggcaacaggaattggaccaaagtcaccggaggatggagagggaagacacagtggtggcttccccaggtcttggaccacaaggcacagccgtggcctccag

SEQ ID NO: 994516 - DNA, 120 bp, Artificial Sequence
  ENSG00000228526_12 (sequence is synthesized)
gaaccctgagataacccgttagtgggtcctgcactccaacagagctcatgcaatcagcctctggtcctcaccctcctcccattggtgtcgttgtgctctctaacattgacattgagcagt

SEQ ID NO: 994517 - DNA, 120 bp, Artificial Sequence
  ENSG00000228526_13 (sequence is synthesized)
gagtgctccagatcttgttccactgattttttccactgttctccagtctagcactttctgaaattcatccaagcctaagaggtgacgccaaacgtaagtgtcttacacctcggaccccat

SEQ ID NO: 994518 - DNA, 120 bp, Artificial Sequence
  ENSG00000228526_14 (sequence is synthesized)
ggactaagacaagcctctggggtccatgtggcaccaaggatggggccttctagtacctttcacacaggccagggacagcacctgctgcgacccccacccccagcctctgctgcttctccc

SEQ ID NO: 994519 - DNA, 120 bp, Artificial Sequence
  ENSG00000228526_15 (sequence is synthesized)
gttgcccttccagccactgccctgggcacctcccctgctcccgcctccctgcctgggcccatctttctttgcacctcaccaattgcggggcttcctagtgctggaggggaagggagcctg

SEQ ID NO: 994520 - DNA, 120 bp, Artificial Sequence
  ENSG00000228526_16 (sequence is synthesized)
cttccattctcaccactctgaaagaagaccctgcagagaggttttctggaatttggagcctaaccttggccttgacacagtccagatgagaaggccgtcccccagttaagccagccctcc

SEQ ID NO: 994521 - DNA, 120 bp, Artificial Sequence
  ENSG00000228526_17 (sequence is synthesized)
tgctggagaggaaaccaggcagctggttgcttcagcaaaccccctccctatgggaattgtccttttcttcctcaaatagactggagtgcagaggacttgcttcagagagagcccctttgt

SEQ ID NO: 994522 - DNA, 120 bp, Artificial Sequence
  ENSG00000228526_18 (sequence is synthesized)
aacgcacattgcacgggccgtgccccatgcccactctgccacaaactcccctcagctgcccagccccgtggagccaggcgtgggctgaagtggggccaatgaaatgcctggaatgccagc

SEQ ID NO: 994523 - DNA, 120 bp, Artificial Sequence
  ENSG00000228526_19 (sequence is synthesized)
cgcagtgacaggccagcactcagatgcctctcgggagttctgaccgaagcagcactgaggactgcttcagagcagaagtctacgccattttccccagttctaggcagaagtaaagaatgt

SEQ ID NO: 994524 - DNA, 120 bp, Artificial Sequence
  ENSG00000228526_20 (sequence is synthesized)
ctctaccttctcccaaccagcaattgattcagagtcctgagcttttaaattaaagggacccctctgttgctttatgcagtagccagcttattcatttgagttcaggtgaaatcattttca

SEQ ID NO: 994525 - DNA, 120 bp, Artificial Sequence
  ENSG00000228526_21 (sequence is synthesized)
agtaacctcttcctatccagctttacttttagttatgctgacataaaaacaataaaaattgtcctcctcagagttcacctgtaaaagttcctggataattagtaaggaaacagaaagagc

SEQ ID NO: 994526 - DNA, 90 bp, Artificial Sequence
  ENSG00000228526_22 (sequence is synthesized)
gtaaaagttcctggataattagtaaggaaacagaaagagcagatagttgttgcttcagataaaagtgatgtctgggttgggcaggggagg

SEQ ID NO: 994527 - DNA, 87 bp, Artificial Sequence
  ENSG00000228526_23 (sequence is synthesized)
aggcatagtggcagcaggggatggcttgagcccaggaggcacagattgaagtgagctgagattgcgccactgtattccagcctaggt

SEQ ID NO: 994528 - DNA, 120 bp, Artificial Sequence
  ENSG00000228526_24 (sequence is synthesized)
gaagtgagctgagattgcgccactgtattccagcctaggtgacagagccagaccctgtctcaaattaaaaaaaactctttgtggtcatttaatttacttctgcattcttttttttttttt

SEQ ID NO: 994529 - DNA, 88 bp, Artificial Sequence
  ENSG00000228526_25 (sequence is synthesized)
gtggtcatttaatttacttctgcattcttttttttttttttttgaaatgggcagtggtaccatctcagctcactgcaacctctgcctt

SEQ ID NO: 994530 - DNA, 120 bp, Artificial Sequence
  ENSG00000228526_26 (sequence is synthesized)
agccactgcactcggcctacttctgcattccttagagtacatcctagctaggatatattcacttgtctttagagctaacagcagaagaaaggtacctagatgcttatctagctctttatc

SEQ ID NO: 994531 - DNA, 120 bp, Artificial Sequence
  ENSG00000228526_27 (sequence is synthesized)
tttctagaaattctagaagatgagaggggcagtggtggctccaagggagtgattttaggatggactgggacagagaggggctgcttacacatactcacacagaggccattaatttaggga

SEQ ID NO: 994532 - DNA, 120 bp, Artificial Sequence
  ENSG00000228526_28 (sequence is synthesized)
gttcaaggtccaggaggttgacggcatctaggcctgtggcagagtgcactcctgctttggggaatgtatgggcagcttcttgcctgtagttggagggttagagagagggatcaataattt

SEQ ID NO: 994533 - DNA, 120 bp, Artificial Sequence
  ENSG00000228526_29 (sequence is synthesized)
catggttggacttgagtttggagcgagtggagttagatacaaattctatgtttttggagaaagtatttgatcttcttggctgtgaggcaaagcgaggtttaaaaatatttttcacttaaa

SEQ ID NO: 994534 - DNA, 120 bp, Artificial Sequence
  ENSG00000228526_30 (sequence is synthesized)
aatatatatatatgcatgtatatttaatactgtctatggattgtgccaatatctatttcatggttttgatattgtgtagttatacaaggagttaccactgaacgaaactgggggaagggt

SEQ ID NO: 994535 - DNA, 120 bp, Artificial Sequence
  ENSG00000228526_31 (sequence is synthesized)
acacagaatctctgtactttttttgttgttgttgcaatttcctgtaaatctatgattattttaaaataaaaaagttaaagcatacgtatttacatttgattaaatgcagtgtgatatcct

SEQ ID NO: 994536 - DNA, 120 bp, Artificial Sequence
  ENSG00000228526_32 (sequence is synthesized)
gggttggattttggaacaaaacaaggcatgagtgaaaaaactggtaaaatccaaaaaagcctttagttaaaagtaataccagtgttaatttcttagttttgacaaatgtgccatggctgt

SEQ ID NO: 994537 - DNA, 120 bp, Artificial Sequence
  ENSG00000228526_33 (sequence is synthesized)
gtaagatgcaaatgttagaggaaactgggcgaagaatttgagggaactctctgtactattctttgcagcttttctgtaaatctacaattattccaaaataaaagtctattaaaaatgtaa

SEQ ID NO: 994538 - DNA, 120 bp, Artificial Sequence
  ENSG00000228526_34 (sequence is synthesized)
ttcattggagttgagggctcggagcagcaggcagccttccccgtgggaaggatgacaaatggggagtgctgcttctaggtgctcgtaccaactggcttcgtgcgtcctgggatgggcggt

SEQ ID NO: 994539 - DNA, 120 bp, Artificial Sequence
  ENSG00000228526_35 (sequence is synthesized)
gttcacaggcgcttcggggctgagcgcccaccaagtgtggcgcgcgcttttgggaaactccgtggaagaccaggacggacccctggagggttaggaagactttgagaccagccaggggaa

SEQ ID NO: 994540 - DNA, 120 bp, Artificial Sequence
  ENSG00000228526_36 (sequence is synthesized)
gccgtgtcccgggccctgactgtggatctcctactctgaaccacggactccagtttggaaggccaggctgcctttcggattggggggtaaggaagggatccccagctcaggcagcctttt

SEQ ID NO: 994541 - DNA, 120 bp, Artificial Sequence
  ENSG00000228526_37 (sequence is synthesized)
gggctagggcaaggggacctctggaaccacatttttgaatgctcccacccatgatttctgggacagctactggagacaaatagaggctcgaaggtgtcgggagaaaggctgtgttcctga

SEQ ID NO: 994542 - DNA, 120 bp, Artificial Sequence
  ENSG00000228526_38 (sequence is synthesized)
tgtcatgtagttgaacttggatgtggaggaagtccagcttcccctgcagagtaaaaccaagccagcgaatgtgggtgggggccagcagctgccgaccctcctgggtgatgtgatgggctt

SEQ ID NO: 994543 - DNA, 120 bp, Artificial Sequence
  ENSG00000228526_39 (sequence is synthesized)
aggtggtaggagccaggggcctggggccagagagggcagccctaagggggtctagacagcaccttctgcccagaatggcagcctttggtacaagtctttatttatgccagtggcatgaaa

SEQ ID NO: 994544 - DNA, 120 bp, Artificial Sequence
  ENSG00000228526_40 (sequence is synthesized)
atgtcgcccgatgaatccccaggggcccgttcttggcaaaagccctgtctcccagcaagatgggaagtgatgtcacattgcactctccagcccgctcttctggggttgttcgagttgtga

SEQ ID NO: 994545 - DNA, 120 bp, Artificial Sequence
  ENSG00000228526_41 (sequence is synthesized)
gatggttcggtgactgatgcctctcattgtcccagaccttgtgcttcccctgggagaccctccaccctggtggttgctttttcctgtccccatgctttagcttgagcatctccaccgtgg

SEQ ID NO: 994546 - DNA, 120 bp, Artificial Sequence
  ENSG00000228526_42 (sequence is synthesized)
aggctgcccttggaggctgcactgtgctgggaggagagggagactggagagggagaggaggaggagatggcaggggcagtggggccctcagagctggtgcagtactgtgctgatgtcatc

SEQ ID NO: 994547 - DNA, 120 bp, Artificial Sequence
  ENSG00000228526_43 (sequence is synthesized)
acttttgggggcctgctgaggcctgtggctgctccagaatcgacaccaggagcctcttgctcagcctgggacaggcacagcattgcggctgccagtctccctgacaaggacaagacctgc

SEQ ID NO: 994548 - DNA, 120 bp, Artificial Sequence
  ENSG00000228526_44 (sequence is synthesized)
accttccaggcagagccaactggccagctgaggtcctgcgactcctgcagggatgaaggtataaggaaaaggtgagggccacgagaaccggcaatgggacgctggcggggctcacctggc

SEQ ID NO: 994549 - DNA, 120 bp, Artificial Sequence
  ENSG00000228526_45 (sequence is synthesized)
aaattggcagcaccagactccggaagagagggagcagaagggaggcaggccggggactgcagagaaaggcgccaaggcactggcaagatcctagcgcctcagatcctgaccgtggcacct

SEQ ID NO: 994550 - DNA, 120 bp, Artificial Sequence
  ENSG00000228526_46 (sequence is synthesized)
ccccaccgaccattttcacttttcacccaatgcagtcggtagtttgctctgcgcttctcattctcagcagttctgattaaagatcagatcccattttccttttatgcctttaaactttaa

SEQ ID NO: 994551 - DNA, 120 bp, Artificial Sequence
  ENSG00000228526_47 (sequence is synthesized)
gcctggccacccaagacaaatgctctattcaaagctggaagatacttagaaatcatctgttacaagtccccaagctcagcgatgaggacagtgaggcccagagattaaccgactttccca

SEQ ID NO: 994552 - DNA, 120 bp, Artificial Sequence
  ENSG00000228526_48 (sequence is synthesized)
aggacacaggaagctcagggcagacctgggattccctgggacatgtgggacacggatgagatcatcagcgctcaacccatcaggcatcctgactcagatgcagtaggacaaggtggagga

SEQ ID NO: 994553 - DNA, 120 bp, Artificial Sequence
  ENSG00000228526_49 (sequence is synthesized)
accctgttcaattgtgtagcctccgtaaggggaagaatttccaagaagcaacaaaatgttctttgatttcataatctctggggagaaaggattccttttttggggttttgctcggctagt

SEQ ID NO: 994554 - DNA, 120 bp, Artificial Sequence
  ENSG00000228526_50 (sequence is synthesized)
tctttcttccctcctctatctccagcgtggggcgaggaaggccgactggttcatgggtggcaaatggggaccctggctctcttgcgctgctggccacggtgatattgcagcaaatgctca

SEQ ID NO: 994555 - DNA, 120 bp, Artificial Sequence
  ENSG00000228526_51 (sequence is synthesized)
acctccccagttcctctcctcaccttgaaagtggaggcattgatactagccacccatggttgcaaaaaactcgcatgaaagggaaaggaaaagtgcttcggtcactaaagtagcgttgtc

SEQ ID NO: 994556 - DNA, 120 bp, Artificial Sequence
  ENSG00000228526_52 (sequence is synthesized)
taagaggtcaaggctttggaagacttttgctctagaagaggggaacgggagaggggctttcagccaacctggccccgaggtgaacgcgcgcgccccctgctggctggagccctgtccagc

SEQ ID NO: 994557 - DNA, 120 bp, Artificial Sequence
  ENSG00000228526_53 (sequence is synthesized)
ctgtgagccgccagtggggaaggagactgaggggaggtggtccctggagttccttgctcctggcctggagcagcaggtgccagtgctcctgaggccccctctctcaggttacgtggatgg

SEQ ID NO: 994558 - DNA, 120 bp, Artificial Sequence
  ENSG00000228526_54 (sequence is synthesized)
ggcctgtagcacagacagggcacatgcttcagcacctccctgtttctgcgtcaggtgggggacatgagctaggctctgcagaaggttccagagcctgggccttcctgttgcatccacact

SEQ ID NO: 994559 - DNA, 120 bp, Artificial Sequence
  ENSG00000228526_55 (sequence is synthesized)
aggctcctggagcccagaggtggctgggatctctgcatacatgcatgtgaaactctagcagataccaagtcatgttaagggggctaaacggcccactgcagttatgttagccagttctgc

SEQ ID NO: 994560 - DNA, 120 bp, Artificial Sequence
  ENSG00000228526_56 (sequence is synthesized)
ctctgcccagttctgagatatctttgggacaaatggccactcctctgagcccctgtgtcttcctgcatgagccacaaatgctgtgtagtcatggctgaggaagagggaaggtacctgtgc

SEQ ID NO: 994561 - DNA, 120 bp, Artificial Sequence
  ENSG00000228526_57 (sequence is synthesized)
ttgcaaacattcctcttgaaggactatccaggagcagagggagcagctgggggcagcatcagttggtacctgagcccattggcacctactgccacatggggtagtggcctgtctcctgag

SEQ ID NO: 994562 - DNA, 120 bp, Artificial Sequence
  ENSG00000228526_58 (sequence is synthesized)
cttccccaagctggccaaaactggccaggactgccctgctctcccctcccaatccagctttctcttgggcctccaggatcccttggctagctggtgtggtggccatgaggactgcacttt

SEQ ID NO: 994563 - DNA, 120 bp, Artificial Sequence
  ENSG00000228526_59 (sequence is synthesized)
tgcaccccacccctgcccttggcacacatcgcaaatcaataatgctaaacctagacaggcccccaggtctttctgatcatagcatccatgcagtgcttcccattgattgtgtcacctaat

SEQ ID NO: 994564 - DNA, 120 bp, Artificial Sequence
  ENSG00000228526_60 (sequence is synthesized)
tgccaacccagccctacacctgcccttgtaactggtccctgggccggggggtgtaggaggatgcaaggatgaacaagatgctgcccttggttataggatacactacctccagctagaggt

SEQ ID NO: 994565 - DNA, 120 bp, Artificial Sequence
  ENSG00000228526_61 (sequence is synthesized)
tatcagatctgtgcataagaaaataactaggcgggactcattcattcatgcgacaaatatttacagagtccttgctatacgcaatgagtcattgaggagaaacctacagaaggatgaggg

SEQ ID NO: 994566 - DNA, 120 bp, Artificial Sequence
  ENSG00000228526_62 (sequence is synthesized)
ggacggcttttcaggcagaagggttagtaagtgcaaaggccctgtgtttggtgcattggagaaattgcaagaaagcgggtgagactgaagatcaactcgtgatacttggtaatgaatatc

SEQ ID NO: 994567 - DNA, 120 bp, Artificial Sequence
  ENSG00000228526_63 (sequence is synthesized)
acatgaaaacaaggaagttttcttgtctagctctgaaatttgccttggttggcagatccttccttcccagagagcacacatcagtactgcagctacagctgtctgtctgacatacttgta

SEQ ID NO: 994568 - DNA, 120 bp, Artificial Sequence
  ENSG00000228526_64 (sequence is synthesized)
agaacgaactgtttagtgcaggctctgggaggcagtgccatgcgggtcactgacatacatggtgccaatcatttttctccattcgtaaggcacctcaggaccccactggggccccagtgt

SEQ ID NO: 994569 - DNA, 120 bp, Artificial Sequence
  ENSG00000228526_65 (sequence is synthesized)
tccagtaaggatacgggttttgagttaaggacccgccttccagctccgtctctgtcactagctgtgctaatttggaaataggacttcctttcctggctttggttcctcatctataaaaat

SEQ ID NO: 994570 - DNA, 120 bp, Artificial Sequence
  ENSG00000228526_66 (sequence is synthesized)
tgcccttatgttaggacctacttggtagacgcatgagataaaataattcgagaatgtgcataaaccagggagcagggtgctgtggcaactattaggtagcatcagtgataaagcactttg

SEQ ID NO: 994571 - DNA, 120 bp, Artificial Sequence
  ENSG00000228526_67 (sequence is synthesized)
ctttcatggatattttatgtgttcactaaatcagaactttcctctatgctgatgtagtctagtgaggtctggggagtttcttgtttgattttgcattgcaaatattcctctcttcccctc

SEQ ID NO: 994572 - DNA, 120 bp, Artificial Sequence
  ENSG00000228526_68 (sequence is synthesized)
gaggaatgagtcccccgttctcaccccggggagcggttgcctcgtgagtccaaggagaatccgccctttcgttttgcgcaggtggagatctcgcgggcccagttcggagtcctgcaaact

SEQ ID NO: 994573 - DNA, 120 bp, Artificial Sequence
  ENSG00000228526_69 (sequence is synthesized)
ctgagcgctgcggggctgcagcagcagccggcgatgcggagaccctgcaccactgctccgggcggcgctcgcgtcccgacggccacctcctggcggctgcgcgcagccggcgccgagatc

SEQ ID NO: 994574 - DNA, 75 bp, Artificial Sequence
  ENSG00000233821_0 (sequence is synthesized)
ttacaggcatgagtcaccacacctggctaatgttggccaggctagtctcaaactgacctcaagtgatctgcctgc

SEQ ID NO: 994575 - DNA, 120 bp, Artificial Sequence
  ENSG00000233821_1 (sequence is synthesized)
gcatgagccatcgcgcccagcctaagctactgtctaccagaaaaaaaagtacacagtgaatcagaatcactttcttgctgtataaacttggaaagttattcattctctctgagtgccagt

SEQ ID NO: 994576 - DNA, 120 bp, Artificial Sequence
  ENSG00000233821_2 (sequence is synthesized)
ttcttgggctgtaaattaaagctaatattatctccttatctagattgttgtaaggagtggagatgattcatgttaagtgcctgaccaaagttaggcactcactaaatgatattttgaatt

SEQ ID NO: 994577 - DNA, 120 bp, Artificial Sequence
  ENSG00000233821_3 (sequence is synthesized)
ataataaaatgagaacccaagcacacaactatttcttagtaacctcatatataagcaggcctcttgttgtctactgccttgaagagcccatttaatctcctctcaccccaccaagggcca

SEQ ID NO: 994578 - DNA, 120 bp, Artificial Sequence
  ENSG00000233821_4 (sequence is synthesized)
aaacatggcccgacacacagttgatgcttgataaaagttgacagaattgaattaaggggcggtgctgttgtgttttcctgatagagtacacttattgccaaaataattatagaaatcaag

SEQ ID NO: 994579 - DNA, 120 bp, Artificial Sequence
  ENSG00000233821_5 (sequence is synthesized)
ttttatgcccaaattagctcattaattttaggctgggagcataatcacaagagaaccgcctatctcccaaatgatccaactacaaagagaacaaaagtcaagcttcatccagtaagcgtc

SEQ ID NO: 994580 - DNA, 120 bp, Artificial Sequence
  ENSG00000233821_6 (sequence is synthesized)
accttacctggcagaggtttagcgcatctctctgctctgggaagaagccaataattgaaagcatctgctggtcaagacaagcagaacatttaggctgaagagggagtgatatttttgctt

SEQ ID NO: 994581 - DNA, 120 bp, Artificial Sequence
  ENSG00000233821_7 (sequence is synthesized)
atctttaaaaggaaagaacgagttgataagagagaacagtggttttgctctgaaaccagcctgacaaactatattgaacacagaggtccgtacttattttctttcaaaaacttcctttct

SEQ ID NO: 994582 - DNA, 120 bp, Artificial Sequence
  ENSG00000233821_8 (sequence is synthesized)
tctgctcccatttatacataaacaacacatatccctaaactccatccattgttttatcctcgaaattcttagccccaattggcctcactggcagcacatgctctcctgaccacacagctg

SEQ ID NO: 994583 - DNA, 120 bp, Artificial Sequence
  ENSG00000233821_9 (sequence is synthesized)
cgtccaagggaggtaggggcacaaccttcaatggtatctctgctatctcaaaggaatttcagatatcattaaaacaatgtgtctgcgcctctaaataaaacaggccagtcatgtttcagt

SEQ ID NO: 994584 - DNA, 120 bp, Artificial Sequence
  ENSG00000233821_10 (sequence is synthesized)
aaactgacagtcttctctaaaggaccccgaggtgtacgaagttactgagttttcccatcctaccatcttcaaagtgataaagaaaatgcaattgttatgcaactagcctttccagctgac

SEQ ID NO: 994585 - DNA, 120 bp, Artificial Sequence
  ENSG00000233821_11 (sequence is synthesized)
cctagggtggcatttgctgtctactcttaaactacctcacaaaaatcatctttttgtaaagattctttgtttcctctctcatacatgcataagagaccccggggtggaggcagtgttagg

SEQ ID NO: 994586 - DNA, 120 bp, Artificial Sequence
  ENSG00000233821_12 (sequence is synthesized)
atggggagggatggaccgggctcctgggaatggcctccatcagaggcctggtctgtgggccccagtcaccgtgaggggtcggtggggagtgtggagcttcccaggatcctgcctctctcc

SEQ ID NO: 994587 - DNA, 120 bp, Artificial Sequence
  ENSG00000233821_13 (sequence is synthesized)
ctgttttctgccaagcagcaggaacacacaattcattaaagcaaagccaaaggtcatggactgagaaatagcaagaaacttccagggacttgttgattttggaaacttaatgtccacatt

SEQ ID NO: 994588 - DNA, 120 bp, Artificial Sequence
  ENSG00000233821_14 (sequence is synthesized)
gtgtaacagtgtgcatgttccccagggggaagtagattgctatttatgtcagaaagatgtttcagaagaagatgtctcctccaagcaaatagtatatgtctagttgttggcatctactat

SEQ ID NO: 994589 - DNA, 120 bp, Artificial Sequence
  ENSG00000233821_15 (sequence is synthesized)
aggggaggatgttggagggggtgccatttcgataggttggcattttctctgtaatggcaggaggcaatagaactatttgtttatgtttcaaacataaaataatgaatcagcactcgaaca

SEQ ID NO: 994590 - DNA, 120 bp, Artificial Sequence
  ENSG00000233821_16 (sequence is synthesized)
agtcttgaaagataaaacgttcagtgttaattgaatctctatattgtgccagataatatttaagtgctaggaatacggtgctgaataaggtccctgccctcatagacaggtgttctagta

SEQ ID NO: 994591 - DNA, 120 bp, Artificial Sequence
  ENSG00000233821_17 (sequence is synthesized)
ggaagagacaaaacagacaagctaaaacaaattttcaaagagtgataagtgctatgaagatggttaaacatggatagagactgaatggctgtggagggggcagatttcagcagatttagg

SEQ ID NO: 994592 - DNA, 120 bp, Artificial Sequence
  ENSG00000233821_18 (sequence is synthesized)
gaaggcctctcagatgagttggcattaaaccaaaaaactgcaatcaaataaatctcctttgccgcctcactgtcggagccctgcttaccacatctgaaggatccatatcttccagagctc

SEQ ID NO: 994593 - DNA, 120 bp, Artificial Sequence
  ENSG00000233821_19 (sequence is synthesized)
tgcagattttgacagcagagatatgctcctcacacccccagcttctgctttttcattatttgtgactatcaaaacagaattttgatgacaaattatttataaataaaccaatcattaaaa

SEQ ID NO: 994594 - DNA, 120 bp, Artificial Sequence
  ENSG00000233821_20 (sequence is synthesized)
tatgtaagatctctcacctatcaccatacatctcacttaaccattctcatgcatcccaatgacttgaacaaaaagaaacagaaccagaaaatagtcaaaacagtacaatttaatctaaat

SEQ ID NO: 994595 - DNA, 120 bp, Artificial Sequence
  ENSG00000233821_21 (sequence is synthesized)
tatccttctcacaacatcactgagattgacttgccaagtcctgttcattgtcagattggattctctggaagtgagtgccttctgcaaagtatctcagacatggataacgcaggcaggact

SEQ ID NO: 994596 - DNA, 120 bp, Artificial Sequence
  ENSG00000233821_22 (sequence is synthesized)
aaactgcttttcttcccatttgagttgccaatacctccctctgggccaatcgaggattattgtttcaacaatacatgcaagctaattgtttgttaagccggcccagccaaccataaaatc

SEQ ID NO: 994597 - DNA, 120 bp, Artificial Sequence
  ENSG00000233821_23 (sequence is synthesized)
acaggagagtcaggcctggcccatcctcttgcctctgaactggatcacagttaatatctctgagagttccaccccaggttcacagaccaactggggaagatggctcttgagcaaactctg

SEQ ID NO: 994598 - DNA, 120 bp, Artificial Sequence
  ENSG00000233821_24 (sequence is synthesized)
aattttgtttccatgaagaaaggtttctccaacataatcaactacaatcacaatttttgaaacattcacattcttaagtctgtatctgctttggtttccttaaataaaaacaagccagag

SEQ ID NO: 994599 - DNA, 120 bp, Artificial Sequence
  ENSG00000233821_25 (sequence is synthesized)
ataaaagtatggaaataaaatagtttcaaacagagagccctgtggaagaatgcactaacttaatatgtacttccagataaatgacaagatacatgtataagagaagcaaacttctacaaa

SEQ ID NO: 994600 - DNA, 120 bp, Artificial Sequence
  ENSG00000233821_26 (sequence is synthesized)
cattcattaacaatgtgtgaagataaaagttatctttgatagaaaaaggtaactgataaagacatcaaagagaaagatctgaaagtgaactttctacatactcaccagataaaacatata

SEQ ID NO: 994601 - DNA, 120 bp, Artificial Sequence
  ENSG00000233821_27 (sequence is synthesized)
aaggggcaattttggtttgttttattgttgtaggtctaaaggaatactttcattttcagtagtttgtcagcaaacagcacaggaaactttactatttgaaatgagtagtctgagttaaca

SEQ ID NO: 994602 - DNA, 120 bp, Artificial Sequence
  ENSG00000233821_28 (sequence is synthesized)
atagtgaccagatattataaaaccgtgttctgcctaaatatatccacaaatcttcagatggcctacaaacccaatattgaggctaaaaaagacatgacctcttgagaggctcttctagaa

SEQ ID NO: 994603 - DNA, 120 bp, Artificial Sequence
  ENSG00000233821_29 (sequence is synthesized)
agtgggactctctggtactagggatatagcactgtgaaccccaaaagggagacagctctgacccccagtgcaatcaggaaagacagatgcaagccctaacttagtttacaggtttgatgt

SEQ ID NO: 994604 - DNA, 120 bp, Artificial Sequence
  ENSG00000233821_30 (sequence is synthesized)
ccccactgctgtgggcattcctgtccagaaacccaagtcctccccaagagagtggctagagagtatatgcaaacacaataaacctttcacagaaaaacaatgactttctatgactagaat

SEQ ID NO: 994605 - DNA, 120 bp, Artificial Sequence
  ENSG00000233823_0 (sequence is synthesized)
caagccgcccaacaagtcaaggagccaagaaaactgcccaggaagtagtgccaggatgaacatctccagggtccataggaggcatccagaaataccacctacccaaactgagacaaaaac

SEQ ID NO: 994606 - DNA, 120 bp, Artificial Sequence
  ENSG00000233823_1 (sequence is synthesized)
gtcatcatcaaaatcatggatcattaccaccaccacatcacttacaagcgggttgtaagaaagtcatactctttcttatttgcccacgtttcttgaaattattactttattaaactacat

SEQ ID NO: 994607 - DNA, 120 bp, Artificial Sequence
  ENSG00000233824_0 (sequence is synthesized)
agtctcgtcgagggctttccaacaagcaacttggaaatgagcgacggtataatgatgtcaccatccatttatcctctgcacttaaaggttgaagctcttcaacaaatctctcctcagcca

SEQ ID NO: 994608 - DNA, 120 bp, Artificial Sequence
  ENSG00000233824_1 (sequence is synthesized)
aactgtttttaaagtcagaagatcttgattcaagtccaattctgcccgttaccatgtgaccttgagtgaatcttgtaatctctcttttaaaaatacagacagcaacacttgccccctcca

SEQ ID NO: 994609 - DNA, 120 bp, Artificial Sequence
  ENSG00000233824_2 (sequence is synthesized)
gacagcgattcgactgcacggttcacagggaggtttgtcagtctcgtcgagggctttccaacaagcaacttggaaatgagcgacggttgaagctcttcaacaaatctctcctcagccaaa

SEQ ID NO: 994610 - DNA, 120 bp, Artificial Sequence
  ENSG00000233824_3 (sequence is synthesized)
gacagcacaggcttctgattagttcacacatcactcaccaattagaatagaaggtcaagctagacccagcaaatgagtctgcagggaccagaaaaactccagggatatgcctttgatttt

SEQ ID NO: 994611 - DNA, 120 bp, Artificial Sequence
  ENSG00000233824_4 (sequence is synthesized)
tccagtcatgaaatctgcagtctgaaagcagtcttagaacaggacagaccctaccccaacatttgcattacactctcttgtactaaagacaattgcaatataaaaataaaccctaagaac

SEQ ID NO: 994612 - DNA, 120 bp, Artificial Sequence
  ENSG00000233825_0 (sequence is synthesized)
tttgtgcctttcgggcccccgaactccgcgggacccgggtcgggcagatcctcacagcggaaaaccggcagcggcttcgaggcgtctagcgcccgcgcccgaaacgacagtttactcatc

SEQ ID NO: 994613 - DNA, 120 bp, Artificial Sequence
  ENSG00000233825_1 (sequence is synthesized)
gctctggggaaacggccccggccagcgggatcatggagaaccgggggttcggtccccactcgccaaccgctgccggggacttgaggggcggagcgcagagcccgccgtccgggcactaac

SEQ ID NO: 994614 - DNA, 120 bp, Artificial Sequence
  ENSG00000233825_2 (sequence is synthesized)
accagccgggagggtgggaggctgtgccgctccgctcctctctcgctcgctctcttcaatacgccatggccaacatggcggacattaaaactccactgtgcgctcttcagccaaccccag

SEQ ID NO: 994615 - DNA, 120 bp, Artificial Sequence
  ENSG00000226053_0 (sequence is synthesized)
attatgccttttcctctgccaatgctatgagaataccttggttcactagaagaaatgctgacaggtggtttccctgcacaagccctcttcttttgtgtggcaccatgtgagatgtgcctt

SEQ ID NO: 994616 - DNA, 120 bp, Artificial Sequence
  ENSG00000226053_1 (sequence is synthesized)
tcaccttccaccatgattgtcagacctccccagccacatggaacccacttgtcccaactacctgcttctggctttgttttgcctaaagctgtgaaaaatattattcaaacacaagatggc

SEQ ID NO: 994617 - DNA, 120 bp, Artificial Sequence
  ENSG00000226053_2 (sequence is synthesized)
aaactgaagaatgaaaaatcaacatgtatcaaatgatgaaggggaaagatggaagaagcctgggttcttgatggcatcattgaaccctccatgcaaggccagcaaccaagctgtcattaa

SEQ ID NO: 994618 - DNA, 120 bp, Artificial Sequence
  ENSG00000226053_3 (sequence is synthesized)
ctaaagctagatgcattattatgttcaaggaatgaacccttatctgattaaattactgccatctaggttttctgttacctgcagatgagccatcctgatgctcaatatcatagaattatt

SEQ ID NO: 994619 - DNA, 120 bp, Artificial Sequence
  ENSG00000226053_4 (sequence is synthesized)
ctgaaagttaaatgaaataatgcatgcataattgcttaaataactacagatatactgtttaaagaggtaacacagggcaatggaaaaggcattggacttgaactctgactaatttagcct

SEQ ID NO: 994620 - DNA, 120 bp, Artificial Sequence
  ENSG00000226053_5 (sequence is synthesized)
ggaatcctagaaagtcaccttattagaccttcttcataggaaaatgtaaacaatctctgtgtgtcagttgtgtcatctctaaaatggaaataattagcatcttggaggattgttgtaaag

SEQ ID NO: 994621 - DNA, 120 bp, Artificial Sequence
  ENSG00000226053_6 (sequence is synthesized)
ggtaagggagataagatatgggaaagctcatggcatagggcttgatacatgttattcaataaacataagttagggagaaaaattagcaagtagcagtgtggtctgccccaagtgaacaca

SEQ ID NO: 994622 - DNA, 120 bp, Artificial Sequence
  ENSG00000226053_7 (sequence is synthesized)
cttcctttatctgagtcagattacactgccccttgaacctttacaacactaaacaaaatttagagcactaggagatacttcagagtgtcctattaataaaagtagtggaaggatagtttt

SEQ ID NO: 994623 - DNA, 120 bp, Artificial Sequence
  ENSG00000226053_8 (sequence is synthesized)
agtagtggaaggatagtttttttttttctaattctgtgaagaacattaatggtagtttaatgggactggcattgaatctatagattactttgaaaagtatggccattttcacaatattga

SEQ ID NO: 994624 - DNA, 87 bp, Artificial Sequence
  ENSG00000226053_9 (sequence is synthesized)
tctgatttctttgaggatcagtttgtagttctctttgaagaggttcctcactttccttctcagctgtattcctaggtatcttttttt

SEQ ID NO: 994625 - DNA, 120 bp, Artificial Sequence
  ENSG00000226053_10 (sequence is synthesized)
gtatcctgaggctttgctgaagttgcttctcagcttaagaagcttttgggctgagaaaatggggtttttttaggtataggatcacgccatctgtaaacaaagataatttgacttcctctc

SEQ ID NO: 994626 - DNA, 120 bp, Artificial Sequence
  ENSG00000226053_11 (sequence is synthesized)
aaatggggtttttttaggtataggatcacgccatctgtaaacaaagataatttgacttcctctctttctatttaccctttatttctttatcttgtctgattgccctggccagaacttcca

SEQ ID NO: 994627 - DNA, 120 bp, Artificial Sequence
  ENSG00000226053_12 (sequence is synthesized)
tcttctaccactttaaaagccatatggaaccaaaaatgagcccaaatagccaagacaatcctaaacaaaaagaacaaacctggaggcaccatactacccaacttcgaactatgctacaag

SEQ ID NO: 994628 - DNA, 84 bp, Artificial Sequence
  ENSG00000226053_13 (sequence is synthesized)
actacccaacttcgaactatgctacaaggttatgcacatagaccaaaggaatgaaaagagaactcagaaataagactgcacacc

SEQ ID NO: 994629 - DNA, 120 bp, Artificial Sequence
  ENSG00000226053_14 (sequence is synthesized)
acaaaaacaagcaatgggaaaagaactctttatttaataaatgatactgggagaactggttagccatacacagaaaattgaaattggaccccttccttacaccttatacagaaattaact

SEQ ID NO: 994630 - DNA, 89 bp, Artificial Sequence
  ENSG00000226053_15 (sequence is synthesized)
aaattggaccccttccttacaccttatacagaaattaactcaagatgaattgaagacttaaatgttgatatggtttggctctggactcc

SEQ ID NO: 994631 - DNA, 72 bp, Artificial Sequence
  ENSG00000226053_16 (sequence is synthesized)
tccctttgcttaacacttctccttccttccaccttgtgaggaaactgctttgcttcccctttaccttctgcc

SEQ ID NO: 994632 - DNA, 67 bp, Artificial Sequence
  ENSG00000226053_17 (sequence is synthesized)
ggctcttttccctttgcttaacacttctccttccttccaccttgtgaggaaactgctccatgctgaa

SEQ ID NO: 994633 - DNA, 120 bp, Artificial Sequence
  ENSG00000226051_0 (sequence is synthesized)
accgatcagatgcacaagacttggaagcaagtaaacgtgggcaaggtgagctagctgggcgtggaggagagtgatctcccggcaagcaggagtcagctggcatggttttgcttcaagttg

SEQ ID NO: 994634 - DNA, 120 bp, Artificial Sequence
  ENSG00000226051_1 (sequence is synthesized)
tgggtccagatcatttgggaagcagcagagacctggggatgctcttgcctggtgggcagcacaagcacgagaggtgcaccacacaggtgcgttgaaagcccctgcccgtgccaagtctgc

SEQ ID NO: 994635 - DNA, 120 bp, Artificial Sequence
  ENSG00000226051_2 (sequence is synthesized)
tgaagttccattggccaaagccactcacttggccaagcctgtagtatcaggtactttaatcagcatttaatgacccagtcgaaaattcattgtttggacccaagcactggtgggaaaggc

SEQ ID NO: 994636 - DNA, 120 bp, Artificial Sequence
  ENSG00000226051_3 (sequence is synthesized)
aggaggggaggcctgccttccttcctccctcccgagccctacagcaggccatggagtggtgagcgagttcgtacagtgccaaccacattcccagaaacttccagcagaggttaatcctgc

SEQ ID NO: 994637 - DNA, 120 bp, Artificial Sequence
  ENSG00000226051_4 (sequence is synthesized)
tcctctcaggtgggcttggcccattctctagactttggaaggtaatgttctatagaggcctgttctgaagctttaccaggtcaaaccggagaagaacccaacaagtaactcatcccagcc

SEQ ID NO: 994638 - DNA, 120 bp, Artificial Sequence
  ENSG00000226051_5 (sequence is synthesized)
taactattcttcaagggcaatcaacctacagcatccaagcacagagaaatcaaatccatggagaatcttcaaattaggctcagaatccatttgggtcaatgaatttactgttattaagat

SEQ ID NO: 994639 - DNA, 120 bp, Artificial Sequence
  ENSG00000226051_6 (sequence is synthesized)
acctctcctgggataatacacacaaaaaaccaagagctgctcactgtggtgcaggagacagcagggcctgaagccagaggctctgtgtccttgaatacaatgttttactcctctgacccc

SEQ ID NO: 994640 - DNA, 120 bp, Artificial Sequence
  ENSG00000226051_7 (sequence is synthesized)
tgttactgtgatttggagaggcagacaatataggatgggctttgcaggcagggaggtccagttataatcccagctcttactaagttgggtaagactcactctgagacttagtttcttctg

SEQ ID NO: 994641 - DNA, 120 bp, Artificial Sequence
  ENSG00000226051_8 (sequence is synthesized)
tcatctctcaatagaatcataaaggtactttcctcttagtgttgttttaaaattcagtaaaataatgcaggcttagcacagggtctgatgtaaattttcaatgaattatcgttgtcaata

SEQ ID NO: 994642 - DNA, 120 bp, Artificial Sequence
  ENSG00000226051_9 (sequence is synthesized)
ttgttctggaaaacaagagggcatattagaagatcaaaagtactgccaagcattgaagtgccaattctagatccagtctcagccctctgagaatggatatcattgttttcaagccattca

SEQ ID NO: 994643 - DNA, 120 bp, Artificial Sequence
  ENSG00000226051_10 (sequence is synthesized)
gaaaccaatgtgaattgaacacctagtatgagctctctgagggaagagccaagtcatgcattttttatcttaaggggtcttcaatacctctagcccaaaacagtatctccatcaggattc

SEQ ID NO: 994644 - DNA, 120 bp, Artificial Sequence
  ENSG00000226051_11 (sequence is synthesized)
ttctctgatagtgttcatttcttttttctcaatggatgccttaaaaaaaaaatcctacaaggaaacctgtactcctcaaatacaccactcaggtgaccattaaatcatttacattgttaa

SEQ ID NO: 994645 - DNA, 120 bp, Artificial Sequence
  ENSG00000226051_12 (sequence is synthesized)
gggtgggtttcagctcccacttgtttttttggtcaggttccccaagaaacagactcgggatttgcatgcaggagtcttattggggaacgctttcaggaactaccaccccgtatgggagcg

SEQ ID NO: 994646 - DNA, 120 bp, Artificial Sequence
  ENSG00000226051_13 (sequence is synthesized)
agagaagcaggactgtgcagaaggagaagttgaacaactcctggaaagctctgaagctgggatcatccttccagaatgtcttggattgagacaagggccttatcttgtacaagattcatg

SEQ ID NO: 994647 - DNA, 120 bp, Artificial Sequence
  ENSG00000226051_14 (sequence is synthesized)
tgttggtgagctcatttccaccagaactcagcccaggctgctgtgggatggaatcacctgcacccggatgttctttctgggctggtacatacaggttctatgggtctggaattcagatgg

SEQ ID NO: 994648 - DNA, 120 bp, Artificial Sequence
  ENSG00000226051_15 (sequence is synthesized)
ctcccccagctgcaagggaggctgtgaaatgaagtctctagttggatagcagtaagtcctgctgagttcagcagttgctgttcctaaaaggaagaaatgggtagaatggatattggtgga

SEQ ID NO: 994649 - DNA, 120 bp, Artificial Sequence
  ENSG00000226051_16 (sequence is synthesized)
catttagagacaaggaaactggacaactctagactgttgccaggagtcaggagaagacaacagacgatggtacttaaggctttggctttggaaaaagagatacctggattctgatcctga

SEQ ID NO: 994650 - DNA, 120 bp, Artificial Sequence
  ENSG00000226051_17 (sequence is synthesized)
catcctgggcaaacctggacaggtggtcaccgtgtgaaacctgaagtcccctttgatcctcccatctggttacaaccacccccaatcagagctgcctggaccttgcccggcctcctcctc

SEQ ID NO: 994651 - DNA, 120 bp, Artificial Sequence
  ENSG00000226051_18 (sequence is synthesized)
ggatgccagctctctgaccccaggaggttggattgggctggagagtgttcactccagcctcctggcctttgctcaagctgtcctttgcctgggatacccaattcctgttctcaagcacat

SEQ ID NO: 994652 - DNA, 120 bp, Artificial Sequence
  ENSG00000226051_19 (sequence is synthesized)
ttgtcttgaagaaaaatgatgtgccgaactgcgcagatggaaatttcgagcaatgagaaagattaaagtgaaaccccactccttagacctaatcatgagttgtagattattctgtcggcc

SEQ ID NO: 994653 - DNA, 120 bp, Artificial Sequence
  ENSG00000226051_20 (sequence is synthesized)
ttaggcttctcatctgtaactggtgaagcccggaagagcttgttgttcaagaggaaatcttgtgttacttctttatgaaggactccagcctggtggagatgaatgagtcctgaagatgga

SEQ ID NO: 994654 - DNA, 120 bp, Artificial Sequence
  ENSG00000226051_21 (sequence is synthesized)
atcaggatgtctgagaggagagcatggtgtttttgcttcattggatccatgcaggtcttggagggtggtggcccactctttctgggccaagtagagggtggctcagacacccccccttcc

SEQ ID NO: 994655 - DNA, 120 bp, Artificial Sequence
  ENSG00000226051_22 (sequence is synthesized)
tttaacaaatggactccctgtgttagctaatgccagtccctactcaacctaggatgactccaatggcgcatgtccccattcccgggccctaaggctgcgctaacatgctatcctgcctgc

SEQ ID NO: 994656 - DNA, 120 bp, Artificial Sequence
  ENSG00000226051_23 (sequence is synthesized)
cccttcattctccaccctgccacattcccactcctttcccctcccaacacgaagccatgcctgagctggacacccttccataccaacccaggaaaaagtgattcagctccggtccaccct

SEQ ID NO: 994657 - DNA, 120 bp, Artificial Sequence
  ENSG00000226051_24 (sequence is synthesized)
ttcctggagttgtggtgggtttccgggtgtcagcagcgcccctgattttgttgccctttggtggccccgggtctcccaggtgttggccgggctcctacggaggctgcctgcggcctgccc

SEQ ID NO: 994658 - DNA, 120 bp, Artificial Sequence
  ENSG00000226051_25 (sequence is synthesized)
tgcccccactgctcagtgtagtccttttcctggttggaggcccacggccggctagatttcgacctggaccctctcatctgcccttctccaccgagcaggtggaagagtggtggcgggaat

SEQ ID NO: 994659 - DNA, 120 bp, Artificial Sequence
  ENSG00000226051_26 (sequence is synthesized)
gcgccagctctgacctccctgcggtgcgcgctgcggggctgggagcaactgtgctgggttctgaggcccatgcgggtgccttcttggagccgcgccagcaccagaaatcgcccgggctcg

SEQ ID NO: 994660 - DNA, 120 bp, Artificial Sequence
  ENSG00000226051_27 (sequence is synthesized)
gagtcccaattagaggcgatggtatcgttttacattcctagcatcagtgtacgaggcccagttcctccacatcctcgccaacacgtgtactttaatcagcatttaatgacccagtcgaaa

SEQ ID NO: 994661 - DNA, 120 bp, Artificial Sequence
  ENSG00000226051_28 (sequence is synthesized)
agaccattgctccacataccctagctcataaatcctgccccaacactgcagagtggttacatcatccccaaacctcatgcaacaattcgatttggaaataaaaaggcaggtgttaattga

SEQ ID NO: 994662 - DNA, 120 bp, Artificial Sequence
  ENSG00000226051_29 (sequence is synthesized)
ggccagagaactgctccccagtcgaccggcaggggccctgcagcggctgctgcgcggcgcagggggtggtgtactttaatcagcatttaatgacccagtcgaaaattcattgtttggacc

SEQ ID NO: 994663 - DNA, 120 bp, Artificial Sequence
  ENSG00000226051_30 (sequence is synthesized)
ataaatctaggtacagagtaggtctctggacatcagtataaggcccatgagcctgatagctgcccaggtgggtgctgtgtgcctgggcgtgggaaggacaaaagagaggtcactaaaggg

SEQ ID NO: 994664 - DNA, 120 bp, Artificial Sequence
  ENSG00000226051_31 (sequence is synthesized)
gttcctgggaaggaagagcccctctgactttaaaagggagcccatacactttttggacaactggaataatcagaaagctgtttttggggaggcagcagccagaaaaacctggggcattgg

SEQ ID NO: 994665 - DNA, 120 bp, Artificial Sequence
  ENSG00000226051_32 (sequence is synthesized)
gtcaaccaaagcccttcccaaggctgcagtggctgcagctagttagcccagcttccctaccagccccagggctgcaactgaacagtgttggcttcttaataaaaacagcaccaatgcaaa

SEQ ID NO: 994666 - DNA, 120 bp, Artificial Sequence
  ENSG00000226051_33 (sequence is synthesized)
acagctcactgacgactcagggcagcttcagctgtaagcagcctgtgatttatggacaccgagtgaactcctgcggcagaaaccagccttgagatcagagcagcaatagggctctttttt

SEQ ID NO: 994667 - DNA, 120 bp, Artificial Sequence
  ENSG00000226051_34 (sequence is synthesized)
ggcaggagacagggcctgcatttttctcattcatgccaaactgctttgcacggcaattagctctgtcctcatttagtctccagtcccaaagggtaatgaaagtcatatatcatcttcagg

SEQ ID NO: 994668 - DNA, 120 bp, Artificial Sequence
  ENSG00000226051_35 (sequence is synthesized)
tttccttacagatatatctcctgagagcactccccaataaacctgcgtgtacctccttgtctcagtgtatctttccaaccgaagacactcacctcgcagactctgggaacccgcaggata

SEQ ID NO: 994669 - DNA, 120 bp, Artificial Sequence
  ENSG00000226051_36 (sequence is synthesized)
gtcctcatttagtctccagtcccaaagggtaatgaaagtcatatatcatcttcaggactgctaattattgagctcgcttacagcatccctcccactcagcctccatggattgtgaactca

SEQ ID NO: 994670 - DNA, 120 bp, Artificial Sequence
  ENSG00000226051_37 (sequence is synthesized)
ttgacttcaaactaaattggagagagacttaagttgacttgcaagcccttgcagttagcacctgctaatctggaatccttcctcaactgtgggagaaacggtgacgtggtactttaatca

SEQ ID NO: 994671 - DNA, 120 bp, Artificial Sequence
  ENSG00000283175_0 (sequence is synthesized)
tctttccagaggaggaacacggaaaaatcagccttgtgggtgaacaggaggagagtcacattcgccagcaggcagcaccctgtgcaggcagtgggagaaatctgagcttcagcagcgtcc

SEQ ID NO: 994672 - DNA, 120 bp, Artificial Sequence
  ENSG00000283175_1 (sequence is synthesized)
ggagcaggatttgcacgaagtctcccgtttcaagttttatgtctcctggagtcctggggaaggcacccagcccacccacagctcccttctcagagccctaagaattgatgagaaagcccc

SEQ ID NO: 994673 - DNA, 120 bp, Artificial Sequence
  ENSG00000283175_2 (sequence is synthesized)
tcactaccacatgcaggacacgcagaaacttcagatgagtggactggtcacgtgatacagcaatgacaaaaacttcagtattggcattcattccagctgatggcattccaggagctttta

SEQ ID NO: 994674 - DNA, 120 bp, Artificial Sequence
  ENSG00000283175_3 (sequence is synthesized)
atgaattaaagccacatttgcctgaagaagccagcgaagttactaactggttcaaaaacgattatgtgcatgatgggcagtattgttgcagttcaatcaccagtattgcttccaccagat

SEQ ID NO: 994675 - DNA, 120 bp, Artificial Sequence
  ENSG00000283175_4 (sequence is synthesized)
ttgtggtctatatatgtgtgcatatggaatagatttccacagacccacaacacggaagcatggcacagaagatgggaaaaaatggggaatactcatgtagttgtatactaaaccatagaa

SEQ ID NO: 994676 - DNA, 120 bp, Artificial Sequence
  ENSG00000283175_5 (sequence is synthesized)
gaattttgaaaagagcagtgtcacatggaaaataaatgtgaacatattctccaaggacagccatgtcgtaaaagaaaaaaagcagctattttttgtgatgtgagacttaaaaatatagtt

SEQ ID NO: 994677 - DNA, 120 bp, Artificial Sequence
  ENSG00000283175_6 (sequence is synthesized)
aatgactgtgaaagttggccagctcttatggactatctccatgcaattgcccataatctagctccataacttttttatttgttgaattttctttttagtttttagtttttatttttagtt

SEQ ID NO: 994678 - DNA, 120 bp, Artificial Sequence
  ENSG00000283175_7 (sequence is synthesized)
tttttcactatttgaaattgtcagcattatttttttataattcgccatgctacctatttcatctttgcatcatttccaatactgcatgcatcgtataaagagttttagagagtcctaatt

SEQ ID NO: 994679 - DNA, 120 bp, Artificial Sequence
  ENSG00000283175_8 (sequence is synthesized)
tgaacttgtgtgtaagcagtatgtgtgtgcataaagacattaaaacttcctcgacaaatgaaaatgtatcttctttgtacatctgcttttatgaaagataaaatttctcaatgccttggc

SEQ ID NO: 994680 - DNA, 120 bp, Artificial Sequence
  ENSG00000283175_9 (sequence is synthesized)
tctttgggcaactgatgtggtggtgatatggtagtgactcatcacggtttttgatcaatcttatcaaaagacttagaagagtctaagaatcacagcatttcagatgactgctgtataaag

SEQ ID NO: 994681 - DNA, 120 bp, Artificial Sequence
  ENSG00000283175_10 (sequence is synthesized)
ctgggggcacacaattaccaaccacagtgtgatatacatttttatattttgctttttgatttatttatttatgaatatggttcatctgctcataactgttatacccatgtgactgttgtt

SEQ ID NO: 994682 - DNA, 120 bp, Artificial Sequence
  ENSG00000283175_11 (sequence is synthesized)
agtatatctgagtgtttctgcttgcaaaaatatggtattattgtccattttattgtgtaaagtagcctatgaagagttctgtcatgtttttgcatgtttcttaaataaatcccctttaaa

SEQ ID NO: 994683 - DNA, 90 bp, Artificial Sequence
  ENSG00000283175_12 (sequence is synthesized)
gtcatgtttttgcatgtttcttaaataaatcccctttaaaaatgtaagtaaatattttacaacgttttgaaaacttttttgttgttgccc

SEQ ID NO: 994684 - DNA, 120 bp, Artificial Sequence
  ENSG00000283175_13 (sequence is synthesized)
tttggaattttgtttttcaggattttaacattggggatgatggcatttgggattatggtcagctcccatcttggacttctggcctctagaattgtgagaaaataaatatctgtgatttaa

SEQ ID NO: 994685 - DNA, 120 bp, Artificial Sequence
  ENSG00000276116_0 (sequence is synthesized)
gggcgcgcatgcgccggccgctgccacctacggcgaccctggcatgtgccagggattctccccgcccccttcctcgctgcgccggtggagagcgtagcagcagcatccaccgcctagcag

SEQ ID NO: 994686 - DNA, 120 bp, Artificial Sequence
  ENSG00000276116_1 (sequence is synthesized)
agccgcgggccacagcgggacggcacagttccagcagggcagcggctgcgcacgccggctccggctcgcacacaggcgtaggccgccctctaccgcctgaaggccggaggctgagcgggg

SEQ ID NO: 994687 - DNA, 120 bp, Artificial Sequence
  ENSG00000276116_2 (sequence is synthesized)
cgcgagcggatcctggatcccgggaggagactcgcctccagagaatgctgtgctccctacagcgccgggaatggaccggcccgtgccagctcagtcggcggccctagggggcacccgcac

SEQ ID NO: 994688 - DNA, 120 bp, Artificial Sequence
  ENSG00000276116_3 (sequence is synthesized)
tagaggttttgaagctggctccttgctacttttaggggtgcgcgctgctgctgctcagcccctgcagcccgcatttggccgcttgactgctgcttccagcgcgatcctacaatggcatcg

SEQ ID NO: 994689 - DNA, 120 bp, Artificial Sequence
  ENSG00000276116_4 (sequence is synthesized)
ctcccccaggagactcagcgaagccctactttatcttgtaagagctgtttccacattcactcgaagagaaagaccccccccacgagggcctgagttcgatgcccggcctctcccgacccg

SEQ ID NO: 994690 - DNA, 120 bp, Artificial Sequence
  ENSG00000276116_5 (sequence is synthesized)
cggctgcgacagcccctctgaggcggaagtttatttagtacgggaaagagaacagcacggggagaggggagaggctttgccctaggatgcgtcctacccgctcggactcggaaaattccc

SEQ ID NO: 994691 - DNA, 120 bp, Artificial Sequence
  ENSG00000276116_6 (sequence is synthesized)
cgccgccccagcacacaaagtagtcgcgggacgaggggtgccgccgaggccaatcagagctgcgcgccgcgtgagtggagtgcgagccggccaatcagagggccggaagatgagcttccc

SEQ ID NO: 994692 - DNA, 120 bp, Artificial Sequence
  ENSG00000276116_7 (sequence is synthesized)
gttccaaactcttccctgtagccttgggacccagatcccaagcctggggcgctttacggtgggagagcgaaatggtgcccttaagacaagaatcatttctctaggcttgggcattttaaa

SEQ ID NO: 994693 - DNA, 120 bp, Artificial Sequence
  ENSG00000276116_8 (sequence is synthesized)
gtacataccggggatacttatcccaaagcaagtagcggcggccttttagatgttaaatattaaaagatcacagaaaggagatttaagaggcagtggcctgtcaaggttgcaatctgccta

SEQ ID NO: 994694 - DNA, 120 bp, Artificial Sequence
  ENSG00000276116_9 (sequence is synthesized)
atattcataaattcacatatttattgagaccttcttatgtaccaggaactctatcacagatacacaaataaggtactgctgattcaaaagaaaatcccttgtcctcaagcagctcaggtt

SEQ ID NO: 994695 - DNA, 120 bp, Artificial Sequence
  ENSG00000276116_10 (sequence is synthesized)
gtgagggaggctttcctagaccttgagactcgtatttattgtcagctctttaaacaaaaagcactctatgaagtgctgtactttacagtcgtttttatgattatctccctgtgagaaaag

SEQ ID NO: 994696 - DNA, 120 bp, Artificial Sequence
  ENSG00000276116_11 (sequence is synthesized)
aaaattgaaaggaaagtagagtgacttgtccaagatcacacagaagatgtactagcagagccagaattatgttctagctcagtttgggtgtcatcattcaataaaataattcaataacaa

SEQ ID NO: 994697 - DNA, 120 bp, Artificial Sequence
  ENSG00000254477_0 (sequence is synthesized)
attccgagtagcgggatcccgcgcagcctcagggctgctggcagtgaaagtggggggatggaggaggtgtccagaggaaagacctggagatctggagatacaggacggtcagggtggtca

SEQ ID NO: 994698 - DNA, 120 bp, Artificial Sequence
  ENSG00000254477_1 (sequence is synthesized)
gagaatttggatcttttgcttgttggaaatcgggaccgctccgagaaacgtaagcagctcgatgttgttagtgccagtggagacacttggcactcacaatttgcagacgtttgggaaagc

SEQ ID NO: 994699 - DNA, 120 bp, Artificial Sequence
  ENSG00000254477_2 (sequence is synthesized)
atcgtttctcaagaggaccccgttcccgtgtctgtaaatcagagatggtacccacttcgtagttcgctgtgaagcctgtgagcgaggaggggctttaaaatacagaactttgcactggag

SEQ ID NO: 994700 - DNA, 120 bp, Artificial Sequence
  ENSG00000254477_3 (sequence is synthesized)
tcccaggcggcttctgcttccgaaaagcagatcgtccctttatctcgagtcttctccccgcctctccctcttctccctaccctatttgtcttcttgggaacaaatggcacattcatcaga

SEQ ID NO: 994701 - DNA, 120 bp, Artificial Sequence
  ENSG00000254477_4 (sequence is synthesized)
gtggagatccataaacgggactggcgagccgaagatttaattctgaagaataggatctgctctgtgctttcaggttaaaaagctgtaaatatctttgtaattctagcagtactttgccct

SEQ ID NO: 994702 - DNA, 120 bp, Artificial Sequence
  ENSG00000254477_5 (sequence is synthesized)
cttctgccatctgaacgcgtgctccctgctgacctcatcggctcccataaagatacgccgggcgtgatagtgcacgcctacaaatcccagctactcgggaggctgcggcagaagaatctc

SEQ ID NO: 994703 - DNA, 70 bp, Artificial Sequence
  ENSG00000254477_6 (sequence is synthesized)
caaatcccagctactcgggaggctgcggcagaagaatctctggaacctgggacacagagcaaaactctgt

SEQ ID NO: 994704 - DNA, 120 bp, Artificial Sequence
  ENSG00000254477_7 (sequence is synthesized)
ctgtattcaagccatccgcccgcctcggcctctcgaagggctgggattacaggcgtgcgccactgcgccctgccccttaacagatttttgttagtgggaatacgtagttccccgcgcttc

SEQ ID NO: 994705 - DNA, 120 bp, Artificial Sequence
  ENSG00000254477_8 (sequence is synthesized)
aagaaaatagagtcttccgcgagaggccgagatatgaacaacccttcacgttaggaatctgaaaaggaccattggggtctggagtaaaaaattctctttccacagcaggaatcaagggtg

SEQ ID NO: 994706 - DNA, 120 bp, Artificial Sequence
  ENSG00000254477_9 (sequence is synthesized)
gcctgtctgcctctgctcagagggttcctgttacaggataattgttttgaaaagagtaaaatcatgactcctctacaaatataaaatgcacacacatcaaagactttaattcattaatga

SEQ ID NO: 994707 - DNA, 120 bp, Artificial Sequence
  ENSG00000254477_10 (sequence is synthesized)
ccagtaaagctagccctgtccagaggaaaacacaaagtgtacacacatatataggcaatcaggaatgctgaaacgaacatgttaataaatgcacaactggccgggtgcagtggctcatgc

SEQ ID NO: 994708 - DNA, 72 bp, Artificial Sequence
  ENSG00000254477_11 (sequence is synthesized)
tcaagaccagcctggccaacatcagtgcacgcctacaaatcccagctactcgggaggctgcggcagaagaat

SEQ ID NO: 994709 - DNA, 120 bp, Artificial Sequence
  ENSG00000254477_12 (sequence is synthesized)
tatgaattttctacaacttaccaagttggaaaatagctgcaagattttataaggcaaaaatcactaaaaaatcaggtaatccagaaaggtgctttagataaggcctagcatgccacagga

SEQ ID NO: 994710 - DNA, 120 bp, Artificial Sequence
  ENSG00000254477_13 (sequence is synthesized)
cacccaataatttttggagtttttgccattttaacttttttagtttttccagacattcccaaggtggcaccttccatagttgtacagtttcaactgtgttaaaatttctttgtcggggac

SEQ ID NO: 994711 - DNA, 120 bp, Artificial Sequence
  ENSG00000276115_0 (sequence is synthesized)
ggcaggagaatcacttgaatctaggaagcggaggctgcagtgagatgagattgcgccactgcactctggcctggcgacagagtaagatgccgtctcaaaaaaaaaaaaaaattggtgttt

SEQ ID NO: 994712 - DNA, 120 bp, Artificial Sequence
  ENSG00000276115_1 (sequence is synthesized)
agtaagatgccgtctcaaaaaaaaaaaaaaattggtgttttcttggtttgttttgtgttttagtttaaggagacacatttcctcatcttaaggacttttttgctgctctgatgctggtca

SEQ ID NO: 994713 - DNA, 120 bp, Artificial Sequence
  ENSG00000276115_2 (sequence is synthesized)
tctagtccattcttttgctctaaactgagccttgcctcccagttcttcattgcacttcagattgtgtcttactacaaagagaaaattagtctgtgatcagtttggatcagaagaactgaa

SEQ ID NO: 994714 - DNA, 84 bp, Artificial Sequence
  ENSG00000276115_3 (sequence is synthesized)
gaaaattagtctgtgatcagtttggatcagaagaactgaaaatgtacatttagaatagaagccagggatgtgatgcacacccgt

SEQ ID NO: 994715 - DNA, 120 bp, Artificial Sequence
  ENSG00000276115_4 (sequence is synthesized)
gacagaacaagaccctgtctctaaaaaataaaaagaagaaaagaaagaaatttaaagtaggaagggctaccgtttgcttctggccaagcttcacctctaaccataggatcttttaaaaga

SEQ ID NO: 994716 - DNA, 120 bp, Artificial Sequence
  ENSG00000276115_5 (sequence is synthesized)
ctaaccataggatcttttaaaagactagttctgaggtcctttactctgagtaggtatttatggaataagccattatgtattgacattagaatcagttaaacataaatttttttctctttt

SEQ ID NO: 994717 - DNA, 120 bp, Artificial Sequence
  ENSG00000276115_6 (sequence is synthesized)
tatgcactacttgacatcaaaagcaaaaagaggtaagttggctataaacctgtaggtgaacctaatttttcttagtagatttgttcctgagtagctttgcttcaattaaatttctgtgaa

SEQ ID NO: 994718 - DNA, 120 bp, Artificial Sequence
  ENSG00000276115_7 (sequence is synthesized)
gcttttcctttaatcaagttatacttacggtttaatttgcttgtgaagacaaggcattttcaaacacttggtttagttttgagataactgaattgtttctcccaccagaaatgtggatta

SEQ ID NO: 994719 - DNA, 120 bp, Artificial Sequence
  ENSG00000276115_8 (sequence is synthesized)
catgttataagtctttcctattttcttaaaaatgaaaaaaaaagccaagaaacaactgacattggtgaaagtctgtaattttcagatccattgatttacagaagaagatgccctgaacct

SEQ ID NO: 994720 - DNA, 120 bp, Artificial Sequence
  ENSG00000276115_9 (sequence is synthesized)
ctcagaatattttctagtgtgattttttttaatgattaaaaaaaatgaagaaaatattaaacaagaagatcaaacacatttcattgagtggtgtctcatatgtttttcttgtttgggatc

SEQ ID NO: 994721 - DNA, 120 bp, Artificial Sequence
  ENSG00000276115_10 (sequence is synthesized)
tatttttataattgatctttttagtggattcttgattgtagtttaacttatttctcttttgtttctttttgatgatgcatcaattctgacatttcaaaggtacagctggtcttcattaga

SEQ ID NO: 994722 - DNA, 120 bp, Artificial Sequence
  ENSG00000276115_11 (sequence is synthesized)
tatgtgctgttattgactttgcttaacaagaacagaccatcatcgtaccaccttgagttaactctgtgccagctggccttgctcttgagaaggtcatttctaaacagaaggttatttttt

SEQ ID NO: 994723 - DNA, 120 bp, Artificial Sequence
  ENSG00000276115_12 (sequence is synthesized)
gaaagatttttaactggtgtaagaatctggcagcagaatgtacttttacctcttggtgccactgtatttaattaccctctccccatttatcctccatgtctttcctaccataagctattg

SEQ ID NO: 994724 - DNA, 120 bp, Artificial Sequence
  ENSG00000276115_13 (sequence is synthesized)
ataacacacatgctcatggtttaattgtaagttgttcagaaatagaaagctgactgtactgcagggcgtttttatatttctcttttgcaagatttgaaataaaaatagatttttgcatga

SEQ ID NO: 994725 - DNA, 120 bp, Artificial Sequence
  ENSG00000254473_0 (sequence is synthesized)
gcggccgcgggggcgccagcaccttcggctccggcggcgctatcctgggagcccggaggaccgccgctttcaccactctcggccatggctgtggcggcggcggcggcggtgactcagact

SEQ ID NO: 994726 - DNA, 120 bp, Artificial Sequence
  ENSG00000254473_1 (sequence is synthesized)
aaatgatgttagacaaaaagcaaattcgagcaattttcttattcaagttcaaaatgggtcataaagcagcggagacaactcacaacatcagcaacacatttggcccaggaactgctaatg

SEQ ID NO: 994727 - DNA, 120 bp, Artificial Sequence
  ENSG00000254473_2 (sequence is synthesized)
acagtgcagtggtggttcaagaagtttcacaaaggagaggagagccttgaagatgaggagcatagtggccagccatcggaagttgacagtgaccaattgagagcaatcatcgaagctgat

SEQ ID NO: 994728 - DNA, 120 bp, Artificial Sequence
  ENSG00000254473_3 (sequence is synthesized)
cctcttataactacacctgaagttgctgaagaactcaacattgaccattctacagtcgttcggcatttgaagcaaattggaaaggtgaaaaagcttggtaagtgggtgccttgtgaacta

SEQ ID NO: 994729 - DNA, 120 bp, Artificial Sequence
  ENSG00000254473_4 (sequence is synthesized)
ctccccaccttacctcatgcccagctgggccgtgttcacccctccgcgctgtcacaatcgccttgccctcccttgcctctctgtctactctgcgttccccgctgggaggagggtctggtg

SEQ ID NO: 994730 - DNA, 120 bp, Artificial Sequence
  ENSG00000254473_5 (sequence is synthesized)
agtgtcatcttctcttattctacgcaacaacagtgaaccatttctcgatcagattgtgatgtgccatgaaaagtggattttatacgacagccagtgacagccagctcagtggttggacca

SEQ ID NO: 994731 - DNA, 88 bp, Artificial Sequence
  ENSG00000254473_6 (sequence is synthesized)
tatacgacagccagtgacagccagctcagtggttggaccaggaagctccaaagcatttcccaaagccaaacttgcaccagaattggtc

SEQ ID NO: 994732 - DNA, 120 bp, Artificial Sequence
  ENSG00000254473_7 (sequence is synthesized)
atctgagaaatatgctcagtaaatcgatgagatgcaccaaaaactacaacacctgccgctggcattggtcaacagaaagggcccaattcttctccacgacagtgcccaaccacacattgc

SEQ ID NO: 994733 - DNA, 120 bp, Artificial Sequence
  ENSG00000254473_8 (sequence is synthesized)
acaaccagcacttgggaaattgaacgaattgggctacgaagttttgcctcatcctccatattcacctgacctctcgccaaccgactaccacttcttcaagcatcttgacaactttttgca

SEQ ID NO: 994734 - DNA, 120 bp, Artificial Sequence
  ENSG00000278493_0 (sequence is synthesized)
cagattggacaatgcagaagccccgtctagcccagtggtcactgccttgtgggactacagacctggaaggctcaagagaagctggaaatctggatttgtatgtcagatcacctgattttc

SEQ ID NO: 994735 - DNA, 120 bp, Artificial Sequence
  ENSG00000278493_1 (sequence is synthesized)
acatttaggctcaaaaaaatactatgtaggacaaacaaagcccacctgcatatgggctgcacacagagaccaccagttaccatcttttgccttgagccacagagtgacagcattgaagcc

SEQ ID NO: 994736 - DNA, 120 bp, Artificial Sequence
  ENSG00000278493_2 (sequence is synthesized)
cccgaggcaggaggagggaaaggtgaaagcagagaggatacagggagaagggaaggtcgggcagaagaggcaagggccagcaggtgatgagaggggaactttgatcctaaggggtttttt

SEQ ID NO: 994737 - DNA, 120 bp, Artificial Sequence
  ENSG00000278493_3 (sequence is synthesized)
aatgcaagctttatataaattatacactaactcagaggtgggtttttcttgctgttttgatgacagctctttacacctggattcagagtgaatcagtctaatatatttgatctgacccaa

SEQ ID NO: 994738 - DNA, 120 bp, Artificial Sequence
  ENSG00000279070_0 (sequence is synthesized)
ctccctccgccacccattggtccctgccgcatgccactggctgtctgttgagccaggtggagccgaaggggccaaccggttttctttattaaacgtaagcgaagtccgaaagagccctgc

SEQ ID NO: 994739 - DNA, 120 bp, Artificial Sequence
  ENSG00000279070_1 (sequence is synthesized)
ttttgattggagccagaagagcctggagcgaggtcctgtaaggcgctgaagcctcggcaacgtgccatgataggctgaggaagtcaaactcctgcctgacgccgctagtgtcaccgaagg

SEQ ID NO: 994740 - DNA, 120 bp, Artificial Sequence
  ENSG00000279070_2 (sequence is synthesized)
ccggacaacacaagagaaaagttcattcattcattcgttgaacaattatatgagcgcctactgtgtgccaagcactgtaaagggtggatgaaaagacaagctgatagaatgccaacgaac

SEQ ID NO: 994741 - DNA, 120 bp, Artificial Sequence
  ENSG00000279070_3 (sequence is synthesized)
agaagtaaaaggaatgatggagttagaaaatcaccattttccaaaatcagtacatggtggcgcgtgactacagtaccagctactggggaggctgaggtggaaggatcacctgagttcagg

SEQ ID NO: 994742 - DNA, 120 bp, Artificial Sequence
  ENSG00000279070_4 (sequence is synthesized)
aggttgaggctgcagtgagctgaaggcgcgccactgcactccagcctgggcgacgagagtgagaccatatctcaaaacaacaacaaaaaaagtaaaatcataaaagatattcagagacag

SEQ ID NO: 994743 - DNA, 120 bp, Artificial Sequence
  ENSG00000279070_5 (sequence is synthesized)
acgtcagggttgcatgtgcaaccctgattcagaagcagcaatagatgtcaaaacaactgggtgaaagttggatgaggagcaagatatttacatatagggttgccagatctagcaaataaa

SEQ ID NO: 994744 - DNA, 120 bp, Artificial Sequence
  ENSG00000279070_6 (sequence is synthesized)
aacacaagatgcccaatcaaatcagaattttagataaacactttgggaggtcatatttatactttatttatggcttatctggaattcagattcaactgggcttcctgtattttttcccgc

SEQ ID NO: 994745 - DNA, 84 bp, Artificial Sequence
  ENSG00000279070_7 (sequence is synthesized)
tatctctcccgcaaggaaacttaaggagggcagggcgcggtggctcacttctgtaatccccagctctttgggaggccaaggcgg

SEQ ID NO: 994746 - DNA, 75 bp, Artificial Sequence
  ENSG00000279070_8 (sequence is synthesized)
tactggggagggagccgagactgtgccactgcacttcagcctgggcaacaaaaagactctgtctcaaaaaacaaa

SEQ ID NO: 994747 - DNA, 120 bp, Artificial Sequence
  ENSG00000279070_9 (sequence is synthesized)
tcagcctgggcaacaaaaagactctgtctcaaaaaacaaaacaaacaaacaaagaacaggggaaaccaatcctgtcaacaccttgacctttacttctagcctccaggaaggaaaggaaaa

SEQ ID NO: 994748 - DNA, 120 bp, Artificial Sequence
  ENSG00000279070_10 (sequence is synthesized)
tggtaaatttacagtgaagaaacatgacagttactgcttcaaccacgtgatcaaagttagcaccacccagtaagggaacacacatatatgccttctgataggatccattgaggagacaca

SEQ ID NO: 994749 - DNA, 120 bp, Artificial Sequence
  ENSG00000279070_11 (sequence is synthesized)
tcacttcgtagctcttaacaagtctgtaaatttaataaggtgattttcctaaaccaatgagtctcctaaaaacggttacagattcctcatttcacattgagaagaaagatcacagaccta

SEQ ID NO: 994750 - DNA, 120 bp, Artificial Sequence
  ENSG00000279070_12 (sequence is synthesized)
gaatgttaaaactgtccaggaaaaaaaacagttgtaaagctttggaacacactagtagatcttaatctattcacaaggaaatatcagacaagcccaaagtgagagatattctacaagata

SEQ ID NO: 994751 - DNA, 120 bp, Artificial Sequence
  ENSG00000279070_13 (sequence is synthesized)
aattgcttgtactcttgacagctccaaggccatgaaagacaaagaatgagaaactgttctccattaaaggagcctaggcatgacagctaaatgctgtttgattctggattggattctgga

SEQ ID NO: 994752 - DNA, 120 bp, Artificial Sequence
  ENSG00000279070_14 (sequence is synthesized)
cccaaaactttttgtctttctttttttctctttcttgcttctttttttctctcttttgctatagatgacattataggacaattggcaaaatatgaataaagtctgcaactagctaatagc

SEQ ID NO: 994753 - DNA, 120 bp, Artificial Sequence
  ENSG00000287467_0 (sequence is synthesized)
ggcaagacctgctaaataacacctttgtctgagacagggttatgcatcatctcctcttctatgccctcatggcaagtctaggtggcttaagattaagaagtgaggacatggaggcggact

SEQ ID NO: 994754 - DNA, 120 bp, Artificial Sequence
  ENSG00000287467_1 (sequence is synthesized)
gtccctctgagcagctctgaagtagggccaagcacactgccttccaagctgacagccacttgtttgtttcatctttcctgagaactaagagaggttcacccagctcagttcttctcaaag

SEQ ID NO: 994755 - DNA, 120 bp, Artificial Sequence
  ENSG00000287467_2 (sequence is synthesized)
acaccccgtctgtgcattgtgcttgtttgctcatccatgaaaagaggaagagagaacagccgtggatgtgatgtcagtatcaaaacttccttgaggacaggcgggataaattgggcaaac

SEQ ID NO: 994756 - DNA, 120 bp, Artificial Sequence
  ENSG00000287467_3 (sequence is synthesized)
ggctgagttctcccgcagcctttgggagattggccctgagaacccagaatagatgcccattatacatcatgcgtgtgctatggaaaggtctgtgccaggcaagcctgagagcctaattcg

SEQ ID NO: 994757 - DNA, 120 bp, Artificial Sequence
  ENSG00000287467_4 (sequence is synthesized)
ctattcctatggggttccatgcacccatcctggctgtcaggccccaatacccatcatacttgacctgtactgggtattttttcactcagatccctcactctacagtgactctaccagaaa

SEQ ID NO: 994758 - DNA, 120 bp, Artificial Sequence
  ENSG00000287467_5 (sequence is synthesized)
gcctgctcctgttcccatgagtggttggcatggaaagggccatcagtagaacttggctggcaacatttgcaggagcaggaatcaacagaggacccaggagaaagggatggagcccagggc

SEQ ID NO: 994759 - DNA, 120 bp, Artificial Sequence
  ENSG00000287467_6 (sequence is synthesized)
atgaaacatagtccagattcctgctggtatgtccatgtgacttggtttcaattcctcaccattgtgtcactgtggccttctagagaagtccaaactgctggaaacgggcagtgctttctg

SEQ ID NO: 994760 - DNA, 120 bp, Artificial Sequence
  ENSG00000287467_7 (sequence is synthesized)
cgctaaccccttctggtctgactgctcagcttagaggaaggaagaaaacactcagaattctgagagcaaaaccccccaaaaaatctactcaaagcacctgaagttcatccctggggagga

SEQ ID NO: 994761 - DNA, 120 bp, Artificial Sequence
  ENSG00000287467_8 (sequence is synthesized)
gaagaaaggaagagcagatgccctgtatctccatgggggtactgaggcacagagctagggccgcctagctgcccagggtagatctcagagggtgactcatctgaattgccgattcccagc

SEQ ID NO: 994762 - DNA, 120 bp, Artificial Sequence
  ENSG00000287467_9 (sequence is synthesized)
accagagcaaggcgctcctcaagaactgagtccgggttcatgtcttctgggacccctggcttcccttttcccacttgagaactaaaactgggtgctctgcccaccccgctcaccccgcct

SEQ ID NO: 994763 - DNA, 120 bp, Artificial Sequence
  ENSG00000287466_0 (sequence is synthesized)
tccaacatagatttccacggagagcacggccctgggcatgcagaacagccaaggggatcctcccaaagagcacagcagagcaccctgccaaccctcagaaccttcccagctcaggcgtct

SEQ ID NO: 994764 - DNA, 120 bp, Artificial Sequence
  ENSG00000287466_1 (sequence is synthesized)
ccctgcaggctgataaactccagtggctcttcccaagcgcggagcagttcctcaggatgaaaaagagcctagtccacctgtccataagtaacagtggctgccccgttggcccagtacaaa

SEQ ID NO: 994765 - DNA, 120 bp, Artificial Sequence
  ENSG00000287466_2 (sequence is synthesized)
tcgccactctgcccaggaaggcagcctcaggttcccctaactggcaagcaaacatattctgcgccatcacgagctgaagggacatgtgggaatcagaaggaaaacttgtcttttctggga

SEQ ID NO: 994766 - DNA, 120 bp, Artificial Sequence
  ENSG00000287466_3 (sequence is synthesized)
agattctaatcaagactaaaatattggtgtgagaccatctctgattttcatctgagtctccactgggtccactgacttccgaagtcctcgccgccgcactgggcatgctgaccatcctac

SEQ ID NO: 994767 - DNA, 120 bp, Artificial Sequence
  ENSG00000287466_4 (sequence is synthesized)
gagttatgtcctgcttgcctcacctgttattcatcctttcgtttccctcctctgccttcccttggataaatcaggccaatgtctctgtcctccaaagacacacggcccggggtccaacag

SEQ ID NO: 994768 - DNA, 120 bp, Artificial Sequence
  ENSG00000287466_5 (sequence is synthesized)
gctgcaggaacttcagtgcctgctatctgcttttcttcagtgggccccactcccaaagctacaccatgagatggaaactgtccccgggggagcaggaccatccccagggctgccaggaaa

SEQ ID NO: 994769 - DNA, 120 bp, Artificial Sequence
  ENSG00000287466_6 (sequence is synthesized)
tctgccgtgagtgaggtgcacaaaccctgggcacagtccacaaacccagtcaatcttaaaactgattaataattgttggcacaaaatgtcccagtgtgtgaaatcctggataaaaggaaa

SEQ ID NO: 994770 - DNA, 120 bp, Artificial Sequence
  ENSG00000287466_7 (sequence is synthesized)
aggaactgatgggcaagaagattcgcgcaggcgctgagcgtgttgcctcaccaaggcagggggcctggaggccccatcgaactcagacaggtggacggtgctgcagggtacacatgggaa

SEQ ID NO: 994771 - DNA, 120 bp, Artificial Sequence
  ENSG00000287466_8 (sequence is synthesized)
gacccctgcacggggctagcagggagagggtgtctccaagcccttgggaagggcacaggcaatcgccttggctgagatggcagaatggcatgcgttcaagttgtttcttgaggaagaggg

SEQ ID NO: 994772 - DNA, 120 bp, Artificial Sequence
  ENSG00000287466_9 (sequence is synthesized)
cgttcaagttgtttcttgaggaagagggtgtggggtctacattctcccctagtatacaaatggagatacctgtttgaaaggttatatagattaggctgggcacagtggcttatgcctgta

SEQ ID NO: 994773 - DNA, 120 bp, Artificial Sequence
  ENSG00000287466_10 (sequence is synthesized)
tgtaatcctaactcctttggaggccaaggcaggaagactgcttgagaccaggagttggtgactagtctgggcaacatagcaagacttgtcctttcaaaaaaattagccaggcgtggtggt

SEQ ID NO: 994774 - DNA, 120 bp, Artificial Sequence
  ENSG00000287466_11 (sequence is synthesized)
gaggtgggagggatcacttgaggctacagcaagctatgattgcaccactgtactccatcctgggcaaaacagcgagactctataactaaagttatatatatacatacatatatatatact

SEQ ID NO: 994775 - DNA, 120 bp, Artificial Sequence
  ENSG00000287466_12 (sequence is synthesized)
cattgggaactggccatatccccccaactccaaactccatcagctggcatgtgcagaccagagccccagcctccttcctaccacttggcatcttccccaacttggtatccccgctgaact

SEQ ID NO: 994776 - DNA, 120 bp, Artificial Sequence
  ENSG00000287466_13 (sequence is synthesized)
gctgctcagcgcggctcagggagcaccaggtctgaacagactcctggcaaacttgtctgttcacagtgatgtgactgggtgttttgtgtcttctcttcataactagactgtatgctccta

SEQ ID NO: 994777 - DNA, 120 bp, Artificial Sequence
  ENSG00000287466_14 (sequence is synthesized)
agcgcaagggcttcattgtaaactttgcttatatctgcaaggcactaatcagttatgcaccctacagcaccctacactacgcagagtaatcagccactaaggagtagtgaaggatctgac

SEQ ID NO: 994778 - DNA, 120 bp, Artificial Sequence
  ENSG00000287466_15 (sequence is synthesized)
aaccagagagctcggtaaggacgatgccatccggctggctcctctgcaggtggccacagattgagcagcagagattaggaacagaattcagagacataagtcattcatctagggctgtat

SEQ ID NO: 994779 - DNA, 120 bp, Artificial Sequence
  ENSG00000287466_16 (sequence is synthesized)
gctcggcccacgtagatcctgccagccaacgaaacggggctccatgcattccacaagtcagagtcactcaacattccaggggctactcaaatctcctttagccatgtgacgaagcccctc

SEQ ID NO: 994780 - DNA, 120 bp, Artificial Sequence
  ENSG00000287466_17 (sequence is synthesized)
aactcactaactctaaatactttctttttttttttacaggccatttattgaaagtcaggattacatttattcacaatatcatattcttaatgagagcatatcaaaccttatttggatgca

SEQ ID NO: 994781 - DNA, 120 bp, Artificial Sequence
  ENSG00000287466_18 (sequence is synthesized)
atccagaacttatttaaacagttaagcacatatacacaaaacataaaacaaagaaagaaagccatgtaatgttattggacactaaagataaattagctttctgagatcagcaattgataa

SEQ ID NO: 994782 - DNA, 120 bp, Artificial Sequence
  ENSG00000287466_19 (sequence is synthesized)
ctgaagtctgctgatagttaaccatacctctgtgtacacttaaaagctaacctcacctatgtgaagtcatactgaattcaaagaggaaagatgagatacttacatgattcaataccgtgt

SEQ ID NO: 994783 - DNA, 120 bp, Artificial Sequence
  ENSG00000287466_20 (sequence is synthesized)
aaactagaccgcatcaggttccagcacagatcatgccactgacagcttacaataccacaatttaatttcaagacaaacactccagatttcaaatttgagatgaatatatgtgatctgaga

SEQ ID NO: 994784 - DNA, 120 bp, Artificial Sequence
  ENSG00000287466_21 (sequence is synthesized)
attacttccagagctttcaaagtggaatcgtatctctgcttaaacaccaaaacatggctaaaaactgatgcgaagatgagaaaatctctcacactgtggggagatcagagtaagggcaac

SEQ ID NO: 994785 - DNA, 120 bp, Artificial Sequence
  ENSG00000287466_22 (sequence is synthesized)
atactgctaatcattcgattcaggtcataccaatcagcatcttatccttgagatcaggtattccgtctcaaagcaaaattaatgaataaaccagaaatcttttatcgccttctgttgtga

SEQ ID NO: 994786 - DNA, 120 bp, Artificial Sequence
  ENSG00000287466_23 (sequence is synthesized)
aacagttatccactccagaggaagaaacaggaggaaattaagcaagtctatgccataaaccactgctcctaatcaaaagatgtaaaacaaacaccgttctgtgatacaatcaattgctac

SEQ ID NO: 994787 - DNA, 120 bp, Artificial Sequence
  ENSG00000287465_0 (sequence is synthesized)
tagtgaagctacaccattcccaagttgattaaagtaaaaaacaaaaacaaaaaaatccctgtcagaattttgcttctcatggcacttaaggaatctgggtggcatgggaatatggacagg

SEQ ID NO: 994788 - DNA, 120 bp, Artificial Sequence
  ENSG00000287465_1 (sequence is synthesized)
cttttaaaattctttcattattgacttctacccgatgactgacactactgttagggctccagctgcaagttaagactaacagatctcttccacaggtgtctcaggaacacagcagcaggt

SEQ ID NO: 994789 - DNA, 120 bp, Artificial Sequence
  ENSG00000287465_2 (sequence is synthesized)
aaaggctaacggacgtatgtaaaccatgctagaagataagagatctggatggataggttaccgaactcggacaaagtgaaaagaatgtctcgttttcctaattaatgcgttgtaaaagtt

SEQ ID NO: 994790 - DNA, 120 bp, Artificial Sequence
  ENSG00000287465_3 (sequence is synthesized)
gcattactgtctgaatatgactggcaaattttgtcatatccagatattgaaactcataactaagttatcagagtaataatcttttgtttaaaaataggggtctgggtgtctttctgtgcc

SEQ ID NO: 994791 - DNA, 120 bp, Artificial Sequence
  ENSG00000287464_0 (sequence is synthesized)
aaacgaaggccggagcagccctgcctgtggggctgtaatgttttctgcagccttgatgagccgccctgggctgtttcaaagggaacgcagcagtctcctcttgacttccgcagtggccgt

SEQ ID NO: 994792 - DNA, 120 bp, Artificial Sequence
  ENSG00000287464_1 (sequence is synthesized)
attcctgggccgtgcggtgggtgtgtctgcagtcgcattctctgctaggccgccagcccgactctacagaatgcacacctggagccatatggaatctcaggaacctgcaaggcttccctc

SEQ ID NO: 994793 - DNA, 120 bp, Artificial Sequence
  ENSG00000287464_2 (sequence is synthesized)
ccactacgcggactaagggcaaggctctcagaaacatttctaggatgtatgtgctgcaagtaggaaggccagtggttgattagaatgggatcgtacgagtcctaatggatacgtaacgct

SEQ ID NO: 994794 - DNA, 120 bp, Artificial Sequence
  ENSG00000287464_3 (sequence is synthesized)
ccacctgttccacatggttttcgctccgctgggccaatgcctctacctacagcacgtagaggaacatcagactgatttctgctgaacactccttttcatccccctaagggacaatgcggg

SEQ ID NO: 994795 - DNA, 120 bp, Artificial Sequence
  ENSG00000287464_4 (sequence is synthesized)
taccgtgtccttagtttttctcaatcatctttcttatttttcttaattcccttaagaactctgatcttgtttccctctctttgttctgtttgtgatcctctgaaaatgaccctaccctta

SEQ ID NO: 994796 - DNA, 120 bp, Artificial Sequence
  ENSG00000287464_5 (sequence is synthesized)
atttaattaaaacgagctgtttacccactagaatgatacagttaaaaagtttgacaatacaaagtgttggcagggccacagaatcactggaattcttaaatgttgcttatgggagtgtaa

SEQ ID NO: 994797 - DNA, 120 bp, Artificial Sequence
  ENSG00000287464_6 (sequence is synthesized)
agtaatacgttttatttgaaaaagagtttacagtcccttacaaagtaagcacacgacccagaaactctactcctaggtgttcgcaccaagtaataaaatttatgttttaagaacaagaaa

SEQ ID NO: 994798 - DNA, 120 bp, Artificial Sequence
  ENSG00000287463_0 (sequence is synthesized)
accagaggccgcccgagtcccggctcgctcccctccttgcgcccttcgccggggcgggcagccgggcggccgccgagggacatctcgcggctacacccgcagagggaagttctcccaggc

SEQ ID NO: 994799 - DNA, 120 bp, Artificial Sequence
  ENSG00000287463_1 (sequence is synthesized)
agccggcggagccgcaggggactacggaaaggaggatgcaacgagcctgggtccctccgagctgagtagggcccggagtggcccagaagcgctcgactccgaacgcaaaaaatgcctccc

SEQ ID NO: 994800 - DNA, 120 bp, Artificial Sequence
  ENSG00000287463_2 (sequence is synthesized)
gcaaacttttcccgtgggcgccggagggcctggagctggcggagaggagggcgcgagtccaggcggggtcggcctgaaggcagctggggtctgggcttcgagggaaggaaccgcagccga

SEQ ID NO: 994801 - DNA, 120 bp, Artificial Sequence
  ENSG00000287463_3 (sequence is synthesized)
ggcggtgccggccgcagaaggctgagatgctgtttctaacaaacctcccgatgctgctgatgctgcatatctgaagaccacactttgagaagcaaggatctaggagttgtttgttattca

SEQ ID NO: 994802 - DNA, 120 bp, Artificial Sequence
  ENSG00000287463_4 (sequence is synthesized)
tggaataaatatatttcccatcatgttccagctgctctggttaaacaagccactattgtcttttccagaaagatttctctgactccagctcccctttgggtgctcctttttctaaactgt

SEQ ID NO: 994803 - DNA, 120 bp, Artificial Sequence
  ENSG00000287463_5 (sequence is synthesized)
aattgattaataattcaccatttatttcatgtgtggagcagggatagtggtgcttgcctgatgtgcattccttacaaacacctacctgggcatcggggacacagtgtcccctcaaacaat

SEQ ID NO: 994804 - DNA, 120 bp, Artificial Sequence
  ENSG00000287463_6 (sequence is synthesized)
ctctgctgattaactggaagataacactagcttacatttttggaggacataccatgtgccgggtacctagctaagtgttttacatgcattgtctccctcattcagctactactgtcctca

SEQ ID NO: 994805 - DNA, 120 bp, Artificial Sequence
  ENSG00000287463_7 (sequence is synthesized)
tttcacagatgaacaaacaaaggccgatctgccttgtcgacctctgcccaccaccataatccacaggggtactgcccgctagggggcattttggaaatttgcaggtactttcattggtca

SEQ ID NO: 994806 - DNA, 120 bp, Artificial Sequence
  ENSG00000287463_8 (sequence is synthesized)
tcacaatgatgggaggagggggccactgacatttagttgggggtggccccagatgcaggagattggtctgtgtcccacatggctttcatttgtcagacctgacctttgcttcagttgaaa

SEQ ID NO: 994807 - DNA, 120 bp, Artificial Sequence
  ENSG00000287463_9 (sequence is synthesized)
tgtgcatcgaattacggtggaactttaactttgttttacatataaacacaaaatgtttttgcatcttgtgaatacacacaggaatttctggaaatgcaactactgtataagtctaggaag

SEQ ID NO: 994808 - DNA, 120 bp, Artificial Sequence
  ENSG00000287463_10 (sequence is synthesized)
ggatggtactctttttaccactttggaaaatcaggacacagaagccagttccattcatgttatctgtttcagcaatcaacacatatatgatgcccacaagcccagtaatttcatatgtgt

SEQ ID NO: 994809 - DNA, 120 bp, Artificial Sequence
  ENSG00000287463_11 (sequence is synthesized)
atatttctttagttcctgtttcaaaataacagcaatttaaagaaaaagtgtaaaaaatattccagagtgcctgactctctgttcttaaattataaataggtacaaatatctgactgctta

SEQ ID NO: 994810 - DNA, 120 bp, Artificial Sequence
  ENSG00000287463_12 (sequence is synthesized)
tttgtgacctctggtgtagctctgagtgagcatttaaatattaattatgtattactttattttattcctcctctattataatttaggtcattatattgatttttcaactatgtgtatatg

SEQ ID NO: 994811 - DNA, 86 bp, Artificial Sequence
  ENSG00000287463_13 (sequence is synthesized)
aggtcattatattgatttttcaactatgtgtatatgcattagccatgaattaatttcataatcacaatagtgaataatgtaaaaca

SEQ ID NO: 994812 - DNA, 120 bp, Artificial Sequence
  ENSG00000287463_14 (sequence is synthesized)
ataaataaataaataaataaataaccaaacaaaacagttggtataaaaagggagactggaccattacagccaaaagatcctgaggagacacaaccactagctgaaatatggcattgtgga

SEQ ID NO: 994813 - DNA, 120 bp, Artificial Sequence
  ENSG00000287463_15 (sequence is synthesized)
ctgaaatatggcattgtggaagaaatcctggaacaaaaaaaagacattaggtaaaaatcaaggaattctgaatcaagtatggacttcagttagtaaggtctcaattattagttgtaaaaa

SEQ ID NO: 994814 - DNA, 120 bp, Artificial Sequence
  ENSG00000287463_16 (sequence is synthesized)
aaagtgcactcatgtgagatgttagtaatgagggcactgggtgcaaggtacatggaactttctaatcttctcaactttatgcaaatctaaaactgttgtaaaaaaggaaagctgaggaag

SEQ ID NO: 994815 - DNA, 120 bp, Artificial Sequence
  ENSG00000287463_17 (sequence is synthesized)
ggcttcaagacagctgattagaagcatttcatgcccacctcttccacttagtgtgtatagacagtcatactttgaatacaccatccaagagagaatgtcgggattcaatagagaagtaac

SEQ ID NO: 994816 - DNA, 120 bp, Artificial Sequence
  ENSG00000287463_18 (sequence is synthesized)
aagaaacaccagaaagcaggtaagaagggagagagacagcctgcctggaggggatgaactgggagcaggagtaacttcccaaggcaaggaaagggtgagtgacttccagaggcccacatc

SEQ ID NO: 994817 - DNA, 120 bp, Artificial Sequence
  ENSG00000287463_19 (sequence is synthesized)
cccaccatggaatcctgcattcctgccacaagagagtccctcaaccctcccaactcctgacactaacatagggagctgctgggagatcatgggatggaaccactccagggagggagctca

SEQ ID NO: 994818 - DNA, 120 bp, Artificial Sequence
  ENSG00000287463_20 (sequence is synthesized)
cattgggtcccataccctttctgagcctaagcagctatggcaaggtgccattttcagacctagcctttggcagactgcatactgtcctggagcccagcaatggcaagactgaggcattac

SEQ ID NO: 994819 - DNA, 120 bp, Artificial Sequence
  ENSG00000287463_21 (sequence is synthesized)
agagactctgttgctgctgggactgggtagcaagctggaagttgtcgcacagccagagctaaaaagcaagcaagctgtgggcagccgttgttggtgccaagaagtgagtgccactgggac

SEQ ID NO: 994820 - DNA, 120 bp, Artificial Sequence
  ENSG00000287463_22 (sequence is synthesized)
agaagactgggatgcaagcagggtgtgagttgctgcttggtcttagtcgccagctgggtgggagctcctacagccagggaggggcataaactaggaacaggctactactgctgaggtggg

SEQ ID NO: 994821 - DNA, 120 bp, Artificial Sequence
  ENSG00000287463_23 (sequence is synthesized)
gaacaagccccactggaactggagcatgagagagatgtggttttcctaccctctggcccaggctgtgaccactgaggatgaccccaccctctccagtggcagggcctcagtacagctgct

SEQ ID NO: 994822 - DNA, 120 bp, Artificial Sequence
  ENSG00000287463_24 (sequence is synthesized)
ccagtggcagggcctcagtacagctgctaccaccctttacccaagcactccacctgccgtctgaggatcaccatgcccctgccaaccatgtcatccaggctggtcttcaactcctgacct

SEQ ID NO: 994823 - DNA, 120 bp, Artificial Sequence
  ENSG00000287463_25 (sequence is synthesized)
tacaggcatgagccaccatgcccagctgcagaaaagataactattgggtactgcacttaatacctggatgatgaaataatctgtacaacattcctggtgacatgtgtttacctatgtaaa

SEQ ID NO: 994824 - DNA, 120 bp, Artificial Sequence
  ENSG00000287463_26 (sequence is synthesized)
tacctatgtaaaaaaaccttcacatgtacccccaaacctaaaataaaattaaaaacaaagaaaaataaaagaaagtcatatatgggtaagagcacatggtcataaaacctgacaactgaa

SEQ ID NO: 994825 - DNA, 120 bp, Artificial Sequence
  ENSG00000287462_0 (sequence is synthesized)
gacaaggagtgtctgaattcattcagcatcagcctccaactccaccccacacgtatccgctggaaattgctgcagccactccaaccttcagcaaccacctccttgatcagtcagcagcca

SEQ ID NO: 994826 - DNA, 120 bp, Artificial Sequence
  ENSG00000287462_1 (sequence is synthesized)
cattgaggcaagaccctccaccagcaaaatgattatgacttactgaaggttcagataatcattctcactttttggcaacaaagtatattttattaaggtgcaactaaaaattctggatat

SEQ ID NO: 994827 - DNA, 120 bp, Artificial Sequence
  ENSG00000287462_2 (sequence is synthesized)
atattctgtacaaaagaaacaaaataaaagtctcaaggatggagaggagggactggctaaagatgcagagacccaatgaatgacgcagaggtgagtccctcaggttttatttttgttttt

SEQ ID NO: 994828 - DNA, 120 bp, Artificial Sequence
  ENSG00000287462_3 (sequence is synthesized)
cttggaagtgaagaagccagcaacccagaaaccaccaataagcacacacacacgcgcgcgcgtgcgcgcgatcataatgaaagcctgttctcattagccaatggaccagaaaagagtcaa

SEQ ID NO: 994829 - DNA, 120 bp, Artificial Sequence
  ENSG00000287462_4 (sequence is synthesized)
ccttacaagacagaaaactttcagacgataacttcccactccagcgaaatgtcacagaaaaaactgtaattataccctatactctgcaataaagaccaactgaagagcccagagtgtgtt

SEQ ID NO: 994830 - DNA, 120 bp, Artificial Sequence
  ENSG00000287462_5 (sequence is synthesized)
gccaggttaaaatacccctgtcagctggtatcaaaagaagcttaatacagattcaggactttcatcccactcactgggtacaaggccacctactcccctctccatggtgtcagtggaggc

SEQ ID NO: 994831 - DNA, 86 bp, Artificial Sequence
  ENSG00000287462_6 (sequence is synthesized)
caaggccacctactcccctctccatggtgtcagtggaggccatgtaaagactagtcatgagtactttggaaggctgaggcgggtgg

SEQ ID NO: 994832 - DNA, 120 bp, Artificial Sequence
  ENSG00000287460_0 (sequence is synthesized)
tgccagacagtgggcgcacgcaggatactcaaacttgaaaccaacctaccttatcgtgaggaagcctggttcaaatggagaggccaatgtaggtgtacaacagacagtcccagctgaaag

SEQ ID NO: 994833 - DNA, 120 bp, Artificial Sequence
  ENSG00000287460_1 (sequence is synthesized)
gcccagcttgcacacaacatcactgccagacgaatgagaagggccttatgatgattccagcatcagacatttgacttggcccagcttttgctgaactgcatcttgtcatcatgagaggtg

SEQ ID NO: 994834 - DNA, 120 bp, Artificial Sequence
  ENSG00000287460_2 (sequence is synthesized)
aagccagctgggcttctaggtctggtggagacttggagaacttctgtgtctagctaaaggattgtaaatgtaccaagcatccctctgtgtctagctaaaggattgtaaacgtgcaaatca

SEQ ID NO: 994835 - DNA, 75 bp, Artificial Sequence
  ENSG00000287460_3 (sequence is synthesized)
accaatcagcgccagcagcggcaacttggttgggtccccttccacgctgtggaaggtttgttcttttgctcttca

SEQ ID NO: 994836 - DNA, 61 bp, Artificial Sequence
  ENSG00000287460_4 (sequence is synthesized)
acctttaagagctgtaacactcgctgcaaaggtcagcagcttcattcttgaagtcagtgag

SEQ ID NO: 994837 - DNA, 120 bp, Artificial Sequence
  ENSG00000287460_5 (sequence is synthesized)
tcattcttgaagtcagtgagaccacgaactcaccagaaggaagaaactctggacacatgtgaagggacaagcaccggacacaccatctttaagagctataacacccaccatgaaggtcca

SEQ ID NO: 994838 - DNA, 120 bp, Artificial Sequence
  ENSG00000287460_6 (sequence is synthesized)
accagaaggaataaattctggacacaatcattgtgagcagcctagagagaaagcatgcagtatgtgttcattattcaccatagagtcctgtagggtataattgtctaaattgacctgtgg

SEQ ID NO: 994839 - DNA, 120 bp, Artificial Sequence
  ENSG00000287460_7 (sequence is synthesized)
gtcctgtagggtataattgtctaaattgacctgtggtaaatccttaaaatatatttagtggtgaaatcatccatatttattccaaaattaataactctttttggataagaaagctttgga

SEQ ID NO: 994840 - DNA, 120 bp, Artificial Sequence
  ENSG00000287460_8 (sequence is synthesized)
aaaaccttttttagagtgcatttggaaaaaacttcaacaaatttccctgattaaattaaatttgagttattcagatctttccctctgatttgaaatcataaagtttaatgatgcatttga

SEQ ID NO: 994841 - DNA, 120 bp, Artificial Sequence
  ENSG00000287460_9 (sequence is synthesized)
aagaattaagttaaaaatatctacaagaaattgaacagtcctgaagactacagtgccaagcagactaggtatcttttctgttctgttggaagctcaaaataaatatgaaagaggccaaaa

SEQ ID NO: 994842 - DNA, 120 bp, Artificial Sequence
  ENSG00000287460_10 (sequence is synthesized)
gaaaagaagtggaggattttcttcaggcttgggtaacaacatttgtcagtaggttctgaagtatcagaatctctttgaaactggcccagtactcccatagactgttctttttgataaaca

SEQ ID NO: 994843 - DNA, 120 bp, Artificial Sequence
  ENSG00000287460_11 (sequence is synthesized)
gtatcaaagaactgaaactcaccagatcactgcaccagatgcctccttgcctctccctagttcctgttttcttacacattgttacatttcttctctgctacataaacccctagttttagt

SEQ ID NO: 994844 - DNA, 120 bp, Artificial Sequence
  ENSG00000287460_12 (sequence is synthesized)
cattcagggagatgaatttgagactgagctcccatctccttggttgcaacacctgattaaagaaagccttcttccttggcaatacttactgtctcagtgattggctttctgtgctacgag

SEQ ID NO: 994845 - DNA, 120 bp, Artificial Sequence
  ENSG00000287460_13 (sequence is synthesized)
cagcaggactagaccaaagcccctgtgttttggtaacagattttggttctttgattgggaagacattgcttgtggcttggttgctgtgggccagaagtcccagaagtgctcctaagcagt

SEQ ID NO: 994846 - DNA, 120 bp, Artificial Sequence
  ENSG00000287460_14 (sequence is synthesized)
tgcccacccaatttcggctggaggtgagtttctgtctctctctggccccacaagcgctgaccctaaccacgttcctgattgccttggatgaactgactttgaaatttgacatctgcatcc

SEQ ID NO: 994847 - DNA, 120 bp, Artificial Sequence
  ENSG00000287460_15 (sequence is synthesized)
caataggtgagtgtcttttgtgggtccggacagcaggatatactcctccctattaatttttaaaggaatttccatttgcaaaacaagcccaactaattgagagaggagaacaacctgttt

SEQ ID NO: 994848 - DNA, 120 bp, Artificial Sequence
  ENSG00000287460_16 (sequence is synthesized)
tagtgtggacagtcttgggggttttctgtaattgtgtgttgtgtctgggcaagtgagtttcttttatgggtaccagacaacagggtcagctcttctcaatataggaaattcctaaggaat

SEQ ID NO: 994849 - DNA, 120 bp, Artificial Sequence
  ENSG00000287460_17 (sequence is synthesized)
ttttgtttgcacttgatcaagcccagctgatagagagaggaagcaccctgtttcagtttggacactcttggggcttctttgttgctgcagcagtaggattgtgttttggtgattgtgtgt

SEQ ID NO: 994850 - DNA, 120 bp, Artificial Sequence
  ENSG00000287460_18 (sequence is synthesized)
gtgtttgctatattatagtcatgaggaattagaattcagtaaacttgatattcttttgcaacactgtttgccccaatattgcttggaatctggagtttgctgtttaataggaaagtggga

SEQ ID NO: 994851 - DNA, 120 bp, Artificial Sequence
  ENSG00000287460_19 (sequence is synthesized)
tggagttgcatgtattcaggcttttgcactgctttttaaagcagggttgggcctgggttgtatgtgatgttctcctttggtactgtttggcctcactgttctatggaatctggggaagtt

SEQ ID NO: 994852 - DNA, 120 bp, Artificial Sequence
  ENSG00000287460_20 (sequence is synthesized)
tggcctttaaaaatgaaactgccatgaaaactgctttacacaaagttttgattcacagtgttcattggattacctaatccagtgaatcatttggcaaacaaagtgtaaccatgttaaacc

SEQ ID NO: 994853 - DNA, 120 bp, Artificial Sequence
  ENSG00000287460_21 (sequence is synthesized)
gtgagtttgtattgctatctcatggataaagttccaaggtaaaagctattgaatttttgtttgtgtgtttatatatgtctagatgtgtttatttgtattcacatttattgttatatgttg

SEQ ID NO: 994854 - DNA, 120 bp, Artificial Sequence
  ENSG00000287460_22 (sequence is synthesized)
ctccactgcttcctctccttggcttcaggaggtaccaggtggctttactgcagcctctgtcaccctgtgatctacaggcactgggggagccatagggaggatgccaaagctgggaaaaga

SEQ ID NO: 994855 - DNA, 120 bp, Artificial Sequence
  ENSG00000287460_23 (sequence is synthesized)
tttttattgttttaaagagtattagaagaagcgaatgttaagatggcctactagatgcagccaggaggaacatctgccaccaagggaccatgacatcgggaagatctgcactttaagcag

SEQ ID NO: 994856 - DNA, 120 bp, Artificial Sequence
  ENSG00000287460_24 (sequence is synthesized)
atctatagaggaaggcatgcagagtggatagagagatggatggagtggatagatcaccctgggctgaaaggggaggaagctgggaacgctgcacagggctatcacctactggaactggct

SEQ ID NO: 994857 - DNA, 120 bp, Artificial Sequence
  ENSG00000287460_25 (sequence is synthesized)
ctgggcccccagtgactcatgggaaaagggtgcgctaaaaggtaaggcatgacctgctcttcctacaaacttctggaatcctggcatcaggagaccccacaaaccccatggacacttgaa

SEQ ID NO: 994858 - DNA, 120 bp, Artificial Sequence
  ENSG00000287460_26 (sequence is synthesized)
ctggcagggagagatgcttagagagttggtaggggcagaactccagcctgtacagaacacggaatgttgagtgtgggacatctgcagaggagcatagccaggggtgcccacttcccaaag

SEQ ID NO: 994859 - DNA, 120 bp, Artificial Sequence
  ENSG00000287460_27 (sequence is synthesized)
cagcctgccatgctctcctaggagactttagccttaggggaactgacagacctaaacagagcaggacaggccaatttgatctcaatgtgccctctctgccaccccctactccatctggtg

SEQ ID NO: 994860 - DNA, 120 bp, Artificial Sequence
  ENSG00000287460_28 (sequence is synthesized)
actatgcctgaccatcagagagctccagcagagtggcccttgatgactctcaccagtccacctgaaccctcccaccactgcatcccctatgccactttgccatgcacttgtcatagccct

SEQ ID NO: 994861 - DNA, 120 bp, Artificial Sequence
  ENSG00000287460_29 (sequence is synthesized)
cccaaacccctccgcacattgcttagccagcttgcaggtgcaggggaccttcccttccttctccagctgaggccatccaccacaatcaagtaggctttatctctgggttacaaggttggt

SEQ ID NO: 994862 - DNA, 120 bp, Artificial Sequence
  ENSG00000287460_30 (sequence is synthesized)
tcaacgtatgcaaatcaatgtaccccaccatgccactgctgccaatgtgagtgtacccccaaccaactgcatagccattgccattttgaacatgtatatggaggccagtggccccaccct

SEQ ID NO: 994863 - DNA, 120 bp, Artificial Sequence
  ENSG00000287460_31 (sequence is synthesized)
tcattgtgtaccaccacctctgctggcccaaatgaatgcatggttccagaagccctgcacccaccagagctctgcccagagctgacatcaccactgacacaaacatgcatacaaaggttg

SEQ ID NO: 994864 - DNA, 120 bp, Artificial Sequence
  ENSG00000287460_32 (sequence is synthesized)
gcagcctggcaaccaccggtgccccactcgagctggcgagagtgcaccctgccatactgcctgctattggtacatgcacatgagcacagttcccattgccactgctgcagtgaagcactt

SEQ ID NO: 994865 - DNA, 120 bp, Artificial Sequence
  ENSG00000287460_33 (sequence is synthesized)
tggctggcaccatctgttgaagtattgtgaccagctgctgtgacccatctagcacagcaggttcctaaactcaagtggccagttgacaaagccaggggcctgataccaaccttccagagt

SEQ ID NO: 994866 - DNA, 120 bp, Artificial Sequence
  ENSG00000287460_34 (sequence is synthesized)
tatggcataaatcccaagagtgctgagctgagccttggctccctaaaatcttccagaaatgaagccagctgactgaagccaccttataccacaatgaaaccccgaagagcataaaaacaa

SEQ ID NO: 994867 - DNA, 120 bp, Artificial Sequence
  ENSG00000287460_35 (sequence is synthesized)
gataaaagcaaaaaagacaacaactttaaagacttaaggaatattggcacacacagatgagaaagaataagccagaactctggcaaatcaaaaagccagagtgtcttaacaatgaatgcc

SEQ ID NO: 994868 - DNA, 120 bp, Artificial Sequence
  ENSG00000287469_0 (sequence is synthesized)
atcactaacaggaacaaagctggaatggaagtgctcccagatcctgggcagagacagaaaccgttctagatcatttgcgctggggaaagctattccagctgtcccgtgcagagacgtgct

SEQ ID NO: 994869 - DNA, 120 bp, Artificial Sequence
  ENSG00000287469_1 (sequence is synthesized)
tggcaaggagcagaagttgcaggccaacaactgcatgtgggggcaaatccaccagcttcagtcaagcctcggatgactgagctcccagctgacaacttgattacagacttgtgagagacc

SEQ ID NO: 994870 - DNA, 120 bp, Artificial Sequence
  ENSG00000287469_2 (sequence is synthesized)
cttagccagacccactccagatccaggtctcaggagccctcggggaaggtttggtggctgcagaaaggactttctctgagaatccagaagtgacatcagggaagaacctcaaaggatcca

SEQ ID NO: 994871 - DNA, 120 bp, Artificial Sequence
  ENSG00000287469_3 (sequence is synthesized)
tggtcccccaacacagagcaagtgactgcagctcctagaatctcttccttcagggaggcccagagaaattaagtgttaagaggccttaccctcagacaacatcttctctcagcctctgtg

SEQ ID NO: 994872 - DNA, 120 bp, Artificial Sequence
  ENSG00000287469_4 (sequence is synthesized)
gctacagtatgtacagtgtgctgagtgtggaaggacctctctccccattaaatctgtagtgcgatcacatggaaggcatctgaggacctagagcaaggaaacatggctatcctgccccac

SEQ ID NO: 994873 - DNA, 120 bp, Artificial Sequence
  ENSG00000287469_5 (sequence is synthesized)
tgtggtcccgatctgggtactgaatcagcatcttccaaggatttttaaaatagaaacccccagttctcagcctacaccaatgaatcagaatctctcaggatggggctcagggaagctgtg

SEQ ID NO: 994874 - DNA, 120 bp, Artificial Sequence
  ENSG00000287469_6 (sequence is synthesized)
tttttaaaaactccaagtaccttacttaccttctcaccatcatgaaaatagaaatgaacaaaattaacaaggcaacaatttccaggcactggaccagaggcacagtgcagaactgtgatc

SEQ ID NO: 994875 - DNA, 120 bp, Artificial Sequence
  ENSG00000287469_7 (sequence is synthesized)
tctgagaggagggcaacactcaagggagggagacctgtgtttgcccaggttctgcccaggtgaagcacagggaggggaaacccaggcagaccacagtggtctgatggagctgagcagaat

SEQ ID NO: 994876 - DNA, 120 bp, Artificial Sequence
  ENSG00000287469_8 (sequence is synthesized)
tcggagcttgggctgctgaagtggctggcatatgtgggggcagaaaacaggaaaggaaagctgcagagggagagaacaaagaccccagaaatgtgtatgcgcatgtcctgtgggctgttg

SEQ ID NO: 994877 - DNA, 120 bp, Artificial Sequence
  ENSG00000287469_9 (sequence is synthesized)
gttgaagcccgggctttgaagaacagagcaagacttggtggagcctagcagagagcagctgctaagggcctgggaacagaatggaaacatagggagactctctgcagggctgggagttcc

SEQ ID NO: 994878 - DNA, 120 bp, Artificial Sequence
  ENSG00000287469_10 (sequence is synthesized)
agctcagctagaatggagaaactctggtgtgcatctcagtggagactgcataaaggccatgtattaggaataaagactacgcttctaggagaaggactacaccctagcacagagtttctt

SEQ ID NO: 994879 - DNA, 120 bp, Artificial Sequence
  ENSG00000287469_11 (sequence is synthesized)
gcttctaggagaaggactacaccctagcacagagtttcttggtatcagcaatactagcattttaaacaggtcatttttattttcccctccggagacagagtttcactcttgttgccaagg

SEQ ID NO: 994880 - DNA, 88 bp, Artificial Sequence
  ENSG00000287469_12 (sequence is synthesized)
cacctcggcctcccaaagcacccaggtcatcttttttgtggggattgttttgtgtattataggatgtttagcagcaaccttgccctct

SEQ ID NO: 994881 - DNA, 120 bp, Artificial Sequence
  ENSG00000287469_13 (sequence is synthesized)
cagcaaccttgccctctacccacaaaatgccaatagcaccccacccccatttatgagaaaccaaaatgtttccagatattgtaaaatgtccctggaatggggagcaaaattgttctcagt

SEQ ID NO: 994882 - DNA, 120 bp, Artificial Sequence
  ENSG00000287469_14 (sequence is synthesized)
tgagaataactgtcctagtataacggccacatcttatgactaatgatgaaatgaaaatagaccagtcctaacaacaacaacaaaacaacaaaagaaaacaaagtgtaataggatcatgag

SEQ ID NO: 994883 - DNA, 120 bp, Artificial Sequence
  ENSG00000287469_15 (sequence is synthesized)
aattcatcagtatttaaatgtctaaattaatagccaaactcataacatttaaaggaaaacaacataatccaatctccctacaaggtatcatccacaatatcccacctacagtgagacaag

SEQ ID NO: 994884 - DNA, 120 bp, Artificial Sequence
  ENSG00000287469_16 (sequence is synthesized)
tgaaacaaacaaaaaaatatgatctataatcaagcaattggtagtcaatagaaacagacacttagatggcacaggtattgtaattaacagaaagactacaatagctattataaatgaggg

SEQ ID NO: 994885 - DNA, 120 bp, Artificial Sequence
  ENSG00000287469_17 (sequence is synthesized)
gtcaggaaatgtaaagatggatcaatagaaattattcaatctgaagaacagagagtaaaaagagtttttttagaaaaaaatgaataaccattgctattgactttaatgtgtcaagatttt

SEQ ID NO: 994886 - DNA, 120 bp, Artificial Sequence
  ENSG00000287469_18 (sequence is synthesized)
caatggagaaagaaagtcttatcagcaaatattaatagtatagaagaaattggatagtgacatgggaaaaaagaaccccacactacatacaaaaatcagcctgagatgaatcaaagatga

SEQ ID NO: 994887 - DNA, 120 bp, Artificial Sequence
  ENSG00000287469_19 (sequence is synthesized)
tttagattttaaaagtgaagtctaaaacagtacaaaaactgaaagaaagcataagaggatgtgattttggtaagccaaagtttcttaagtgggacacaaacagcaaccaacaataactat

SEQ ID NO: 994888 - DNA, 120 bp, Artificial Sequence
  ENSG00000287469_20 (sequence is synthesized)
aaaagaaaaatatgataaattgcatgccatcaaattaaaaccttttgtttctcaaatgcaccatgaagaaaatgagtaagcaagccacagattgggagaaaatattcccaaaacatatat

SEQ ID NO: 994889 - DNA, 120 bp, Artificial Sequence
  ENSG00000287469_21 (sequence is synthesized)
acatatatttcacaaaggactggtgtccaaaatataaaaagaatgcatacaactttttagagacagggtctcattctgttgtccaagctggactgcagtggtgtgatcatagctcactgc

SEQ ID NO: 994890 - DNA, 120 bp, Artificial Sequence
  ENSG00000287469_22 (sequence is synthesized)
ctcctaggcccatgtgatcctcccacctcgacctcccaagtagctgggactgcaagcacatgccacaacacctggctcaattttttttttctttttttatagagacaagagtctccctat

SEQ ID NO: 994891 - DNA, 90 bp, Artificial Sequence
  ENSG00000287469_23 (sequence is synthesized)
ttttttttttctttttttatagagacaagagtctccctatgttgcccaacctgctgagctggtctgaaactcctgggctcaaatgatctc

SEQ ID NO: 994892 - DNA, 120 bp, Artificial Sequence
  ENSG00000287469_24 (sequence is synthesized)
tgaaataagcaaaataaatttgaacagacatttcgcaaaaggagatccatcattggtcaattaccacatgaagagtgctcaacattgttggtcttcaggaaaatgaaaattaaaaccacg

SEQ ID NO: 994893 - DNA, 120 bp, Artificial Sequence
  ENSG00000287469_25 (sequence is synthesized)
atctgtacaaattcatccaacaaaatacctaaaattcaaaagacagaaaacattcagtgttggaaagaatatggggcgatcaggactcttgtgaactgttggtagaaatataaaaaagta

SEQ ID NO: 994894 - DNA, 120 bp, Artificial Sequence
  ENSG00000287469_26 (sequence is synthesized)
caaccagtttgaaaaaagttccaacagtttccttgtaaaattaaataaacacctgctttatgatcaaacaattctacttctaggtatttacccaagaaaaagggaaatacacattcacag

SEQ ID NO: 994895 - DNA, 120 bp, Artificial Sequence
  ENSG00000287469_27 (sequence is synthesized)
taaaagacttgttcaagaagattcatagtagctttatttacaatatctaaaagcagaaaacagcccacgtgtcattaatagtagactggctaactaaactgtggcaacttcacattgtgg

SEQ ID NO: 994896 - DNA, 120 bp, Artificial Sequence
  ENSG00000287469_28 (sequence is synthesized)
acaccccgtcagttctcccagggcagaggctgtttcctattctgcgcagcgtttccggcacccagccaggcttaaagatcatttgcgctggggaaagctattccagctgtcccgtgcaga

SEQ ID NO: 994897 - DNA, 120 bp, Artificial Sequence
  ENSG00000287469_29 (sequence is synthesized)
tctcaaaaaatcattaagcaaagaaaaaaacttacaaaaaagagtatatactgcattattttatttatataacttttttttttggacagattttcactcttgtcacccaggctggagtac

SEQ ID NO: 994898 - DNA, 78 bp, Artificial Sequence
  ENSG00000287469_30 (sequence is synthesized)
ccaccacacctggctaatattttttatgttttaatttttattatgtttttatttttagtagagacagggttttaccat

SEQ ID NO: 994899 - DNA, 120 bp, Artificial Sequence
  ENSG00000287469_31 (sequence is synthesized)
taagcctatataaagttttatgagaaactttaataataacttcaattttccataggttaatgtaaaattaattaaactggtgaaaaataattacaacagtggttgtctccggggaggaaa

SEQ ID NO: 994900 - DNA, 120 bp, Artificial Sequence
  ENSG00000287469_32 (sequence is synthesized)
ttgactaggaaagagcatgagagaactttccggagtgatgatagtgttctacatcttgatagaagtttgtgttatgcaagtgtatgcatttgtcaaaattcatcaggtggtacacttaaa

SEQ ID NO: 994901 - DNA, 120 bp, Artificial Sequence
  ENSG00000287469_33 (sequence is synthesized)
attttaagtgtgtcattgatgagttttgacaaactataggtataaggtttatacgtatgtacttgtatctagatataaatcttacctttgaaaagaaaccacaaacaaatattaaactct

SEQ ID NO: 994902 - DNA, 120 bp, Artificial Sequence
  ENSG00000287469_34 (sequence is synthesized)
tgtaatagtgtctatgctattacatggatttgaggacaaactgtattgatgcccacaacttactttgaaagccatcctaaaattagatggattgatggatggctagaaaatgagcagatg

SEQ ID NO: 994903 - DNA, 120 bp, Artificial Sequence
  ENSG00000287468_0 (sequence is synthesized)
ggctgaaataatgaaaattctaattaggctttgcttgcttgctgcacaaaagccaacatcccttgtttccacagtataaactgctgatgtactgtttctttgccaagcaggaggaggtga

SEQ ID NO: 994904 - DNA, 120 bp, Artificial Sequence
  ENSG00000287468_1 (sequence is synthesized)
cttcagggtcatgaaaaagatttgcagaaggaatggacatggcgaccagctgctgatactcaagggtctggttgctcaagatgttttctgagactgaagacacacagacttttcccctcg

SEQ ID NO: 994905 - DNA, 120 bp, Artificial Sequence
  ENSG00000287468_2 (sequence is synthesized)
tagccacataaaaattccccgcttctttttgtttagagggatttgagagatcttgccttctcatgttggccaaattgaagaaagctttttctccaagcagttgtttgccagtgtttggtg

SEQ ID NO: 994906 - DNA, 120 bp, Artificial Sequence
  ENSG00000287468_3 (sequence is synthesized)
ttaactgcacatcaggttcataatttatggtggataacttataagcaaataattaaagatctacaaaagtaaattcattgattgattgaattgggttgtgcacaaaaaaggaaaataaaa

SEQ ID NO: 994907 - DNA, 120 bp, Artificial Sequence
  ENSG00000286655_0 (sequence is synthesized)
tgaagacctttatgatgatccacttctactcaatgaatagctttcttggcacactgcctcaggaacaggattatgctacagaacaaaaagagcaaattcttggcttttgaattccaaaat

SEQ ID NO: 994908 - DNA, 120 bp, Artificial Sequence
  ENSG00000286655_1 (sequence is synthesized)
caaattcttggcttttgaattccaaaatctaaaatcttggcaaaaacaatatgtttagaaggaaaattgatctggaaatggtcggcatcagtttttcctacccctaagacaaaataaacc

SEQ ID NO: 994909 - DNA, 120 bp, Artificial Sequence
  ENSG00000286655_2 (sequence is synthesized)
taggggaaaaaacctgttggggataaaaagtagcaaaagtggaagagttagaaccttgaactggtcatggagcagacacctgtggtccgtgccctccgctctgaccccaaaagttgctgg

SEQ ID NO: 994910 - DNA, 120 bp, Artificial Sequence
  ENSG00000286655_3 (sequence is synthesized)
tgcagaggagagacaatagacgctccaaaggaaataaaggaaatgaaagggaatatggccagcacccactcctaccctataccccctactgctgcctccaggcccaggtaaagctccaca

SEQ ID NO: 994911 - DNA, 120 bp, Artificial Sequence
  ENSG00000286655_4 (sequence is synthesized)
tactccacatatctcagactcttaggatctttcttcaacatgctatgaagacagcagagaagcacatatggctgggaaagtgtatctagatggagaggacccaaaacagcctgaaagttc

SEQ ID NO: 994912 - DNA, 120 bp, Artificial Sequence
  ENSG00000286655_5 (sequence is synthesized)
cccaacatgtccctggagttcaggaccagaccaaatattttccaagtgctcaagagaaaaagtcatgagagacccagatggacctcaggcactgcaggatgatgcccaattcagccacta

SEQ ID NO: 994913 - DNA, 120 bp, Artificial Sequence
  ENSG00000286655_6 (sequence is synthesized)
cctgtgtgactgatgagaaaccctaaggactgatgtctgtcccccagctctctctctgtcagatgctaatgcaccctgaaagtgtcctagatctatacaaacactccatgttcactatcc

SEQ ID NO: 994914 - DNA, 120 bp, Artificial Sequence
  ENSG00000286655_7 (sequence is synthesized)
cacataaacaactatccatcccagaagagttgccaccaggctcttcataaacccagcctcacccacgcatccatgtttaaccagcttccttcagaaatattctcgcagagttccactaaa

SEQ ID NO: 994915 - DNA, 120 bp, Artificial Sequence
  ENSG00000286655_8 (sequence is synthesized)
tcttctatgctataggcacaactgctttcttttttccattcttaggaagtaaagaaaaggccaggacaacatagtctgtgtaacaatctggtgcatcagaagaacgggaagaataaagtc

SEQ ID NO: 994916 - DNA, 120 bp, Artificial Sequence
  ENSG00000286655_9 (sequence is synthesized)
ttctgatccatacaagatcttctttctgatctccagaacccgagccatgaagtgggaaaaagtcctctaggtggcctgtttcccaacctggtggtacttagtgccctttccttcttgcaa

SEQ ID NO: 994917 - DNA, 120 bp, Artificial Sequence
  ENSG00000286655_10 (sequence is synthesized)
tgtcctctcactgtcttcccaaaacaacccgaaactcactcccattaaagtgacgggactcaatagtttgaggtttaactccagctccttctctgttcacgcagctatccagttgttaaa

SEQ ID NO: 994918 - DNA, 120 bp, Artificial Sequence
  ENSG00000286655_11 (sequence is synthesized)
tctacctgccggctctctcctctcctttctattacctggaagtgctgctttctgaatattccttttcctcaatccaggaacatgacagatttgcacttcccctctttcttgaggtagatc

SEQ ID NO: 994919 - DNA, 120 bp, Artificial Sequence
  ENSG00000286655_12 (sequence is synthesized)
atggccaggcacgtggcttcctttggctagtgaaacgtggacaggagtaacatgggctgcttcctaattgcagtaagcaacactgcagctggaactgcctcctgcagctggaactgacag

SEQ ID NO: 994920 - DNA, 120 bp, Artificial Sequence
  ENSG00000286655_13 (sequence is synthesized)
catttcagatggtggaggccctgtcactctgatttccagagtaaagggcatgcaatgggtcgtttcagtcaatgggcatgtaaagtgagcaagcaataaacacttgttaaatgaactcgc

SEQ ID NO: 994921 - DNA, 120 bp, Artificial Sequence
  ENSG00000286655_14 (sequence is synthesized)
tggctgttgctgcataataatccagcccaccctgactaatatgcccaggctattattggggttcaggctctcattcctcatcaaagcttttaacacatgccactcaaagtgtagttcata

SEQ ID NO: 994922 - DNA, 120 bp, Artificial Sequence
  ENSG00000286655_15 (sequence is synthesized)
cacaggtatcaatccacaaactattgctgctctgcaatgatgtaagtatagaaattgagaataaacatttagaaattcttgtaacagttaagctgattaatttgacctattgaatctaat

SEQ ID NO: 994923 - DNA, 120 bp, Artificial Sequence
  ENSG00000286655_16 (sequence is synthesized)
aataacatatttggaattgtctttccaccagatcttagcacgatgtcttacccatgaaggtgctaacaaaatgtttgtcaaattaaattggattattgattcatgattaagaaacagaat

SEQ ID NO: 994924 - DNA, 120 bp, Artificial Sequence
  ENSG00000286655_17 (sequence is synthesized)
tatgttaggattccaagcactggcaggcagatctgaggaatacttggggtgcaagatcattgaggtgcaatggtcttcttcattgaggtgcaatgatcatttataagtttctggattttc

SEQ ID NO: 994925 - DNA, 120 bp, Artificial Sequence
  ENSG00000286655_18 (sequence is synthesized)
tgtttgtaccagcacaaaatttagtgtcaacaagcagagaaactttctgagttcttctttatttactattaaatattgttttaggtttgccaacataaaagcatgagcatgaatgtgttt

SEQ ID NO: 994926 - DNA, 120 bp, Artificial Sequence
  ENSG00000286653_0 (sequence is synthesized)
aaactaaaagctcttagaaatcctattgcaataaaatggtttatttggtttattcctggatttcttaaatatagttagttaattatgattttgttcactgaataaccaatgttatcttcc

SEQ ID NO: 994927 - DNA, 120 bp, Artificial Sequence
  ENSG00000286653_1 (sequence is synthesized)
taaatagatgtattttgtaaataaaatttatgcatcactattggaatcgatagacattactattagaatcaatagagaaactgaggattttaaagacatgaagggatatgatcaaatcta

SEQ ID NO: 994928 - DNA, 120 bp, Artificial Sequence
  ENSG00000286653_2 (sequence is synthesized)
atataattttcttccttgtaataggatcatattcaggatatcaccatctatttattgagcatctacactgcacatagctccgtgatgagcataattgggaataaagcagtaggataagtc

SEQ ID NO: 994929 - DNA, 120 bp, Artificial Sequence
  ENSG00000286653_3 (sequence is synthesized)
acagaccttgttcacacagagctaattggagagataaatttaacacactgagataattaggtgatgtgacctaccacatatgacagtatgtaaaggaagaggcaaagtgtggggaagctg

SEQ ID NO: 994930 - DNA, 120 bp, Artificial Sequence
  ENSG00000286653_4 (sequence is synthesized)
tcaattgacattcagaaaagagaaaaggtcaaggaagttcagatggctggagaaatcaatgtgcaagaagttgagcttgtttttttaggattagttccccattgagaagagggcatttgt

SEQ ID NO: 994931 - DNA, 120 bp, Artificial Sequence
  ENSG00000286653_5 (sequence is synthesized)
gaaacaatgattgttcacataggttattgcagtagtctatgtctactctgtctccaatcttcttctccgtcaatttttggaaatctctattatcaagtaaacatcctaaaacatcacatc

SEQ ID NO: 994932 - DNA, 120 bp, Artificial Sequence
  ENSG00000286653_6 (sequence is synthesized)
ctagaatggccaagatcctaaaatggcctcctaatcatgtaaatttctgtggatttaaaacaaatccacagaaatatacattttacgaggatacatatccaagaatatttatttttgctt

SEQ ID NO: 994933 - DNA, 120 bp, Artificial Sequence
  ENSG00000286653_7 (sequence is synthesized)
atttgaattttgctctttgtagtcgtttttaatttggttcagtatataattgtagagtttgtgggtgtttcaggttttcctggagcatatatcctactcaaaagaaacttctaggctggt

SEQ ID NO: 994934 - DNA, 120 bp, Artificial Sequence
  ENSG00000286653_8 (sequence is synthesized)
tttaaggtcgatgatggagaagaatggccttgttatattaatcaatgacctccatgccaatgtaattcaccctagcttactcatccaaatcctctccctttccttttgtcaaaataagat

SEQ ID NO: 994935 - DNA, 120 bp, Artificial Sequence
  ENSG00000286653_9 (sequence is synthesized)
tctctccttcaatggcctttgctgaagacactcagaaatgtccttcttcctattagtacctaactacagacactatatttatccttaggttctcatcacagtattgggcacagagatcag

SEQ ID NO: 994936 - DNA, 120 bp, Artificial Sequence
  ENSG00000286653_10 (sequence is synthesized)
atgttaaacccccaggagttaagcagccttctcataaaagtggcaaagtgtgttgagtgagttatgttacaaataaagaaaatagtcctaaaaggttaatatgttggagatgaaaaagaa

SEQ ID NO: 994937 - DNA, 120 bp, Artificial Sequence
  ENSG00000286653_11 (sequence is synthesized)
tcaagctagttcaacatctatattgtctttagataacaatggctattgagggggtgggaaacgaataaaatagtaactcaattccaagtaagcatttatttgtcatgtttattgaacacg

SEQ ID NO: 994938 - DNA, 120 bp, Artificial Sequence
  ENSG00000286653_12 (sequence is synthesized)
gaaatgattgagtactttgaggaaaataaagatttatctgacacagtccttagattgtaatcctttaagttacagtgacctgtttagtgtcatcctctgtaaaagaaacttgctctcaaa

SEQ ID NO: 994939 - DNA, 120 bp, Artificial Sequence
  ENSG00000286653_13 (sequence is synthesized)
ctgacatcactttatcttacttcccaatatttttttgtttgatgtatcaaggtatcaagtaaaccacagttgaaggaaacgtttttgtttggcttaacaacaattagcccaacatttttc

SEQ ID NO: 994940 - DNA, 120 bp, Artificial Sequence
  ENSG00000286653_14 (sequence is synthesized)
agaaatctcttctagcttgtaagtatgaatatcttctattcactcaaaaagatgcacattttaatatgaccacattttctgtgaccaaaataaataagaaaattggaaaataattttgaa

SEQ ID NO: 994941 - DNA, 120 bp, Artificial Sequence
  ENSG00000286653_15 (sequence is synthesized)
gtttgttaaatggagtaaagacaatactggaatttttttctcaataaaaagaatgtagaatctttgttctataacaatttgtctatctcatcaggaagaacatttacaggaatgcaggtg

SEQ ID NO: 994942 - DNA, 120 bp, Artificial Sequence
  ENSG00000286653_16 (sequence is synthesized)
ttttgcactgagttgtcacagctactgtatgactgacctgtaaacctgcaagaaatatttaacaatcttgtcaatgtttgcagtgggaaaaggcattttcatgtttttatgtttcttact

SEQ ID NO: 994943 - DNA, 120 bp, Artificial Sequence
  ENSG00000286653_17 (sequence is synthesized)
acttgagttgttcctgaaagtcccatgttgaattgatgaagtactagactattatagcctatcaaatatgtaagttaggctcatattatttgtaaatttgtacattataatatttgggca

SEQ ID NO: 994944 - DNA, 120 bp, Artificial Sequence
  ENSG00000286653_18 (sequence is synthesized)
tattctacattaaagaatgtagaaaccaatttttctagcaatagggtggttttataatcaccatgatgattgcaaccaatgatgcttttgtaatcacactgcaacaagatcactctcttc

SEQ ID NO: 994945 - DNA, 120 bp, Artificial Sequence
  ENSG00000286653_19 (sequence is synthesized)
tcttttatccaatgcggataatgtcaaaggatggcatacactctgcaccaaattccttaataaggcattataaacactctcacaaatgttcttgtgggataatgatgaagaggtcctcaa

SEQ ID NO: 994946 - DNA, 120 bp, Artificial Sequence
  ENSG00000286653_20 (sequence is synthesized)
gattgttttctaagattcgtactccctatttagaaagagacgtatacataagatcattaaatcaatttgccacactgtaccccaccaactcatcactaaaatcaagcctgctaaaatccc

SEQ ID NO: 994947 - DNA, 120 bp, Artificial Sequence
  ENSG00000286653_21 (sequence is synthesized)
tctgatcaattaagggagaatgtggtaaccaacatgaagttaagtgatttgggaaggtctcttctaactacccagctcacttataacacaaacgttcatgaaatggccatattgaaagat

SEQ ID NO: 994948 - DNA, 120 bp, Artificial Sequence
  ENSG00000286653_22 (sequence is synthesized)
gaagggtcttctccgggccttcgtgaaagaacctaataaggataagtaataactttcctggatcccactctgaaattcttccttgttcactgtttccgagtatttcctttatggcctagc

SEQ ID NO: 994949 - DNA, 120 bp, Artificial Sequence
  ENSG00000286653_23 (sequence is synthesized)
ctgttgactactccctcatgggctgaccttctctgatgccatgctttgactcacgcattctattttgcttcccacttgaaggttggatggtccagttctttaaaagaattattggcttct

SEQ ID NO: 994950 - DNA, 120 bp, Artificial Sequence
  ENSG00000286653_24 (sequence is synthesized)
tcttgggtgacccattggatatagaaattggtctttgagtttaaaagagattatgaatctgtgcttgtcctcaactatcggggcaaaattatgtttcctgaatacacctggaaagaaaag

SEQ ID NO: 994951 - DNA, 120 bp, Artificial Sequence
  ENSG00000286653_25 (sequence is synthesized)
aagaaatgtttctcaggcaatgataccaggagataatagactattaaattatcattcatagaaggggatttagcaaacatgtgaactcatcctctccttacacacttggggctgaaagac

SEQ ID NO: 994952 - DNA, 88 bp, Artificial Sequence
  ENSG00000243144_0 (sequence is synthesized)
gactttgagagttccgcttatggctgcagggtcaaccaatttgttgttgggaccctggagctgaatggctttcctgtctgtcgatcct

SEQ ID NO: 994953 - DNA, 120 bp, Artificial Sequence
  ENSG00000243144_1 (sequence is synthesized)
gctggttccagacaaaccaacgctctcaactctgaagagtcaggagttgttagagagccttttctcagaaagcctgacacccgtgtctttagtctggcatccatgctagtcacttttaac

SEQ ID NO: 994954 - DNA, 120 bp, Artificial Sequence
  ENSG00000243144_2 (sequence is synthesized)
tggccaataggtgcctggtatttagtccccaaattctaaggaaaaataagacagaatagcaagcaaaaggggtctgatggtactcaccacttggtgataggcgacagtcccatctgggtc

SEQ ID NO: 994955 - DNA, 79 bp, Artificial Sequence
  ENSG00000243144_3 (sequence is synthesized)
catgattgtgaggcctccccacccacatggaatgagttccccagctatcccccagtggcttggagattcccatttcaag

SEQ ID NO: 994956 - DNA, 120 bp, Artificial Sequence
  ENSG00000243144_4 (sequence is synthesized)
cccagctatcccccagtggcttggagattcccatttcaagagtgtagagttctacccagaaggtggctgcgtggacagtgactacattctcagctccatgcctatttgggtgaggccctg

SEQ ID NO: 994957 - DNA, 120 bp, Artificial Sequence
  ENSG00000243144_5 (sequence is synthesized)
gtgttggtttccagggtgtccttgggaggggtttgggccataatttcaaaagacacagtgctaaataccacaatcccaaatgttgaaatctggaaagatcaaaatctctaaaggaaggca

SEQ ID NO: 994958 - DNA, 120 bp, Artificial Sequence
  ENSG00000243144_6 (sequence is synthesized)
cacatttaagatggcaaagccactgtgcctttgtccctaaataagagtggggcaactgtgcctttcaccactctgctgttaaccagttatacacacaatgaactgttacgttagcaaaaa

SEQ ID NO: 994959 - DNA, 120 bp, Artificial Sequence
  ENSG00000243144_7 (sequence is synthesized)
aaatgtttcttgtaaaggccactgaaattgtggagtttgtctgttacagtaactagcagtactctaactaaaatgagcgtctttcataatagagatgagaattcagatttctactattct

SEQ ID NO: 994960 - DNA, 120 bp, Artificial Sequence
  ENSG00000243144_8 (sequence is synthesized)
ctgacaaatctccataacacttatttaccaaaccactgattttaattgtgctgaacggaaatgatcatggagagtcacttttccaatgacctctctgtcccttggttttccattgtttaa

SEQ ID NO: 994961 - DNA, 120 bp, Artificial Sequence
  ENSG00000243144_9 (sequence is synthesized)
ggtgaatgataatttctatcttttatttctatttgtggtatccaaacaaaatcatcataaaaactccattatggcatagttaattgtaaaataaatatatatgaccaaaaaaattaaaaa

SEQ ID NO: 994962 - DNA, 120 bp, Artificial Sequence
  ENSG00000243144_10 (sequence is synthesized)
gaatgctatgtgaagattgtgcctgcttcctctttgccttccaccatgattggaagtttcctgagaccttcccagcagcagaagcctatacagtctgcagaactgtgagcagattaaacc

SEQ ID NO: 994963 - DNA, 120 bp, Artificial Sequence
  ENSG00000243144_11 (sequence is synthesized)
gattcactaattcagtattagcagcaactttacggaacaaaactactgtggataatgagaattcactgcgcccgttgtttaaacagttaacagcagtcactttagtgccttttgtagaga

SEQ ID NO: 994964 - DNA, 120 bp, Artificial Sequence
  ENSG00000243144_12 (sequence is synthesized)
ggtcttaggagagttggacacattcaaaacacaatatgtgattaagaagattaaagattaatacttattgatggattactatgtgccaaacttccaaccgaatcctgacaacaattcctt

SEQ ID NO: 994965 - DNA, 120 bp, Artificial Sequence
  ENSG00000243144_13 (sequence is synthesized)
ttgcgccagaggggatgatttagtgagcagatggtaccaggaaaaccaagggtattgcatccagctgtgtgtacacagattggtgaattcaagcctctgatctaggatctgaaataaaaa

SEQ ID NO: 994966 - DNA, 120 bp, Artificial Sequence
  ENSG00000243144_14 (sequence is synthesized)
cccaccacaaccattcttttagatatgcatggtcacttagatctgctttcatggttcctatcctgtttggcaccatgacaagaaaacaaacaagttatggacttagaagatatagactta

SEQ ID NO: 994967 - DNA, 120 bp, Artificial Sequence
  ENSG00000243144_15 (sequence is synthesized)
tggtggagacagagacatggaataataacccaaagtagctcatcttcctagaggcctattcttcctcttcctccagccattgcctgtttgacatgagatgtgtccttcgataagtcagta

SEQ ID NO: 994968 - DNA, 120 bp, Artificial Sequence
  ENSG00000243144_16 (sequence is synthesized)
gtggattacctcaaggcaggggacaactaaggctccaatagaaaggatgaattgcaagaatgggacagagatcatattctcaaaaggactttttaataaaaactcactgaaagcaattaa

SEQ ID NO: 994969 - DNA, 120 bp, Artificial Sequence
  ENSG00000243144_17 (sequence is synthesized)
aagatgtggaaactgcagttcactgaggttgacatttccgggttcatacaacaaggatgggtttggcaccatgacaagaaaacaaacaagttatggacttagaagatatagacttatggt

SEQ ID NO: 994970 - DNA, 120 bp, Artificial Sequence
  ENSG00000243144_18 (sequence is synthesized)
gtagctcatcttcctagagctgatgccatcgaaacctgatcatctatcaatcttagttttagtggtgaagactcatggtggattttgcctagcagttcataatttgtctcaagggtgcct

SEQ ID NO: 994971 - DNA, 120 bp, Artificial Sequence
  ENSG00000243144_19 (sequence is synthesized)
gagtgtctcagcgtctccagaaagcccttcgtggttgtttctggaatgagtcccagtgctcacctcacacaggcctattcttcctcttcctccagccattgcctgtttgacatgagatgt

SEQ ID NO: 994972 - DNA, 120 bp, Artificial Sequence
  ENSG00000246394_0 (sequence is synthesized)
gcctgtcgcttggagacggagtgactccaaacgggctcacacggttttctgagaaacataaagggaaaccgaatccaccaatatatatatatattttcttgagacggcgtctcgctctgt

SEQ ID NO: 994973 - DNA, 120 bp, Artificial Sequence
  ENSG00000246394_1 (sequence is synthesized)
ggcgtgagccaccgcgcccggcccaccaatactcaattggtttgacttcagttgaggaaaccagaaaaaatttaaatatatttatggaaagaagctattgggagagtggctgagtactga

SEQ ID NO: 994974 - DNA, 120 bp, Artificial Sequence
  ENSG00000246394_2 (sequence is synthesized)
caaattcaacttgggcctcaatttctgcagatggacacctctggactccaaaaaatccaaggacataaaaaacttaagcagcctttattacatttagttcaacaagtttaaagtgtaggt

SEQ ID NO: 994975 - DNA, 120 bp, Artificial Sequence
  ENSG00000246394_3 (sequence is synthesized)
cactttccacttttgtttacttgatgcttaattttactggaatcgttaaaagaaatatacttgcaatttttttaaaaaggtatctatttctgaggccagtcttggtgtctagagttttca

SEQ ID NO: 994976 - DNA, 120 bp, Artificial Sequence
  ENSG00000246394_4 (sequence is synthesized)
aggtagtattaatgacagcacgtagaacctcaaagctcatttgtcggtgaaaatgctgtgctaagcctggcagaagtctgctcccacactcagaatcaccataaatgtgcaacatcacca

SEQ ID NO: 994977 - DNA, 120 bp, Artificial Sequence
  ENSG00000246394_5 (sequence is synthesized)
gaaagtgctggtgtgctgggcactgggcattggagttggggatggctgccccagcctctgtacacgacacctggcctggtggatccagagttagtcttgctgcccagctgccactccagc

SEQ ID NO: 994978 - DNA, 120 bp, Artificial Sequence
  ENSG00000246394_6 (sequence is synthesized)
cactccctagacacaattttaaattgtcagatatacctttagtaaagctgaaaaaacaattccagaggaattaaaaggaggaaaattttctatttattaaatagcataaagataccaaaa

SEQ ID NO: 994979 - DNA, 120 bp, Artificial Sequence
  ENSG00000246394_7 (sequence is synthesized)
tagaaggccagaaacagagggcagctgaaggaaacagctcactcaagatgccaaccaggcctctgttcatgccatcatggataagatctatttttgagggtctaattaagttaagaacta

SEQ ID NO: 994980 - DNA, 120 bp, Artificial Sequence
  ENSG00000243149_0 (sequence is synthesized)
gcctactttttatgtccattcctacggctgcagggccatgtcctgtgattggcagctcctcagaaccacatggagtggaagagctgttcctagaaatagggtgcttgttattctgagagg

SEQ ID NO: 994981 - DNA, 120 bp, Artificial Sequence
  ENSG00000243149_1 (sequence is synthesized)
acaagaatgacagccacgtcatctggagaaggcagccagggaagttgttggccaagctttgctggcttttttgcagctttctgttcccgcaagttactcccccaaatcctacctatttta

SEQ ID NO: 994982 - DNA, 120 bp, Artificial Sequence
  ENSG00000243149_2 (sequence is synthesized)
tcagaaggcaaaaattcaagaatgaatatttactgcctatatctgacagaagaatcccatttctcatgagaaaatcaatggataatactcagcgtttcttcaaaaccaaaacttccttta

SEQ ID NO: 994983 - DNA, 120 bp, Artificial Sequence
  ENSG00000243149_3 (sequence is synthesized)
tcaaaacctgtagaacacaggtttcagcaaacttcgtaaaatattcagatcaaatttgggtttgttattgattttcagggggattaatctcttttatattaaaagctcatttggtcacaa

SEQ ID NO: 994984 - DNA, 120 bp, Artificial Sequence
  ENSG00000243149_4 (sequence is synthesized)
cagaaccgcccaagaagaaactcccaatctcggaacaggcacacggctcgaattatcagaaaagccgttgagataagacatgcatgatctccttcctaaagaggacaagaatgacagcca

SEQ ID NO: 994985 - DNA, 120 bp, Artificial Sequence
  ENSG00000277210_0 (sequence is synthesized)
tacaggcgtgagccaccgcgcccggccacgttatggttttgagcaagaagaaagtttatgagagacagaatgcattcagccttgacgctgaagtcattctctcctgtggccccgggaaag

SEQ ID NO: 994986 - DNA, 120 bp, Artificial Sequence
  ENSG00000277210_1 (sequence is synthesized)
cgggaaagccaccaaccacagagaaggaagccacttggctgctatgaatggtacttacaaagttgtaaaaacgcgaatgccgttgacttgttttcaacacagataaaacttaacaaagaa

SEQ ID NO: 994987 - DNA, 120 bp, Artificial Sequence
  ENSG00000277210_2 (sequence is synthesized)
cagaaaacttaattatgctcatcaaacagaatatgatgccatccttggtgctgcaaaagaaaaacccacgggatggaggaagagaaggggaagaggggaggggagacggaggacaggaca

SEQ ID NO: 994988 - DNA, 120 bp, Artificial Sequence
  ENSG00000277210_3 (sequence is synthesized)
gggcttcagaggcctccacggtgtgctgaagattcagcagtctcagctggatggaaaagcagtaaatgcccaagtctatattgacaggtgcgaatctaacgaatgtgaaaactaacaatc

SEQ ID NO: 994989 - DNA, 120 bp, Artificial Sequence
  ENSG00000277210_4 (sequence is synthesized)
gtgactgagaggaggtgggggagggtaaatgagggaaattctcattttttaatagtgcagaatcagtagatactgttgaaggatgacaaatgaagaggtgacggaataagcatattgact

SEQ ID NO: 994990 - DNA, 120 bp, Artificial Sequence
  ENSG00000277210_5 (sequence is synthesized)
aaagttatgatggtggatagattgatttttttttcttttgagacggaatctcgttctctgttgcgcacagtggagctcttagaggtgttgacagagtctaatcgcatccctttgacctgc

SEQ ID NO: 994991 - DNA, 120 bp, Artificial Sequence
  ENSG00000277210_6 (sequence is synthesized)
gaagctctgaggagggagggttccaacagccacctgtgaccagagtccctgtctcagcaccctgcagggcaggtgaccttatggccaatgagacacagggaacattggctgttccctccc

SEQ ID NO: 994992 - DNA, 120 bp, Artificial Sequence
  ENSG00000277210_7 (sequence is synthesized)
tgatgagcagggaggagcagtttgaggccatgatgcacagaacgaggtggctgtgttgtgactgccagggagggaggagccaccagcagctgatgggacagaggagaaggataaaggaga

SEQ ID NO: 994993 - DNA, 120 bp, Artificial Sequence
  ENSG00000277210_8 (sequence is synthesized)
cgcagctcactgggtgcttggcagcccactcccccagcgggcccaggagcctggcggtaccgtggctcctcctagtgcaggcgctcggctcagtcttcctcatggaaaggctccagcggg

SEQ ID NO: 994994 - DNA, 120 bp, Artificial Sequence
  ENSG00000277210_9 (sequence is synthesized)
ccccggtctcacagggtggcccagctggctgtcaggcttgctcctggggacacctcaggcaagacaggagaggtgctctgtgccctcaagctttcattcatgcactggttctgtcggcga

SEQ ID NO: 994995 - DNA, 120 bp, Artificial Sequence
  ENSG00000277210_10 (sequence is synthesized)
atgtgttgacacgtgccacaccaaagctgtgtggtgtggacctcattacctgtcatctttctaacttgactgcaaacttcatgtggggaggacagtggcctgtgtgacccagatcctcag

SEQ ID NO: 994996 - DNA, 120 bp, Artificial Sequence
  ENSG00000277210_11 (sequence is synthesized)
tggccagccctgggaacggctcatcatctaggggaggaaacagactctcatcagatccaagcccagctcctaggggtggtgatgctgctatctaagcaggaccctctcacacacccccac

SEQ ID NO: 994997 - DNA, 120 bp, Artificial Sequence
  ENSG00000277210_12 (sequence is synthesized)
cccacccagctgcatggctgagccctgtggctggtggcacttcacacacatcattctatggctgccactggtatttagtgtcccctcgtcctgcctggcccctccaacagggtctccttt

SEQ ID NO: 994998 - DNA, 120 bp, Artificial Sequence
  ENSG00000277210_13 (sequence is synthesized)
cttccagggccctgacatctcgtggagacactgcctcccacatctctccatgtgagcagtttccccagccctgccttgctcctctctctgctctgctgcagtgccttctcctaataccac

SEQ ID NO: 994999 - DNA, 120 bp, Artificial Sequence
  ENSG00000277210_14 (sequence is synthesized)
gggaatgctgaaagaggtctctggggaagcagcgccttgtcacctgcaggcccagcagccgcaactcaaacacactggcacaaagttgcacttcatttactccacttgatttctgggatt

SEQ ID NO: 995000 - DNA, 120 bp, Artificial Sequence
  ENSG00000277210_15 (sequence is synthesized)
ccaattccagtccgggaagacgtgtaaacaaggatgttcagatggtggttgccctggagggtgggcgtgggggcaggtgttgatggcagtggggcacagggacgcctcctgggagctgct

SEQ ID NO: 995001 - DNA, 120 bp, Artificial Sequence
  ENSG00000277210_16 (sequence is synthesized)
gatgtcttctgtcttggtctgggtgcgatttacaggggtgggctcggtttgtcaaaattcgtcgaactgtactcatatgatgctgtatgtaatatgtcaatagatggaaaggtttctgtg

SEQ ID NO: 995002 - DNA, 120 bp, Artificial Sequence
  ENSG00000277215_0 (sequence is synthesized)
tatgtgacattttagatacatggacaacagaaagacggaattggacaaagaatgaaaatgcagggaagaaataaatcagcaaacaaaacactgaacgtgaaattggaaagtggttgtaat

SEQ ID NO: 995003 - DNA, 120 bp, Artificial Sequence
  ENSG00000277215_1 (sequence is synthesized)
gggaaggatgaagatgtcccaaaggaagtaacactggcaacaactttcacattaaagaaacttttggggaaattttacaaatttaaatacaaagggtaaaacactggaagcgatccatac

SEQ ID NO: 995004 - DNA, 120 bp, Artificial Sequence
  ENSG00000277215_2 (sequence is synthesized)
ttagaaaggaatatgacaattcactaaagcaaagcaagatgcttacttcatatcataaattacatgatttatgtgctaagaagctgttgtgattttcaagaatctcgaggaagctcccaa

SEQ ID NO: 995005 - DNA, 120 bp, Artificial Sequence
  ENSG00000277215_3 (sequence is synthesized)
tagctatctcattctgccacaacaaagcagatatctcttaagtgcttactaagaagcccatgtgactttcacatctgcctatgcacctgtctgcaactaccccagagtataatagactgt

SEQ ID NO: 995006 - DNA, 120 bp, Artificial Sequence
  ENSG00000277215_4 (sequence is synthesized)
tctcttccaccttttaaatctcattcatgcaagtgcctcctactggaaaactgtaatccagaatcatttcggggagaggattctgggaaactgttcactggcttcccttctgtgatacaa

SEQ ID NO: 995007 - DNA, 120 bp, Artificial Sequence
  ENSG00000277215_5 (sequence is synthesized)
aaagaggatcttaaagcagcttggtcgttgtggtaggcagaaaaattgccttccagagatgttcgatccctgcaacctgtgaatatattactttatatgcgaacagaaacttcagagatg

SEQ ID NO: 995008 - DNA, 120 bp, Artificial Sequence
  ENSG00000277215_6 (sequence is synthesized)
tggaagagggagacagaagactgagtcagagagatgcaagaaaattcaaagtgtgagagggactcctacccaccattgctggtgtgaaagatagagaaaaggggccagaagccaaggcat

SEQ ID NO: 995009 - DNA, 120 bp, Artificial Sequence
  ENSG00000277215_7 (sequence is synthesized)
ggaggcagcatctacaagctagatatcaccttcatctgacagcctcaaaggaaacaggaatgctagtgctacaattgcaacaacctgaatgtacaataaagcaattctcgaccgggcaca

SEQ ID NO: 995010 - DNA, 79 bp, Artificial Sequence
  ENSG00000277215_8 (sequence is synthesized)
caacctgaatgtacaataaagcaattctcgaccgggcacagtggctcatgcttgtaatcccggcactttgggaggtcga

SEQ ID NO: 995011 - DNA, 61 bp, Artificial Sequence
  ENSG00000277215_9 (sequence is synthesized)
aatggtgagccaaaatcttgccgttgcattccaccctgggcaacaagagcaaaacttcatc

SEQ ID NO: 995012 - DNA, 120 bp, Artificial Sequence
  ENSG00000277215_10 (sequence is synthesized)
aaaaacaaaacaaaacaaaacaaaaaaaccaattctcacttagagcctttagaaaggaacagagctctactgactccttcatttctgcttggtattagagacagacttgtaactccttca

SEQ ID NO: 995013 - DNA, 120 bp, Artificial Sequence
  ENSG00000277215_11 (sequence is synthesized)
atttctgcttggtattagagacagacttgtaactccttcagctcctgcggtatcttcagcttcatcttctctgactgttgggccaggtgtgtgtttagcttcccgatgaaggacattgac

SEQ ID NO: 995014 - DNA, 120 bp, Artificial Sequence
  ENSG00000277215_12 (sequence is synthesized)
ttctcttgcacttcatctgcatcatccaagttgaaggtttagaggtcgcgggaaactgatgtggatttctgcttatctttgggaattctggttatcccttttctccaccattttgcaggc

SEQ ID NO: 995015 - DNA, 120 bp, Artificial Sequence
  ENSG00000277215_13 (sequence is synthesized)
atctttccttccttactgcctgtcctgctgtcttcagagtaaacacaagactcagaagtaatgggaaaatatagatttctttaccacttcctacaatagcatataatcaaataatgccta

SEQ ID NO: 995016 - DNA, 120 bp, Artificial Sequence
  ENSG00000277215_14 (sequence is synthesized)
ctgttagaagcccggggttatggaagagaagcgtggaaaccagcgaccagcgttcaggtagattaggaccaaccccggcacttagctgcacaggaacaatggcgagcccctttgggcgcc

SEQ ID NO: 995017 - DNA, 120 bp, Artificial Sequence
  ENSG00000277215_15 (sequence is synthesized)
tcactgatcagaagggcagaggacaccctgctggatctggaggagtggaagtcaatggcgggtctgcgagggcggcgttcagcggtggtggacggagggtgttgagcggtggtggacggt

SEQ ID NO: 995018 - DNA, 120 bp, Artificial Sequence
  ENSG00000277215_16 (sequence is synthesized)
ggtggacgacggccttcggcggtggtggacggacggccttcggcgttggtggacggacggccttcggcggtggtggacggacggccttcggcggtggtggacggacggccttcggcgttg

SEQ ID NO: 995019 - DNA, 86 bp, Artificial Sequence
  ENSG00000277215_17 (sequence is synthesized)
acggccttcggcggtggtggacggacggccttcggcgttggtggacggacggctttcggcggtggtgaacgagtctcactcttgtc

SEQ ID NO: 995020 - DNA, 120 bp, Artificial Sequence
  ENSG00000277215_18 (sequence is synthesized)
gcctcccgagtagctggaactacaggtgctggacaaagatcagaccagatgtgaggaatgctgaaaatgaaagtctcttctgatatgttcaccaaagaaagcgatcccttagcccagatc

SEQ ID NO: 995021 - DNA, 120 bp, Artificial Sequence
  ENSG00000277215_19 (sequence is synthesized)
gatcttggcaagaaccagtgtcaaagggatgttcatccagtaatcctgaattgttggacacccaagaagagaatcaagatgaaaatctgtgcagttctgtgagatttctgtagtactttg

SEQ ID NO: 995022 - DNA, 120 bp, Artificial Sequence
  ENSG00000277215_20 (sequence is synthesized)
ttctgcttacacttcaaaagcaagctagactttcaacttagtatagcattgtcatttccactgatgtatttcctgagtatagataccaactctcctgatttcctcaggactaaaggagtt

SEQ ID NO: 995023 - DNA, 120 bp, Artificial Sequence
  ENSG00000277215_21 (sequence is synthesized)
acaagaaaattatagttttaaaaacaggacagccccagcaaactgggacaagttggtcacactatgcatgaggatgtgtatatatgcatatttttatgtatgctaattcatattataatt

SEQ ID NO: 995024 - DNA, 120 bp, Artificial Sequence
  ENSG00000277215_22 (sequence is synthesized)
tacataccatatttatactaggaatcaggtgtgttaaatcccatgatacacatatgtttatactccaaaatctatgtaattaccatctatttctaaaaaacattctagaaacaaaagtaa

SEQ ID NO: 995025 - DNA, 120 bp, Artificial Sequence
  ENSG00000277215_23 (sequence is synthesized)
ttatgaaaggctattttactatattttggaccatatatcatcataccatatttaggacctcatttgttaaggctaactacctgaatatcttgagcagccacaagtttagcccatttcatg

SEQ ID NO: 995026 - DNA, 120 bp, Artificial Sequence
  ENSG00000277215_24 (sequence is synthesized)
ggactcattatagcaagtgttcatttctcccaccctctgttcatgtccccagttatatgaacaggaattttttgttagaatagaacaaattctttatttttgctatgttacagataatgg

SEQ ID NO: 995027 - DNA, 120 bp, Artificial Sequence
  ENSG00000277215_25 (sequence is synthesized)
aaaagcttgcatacatggccactttggaggatagacacttttcctcatttaacaaaatagtgtgaatacataagaccatgccatcatttttattaatcaaagctgttaccttttctgaaa

SEQ ID NO: 995028 - DNA, 120 bp, Artificial Sequence
  ENSG00000277215_26 (sequence is synthesized)
gaattgttctatttccttgagctcattgtgatgaatcttgagtctcccctcaagaattaagctgtgttctggaagatgaaaagcagccctccccaaagttataccaagacatattggaat

SEQ ID NO: 995029 - DNA, 120 bp, Artificial Sequence
  ENSG00000277215_27 (sequence is synthesized)
atgcttttctattatatctagatatctggatggaaaaattagactggggatttattttaaaaagagagacatttcatacttggtatttgaaaatacgctagcacagctcttggaaataaa

SEQ ID NO: 995030 - DNA, 61 bp, Artificial Sequence
  ENSG00000277215_28 (sequence is synthesized)
acggaagaagtaaaccaagaaagatgaagatgtggaatgcggaaaataggagacacaacac

SEQ ID NO: 995031 - DNA, 120 bp, Artificial Sequence
  ENSG00000277215_29 (sequence is synthesized)
agatgaagatgtggaatgcggaaaataggagacacaacacaagagagagagaaattcttaaaagtgtagtgatggaaaatcctaggatgagaaaattgaatcaggcctagagggcaacca

SEQ ID NO: 995032 - DNA, 120 bp, Artificial Sequence
  ENSG00000277215_30 (sequence is synthesized)
aggaaaaggatgcgctgggtcgctgaaccaccggcttgtgatacgccagtgaagactatggcttccactcactcctttctgcctcctggtgttcacccacgtgtccctgcatgatgtgtt

SEQ ID NO: 995033 - DNA, 120 bp, Artificial Sequence
  ENSG00000277215_31 (sequence is synthesized)
ctagagaactgaaggttaatcaatttatgttgttcaagccactgagtttgtagtaatttgctactgcagcaatgggaaactaatacaatggtcatgctgagttcataacaggcctctaga

SEQ ID NO: 995034 - DNA, 120 bp, Artificial Sequence
  ENSG00000277215_32 (sequence is synthesized)
aataacgaggacataagtggaaactcagtcaaaaagtctagcagtaaggattgaacccattgaaatgtagggctacaattaaaataaatgtagagattatgagtacaaattttaaaaata

SEQ ID NO: 995035 - DNA, 120 bp, Artificial Sequence
  ENSG00000277215_33 (sequence is synthesized)
taaattctgtaaattctgataatatagaaattaagtaattaaggaagagaagaactagaggaaaatggctagctttttctatggtagtaagttcatctttcataactgagatcaaaccat

SEQ ID NO: 995036 - DNA, 120 bp, Artificial Sequence
  ENSG00000277215_34 (sequence is synthesized)
cattgtaactagataaaataatataaaaactcagatacttttaatgataaagataaacattggagaaataaaataattaaccaaaatttgggtagtagagaagtagaagggaaaggtgga

SEQ ID NO: 995037 - DNA, 120 bp, Artificial Sequence
  ENSG00000277215_35 (sequence is synthesized)
gaaagtggaaatatactaattctaccattgttcattataagcaaagaatactatctaaagaagagaggattaaatgtgttttttataattaaagcaaaactagcagattaaaaatataac

SEQ ID NO: 995038 - DNA, 120 bp, Artificial Sequence
  ENSG00000277215_36 (sequence is synthesized)
ccttcccaagcttcagaagaaatacacaaaaaagtaaagaaaatatattaaagacttttaaaacagaaaacataatgtgaaataacttgacaaactaagcccgtaagtgcctaccattta

SEQ ID NO: 995039 - DNA, 120 bp, Artificial Sequence
  ENSG00000277215_37 (sequence is synthesized)
aataaaatcagctaaagtcactttttaaaggatatgttttcagatctcattacatagcaaaacccctgtacttaaaaatgactcagaaacactaacattaaatgatggagagagttaaac

SEQ ID NO: 995040 - DNA, 120 bp, Artificial Sequence
  ENSG00000277215_38 (sequence is synthesized)
catgcaaatgcaaacaaaaataaatcagggttcatacttttaaaattggacatgttgaatttatcgcaaaaagcattataatagaaaaaatagtgaaacactttgttggttttttttctt

SEQ ID NO: 995041 - DNA, 75 bp, Artificial Sequence
  ENSG00000277215_39 (sequence is synthesized)
tgcagatcaaaccgtcacctaggtgttaaactctgcatggattagctatccttcctgatgctctccctccccgta

SEQ ID NO: 995042 - DNA, 120 bp, Artificial Sequence
  ENSG00000277215_40 (sequence is synthesized)
gttccccagccatgtgtccatgtgttatcatttagctcccactttcccacttataagtgagaacgtgtggtgtttggttttctgttctttcattagtttgctgaggataatagcttccag

SEQ ID NO: 995043 - DNA, 120 bp, Artificial Sequence
  ENSG00000277215_41 (sequence is synthesized)
ttctagatctttagagaatctccacactgtcttccacggtagttgaactaatttacatccccaccaacagtgtaaaagccttctgttttccttgcaacctcgccagcatctgttgtttct

SEQ ID NO: 995044 - DNA, 120 bp, Artificial Sequence
  ENSG00000277215_42 (sequence is synthesized)
gtcttcttttgagaagtttctgttcgtgtccttggcccactttttaatgttttttttttctcgtaaatttgtttaagcttagtggaacactttgtaatgataaaggttgcaattcccatc

SEQ ID NO: 995045 - DNA, 120 bp, Artificial Sequence
  ENSG00000277215_43 (sequence is synthesized)
agagatccaacaattatgaaaatccatgtgctaaataatatagcattaattttcataaggcaagcatttcaagagtaaaaagagaagaataaaatcatattagtagtgaagggttttaat

SEQ ID NO: 995046 - DNA, 120 bp, Artificial Sequence
  ENSG00000277215_44 (sequence is synthesized)
acgtctctctcagtccataatagatcccagaggacaaaaaatccccacatagatctcaatctcctaattagtaaagtatatataattgacaaatattgaaccaaccatattaatgtcagg

SEQ ID NO: 995047 - DNA, 120 bp, Artificial Sequence
  ENSG00000277215_45 (sequence is synthesized)
aaaaggactaaatttaaggttctcagattcccagtatgctgttttcttgcccctgaaactgtgattttcgtctatattaaattatatgcaaaagaatgatgtcggacttatacctcaggc

SEQ ID NO: 995048 - DNA, 120 bp, Artificial Sequence
  ENSG00000277215_46 (sequence is synthesized)
catacacgaataacttgaaataaaacaaaggccctacagcaatagctaaaactacaaaactcttaagagaaaacataggttttagtcttcatgactttggatttggcaatggcttcttag

SEQ ID NO: 995049 - DNA, 120 bp, Artificial Sequence
  ENSG00000277215_47 (sequence is synthesized)
atgtgacaccaaacacacaagtgacaaaaaaagtagaaacaccggacctcataaaacttaaaagctttagtgcctcaaaagccactatcaataaaatgaatggacatcccagagaatgag

SEQ ID NO: 995050 - DNA, 120 bp, Artificial Sequence
  ENSG00000277215_48 (sequence is synthesized)
ataaactattttcaaactgtatatcacataagtgactaatatgtaaaatatgtaaagaactcctccagctcagcatgaaaaagagaaaacacccaaataaaaagtgtgcaaaggtcttga

SEQ ID NO: 995051 - DNA, 120 bp, Artificial Sequence
  ENSG00000277215_49 (sequence is synthesized)
aaagtgtgcaaaggtcttgaatagacatttttccaaagtaggtatacagttgatcaataagcacatgaaaaaaatattcaagatcgttaatcatcaggaaaatgcaaatcaaaaccacaa

SEQ ID NO: 995052 - DNA, 120 bp, Artificial Sequence
  ENSG00000277215_50 (sequence is synthesized)
attggtatggctataatattaattttaaaaaacaataaaaagcgttgctgagaatgtggagaaattggaaccctcaatcattgctggtgggaatgtaaaatggtgcagctgctaaaaaaa

SEQ ID NO: 995053 - DNA, 120 bp, Artificial Sequence
  ENSG00000277215_51 (sequence is synthesized)
gcctggcattgttctcaaatggttaaccatagagttaccatttcatccagcaattctatttctgggtatatacttgtgagaaatgaagacgtatgtccacccagaaacatgaacatgatt

SEQ ID NO: 995054 - DNA, 120 bp, Artificial Sequence
  ENSG00000277215_52 (sequence is synthesized)
atttatagtatcattatttataacagcaaaattgaatcaactcaaatgtccatccactgattcaatacataaaatgagatgcatccatgcaaataaatatgattctgcaatgcaaaagat

SEQ ID NO: 995055 - DNA, 120 bp, Artificial Sequence
  ENSG00000277215_53 (sequence is synthesized)
gaagtattgatacatactacaatatggatgaaccttaaacaaaatgctaagtgcaagaagccagtcgcaaaggaacacacgattccatttacgttaaatctctggaataagcaaattcac

SEQ ID NO: 995056 - DNA, 120 bp, Artificial Sequence
  ENSG00000277215_54 (sequence is synthesized)
agatacaaaaatagagtagaaattgcttagcactggggaatggaggaaatgggcatgaccgctaaagggctaaagggaatggagtgcctttttgggtgaaaatgttctaaaattggttgc

SEQ ID NO: 995057 - DNA, 120 bp, Artificial Sequence
  ENSG00000277215_55 (sequence is synthesized)
ggcaataattttacaaccttgcgaatatactaaaagtgtgctagattatacacttttaaatggcaaattgcatggcatgtaagtaatcacaatcaatatcatacacacacacgtacacat

SEQ ID NO: 995058 - DNA, 120 bp, Artificial Sequence
  ENSG00000277215_56 (sequence is synthesized)
atgtttacactgagaaacagcacccatgtttacccagagaagattagtgtagggttttgcagtgtgacagtccatgcacgttgtcactgatctgctgcctcacctttttgatgtaggtat

SEQ ID NO: 995059 - DNA, 120 bp, Artificial Sequence
  ENSG00000277214_0 (sequence is synthesized)
gctaatgatgaagactgtgccatacacattcatggctgagtatctaattgttacattgttatatatcatttctagaaattaaatgcccatgtttgggcagctaaatatattattatctgc

SEQ ID NO: 995060 - DNA, 120 bp, Artificial Sequence
  ENSG00000277214_1 (sequence is synthesized)
acatttttatggtttatttatgtacactgctgtgaagacatggtatttttatttctcttattgcaaggtcttttatagtcgcccattttctcttggaaaaaaaaaagagaggatcagaat

SEQ ID NO: 995061 - DNA, 120 bp, Artificial Sequence
  ENSG00000277214_2 (sequence is synthesized)
tttagatgtgtagcagtaatgctctcaggcttataacttaattctcatttttatcctttttacattattatttagtgattcacaggggtgtctaaacatttacagttctctgttagcagc

SEQ ID NO: 995062 - DNA, 120 bp, Artificial Sequence
  ENSG00000277214_3 (sequence is synthesized)
atttcttttataacaattgagctctctcattttaatgagtactattcaggtttttgattctgtacaattacagtgggccacatgtctttagacttctttgctaacattgtttgtttcact

SEQ ID NO: 995063 - DNA, 120 bp, Artificial Sequence
  ENSG00000277214_4 (sequence is synthesized)
tctatccaagccaatctaatccaaatacaatgtgaactgtgttttcttactgcttaacatccccttgctatatatactctagtaatctctgtagaacaatatacagtaatttagaaacca

SEQ ID NO: 995064 - DNA, 120 bp, Artificial Sequence
  ENSG00000277218_0 (sequence is synthesized)
cgagatcacaccactgcattccagcctggatgaaagagtgagactctgtctcaaataaaaaagtaaaaataaaatatacccacaaagcttcacaatgaagtcctaaattggctatcataa

SEQ ID NO: 995065 - DNA, 120 bp, Artificial Sequence
  ENSG00000277218_1 (sequence is synthesized)
cagggaaggtttaatggaagacaccctgaatgatctatcaggttggaattgctgaaatggagtgccaggcttcaggttgcaatacttcttgactgttaccaaagaataatgagttgggta

SEQ ID NO: 995066 - DNA, 120 bp, Artificial Sequence
  ENSG00000277218_2 (sequence is synthesized)
tcttattggcatggtgtatattgcctcttaatttgataaagttttgtttatgttgtattgtgtcctagtctttgatttaataatccagattgagttcaataaagtatccaagttctacca

SEQ ID NO: 995067 - DNA, 120 bp, Artificial Sequence
  ENSG00000222035_0 (sequence is synthesized)
agtcatctgaagacttgactggggctggagaacctcctctcaaggcaactcccacacaagcctaggaagttcattctggctgttggcaaggggcttctgttccttgccatgtggactgct

SEQ ID NO: 995068 - DNA, 120 bp, Artificial Sequence
  ENSG00000222035_1 (sequence is synthesized)
tgccataggctgcttgagtggcctcatcacagacatggtggttggctttccccagaagactcttagaaagccagacctttataggaagatgtgggtttaagatctttcaccaccttcttg

SEQ ID NO: 995069 - DNA, 120 bp, Artificial Sequence
  ENSG00000222035_2 (sequence is synthesized)
agcaacatcctgtcaccatcaagactgaaggtcaaccaactgcccatggaggaaaggcttgagaaagcttttgctgtgccaaaagggggaactatttctcctggaacagagtggacaaat

SEQ ID NO: 995070 - DNA, 120 bp, Artificial Sequence
  ENSG00000222035_3 (sequence is synthesized)
gtgcagcaggtgaacagaatcatatttgctttccagctgttgcaccagctgtgtcatgctgacagtggcctccacctgtctaactcctgcttccaccaattcagaaccaagatattttta

SEQ ID NO: 995071 - DNA, 120 bp, Artificial Sequence
  ENSG00000222035_4 (sequence is synthesized)
tactcatatcctggtataaaccaactgctgatggaagttctttgatgctgaatttggaatcaaatacattctactttctggaaatccatatactgggtggctgcttcaatagcagcggac

SEQ ID NO: 995072 - DNA, 120 bp, Artificial Sequence
  ENSG00000222035_5 (sequence is synthesized)
ggaaccttggatacagggaggatgagggactgactcaaagtcatctggcaacttagagacgaggccagagctcctcaaatctcctagctctgaatccatgttctttttattgagcgggtc

SEQ ID NO: 995073 - DNA, 120 bp, Artificial Sequence
  ENSG00000222035_6 (sequence is synthesized)
atgacgtaaccccccagatgagtgcagcttttaatctcccacatcaaggagcctgctggctgcagactcatgcatacacatcacggtggtttctgggtggttgatgctcatcaccctctg

SEQ ID NO: 995074 - DNA, 120 bp, Artificial Sequence
  ENSG00000222035_7 (sequence is synthesized)
acttcatttattttttcctttgcaaaatggctattgcccagaggcagcatctcttttctaaaaagtgaacatgccagaagggtttttggaaactgccttgctatctgtaggagccagatg

SEQ ID NO: 995075 - DNA, 120 bp, Artificial Sequence
  ENSG00000222035_8 (sequence is synthesized)
attcacagggatgaaccaatgtacataacaaggatacctgattggattaccaattagccgtctccacctctgcagggtggttggaaagaagagaaaaggcagtgtttagtttgggcaaat

SEQ ID NO: 995076 - DNA, 120 bp, Artificial Sequence
  ENSG00000222035_9 (sequence is synthesized)
accaaaaggactttatcattctcatcaaggcatcagcgtggcacattagacctcttccaagccattccactggaacttctctctccaaatgctccagcaagagtaaacttgttatgcaaa

SEQ ID NO: 995077 - DNA, 120 bp, Artificial Sequence
  ENSG00000222035_10 (sequence is synthesized)
ataggctgcttgagtggcctcatcacagacatggtggttggctttccccagagtgagtaatccgagagagagagcaaggaggaagccttggtgccttttatgaccccagtctcagaagtc

SEQ ID NO: 995078 - DNA, 120 bp, Artificial Sequence
  ENSG00000222035_11 (sequence is synthesized)
acataccatcaattctgccatagtctatctttatttagaagtgagccatcatatcccactcacactcaaggggagaagagttagtttctcccttttgaagggggaagtgtcaaagaattt

SEQ ID NO: 995079 - DNA, 120 bp, Artificial Sequence
  ENSG00000222035_12 (sequence is synthesized)
gtggatgtattttaaaaccaccacaccaagaaagagttgcaagggggaaggatgctaattaaatgacaaataacaacaacaaacaaacaagaaaggctgggtgcagtggctcatgcctgt

SEQ ID NO: 995080 - DNA, 120 bp, Artificial Sequence
  ENSG00000222035_13 (sequence is synthesized)
atggtggctcgtgcctgtagccccagctatttggaggctgaggtgggaggatagcttgaacccaggagtttgaggcttcagtgagccatgattgcaccactgtactctagcctgtgcgac

SEQ ID NO: 995081 - DNA, 120 bp, Artificial Sequence
  ENSG00000222035_14 (sequence is synthesized)
agagcaagaccctgtctaaaaaaacaaaaaacacccaagaaacattttgagggtaaaaatccatttagaacaagaacaaatactaaacagaaactctgaaagagaccaggaatttaaatt

SEQ ID NO: 995082 - DNA, 120 bp, Artificial Sequence
  ENSG00000222035_15 (sequence is synthesized)
tacatgggacttgatgcccaacctgaatcattggcataaacatccttgaacttctttgtaaaacaaacttctgaataaaagaacttctgagagaaaacttctattgctggcactgtgact

SEQ ID NO: 995083 - DNA, 120 bp, Artificial Sequence
  ENSG00000222035_16 (sequence is synthesized)
aggggagtagatgaaggatttgaatcaaggataagcaattcagagggcatatccagtggtttgacatgtatccttctaagttaacttttcctttctcaagactttcaattttctaaatgt

SEQ ID NO: 995084 - DNA, 120 bp, Artificial Sequence
  ENSG00000222035_17 (sequence is synthesized)
tcaatatcccaacatgaccaaaagggtcaaattccagctctagtcttcacatctttttttttttccttctgaaggtttatattcatttccctatgctgtctgaaagaagataccatgatc

SEQ ID NO: 995085 - DNA, 120 bp, Artificial Sequence
  ENSG00000222035_18 (sequence is synthesized)
taattgcctaagaatttatttccaaatagttgttgacagagcctggaagtctcagaaagatcagatggatcgtattccttcctttactcaagagtttttttttttttttaattaaaacaa

SEQ ID NO: 995086 - DNA, 120 bp, Artificial Sequence
  ENSG00000222035_19 (sequence is synthesized)
aaaacaaaaaacccagcaacaactatgatccctaaagaactttcctttgtggcacctggagtattcagtcaatcaacaagcttttcctggacatatgatggagatgagatgttctctagg

SEQ ID NO: 995087 - DNA, 120 bp, Artificial Sequence
  ENSG00000222035_20 (sequence is synthesized)
actcatattggaagctaaacagaaaacagatgcagatacatacaataatcacaaaagtgggattgagaaagagagagaggaatggggctgaggctacatctaggcagctgtgtgcaatga

SEQ ID NO: 995088 - DNA, 120 bp, Artificial Sequence
  ENSG00000222035_21 (sequence is synthesized)
ggtggatttattaaggaaaatgttccagaaaagatgaacttaaagctattctaaatatttgggggaaacttgagcaaaagtttggagagaaaagaatgaagactgaatttttaggtcatc

SEQ ID NO: 995089 - DNA, 120 bp, Artificial Sequence
  ENSG00000222035_22 (sequence is synthesized)
acaaggggtgggctggaatatagtaggagatgaggctggaaggggagggtggagacggtgattaagatggttttgaacaaactgatctgcaaagagttcggtgtggttggagcaattata

SEQ ID NO: 995090 - DNA, 120 bp, Artificial Sequence
  ENSG00000222035_23 (sequence is synthesized)
ggtgcaaaagtaattgtggtttttgcaattaaaagtaatggcaaaaccgcaattacttttgctccaacctaatattttgcgagaggaaaaatttttttcagtatactgtctcccaaacca

SEQ ID NO: 995091 - DNA, 120 bp, Artificial Sequence
  ENSG00000222035_24 (sequence is synthesized)
accaaaccaaaccaaaacaaacaaacaaacaaaaaagcccaaaccaaaaaaatctttgcttattaatagagactcttagaaagccagacctttataggaagatgtgggtttaagatcttt

SEQ ID NO: 995092 - DNA, 120 bp, Artificial Sequence
  ENSG00000222035_25 (sequence is synthesized)
gtgtcggtgaaaggggagaaactggctgacttgcgtctgtttttaatgatgtcgctgctgctgggaaaatttggaagctgcagagccaagaacatcagaggtgggatgatgatgcttgtg

SEQ ID NO: 995093 - DNA, 120 bp, Artificial Sequence
  ENSG00000222035_26 (sequence is synthesized)
gctatgagacaggatttcaaggatcctgatgaaacgtctgctggcctgaatctgtctgaatgctgaaaaggactttgtgttactctaactgaaaggaaaacataaaatgatgataatgta

SEQ ID NO: 995094 - DNA, 120 bp, Artificial Sequence
  ENSG00000237851_0 (sequence is synthesized)
aaaaaaaagacatttactgaatgcctacgatatgccagaaatgggctgtatttacacaatacagaaaaagaaaagacaagcattgcatttaagagcacagagctggctgggtatggtgcc

SEQ ID NO: 995095 - DNA, 120 bp, Artificial Sequence
  ENSG00000237851_1 (sequence is synthesized)
ctcatggtttataatttctaactgtctacttaaaatgaagtgatatgggagaaatttatctggactcaaaatcaggaagaattttatttttatttaaaattagctttatagacactacat

SEQ ID NO: 995096 - DNA, 120 bp, Artificial Sequence
  ENSG00000235586_0 (sequence is synthesized)
ctgaagagaaccggtggtcccgacgctggccccgagcccgaggagttaaactaacaaagagctccccgagccgcgaaaccccccagagcggaagcgacgcctccccgccgccgccgccgc

SEQ ID NO: 995097 - DNA, 120 bp, Artificial Sequence
  ENSG00000222037_0 (sequence is synthesized)
gtcagcccaaggctgccccatcggtcactctgttcccgccctcctctgaggagcttcaagccaacaaggccacactggtgtgcctgatcagtgacttctacccgggagctgtgaaagtgg

SEQ ID NO: 995098 - DNA, 120 bp, Artificial Sequence
  ENSG00000222037_1 (sequence is synthesized)
gcggccagcagctagctacctgagcctgacgcctgagcagtggaagtcccacagaagctacagttgccaggtcacgcatgaagggagcaccgtggagaagacagtggcccctgcagaatg

SEQ ID NO: 995099 - DNA, 120 bp, Artificial Sequence
  ENSG00000246640_0 (sequence is synthesized)
gctgctgctgctgaaaaggccagccgggctggagagacctggcattggcgcatctgggaaccgacgtccgtgcgcggctggctagaatgctggactcgcctccgcagcgctggcctgcag

SEQ ID NO: 995100 - DNA, 120 bp, Artificial Sequence
  ENSG00000246640_1 (sequence is synthesized)
ggattagaagacatgtggggtcaaggaacaggaagctgacctggatggaagttgaacagtgatctttgctctctgcctggctcctgagtcctctgccatgttcctggagaagaggagcca

SEQ ID NO: 995101 - DNA, 120 bp, Artificial Sequence
  ENSG00000246640_2 (sequence is synthesized)
gccaggtcttcattcaaaccaaaccttggatgggatccatctgcctctgcaggtgaccgtaacaacatgcaaatggtgagttctgctggggggtcatggaagctccctggaggaggtgta

SEQ ID NO: 995102 - DNA, 120 bp, Artificial Sequence
  ENSG00000246640_3 (sequence is synthesized)
tctggacaacagggaaagaaaggagctggagaagagaggcagaaaaattgggtcctggttcaggtgaagttttcccagctggaacaatgacaatgtcaatatcccacaaaggcggcttct

SEQ ID NO: 995103 - DNA, 120 bp, Artificial Sequence
  ENSG00000246640_4 (sequence is synthesized)
gtttatttagcgcttgctgtgttcccacaagtcttcctctacctgccctctccccagccctcatctcactctcccagagccccagagcacaccaatggacaccatcacctctcgggcaga

SEQ ID NO: 995104 - DNA, 120 bp, Artificial Sequence
  ENSG00000246640_5 (sequence is synthesized)
tcagcacagagacgtgaagcacacaggcagctgctggaaaaataacaaggaattgcaatggtgtgcccctccgttgaatgcaagctctcttctgccttctcaccttgggcaagttacctt

SEQ ID NO: 995105 - DNA, 120 bp, Artificial Sequence
  ENSG00000246640_6 (sequence is synthesized)
ccgttccaggcctcggtttctccatgtgtgaaatgaaagggctggagagaaatctctcactattccccaatctacattcattgtatcccaaaccttctaatatctgttcaacgaagtgta

SEQ ID NO: 995106 - DNA, 120 bp, Artificial Sequence
  ENSG00000246640_7 (sequence is synthesized)
ccaaatctcagctattggactgagactcaggggtctatctgacttgaattgaaaatgcaaattactgaagagggagggagggaggagtgctgaagattgaatggatttatcagatttcct

SEQ ID NO: 995107 - DNA, 120 bp, Artificial Sequence
  ENSG00000246640_8 (sequence is synthesized)
tctcctatggcccagatgcaggcctagtccaggcgattcccctggctcagaatctgccaggctcaagcattcattgacagcctactatgtaccaatcctgggctgagtcccaacccgggg

SEQ ID NO: 995108 - DNA, 120 bp, Artificial Sequence
  ENSG00000246640_9 (sequence is synthesized)
atgacttagaggaggccaggatgtggcctcatgttctggttgctctcacatttaaacaggctaaacccactttgcattgtatgttaggggtggtgcttgtgggacaaagggggctgtcag

SEQ ID NO: 995109 - DNA, 120 bp, Artificial Sequence
  ENSG00000246640_10 (sequence is synthesized)
ccacatgaagttgactttgccaggacagactgggttgtgggggaaggcagctactgtaataatttggccaagaagtgggctgagcaggagcagggctgagggagggagagagggaatgag

SEQ ID NO: 995110 - DNA, 120 bp, Artificial Sequence
  ENSG00000246640_11 (sequence is synthesized)
taagaaaggcccagggtactgatttgactgggacttcagggacaggtgtggggcgagagggatgctggaagtgaaggagggaaagtgcagaggctttctggggattaataggcaatgatc

SEQ ID NO: 995111 - DNA, 120 bp, Artificial Sequence
  ENSG00000246640_12 (sequence is synthesized)
tctatgagggcgtggtgagtaggccccaaacatccggggacttccctgcctgccatccctctgtctctctcttcctttcctactgcccagggcctggccctgctgcacatgccctgccct

SEQ ID NO: 995112 - DNA, 120 bp, Artificial Sequence
  ENSG00000246640_13 (sequence is synthesized)
ggcccccagagtccccttctttcctggctgggagattaagactctgctgtgcctacagcattctcaacctcaagtcaaggtggccctttggagcccaggaggccacatggctgagtcagg

SEQ ID NO: 995113 - DNA, 120 bp, Artificial Sequence
  ENSG00000246640_14 (sequence is synthesized)
gctgagtcaccaccccccaagggccttgccatttcctgtggagaagcctctttactggcagggttctgtgctcaggtgggaaatctggagaggtcgggggcagggcttcatctactttta

SEQ ID NO: 995114 - DNA, 120 bp, Artificial Sequence
  ENSG00000246640_15 (sequence is synthesized)
cccactaactccctagacactccactgggggtagagggttcctacacgtatgatgatcaaaacatgtgtctgtgcacatgggcccttatgcattcacaggtgtttgcctatgcgactgca

SEQ ID NO: 995115 - DNA, 120 bp, Artificial Sequence
  ENSG00000246640_16 (sequence is synthesized)
tgtctgaatgttttatgtatatttgaatatagatagggaacaaatatttatggagcacatattatgtgtgcagccttttacgtgtgttactttctaataaccctaggaggcgtagatgcc

SEQ ID NO: 995116 - DNA, 120 bp, Artificial Sequence
  ENSG00000246640_17 (sequence is synthesized)
tcccaggctatggttgaaaatactgacatgcccaaggtgcaggaggtatgaatacctccccactgtggctggtaacaccccaggtttctccaactccacagtgatgggctttcctccaga

SEQ ID NO: 995117 - DNA, 120 bp, Artificial Sequence
  ENSG00000246640_18 (sequence is synthesized)
gccggttcctcaggggcaggagtgagaagtgtgtgtgtctgtatttatccttccaccagtggctgtgattggtcctgtggttggaaacagggtcaagtaaggcccttgggagtagctggg

SEQ ID NO: 995118 - DNA, 120 bp, Artificial Sequence
  ENSG00000246640_19 (sequence is synthesized)
tgaatggacgatggtggcgtccaccttggacatggcacatacttctggtcgggtatccacgtggctggccaacccggacctgccctattaggggccatcgccctcatggctcatcagtgc

SEQ ID NO: 995119 - DNA, 120 bp, Artificial Sequence
  ENSG00000246640_20 (sequence is synthesized)
tgagtttcattgccttcttcgtaatgcaatactaatggatacaggcatgtatctgccgtacactagatgaaatgtggttatttgctcaggtagaaataaagactaaaataccaaagtggg

SEQ ID NO: 995120 - DNA, 120 bp, Artificial Sequence
  ENSG00000227047_0 (sequence is synthesized)
ggaccttggtatgctgagcaccggtcccctgggcccactgttgttttctcacgttttctcacctttccaaacgtgtccatgcctagaagctggagaccccatccacactgcagtaccagg

SEQ ID NO: 995121 - DNA, 120 bp, Artificial Sequence
  ENSG00000227047_1 (sequence is synthesized)
gattcttcctgggcagtgtatagcaggtaaccatttgtgtcctggatgtctgtccacccaagaggccatgactttgcaaaggcaaggcaagggcagtgctggatctccggctctgcttcc

SEQ ID NO: 995122 - DNA, 120 bp, Artificial Sequence
  ENSG00000227047_2 (sequence is synthesized)
caaaattcctggactagatgtggggtgactgctgctgaacagaggtgggccccagggtgaaggaccttgctcagcctcccctcagtttggtctaccaggcccttgtcaagcactctgctg

SEQ ID NO: 995123 - DNA, 120 bp, Artificial Sequence
  ENSG00000227047_3 (sequence is synthesized)
gagtctgggggtactgatctttggaaatgtcagtcctggaggctgagctgttccccagagccctagagacccctcaccaactactttattgagggacaaggcagtaggcaggagtgctgg

SEQ ID NO: 995124 - DNA, 120 bp, Artificial Sequence
  ENSG00000227047_4 (sequence is synthesized)
gaaatctggtttgcttggtatgccttcttgcacacccacctctccctgcacctggttctatttgtatctgagcttctcgaactgcaataatgatgcagcctagctggcttctggaagctg

SEQ ID NO: 995125 - DNA, 120 bp, Artificial Sequence
  ENSG00000227045_0 (sequence is synthesized)
ctcttggcttcttgggagaacaaattgtaggagagcaggaaaagaaacatggagacagatgagagcaatgtgacgtggacagtgttgatggctgtggagatgcagagacatgagatgtgc

SEQ ID NO: 995126 - DNA, 120 bp, Artificial Sequence
  ENSG00000227045_1 (sequence is synthesized)
tgtgaaggcacatgcttggaaagtgaaaagcctactggaatgaaaagggcatcattggctactctgtgaggactctgaactggaaatcatccccaccctgggttgccacagcaaatgttt

SEQ ID NO: 995127 - DNA, 120 bp, Artificial Sequence
  ENSG00000227045_2 (sequence is synthesized)
aatctcaggctagtcttcccttgtagctgccctgcgtgccttaccacgactcctgcccccacaccccagtcctcatggtgtgcctcaaatcttaatactagtctgagctgaataaaaacc

SEQ ID NO: 995128 - DNA, 120 bp, Artificial Sequence
  ENSG00000231530_0 (sequence is synthesized)
tcctgatactgtgtttactcttctgcctgaatagttccacgcagaatcacaccatcatgttttaggttccatcaaaaatgaatgaggagaggccaggtgcagtggctcatgccagtaatc

SEQ ID NO: 995129 - DNA, 89 bp, Artificial Sequence
  ENSG00000231530_1 (sequence is synthesized)
ggaggcaaaggttgcagtgagctgagaatcaggcccactgcctcaaacaatgaggagagtaaatggttacatgcatgctattgttatat

SEQ ID NO: 995130 - DNA, 120 bp, Artificial Sequence
  ENSG00000231530_2 (sequence is synthesized)
atgaggagagtaaatggttacatgcatgctattgttatatgtacatgcccttatgttatcccataagggataatgcaacaggatctgttcattattgaacagaatgaatattaagcgtat

SEQ ID NO: 995131 - DNA, 120 bp, Artificial Sequence
  ENSG00000231532_0 (sequence is synthesized)
ggtactgctcctgcgcagtaaagccttctccaaagaggcgggggtctcagcctggttcttccttgttcctcgtcctctgaggtagcaactgcctcatcttttccatctatggagtgtgga

SEQ ID NO: 995132 - DNA, 120 bp, Artificial Sequence
  ENSG00000231532_1 (sequence is synthesized)
atatgtgccctacttcattcaggaatgttggacaaaccagctatttagagagtgaaggagaggaacttccgagagcaaccggcccccaagagaaacccagggactcctgcccttcggcag

SEQ ID NO: 995133 - DNA, 120 bp, Artificial Sequence
  ENSG00000231532_2 (sequence is synthesized)
ttcggcagctttgtccatgtgctgctcacaccaaaaagcactcgagggtgacctgcaccaaaaatgcattgccgtagtctgggcacagtggatcacgcctgtaatcccagctctttggga

SEQ ID NO: 995134 - DNA, 120 bp, Artificial Sequence
  ENSG00000231532_3 (sequence is synthesized)
cactgtgctaagttggacttacagagatgaataagatttggccacatcttcaaggagctcagaccttcatggacgtaccaaatatatacagaactaactctactgcttatcataatgaga

SEQ ID NO: 995135 - DNA, 120 bp, Artificial Sequence
  ENSG00000231532_4 (sequence is synthesized)
gctgtgctatggatatttgaaagttagagagatttattttcaacagaataataaagtcaactttcacaaactggtgacagatgatctgggccttgcagacaggggaggactgacagattg

SEQ ID NO: 995136 - DNA, 120 bp, Artificial Sequence
  ENSG00000231532_5 (sequence is synthesized)
agaagagtatttggttaaaaacggatcataaactggtataaatatctaaacaaactcatgagaatgagcagagtcagacacaataaaataattcaaagatatatcagataaacctggacc

SEQ ID NO: 995137 - DNA, 120 bp, Artificial Sequence
  ENSG00000231532_6 (sequence is synthesized)
caaaagtcatgactttttcttttcagttaactctgaacaatttacaataacttcctcaattattgtttgtctcattttaacattttgtaataacacctatgtctccatattggtatgaag

SEQ ID NO: 995138 - DNA, 120 bp, Artificial Sequence
  ENSG00000231532_7 (sequence is synthesized)
attaaatgaaaatacatctatgttagatagtccctaagtttctgtccctgatataagtccaccctccccaccatcatgtgatcacacgcaggtgcacatgcacagatgtatacatgcatg

SEQ ID NO: 995139 - DNA, 120 bp, Artificial Sequence
  ENSG00000231532_8 (sequence is synthesized)
ccgttatggggacagtaattgcaaatatcaatactgttatggttgttacttcagccattgcacaagtgtagacctctggatcaacacacatacgtatgtgtatgtgtaacaaatatatgg

SEQ ID NO: 995140 - DNA, 120 bp, Artificial Sequence
  ENSG00000231532_9 (sequence is synthesized)
ctaataatgcataggtttcatagctataccttgaaatcaatttattaaagggatgtgtccttcccatgctgactcacctactgcggcccaaaagcaacaacgtaaactgccctggataaa

SEQ ID NO: 995141 - DNA, 120 bp, Artificial Sequence
  ENSG00000231532_10 (sequence is synthesized)
ataaaacatctgcagacaagagatctctaagctaagctacagcttcatcaagcatggagttatctcatttcatagcttcacacacacaaaggcgcgcgcacacacacacacacacacaca

SEQ ID NO: 995142 - DNA, 120 bp, Artificial Sequence
  ENSG00000231532_11 (sequence is synthesized)
accgtcagggaaaacaagtaccagtgagacctggggatcttcatttgattttgtctactgggtgaggctgtgttgaaaacactttgacagagggctcttctcttggggctcatcaaatat

SEQ ID NO: 995143 - DNA, 120 bp, Artificial Sequence
  ENSG00000231532_12 (sequence is synthesized)
tgctggtagagggtttgcttgctttaaatattcctttcctcaggtaacgaagaataccatgtaatttgtaatgataacttggataatgaatgcacactgtagtcagccattaccagtggt

SEQ ID NO: 995144 - DNA, 120 bp, Artificial Sequence
  ENSG00000231532_13 (sequence is synthesized)
aattggtcttcctttcatctcctgtcaagcagagtggttaggattaggaccaaaaggcagctatcatctctctcatttcctgactcagacaaaaggcaaaaaaaaaaaggtgcctgcttg

SEQ ID NO: 995145 - DNA, 120 bp, Artificial Sequence
  ENSG00000231532_14 (sequence is synthesized)
tgctgataggtgtctgatcaaagcggctgaaagctgtcagaagccagccagcctcagcacctgactactccttaatgcagctttgcctttgatgtacaggcagtccaaccggggttctat

SEQ ID NO: 995146 - DNA, 120 bp, Artificial Sequence
  ENSG00000231532_15 (sequence is synthesized)
ttatgtaaaaaaaaataatcaggattgtaatagaacaggagaaagtgtcattttctattttgattccagttttgcagtctgacacctataggaaatgtggactaattctgtccagagtat

SEQ ID NO: 995147 - DNA, 120 bp, Artificial Sequence
  ENSG00000231532_16 (sequence is synthesized)
tgtgtgtgtgtgtgtgtgtgtaactcaataaaataaaatatctttgaaacttcatcaaatacatttggcagtgagcagaagttagattgctggtagaaagaaattatccttcttggaaag

SEQ ID NO: 995148 - DNA, 120 bp, Artificial Sequence
  ENSG00000231532_17 (sequence is synthesized)
aaagaaattatccttcttggaaagtaaaaaaaaaatgcttaagtaaaattgcagcagttttgacatgtgtattttatgtttcagaaattctacaggttataggtttataaatggagaact

SEQ ID NO: 995149 - DNA, 120 bp, Artificial Sequence
  ENSG00000231532_18 (sequence is synthesized)
ggtcttggatttaaatgaattggcatcgtatctcagacttctagctttctacccatgtgaatttaggtgcgtactaatcacatatgtgttttaagtttatcactggctatatacatggtt

SEQ ID NO: 995150 - DNA, 120 bp, Artificial Sequence
  ENSG00000231532_19 (sequence is synthesized)
acttttgtatatgcctgtgcattgaatgaaaatacctggcatgtggttgttataagcaatagacagtttttggccagagagccaggcagacaagtgttaatatcacttaagccctctgtg

SEQ ID NO: 995151 - DNA, 120 bp, Artificial Sequence
  ENSG00000231532_20 (sequence is synthesized)
gtctctagacagagctaggtggggcactgtaaaacagtcgcaggggagaggtgctccctttttttggtgcttttgtgctgcttgtagcatggcagccagcaagttggtgtgcaagaggct

SEQ ID NO: 995152 - DNA, 120 bp, Artificial Sequence
  ENSG00000231532_21 (sequence is synthesized)
cagtagcattaatctctgtgactctgatgggccagctgcatcctgagcccctgaaaacttcttgacttcttggtgcactggaccaatggaccggctctacccacgtcttccagcaagtcc

SEQ ID NO: 995153 - DNA, 120 bp, Artificial Sequence
  ENSG00000231532_22 (sequence is synthesized)
caagttcaaaatttctaaaatgagtgaatataatatttgtttgaattaaagtatacaaagcatgtatctcagtgtctaagacattgtaagacaccaataaatgtccagtatttctgttgt

SEQ ID NO: 995154 - DNA, 66 bp, Artificial Sequence
  ENSG00000231532_23 (sequence is synthesized)
aggtgcgggatatagtctcgctcgattttccaggtgcctccgtcacccctttctttgactcggaaa

SEQ ID NO: 995155 - DNA, 120 bp, Artificial Sequence
  ENSG00000231532_24 (sequence is synthesized)
tcagttgaatggcagagggactagaaattacatttcacgaagaaaatttacagaactaaagatatttaggctgcaaaagaaaagactaagagaacagtatacaagcatggtgaagagtga

SEQ ID NO: 995156 - DNA, 120 bp, Artificial Sequence
  ENSG00000231532_25 (sequence is synthesized)
aatctctactgctaaactacagaggtatccgatacaggttcttaagtgctgagggactttgcataaattactgatgctgtggttttggttttctccagtgtaaatagtgttgaatacagt

SEQ ID NO: 995157 - DNA, 120 bp, Artificial Sequence
  ENSG00000231532_26 (sequence is synthesized)
atccataaaatacctgaacaggttgagaaaggaaatgtgtataaagtggttaaaaagagactgacgcaaagtaagtgctctataaaaattgcctgtaaaaaataagactaccacaaataa

SEQ ID NO: 995158 - DNA, 120 bp, Artificial Sequence
  ENSG00000231533_0 (sequence is synthesized)
actgactggaggcagatgatgaatttgaagccctgacaaagagaaggcaaaatcagtttgtgtccctgagttgctaagtggagaagaaacgtccaccaaccaggaaacacctgcctccaa

SEQ ID NO: 995159 - DNA, 120 bp, Artificial Sequence
  ENSG00000231533_1 (sequence is synthesized)
ctgttaagtgagcaagaaataaacttctgttgtgtttgagctattacacattttctgatctatttgtctacaggttaatttatgtttaaatatgttttaaactgccactgaactgactta

SEQ ID NO: 995160 - DNA, 120 bp, Artificial Sequence
  ENSG00000231533_2 (sequence is synthesized)
gtcacatatttaaactttgcagtaggtctgtgaaatgtgctttgtttctggtcagcatggacacccgctttaatagtggcttcagatgaggcaccttgtgacagaggagctcttcccctg

SEQ ID NO: 995161 - DNA, 120 bp, Artificial Sequence
  ENSG00000231533_3 (sequence is synthesized)
cagcaaccttgaagatgttgtggaagacaatagccattcttacttcactctgaggatcacgatggcgtgcaagggtgtgccaagcacattgctatctttggccattctctctcacattag

SEQ ID NO: 995162 - DNA, 120 bp, Artificial Sequence
  ENSG00000231533_4 (sequence is synthesized)
tacacctggatgtgaatggcacgttatctatgtaagcagtgatggtctctatctggtggtagaaatgacagaattacacacaatcaggacagctgagattccatttactagctcagtaat

SEQ ID NO: 995163 - DNA, 120 bp, Artificial Sequence
  ENSG00000231533_5 (sequence is synthesized)
cagagaatatgtatgacatcccagcaaaaaatgttgaacatgttcagatttcatcatatcagcaccacagtatcagtcttactgggaggtgctcgcattcagttcctggctactgaagaa

SEQ ID NO: 995164 - DNA, 120 bp, Artificial Sequence
  ENSG00000231533_6 (sequence is synthesized)
attttgcaggagttccagataacttacttgtcccataataatgaaaactattacaattatgctaaagaagaatacttaataacacagtaaaaatgtttatgatgtcttttaatttctaaa

SEQ ID NO: 995165 - DNA, 120 bp, Artificial Sequence
  ENSG00000231533_7 (sequence is synthesized)
gcatgttataaaagtattacagtatgatctcatatttgtaagtaaaatatatattaattcatttagcaaataaatattaagcccctactatgcacataccaatatagatattggtatttg

SEQ ID NO: 995166 - DNA, 120 bp, Artificial Sequence
  ENSG00000231533_8 (sequence is synthesized)
tgtgggtgtgtgttacagcagattttaattttcttattttgtattttctgatttatctacaatgaatttgtattaatttgctaacaaaacatcactattaaaataaattttttttgaatt

SEQ ID NO: 995167 - DNA, 120 bp, Artificial Sequence
  ENSG00000231533_9 (sequence is synthesized)
ataagaaaaggctaacatcataacaataaggttgtatagaataaactgacaacacagaagttattttggccctgtgttccacagtgactcaccaaatataccctgcactgtttattttat

SEQ ID NO: 995168 - DNA, 120 bp, Artificial Sequence
  ENSG00000231533_10 (sequence is synthesized)
ttttttctatttcactattgaaatgaacagatgcatttcacgtcacatggatctcgtggaaacatgccaaacattttcttagcaaccaaactcctgtcttctgcactgtgcatgattaac

SEQ ID NO: 995169 - DNA, 120 bp, Artificial Sequence
  ENSG00000231533_11 (sequence is synthesized)
taaaacagcctgttgacggcttaaaataaacctgccttttccatttagcattttatcaaatgaatataatttcatttgctgatgaatttagttcagcttcaagagaatttttcttttctt

SEQ ID NO: 995170 - DNA, 120 bp, Artificial Sequence
  ENSG00000231533_12 (sequence is synthesized)
catggggaggctgaagaatcagaactgtcataccaaagaatgaaaagcaagcctagggagaacaagacagtctgatgtttacatgggtaaagtaaaagtatctttgtcaatattaccagc

SEQ ID NO: 995171 - DNA, 120 bp, Artificial Sequence
  ENSG00000231533_13 (sequence is synthesized)
actctccctcaccctctgttttatagggtggaatgttgattttagttctgcttttgcattatggtgtttacgttgcttgattacaagcattaatttaaatgactgctgtggggattacta

SEQ ID NO: 995172 - DNA, 120 bp, Artificial Sequence
  ENSG00000231533_14 (sequence is synthesized)
ttgttattatacgtgagctcttgtcttacttttgtttatttctagcacttgagtatgccctaaaatttaattagattcatctcttaggatagtagaccctttgctggggttcaaaagtaa

SEQ ID NO: 995173 - DNA, 120 bp, Artificial Sequence
  ENSG00000231533_15 (sequence is synthesized)
agggacaaatggtataatccgtcaagggaggagggaggtatattatcagcaatgaggagagtcaatgttttcttagaggatgtgactctgcaacttggaatgaattgatattctgtttga

SEQ ID NO: 995174 - DNA, 120 bp, Artificial Sequence
  ENSG00000231533_16 (sequence is synthesized)
tgaatataaaatatatctctgtgtctatatgtacatgtagacactttgcatccaaagactatagggatatttgctaaataaggaagatttaaagtttctttaaagacagcttaaaaacaa

SEQ ID NO: 995175 - DNA, 120 bp, Artificial Sequence
  ENSG00000231533_17 (sequence is synthesized)
agtcatctatgcagttaaaccagcatgtatctacagaatcaatgagaggaagagggttggactgaatattatatagtccatgcgatttccccactatcttttacttgtgtcctcatttgg

SEQ ID NO: 995176 - DNA, 120 bp, Artificial Sequence
  ENSG00000231533_18 (sequence is synthesized)
aaatagtgaaaaacagcactaatggcaaattgcaacactatttaaatttccaccttatttcccccagagcaaattcttaaatgttaatcatcatcaggcagtcaagtagacactttagct

SEQ ID NO: 995177 - DNA, 120 bp, Artificial Sequence
  ENSG00000231533_19 (sequence is synthesized)
taaaggcacaacaaatataaaacatattcctgataaatccactctttctgattgctgctctgtttacattttgagaaataatcttgatgtattgcctttaacattagacataatcaatat

SEQ ID NO: 995178 - DNA, 120 bp, Artificial Sequence
  ENSG00000231533_20 (sequence is synthesized)
aagattgatagacattttacattaaacattgtaaaaatagctgctcccacatttaatattcttctgctacaagtctgaattcttcattacttaagcgaggttatgatgctattcagctac

SEQ ID NO: 995179 - DNA, 120 bp, Artificial Sequence
  ENSG00000231533_21 (sequence is synthesized)
tttggaaaatgtcactatcttcttcaggtttgtttttgaaagtgtattaacattttcaaaacctgatttctaagttgagaaaaatccaactgaaagatgtcacaatgactatttgagact

SEQ ID NO: 995180 - DNA, 120 bp, Artificial Sequence
  ENSG00000231533_22 (sequence is synthesized)
aatcctactgacggcattacttcctttatggaggtaagacttgataactagcattctctcccactagcctacagagaagattccctaaaacaatactgggagcttcttgcaggtgcttag

SEQ ID NO: 995181 - DNA, 120 bp, Artificial Sequence
  ENSG00000231533_23 (sequence is synthesized)
agttttattaattacactcagctgggccgagggaaactagagatgaaatctaggaaatattccagagtctggcatgtgagcaatcataagcagttcatggaaacctcagagtgtctcagc

SEQ ID NO: 995182 - DNA, 120 bp, Artificial Sequence
  ENSG00000231533_24 (sequence is synthesized)
tttcctgctttatattcattaatttccttttctcatattaataaaggtcaatgctgttagtgcctatcttatccatagaaaggagcttgatcttgaactaattccattatattctatttt

SEQ ID NO: 995183 - DNA, 120 bp, Artificial Sequence
  ENSG00000231533_25 (sequence is synthesized)
ttaatagaaaactaaaatcttacatttggggatggctttgttgtcagtatgcttggtacagctttgtctttttctagtgaatagccctttactttattccaaaagatcgtatgcttctta

SEQ ID NO: 995184 - DNA, 120 bp, Artificial Sequence
  ENSG00000231533_26 (sequence is synthesized)
gaagcatttttattctttagttaaaattacattttacttttaaaactcaatttaaaaatcagcagttatttattgatggcatgatattagttgctatactaaatcctatagatgaattaa

SEQ ID NO: 995185 - DNA, 120 bp, Artificial Sequence
  ENSG00000231533_27 (sequence is synthesized)
ttctcacactgacactaggaagtagaatcaggtctttctgatgctctataataaagtgaaaaagaacacaccacacccacattaagaatagattaaatgtcttagttaattagccaagga

SEQ ID NO: 995186 - DNA, 120 bp, Artificial Sequence
  ENSG00000231533_28 (sequence is synthesized)
aaaagaaatctctccaaggcaggaccaatatggcctgactaacaaggatttccctggtctctgctccctgagaaagtccaccaggaaggtcatatccacagatagtaaagaccatcagtg

SEQ ID NO: 995187 - DNA, 120 bp, Artificial Sequence
  ENSG00000231533_29 (sequence is synthesized)
tctaaatgtccctgatagtagacctacctccagctttccaggcttcccaaataattacgtcttcacaacccaaattattttccaaatcccgtgttcttataattacagcagatttcagaa

SEQ ID NO: 995188 - DNA, 120 bp, Artificial Sequence
  ENSG00000231533_30 (sequence is synthesized)
cattatacctttgcagtggtgttccttaaaaatgaggtacataaattcctttaattctatagtgaaataaaaatatagttcatttacaatttaaggactggggcaactaaaatctggcca

SEQ ID NO: 995189 - DNA, 120 bp, Artificial Sequence
  ENSG00000231533_31 (sequence is synthesized)
tttgaataactaatttctggtaaaaagaagaggaactaaagtatagagattggttaatatagtattggaaattgtcaggataatttgggaatagttctttttagatcaatggatggattc

SEQ ID NO: 995190 - DNA, 120 bp, Artificial Sequence
  ENSG00000231533_32 (sequence is synthesized)
aataagaacatctttgacttatgattctaaaatgtggtactatatttttgcaaatttcatcttgaggaaatacttttctgtaagattttctccctaaagctagattagatctccagtggg

SEQ ID NO: 995191 - DNA, 120 bp, Artificial Sequence
  ENSG00000231533_33 (sequence is synthesized)
agtacccgtactccctggaagtctggaacaaaacaggcaataatttctcagctctgcaatggtatacaatggttgcctaaacaaaaaagggcaaagttgtctggtacttgcataaataga

SEQ ID NO: 995192 - DNA, 120 bp, Artificial Sequence
  ENSG00000231533_34 (sequence is synthesized)
taactagaaagatatagacatgggtatgcatgggtgtgtgtgtgtatatgtgtatgtgtgtgcatacaattaagaagcctatatgtatatggatataagcttatagatatacatacatat

SEQ ID NO: 995193 - DNA, 120 bp, Artificial Sequence
  ENSG00000231533_35 (sequence is synthesized)
aagcttcttagttccaaatatagtaacataaagaatacttaagttattaggaaaagatactctttcaatgcaggctctagggtgcactaattcagttgttactatccatatgtggggcta

SEQ ID NO: 995194 - DNA, 120 bp, Artificial Sequence
  ENSG00000231533_36 (sequence is synthesized)
tataaatttaaatgtaaattaattaaatgtaaattaatttaaaattcatcttcagagctgcactagccacatttcaagtactccacatatggctagtagctaccatatcagatagcacag

SEQ ID NO: 995195 - DNA, 120 bp, Artificial Sequence
  ENSG00000231533_37 (sequence is synthesized)
acgtagaatccttccatcattgcgggaagttctattggacagtgttggtccagaagttaaggaaatatttttaaaatgcatttaataagggcttgttagtcttatcctttcaataaagtc

SEQ ID NO: 995196 - DNA, 120 bp, Artificial Sequence
  ENSG00000231533_38 (sequence is synthesized)
ctctcattgacacactcgcttacccatctgaaaacagcaacacagtctgggttcctgatttgtatctgttacccttcatggaaatggctggtgaagcaaaactatgtgtgtaaaactgca

SEQ ID NO: 995197 - DNA, 120 bp, Artificial Sequence
  ENSG00000231533_39 (sequence is synthesized)
tctgccacaggctgcttgtccacaaaagcagcaaagcatctctatggaatacctccgtatggatctgtaaagaagagtcccacttcagtcaaagacagtagattatgaggttaaaaggac

SEQ ID NO: 995198 - DNA, 120 bp, Artificial Sequence
  ENSG00000231533_40 (sequence is synthesized)
ttctaactcaaactccgcctcttaagtttgctgttcaccacttccagcctcatgatttccacttctagcctggtgatttgatgctgattaaaacttggaaagaagacaagctccacccaa

SEQ ID NO: 995199 - DNA, 120 bp, Artificial Sequence
  ENSG00000231533_41 (sequence is synthesized)
gctgggaaggaccctcaagtgctcctaaccactgaaacagccatgcaaacagctgaacagcagcagattcactctactccaatcaagggactggtaaaacagaccccagaagggagggga

SEQ ID NO: 995200 - DNA, 120 bp, Artificial Sequence
  ENSG00000231533_42 (sequence is synthesized)
aaacaacagtaaaaagtgcctgggtcacctaaggaacccttaaagttaactctaaaaaaaaatctaaaaagaaaacataggctggccccatttctggaagttaatatggctaaaatgggc

SEQ ID NO: 995201 - DNA, 120 bp, Artificial Sequence
  ENSG00000231533_43 (sequence is synthesized)
tactatacaaaaagcagaacgtcaaaatggaaactggcagggaactcctccctacccaatcaagttggtaatcaacgtaaccaagatggtagcaccacaaactataagatttaatacctg

SEQ ID NO: 995202 - DNA, 120 bp, Artificial Sequence
  ENSG00000231533_44 (sequence is synthesized)
cccggtcttaccttgtgggaatttgaaaaatcagagacagctctcacaggcaaataagtatctttgccctgaaccagatacagattacagcagcgcatgactccgccccagctgggatga

SEQ ID NO: 995203 - DNA, 120 bp, Artificial Sequence
  ENSG00000231533_45 (sequence is synthesized)
tgtatggtaaactacccaatttcagggatggacggtaaacacggggtgggtaactccgagctggagacccttaaagaataaactacatctgtccaagggctccctgccaaataactgcca

SEQ ID NO: 995204 - DNA, 120 bp, Artificial Sequence
  ENSG00000231533_46 (sequence is synthesized)
gaatttaaaatgcaatcctatactcatcaccattaacaatccagccattctaaaccaagaaccaaaggaagcgtcttgggtatatgggttaagagcagacatcacagggaaagaccccct

SEQ ID NO: 995205 - DNA, 120 bp, Artificial Sequence
  ENSG00000231533_47 (sequence is synthesized)
ttctcaaaaatcaaaaactcaacctcccatttgcctgagactactccaactccaaaccctaataaacactttagtccaccaaataataaccctaaaagggtaaaaataattgaggtaaag

SEQ ID NO: 995206 - DNA, 120 bp, Artificial Sequence
  ENSG00000231533_48 (sequence is synthesized)
aatttaaggcaaaccttagaaattgagacagggtacagggatgtgaatgcctgggtcgaatgggtcaaattttcggtacaagccctcaacaagagtaaccactacaagtgtgctgcgaaa

SEQ ID NO: 995207 - DNA, 120 bp, Artificial Sequence
  ENSG00000231533_49 (sequence is synthesized)
caacctcaggcaaaggtggttccatttcctctaggataaaatatcaatcctgaaggaatgcgttgcatgttggctctataccagaacaaggatgcataggaaaatgaaacttataaaagt

SEQ ID NO: 995208 - DNA, 120 bp, Artificial Sequence
  ENSG00000231533_50 (sequence is synthesized)
ctgtcattgttctttcctgcattgcggaggtcaaatcccagagcaattccctcgttctctatagggaatataaaccacccctcttgtctctctaggtggggggcagagttcaataagccc

SEQ ID NO: 995209 - DNA, 120 bp, Artificial Sequence
  ENSG00000231533_51 (sequence is synthesized)
atgggagaattttcaacttgtacccacatcccaaacatcagtggtaaggcaatggcaatcactcagctctccacatacccagtgctaacgtcatgtggtattgtgggaaaaggaacctcc

SEQ ID NO: 995210 - DNA, 120 bp, Artificial Sequence
  ENSG00000231533_52 (sequence is synthesized)
gtaacctgttaccatccgattggatagggacttgtgctttagtccaattggccattcccctctccctggcattccataagatacccaaaaatacacatggccaccaaaaccaaaaagatg

SEQ ID NO: 995211 - DNA, 120 bp, Artificial Sequence
  ENSG00000231533_53 (sequence is synthesized)
taacaaattcttttaatcccaatatacatgttaactcaataggagtccctagggagatgcctaatgaacttaaggcccgaaaccaaatacttgctaggtttacgtcagcactcttctagt

SEQ ID NO: 995212 - DNA, 120 bp, Artificial Sequence
  ENSG00000231533_54 (sequence is synthesized)
ggtcaactattaataagaatgtggattagattaactacatctattataatcaacaaagactcatcaattatactcagatgccctcaaagggggtagctagccagttaaatgccatcagcc

SEQ ID NO: 995213 - DNA, 120 bp, Artificial Sequence
  ENSG00000231533_55 (sequence is synthesized)
aaatggcctgagaaaacaggcttgcactagacataatactagcaaaaaagtggggcatatgtgttatgctgggtgggaaacgttgtactttcaatcttaacaatactgccccaaatgtaa

SEQ ID NO: 995214 - DNA, 120 bp, Artificial Sequence
  ENSG00000231533_56 (sequence is synthesized)
ccatcatgaaaactttacaaggactaacaactctaggcaacaaactggcagaaaatgctggaattaataacccatttaggggttggctagaaagttggtttaaaaaatggaaaggcatgg

SEQ ID NO: 995215 - DNA, 120 bp, Artificial Sequence
  ENSG00000231533_57 (sequence is synthesized)
tagcttcaatccttacatctctcataactgtggcaggagtcttaacagcagtgggatgttgtattatccctcgtgtgaggggactagcacagagattaattaaaacggctattaataagc

SEQ ID NO: 995216 - DNA, 120 bp, Artificial Sequence
  ENSG00000231533_58 (sequence is synthesized)
aaatgcccataacttaccagcaaaataacctgctactattagaaaccaaattaaactcactctcctagaaagaaaaaagttaacaacttctaaagcaattcaagtaccagaaaggtttaa

SEQ ID NO: 995217 - DNA, 120 bp, Artificial Sequence
  ENSG00000231533_59 (sequence is synthesized)
ttgttttaaaaaaaagttttgggtgttgatacagaaattaatgctaaatagataatgatctccctctaatgacatgcttcatcatgttacttattctcttctctcaaaaatacacgatgt

SEQ ID NO: 995218 - DNA, 120 bp, Artificial Sequence
  ENSG00000231533_60 (sequence is synthesized)
catttaatcttcacaataatcttgtaagataggatcagctctatttcacttctggaagatgttaagaaaagttaattatttgacaaaagttgtaattagcaattggcaaacactccaacc

SEQ ID NO: 995219 - DNA, 120 bp, Artificial Sequence
  ENSG00000231533_61 (sequence is synthesized)
caacttctgactccaaagtcagtgtttttactattctactctggctgctgagttctaatttttattttgtcttagatgaggtagatagaatataatcacttatatatggatatgtatctc

SEQ ID NO: 995220 - DNA, 120 bp, Artificial Sequence
  ENSG00000231533_62 (sequence is synthesized)
aaaaatgtagcatttagtatggaaaatacatatttgggtctctaagtctttctatgaattctaaaatgtagatgtcatatccatcttacctactgtagctgataaatcgttcacccttta

SEQ ID NO: 995221 - DNA, 120 bp, Artificial Sequence
  ENSG00000231533_63 (sequence is synthesized)
ataatcaatgaacttcacagtgcaaccccatcatatcttattagagaaatgcctcgttcctgggaataaggagtgctgaacaagtaaccaacttttaatgtttattccctattattttta

SEQ ID NO: 995222 - DNA, 120 bp, Artificial Sequence
  ENSG00000231533_64 (sequence is synthesized)
ttccatattattttttgattaaaatttttaataaaaaaagaatattttttgtatgtcaaaaattccttcatcaggggaaacatgcctcctccattccacaaaaatcctgttcattccatg

SEQ ID NO: 995223 - DNA, 120 bp, Artificial Sequence
  ENSG00000231533_65 (sequence is synthesized)
aagtaggtaagagtagggatccatcctttccctgcacaagaccaccaaccttaatgctgagcacacagcattccttgggccaatcagacttctgccagactagactttctttttgcaggg

SEQ ID NO: 995224 - DNA, 120 bp, Artificial Sequence
  ENSG00000231533_66 (sequence is synthesized)
ggtgggagaaggggcatgccagatgaaggaatgatgtgggttcaaggctaccaactgtaacaactgcaatattatcaaatgtaaagtttctctgaaaatgagacccagcagtggacaaag

SEQ ID NO: 995225 - DNA, 120 bp, Artificial Sequence
  ENSG00000231533_67 (sequence is synthesized)
taagtactattattcgaacctccagatccaaccacacattattaagctttctggttttgagacaaaagtaatttccttattttgcttaagcttgtttgatttgggtttctgttaccactt

SEQ ID NO: 995226 - DNA, 120 bp, Artificial Sequence
  ENSG00000231533_68 (sequence is synthesized)
aggtggggtggggagcctgaagacttcttcatctgcctctcaccacatcccccctcctggcacctgaagaattctgcagagaccagtttccaagggctgtgtgggcagagtgtgcatgtt

SEQ ID NO: 995227 - DNA, 120 bp, Artificial Sequence
  ENSG00000231533_69 (sequence is synthesized)
caggcatgcatgcctgtttgcagatggtatggagaaaaaggtgattgtattgttcataaaaatgtaacttgctcaagtatacgccccctttctttctaaattacttgctttgatattctg

SEQ ID NO: 995228 - DNA, 120 bp, Artificial Sequence
  ENSG00000231533_70 (sequence is synthesized)
ggttccctagaacttagattgaaatgtcatccaacaactatttgtttagggcttgctgagctgctttcatactgtgaggattgagaaatatatgaagtagtccctgcccaagaaattgca

SEQ ID NO: 995229 - DNA, 120 bp, Artificial Sequence
  ENSG00000231533_71 (sequence is synthesized)
taatttaatcgcgaggccaagactgtcatcttcctgagagtgactccaacattctagattttcagttttgatcttttgcttgaactttaactgcctgttggcctcctggacaatctctgc

SEQ ID NO: 995230 - DNA, 120 bp, Artificial Sequence
  ENSG00000231533_72 (sequence is synthesized)
ttgattatcctactcttcgcctcaattcgacatctctaaacctgaaactatgtcctttgtcaggaaaccaagacgtttgtaatatccacatcagagttgtctggtaaaggagtaaaaaca

SEQ ID NO: 995231 - DNA, 120 bp, Artificial Sequence
  ENSG00000231533_73 (sequence is synthesized)
tggaggagcagtaataaacagtggagatcatcaaattgacaaaagtaacaaaaataattggggattgctaagagctactgttaattatttgaagcctgtaatgtatgagagggagtagat

SEQ ID NO: 995232 - DNA, 120 bp, Artificial Sequence
  ENSG00000231533_74 (sequence is synthesized)
gtctcctggagtgaacatatacctgctattacctcaacgaccttagttccctgcctttcatcttgtcagcatgtctatgttaatatgattatagtatttaaaaacaattttttatatata

SEQ ID NO: 995233 - DNA, 120 bp, Artificial Sequence
  ENSG00000231533_75 (sequence is synthesized)
aatagcctttaaattacaagtcaataactatatctataatgcagccaaataaatagaaatctgttctaaaaatggagaaaaaactaaccatgatggacactctaaaagaaggcactatat

SEQ ID NO: 995234 - DNA, 120 bp, Artificial Sequence
  ENSG00000231533_76 (sequence is synthesized)
ataaaaaacagcgtttattacaatttctgggtagtgactggtattttgtggatcccatagatcaggcatgttcagcatggtatggccatagacatgactggtattttctttttttatttt

SEQ ID NO: 995235 - DNA, 85 bp, Artificial Sequence
  ENSG00000231533_77 (sequence is synthesized)
gactggtattttcaatagtaattttgaatctgtcttatctgtttactttaaaaacaaacccttgccaaaaaaatgtgactttatt

SEQ ID NO: 995236 - DNA, 120 bp, Artificial Sequence
  ENSG00000231533_78 (sequence is synthesized)
ctttaaaaacaaacccttgccaaaaaaatgtgactttattgtatttgattttgctgtagagaaaaaaaaccaagggttgcagagtagcagactgttgctcaatgtaaaggagaactccta

SEQ ID NO: 995237 - DNA, 120 bp, Artificial Sequence
  ENSG00000231533_79 (sequence is synthesized)
ataagagagctgcccaaagtcagactggtagtctaggagggcaatgtgtttccttttccaattcaacgtgacctgggatgaagcactgcattcagagggatgttgaattgaaagtccttc

SEQ ID NO: 995238 - DNA, 120 bp, Artificial Sequence
  ENSG00000231533_80 (sequence is synthesized)
aaagtccttccaactaaacactttatgagcatatgaatgtaagttcaccaggaggtcagggaggcaagaaactaaaattagaaggagttttagcagaggggtcttcctaatggaggaggt

SEQ ID NO: 995239 - DNA, 120 bp, Artificial Sequence
  ENSG00000231533_81 (sequence is synthesized)
cattagggcttgctttgaagggctgctaggttttttagaagggttgagtaaaaggcatcattttgggtgggaaaaacatgatgtcaaaggtgtggaagaggctggtcaggtgcaggagaa

SEQ ID NO: 995240 - DNA, 120 bp, Artificial Sequence
  ENSG00000231533_82 (sequence is synthesized)
ggaagagggcagttgatgctggtgggggaaagctatatgatagaaagagcccctggagaaagagtaggattgaactgtgtttgaggctatggtgagctaagcaaaaacctgacagctgtt

SEQ ID NO: 995241 - DNA, 120 bp, Artificial Sequence
  ENSG00000231533_83 (sequence is synthesized)
catgtattatctgataaacctgacagttgcctaaggacatatgaactcaggagcagctctgaagtgcaaggaggtgaaagagctgtgtgctgtgttacagcttcttctccaggctgagga

SEQ ID NO: 995242 - DNA, 120 bp, Artificial Sequence
  ENSG00000231533_84 (sequence is synthesized)
actgggtcttgcctaactacaaggggatagctgccaatcagaacttccagtatatccaaggccgagtaaccttcttttaggtgtctctctgccttgtctatactgagatgcaagggcagc

SEQ ID NO: 995243 - DNA, 120 bp, Artificial Sequence
  ENSG00000231533_85 (sequence is synthesized)
aagaaaatctgtaaacatcctattaaagccagaacatgacattttaagaactttcatttcaccacagaggtgaaaaaagactttcaaaaatatcataaagatcctttgctagtgaacaaa

SEQ ID NO: 995244 - DNA, 120 bp, Artificial Sequence
  ENSG00000231533_86 (sequence is synthesized)
taagtacagatcatttattaaggaactgaaacactgaaagcgagccagacatggaattgtttacagaaaaatacccttgaagttattatccattttgtaactaccattataactataatt

SEQ ID NO: 995245 - DNA, 120 bp, Artificial Sequence
  ENSG00000231533_87 (sequence is synthesized)
ttaatatacattatatatccaaattataatacaaaaccattacaggatggtttacagcagtgtgcagctgggagtgacagtatatcctctggactgaaaatgacccatctctgatgttac

SEQ ID NO: 995246 - DNA, 120 bp, Artificial Sequence
  ENSG00000231533_88 (sequence is synthesized)
tggacccacttgagccctagggacagagctgtgcatattatggcaagtggccaaggaagtatcatgatggtcccatcagcaaccccaaaactgtgatggttctacgtagtttgcatattt

SEQ ID NO: 995247 - DNA, 120 bp, Artificial Sequence
  ENSG00000231533_89 (sequence is synthesized)
ctatgtttcggcattattgagtttcaactgtataaatctgtattttcattgtattacttaatgagtacttaatgaaaaggggaaaaaagcaaagaatacattcagaaaacagtagaacaa

SEQ ID NO: 995248 - DNA, 120 bp, Artificial Sequence
  ENSG00000231533_90 (sequence is synthesized)
attatgtttcaatcaatttgtacttttgtaataaagagacctcaaatcctgaaatattaacatacaacaggcgaagttccaaacattcatctactgtcatccacttgtctacgtgtgagg

SEQ ID NO: 995249 - DNA, 120 bp, Artificial Sequence
  ENSG00000231533_91 (sequence is synthesized)
ataacactggttgtgagcacagaggactaatcataaaactcatcatttgggtaatgagacctttagtagaataagataacacttcagatttattctgaaaaagacagaagactttttggc

SEQ ID NO: 995250 - DNA, 120 bp, Artificial Sequence
  ENSG00000231533_92 (sequence is synthesized)
tggtgatacccagtgttgtttctatgatattacctcccactgtagactatcacgcctctccttggatccaaccatatttttggattgacctataattgacttcggatttatttcaaataa

SEQ ID NO: 995251 - DNA, 120 bp, Artificial Sequence
  ENSG00000231534_0 (sequence is synthesized)
cccataccaaaggctcagttctgagcctcaagttccatttcctctcacgagaggatgtgacgctctcattcagccactctgccctgtttgggagctttttcccacagtcaagccggtcta

SEQ ID NO: 995252 - DNA, 120 bp, Artificial Sequence
  ENSG00000231534_1 (sequence is synthesized)
ttgcccatccttggatcatgtggtaggagctgatgtttttaccacccgcctctgtccatcttcttgtggttacagtgccctggttttccacaggaaagccatgcctccctcacccttatt

SEQ ID NO: 995253 - DNA, 120 bp, Artificial Sequence
  ENSG00000231534_2 (sequence is synthesized)
ggcgcacttcctttatccctgaacttggttgtagtgatgttaaccagggtccagcagtcatgctgtcagcaccagagacaacctacctacagatgcagccaatgtggagggacaggagcc

SEQ ID NO: 995254 - DNA, 120 bp, Artificial Sequence
  ENSG00000231534_3 (sequence is synthesized)
aataggtgaaagagaggtggggcctctgtggcactgtttgagcctccacagccagctaggcattaccgctagatgtgaagcggtaaacaatattgggccacagattgggagtagagtggg

SEQ ID NO: 995255 - DNA, 120 bp, Artificial Sequence
  ENSG00000231535_0 (sequence is synthesized)
gctcattgctcagcctctgggtattaatctgctgagctggtggccacctaaatacaatcgtcctgttcccctcattggtctctccggtctcctgattccagccacattttggtgagccag

SEQ ID NO: 995256 - DNA, 120 bp, Artificial Sequence
  ENSG00000231535_1 (sequence is synthesized)
ccaggagtgaagacgacaggtttgctgtctcctttgcctgtgggtctggggccccagcctgggggagacccgtgactccaggcatgctatcaggacaacttcaacccgaggggagatcag

SEQ ID NO: 995257 - DNA, 120 bp, Artificial Sequence
  ENSG00000231535_2 (sequence is synthesized)
ctctcccgcaacctggtgccgctctctgacagcacaacagaacctaaggggctacaggatgattcaaggaacagtgtgctacaggacctcgatggggtctcgctctgtcctggagtgcaa

SEQ ID NO: 995258 - DNA, 120 bp, Artificial Sequence
  ENSG00000231535_3 (sequence is synthesized)
gggtattttgctaagaagttttacattttggtgaagtctagtttttccatttttttattatgcttattatttcttatgacttcagatttccttcccttcacttaattaatggaggtattg

SEQ ID NO: 995259 - DNA, 120 bp, Artificial Sequence
  ENSG00000231535_4 (sequence is synthesized)
tagtatgatttcttttaccttgtattttgaaattttaccttttactctgtggtccatcttgaattatcttttatgtatgatgtgaggatgtgagattacttttcttcatatgaaaatgca

SEQ ID NO: 995260 - DNA, 120 bp, Artificial Sequence
  ENSG00000231535_5 (sequence is synthesized)
atttttccaccttccattcttgaagaaattaactttccccatttgactgttttggtgtattggacagtaagtttaaaaatatgttttaaaaagtatttgccatgtttaaaaaatgtttag

SEQ ID NO: 995261 - DNA, 120 bp, Artificial Sequence
  ENSG00000231535_6 (sequence is synthesized)
aaagaaaggccacattcttgtctttttccttatcttagaggaaaaggcttcaacttttcacattgagtatgatgttagctgttggattgtcatacatggattttcttgttggtgaacttt

SEQ ID NO: 995262 - DNA, 120 bp, Artificial Sequence
  ENSG00000231535_7 (sequence is synthesized)
tcttctatacctaatttgtaattgataataataatatattgtttatatcaaaacagctaaaaaagggattttaaatgctctcaccacaaagaaatgatagtatttgggtgggataaatat

SEQ ID NO: 995263 - DNA, 120 bp, Artificial Sequence
  ENSG00000231535_8 (sequence is synthesized)
gttaattgaccatatttgattattccacaatgtacatgtaacaaaacaccacattgtaccccataaatatataaaattattatttgcaattagaaataaaatataacttaaaaaagaaaa

SEQ ID NO: 995264 - DNA, 120 bp, Artificial Sequence
  ENSG00000231535_9 (sequence is synthesized)
ggacttcccagcctccggaagttagaaatgtgctacaaccactcaaggtctgcaaacagattcctatttagatgttgttgagaggtaagtacaactagttctcattaatatttcatgtcc

SEQ ID NO: 995265 - DNA, 120 bp, Artificial Sequence
  ENSG00000231535_10 (sequence is synthesized)
tatgtgccatacttacactgccattttgtagtcatttgtcctacagctaaagattaatttataatcagatacgtgaaatctgatatgtgcattaagcttgattatacctgactgtgtctt

SEQ ID NO: 995266 - DNA, 120 bp, Artificial Sequence
  ENSG00000231535_11 (sequence is synthesized)
aattgtaaatgacatattaattaatttgcaagtgtgttcggtttacattacatatagtatcacagacaacattacacatatgataatttgccattagtcctaaatattaataatatgatt

SEQ ID NO: 995267 - DNA, 120 bp, Artificial Sequence
  ENSG00000231535_12 (sequence is synthesized)
tctcaatgagtctgaaacattttcaagatactagaaatttgtgacagatgccttttacatctgtgagaatccagaatattattctttaaaatgcattttctcataaatagctcattaact

SEQ ID NO: 995268 - DNA, 120 bp, Artificial Sequence
  ENSG00000231535_13 (sequence is synthesized)
ttctcattgttctcagttgtaaatctgtaaaaagcaattttgttcccttgtctgtaataagaaatcttttgcactcattaagataattaaagcattactagtgtgcatgctcactatatt

SEQ ID NO: 995269 - DNA, 120 bp, Artificial Sequence
  ENSG00000231535_14 (sequence is synthesized)
caaaacattttctacttgatatgagttgtcatggcattatcaagaccggagggggcggaaagaaaaaaataaaatagcgtcagcctatggttatgctctttgaatttgaatatgattaag

SEQ ID NO: 995270 - DNA, 120 bp, Artificial Sequence
  ENSG00000231535_15 (sequence is synthesized)
tgcatctttaatttgtttctgagtcatagtttaaaataaaaactggagagcattttgtaggagcaatactgcccttttgttcaatttccttcttttaattcaacagaacacttaataaaa

SEQ ID NO: 995271 - DNA, 120 bp, Artificial Sequence
  ENSG00000231535_16 (sequence is synthesized)
atatgttcacctcaagaagaccctcaccagatgcagcccctctatgttggacttcccagcctccggaagtaaatgtgctacaaccactcaaggtctgcaaacagattcctatttagatgt

SEQ ID NO: 995272 - DNA, 120 bp, Artificial Sequence
  ENSG00000231535_17 (sequence is synthesized)
gtttcgttcttgtcgcccaggctggagtgtcattttaacttttaaaacatcctgttctgtttcattgctcccacaaatgactgagaacatgacaaatttgtcattctgatactctgaacc

SEQ ID NO: 995273 - DNA, 120 bp, Artificial Sequence
  ENSG00000231535_18 (sequence is synthesized)
tctgaaccagacctccagtttcatttatgttgttgtaaatgacagggtgtcttttgaaaagtctacacaaactatttagtttttaacctcaaggaactaaaaaacaaatgaacaaacaaa

SEQ ID NO: 995274 - DNA, 120 bp, Artificial Sequence
  ENSG00000231535_19 (sequence is synthesized)
ctgtgctggatttaccatcacagggaccagatttatagaaaaatgaacatgtattgttgctaaatggagttggtcatggagtggaaactaacaatatgttcaccttagaaatgtgctaca

SEQ ID NO: 995275 - DNA, 120 bp, Artificial Sequence
  ENSG00000231535_20 (sequence is synthesized)
acaaaatttaacgtctcttcatgttaacaaccctcaacaaactgggcattgaagaaacatactctaaaataataagaaccgtctatgacaagcctatagcaaacatcgtactgaatgggc

SEQ ID NO: 995276 - DNA, 120 bp, Artificial Sequence
  ENSG00000231535_21 (sequence is synthesized)
aaaggctagaagcactccccatgaaaaccggaacaagacgaggatgcccaatctcaccactcctatttaccataatactggatgtccaggtcagagcattcaggcaagagaaagaaagaa

SEQ ID NO: 995277 - DNA, 120 bp, Artificial Sequence
  ENSG00000231535_22 (sequence is synthesized)
aagccatccaaataggaagagaaaaagtcgtactatccctttttaccaatgatataattctataccttgaaagtcccatagtctctgcccaagaactccttgatctgataaacaacttca

SEQ ID NO: 995278 - DNA, 120 bp, Artificial Sequence
  ENSG00000231535_23 (sequence is synthesized)
tcaaagtgtcaggatgcaaaatcaatgtgcaaaaatcagtagcattcctatacaacaataacatgcaagtttctaagcttacatggttctagccatgcctcttattgttaaaataatgac

SEQ ID NO: 995279 - DNA, 120 bp, Artificial Sequence
  ENSG00000231535_24 (sequence is synthesized)
cttgattcccagtggcgctctcaacagcagtcataaacaatggtaattcaatgtatatttatattcaactgatatattaattggaatatattaaaaatacgtatatttatattcagaata

SEQ ID NO: 995280 - DNA, 120 bp, Artificial Sequence
  ENSG00000231535_25 (sequence is synthesized)
cccatgacagaaggggagcctcatcacctcccagggtatacctagtaatatgacccaggatgcaagagtggctcgcaaatttggaagaaacctacaccccaaccaacccaggacacaaaa

SEQ ID NO: 995281 - DNA, 120 bp, Artificial Sequence
  ENSG00000231535_26 (sequence is synthesized)
gaaacagacgattccaaaaggaaccaacgtggggaatggtgtgtgtggagccacaggtctcttagcatagactgtatgctagggaggtgccccacagtttagtgattgtggtggtctggg

SEQ ID NO: 995282 - DNA, 120 bp, Artificial Sequence
  ENSG00000231535_27 (sequence is synthesized)
tttgggactcaaaccctcctttaaagcttagcagtgtctgaaatactcctgtgagggagacagtctaatcggtctgaagtgaaagtaaaacagtgagtgaattgtgctgtaaatgggagg

SEQ ID NO: 995283 - DNA, 120 bp, Artificial Sequence
  ENSG00000231535_28 (sequence is synthesized)
aaatgggagggaagttgttgaaacccaccccattagaatgcatgttaaacaactttaagaaagattatgtgggggattatgggatcaagttgacccccagaggttgagaactgtctgtga

SEQ ID NO: 995284 - DNA, 120 bp, Artificial Sequence
  ENSG00000231535_29 (sequence is synthesized)
aatagagtggtcctctttcagtattggatggccggccgaaggaactatagatggggaaataattggctgtgtatttaaggtggtgactgaggtcggaggacagcctggacttccaggcca

SEQ ID NO: 995285 - DNA, 120 bp, Artificial Sequence
  ENSG00000231535_30 (sequence is synthesized)
atttccttatattgactcacggctgaatataattcaaactcgacctgtatggctagagccctgcctggcagcttattgcagaacactggtagctcgagctgagccaaaagtgaaagagaa

SEQ ID NO: 995286 - DNA, 66 bp, Artificial Sequence
  ENSG00000231535_31 (sequence is synthesized)
caatccacctatttattttcttaacagggtattttgctaagaagttttacattttggtgaagtcta

SEQ ID NO: 995287 - DNA, 80 bp, Artificial Sequence
  ENSG00000231536_0 (sequence is synthesized)
ctggctgcagcggccggcgcactcacccgctccccggcttgcgcgcaggcacactcaagagagagcagcgagctcgccgc

SEQ ID NO: 995288 - DNA, 120 bp, Artificial Sequence
  ENSG00000231536_1 (sequence is synthesized)
cgccgccgccgccgccgcccccgccccgcctggcccccggccccgcccccggccctgcgccgccgccgccgccgctcctagggttccgtctgctcatcagacaacagatatttattgaat

SEQ ID NO: 995289 - DNA, 120 bp, Artificial Sequence
  ENSG00000231536_2 (sequence is synthesized)
gggttccgtctgctcatcagacaacagatatttattgaatgttctttgtcatgcgtcttcaagatgtgccctggccattcatgcaagtttcaaggactctgaatctgttgagaaaaagag

SEQ ID NO: 995290 - DNA, 120 bp, Artificial Sequence
  ENSG00000231536_3 (sequence is synthesized)
aacccaaatgctgagaaacactccatggaatttaattacagggcgataactgtgatcttaccaagatttatgaacaggaagatccttggtgattgtagtcagtcaaagggtggctttgac

SEQ ID NO: 995291 - DNA, 120 bp, Artificial Sequence
  ENSG00000231536_4 (sequence is synthesized)
atagcacctatctgttagggcaaatactgccagggaaaaggtgacatttggaatcatctgggattggactcttgatcaatagatgcgaaatgtcaggtggacatgagaactgttggtctt

SEQ ID NO: 995292 - DNA, 120 bp, Artificial Sequence
  ENSG00000231536_5 (sequence is synthesized)
tggtacatatgtgttgcaatgagtaaggatgagtaatgtgaaggaaaagtagaatcttgggaccccaaactcactatgccaaagggaaagttaagcgtgggagactgagtcaggcaaaaa

SEQ ID NO: 995293 - DNA, 120 bp, Artificial Sequence
  ENSG00000231538_0 (sequence is synthesized)
atacgttccacctgtatgtttggaagagaaagaactatgctcactccttctgagctgtccctatttatttatttatttttggtctgatggctaaataaagattttttgtattcaagagaa

SEQ ID NO: 995294 - DNA, 120 bp, Artificial Sequence
  ENSG00000231538_1 (sequence is synthesized)
ataatttaatgagataaaatattatttcctaagaaaaatatatcagctgaaacctgggaaacatctagataatttaattgaaaatgattgacattctcaaacaaaaaagaaaagaaaatc

SEQ ID NO: 995295 - DNA, 120 bp, Artificial Sequence
  ENSG00000231538_2 (sequence is synthesized)
ccagtgcatgtgcacctgcctgcttggacacttcaatgactaacttctctgcaaatacatcaatagtttcattgccttcaggcttcttctatgtcttttaactcttgaaccttctggtgc

SEQ ID NO: 995296 - DNA, 120 bp, Artificial Sequence
  ENSG00000231538_3 (sequence is synthesized)
attttagcttaccaaacagcacatgctgctttgtacttgtgttgttttatgtattcatttattgcacaaattttccttgagtgccttgttcatggaaggcgctattccaggaattttatg

SEQ ID NO: 995297 - DNA, 120 bp, Artificial Sequence
  ENSG00000231538_4 (sequence is synthesized)
tgtagtttaagttacctccatctaaactataagattttcatataattcatctttgtagttctaccacaagcatattagtagattctaaataaacgttaactccatatttgtgtgcatgta

SEQ ID NO: 995298 - DNA, 120 bp, Artificial Sequence
  ENSG00000179755_0 (sequence is synthesized)
atcttttgatttatatttattacataaacaattctagcaacctcatttcttatcttcccttctgttaactcagagacgtcccctgtttatttttttttcttggtagttttctgagctgtt

SEQ ID NO: 995299 - DNA, 120 bp, Artificial Sequence
  ENSG00000179755_1 (sequence is synthesized)
caatctttcagacaaccagcttgtgtctgaacatatgtatgtgtgtgtgacgcatgcacatgtcacagagtgagctgttgtgtgtgcatatgtgtgcgtgtagatggttgagaggcacca

SEQ ID NO: 995300 - DNA, 120 bp, Artificial Sequence
  ENSG00000179755_2 (sequence is synthesized)
atgacaggctgtctgggtgcaagcaggccaagccccactcctcaagatggaggaggagctgctgctcccggtggggactccccagtaggccactgggggaagccccacgacccagacagc

SEQ ID NO: 995301 - DNA, 120 bp, Artificial Sequence
  ENSG00000179755_3 (sequence is synthesized)
aggtggagagcagcagctggccggagatcgacttcagcgagaaactgtgcggagctccagcagctggacttcctggagcagaagagccgctgaaccccgcccctgctgatctcactgcac

SEQ ID NO: 995302 - DNA, 120 bp, Artificial Sequence
  ENSG00000179755_4 (sequence is synthesized)
acagcctagggccccacccgccgaggactccagaaccttctcctaccagctcgcccagagaccaagccaagagagtggtctctgaggagcccgctagaaaggcaaggcgaggcccgcaga

SEQ ID NO: 995303 - DNA, 120 bp, Artificial Sequence
  ENSG00000179755_5 (sequence is synthesized)
gaaggatgccaagcctgtagaagcagagacgtcggggatgggggacctgccctgggcgccgccagaggcccaagcgcccagcaccgcaggagctggagacgtcgctgagcaccaggtggc

SEQ ID NO: 995304 - DNA, 120 bp, Artificial Sequence
  ENSG00000179755_6 (sequence is synthesized)
gccggcgcggttcctacagggagcctggaggcaggctgcggggtggctgtgccgggagactggagcggctcctggctccgcgcaggcagggcccccagagacagctcatgcagcagatcc

SEQ ID NO: 995305 - DNA, 120 bp, Artificial Sequence
  ENSG00000179755_7 (sequence is synthesized)
ctcatgcagcagatccgcagccccggggccctcaggcaccgccgcggctgccgccctcgctcagtcccgagcgcgtccaccctggccagccagctgcccccgctgaacctgcgccgggcg

SEQ ID NO: 995306 - DNA, 120 bp, Artificial Sequence
  ENSG00000179755_8 (sequence is synthesized)
gggccccagccaaccccgcgggctcaggctcccagttcctgtcccagcctgcgccggctccagcgcccccggctctccagctgctcttcccgactcctatccttggccgcccccagcgcg

SEQ ID NO: 995307 - DNA, 120 bp, Artificial Sequence
  ENSG00000179755_9 (sequence is synthesized)
gaaccgacccgcgaccctaccgccaacatcgcgggtctcgcctctcgcagcctttttggcgtccgcgcctcagcgttgaagccagggcccctcgtgagctcggcgcccagcctgtcaagt

SEQ ID NO: 995308 - DNA, 120 bp, Artificial Sequence
  ENSG00000179755_10 (sequence is synthesized)
gtccgcccccgcgaagcgctgcaagggccagcgcccaacctgtcgctgcggaagaccggggcatagaacctgtcctggtgctgggcaagcgcttccgccccaagtccccgacctgggcaa

SEQ ID NO: 995309 - DNA, 120 bp, Artificial Sequence; identical to SEQ ID NO: 913560
  ENSG00000179755_11 (sequence is synthesized)

SEQ ID NO: 995310 - DNA, 120 bp, Artificial Sequence; identical to SEQ ID NO: 913561
  ENSG00000179755_12 (sequence is synthesized)

SEQ ID NO: 995311 - DNA, 120 bp, Artificial Sequence; identical to SEQ ID NO: 913562
  ENSG00000179755_13 (sequence is synthesized)

SEQ ID NO: 995312 - DNA, 120 bp, Artificial Sequence; identical to SEQ ID NO: 913563
  ENSG00000179755_14 (sequence is synthesized)

SEQ ID NO: 995313 - DNA, 120 bp, Artificial Sequence; identical to SEQ ID NO: 913564
  ENSG00000179755_15 (sequence is synthesized)

SEQ ID NO: 995314 - DNA, 120 bp, Artificial Sequence; identical to SEQ ID NO: 913565
  ENSG00000179755_16 (sequence is synthesized)

SEQ ID NO: 995315 - DNA, 120 bp, Artificial Sequence; identical to SEQ ID NO: 913566
  ENSG00000179755_17 (sequence is synthesized)

SEQ ID NO: 995316 - DNA, 120 bp, Artificial Sequence; identical to SEQ ID NO: 913567
  ENSG00000179755_18 (sequence is synthesized)

SEQ ID NO: 995317 - DNA, 120 bp, Artificial Sequence; identical to SEQ ID NO: 913568
  ENSG00000179755_19 (sequence is synthesized)

SEQ ID NO: 995318 - DNA, 120 bp, Artificial Sequence
  ENSG00000279914_0 (sequence is synthesized)
gccacatagaaagggctcaaaaatgatcctttgtccttcttgttgctttttttctttattcccaagacattcttttttctctcctaaactctaggtgactttacttcttggcaagtttca

SEQ ID NO: 995319 - DNA, 120 bp, Artificial Sequence
  ENSG00000279914_1 (sequence is synthesized)
taacctcagcaagcctcagtttgctcatcttaaaagtggatatagtaactgtaaggacttactggtggattgtgaggattaatgaatcatttcgagctgttgcatgctgagagcagggag

SEQ ID NO: 995320 - DNA, 120 bp, Artificial Sequence
  ENSG00000279914_2 (sequence is synthesized)
actgcatctcacctgtcttgataggttttgtctcttcacagtatgaaggcagcagcaggtagatgccatcttcacctacttactcccgtgcagtattttctgctcacggtctcagcagtg

SEQ ID NO: 995321 - DNA, 120 bp, Artificial Sequence
  ENSG00000279914_3 (sequence is synthesized)
tggaatcataggtagtcctggatcttagcaggtccgtgaatcagtcctctgaagtcatgcacacaaactcatcatgtccttagagagaggccagaaacaggtccctggcatcccaaagaa

SEQ ID NO: 995322 - DNA, 120 bp, Artificial Sequence
  ENSG00000279914_4 (sequence is synthesized)
caaaggagcatggtatcacagggaaaggtgctctgggccaggactcagaatccagatgtgggctctcactggcccggggtcagactctttagctagttgttctggcctcatttttgtcac

SEQ ID NO: 995323 - DNA, 120 bp, Artificial Sequence
  ENSG00000279914_5 (sequence is synthesized)
tagtaggaacaccaaatctattagcttgttttcctctttccttggggtagagctacattttgtgcaatatgcatcacacttccatttgctctctgaccagtataaaaattaaaatatata

SEQ ID NO: 995324 - DNA, 120 bp, Artificial Sequence
  ENSG00000279914_6 (sequence is synthesized)
tatatatgtatatattcacacacagatatatatattcatcaagagagactaaataaagaagaaaactatgctcactggctagtagaaagatccgtcactaccaaggaatatgttttggtg

SEQ ID NO: 995325 - DNA, 120 bp, Artificial Sequence
  ENSG00000279914_7 (sequence is synthesized)
actaccaaggaatatgttttggtgtatgtggggacaaaaagacattctgtggttcaataggttagtaagccttgcactgataaaagtaaatgggtgtccatcctggctaacacggtgaaa

SEQ ID NO: 995326 - DNA, 72 bp, Artificial Sequence
  ENSG00000279914_8 (sequence is synthesized)
taaatgggtgtctttcccataaggtaggttgacccttagcatgagatgtgcattgcaaagcaacaagaagaa

SEQ ID NO: 995327 - DNA, 120 bp, Artificial Sequence
  ENSG00000177800_0 (sequence is synthesized)
aaggtagagacaaccatgaaagttgaacacgtcatctgtgcaggaccgttcatactgacatgtggcttgacaccagaaatctgggtattgtaatatcatgttggaaaggagtttgtgtgc

SEQ ID NO: 995328 - DNA, 120 bp, Artificial Sequence
  ENSG00000177800_1 (sequence is synthesized)
ctcaaacaactactctagagatgttttacaatgacaatgatagagtagaggaatcttctaattcctaccaaatcagaagggaattcctccttcctgcctgcctgcctgccttcctttctt

SEQ ID NO: 995329 - DNA, 120 bp, Artificial Sequence
  ENSG00000177800_2 (sequence is synthesized)
tctctacttccttttctttctttctttccttccttcctctctctctttctctctttcttcctttctttccttctttctttctttctctctctctctccccttccttccttccttccttcc

SEQ ID NO: 995330 - DNA, 120 bp, Artificial Sequence
  ENSG00000177800_3 (sequence is synthesized)
ttccttccttccttccttcctgagacaaggtcttgctctgtctcccaggctagaatgcgatggtgcaatcatgattcactgcagcctcaacatcccaggctcaagtgatcctcccacctc

SEQ ID NO: 995331 - DNA, 88 bp, Artificial Sequence
  ENSG00000177800_4 (sequence is synthesized)
tcctgagtagctgggactacaggggcttgccaccacgcccagctaatttgcgtgtgtgtgtgtgtgtgtgtgtgtatgctggtctcaa

SEQ ID NO: 995332 - DNA, 120 bp, Artificial Sequence
  ENSG00000177800_5 (sequence is synthesized)
cggcctcccaaagtgttgggattacacgtgtgagccaccatgcccagtctctatttcttaatagtgtcagcaactgaaagatatagaaaaggaagtctgtttggtgtgtctgttgcctcc

SEQ ID NO: 995333 - DNA, 120 bp, Artificial Sequence
  ENSG00000177800_6 (sequence is synthesized)
tctgttgcctccccaaaatcttcagcctttgtaggacagtgcatcccactgggcaaaaccagagaatattcttttgtgagcccgtaagtaattgtctgcaatagacatgcaggggcctct

SEQ ID NO: 995334 - DNA, 120 bp, Artificial Sequence
  ENSG00000177800_7 (sequence is synthesized)
actgtcatctcttatgcaactgaacttcctaaaaactgtggtgtttatctcttctgttgctcagcactgctgggactgggactgcaaaaaacaaaaaagcacccaggtttactgccctta

SEQ ID NO: 995335 - DNA, 120 bp, Artificial Sequence
  ENSG00000177800_8 (sequence is synthesized)
aaaaactgactgctagaggagatgagcatatacatgacaggatgtgataagatattaagcagaatgtgatcagaatcataggaagtatatacaaaagatgggaacactaatagaggtgac

SEQ ID NO: 995336 - DNA, 120 bp, Artificial Sequence
  ENSG00000177800_9 (sequence is synthesized)
tgtagaggagatgacattcaagctgagttttaaaggatgagtaggagttggccagaaatggagagggagaataaaccatggggaagtagtacacaggcatggcatgtttagagcattttt

SEQ ID NO: 995337 - DNA, 120 bp, Artificial Sequence
  ENSG00000177800_10 (sequence is synthesized)
ggagcagggtaaccagaatatactggaggttgctagtagaggagattggaaaagaaagggtcagattattaatggatttacgtattatgcaaagaagtttatatttgaccctttttttga

SEQ ID NO: 995338 - DNA, 120 bp, Artificial Sequence
  ENSG00000177800_11 (sequence is synthesized)
caatctggcatttagccttatcataaaataaagatctctcaatgcttcacatagaaacttcatctgatctcttgaggatcaaaaaatggctttctgggttttttttctttctctctctct

SEQ ID NO: 995339 - DNA, 120 bp, Artificial Sequence
  ENSG00000177800_12 (sequence is synthesized)
tttgtttttaatatctcacatatactttaaccaccataaattcaagttttctcttactcagacatgagttgcttaacaatggaataattcatttctttatttctcaacattgcccttttg

SEQ ID NO: 995340 - DNA, 120 bp, Artificial Sequence
  ENSG00000177800_13 (sequence is synthesized)
aaggttttaggttttaggttttctaaaactctgaatacttttggctatcattatccagggaaagcctgaagacactccaaagcacaaggacaaaagagaccttgttagatctaattaagc

SEQ ID NO: 995341 - DNA, 120 bp, Artificial Sequence
  ENSG00000177800_14 (sequence is synthesized)
gctccagcaccaggggcacggggagcaagagaaaaatacagagtcagaaactgagccgagttctatggtggtacagagtgaggcctgcttcactgtgggctggggctggggcagggaggc

SEQ ID NO: 995342 - DNA, 120 bp, Artificial Sequence
  ENSG00000177800_15 (sequence is synthesized)
cttcatcttgctctaagctgtgcaaagtacctcccacgaggctaagtatagagctactcaataaaaattatgcaatgtggctgggcacggtggctcacatctgtagtcctagcactttgg

SEQ ID NO: 995343 - DNA, 120 bp, Artificial Sequence
  ENSG00000240497_0 (sequence is synthesized)
acacactccagggagttccggtctgattgaggaaaagcagaaaacacatccctttcacctgcttaagttcagccataaaactgaaacgttacagccacaaagtcagaaagaacaggcagg

SEQ ID NO: 995344 - DNA, 120 bp, Artificial Sequence
  ENSG00000240497_1 (sequence is synthesized)
gctgagttaaagccataaataaagattattgtggctgtcactcaggttttctgctcattggtagacaaagggtgaggaggtgactgaaattggaacagtggaaggacccttcaccaaaac

SEQ ID NO: 995345 - DNA, 120 bp, Artificial Sequence
  ENSG00000240497_2 (sequence is synthesized)
ctggaacttcagaagaatggcagggctgaaaatgattagtgttaattcattccagttgtgttaccctacccataagcctcagaagtcatgcgacttcatttccaccactgtcatgaatct

SEQ ID NO: 995346 - DNA, 120 bp, Artificial Sequence
  ENSG00000240497_3 (sequence is synthesized)
acccggactcaaggggaggatgcagagatgccacctttcaataagaggattatctaagttgcactgaagaagagcatgtgggatggaagatactattgcagtatttttggaaactaaagc

SEQ ID NO: 995347 - DNA, 120 bp, Artificial Sequence
  ENSG00000240497_4 (sequence is synthesized)
ctaccatattcttcaagccttaccatcaattctgtgtcctcagcattctcccctttgctcacgttagcgagagttagtttctacttttgcttgtaaccaaagaataatgtagctggcata

SEQ ID NO: 995348 - DNA, 120 bp, Artificial Sequence
  ENSG00000240497_5 (sequence is synthesized)
agaatgtggatgcttttcaaatctctcacagaaaattaacaacattggaccaggccaaaaagtacgctttttataatttcccaaaagcaacaatcatacataccatattattagtagatt

SEQ ID NO: 995349 - DNA, 120 bp, Artificial Sequence
  ENSG00000240497_6 (sequence is synthesized)
tcaacattcatgtaacagatccatctaaatctgtaattctcaattattgaaactttttcactagaatgactttagtttctcattatacttaaagttactcccagaggcccacccaagaat

SEQ ID NO: 995350 - DNA, 120 bp, Artificial Sequence
  ENSG00000240497_7 (sequence is synthesized)
ttatcatcatcttgaacagcttttctttagaaaataaagctccaattttcctttgtccaattagtctacccttccagctccccggcagccttcactgacattactgctgtttttcactga

SEQ ID NO: 995351 - DNA, 120 bp, Artificial Sequence
  ENSG00000240497_8 (sequence is synthesized)
cattaccgctgccttacaaagactctatttctgtacattggtagcattcttcattattttccaattggtcttacctcttacccttcctctttccaattttgtgctggacctcagactgcc

SEQ ID NO: 995352 - DNA, 120 bp, Artificial Sequence
  ENSG00000240497_9 (sequence is synthesized)
tgaaggagcctgaacttccacgtgctgtcttccatataatgtgatctgaggtgaagagcatggtccctggagttgaactgcctgaagtaaatcccaaaatagaaaaataaaaataaaaca

SEQ ID NO: 995353 - DNA, 120 bp, Artificial Sequence
  ENSG00000240499_0 (sequence is synthesized)
cgcagcttgcacagaaggtatgggaatggcattactgctttattctttgccttggtctacacaggaataaagcaaagaagaaactggtgcctaaggtcacactgataatagatgaagtga

SEQ ID NO: 995354 - DNA, 120 bp, Artificial Sequence
  ENSG00000240499_1 (sequence is synthesized)
tggagcaaggattcaaccgccagcagttcggttcctcagcctctgcgaaactacttatttgaagctttattccaactgactcctaaaaggccttaccagatcctgcacgttataggaagg

SEQ ID NO: 995355 - DNA, 120 bp, Artificial Sequence
  ENSG00000240499_2 (sequence is synthesized)
gccttggcattttcattgctatatataagcccccgatctcatatgctactcatgaccatctgttacaccttagagggaatctaaatcatctaatcactaaatgatgcgcccactgcttca

SEQ ID NO: 995356 - DNA, 120 bp, Artificial Sequence
  ENSG00000240499_3 (sequence is synthesized)
tctctacttatacagtgaaagatcatcgctttcatcaaaggaaaatgacaaattaacataaaaggaagttgtagaatgaaggaacaaggatgaaaccagaaattgaaatatgtcaataaa

SEQ ID NO: 995357 - DNA, 120 bp, Artificial Sequence
  ENSG00000240499_4 (sequence is synthesized)
caatgctttccaggagatgtgatcagtgactataactggaataaaggtccctgttcatcctgccacctgtcaatggagggcaggagggcatcctgccatcactaagtcttccctactggg

SEQ ID NO: 995358 - DNA, 120 bp, Artificial Sequence
  ENSG00000240499_5 (sequence is synthesized)
gggcagaaaggaggctctgccatggaaaccaggacatggagaagctgtattaggtacccacgatgggatgttgttccaaaaaataaagcaatccttaaggatttttattcataatacctt

SEQ ID NO: 995359 - DNA, 120 bp, Artificial Sequence
  ENSG00000240499_6 (sequence is synthesized)
cgcagcttgcacagaaggtatgggaatggcattactgctttattctttgccttggtctacacaggaataaagcagaactgtgaaaactgcttaacatattcacaataagcctataagagg

SEQ ID NO: 995360 - DNA, 120 bp, Artificial Sequence
  ENSG00000240499_7 (sequence is synthesized)
tcacactgataatagatgaagtgatggagcaaggattcaaccgccagcagttcggttcctcagcctctaatgactatatatcagatggataatgaaaaagtcctgacgttcaggagatgg

SEQ ID NO: 995361 - DNA, 120 bp, Artificial Sequence
  ENSG00000240499_8 (sequence is synthesized)
ctgaggagaatgtttgcctgtgaacaatggggatacaggcaaggcagagcacagcaaggcacaaagatgaagatggtctgttcagtgggcaatggcaggggacagggactccagagactt

SEQ ID NO: 995362 - DNA, 120 bp, Artificial Sequence
  ENSG00000240499_9 (sequence is synthesized)
cgcagcttgcacagaaggtatgggaatggcattactgctttattctttgccttggtctacacaggaataaagcaagacaaggtcttgcaatgttgctcaggctgttcttgaactcctaga

SEQ ID NO: 995363 - DNA, 120 bp, Artificial Sequence
  ENSG00000240499_10 (sequence is synthesized)
cctgggaaactcctgggcgtggaggacctcagatgtcaccctgcagctttctctgtctctgagaacagatctagagccttagtgccatcgccactacagatgggctaaattcaaggactg

SEQ ID NO: 995364 - DNA, 120 bp, Artificial Sequence
  ENSG00000240499_11 (sequence is synthesized)
cacaataaggttttactggaagaagagttagttttaaaatgacaacaattgtaggaaaagccaaaatttattatatacaaaaaaacaaaagctgttgacatagtgttcctaacctttttt

SEQ ID NO: 995365 - DNA, 80 bp, Artificial Sequence
  ENSG00000240499_12 (sequence is synthesized)
aaactggtgcctaaggtcacactgataatagatgaagtgatggagcaaggattcaaccgccagcagttcggttcctcagc

SEQ ID NO: 995366 - DNA, 120 bp, Artificial Sequence
  ENSG00000240499_13 (sequence is synthesized)
cccagccttggcattttcattgctatatataaggtgtctcaaaggcagctcaatctcaacatgtccaatactgacatcatggtctttctctccaaatctgtttctcttccaggacagcct

SEQ ID NO: 995367 - DNA, 120 bp, Artificial Sequence
  ENSG00000240499_14 (sequence is synthesized)
gcatctaggaatgatactaacattcaggccataaacctaagagtactccttactatttcccttttcattgtacatctgaaatgtctttggattagttcaacagagaccaagtaacagctt

SEQ ID NO: 995368 - DNA, 120 bp, Artificial Sequence
  ENSG00000240499_15 (sequence is synthesized)
tggagcaaggattcaaccgccagcagttcggttcctcagcctgcagagtccttggagatataccagagtacaaggaaggaagagaatgacagaatggaaagggacatcaccaggtttgca

SEQ ID NO: 995369 - DNA, 120 bp, Artificial Sequence
  ENSG00000240499_16 (sequence is synthesized)
ttaaattgcaaaacagcaatgtggtttattggaaaatgtccaggtctggagcctggcctgagtcttcacccaatcactcactagctgtgcatctgtgggtttcattctactccatggctt

SEQ ID NO: 995370 - DNA, 120 bp, Artificial Sequence
  ENSG00000240499_17 (sequence is synthesized)
agaaaggggcatatctcctggcacactggactgggctgcctcccttgctgctattccctgtcaaagtccccgtgatggatgcacagtgatgctcatggtgaagcttataccaggatgtgg

SEQ ID NO: 995371 - DNA, 120 bp, Artificial Sequence
  ENSG00000240499_18 (sequence is synthesized)
gaagaagaccactaatgactatatatcagatggataatgaaaaagtcctgacgttcaggagatggctgaggagaatgtttgcctgtgaacaatggggatacaggcaaggcagagcacagc

SEQ ID NO: 995372 - DNA, 120 bp, Artificial Sequence
  ENSG00000240499_19 (sequence is synthesized)
cgcagcttgcacagaaggtatgggaatggcattactgctttattctttgccttggtctacacaggaataaagcactcaatccagaggcactcatggtgggggaagagaagagacttgcat

SEQ ID NO: 995373 - DNA, 120 bp, Artificial Sequence
  ENSG00000240499_20 (sequence is synthesized)
ctggacatggcagccgtgggctggttgtcaacacaccagggaagaacacaaatgcagaccccgtgagggtgggcagtgctagccccatttatgctactatttgctggattgagtctgtta

SEQ ID NO: 995374 - DNA, 120 bp, Artificial Sequence
  ENSG00000240499_21 (sequence is synthesized)
cagctttctcatctgtaatatgtggggtagattatatgaatctatctttaaaatactaagatttgaatgctctatagaaatactgtgagtttaaatttgacttacaggaaaaggcatgat

SEQ ID NO: 995375 - DNA, 120 bp, Artificial Sequence
  ENSG00000240499_22 (sequence is synthesized)
gagcttgtgattcttgtaaaaatgaatggaagagaaaaacccagttgtcattctgtttttatatgttgcttcaatacagctttattcttccagaataaagaaaaatcatctagagttcca

SEQ ID NO: 995376 - DNA, 120 bp, Artificial Sequence
  ENSG00000240499_23 (sequence is synthesized)
cgcagcttgcacagaaggtatgggaatggcattactgctttattctttgccttggtctacacaggaataaagcaaaggacatctggatttctgttttgtcaataacacctttgatgctta

SEQ ID NO: 995377 - DNA, 120 bp, Artificial Sequence
  ENSG00000240499_24 (sequence is synthesized)
agagtagttcggtgcttctagcagaagaaaactaggaaaagtgtcattagcatttgtggtccttactgacagtcactgcaacataggattatgcacaaatagagaagaagaagaaactgg

SEQ ID NO: 995378 - DNA, 120 bp, Artificial Sequence
  ENSG00000240499_25 (sequence is synthesized)
aaaagtcctgacgttcaggagatggctgaggtctgtggcctcctaattccatggcttcctttgggaccaactcatttaatgaccctgccatttaaatcacattaactactttacctagat

SEQ ID NO: 995379 - DNA, 120 bp, Artificial Sequence
  ENSG00000240499_26 (sequence is synthesized)
tatctttcgcatctgtaaattcattgtaagcctatggccagctgttgaacaaaggagaattggccactagagtatagaccaatgacagctgggctgaatccaaactgagcagtctccata

SEQ ID NO: 995380 - DNA, 120 bp, Artificial Sequence
  ENSG00000240499_27 (sequence is synthesized)
ctaatgactatatatcagatggataatgaaaaagtcctgacgttcaggagatggctgagaagacacatatccaccagacagaagtattttgaagtatataatttttccagatcgtgggga

SEQ ID NO: 995381 - DNA, 120 bp, Artificial Sequence
  ENSG00000240499_28 (sequence is synthesized)
gcacgctatgttttataagaaagttaaaaattttgttttaactcagatactagacaaacttggaaaatcatctaagaagtgagaaagtaaaaataaccattggggataattacaataaag

SEQ ID NO: 995382 - DNA, 120 bp, Artificial Sequence
  ENSG00000240498_0 (sequence is synthesized)
ctcgtcgaaagtcttccattcttcaaactagattatttaaaaatgaaaaaggaagaaaggaaagcgaggtcatctcattgctctatccgccaatcaggaggctgaatgtcagttttgaac

SEQ ID NO: 995383 - DNA, 120 bp, Artificial Sequence
  ENSG00000240498_1 (sequence is synthesized)
taaaagccgctccgctcctcttctagatttggaaaacaagcgaaattaaactaaaccgctgcacgcctctgacgcgacatctggacacggcgcggcgctggcgctgccggagctgtcgac

SEQ ID NO: 995384 - DNA, 120 bp, Artificial Sequence
  ENSG00000240498_2 (sequence is synthesized)
ccggcctggcgccggactagtgtcccttttgatgagaagaataagcctcattctgattcaacagcagagatcaaagaaaagacttctgttttctggccaccagatatatgttatctgtgc

SEQ ID NO: 995385 - DNA, 120 bp, Artificial Sequence
  ENSG00000240498_3 (sequence is synthesized)
ttaaagaattgaaaaacacacatcaaaggagaattttcttggaaagagagggttcaagcatcactgttaggtgtgctggaatcctttcccgagtcagtactgctttctagaagaaaaccg

SEQ ID NO: 995386 - DNA, 90 bp, Artificial Sequence
  ENSG00000240498_4 (sequence is synthesized)
atcctttcccgagtcagtactgctttctagaagaaaaccggggagatctatttggaatgtatctaactccaaagaaaccatcagaggtaa

SEQ ID NO: 995387 - DNA, 120 bp, Artificial Sequence
  ENSG00000240498_5 (sequence is synthesized)
catggcaagaaacattgctgctagcacttcccgagttctacgttctacaacatccaccactggatcttaacatagacgtaagatcaaatgcaatagcatgtcaaacaatgtgtaactcca

SEQ ID NO: 995388 - DNA, 120 bp, Artificial Sequence
  ENSG00000240498_6 (sequence is synthesized)
gttatacaaacattactgtatctcattggggatacgaagctctacacacttgaagatggtgaaggaatataaaaatctatgtctcacagtccagacttggagtacaagtaataagaagaa

SEQ ID NO: 995389 - DNA, 120 bp, Artificial Sequence
  ENSG00000240498_7 (sequence is synthesized)
taaaacttaatcccttaagtagattcaccataagttagctcagagcaattccagtgcaagtatggtctgtgatccagtagtatcttacagacagcaagttgaacattgtgggatgcatga

SEQ ID NO: 995390 - DNA, 120 bp, Artificial Sequence
  ENSG00000240498_8 (sequence is synthesized)
gctattgaggcctttgcagctttctgctacatggaggctagggccagagtcaagatttatgctttgcagcacactggtcagctgtttttgcaaatcagattaaatgatttttaaatgagg

SEQ ID NO: 995391 - DNA, 120 bp, Artificial Sequence
  ENSG00000240498_9 (sequence is synthesized)
ctgagagcatgggagatactaatgtgtgtttccttgtgagctactgcataagttaggaaattgaaatacagaaagatgaaaagtgatttgcccaagcatatagatcaaagctgtggcaga

SEQ ID NO: 995392 - DNA, 120 bp, Artificial Sequence
  ENSG00000240498_10 (sequence is synthesized)
caagatctcggaacggctctgagccctgcgcacgcgggaagggctgccggaggcgcccgtagggaggcgcgcgcgcgggcggctcagggcccgcgttcctctccctcccgcctaccgcca

SEQ ID NO: 995393 - DNA, 120 bp, Artificial Sequence
  ENSG00000240498_11 (sequence is synthesized)
ctttcccgccctgtgtgcgcccccacccccaccaccatcttcccaccctcagcgcgggcgccccgcggtgacggcccaggggccggacgcctggaacgcaactccaggcagctcgccccc

SEQ ID NO: 995394 - DNA, 120 bp, Artificial Sequence
  ENSG00000240498_12 (sequence is synthesized)
gcgccggactagcgaggcagccgagctgcagacacagagatgcagatctttgtgaagaccctcacgggcaagaccatcacccttgaggtcgagcccagtgacaccattgagaatgtcagt

SEQ ID NO: 995395 - DNA, 120 bp, Artificial Sequence
  ENSG00000240498_13 (sequence is synthesized)
gcgaaaattcaagacaaggagggtatcccccctgacaagcagcgtctgatatttgccagcaaacagctggaggatggccgcactctctcagactacaacgtccagaaacagcccaccccg

SEQ ID NO: 995396 - DNA, 120 bp, Artificial Sequence
  ENSG00000240498_14 (sequence is synthesized)
cacctggtgctgcacctgcgaggtggcattattgagccttcactcttccagctcacctagaaatacagctgaaacaagatgatctgccataagcgctatgctctcctgcacccctatgct

SEQ ID NO: 995397 - DNA, 120 bp, Artificial Sequence
  ENSG00000240498_15 (sequence is synthesized)
gtcaattgccgcaagaagaagtgtggccacaccaacaacctgcaccccaagaaggtcaaataaggctcttccttcctcggagggcagcctcctgcccaggccccatggccctggagcctc

SEQ ID NO: 995398 - DNA, 120 bp, Artificial Sequence
  ENSG00000240498_16 (sequence is synthesized)
aataaagtgtccctttcattgactggaaaaaaaaaaagtatgaatagaactggttgactggccaagagaaacagcgacctaaccttgccctcatttatgcacacttttgcatatgattag

SEQ ID NO: 995399 - DNA, 120 bp, Artificial Sequence
  ENSG00000240498_17 (sequence is synthesized)
gactaagatagtgtttataagtgagaagagaaggaaattcataatcacttttggggctttttcaaattttttatgaacacaccttcccaccaagaggtttgattttctccattttatgag

SEQ ID NO: 995400 - DNA, 120 bp, Artificial Sequence
  ENSG00000240498_18 (sequence is synthesized)
ttgggtttattgctccgtgatccacagtatatccacttctatattcccatgtatttttcaagattaattaaatggtggacttgttcatcattttagtatccgtattagtttgctagggct

SEQ ID NO: 995401 - DNA, 120 bp, Artificial Sequence
  ENSG00000240498_19 (sequence is synthesized)
gccataacagaataccacagactgagtagcttaaacaacaaatatttattttctcagagttttaacttctcctgaggcttctcttcttgacttgcacatggccatcctactgctgcctct

SEQ ID NO: 995402 - DNA, 120 bp, Artificial Sequence
  ENSG00000240498_20 (sequence is synthesized)
tcacatagtcatccctctgtgcacacgtgcccctggatctcttgtgtgtgtccaaatttcctcctcttttgaggacaccagtcagattggattagggcccaccccaatggccttatttta

SEQ ID NO: 995403 - DNA, 120 bp, Artificial Sequence
  ENSG00000240498_21 (sequence is synthesized)
gaatttaacccataacaacagcatcttaatttttacacattttacttttcatttctttttaaactgttattaataatttattcatttgaataaggattaaaataaggctaggatattgaa

SEQ ID NO: 995404 - DNA, 120 bp, Artificial Sequence
  ENSG00000240498_22 (sequence is synthesized)
attggttgaaattgctacagtctcttgtatctctctctctctcttttttttcttataagggacaggtttcattcaccttgtcgaccaggctggagtgcaatactgtgagcaagggtcact

SEQ ID NO: 995405 - DNA, 120 bp, Artificial Sequence
  ENSG00000240498_23 (sequence is synthesized)
gctgcctcgaattcctgggcttaagggatgctcctgcctcatcctccagagtagatgggactacaggtgttggccaccatgactggctaatatttttacttttttgaagagatgaagtct

SEQ ID NO: 995406 - DNA, 120 bp, Artificial Sequence
  ENSG00000240498_24 (sequence is synthesized)
tgccatctggcccaggctggtcccgaactcctgggctcacacaattctttcacctcggccccccaaagtgctggattgcaagtgtgaaccactgcacctggcgtcttgtttcctcttaat

SEQ ID NO: 995407 - DNA, 120 bp, Artificial Sequence
  ENSG00000240498_25 (sequence is synthesized)
ctacagtttcccccttttgccttctttttttttctttcaatttatctattgcagaaattggctttatctgtagttttctaaagcttggattttgctgaatgcttctttataatgacactt

SEQ ID NO: 995408 - DNA, 120 bp, Artificial Sequence
  ENSG00000240498_26 (sequence is synthesized)
aacatttttctttgtcatttgtatttctcataacttattatttaggcctagagtctgtatgtgattcaggtttgatatttgggcaaaagtatttaataagtgggattacgtactttcacc

SEQ ID NO: 995409 - DNA, 120 bp, Artificial Sequence
  ENSG00000240498_27 (sequence is synthesized)
aagagacacataatatggttgtctctttctgtgattctagcagccatggataattatttcatagattattattttcttggggatggcaaaatggtgatattctaattttactattccttc

SEQ ID NO: 995410 - DNA, 87 bp, Artificial Sequence
  ENSG00000240498_28 (sequence is synthesized)
aatagctaggactacaggcacacatcagggtcttgcttttttgcccaggctggtctctaactactgggctcagcctcctaagctcct

SEQ ID NO: 995411 - DNA, 84 bp, Artificial Sequence
  ENSG00000240498_29 (sequence is synthesized)
ataagccactgtgcctggcctggaatatttctatatagaaagttctcttcattatctacttcattgctttcaggtatatgtaag

SEQ ID NO: 995412 - DNA, 120 bp, Artificial Sequence
  ENSG00000240498_30 (sequence is synthesized)
ctcttcattatctacttcattgctttcaggtatatgtaagaaagacaggataaaccactagattttgaaatgtatttataaattttcaaaataatgagttgagtcctagaatctttcttt

SEQ ID NO: 995413 - DNA, 120 bp, Artificial Sequence
  ENSG00000240498_31 (sequence is synthesized)
tgttttctttaaaagcaaggtaagtatgcctagatgcactgcctcttagtaatttttgaggatggattattcattaaattgcttccctttctcacagctggtgaattagaacgatagtga

SEQ ID NO: 995414 - DNA, 120 bp, Artificial Sequence
  ENSG00000240498_32 (sequence is synthesized)
gcttacaagagctttaacgaggaaaagatggtcattgtttaacagagaaggatggtttgggtgagcatttttgtgtttttggaggggaactttgagggcaatgagtgttgcacctgtgtc

SEQ ID NO: 995415 - DNA, 120 bp, Artificial Sequence
  ENSG00000240498_33 (sequence is synthesized)
cactgaggatctctgggcggggtaaaaggaaggcagggatgagagtgaggaagggagacaggagggtcccaaatacgaactttgacttaacgaggatgattactagaagggaaagattgt

SEQ ID NO: 995416 - DNA, 120 bp, Artificial Sequence
  ENSG00000240498_34 (sequence is synthesized)
ggattcattgatgagatgttgaaccatgaaaactctaattgtagaactcacttcagactgaattgacttggctttcagtagcagaagccctttgtctacttctctagtattgaagtgaat

SEQ ID NO: 995417 - DNA, 120 bp, Artificial Sequence
  ENSG00000240498_35 (sequence is synthesized)
gcaaatttctcaatgtaagaaaagtagagtggtgaaataagagtgtgggttccagggtcagacaactgggtgcataaaaagggtaaggatgctacaactggtaagccctgtgagaattat

SEQ ID NO: 995418 - DNA, 120 bp, Artificial Sequence
  ENSG00000240498_36 (sequence is synthesized)
ttaatccttccatgtctcattccgctcatctggaaaatgatgatcatactaacttatgagatgtgtgtacagactagatataatattaaaacatttctgatacctatgcattatattgga

SEQ ID NO: 995419 - DNA, 120 bp, Artificial Sequence
  ENSG00000240498_37 (sequence is synthesized)
cgccggactaggactatttgccacgacatttcaaaggattccaagagagaatattggtgtccatgctgtgatgattcctcagctcctctcatctgatctccgtcctggcccccatgactt

SEQ ID NO: 995420 - DNA, 120 bp, Artificial Sequence
  ENSG00000240498_38 (sequence is synthesized)
tctttgtggtagttagggtgtggtatgtgccactgaggcccacacctattgctgcaatttatagcactgatctgtcatcaataccacttgctgtcttggatgtgaagatgatttttcctg

SEQ ID NO: 995421 - DNA, 120 bp, Artificial Sequence
  ENSG00000240498_39 (sequence is synthesized)
cagggattccctctacaaaattaaaaacactgggcatgtggaaataatattcatgctttaaattgtcttttctcttcactacaccaggggtccccaacccctaggccacagactgtggcc

SEQ ID NO: 995422 - DNA, 120 bp, Artificial Sequence
  ENSG00000240498_40 (sequence is synthesized)
ctagtgtagtgaatagaaaagacaatttaaagcgtgaatattatttcctcatgcccagtgtttttaattttgtactggtctgtggcttgttagaaaccaggctgcacagcagaaggtggg

SEQ ID NO: 995423 - DNA, 120 bp, Artificial Sequence
  ENSG00000240498_41 (sequence is synthesized)
cagcagatattgagaaaccacagaaagagagaagttaaataattttcctgtcaaagaccacatcaatgatgaagccagaatttgagctcatgtacttaaccactggactacctgcctgcc

SEQ ID NO: 995424 - DNA, 120 bp, Artificial Sequence
  ENSG00000240498_42 (sequence is synthesized)
gggattacaggtgtgagacaccacacccggcggatagagagaattttgacagtctctccaatgaacgccttcactgatatccaaagcatgaaggacacaccagggaaaaacatagaccta

SEQ ID NO: 995425 - DNA, 120 bp, Artificial Sequence
  ENSG00000240498_43 (sequence is synthesized)
gaaaaacatagacctaacacaggacaaatggaattattagaaacattttctagcagaagaacactattctgttgccatttgaatctttgcttctttctaggtttgacaatgagcctatca

SEQ ID NO: 995426 - DNA, 120 bp, Artificial Sequence
  ENSG00000240498_44 (sequence is synthesized)
tataagcccaaatgtaaacagaaagaggttgaatcagtcacgataagcccaattatgctgtggtaacaaacaacctcaaaatctcattggcttaaaatatacagaattattcttactcat

SEQ ID NO: 995427 - DNA, 120 bp, Artificial Sequence
  ENSG00000240498_45 (sequence is synthesized)
ggcacatatccatctatcatctgcaggggatctgctcactgaagtcacttaggaacttggactgatggaacggccactttttggtcactatatgtattaatctgttttaatcctgctgat

SEQ ID NO: 995428 - DNA, 120 bp, Artificial Sequence
  ENSG00000240498_46 (sequence is synthesized)
aaatgaggaagaagcaaaagcggaaacctctgataaacccatcagatcttatgagacttattccactatcaagagaatagcatgggaaagactggctcccataatttacctccctctggg

SEQ ID NO: 995429 - DNA, 120 bp, Artificial Sequence
  ENSG00000240498_47 (sequence is synthesized)
tgggtccctccctcaacatgtgggaattctgggagaaacaattcaagatatgacacattcataatttaaacagaagcctacgaagaactcataaattaaaagaagataatcttttcacaa

SEQ ID NO: 995430 - DNA, 120 bp, Artificial Sequence
  ENSG00000240498_48 (sequence is synthesized)
ggtgatggaggctttttattttgccacaaaaccactggtgacgttgcctgtggccaccttggagaagacactggaggcctgggacatggagactgcttttctgcagaaaccacatccctt

SEQ ID NO: 995431 - DNA, 89 bp, Artificial Sequence
  ENSG00000240498_49 (sequence is synthesized)
gggacatggagactgcttttctgcagaaaccacatcccttggagtaatgagctacacctacctcaattattcagtgcagtacaacactc

SEQ ID NO: 995432 - DNA, 120 bp, Artificial Sequence
  ENSG00000240498_50 (sequence is synthesized)
tcccaggctcaaacctgagcagctgggactacagatgcaccaccatgcatggtaccagagatataataatgagaaacagacatgctccctcccctcattgaggttacagcttagtgtgga

SEQ ID NO: 995433 - DNA, 120 bp, Artificial Sequence
  ENSG00000240498_51 (sequence is synthesized)
gacacacagatgcctaacgcactatggtatggaaggtgctatggacacagtgctcaaatccatgatctacataggtggagaacttcagtagaggaagtggcaggaatttgggaatgagga

SEQ ID NO: 995434 - DNA, 120 bp, Artificial Sequence
  ENSG00000240498_52 (sequence is synthesized)
aaataaccttgtttcaaaaatattaaaaagtcacaagaaaggtaaacatgtggataaacaaaatgaagaaaataaaaattatccagtaataacatattggcatatgtctttctggtatat

SEQ ID NO: 995435 - DNA, 120 bp, Artificial Sequence
  ENSG00000240498_53 (sequence is synthesized)
tttcctgtgttgtcatcattatcatctccatcatcattatatccatcattatcatcatcatcatcatcatcatcatcattatcatcaccatagtgaacatgtaatgcttacctagtgcca

SEQ ID NO: 995436 - DNA, 120 bp, Artificial Sequence
  ENSG00000240498_54 (sequence is synthesized)
gatgctgtctaggcattttacatgtgttactggtaactcatgtaatcctcataacaaccttataaggtggttgctattatccccatgttacatatgaagagacagaagcataaagaagtt

SEQ ID NO: 995437 - DNA, 120 bp, Artificial Sequence
  ENSG00000240498_55 (sequence is synthesized)
gcaccgctggtaattggctgggatttgaacttaagcagtctaaccttagagtaatgattttaacaactatgctatatacatacaaatttacaaaataaaactgggctcagacaataaaaa

SEQ ID NO: 995438 - DNA, 120 bp, Artificial Sequence
  ENSG00000240498_56 (sequence is synthesized)
ctgaggcccacacctattgctgtaagtgctgtttgggaaaccatcatctttcaggtctgtgtgataaaagaagagccttggggaaatgttctcttccaaatttaatctttacattattag

SEQ ID NO: 995439 - DNA, 120 bp, Artificial Sequence
  ENSG00000240498_57 (sequence is synthesized)
ttagaaaatattttgatgacctgttttcaaatattttcttataactttccattttcatgtgtttattctgacagtttattttatcttgtatttataatcactaagatgttagtattgtaa

SEQ ID NO: 995440 - DNA, 120 bp, Artificial Sequence
  ENSG00000240498_58 (sequence is synthesized)
aatattacatgatttaaattaggaaaaatgtgttttctattacaaaatggatagtggataatttaagtatagaaagtaatattttctatatgggactatttcactctctgtaatatcctg

SEQ ID NO: 995441 - DNA, 120 bp, Artificial Sequence
  ENSG00000240498_59 (sequence is synthesized)
aattctaattcccactgtagtgagctataactttactaatcagttttcttacaatcgattttaagtctattttgttagatctaaagacataaagccaaaagttcttcttgaagagaagca

SEQ ID NO: 995442 - DNA, 120 bp, Artificial Sequence
  ENSG00000240498_60 (sequence is synthesized)
atctggttttactcaaaactcacatgtcatactgaaaaacagaagggagatgttgtcttttcttgaggagagacttctctgcagttaaacagctcaccacatgtttagagtacatagaca

SEQ ID NO: 995443 - DNA, 120 bp, Artificial Sequence
  ENSG00000240498_61 (sequence is synthesized)
atacacttcctcttttgtaatgtagatttcagctttttgcttgtagaattatcattggcgtggaggttatacaggggaagtagtgaaaaatgtagccaataccaggaaccttaggaagtg

SEQ ID NO: 995444 - DNA, 120 bp, Artificial Sequence
  ENSG00000240498_62 (sequence is synthesized)
tctgaacttcatcttttctgtgttcctttgcccttagggggtcagtgtaagagtttgggctaggaagagattgcttcttttactctatttagtttgtacttcctatctgggtatttgaca

SEQ ID NO: 995445 - DNA, 120 bp, Artificial Sequence
  ENSG00000240498_63 (sequence is synthesized)
ataaatgactcattctctttgtttgccctggtgttgaaaaattttcccatatgccagagaaaaaatgttacagtgacacaatgtaaaattgtaagaggtggaaaaagatgaggtatggac

SEQ ID NO: 995446 - DNA, 120 bp, Artificial Sequence
  ENSG00000240498_64 (sequence is synthesized)
atagtgaatggaagttcagccctttaaaactactggcagagtagattttactcaggcttcaattaagtagacctgaatgtaaattcaggtctagctctgcaacttactaggtaagtgact

SEQ ID NO: 995447 - DNA, 120 bp, Artificial Sequence
  ENSG00000240498_65 (sequence is synthesized)
ttagtcctctttaagatttagtttcctcattacaggatataataatactatttttcttatgaggtaagtattaattgaaatagtatatgtacattctagcatacagtgatcccctaataa

SEQ ID NO: 995448 - DNA, 120 bp, Artificial Sequence
  ENSG00000240498_66 (sequence is synthesized)
atggaacttatcattaatacattgctaggaaaagaaaaacacatcagggaacaaaagatataactgtcttattgataacaggggatggattcttgtggacaaaaaaatttagaattgaat

SEQ ID NO: 995449 - DNA, 120 bp, Artificial Sequence
  ENSG00000240498_67 (sequence is synthesized)
tttcaaggggtcatttctttcaccaggtgtagttaggtttgctcttatggtaacaatgaatatgtttgtttagcttcttaaaccggcatcatggaacgttaattaataaacagaattcaa

SEQ ID NO: 995450 - DNA, 120 bp, Artificial Sequence
  ENSG00000240498_68 (sequence is synthesized)
ctggtcttctaggaagcggctgctgccctagacgctggctcctcagtagcatcagcacgagggccacagcggcgggcgcccctggcgctgcccactcccccgtgagccgcgggatgtgaa

SEQ ID NO: 995451 - DNA, 120 bp, Artificial Sequence
  ENSG00000240498_69 (sequence is synthesized)
ccacgaaaaccctcactcgcggcgggccgcacgcgcgccgaatccggagggtcaccaagaacctgcgcaccatgttctcgccgcctccagggccgagctcggcagccgctgcgccgccct

SEQ ID NO: 995452 - DNA, 65 bp, Artificial Sequence
  ENSG00000240498_70 (sequence is synthesized)
cgcaagggatctaggttgtgcgccctttatgagaatctaactaatggctgatgatctgacgtgga

SEQ ID NO: 995453 - DNA, 120 bp, Artificial Sequence
  ENSG00000240498_71 (sequence is synthesized)
tttatgagaatctaactaatggctgatgatctgacgtggaacagtttcaacccagagcaccccccacccacctgcagaagaattgacttttacgaaaccagtccctggtgccaaaaaggt

SEQ ID NO: 995454 - DNA, 120 bp, Artificial Sequence
  ENSG00000240498_72 (sequence is synthesized)
tagctaaagctagccttctggtaaatggaggggcagagcagatggtgggggaggagtacatacggacgaatttgaatcacaatttcctcactatatgccagcaaaatttaataatagcac

SEQ ID NO: 995455 - DNA, 120 bp, Artificial Sequence
  ENSG00000240498_73 (sequence is synthesized)
ctaaacatacacatgcatatgtaaatgagtcacactataaaaacttttaacaagtactggcaagtcagatggcagacttaccctgaaacctgccactccaataaaaacctcataattaaa

SEQ ID NO: 995456 - DNA, 120 bp, Artificial Sequence
  ENSG00000240498_74 (sequence is synthesized)
aacaaggctgtctataaagcataacatataataacaattatttgcaactggtacaaggctagattagaaagttgaaagttatctttctcaggtaaaaatgcttttcctatacagtatgca

SEQ ID NO: 995457 - DNA, 120 bp, Artificial Sequence
  ENSG00000240498_75 (sequence is synthesized)
gccagcagattatcatccatagtttgagtagtgagatgccacttgctccaacaattaacacctgctgatgttggtccaagaagagactgaggtgatgcagtttcacctgttttgtaagaa

SEQ ID NO: 995458 - DNA, 120 bp, Artificial Sequence
  ENSG00000240498_76 (sequence is synthesized)
taacgctggtgtttgccatctattgacagagtgcctactacgtgccagatgctttgttggcactgaatgtgctatctcattccagtttctttatactcaatgaaaaaccaactacattta

SEQ ID NO: 995459 - DNA, 120 bp, Artificial Sequence
  ENSG00000240498_77 (sequence is synthesized)
tattgcattgaggcttaaagtggtttactgacttgcttaagattatacaagtagtaggtggctacagcagggtttgaacccaagtatgcttgattccccaaaccatgctttttaaaaaat

SEQ ID NO: 995460 - DNA, 120 bp, Artificial Sequence
  ENSG00000240498_78 (sequence is synthesized)
caaaggtgtaacttcgataaaagacatgaagttaatgaatatatgaaagatggtgaatagatacagatacaatgtggccttaggccagatcatgttgaacatgtggtgggatagataaga

SEQ ID NO: 995461 - DNA, 120 bp, Artificial Sequence
  ENSG00000240498_79 (sequence is synthesized)
gaaggttcttctttgttgttacctggttctcaattggttattactttatgtgctttccatattaaaattctattattctggtctataaattcacccacccagacttgcctaaactaatta

SEQ ID NO: 995462 - DNA, 120 bp, Artificial Sequence
  ENSG00000240498_80 (sequence is synthesized)
aaccctgaagtttggcatgtctcttttttggggtgcctctatgataggtggtagaaatgaaaatggaattaaaagttttgtgaagctatagcactactttttcattgtgttcccccctga

SEQ ID NO: 995463 - DNA, 120 bp, Artificial Sequence
  ENSG00000240498_81 (sequence is synthesized)
ctttctgccttaggtgtttactttggtgagatatcctgggagaaattgaggtgaaaagaagcccgagttaggattagggaagagatgaagtagtcaataaaattcaaattcttgtattct

SEQ ID NO: 995464 - DNA, 120 bp, Artificial Sequence
  ENSG00000240498_82 (sequence is synthesized)
cggcgctggcgctgccggagctgtcgacccggcctggcgccggactagccatctcagcctcagcctggtactgaacgcttgccagagaggtgatgtggtcctttggaggaaagaaggact

SEQ ID NO: 995465 - DNA, 120 bp, Artificial Sequence
  ENSG00000240498_83 (sequence is synthesized)
gtacttaggcaatcgggatcttgctttaagaaaaggtaggcattggagtcaggctgctggagtatgaatcactatgctatcatttttcatttgtttttgctctgttacattaggaaagtt

SEQ ID NO: 995466 - DNA, 120 bp, Artificial Sequence
  ENSG00000240498_84 (sequence is synthesized)
atgtagaattttgtgcctcagtttcctcattcaatatgggtgtaataactgtgcctgtcttgtaggattattgtgaggcccaagtgcaataatatatagtacactgtgtctggcatctag

SEQ ID NO: 995467 - DNA, 120 bp, Artificial Sequence
  ENSG00000240498_85 (sequence is synthesized)
taagcattcattaagatgacatgaagataacacagatatatcttaacatgtaattatgattttgcttattcaaggccaagcattccaatttaatggagttaggcaaacacagtaaattca

SEQ ID NO: 995468 - DNA, 120 bp, Artificial Sequence
  ENSG00000240498_86 (sequence is synthesized)
ttgctctttcctttttatgctacttcctttgaagaggcagtcaagttccatttgactgattcggaactttttagcaatgtatattatgctgacttcactcttatgcgctcttggggctat

SEQ ID NO: 995469 - DNA, 120 bp, Artificial Sequence
  ENSG00000240498_87 (sequence is synthesized)
aattcatcaagttaggcgagcaaagaagtgtgttggtgaaagagaaatgaggaagaacaaggaagaaaaaaagggtcatgagcttattcactgccaatatttattatatggaacaatgac

SEQ ID NO: 995470 - DNA, 120 bp, Artificial Sequence
  ENSG00000240498_88 (sequence is synthesized)
catccttcagaagtgtttgttctctattatactgtaggtgtggaagaattatcattgctcaatagctgtctcagtcactacctgatagacttgggaggtctggctatttcagggcgcatt

SEQ ID NO: 995471 - DNA, 120 bp, Artificial Sequence
  ENSG00000240498_89 (sequence is synthesized)
gttgtttgtagtaaaatactttccctcactgcattaggttcttggtaccatttatctagcagagttcttcagtgggcttgaggcttagcagtcaagttaaaacaataaccaacatcccaa

SEQ ID NO: 995472 - DNA, 120 bp, Artificial Sequence
  ENSG00000240498_90 (sequence is synthesized)
acccagtggctgtcaaatttcagtgaggtggcatagaactttagcatgaacttgagcttgggttcagctagactttcatataaatccttgtttgaagttagtagctgtgtgatcttgggc

SEQ ID NO: 995473 - DNA, 120 bp, Artificial Sequence
  ENSG00000240498_91 (sequence is synthesized)
actgatattaaacctttatgagaaagttatgtctgaaatatgggaaataaaccttccacttaggttgttgtgaagattcaatgagttgtaacgattgtatacactataatgatctatatt

SEQ ID NO: 995474 - DNA, 120 bp, Artificial Sequence
  ENSG00000240498_92 (sequence is synthesized)
cccggcggatagagagaattttgacaggatgattacggagctaggaatttcctacgaagctgggtgataaaaggacattggacaaaaacacagatagcttcattctataccaggatccat

SEQ ID NO: 995475 - DNA, 120 bp, Artificial Sequence
  ENSG00000240498_93 (sequence is synthesized)
cactgattagctgtattatatttgtctctactgtaatttgaggagaatgatacctgcttctctatcttgttgggttttacagatgatgtattgaaagttcaataaaatctataaacaata

SEQ ID NO: 995476 - DNA, 120 bp, Artificial Sequence
  ENSG00000240498_94 (sequence is synthesized)
ttatacatatagacttagcagtatgctataaaagtgaagatatagcactataaaattccaccataaagtaaattgttcaagattgtggtccaagctcttcaaaatgctcataaatcagaa

SEQ ID NO: 995477 - DNA, 120 bp, Artificial Sequence
  ENSG00000240498_95 (sequence is synthesized)
aaacaatattttatatgtacctataataatacaatactatactacacaaattggacctaaaatgaattctcttgctatattaaatattaaacattaaataggcagaaattttgtttgcac

SEQ ID NO: 995478 - DNA, 120 bp, Artificial Sequence
  ENSG00000240498_96 (sequence is synthesized)
ttttgtttgcactggacttagaatataagaagaaaatttgggacaacctgaatagttgaggtctcttgagaaacccttcagcttcttttcctccaaataaatttctctgtagcaaatgga

SEQ ID NO: 995479 - DNA, 120 bp, Artificial Sequence
  ENSG00000240498_97 (sequence is synthesized)
agccatccaaatgattccctagctacctcaaagtactgtaatttgtctacttcacaaagtggaggactatatctagcaataattcaagaaaaatgcagtgactcccattatatcttaggc

SEQ ID NO: 995480 - DNA, 120 bp, Artificial Sequence
  ENSG00000240498_98 (sequence is synthesized)
tgtgtatagatagttgtttgaagagagaaaaaaggcaggaggatctggggcatatgtttaaatcaggcattggcatctgtactagaattgaaaggtggaactattattgtgttctattta

SEQ ID NO: 995481 - DNA, 120 bp, Artificial Sequence
  ENSG00000240498_99 (sequence is synthesized)
atgaaatgggagggcaaatatgggaaactttaaggtaagttttctttccccttgaaggggaccaaaaagttgtggtttatactttcttgactctggtcactgttgggtgaagagttggtg

SEQ ID NO: 995482 - DNA, 120 bp, Artificial Sequence
  ENSG00000240498_100 (sequence is synthesized)
ctatggaagccatcttcagaccatgaggggacaagtctgaggatacaattacatgctaccggtggcagaggacagtatagcaagaaactggatccctgatgacattgaaccattgactga

SEQ ID NO: 995483 - DNA, 120 bp, Artificial Sequence
  ENSG00000240498_101 (sequence is synthesized)
atctaccctggaaccatcaggaaataatccttagttttttaaagatgcttttagttgtgttttttattacaagtacctgaaagcatcctaactaatcaatgctaaatgcatctctcacag

SEQ ID NO: 995484 - DNA, 120 bp, Artificial Sequence
  ENSG00000240498_102 (sequence is synthesized)
tttatgcttatttttcagaaatgcctagtggaaatttctattgctgattataatatttgtcctaaataaattgaatagactgtcaatcttttgaaaataaaagcatgacttgattagcaa

SEQ ID NO: 995485 - DNA, 120 bp, Artificial Sequence
  ENSG00000240498_103 (sequence is synthesized)
tcatcattctttgaaagtgtttatcatactcaatcttctaaaaatccttaaggcatactacagtgtagaggttggcaaactttttctatagaggtcctgatagtagcttgtttcgctttt

SEQ ID NO: 995486 - DNA, 120 bp, Artificial Sequence
  ENSG00000240498_104 (sequence is synthesized)
gagggccatcgagtttctgtcacaactactcatctctgctgttgtaataaagactcacccatagacaatacatgaatgaaggagtatctatgttccaataagacttttaaaaataaaatt

SEQ ID NO: 995487 - DNA, 120 bp, Artificial Sequence
  ENSG00000240498_105 (sequence is synthesized)
aggcagcaagactgatttgacataagggtcataatttgctaacctgtggtatagtgaaaggagttcaactagagtttgattatggctgtgccattctagttgggtagttttaggaaagtt

SEQ ID NO: 995488 - DNA, 120 bp, Artificial Sequence
  ENSG00000240498_106 (sequence is synthesized)
atttaatttagatttgatgtagttttctcatatgtaaaatggggataataaaacctgcttcacaagactactatgaggagtaagctatgtagctaaatatagcaaaatatctggcatcta

SEQ ID NO: 995489 - DNA, 120 bp, Artificial Sequence
  ENSG00000240498_107 (sequence is synthesized)
atagatgcctaataaatggtgactataatgattcttatcattactgtattattttaaacatttatcttttttttttaggttgttgtctaactaaggtatttagagaaaataagtgctgct

SEQ ID NO: 995490 - DNA, 120 bp, Artificial Sequence
  ENSG00000240498_108 (sequence is synthesized)
gagggcagctggaactgttttgctggttcatcactgaaattctagttcttgttggtgcttatttcataattatgaaactaattcttttgaaaagaacttgaagtagagcaacaagaacta

SEQ ID NO: 995491 - DNA, 120 bp, Artificial Sequence
  ENSG00000240498_109 (sequence is synthesized)
agatagaactaataccattctctctcagttcttattgctttacttcaagttcttttgaaaagaattacatagatatgggtgcatgtgtttgtttattttccttgttgggtaatcgtgaat

SEQ ID NO: 995492 - DNA, 120 bp, Artificial Sequence
  ENSG00000240498_110 (sequence is synthesized)
atgttgattggcgtcaaacatgggtctcacctatacccatggcagtaagcttctattgatttgaattcagactagccctggtggccctgtgagtgggaaagtctaggtgtgcctagcttg

SEQ ID NO: 995493 - DNA, 120 bp, Artificial Sequence
  ENSG00000240498_111 (sequence is synthesized)
gtctgtggttccacgaggggttggatgcatctgttctacttgtggaatgttggcaccaatatattggctgcttctccgagtatttgcctttgtcttctttgtgaaaggtcactggctggt

SEQ ID NO: 995494 - DNA, 120 bp, Artificial Sequence
  ENSG00000240498_112 (sequence is synthesized)
ttgagctattgggctgtttatgccacatcctgtgcatgccacactggctttctttctgtggtgtttccagagataagtttgcctgatagaagtcagactctgtggctttttatcattata

SEQ ID NO: 995495 - DNA, 120 bp, Artificial Sequence
  ENSG00000240498_113 (sequence is synthesized)
ggagaattgcatcaatcacggtgaaggagatgccacaggacagggcctgaggtgttggcttagccacagatgtaagggctacagttaacagacaactttcagtttccactattggaaggg

SEQ ID NO: 995496 - DNA, 120 bp, Artificial Sequence
  ENSG00000240498_114 (sequence is synthesized)
atgatcagtccttccctcctctattttcttgagccccgtttttcacctttctttttctctctcctttcttatcatgaagaataaagacaaatgagaacagatctaccttaggctgataca

SEQ ID NO: 995497 - DNA, 120 bp, Artificial Sequence
  ENSG00000240498_115 (sequence is synthesized)
gggcagggaatccatttaataataaaacgtgggtcaaaattcacttttctccttttgaattgaaattatattgtgcatgggctaattagattgaatgctgtaaacatgaagataatgctt

SEQ ID NO: 995498 - DNA, 120 bp, Artificial Sequence
  ENSG00000240498_116 (sequence is synthesized)
gcaaagtagctacagagaaagagaaaaagcctaaaacaaccagtagtgcttaggaccaatagtataagtctttacacactacatttgaataatactgtaagacacaattctttgataggt

SEQ ID NO: 995499 - DNA, 120 bp, Artificial Sequence
  ENSG00000240498_117 (sequence is synthesized)
taaatagcaaatctaggccccccaaaattatttaaaaaattgtcattttaattctagaggtataacaacagtgtgtaagttgcatcaaataacaaagttagtctacagcctaaattgttt

SEQ ID NO: 995500 - DNA, 120 bp, Artificial Sequence
  ENSG00000240498_118 (sequence is synthesized)
cgtcctgcttttttcacttctatgcatatttttatacttccatgctagagctacctcattcttttaaaattgtgagatattctataatttatttgtattcccctattaatatatttttag

SEQ ID NO: 995501 - DNA, 120 bp, Artificial Sequence
  ENSG00000240498_119 (sequence is synthesized)
cttattagtttacttaaaaagatttatgtttgccttctaatgtcaaagttaggagtcatctgtccatttaacaggtggtgttttcttgtgtaactcctctgccttcatgcaaacctttga

SEQ ID NO: 995502 - DNA, 120 bp, Artificial Sequence
  ENSG00000240498_120 (sequence is synthesized)
gaacaatctcttgaaacaaggctaaaatgcctttggagaggtattatagatgatcatatctactttgtgcctctttccattacttagctgcattagaggcccagctgtgtaggtgtaact

SEQ ID NO: 995503 - DNA, 120 bp, Artificial Sequence
  ENSG00000240498_121 (sequence is synthesized)
caaaatccaccaaaactaatactgtggttagattctggtcaaacaagttgccattaatccagatgtagaatgggattgaaaggtggctcttccacaccctgacatcaatgtaccagtttg

SEQ ID NO: 995504 - DNA, 120 bp, Artificial Sequence
  ENSG00000240498_122 (sequence is synthesized)
gctctgtgcattctttctccccttctccctttaccaccctcatataattgtttgtgtacatgtctggtttcgtcactacgctgatggcaaggatcatgcatgccttattcatatttgtgt

SEQ ID NO: 995505 - DNA, 120 bp, Artificial Sequence
  ENSG00000240498_123 (sequence is synthesized)
tattcaaggattctactctgggttctattatggggcctggcctaaagtggttgttcaagaaatgtgtgttagagaaatcatacataaactagcaattctcatttggattcctgtatctga

SEQ ID NO: 995506 - DNA, 120 bp, Artificial Sequence
  ENSG00000240498_124 (sequence is synthesized)
acaactaactttcagcttcttcagtgggataaagaagaaaaatggggtttaaagtacatactattcagtattaatgtagaatttaacagctgccatccaagtgcagaatcctctgtagtt

SEQ ID NO: 995507 - DNA, 120 bp, Artificial Sequence
  ENSG00000240498_125 (sequence is synthesized)
tcccagtgttaacctcacttctatctctagccatgtctcagtgctgggtgactctctcctggcatgttctggcaagactctacctggtttgcgtaatctacatcggcttctagtttccac

SEQ ID NO: 995508 - DNA, 120 bp, Artificial Sequence
  ENSG00000240498_126 (sequence is synthesized)
aagaattgtttatatgcatttaattttagctcttgggctataacatgtcattgttctttttacttatctcctcttacttctggaaacagggcaggcatcttcaatacttgctgttcctgt

SEQ ID NO: 995509 - DNA, 120 bp, Artificial Sequence
  ENSG00000240498_127 (sequence is synthesized)
ttggtgtgctcttagattaattttaactttcctcttcagctttcatgacacttcaagacattttccagtcatatttcctgtataagaaaatacagactatgtcaccacaaagggtagtgg

SEQ ID NO: 995510 - DNA, 120 bp, Artificial Sequence
  ENSG00000240498_128 (sequence is synthesized)
agattggggggcataatttaattcattcagggaactcatattttggtgtgaatggaaattaaagcaaggtatttggattaatttacctcatttggttctatattccatttagaggataac

SEQ ID NO: 995511 - DNA, 120 bp, Artificial Sequence
  ENSG00000240498_129 (sequence is synthesized)
acattaagcttttattcaattttatctgttatggtcacagtgaatctggaaaaaaatatatatggggcttagttttcatatttaggggaaaatgaatatcctagagaataataataaaag

SEQ ID NO: 995512 - DNA, 120 bp, Artificial Sequence
  ENSG00000240498_130 (sequence is synthesized)
ttagggaaaataatgttttcctaagagtaggcaatgaaaatctgaaggtactcaaagcagtcttgcacaagtgctttgaaaagcctcttgcacaattttatttctttatagtacttacac

SEQ ID NO: 995513 - DNA, 120 bp, Artificial Sequence
  ENSG00000240498_131 (sequence is synthesized)
aatcatatttcataatgacttgctataaacaatgttcttgacaagaagcttaaagatacaaaactgaaggaagcacttttgggagaaaatacttttatatttgcttacttctacactaca

SEQ ID NO: 995514 - DNA, 120 bp, Artificial Sequence
  ENSG00000240498_132 (sequence is synthesized)
acagacataaaattatggatttttttttcagtgcaattttcatatgtcagttctaggagacaggaaatgtgaaacactgtaggaggtatgagtttgccacctagaggagagaggtgaaat

SEQ ID NO: 995515 - DNA, 120 bp, Artificial Sequence
  ENSG00000240498_133 (sequence is synthesized)
tcaacttttctccaatttctttagtataattcattaatttatttaattatttactcgtttaattattcaaaaataattatctaccaagcttaactattttgccagcgcagatttgataaa

SEQ ID NO: 995516 - DNA, 120 bp, Artificial Sequence
  ENSG00000240498_134 (sequence is synthesized)
tctgttcaagatttatgagctcaaagaaaccacaaagtgcatcttactttaattgctcagctgcctcttttaaaaatcttttacttttaagagagtatagcacaaatatctgaacaactc

SEQ ID NO: 995517 - DNA, 120 bp, Artificial Sequence
  ENSG00000240498_135 (sequence is synthesized)
taaatatccatacttgggatggatattactttgagctcttgcactataataaaactttattcttttgtactaattcagtccttttactttttcttttttaatgtttaagaaacaagttgg

SEQ ID NO: 995518 - DNA, 120 bp, Artificial Sequence
  ENSG00000240498_136 (sequence is synthesized)
atatggacaagatgtaatttcttctgtcaaggaacccacaggataataggttaatgatagagaccaacaatgctgatgcatttttaatgacggagataatgtctagaaaaaaatccatta

SEQ ID NO: 995519 - DNA, 120 bp, Artificial Sequence
  ENSG00000240498_137 (sequence is synthesized)
tttggtaaagacaaagtatgcatatgtattcctttgtttcaattatttttaaagttaaaaaacaactgcttatctccttttgtactacaagcaatatctggtatagtgtatgcatagtaa

SEQ ID NO: 995520 - DNA, 120 bp, Artificial Sequence
  ENSG00000240498_138 (sequence is synthesized)
gtattctagaaatagtaatttcattgttgacttgattatattggagtggaacttactctggaagagatcctaactttcatttatctgagaaaatttccagttaggacatggaaatttttt

SEQ ID NO: 995521 - DNA, 120 bp, Artificial Sequence
  ENSG00000240498_139 (sequence is synthesized)
ccttgtcaatatttattcttaatgtgtttagaattttagaaaatgggtttagggatttagaaatttctttactaaataactctagggaacagtaccttaaaaatattcaaaatgacaaaa

SEQ ID NO: 995522 - DNA, 120 bp, Artificial Sequence
  ENSG00000240498_140 (sequence is synthesized)
acttaaaatgacatctaattttttaaggccaagaatcattaaaaagggatccaaatctttagactttgttgctcggtggaactagaatcattaatatctcagtcaggggaagccatgtca

SEQ ID NO: 995523 - DNA, 120 bp, Artificial Sequence
  ENSG00000240498_141 (sequence is synthesized)
acttactggtttaatttcctgtgagcttcccatgttctctccctgcaaggaccacctcaaatccctcagtagtcctgtctttatgaaaccagtataatttttcttttcgctcttgtcctt

SEQ ID NO: 995524 - DNA, 120 bp, Artificial Sequence
  ENSG00000240498_142 (sequence is synthesized)
caccttcctgtggcaacaagagtcaattctccatatataaatactcggcccctgttttagctgtgtcttaattgcgcaacatctgtttactctgtgttttaacatctgtgtggatagcat

SEQ ID NO: 995525 - DNA, 120 bp, Artificial Sequence
  ENSG00000240498_143 (sequence is synthesized)
gagatctatttggaatgtatctaactccaaagaaaccatcagaggtaacaggttaggaaattgaaatacagaaagatgaaaagtgatttgcccaagcatatagatcaaagctgtggcaga

SEQ ID NO: 995526 - DNA, 120 bp, Artificial Sequence
  ENSG00000240498_144 (sequence is synthesized)
acagggggctgactcagcttgagcaaactcttgctatcccctgctgaggtccgcacttgctgtggcccctgccgctctcctcggaccttgctgccctcctcctttgtcactgtggagaaa

SEQ ID NO: 995527 - DNA, 120 bp, Artificial Sequence
  ENSG00000240498_145 (sequence is synthesized)
caggaaggaatgtttattagcaagactgactggggtcacacccaaggcaatatcaggtttttacctctcccaggcctgggaagaggttcaaggatcaaggacaagctcccggttagagtg

SEQ ID NO: 995528 - DNA, 120 bp, Artificial Sequence
  ENSG00000240498_146 (sequence is synthesized)
agaggcaagttcaaacctttgaaaaataaactcacaaccagcatttggcacaggcctctggagtttacagaatgtatctgcctgtgtgtgatttcattagttcctcctgccaatctaatg

SEQ ID NO: 995529 - DNA, 120 bp, Artificial Sequence
  ENSG00000240498_147 (sequence is synthesized)
agattttacgtcctgtaacagtgaggcaattggagtctcagcagggaaaggaacttgcctaaaactgcaggatgggtagcgcttggatcctgactttctgactcctaggactgtgctgtc

SEQ ID NO: 995530 - DNA, 120 bp, Artificial Sequence
  ENSG00000240498_148 (sequence is synthesized)
ttcagatgatcacatgccttcttggcagatgtttctaacaaaggagagagttgcccagggtggggctctgctagctcccttgtcatgagccattctctccacattgccttttagttgcac

SEQ ID NO: 995531 - DNA, 120 bp, Artificial Sequence
  ENSG00000240498_149 (sequence is synthesized)
cacatagtcaccttcaattagctgtgcgaataggctcactcttatgctaacatgtactaaaagtgaaaatggggagagagagagagagagagaaagagagacacacagagagagagactc

SEQ ID NO: 995532 - DNA, 120 bp, Artificial Sequence
  ENSG00000240498_150 (sequence is synthesized)
ctcaacagggagaaagtacctgaagaaaatcattgctatgaagggcatagccagctaaatgggtgtcacttagtctgaaaaatctcaaagatgtcaataagccactcgagacaacaagga

SEQ ID NO: 995533 - DNA, 120 bp, Artificial Sequence
  ENSG00000240498_151 (sequence is synthesized)
acctgttttcctgtcatcattccttctcagtccttggctttgggaagggtaactttatggagagagaagaacctctgtggagttaaaaggtttatgaacttttttccctgcaacaaatca

SEQ ID NO: 995534 - DNA, 120 bp, Artificial Sequence
  ENSG00000230126_0 (sequence is synthesized)
ttccggaggcggtggctggtctgaggacgacgcggaggacgtcactgcgggtcggtgcttccttacaggtgccttctggaccggggtccttggcacctcccctgctcctgccctcggtgc

SEQ ID NO: 995535 - DNA, 120 bp, Artificial Sequence
  ENSG00000230126_1 (sequence is synthesized)
cggaccctgtgccctgggagcccgactacctcggtgtcccagccgtcccgggcttgaggcgctgagagggctgcgcggcttccagcccggaaggcagcggtcccgcgggctgcgcgcggc

SEQ ID NO: 995536 - DNA, 120 bp, Artificial Sequence
  ENSG00000230126_2 (sequence is synthesized)
agggggtggggtagggaggcggggacgtggaataaagaaagctcctgggtgccggctatgagaagtcaggtgtgcgtaggcgtggacagagtgccgatgtgggagtctggacacctggat

SEQ ID NO: 995537 - DNA, 120 bp, Artificial Sequence
  ENSG00000230126_3 (sequence is synthesized)
tttctggtcggggctctgtgtccttgggctaaacattcgcggttccactggctccctaacacttgaaatgatgtttgaagttgcctggaagaagtctcttccttttttctctcagaggtg

SEQ ID NO: 995538 - DNA, 120 bp, Artificial Sequence
  ENSG00000253799_0 (sequence is synthesized)
gcaacccggtaggttatcttactcagctgtggaagctttgttctctcagtcttctcagtaaatcttgctgctgctgacttttggggtccgtgctgcgtatgagagctgtaacactcactg

SEQ ID NO: 995539 - DNA, 120 bp, Artificial Sequence
  ENSG00000253799_1 (sequence is synthesized)
cttgaagtcagcgagaccaagaacccagcaattccagacacgtaactatattgtagctgctggctcccatatttgagaactgaagtttccacctcatttacccgtccactctcaaggctt

SEQ ID NO: 995540 - DNA, 120 bp, Artificial Sequence
  ENSG00000253799_2 (sequence is synthesized)
tcaaccttgggcactcttcctggcataagcaaagactgccgctagaaaccactacatttgtaagaaacataaggcttcgagaaggccatacaactgtacatgtttgaaattccttgtcca

SEQ ID NO: 995541 - DNA, 120 bp, Artificial Sequence
  ENSG00000253799_3 (sequence is synthesized)
ggatgtggtgacataatacactgaatccattcaagagtcaatggtgatctcagtgatgcttgtggttggaatattttttgtaatgaaaatagttagaatctgttgattaagtacctgtta

SEQ ID NO: 995542 - DNA, 120 bp, Artificial Sequence
  ENSG00000253799_4 (sequence is synthesized)
aggtgtgcctttaaattaagaattaggaatgctgcatgcataatattatatttcttcaaatcagaaataaaatatcccatatgtagaacttgtctatatgaaaaaaaaatcaggaatcac

SEQ ID NO: 995543 - DNA, 120 bp, Artificial Sequence
  ENSG00000253794_0 (sequence is synthesized)
cccaggcagggcagactcagcagctctctgtatccaagggcttgggatagacaaccacactcacctgcactggggacagcaacaatgttggcaaagatggagctgtctggccgcagcagc

SEQ ID NO: 995544 - DNA, 120 bp, Artificial Sequence
  ENSG00000253794_1 (sequence is synthesized)
aggaacatggcatctctgaccatctctggcctccagaccaaggacaagcctgcctattactgctcagcctgggacagcagcctcagtgctcacacagcgcctcaggggaagtgagacgaa

SEQ ID NO: 995545 - DNA, 120 bp, Artificial Sequence
  ENSG00000253796_0 (sequence is synthesized)
gcagagtcggtttgagttgcatgactgacatcttctggctacagtggatattacagaaagactgaaactccgcaaaagtgtgtttgaaaaaaagaaaagcaccctggaatttggatcatt

SEQ ID NO: 995546 - DNA, 120 bp, Artificial Sequence
  ENSG00000253796_1 (sequence is synthesized)
aagactctagacatgtgacctggagatgcagcatccatcttgtgaccatgaagcaatagggataagggtaaaagtctacacattgcagattgcagataaaaacatgaaaagatcctggct

SEQ ID NO: 995547 - DNA, 120 bp, Artificial Sequence
  ENSG00000253796_2 (sequence is synthesized)
gcctgatgacactacaggggagaaattgagagtagaaagaagaatgacgaggtttacgctctcctgaggaaggaccctcaagagaggaccttatgaacacaattagctactgaaaaagac

SEQ ID NO: 995548 - DNA, 120 bp, Artificial Sequence
  ENSG00000253796_3 (sequence is synthesized)
ttggaaaaaattatggcacaatgaagaaaataatcttcaaggctcagtggaagaaaaagaagagaggaggtctcagagagctgccctgtgaacaggtgccttctgccatgatcataagtt

SEQ ID NO: 995549 - DNA, 120 bp, Artificial Sequence
  ENSG00000253796_4 (sequence is synthesized)
gtgctgaataaatttgctgaacatgaatgtgggcggcagattgaagattcaaggacgcccagatgtctggtttgaataccattaactgagagagagaactctacaaaaggaacaggtttg

SEQ ID NO: 995550 - DNA, 120 bp, Artificial Sequence
  ENSG00000253796_5 (sequence is synthesized)
gagggatataagatatgctcagttttggacatgttgattttgaggtgctgtgagatttcatagcagaaatgtctatcaggaaactgaaaacagatctggggtttaggaaggagatctaaa

SEQ ID NO: 995551 - DNA, 120 bp, Artificial Sequence
  ENSG00000253796_6 (sequence is synthesized)
ctggagatacatcgccagaaatagctatatttcagagctttgctcaatatttatatgttttttgcagtagagaatcatacataacttgatttttccaacttaaatgtatatcttgaagct

SEQ ID NO: 995552 - DNA, 120 bp, Artificial Sequence
  ENSG00000253796_7 (sequence is synthesized)
ttccatgttctttaatattcttttacattattttcatgattgaataatgttccattgggcaattgtctcatagttatttaactaattgtctttcattggatatttagattgctaacagct

SEQ ID NO: 995553 - DNA, 120 bp, Artificial Sequence
  ENSG00000253796_8 (sequence is synthesized)
tttgtcattgagtgtaatctgtaatggacagtcttcagctaagacatggttctcactagtgagtaattcttgaaaagtgttttctagaagtggaatggctaaataaatgaacatacaaaa

SEQ ID NO: 995554 - DNA, 120 bp, Artificial Sequence
  ENSG00000253796_9 (sequence is synthesized)
tcttggtcttgatgcttggggcctccaggatgcctacagtatagaagagactcgttctgaaatccctccaactccttgagccattgatttctcattgaccaagcatgatggaaaaaagca

SEQ ID NO: 995555 - DNA, 90 bp, Artificial Sequence
  ENSG00000253796_10 (sequence is synthesized)
ttggatgagacttgagactgtggacttttgagttaatgctgaagacgggacttgctcctctctgccttctgccatgattgtgaggccttc

SEQ ID NO: 995556 - DNA, 120 bp, Artificial Sequence
  ENSG00000253796_11 (sequence is synthesized)
ggccttcccagccaagtagaactgctatttgcttttgagctactccgggagaggagcagagtcggtttgagttgcatgactgacatcttctggctacagtggatattacagaaagactga

SEQ ID NO: 995557 - DNA, 120 bp, Artificial Sequence
  ENSG00000253796_12 (sequence is synthesized)
aactccgcaaaagactctagacatgtgacctggagatgcagcatccatcttgtgaccatgaagcaatagggataagggtaaaagtctacacattgcagattgcagataaaaacatgaaaa

SEQ ID NO: 995558 - DNA, 120 bp, Artificial Sequence
  ENSG00000253796_13 (sequence is synthesized)
agtatctgccatttagaatgtgcccacaactgccaaatcaataatagaataaagcaaggggaatccctgagtcttcatggagtaagagccacaccttcttaaggggatcaaggggcaaag

SEQ ID NO: 995559 - DNA, 120 bp, Artificial Sequence
  ENSG00000253796_14 (sequence is synthesized)
gaagacaatattatcatgataaataaggaaataagggaaagtgtggaaggttttcatctcaatggacatgaaaaagtgtgcattattagagttgagtgcatttaataagccaggattatc

SEQ ID NO: 995560 - DNA, 120 bp, Artificial Sequence
  ENSG00000253796_15 (sequence is synthesized)
tcctagagttgcagagcaagacaaagcaagtagagtcggtatctggagacctttttgcaaagaagagacaagctctctctaggctatatcactagtctcaacttcctgggctccagccat

SEQ ID NO: 995561 - DNA, 120 bp, Artificial Sequence
  ENSG00000225652_0 (sequence is synthesized)
tatcagtgtgagacatctggggaggctcccctttttttcaccatttgaggactgaaagtaaatttagcttcctcagcagaaagaaaagaagctgttttggaggttgggaagagctttaga

SEQ ID NO: 995562 - DNA, 120 bp, Artificial Sequence
  ENSG00000225652_1 (sequence is synthesized)
aaatgcggcatcacgtctgttgccccatttgaagaaagcagctctggaaaaggcctaggacattagttgctacaaagttctagatcattctgtgtggtaaagaagtgcctttcacctccc

SEQ ID NO: 995563 - DNA, 120 bp, Artificial Sequence
  ENSG00000225652_2 (sequence is synthesized)
agcctgcccaagaaatatttaattacctagaggaaatcatccatcccactgatgcaaaaagaaggtggtttccattttcactctggatctatctaattgactatttaattgatgtggact

SEQ ID NO: 995564 - DNA, 120 bp, Artificial Sequence
  ENSG00000225652_3 (sequence is synthesized)
ttagtagaggcagtgattgcttccagttggtgggcccaggaagactgtgaaaaaggagtcacagaaggcctggaatggctgcgatggagataaaggatgaagggtagtcccctcagggtg

SEQ ID NO: 995565 - DNA, 120 bp, Artificial Sequence
  ENSG00000225652_4 (sequence is synthesized)
ttatccaaaaagtcaccttggaagaggaagaaactcctaccaatatcagaagagcaacaaacatttttttttctagaagataagtggctaatttcaaaataattattttatcaactgcca

SEQ ID NO: 995566 - DNA, 120 bp, Artificial Sequence
  ENSG00000253792_0 (sequence is synthesized)
ctactaacatgtggatgccgccactccacaacttgcttaaaagccacactgtgtttcctggacaatggccgcaggccaaaacacacacattccagtttttacgactataagatctccagt

SEQ ID NO: 995567 - DNA, 120 bp, Artificial Sequence
  ENSG00000253792_1 (sequence is synthesized)
cagacccaagaaggaagcatgtgaagagagcgaagctaaacgttgaaggtcctggttggagttggtggtcaactccactgttgcttggatcactaggcattaaagggttctgaggctgca

SEQ ID NO: 995568 - DNA, 73 bp, Artificial Sequence
  ENSG00000248131_0 (sequence is synthesized)
ggttcccgcctgcgcctctccctccacaccgccttgcaagctgagggagccggctccggcctcctcctcaagt

SEQ ID NO: 995569 - DNA, 120 bp, Artificial Sequence
  ENSG00000248131_1 (sequence is synthesized)
gaggaggcgccgagagcgagcgagggctgcctgccagcacgctgtcacgtctcagcaatagactgctcttgagggatggctatttttgttacttctgaattctactacaaaagagtgctg

SEQ ID NO: 995570 - DNA, 120 bp, Artificial Sequence
  ENSG00000248131_2 (sequence is synthesized)
gaattctactacaaaagagtgctgcaataaaaatctttgaacaagttctaatgccgttcaactggaattgaagttttcaatcgttggatatgtcaaaatttaatcagattgtatattgct

SEQ ID NO: 995571 - DNA, 120 bp, Artificial Sequence
  ENSG00000248131_3 (sequence is synthesized)
caattactttcaaattatgtacaccaagtcattcttgctctggcaaaataagaatattttcattaatatatcattcaacttgaaattgcccagcttttccttctcatttccccccagtca

SEQ ID NO: 995572 - DNA, 120 bp, Artificial Sequence
  ENSG00000248131_4 (sequence is synthesized)
aatgagttgaattaatactgtctaaaaatatatattcatttgcttacctgttagtatttgttccatgtattaagaagctttgctagtatatgaaaatatatgtattaccatgtcttgtga

SEQ ID NO: 995573 - DNA, 120 bp, Artificial Sequence
  ENSG00000248131_5 (sequence is synthesized)
atctattttgactggtttttaatgtaactactaacatctttttatgttcagcactttttcacaattttactttcaatgtctttatttttaaaatgtatcttctgtagacagtgtacaggt

SEQ ID NO: 995574 - DNA, 120 bp, Artificial Sequence
  ENSG00000248131_6 (sequence is synthesized)
aggtggtcttgttttattgtaaatcaagtgacaatctctatttcataattgacatatttaatccatatatatttaatttaattgttgttattttgagacttaatatccagttttactatt

SEQ ID NO: 995575 - DNA, 120 bp, Artificial Sequence
  ENSG00000248131_7 (sequence is synthesized)
ttactattttggcccatttatttttggtttattttagatgtcttgccttatcttagattgattgatatttttagtatttaattacatttcttttataaatgtaatttcttgaatatttgt

SEQ ID NO: 995576 - DNA, 120 bp, Artificial Sequence
  ENSG00000248131_8 (sequence is synthesized)
aattgctctgggaatataaaaatcatctttaaaatctatttagagttaatggtactactttatgcagtaggtaaaaacatttcactagcacaatttcatttgcaggcacctaaccttctg

SEQ ID NO: 995577 - DNA, 120 bp, Artificial Sequence
  ENSG00000248131_9 (sequence is synthesized)
tgatagtattgtcttatattgttatatttatgagatacaatcactacagtaaaatactattttctattcattgtgccatcttataaataaacagatgaataaacagatatttttgaacaa

SEQ ID NO: 995578 - DNA, 120 bp, Artificial Sequence
  ENSG00000248131_10 (sequence is synthesized)
gtgcaagtttgctacatgggtaaatatgtgccatggcagtttgctgcatctattaacccattacctaggtattaagcccggaaataagaatggcagaaatgtgaagagttattgtgtggg

SEQ ID NO: 995579 - DNA, 120 bp, Artificial Sequence
  ENSG00000248131_11 (sequence is synthesized)
gaagtggcctctacatagaaatgtttttccactgaatgttcctgttgtgctgatgaacaaaggagttcatcacaggccagaaactaagatagatagataaataaataaataaataaataa

SEQ ID NO: 995580 - DNA, 120 bp, Artificial Sequence
  ENSG00000248131_12 (sequence is synthesized)
ttgagaaaagcaaatacttgctacatattttgaggaacaataagtattgaagttgcaaacaggttctatggatatttgtcaacagaagatagctgatcacaaatgcgcagagaggtagaa

SEQ ID NO: 995581 - DNA, 120 bp, Artificial Sequence
  ENSG00000248131_13 (sequence is synthesized)
aaatgacacaatgaccaccctaccctctgagtcagcaaattgttttctcagtacatttctactctggtccttgtttaataaaacctctttctccttacagctgcgtgcagtaatatttat

SEQ ID NO: 995582 - DNA, 120 bp, Artificial Sequence
  ENSG00000248131_14 (sequence is synthesized)
tatttaaagttcttgtcttcaccttaacaatcttagtttctgctttaaaataatctcttaaatattcatagggattgcacatgtttttcagctgccaataattattatttactatacact

SEQ ID NO: 995583 - DNA, 120 bp, Artificial Sequence
  ENSG00000248131_15 (sequence is synthesized)
ataatagattctgtccttcttgtgacagaaaagtaatttcttaccaatgataataaaagattttttgtgtatttgctacagttaagtttttttagatattcctgctttaagaactctaaa

SEQ ID NO: 995584 - DNA, 120 bp, Artificial Sequence
  ENSG00000248131_16 (sequence is synthesized)
ttatttggaatttgcttttataaataatgtgaagttgagatatggcatattttttcttctaagttcataacttagagttctaacttctttttctggctgatttgaaaatggtgcattttt

SEQ ID NO: 995585 - DNA, 120 bp, Artificial Sequence
  ENSG00000248131_17 (sequence is synthesized)
aatatggtaaaaacctccatatgcctgtgtatttcttccatattttatattattatatttatctgttcattctcccttatgagaaaaaatgtcacctttaactactatgggtttttagca

SEQ ID NO: 995586 - DNA, 120 bp, Artificial Sequence
  ENSG00000248131_18 (sequence is synthesized)
agcacatataggatacaatataattaagcacatttaaaaatattttttaaattctcacttattttttctcatgaaatttaaaattgatttgccaattttctttcaatttccttaagtgta

SEQ ID NO: 995587 - DNA, 120 bp, Artificial Sequence
  ENSG00000248131_19 (sequence is synthesized)
taattttggcctgtctcctatggtttgtatcactacttatcctattttaaaattgtaaaacttttgtggttttcttaatatggactttcctaatttcttacgaagtttatttctacataa

SEQ ID NO: 995588 - DNA, 120 bp, Artificial Sequence
  ENSG00000248131_20 (sequence is synthesized)
tttaaagttttataacttttgtgactgggatttgtttttcattgcatttcctaaatagtaatttctgttacatagtcaagctattgatttttgtttctctatgtaaagagtgccttacta

SEQ ID NO: 995589 - DNA, 120 bp, Artificial Sequence
  ENSG00000248131_21 (sequence is synthesized)
atatccagatattctaatgactttcctagggttttcaaagcagataaaccttatataatataatgcttttgttccaatatgtataactcaagccaaagcttgaaaaaatgatttttaaaa

SEQ ID NO: 995590 - DNA, 120 bp, Artificial Sequence
  ENSG00000248131_22 (sequence is synthesized)
aaaagcagctatgaatgtgactatttacatctaactatatttctgcatatgtcttaaatattgatatttattttgactttcatacttctaaacatattcaataaatatcattttgattca

SEQ ID NO: 995591 - DNA, 120 bp, Artificial Sequence
  ENSG00000248132_0 (sequence is synthesized)
tctctgcttctgtctccatggtaacctaactgtcatgttttcatctctagcatggtggttagtcacaactgaatctttcagaggaggaaagagcagacactaggcacagaacaaagagca

SEQ ID NO: 995592 - DNA, 120 bp, Artificial Sequence
  ENSG00000248132_1 (sequence is synthesized)
aatgaaacaggaactgtggaataacactgtgttcccaaagaaaacataactgccatagatcacagaatgaaagccccagagcacgcagcagagaagtccagcaacaggagtcaacattta

SEQ ID NO: 995593 - DNA, 120 bp, Artificial Sequence
  ENSG00000248132_2 (sequence is synthesized)
cagaaaaccctgtaggaagactgtggcactaccaactgatcaacatgttacagaactcattttatactgcagccaggctgaggagggcccatcacctgcacataaatatttggacagtgg

SEQ ID NO: 995594 - DNA, 120 bp, Artificial Sequence
  ENSG00000248132_3 (sequence is synthesized)
cgacaacttgaagacagctagctgcagagtgatattccagaataagagttttgaagctccagatgactagctgacctgggtattaatgctggatatagcaacgtccttctatgtccttct

SEQ ID NO: 995595 - DNA, 120 bp, Artificial Sequence
  ENSG00000248132_4 (sequence is synthesized)
aaattttcttcatgagtagtgataagttatgctgagaaaaattcttgaacctacagttatacaacattgttcttgccgcctttcaaaaatggacaatgtctcccatatggaatatctact

SEQ ID NO: 995596 - DNA, 120 bp, Artificial Sequence
  ENSG00000248132_5 (sequence is synthesized)
caagaaggtgaataaaaaatccaatgaagacataaaacgagtttcatttaaaaaatctggtaaaatggaagtttgctttacacaaacagtaaagaagccttggaagataatgttgacttc

SEQ ID NO: 995597 - DNA, 120 bp, Artificial Sequence
  ENSG00000248132_6 (sequence is synthesized)
ccatgctcaaaagtactctgactcaggaagatagctccagcccttcaaaggaagggctgtctgcaataaatgcccatggagacctctcagcaattccataagataagtgaattggcttaa

SEQ ID NO: 995598 - DNA, 120 bp, Artificial Sequence
  ENSG00000248132_7 (sequence is synthesized)
atcaaatgttttgcagttccatttacagagcatttactggccatcgtgtactactcaagttactagaacactaagttgactcatgcttggaaatactggttttatgttgctatcagagta

SEQ ID NO: 995599 - DNA, 120 bp, Artificial Sequence
  ENSG00000248132_8 (sequence is synthesized)
ttgtcataaatccacccacaattacaaagagtcctactctgctgctgtagctacctttaactccttgccctcagcaaattgtatgcctagggagatggactacttcggccttgagaaatt

SEQ ID NO: 995600 - DNA, 120 bp, Artificial Sequence
  ENSG00000248132_9 (sequence is synthesized)
tccaattaggtcattttgagaagcagtctggatgtgtggtctgaaatagcatttccagtttttgcctatttttatttttgagaactgcttgcaaataaatgccactgagtttgttaggaa

SEQ ID NO: 995601 - DNA, 120 bp, Artificial Sequence
  ENSG00000248132_10 (sequence is synthesized)
tttcatctctagcatggtggtgagatttcatatgtgtgtgccttaatgcacaggtccatagtctctggcacggtgttttaatttagtatctctaaatgtgatcatttttgagctattagg

SEQ ID NO: 995602 - DNA, 120 bp, Artificial Sequence
  ENSG00000248132_11 (sequence is synthesized)
gttattgctgaaaaactattgttccagagaagccaatttcatcttctctcttcatcttctacatgttgctagcttccattttgggggatgtgtgcattagggtttgtatggatacctgca

SEQ ID NO: 995603 - DNA, 120 bp, Artificial Sequence
  ENSG00000248132_12 (sequence is synthesized)
agggcgacacaggaaatctggaggagaaaattggagcttcccagcccagggagtcgatcacttctgaccacataagtcagtggttctcaagatttcggggcagaagaacaatctgagttt

SEQ ID NO: 995604 - DNA, 120 bp, Artificial Sequence
  ENSG00000248132_13 (sequence is synthesized)
ttcccacacattccagatattctgattcattaggcctgggataagactcatgaatctacttcttcaacagtgacagttactaagcaggtattcattggatcagactatgagaaacacctc

SEQ ID NO: 995605 - DNA, 120 bp, Artificial Sequence
  ENSG00000248132_14 (sequence is synthesized)
cttgagtagagaaagagagtctctctttgtagccaagttggcctttgggagccaactttcacatcatggtgttctgtttagggaattcctggcagggggaggggtcctagcatcatgtag

SEQ ID NO: 995606 - DNA, 120 bp, Artificial Sequence
  ENSG00000248132_15 (sequence is synthesized)
ctatctatctatcatctatcatctatgtacctgcctatctatgtatcatatatctatcaatacaggctttgacgttagtcacaaatgagcttgaattctacttaaaatatgtgatcttaa

SEQ ID NO: 995607 - DNA, 120 bp, Artificial Sequence
  ENSG00000248132_16 (sequence is synthesized)
tctctctaagcctcagtttccttctctcaaaatagagtgatgagacctacttcatagggctgcaatgaggactgtatgtgattaaatgtaaaaaaaaataaaaaataataactagcataa

SEQ ID NO: 995608 - DNA, 120 bp, Artificial Sequence
  ENSG00000248132_17 (sequence is synthesized)
agtttcagaaatgctggaacataccctcgaagcaaccactgaagcccttccagcagaggaaccgcagaactcaaaaatcctagctgtaggttgggtccacactactagggagacctccag

SEQ ID NO: 995609 - DNA, 120 bp, Artificial Sequence
  ENSG00000248132_18 (sequence is synthesized)
gggtccacactactagggagacctccagcccagaaagcagcttggcgataagacggaagaatgaaggagctccagttttgaagcagggttgttttttgtttgtttgtttgtttttatttt

SEQ ID NO: 995610 - DNA, 120 bp, Artificial Sequence
  ENSG00000248137_0 (sequence is synthesized)
attctaaccaaatggggtgctgtgatggagaacttccctttgagttgtgccttcgcctgtgtcaattggtgctactctaacagaataccacagactgagtaatttataaagaacacacgt

SEQ ID NO: 995611 - DNA, 120 bp, Artificial Sequence
  ENSG00000248137_1 (sequence is synthesized)
ttattttttacagttctggagtctgagaaggccaagattaagataccaacaggttttgtcgtctggtgaggtcagcctacgcttccaagatggtggcttgtatgctgtgtcttccagacg

SEQ ID NO: 995612 - DNA, 120 bp, Artificial Sequence
  ENSG00000248137_2 (sequence is synthesized)
gcacctaacctcattcacaagagtggaggtctcctgacctatcgtctcttaaagaccccacctgttaacattatgatattagccattcggtttcaacgcatgaattcctgaggagtcaca

SEQ ID NO: 995613 - DNA, 120 bp, Artificial Sequence
  ENSG00000248137_3 (sequence is synthesized)
ttgaaaccatcgcagttactacactccagtttagcagttatggtgtacaagtccacaaccacctaagaacagaagttgaaatggtgcaggcaaatgccacgtcacagatcctgggaagag

SEQ ID NO: 995614 - DNA, 89 bp, Artificial Sequence
  ENSG00000248138_0 (sequence is synthesized)
ctatgttgcctaggctggtcttgaacttctggcctcaagaaatcctcctcctgatcctcctcactggctagaacttccatccctgtggt

SEQ ID NO: 995615 - DNA, 120 bp, Artificial Sequence
  ENSG00000248138_1 (sequence is synthesized)
tgtttagagagagagtgaagaatgagggtgtacctggcggagccaccatcctctgccacttctgaaacaagcaggtcttcaggcagtctcggggactgaggttgtaagttttatgtctcg

SEQ ID NO: 995616 - DNA, 120 bp, Artificial Sequence
  ENSG00000248138_2 (sequence is synthesized)
acatcagttcctgcattggctccaatattacacacaactgcaagaagttcaaagacattggcatttcactacttcataacactaattacaataaataatgctaacagctggaatcaagta

SEQ ID NO: 995617 - DNA, 120 bp, Artificial Sequence
  ENSG00000248138_3 (sequence is synthesized)
ttgctgccctggtctgttgcgagcatgtcaaggagatttctcacttcctcacaggacgtgtgggatcatctcccagatgaactaccagttcctaagtatttgtctgaagcactggctaga

SEQ ID NO: 995618 - DNA, 120 bp, Artificial Sequence
  ENSG00000248138_4 (sequence is synthesized)
tgtggtgaataagagtgatgaaagtggacaccatcgtattattgaattgaagggattcaaacctcttctgtgataatcatagaactgtagcatcagaaggcaattccctaagtgtggtct

SEQ ID NO: 995619 - DNA, 120 bp, Artificial Sequence
  ENSG00000248138_5 (sequence is synthesized)
gcccacatccctggtggtaagccaaatgatcgtaagtggtagagcggcaattacttttaaaaaatttgacagtcatatatctatttcaatgtatagcaaatatagaattggaacatcaaa

SEQ ID NO: 995620 - DNA, 120 bp, Artificial Sequence
  ENSG00000249849_0 (sequence is synthesized)
cctatgagaagcccctttcaattccttgttgagacctctacagttcctttggagtgctttccccgctcctgcagcaagactttcttgcaaaaatgcctgtttgggattcctcagagtaca

SEQ ID NO: 995621 - DNA, 120 bp, Artificial Sequence
  ENSG00000249849_1 (sequence is synthesized)
acattttggcaaatgtgaagaagtgagattcaatgaagatgataagaaatgaaaggtgttaccaaaagcatcctgtggtgactgaagaagggcctagcagcaaagggactccatcgcccg

SEQ ID NO: 995622 - DNA, 120 bp, Artificial Sequence
  ENSG00000249849_2 (sequence is synthesized)
aggagcagcttccgcaggagctctggcaggttccttggaaaacgtggcagtgccggcccatggtgccctgttcagaaatacaagactcagatttagtaaagccagttgtgtaatgtgaaa

SEQ ID NO: 995623 - DNA, 120 bp, Artificial Sequence
  ENSG00000225656_0 (sequence is synthesized)
cccagaagctagctgggcctgagctggacatttagtgccagaagattctcaaaggggtccctgattcagaaaaataagaaccactccacagagggactgctgagattctgagcgtcgcaa

SEQ ID NO: 995624 - DNA, 120 bp, Artificial Sequence
  ENSG00000225656_1 (sequence is synthesized)
tgtgtcctcatcccgccctgcacctggcagtgtgactgagaggggaagccaggatggggttcctgttggatcccacatgtgtttcctccctggcttgtggaagaaaatgtgttctccaaa

SEQ ID NO: 995625 - DNA, 120 bp, Artificial Sequence
  ENSG00000249842_0 (sequence is synthesized)
ctaacaatgtatatgaggactttctgagaattttctacatgggaatttaagtcattttaaaataaagacacttattttttctttcaatctttttgcctttaattgcctttttcctccttt

SEQ ID NO: 995626 - DNA, 120 bp, Artificial Sequence
  ENSG00000249842_1 (sequence is synthesized)
atttctttattatccatgggtcaagatgatgaaatgaaagtggtgatatttaacatgcttataattttaaagggaatgttactaatttttcttcattaatgacatatttcgctgtagatt

SEQ ID NO: 995627 - DNA, 120 bp, Artificial Sequence
  ENSG00000249842_2 (sequence is synthesized)
tctcatagaacctattacgaagtttagtttaccaacctattaccatatttcattgtagatttattgtagaacccattaccaaattcctttcaatctattcctagaataacatttttccca

SEQ ID NO: 995628 - DNA, 120 bp, Artificial Sequence
  ENSG00000249842_3 (sequence is synthesized)
atacacacacacacacaagcaatttcttactgtggggaatagcagttacacattttctaataatagacacaccttactttttaggataaatatactttggcccaggagttttatctttgt

SEQ ID NO: 995629 - DNA, 120 bp, Artificial Sequence
  ENSG00000249842_4 (sequence is synthesized)
ttatcttattcccatatgaattgtcatagcttcatctgaattttctagtagtattgccctgattatactgtccttgtgaattctgatgtaaaagctagactgtcctcatagaaaaagtgg

SEQ ID NO: 995630 - DNA, 120 bp, Artificial Sequence
  ENSG00000249842_5 (sequence is synthesized)
aggtatgcatttttttcaattatctgttcaccaaaagatgtcttttttatgtctgaaatgttctgttcttaaaaagagattagctggtactcccactaaactattgtttaaatttcttta

SEQ ID NO: 995631 - DNA, 120 bp, Artificial Sequence
  ENSG00000249847_0 (sequence is synthesized)
aaaaagaacagatttattgaatagatccatccaagtttcagattggcttctctctaaattgaatcccaaagttactatttattagataattcagcatttattggttgtgtttatacttct

SEQ ID NO: 995632 - DNA, 120 bp, Artificial Sequence
  ENSG00000249847_1 (sequence is synthesized)
taaacaacaaagcatgcacaaatattatctgtagctatttaaaatagatgatatggaggctaagtagaaatgggctatttatagataacagagctatttgcaaagaattgtatcagcttc

SEQ ID NO: 995633 - DNA, 120 bp, Artificial Sequence
  ENSG00000249847_2 (sequence is synthesized)
caagtgaatgctcaatcaaatctagttttgttatgtgtcaggcaccgggaatcttttttaatgaattaataattcttagaatatctcctacatccatactaataggctgcattttttcat

SEQ ID NO: 995634 - DNA, 120 bp, Artificial Sequence
  ENSG00000249847_3 (sequence is synthesized)
ttgtcctgcttatcacaagtgtggctaacttcatatttgtttcaatgatggaattctttcagagtgttttggccttttagtcaatttgctgcaagttgtaatggaaagcgcacctctctg

SEQ ID NO: 995635 - DNA, 120 bp, Artificial Sequence
  ENSG00000249847_4 (sequence is synthesized)
gaactcgggagtcttggatcctacacatggttctatgcataaatagaaatgaaattagcttcctggatactaagctagtattaatcaggtgattctaattaaaatcactctgctagctaa

SEQ ID NO: 995636 - DNA, 120 bp, Artificial Sequence
  ENSG00000249846_0 (sequence is synthesized)
gttcctccgccttcaggaaggtctttttagcaggggccttacgggtgcgcgcttcggtcctggaggccttatcctagcctcctctctccatcagcgccacccgtctggggcccaaaagga

SEQ ID NO: 995637 - DNA, 120 bp, Artificial Sequence
  ENSG00000249846_1 (sequence is synthesized)
gggagctttacctctgtcccccagcctttggagtgtcaccaaacaagccattcgttcaccaaatacttattaagtgcctgacaacggagatgtaacgaaattgcctgtttgctccactct

SEQ ID NO: 995638 - DNA, 120 bp, Artificial Sequence
  ENSG00000249846_2 (sequence is synthesized)
ctgtttgctccactctggttgaagaaaccagtctgactgtctctgaggctatggagcagtccatcaagaatgaaagccctctgccaggcacgttggctcacacctgtaataccagcactt

SEQ ID NO: 995639 - DNA, 90 bp, Artificial Sequence
  ENSG00000249846_3 (sequence is synthesized)
taatactttgcaaggcctcagaaactctgctatccacaggcaggtcttacagtcatggctggctcctctctctgagaactgggactcctg

SEQ ID NO: 995640 - DNA, 120 bp, Artificial Sequence
  ENSG00000249846_4 (sequence is synthesized)
agtcatggctggctcctctctctgagaactgggactcctgaacttggtgaaatacctcagccatcgatcatgttaaattatcggggacactcattaaaaatgtgagtctgctccagatgg

SEQ ID NO: 995641 - DNA, 120 bp, Artificial Sequence
  ENSG00000249846_5 (sequence is synthesized)
actctctctctttctgccctgaccgtgagggagaccgtgagagagagagaccgtgagagagagaaaccgtgagagagaccatcagagagagaaagagagaccgtgccctgacctgctgga

SEQ ID NO: 995642 - DNA, 120 bp, Artificial Sequence
  ENSG00000249846_6 (sequence is synthesized)
cagtggagatgcttgtgggctgtgagcaacagatgcaagggctgccgggaatcccatctttccagcatcatctgccaaggcacatcagttcctgggtgtcttgatgggttctggcagcat

SEQ ID NO: 995643 - DNA, 120 bp, Artificial Sequence
  ENSG00000249846_7 (sequence is synthesized)
ccccacacagcctgcctggaagggacgcgggacaagggtaggttctccctgtgatggacaggaggcaggcgaccctcccacagccctacctggcaatgcagatgtgtccccaaaaggcac

SEQ ID NO: 995644 - DNA, 120 bp, Artificial Sequence
  ENSG00000249846_8 (sequence is synthesized)
tgggggcagctggagtgctgtgcctaggcgggctcacccgggcagcggttcgctctgattgcagtggtttcccaccagctccttggagagctggcagatgacccagccccacagcaggag

SEQ ID NO: 995645 - DNA, 120 bp, Artificial Sequence
  ENSG00000249846_9 (sequence is synthesized)
ccgggaatggcagaacgagatacaacaatttgatatccacttgccagatgagccgggtgtcctcagtcgcctggctctgtgcccaacctctttttacataaacacttatgaattgagcca

SEQ ID NO: 995646 - DNA, 68 bp, Artificial Sequence
  ENSG00000249846_10 (sequence is synthesized)
ttgagccagataaacaccaatgaaacaaaaaaccacgaataagaaaaatgacagaaaaggagaacctt

SEQ ID NO: 995647 - DNA, 62 bp, Artificial Sequence
  ENSG00000249846_11 (sequence is synthesized)
caagcacaagattcctgtgaaatccaggtctaagtgttttgacaacagaagtaatattatgt

SEQ ID NO: 995648 - DNA, 120 bp, Artificial Sequence
  ENSG00000249846_12 (sequence is synthesized)
tccaggtctaagtgttttgacaacagaagtaatattatgtcataggtgagagctgtgagttgctgaacccaaagtgagttcaaatccgagctctgcctcctgctacctgtgtgactttga

SEQ ID NO: 995649 - DNA, 120 bp, Artificial Sequence
  ENSG00000249846_13 (sequence is synthesized)
gaagttccagcactgctttgtgcctcagttttgtcatctgttaaatgggcgtaatcacagctcctgcctcagagttgttgtaaattaatacatgtaaagcactgaaatcagcctggtata

SEQ ID NO: 995650 - DNA, 120 bp, Artificial Sequence
  ENSG00000249846_14 (sequence is synthesized)
aggatgagcgtcatgagagcgaggcctggggtagggccagaattaacgtcgttggggcaggtcctgggtagattccaggttggcgggtcctggggcggggccaggatagggcgatcctgg

SEQ ID NO: 995651 - DNA, 120 bp, Artificial Sequence
  ENSG00000249846_15 (sequence is synthesized)
aagctgggcttcggaagcgtccaggcttccaaggcgatcgatcgggcagtgtcggtctgcagctgctaagccaagaagatctggaaaggagtcagtcagagagccttgggctctgggagt

SEQ ID NO: 995652 - DNA, 120 bp, Artificial Sequence
  ENSG00000249846_16 (sequence is synthesized)
ggtgccagttctacaaggcctggagcagatacgaaaaacctcccttctttgccaaatggtccccagcttccccattcactgaaggccctgcggtcaggaacagtcaggactttgcaccca

SEQ ID NO: 995653 - DNA, 120 bp, Artificial Sequence
  ENSG00000249846_17 (sequence is synthesized)
gttgttgtgagtgttggccgacccttcctcttgtgtgattcatggacccttagcattgcatcacctgggagcttttggaattgaagactctcagcgctcaccggaaggacctcctgggcc

SEQ ID NO: 995654 - DNA, 120 bp, Artificial Sequence
  ENSG00000249846_18 (sequence is synthesized)
agaatctgcattttaacaagatgcccagggcttctcaaccagggggtgattttgcccccaagagaacatgtggccatgtctggagacaattttggttgttgcagctggaggaggtggtgc

SEQ ID NO: 995655 - DNA, 120 bp, Artificial Sequence
  ENSG00000249846_19 (sequence is synthesized)
gagagaccctgattccatcttagagatcatccaagcacacttggccaaatagtttttgctactatcccatgaagaaaaggcagactcatgactgatggcaacgtcgatgggaattttgtt

SEQ ID NO: 995656 - DNA, 120 bp, Artificial Sequence
  ENSG00000249846_20 (sequence is synthesized)
cgatgggaattttgtttacttcttctttgtggactttgggatacgatgacttaccatttgtgcaagttgtgcattgcatacctccagggggcgccacccacatatttatgaaaatgccac

SEQ ID NO: 995657 - DNA, 120 bp, Artificial Sequence
  ENSG00000249846_21 (sequence is synthesized)
cccaggaattgcacagtacatagtctacatggcaataaacagttgctctggttttggggttgtcctgggttgctctggaactgggaggaactttatttctggccattagaggccctgagc

SEQ ID NO: 995658 - DNA, 84 bp, Artificial Sequence
  ENSG00000249846_22 (sequence is synthesized)
ctgggaggaactttatttctggccattagaggccctgagcatgacattgagtatcctttcaagaaaggagaaatgttgaacaga

SEQ ID NO: 995659 - DNA, 120 bp, Artificial Sequence
  ENSG00000249846_23 (sequence is synthesized)
ttgacggatgaaaaatcatcaaattataatatcatggcttttacttttgatagcttctgcccggaacatggcggtaacagcttctcattttcaattgattcattgggggagaaaatatac

SEQ ID NO: 995660 - DNA, 120 bp, Artificial Sequence
  ENSG00000249846_24 (sequence is synthesized)
tttcaattgattcattgggggagaaaatatacacgactgccctaagactttctattacataccatttgtttgacgggatttctttagtttctgtagcataacttattctaactggtcctc

SEQ ID NO: 995661 - DNA, 81 bp, Artificial Sequence
  ENSG00000249846_25 (sequence is synthesized)
aaagtttggaagttactttccaggagacttagcttgcactgagagctgccctcccaccctctctccaaatttcctcttggg

SEQ ID NO: 995662 - DNA, 89 bp, Artificial Sequence
  ENSG00000249846_26 (sequence is synthesized)
tctctggagctctctggggaggggtgagacctgctgtctgctttgtactgtttgcccaggtcttacagtcatggctggctcctctctct

SEQ ID NO: 995663 - DNA, 120 bp, Artificial Sequence
  ENSG00000249846_27 (sequence is synthesized)
gtttgcccaggtcttacagtcatggctggctcctctctctgagaactgggactcctgaacttggtgaaatacctcagccatcgatcatgttaaattatcggggacactcattaaaaatgt

SEQ ID NO: 995664 - DNA, 120 bp, Artificial Sequence
  ENSG00000249846_28 (sequence is synthesized)
cttcatgttaaatctattaactgtggcaatggtatgggggttataaaacaaaacaaaacccttacatcaagaatgcacccgggtgtgttatggatgtgggtgaaatgaaatgtctggaat

SEQ ID NO: 995665 - DNA, 120 bp, Artificial Sequence
  ENSG00000249846_29 (sequence is synthesized)
ttgctttaaaatatcctaaaatagcaagaaggaaaagaaaagtgggaactggaatgagattggagaaatgttgacaagttcttgcagtgggatgatgggtgcatgggggttcatggtata

SEQ ID NO: 995666 - DNA, 120 bp, Artificial Sequence
  ENSG00000249846_30 (sequence is synthesized)
cttgcagtgggatgatgggtgcatgggggttcatggtataattctctccctgctttttgtgtatatgggaaatttccataatgaaaagttagaggtcgggcacggtggctcatgcctgta

SEQ ID NO: 995667 - DNA, 120 bp, Artificial Sequence
  ENSG00000249846_31 (sequence is synthesized)
gaatcgagagagttaaactagcagaatgagccgctcaccctcagcattgcttttaatcttgctcctcccactgaagaattggagtatatttctccagcccctaatgttgggtttagtcat

SEQ ID NO: 995668 - DNA, 120 bp, Artificial Sequence
  ENSG00000230668_0 (sequence is synthesized)
ggactgcagtaggctcagtcatggttcagcaaatagcaccaacaacctaaaagagctggtggaataccaacttcatgtacacttggcttattcagcacccataaaattcaatggaccacc

SEQ ID NO: 995669 - DNA, 120 bp, Artificial Sequence
  ENSG00000230668_1 (sequence is synthesized)
acagaacacatcaagataatgaattttcttcaaactactgaggtacaatgaaaaatggaaatattatctcagaaattacaacagagggatgaagatatagcatatgctgtacctaaaaga

SEQ ID NO: 995670 - DNA, 120 bp, Artificial Sequence
  ENSG00000230668_2 (sequence is synthesized)
tacatcaaatgggacattgggaatatggattgatgaaatttaatttgcgattgtcctataatgccttttcattacagtaccacacaaattgaggcaataaatgtatatttgatcaaaaaa

SEQ ID NO: 995671 - DNA, 120 bp, Artificial Sequence
  ENSG00000251660_0 (sequence is synthesized)
ggggtcagccagcagtaaatctgggggctcccctgagaaggagagtgagccccacagtaacctaggcatgtcggtgtaaacctgattgtctcgacattttctgtttaattgattggtgct

SEQ ID NO: 995672 - DNA, 120 bp, Artificial Sequence
  ENSG00000251660_1 (sequence is synthesized)
gtgaggagttcggctgctcgtggtaaaacagcgtactccagttttaagtcatcgggtaaaataataggacagtgatttccatctgtgcttcagtacccactttgtgttcttttcttgaaa

SEQ ID NO: 995673 - DNA, 120 bp, Artificial Sequence
  ENSG00000251660_2 (sequence is synthesized)
ttaatttcaagtaaaatgaatttccttccaagtagcctattagtaaaacacaacttagtgtttcatccattggggtgagcatatactgccctttgcagccctgcctgtgttctgattggc

SEQ ID NO: 995674 - DNA, 120 bp, Artificial Sequence
  ENSG00000251660_3 (sequence is synthesized)
tccattcatgagcaaaggtgattgtgagctgtatattacacaggtgtcgcccaggtttcgtaacctccactttaatgcagtaagccgcaagaatgacttctgcaagtgaaatgaggaagc

SEQ ID NO: 995675 - DNA, 120 bp, Artificial Sequence
  ENSG00000251660_4 (sequence is synthesized)
ttcactagcttgctccattggaaggtaaactgaaattttatacgttgaagcttaaaatctaaatttatgtatgtttggaaatggaatggacattaacataaaatgtattttatcaaaaaa

SEQ ID NO: 995676 - DNA, 120 bp, Artificial Sequence
  ENSG00000272654_0 (sequence is synthesized)
gcgagaacggcaaatggcggttgcagaggctcgtccgaattctcggctcgctgctccctggctggcgcgtgtttgttcattctgggctaggtgagcagggacaatacgtcgccctctcag

SEQ ID NO: 995677 - DNA, 120 bp, Artificial Sequence
  ENSG00000272654_1 (sequence is synthesized)
gactttgctctctccttaaaacccgaggattcaccgtcaagcttctggtttctctgacatccttccccagccgccccttcatcgccaccgatgatccagtggagaagctgtgttggaggt

SEQ ID NO: 995678 - DNA, 120 bp, Artificial Sequence
  ENSG00000272654_2 (sequence is synthesized)
caagggatggaggcgaaactgcgcgttctcgtccctgcagaaaccggaatatccgagacacatgacgaacatgaaactttctccttgtctcttggctcccactccgctacacagatgaac

SEQ ID NO: 995679 - DNA, 120 bp, Artificial Sequence
  ENSG00000272654_3 (sequence is synthesized)
ggtgttaccttccctcatgttactttgctaagcctactcctcagagctggtcctttgcataacctcttcaaatgctctcaactctcccttgctcctacataatggagtaatcataagtgc

SEQ ID NO: 995680 - DNA, 120 bp, Artificial Sequence
  ENSG00000272654_4 (sequence is synthesized)
aatgagaaaagcatgagatttgaagttccataagtattgagtctaggttctggtggttattaactccatgatcttaggaaagtatctgtcagtgttctgtgtaaaacggaaatgctaatg

SEQ ID NO: 995681 - DNA, 120 bp, Artificial Sequence
  ENSG00000272654_5 (sequence is synthesized)
agctaatgagtgggaaagctgaggcttgagcctagactgtcaacacccaggccaaagattcattgcctgcttttcatcttatggagttaaaccttgatacacactcagatctgcagtgac

SEQ ID NO: 995682 - DNA, 120 bp, Artificial Sequence
  ENSG00000272654_6 (sequence is synthesized)
ttgaccagcactgtgggttcatgctttactgtctgataacgaattttcatttaattttattttttttcttagacagggtctagctctgtcacctaaacctgatgagggctgagccttcat

SEQ ID NO: 995683 - DNA, 120 bp, Artificial Sequence
  ENSG00000272654_7 (sequence is synthesized)
ttcgccgttttttgtttgtttgtttttgtttttgaacgagatggactctggctatgttgccagactggagtgcagtggcaagtcacaggagccatcatagcgcattacagcctggaactt

SEQ ID NO: 995684 - DNA, 120 bp, Artificial Sequence
  ENSG00000272654_8 (sequence is synthesized)
tagctgggatttcaggcatgtgccaccatacctggctctaattttgaatttgtttctttaaattattatttgtgtttgctgaaattgtgtgtgtattatttttgtgtatgtgtgtgagta

SEQ ID NO: 995685 - DNA, 120 bp, Artificial Sequence
  ENSG00000272654_9 (sequence is synthesized)
tatttttgtgtatgtgtgtgagtagttatatgttacataaagtaggttgtggggttttttccagtaatgtttagctataattgaagtttgggccgaaatctgctagtatttgttactcct

SEQ ID NO: 995686 - DNA, 120 bp, Artificial Sequence
  ENSG00000272654_10 (sequence is synthesized)
caccaaatcctaccttatctcacaacaaactgtaagatcttgtgatatttcacttccaataaccttaccaggcatcagagtggggtctctactctgaaattaaatatctgccataaggta

SEQ ID NO: 995687 - DNA, 120 bp, Artificial Sequence
  ENSG00000249269_0 (sequence is synthesized)
gcctttactgctaacactttacagacgaggaaaccgaggcttataatgggaagtagcttgatgagagattttggggccctcatgcagaattctttgtgccttattctccagcaatggaac

SEQ ID NO: 995688 - DNA, 120 bp, Artificial Sequence
  ENSG00000249269_1 (sequence is synthesized)
ttcggcatctagagatttcaagattacatttgggaggcaagtccctaggacttgagacaagctgcagcattcacctgcaagtgtggcttgcaaatcagcagactttggagccattggaaa

SEQ ID NO: 995689 - DNA, 120 bp, Artificial Sequence
  ENSG00000249269_2 (sequence is synthesized)
aggctacttccagctacaaagtgaaaagatataagcagcgtgtgctgtagactgaggtagtatcttcgagttctgtcattggcacctatcagtggctgagatatcctgggttgaagtctg

SEQ ID NO: 995690 - DNA, 120 bp, Artificial Sequence
  ENSG00000249269_3 (sequence is synthesized)
agggctggatgacagtgtgtgaagtggctgaaacttacatcaaatgctttaataacaggtcagcaaaaaggccaatgggcttaacttttacattccaactggcacagctacaggagtggg

SEQ ID NO: 995691 - DNA, 120 bp, Artificial Sequence
  ENSG00000249269_4 (sequence is synthesized)
ctatttgccaaagacatcgaaccaagcctcggagaagtagaaacagctcaaccaggttcattcagcagagaatcgtggttaaaatatattaagcctggattcctcaaattctgttggtaa

SEQ ID NO: 995692 - DNA, 120 bp, Artificial Sequence
  ENSG00000249269_5 (sequence is synthesized)
agttaatcgggatagggtaacacttggcatccttatgctatgactggatctctcatgggaatgagatcttagctttaatttttagaatttaattaaagcttcacaagtataaatataaaa

SEQ ID NO: 995693 - DNA, 120 bp, Artificial Sequence
  ENSG00000286263_0 (sequence is synthesized)
acattagaagctctgcagaggcagatattcagagcttgttcatccccgtaccccaatgcccaggaacagtgcctgacacgtcctaagcacatgataaatatctgttgaattaaatcgaat

SEQ ID NO: 995694 - DNA, 120 bp, Artificial Sequence
  ENSG00000286263_1 (sequence is synthesized)
gttaggtgaatgctgaagaacgaagttggatctgctattgtcctcgcattctcatggatctaaaggcaccaggggcgtgatgagagcttagctgaaaggagagaagactcagcaagcaca

SEQ ID NO: 995695 - DNA, 120 bp, Artificial Sequence
  ENSG00000286263_2 (sequence is synthesized)
tcaccttgaagctgacctgtcagccagatttcgcagcacctgcctgttccagcctgaggggctgcgattcattccttgggaaagagagctgcaaattcccgctctaggccacagtccaaa

SEQ ID NO: 995696 - DNA, 120 bp, Artificial Sequence
  ENSG00000286263_3 (sequence is synthesized)
tccttgctcttctctctcaggttctggaagacagaatggaggcatctacagagcaaggacatgttttctacctgaattagcttttctgacaccttcaaaccatctctaagaaattgattt

SEQ ID NO: 995697 - DNA, 120 bp, Artificial Sequence
  ENSG00000286263_4 (sequence is synthesized)
tttaacatacacatatacaggtaaacatttaaatctgtgccataatgtatttgcacttcgagtccccctgaagtcctaagtcacatgcttctcttcctaggggttctgtctgaagcagag

SEQ ID NO: 995698 - DNA, 120 bp, Artificial Sequence
  ENSG00000286263_5 (sequence is synthesized)
acccctggattggagcagtgggaagaatcctgatgaatcaggtgttcctgcctgtttacattaactgggcaccctgcctgcccaccccacatgctgaatactgctggggagaagagaaga

SEQ ID NO: 995699 - DNA, 120 bp, Artificial Sequence
  ENSG00000286263_6 (sequence is synthesized)
aacatttattaaaggcaaggaaaaattagagccttttcattgaggtcagaagatttttgaggttggatcggctggccaggtgcatgaccaattttcttggctccttagaagcagcaaagt

SEQ ID NO: 995700 - DNA, 120 bp, Artificial Sequence
  ENSG00000286263_7 (sequence is synthesized)
atttgaaaaataatggagcccttcgtcctacaagtaaaagcccatttatattgggaattttttaaaaagtgctggcgatggaaaatttccgatgagatgcatttcttcctgcctgaatgt

SEQ ID NO: 995701 - DNA, 120 bp, Artificial Sequence
  ENSG00000286263_8 (sequence is synthesized)
cttgaatgcctgctggatttgtctccctgctaagacactcacacttgcaaatctgtgcttttcaaggtggggagatgaaaataaaaagtctgtgagatgtatttctgggaggcctgaaaa

SEQ ID NO: 995702 - DNA, 120 bp, Artificial Sequence
  ENSG00000286263_9 (sequence is synthesized)
caggaagcaaattggaaccacagcatgtggggcacggatgctggattctgggggatatttgcttatttggaaaggctgcaaacattccatcctacccactgctaggagctctgcactttg

SEQ ID NO: 995703 - DNA, 120 bp, Artificial Sequence
  ENSG00000286263_10 (sequence is synthesized)
ctaacgtcccatggaaaccaaggttctctttaggactcgacaggactgggttatttttctcagcttaaattgtttttatatggttatcctcagtactcttttctgttttgggatattttc

SEQ ID NO: 995704 - DNA, 120 bp, Artificial Sequence
  ENSG00000286263_11 (sequence is synthesized)
atactttttattttttaaaaaccccagaatatcttgattttgaaaaggtacattcacccaaataaagtgcccagcgcatagacaaggctgcctcaatatttcacgtgtcaacagccaatg

SEQ ID NO: 995705 - DNA, 120 bp, Artificial Sequence
  ENSG00000286263_12 (sequence is synthesized)
cccccagtacgtgcagaaaagcctgagaacaaggaaggaagaaaagggtctggtccttgctctgcgggtatttaagcatttctcagccccctcctctgacttctcaactatgttcaccta

SEQ ID NO: 995706 - DNA, 120 bp, Artificial Sequence
  ENSG00000286263_13 (sequence is synthesized)
tatggcctcgaatggagagaactggggttataaaagaggatattagctatgcctgctatagaatgaggaaggcatttcaggatgtgcttggggaggagatggaatgaatggcaaagggga

SEQ ID NO: 995707 - DNA, 120 bp, Artificial Sequence
  ENSG00000286263_14 (sequence is synthesized)
tgtttgtccgtgagggtggtctgtgatctgtgggtgggggatgtctgtgcagctcccttcatggcctctcatggcccacacagtaggcagtgtttgccacacacagaccctggacaaagt

SEQ ID NO: 995708 - DNA, 120 bp, Artificial Sequence
  ENSG00000286263_15 (sequence is synthesized)
tgttggtaccatttcataggaggggtcctaggggacattctaggaagttcttcatcagcttaggacggtgcagcctctgcagtcattaaacacagtctaccagccagagaagcccaaaag

SEQ ID NO: 995709 - DNA, 120 bp, Artificial Sequence
  ENSG00000286263_16 (sequence is synthesized)
ctgctgctcctgctgttctgcgtggtgtgggaaactacggcattggcacaactttgggagctctctttgatctcttgtttgtctgcatttcccatactcttccagtcaccaagtgtcatc

SEQ ID NO: 995710 - DNA, 120 bp, Artificial Sequence
  ENSG00000286263_17 (sequence is synthesized)
attcttccccaggttgtctctgtctcccttccttttctgtccccatgactcttacctgtatccaaaactatggcgtttaaggtgaaagagccagtctgtaggagctgcttcgaggaaagt

SEQ ID NO: 995711 - DNA, 120 bp, Artificial Sequence
  ENSG00000286263_18 (sequence is synthesized)
cttgcaagactgccttcttgaacttggtgctcaaactcccctctggcttcacaacctgcatagttgcctgggtcagaaacaggttcctcaggcaacttggtgttgcattaaccaagtgac

SEQ ID NO: 995712 - DNA, 120 bp, Artificial Sequence
  ENSG00000286263_19 (sequence is synthesized)
actgattgtcacttggaagacactcagtgactgactattagagatcatctgcctctcattttggggatgtgaaggttgagactcagagaggtcaggcaacatgtctgaggtcactgagcc

SEQ ID NO: 995713 - DNA, 120 bp, Artificial Sequence
  ENSG00000286263_20 (sequence is synthesized)
aactagcagcagccccagagttgtcacccagatttcccgactccctattcattccccaaaacctacccatggggaatgttctgccaggctgttctacatcaccagtagagagaagttgcc

SEQ ID NO: 995714 - DNA, 120 bp, Artificial Sequence
  ENSG00000286263_21 (sequence is synthesized)
ttgagtattcggtttggttttgaagttaacctattcagacacacttgagcatgcagtgagtcactgactggattcattcccagacctatggactcagcgcatcagctcaccaagcctcct

SEQ ID NO: 995715 - DNA, 120 bp, Artificial Sequence
  ENSG00000286263_22 (sequence is synthesized)
gcatactctgcttctacgctggacaactgtgcattttgagaagctggaggaaattgtttggcatagtgttctaggccagcagtcatgcgatactgagctaggcctggctcctataggctg

SEQ ID NO: 995716 - DNA, 120 bp, Artificial Sequence
  ENSG00000286263_23 (sequence is synthesized)
gtgaaagccaagtgttagctgttcaggatttttttgagttggttaactattgatagcttcaaagtcgccatggcaggggtatttataccatagaaattggtacatgttacaaattagggt

SEQ ID NO: 995717 - DNA, 120 bp, Artificial Sequence
  ENSG00000286263_24 (sequence is synthesized)
ttcatttttcaccatccagagatctgatttactaactcactactgattctgaggtaggaccccagcttaggaaggcactttcaggcaagactgttctgcggtaattaggaaatggagagt

SEQ ID NO: 995718 - DNA, 120 bp, Artificial Sequence
  ENSG00000286263_25 (sequence is synthesized)
ggccctgtcagatgcaaaggagaatatcaaatttggaaaaaagtactgcctattgcacaagaggtaagagtcactgagacatcttgcaccagacccaagtgagggatggaaggggccctg

SEQ ID NO: 995719 - DNA, 120 bp, Artificial Sequence
  ENSG00000286263_26 (sequence is synthesized)
atggtcatcttgggacagcttcttagggtcacccaggagcccaggagccaggtatgccactctgtggtgggacagaaacccctgtaaagagcaagcagacactcagtcacccaggaccct

SEQ ID NO: 995720 - DNA, 120 bp, Artificial Sequence
  ENSG00000286263_27 (sequence is synthesized)
ccccaacactcccattccctgcaatctatcagcacatcctatcaatcccgtctggagtagatatctgatcacgccttctctcccttgtgactgccatgacccaagtccaggttcctgcta

SEQ ID NO: 995721 - DNA, 120 bp, Artificial Sequence
  ENSG00000286263_28 (sequence is synthesized)
catccttcctaaaaggccttcccctgcaagcttgcctacctcacatcaactctccccacatagctgcaaaagtggacgtctgagaagaagggggaggaagaggagaagaaggaagagatg

SEQ ID NO: 995722 - DNA, 120 bp, Artificial Sequence
  ENSG00000286263_29 (sequence is synthesized)
aagaaggcgaagatgaagaaaaagaagaagaggaggaagaagaagaaggaggaagagggggaaaagaggaggagatgatgttatgtcatcccttcacccttcccctgcacacacacacac

SEQ ID NO: 995723 - DNA, 120 bp, Artificial Sequence
  ENSG00000249267_0 (sequence is synthesized)
cttcgtggagcctggcgactgctttgggaagtcctgctggcaggcactctgcccctgggggtgtgcaaagagttgtccagttaccttgatcttctcacagcctcctccccagggcaccag

SEQ ID NO: 995724 - DNA, 120 bp, Artificial Sequence
  ENSG00000249267_1 (sequence is synthesized)
gagagaccaggattggaggacggtaaagaacacacttcccagaggattcttggaggtggcttcctccaggcagtaaatctacagcccaggctccctgcatcttatggctccaatcacttt

SEQ ID NO: 995725 - DNA, 120 bp, Artificial Sequence
  ENSG00000249267_2 (sequence is synthesized)
ggatctcatcgtcgcctgcacattgccatacacagggaaggagaagagatggagaaggcaaagactttctgaaagccgtggctaaaagctggcatgtgtcacatcagctcacattccatt

SEQ ID NO: 995726 - DNA, 120 bp, Artificial Sequence
  ENSG00000249267_3 (sequence is synthesized)
caggcattcttgaggcaaacgggaaatggggtaagttacacaatcgatacagctccgtcatcgtggtttaattacttttccacgtaccatgtttcctgacaggtagaacgatcagcctgg

SEQ ID NO: 995727 - DNA, 120 bp, Artificial Sequence
  ENSG00000249267_4 (sequence is synthesized)
gcctccgtttttcattctacaaagaatgaagtgcatgaactgtcctctatagaattgtggaaaaagttgtttttattgagttgtggttatctttgtcttcatggtctaattacggaaata

SEQ ID NO: 995728 - DNA, 120 bp, Artificial Sequence
  ENSG00000249267_5 (sequence is synthesized)
aatgcttttccgagtctccggggatggtctgccctagtccagctctctgcagtgtctttctgggtttttcctcagtgaacgggaggaacattggcagcacttgtggtctgcaccaagaac

SEQ ID NO: 995729 - DNA, 120 bp, Artificial Sequence
  ENSG00000249267_6 (sequence is synthesized)
tgaatcgaatttccatgtgttattgaatgttcacaaagaccttgtacagcgagtgttactacctctggtcaatgattcaactcaaggctcagaaaagtcaagtgtcttgtccagggacac

SEQ ID NO: 995730 - DNA, 120 bp, Artificial Sequence
  ENSG00000249267_7 (sequence is synthesized)
actctgaatttcacagccttttgctacatatggcgaataatatatccctgagcactaaaggcagactccaaggatcttgtctctgcaatcatcattctggccataatttatgaaaagcaa

SEQ ID NO: 995731 - DNA, 120 bp, Artificial Sequence
  ENSG00000249267_8 (sequence is synthesized)
cccaaagtatgtgatgtaataaaaagtactatctatgagtttacccttccaaaaattgaactgaattctgagctctaaatttggaatcaaaagaacttttctctgcactaatcatttgga

SEQ ID NO: 995732 - DNA, 120 bp, Artificial Sequence
  ENSG00000249267_9 (sequence is synthesized)
acatcacttaaagaaaacaacgaaaaactggtgtcccctgagagaaagcaatacaaaacattatgcataaagaaatccttccaaaaaataaaccaaatccagtcaaatctctagttttga

SEQ ID NO: 995733 - DNA, 120 bp, Artificial Sequence
  ENSG00000249267_10 (sequence is synthesized)
ctcctagcttaccggaaatacgtgatgggaaaaaaatgaaatgacaccactatgattcaatcagccaaatccagcatatgcaaatttctaccagataaatggtttagtttcttccccaaa

SEQ ID NO: 995734 - DNA, 120 bp, Artificial Sequence
  ENSG00000249267_11 (sequence is synthesized)
caaatggcacaaggaaacggagatggagttcccctctgccacccagactggagtacagtggcgcgatcctggccatcgcaacctccgcctcccagatccctcctacaacacatgagaatt

SEQ ID NO: 995735 - DNA, 120 bp, Artificial Sequence
  ENSG00000249267_12 (sequence is synthesized)
attcaagatgagatttgagtggggacaaagtcaaaccatatcattagataggacactggagaaaggcaagaaagaaaagacatctgaagaatgaagggagccaaagaaatgccaacattt

SEQ ID NO: 995736 - DNA, 120 bp, Artificial Sequence
  ENSG00000249267_13 (sequence is synthesized)
atgccaacattttgctttttgaagaaaagctaaattaaagtcaaaatggatttatcaatttccttgggttcgtgaatgtacagaactttattaagactgtcatgctgtcatcatggctgg

SEQ ID NO: 995737 - DNA, 120 bp, Artificial Sequence
  ENSG00000249267_14 (sequence is synthesized)
atctgatacggccaccgtggaccttgaggtgacctcgggaatggagacagtgcatgggagagaatcacattggaaggggcctgggtttctgaagaccctgtaagacagatctccttgcag

SEQ ID NO: 995738 - DNA, 120 bp, Artificial Sequence
  ENSG00000249267_15 (sequence is synthesized)
ccctgactgcccacattagggcttttatgttagggtgaagttaccttgcattgtcatataagcaattgctatttgtggtgtcttgcaaataaacctattctgatctagtatgtttcctaa

SEQ ID NO: 995739 - DNA, 120 bp, Artificial Sequence
  ENSG00000249267_16 (sequence is synthesized)
acaggcgtgagccaccgctcccggcctggcaggcattcttgaggcaaacgggaaatgggtgaacgggaggaacattggcagcacttgtggtctgcaccaagaactgaatcgaatttccat

SEQ ID NO: 995740 - DNA, 120 bp, Artificial Sequence
  ENSG00000249267_17 (sequence is synthesized)
aactcctgacctcaggtgatccacccacactttttattgtttgcctacactttctagacttgcttcatcagcctactccgtttctggttgatatggtttggttgtgtccccactcaaatc

SEQ ID NO: 995741 - DNA, 120 bp, Artificial Sequence
  ENSG00000249267_18 (sequence is synthesized)
tttctggttgatatggtttggttgtgtccccactcaaatcttatctagaagtgtaatccccaagtctcaagggagggacctggtgtgaggtgattggattggggggtggttcccgccatg

SEQ ID NO: 995742 - DNA, 68 bp, Artificial Sequence
  ENSG00000249267_19 (sequence is synthesized)
tcagccatgcacgtatctttatagcagtatgagaatggactaatacactggtctatccttcatccaaa

SEQ ID NO: 995743 - DNA, 120 bp, Artificial Sequence
  ENSG00000249267_20 (sequence is synthesized)
atgagaatggactaatacactggtctatccttcatccaaattaactacctgcactgcagtccttgtctcaggctctgctttgagggaccccaactgtgacagccgcattagaatgcatca

SEQ ID NO: 995744 - DNA, 120 bp, Artificial Sequence
  ENSG00000249267_21 (sequence is synthesized)
agccgcattagaatgcatcacatactgcagtgaaattctagagtgggtgttgtcaggtggtgatgattgttagatatgtcagtctgttttcaggctgctgataaagacatacctgagact

SEQ ID NO: 995745 - DNA, 88 bp, Artificial Sequence
  ENSG00000249267_22 (sequence is synthesized)
gcttacagggtggcagcaagagaggaaatgagaaccaagtgaaaaggtttctgcttataaaaccatcagctcttgtgagacttattca

SEQ ID NO: 995746 - DNA, 120 bp, Artificial Sequence
  ENSG00000249267_23 (sequence is synthesized)
ggtggcagcaagagaggaaatgagaaccaagtgaaaaggtttctgcttataaaaccatcagctcttgtgagacttattcattacaatgagaacaatatgggggaaactgcccccatgatt

SEQ ID NO: 995747 - DNA, 120 bp, Artificial Sequence
  ENSG00000249267_24 (sequence is synthesized)
ccaacattatttttgtgcagatttcaattcatgctgcactcatcctgggggcaaaagttaaaggttttctaaaaagctacttagtgaatgtcttagttaatggaaaagaaaataagtcaa

SEQ ID NO: 995748 - DNA, 120 bp, Artificial Sequence
  ENSG00000249267_25 (sequence is synthesized)
tccttttttttctaaccttgaagttgcaaagattgacaatgaactctgtaatggtgcattctcctcttgtgtggtttttgaaagctgagttatccttcctgtaatgattctgcacctgca

SEQ ID NO: 995749 - DNA, 120 bp, Artificial Sequence
  ENSG00000249267_26 (sequence is synthesized)
aaaagatttaagaaagtataaactaaatacactatgtgcatcctctctgaacgtgcttcaaacatatcaaggggtcaatgagcagttttgaaacaataagggaatttgaacactgaatgg

SEQ ID NO: 995750 - DNA, 120 bp, Artificial Sequence
  ENSG00000249267_27 (sequence is synthesized)
atggttgtcagaagatagtaagagatcattattaattttactagacataatgatgttctgattttgttttttttttaaaaaaaaaacagtgttatttcctttatagatacatcatatagt

SEQ ID NO: 995751 - DNA, 120 bp, Artificial Sequence
  ENSG00000249267_28 (sequence is synthesized)
actaatgaaatgctttgatatctggaacgtttaaaaaatattcccgatggagtaagtgcaaagaaacaggtaagcaaaatgctgataattgctgaaacacaggatgtgtacctggggctt

SEQ ID NO: 995752 - DNA, 120 bp, Artificial Sequence
  ENSG00000249267_29 (sequence is synthesized)
catttactatctcttcattttctattttgatatttgttggacattctcataaaaaggaaagttatgttttattttctcataagctagtaatgaaatagccctacgtaactgatattgtag

SEQ ID NO: 995753 - DNA, 120 bp, Artificial Sequence
  ENSG00000249267_30 (sequence is synthesized)
agacaagaataggtgtaatagagcttaaggttttcatttaaaaaactatctgtagacttcaatggatcttaggtggcatccatgcaataacactcgtggaacatgcaggacaggtgtgga

SEQ ID NO: 995754 - DNA, 120 bp, Artificial Sequence
  ENSG00000249267_31 (sequence is synthesized)
gctccatcttcacacagtgacattttttatgcttctgttttccctaagagtggagtgagaggatgattattttatatcatggacttcttccctgctatactttttttaattattttactt

SEQ ID NO: 995755 - DNA, 120 bp, Artificial Sequence
  ENSG00000249267_32 (sequence is synthesized)
ttcttccctgctatactttttttaattattttactttcacttctgggatacatgtgctgagcatgcaggcttgtttacataggtatacatctgccatggtggtttgctgcacctatcaac

SEQ ID NO: 995756 - DNA, 120 bp, Artificial Sequence
  ENSG00000249267_33 (sequence is synthesized)
ccatcatacaggttttaagccctgcatgcattaggtattcgccctaatgctctccctcgcctttccccccaccccctgatagcccccagtgagtcatattcccctccctgtgtccatgtg

SEQ ID NO: 995757 - DNA, 120 bp, Artificial Sequence
  ENSG00000249267_34 (sequence is synthesized)
gttggccacataaatgtcttcttttgacttttatgtggaaacaaatttaactgcacagagaggtgaaaattaattaataacttttaaagtaattccctaagtttctaaggatctatatgt

SEQ ID NO: 995758 - DNA, 120 bp, Artificial Sequence
  ENSG00000249267_35 (sequence is synthesized)
atgtttccatctgactttattttatttaagctcttgattgatgctgcatttggagcaggttcatgaacatgaatagagttaatctgggacagatttccctcatttgattttttcactgtt

SEQ ID NO: 995759 - DNA, 120 bp, Artificial Sequence
  ENSG00000249267_36 (sequence is synthesized)
tccatcacagaacttatttcatgctcaccatgtttgcaggcattgagcttggtactggagccacagagctggatcagacagacttgtgcaaatatttcaggttttttttgtgggggggtc

SEQ ID NO: 995760 - DNA, 120 bp, Artificial Sequence
  ENSG00000249267_37 (sequence is synthesized)
atatttatagataaataacagtaaagagtgacgggttcttatgaaaatgcatacacagtgaagtagagggtgaaaaggagggatgtgttctatgaggaggaagagtgataagaaagtgta

SEQ ID NO: 995761 - DNA, 120 bp, Artificial Sequence
  ENSG00000249267_38 (sequence is synthesized)
aggggatgtgtctgtgtctagacatatgtgtgttcacgtgtgtgcgtgcttgtgtgtactgcatgtgtatatgtgtggccatgcacctgtgtgcatgttcatgtgtgtgtgtgtatgtgt

SEQ ID NO: 995762 - DNA, 120 bp, Artificial Sequence
  ENSG00000249267_39 (sequence is synthesized)
ctgtgttgaggactaaattaattgggcttatggaagcagggagccactgataggtttaattagagactgacatgatatgatagtttaggtggatttctctgggggctgtgttgagggaca

SEQ ID NO: 995763 - DNA, 120 bp, Artificial Sequence
  ENSG00000249267_40 (sequence is synthesized)
gtggggaggagagctagaaggaagaaaaggacacatgcataacagaagcaatatctgtctatgggatggtggaaagaatcagaaaagacttaataaaacatgtgacactttaactgaatc

SEQ ID NO: 995764 - DNA, 120 bp, Artificial Sequence
  ENSG00000249267_41 (sequence is synthesized)
ttgaaatagacaagtgttggaggagggagttggaccagatacttcatgcaaagggaagaaaagtgcacaaacaaaatatgagaaacaaggcagacaggcatttttttaaaattttcgcac

SEQ ID NO: 995765 - DNA, 120 bp, Artificial Sequence
  ENSG00000249267_42 (sequence is synthesized)
ccactgatagaccagtgatgcattcacatcgtctgcattcatgatcaacaaaagtgctttcctagaacatgaacctcaacccaagtgtcgcctcaagtagtgtatgcatgaactcaagca

SEQ ID NO: 995766 - DNA, 120 bp, Artificial Sequence
  ENSG00000249267_43 (sequence is synthesized)
ttaaattagaattgattttttaaaaaactcacacaaacagatgtattatttaaaaatctttaaagcaggtttaaacagttttcaggattaaaagcagccactattagaaagaacaaaaat

SEQ ID NO: 995767 - DNA, 120 bp, Artificial Sequence
  ENSG00000249267_44 (sequence is synthesized)
acatttgacataaatataaggagcctcaatagaacctcctgtacccagtcattgtcaatgccacatccattcattcaccagcccttatatcaatgcttgctgggctcacttaccacgatc

SEQ ID NO: 995768 - DNA, 120 bp, Artificial Sequence
  ENSG00000249267_45 (sequence is synthesized)
agcacgtgcatgtccttatctgaaagcttgccactcaaatgtgctcagtcttacctgtgtggctgggagtgttggggatttaatgtcaagggaaagaatcttccatcaatgaatgatgaa

SEQ ID NO: 995769 - DNA, 120 bp, Artificial Sequence
  ENSG00000249267_46 (sequence is synthesized)
agttagttttcacaacttccggtccccttggccctcatcaaagggctccaggtgaggtttgggctccttgctatcctccgagtttccacggtagttttaagcaccattgcccgtggtaat

SEQ ID NO: 995770 - DNA, 120 bp, Artificial Sequence
  ENSG00000249267_47 (sequence is synthesized)
agaagcctgtggggccgagatgcccggacctgcccggcccgaactaggcaaagtccagcgaatagcctcctccccagggcaccaggagagaccaggattggaggacggtaaagaacacac

SEQ ID NO: 995771 - DNA, 120 bp, Artificial Sequence
  ENSG00000249267_48 (sequence is synthesized)
ttcccagaggattcttggagcaaaatattacacaaggtccagggcaaggcaggatggccacctcgctcactcatcacagctgtcctctgacctgagcagggccgttctgtctcagacctg

SEQ ID NO: 995772 - DNA, 120 bp, Artificial Sequence
  ENSG00000249267_49 (sequence is synthesized)
gagaccccgcactcagggcgttcaggaactccccgacccaccaggagcctctcctggtgtctcccagggattgtcaatagttccattttccttgaagaacttgttttcaggtggcttcct

SEQ ID NO: 995773 - DNA, 120 bp, Artificial Sequence
  ENSG00000286260_0 (sequence is synthesized)
gaaaccgtttttctgactgatatttaagtctgtgaggaaaggctttgctgtgtttcctctgcagagaaagtgcccaggtaacagagatgactcaaaatcatgtacattagcagtcagatc

SEQ ID NO: 995774 - DNA, 120 bp, Artificial Sequence
  ENSG00000286260_1 (sequence is synthesized)
agacaaaccaaagcctcacggtgtgcccacgtcggaactccttctcctagcatttttctgggtcagcctggattgagacacactggcctttagaacttgaataaaatgccgtttcactca

SEQ ID NO: 995775 - DNA, 120 bp, Artificial Sequence
  ENSG00000286260_2 (sequence is synthesized)
ttgccatcttcgatagttggtagaaggtgattgcagttccaagtggtgtcaccattttagtgagtgcattgtgaagggataagtaagcagagatgcaaaacctcttccacttcttttcca

SEQ ID NO: 995776 - DNA, 120 bp, Artificial Sequence
  ENSG00000286260_3 (sequence is synthesized)
aagaaatgatcaccatagaggaaacaaaatcagagaggataggaaacctgtccaaagtcatatggctgataagaggcagagtgaagactggacctgagcaagtttggtgtagaagcctgt

SEQ ID NO: 995777 - DNA, 120 bp, Artificial Sequence
  ENSG00000286260_4 (sequence is synthesized)
gctcttaactgccatcctagattctttcttaagacttcttctgaggaactgaagacacattttgtagaagttgatggattaagaaaaagaagttgcattttattacctatcctaaagata

SEQ ID NO: 995778 - DNA, 120 bp, Artificial Sequence
  ENSG00000286260_5 (sequence is synthesized)
gaaggtgatctgaacattctaatatcacttgccaagactgttggagcatggggaagagaggttcctcgcatgactgacagcttagaagccagaggtcaagggagcctatcgatcaatgca

SEQ ID NO: 995779 - DNA, 120 bp, Artificial Sequence
  ENSG00000286260_6 (sequence is synthesized)
ctccacgcaaatatgtcccaggagcaggatagaacaaggtgtaaaagggtgggactctatctagaggggcaaaatgaagatatcgaacacattgacatgaataaaatatgtacaatgtca

SEQ ID NO: 995780 - DNA, 120 bp, Artificial Sequence
  ENSG00000249261_0 (sequence is synthesized)
tcagtttacctcattcaaccttcactgcaatcaaggaggaagctttatcatccctatctgacagaactgaggacatggctgaaggagattaaaagcacatttggaaataccgctttagat

SEQ ID NO: 995781 - DNA, 120 bp, Artificial Sequence
  ENSG00000249261_1 (sequence is synthesized)
actctacaagttaaccttggaataaaccagactatcagagggcattgtcactcactgacggatttctttcattcctctctgctttggcattaggcagtcagccacatcaagagacttcat

SEQ ID NO: 995782 - DNA, 120 bp, Artificial Sequence
  ENSG00000249261_2 (sequence is synthesized)
aagaaacagccctgtaactcatttgttgctttcctgtaagaatgttgtcaaggacattatttacttcattacaaagggtcttctttgtgctggagaaacttctctcagatctctgtgcca

SEQ ID NO: 995783 - DNA, 120 bp, Artificial Sequence
  ENSG00000249261_3 (sequence is synthesized)
acttcatttttttcatcttccaacttctccataataatatttacttttaaaaatgttcttaacaatgaatatgaccaagacaatttgaggaaaccaatcataaactttgtgtcaatatag

SEQ ID NO: 995784 - DNA, 120 bp, Artificial Sequence
  ENSG00000249261_4 (sequence is synthesized)
taagcatgtttcctgcagggagataccactgttcccactaaaatagaacacaacaaaaggaggcaggagagaaatgaatgacttaggacctgtctaggttgaaaaggcaaactagaagtg

SEQ ID NO: 995785 - DNA, 120 bp, Artificial Sequence
  ENSG00000249261_5 (sequence is synthesized)
gggcacacctaacttgtttaaaaagactttgtcaactattatttgtgtactcttggcatttctgtgttctcctcattcctatttcattcctattcccctttaatatttcctttacatacc

SEQ ID NO: 995786 - DNA, 120 bp, Artificial Sequence
  ENSG00000249261_6 (sequence is synthesized)
tgataccttccctcccaaaaatggtgtgtgtctatgtagttccttgatgattttgtcaacgaataataaaccctgggttttggataaggaggtgaaaagaaagggctctgcttgattctg

SEQ ID NO: 995787 - DNA, 120 bp, Artificial Sequence
  ENSG00000265888_0 (sequence is synthesized)
gcaccctgctccccggcgcgtacccaggggccacgattttggctgggcgaaagcggcccgctcccgcctctccttgagtgcgctgattacatctaccggagacaccttcccttcccttgg

SEQ ID NO: 995788 - DNA, 120 bp, Artificial Sequence
  ENSG00000265888_1 (sequence is synthesized)
ggatcccaactctcagctcttcagaaagcaatgacaaggcatctgactcatcctcctgcacctcttttcaattactgacttaaaccagattacagttgctgtcaggcttgaagactgaga

SEQ ID NO: 995789 - DNA, 120 bp, Artificial Sequence
  ENSG00000265888_2 (sequence is synthesized)
ctgcttacagaagatgctccctggggcagcagaggccagagccatcagaagcagtcccaatggccagggacggtggccagataacagggcagcctgggatgcacagagcggctaagaaga

SEQ ID NO: 995790 - DNA, 120 bp, Artificial Sequence
  ENSG00000265888_3 (sequence is synthesized)
cgctggcacttgcacagggtattctgctgccaccttgatgcagctgagcttggtttggaagacagtccggaggcaagtgataaacagtaggaggagcaacgggagaatttctttccccct

SEQ ID NO: 995791 - DNA, 120 bp, Artificial Sequence
  ENSG00000265888_4 (sequence is synthesized)
ttcctgccgatcgctgcagcaacctactgagccggccagagaacctttgccttcatagttatacgaacaaacgtagtcttcacaatgtttatgctcctcatcttgtccacacaaatacac

SEQ ID NO: 995792 - DNA, 120 bp, Artificial Sequence
  ENSG00000265888_5 (sequence is synthesized)
tgtcctctaatggattcctatatataaaaaatgcacaggattggtctgtattatagtcactcttaaaatatagcaaataaataaatgcttctagtgagcacatttaaaaaattaagacta

SEQ ID NO: 995793 - DNA, 120 bp, Artificial Sequence
  ENSG00000265888_6 (sequence is synthesized)
cgcatatatcacgcaacacatttataatttcccatttgaacacaaaacatgtatatttgaaatttacctttgtagcttcttcacgtatttgaggaaaaccaatataggctatgattccta

SEQ ID NO: 995794 - DNA, 120 bp, Artificial Sequence
  ENSG00000265888_7 (sequence is synthesized)
tgtttatacactactatataactgtgatagtgtaatatattaaactggctaatatcaaacctatactgattaatctgaacataaaacaaaacaaggaactaaaactcaaaataaaagctc

SEQ ID NO: 995795 - DNA, 120 bp, Artificial Sequence
  ENSG00000265888_8 (sequence is synthesized)
aacaatttatctggttgattttgatagccaggacttcataaccacacaaagaactcaagcacactgagaaatgtttataatttatgatccattcattcctgtataataaatatttcactc

SEQ ID NO: 995796 - DNA, 120 bp, Artificial Sequence
  ENSG00000241456_0 (sequence is synthesized)
acacaaatgctcgctgttcagggcaggctgcccaagtcaccccttcctggtgtccccagacctgggctactaagtcctgggggtccggaaggcagggttagtcccaggtaaccacaggga

SEQ ID NO: 995797 - DNA, 120 bp, Artificial Sequence
  ENSG00000241456_1 (sequence is synthesized)
cgctccagggatccctgctgaaggacaaggaccttctcctcctcctcctcttcctcctcctgcatctcagcctccccagcagccacagccaagagccctgccaagccgatgggacccacg

SEQ ID NO: 995798 - DNA, 120 bp, Artificial Sequence
  ENSG00000241456_2 (sequence is synthesized)
gggagttcagacatcgtgtcttatagctacgtggcactcacaggttgtccttgtcccgaaacaaaacaaagtgaagcaataacaacccgccagactcatttcctgctgtggaacctaaaa

SEQ ID NO: 995799 - DNA, 120 bp, Artificial Sequence
  ENSG00000241456_3 (sequence is synthesized)
tctcaaccatttagtaactctttgggtttcaagaactgtggccctagaagggtcctgccagagtgcagtgatgttccccatcactatggtcgcttgtgcctcaccagtgtctccagttcg

SEQ ID NO: 995800 - DNA, 120 bp, Artificial Sequence
  ENSG00000241457_0 (sequence is synthesized)
aagcaagagggagaataacaaatcactcatgctctcaaagcccatacttacaaagagaaaacaggcaccgatcattgctgctttgactgttacatctagatctgcaggaacatgaattcc

SEQ ID NO: 995801 - DNA, 120 bp, Artificial Sequence
  ENSG00000241457_1 (sequence is synthesized)
ttaaggctcagccaccacaagatggcagcaggtacatagttcaattgtatcatctaagcatgaaggcgatttctttacttgaggtccagattttaaacctgaattctccatcttaaaaat

SEQ ID NO: 995802 - DNA, 120 bp, Artificial Sequence
  ENSG00000241457_2 (sequence is synthesized)
gaattctccatcttaaaaatgtaaaagaagatatgtttgaaaaaatatttcagaaggaattaaattaatttctaggcataatttgtaaactttcaaatttcagttgctaaaattttataa

SEQ ID NO: 995803 - DNA, 120 bp, Artificial Sequence
  ENSG00000233363_0 (sequence is synthesized)
gttccttccccttcccagcccgcagctcctgggagagaagcagaaatccagtcccctcgactccctggtctcgcctggaacttagctctcacctgggactcagctcccagagtgaaaggg

SEQ ID NO: 995804 - DNA, 120 bp, Artificial Sequence
  ENSG00000233363_1 (sequence is synthesized)
attgtcctgtagcgtgaactgtgagtgacacccacaccctcccttgtaaatctgctccaacaagctctcctccaggacgctgtcttttctgtgctatcgagcacagccctgacattatag

SEQ ID NO: 995805 - DNA, 120 bp, Artificial Sequence
  ENSG00000233363_2 (sequence is synthesized)
ctggccttgcagacaccaccagacgacacccaagaaaaatggcagcgccagagccgtgagcatcacaggaggtctcagggacacgccaaggccgcctcccaggaaaaagcagaacaccgg

SEQ ID NO: 995806 - DNA, 120 bp, Artificial Sequence
  ENSG00000233363_3 (sequence is synthesized)
aaaagaccttgtgaagacttcttatcttcccctccaaatggtgtctcttgctttggctctcgtcgagttggggcttgttggaagaccaggtgaaggcccagctgctaaagcttccccttt

SEQ ID NO: 995807 - DNA, 120 bp, Artificial Sequence
  ENSG00000233363_4 (sequence is synthesized)
ctacttcttgttactctattactcaattaggactggtgctgctttaggggaaaaacattatttgaaaacacagaggttccctctgctttgatcctacacaggcagagatatctccaagca

SEQ ID NO: 995808 - DNA, 120 bp, Artificial Sequence
  ENSG00000233363_5 (sequence is synthesized)
gagagatccaaaaaagagcgccccctgcgggaaacgttcttttaatttagactttgccgctcctcctgtggagacgttgtcacagttacggtagtgggtgatagatccccaaatttctgc

SEQ ID NO: 995809 - DNA, 120 bp, Artificial Sequence
  ENSG00000233363_6 (sequence is synthesized)
cacgtgctcagagagctaaggcatatcccacacccacgacatgcttacaggtgtgaacctgggtccaggcaggtgccctgttcctaactctggtcttggacgtgtgatttaagccaggcc

SEQ ID NO: 995810 - DNA, 120 bp, Artificial Sequence
  ENSG00000233363_7 (sequence is synthesized)
tcagtttccttgctcacagatgtggatcccaggagctgcctcaaatacttggaggcatgaatggttctaaatcacgcatgccatgcctgacacattaaccccccattctcttcactgtgc

SEQ ID NO: 995811 - DNA, 120 bp, Artificial Sequence
  ENSG00000233363_8 (sequence is synthesized)
agggtgaaacaacagacagcaacccagcctgggcagcacatgtcctgcacctgggctgtgcagatactgagagctccctccctggagtggaaattcctgcagcatgcatgcagaaaggag

SEQ ID NO: 995812 - DNA, 120 bp, Artificial Sequence
  ENSG00000233363_9 (sequence is synthesized)
atggccaggaagtcccaggaagatgtagaaagtagaaagggaggcaagagcgaggagttctcatttgggagaaaggctcaccagtgaggcaggaagggacctttggaaacatgtgagaac

SEQ ID NO: 995813 - DNA, 120 bp, Artificial Sequence
  ENSG00000233363_10 (sequence is synthesized)
ctacgtgcatgggtcctcaccaacttactctcagcagcgaggcctgccaacaagaaggcataggctcaccagctgcacacggctaatgctcacccagcaccaccctgcctgtccgtgcat

SEQ ID NO: 995814 - DNA, 120 bp, Artificial Sequence
  ENSG00000233363_11 (sequence is synthesized)
ctgccgtgcacgtcagaggtcaactacacgtcccagtggtacccatatggggacagtgctggtcccagagaacgacactgatataagacccagagactggaaatctgccactccacactc

SEQ ID NO: 995815 - DNA, 120 bp, Artificial Sequence
  ENSG00000233363_12 (sequence is synthesized)
agctctgaacatgcctcccagccatgcctcttcttcacaactgtgagatcgccgcaaacataattcagcacacagagcccgaatccttatttccagataacatgagcagaaacatgcagc

SEQ ID NO: 995816 - DNA, 120 bp, Artificial Sequence
  ENSG00000233363_13 (sequence is synthesized)
tctccctgcgccgaaccaagtcccattgactatatcacaccacaccaaatcacacagacatggaaaactccaccagggccagcactcttccctaagaactcaactgcctgcatgcaacag

SEQ ID NO: 995817 - DNA, 120 bp, Artificial Sequence
  ENSG00000233363_14 (sequence is synthesized)
tgctaactttcccttgaacaatccgacagagccgcgtgttgatgggaacgtcccctgacctttcaatcaatgtttatgaatttgtatcgcaaagcatcccgggaaactgtgcatgctaac

SEQ ID NO: 995818 - DNA, 120 bp, Artificial Sequence
  ENSG00000233363_15 (sequence is synthesized)
tggcccgaggatgatctcgcatctattatgaagcaaatggcccattcctcaaggaggagttctcccggggataccgtctgtctagctaggattcaatatacatattttgtatacctgtat

SEQ ID NO: 995819 - DNA, 120 bp, Artificial Sequence
  ENSG00000233363_16 (sequence is synthesized)
tttatatagataatttctaatcattttaattgttcaacatttttaccccagagcctcccttttcagacttagaaattgctgcagaaaacctcattcttttatgctagcaggaattaaagg

SEQ ID NO: 995820 - DNA, 120 bp, Artificial Sequence
  ENSG00000233363_17 (sequence is synthesized)
aaacacccttggcccaaacatgaaaggaactttaataggaaacacactgtaaggggcacacacgggactcagggtgggaaggaagcacggcgggatccccctacccacacccacaccaca

SEQ ID NO: 995821 - DNA, 120 bp, Artificial Sequence
  ENSG00000233363_18 (sequence is synthesized)
cgtgccacacagccatgctgtggctcatcccagggttccgccaatcagccaaagcgcctccctgcctcacgcctgcatttactaacttcagaagacaggactaccaagtggaaagaagtt

SEQ ID NO: 995822 - DNA, 120 bp, Artificial Sequence
  ENSG00000233363_19 (sequence is synthesized)
gagaatgccaactgatgggcgcagacggagaaatgaaattagaagattgccatctgacaaccattgtaataatacttgactcgggtaagaatcatcaatgcatgcccaaactaggaggtg

SEQ ID NO: 995823 - DNA, 120 bp, Artificial Sequence
  ENSG00000233363_20 (sequence is synthesized)
aaaatttgatgagtcaaaagatatgaatatagtccgaaaaaatcgccccacaattacttgttcatttcaaaggaaatagagcaacctacggtgggaaaaccttacagatgccaccttaaa

SEQ ID NO: 995824 - DNA, 120 bp, Artificial Sequence
  ENSG00000233363_21 (sequence is synthesized)
caagagatcaaaatgaccatcgccagcaggacacactgatatcacgtgcctcttgataggatgcatggcaaggacaaaacatcacttctctaggattctggccaaaattctaattatgag

SEQ ID NO: 995825 - DNA, 120 bp, Artificial Sequence
  ENSG00000233363_22 (sequence is synthesized)
gaaacatcaaacaaatcatagtgatgggcactgtacagaaaacctgttctgttctgaaaaatgtaaaggccataacaggcaaagaaagagggaagaaatattctagttgaaaggaaatta

SEQ ID NO: 995826 - DNA, 120 bp, Artificial Sequence
  ENSG00000233363_23 (sequence is synthesized)
aggagacagagcaactacacacactggaggcctgggtggatcccagaccaaggtggcagtggtccacagtgtgccagggagcaggtgaaactggaatgttgatgccaggttagacgccga

SEQ ID NO: 995827 - DNA, 120 bp, Artificial Sequence
  ENSG00000233363_24 (sequence is synthesized)
tactgtgccaactgtgaatgtcctgattctggtcacggtcctgtgcctctgtaagaaaatgctctttttattggtaaatacagaaagagagaaaataataaagtaagtggagcaaaatgt

SEQ ID NO: 995828 - DNA, 120 bp, Artificial Sequence
  ENSG00000233367_0 (sequence is synthesized)
aactctaaaaagaatcctttttaagccattttgtccgttggatactctgggaaacagacgacaagatgaaggtaacacctatgaaagacagggaaagaaaggagaactaggcagtaaaag

SEQ ID NO: 995829 - DNA, 120 bp, Artificial Sequence
  ENSG00000233367_1 (sequence is synthesized)
cccttagaccatgatgctggtctatcattttgaaagaaggaaggggcaggaaaagcctgagtgctgttcaactctgacaacatcttggccagtctaatggacggggactctctgtgatgc

SEQ ID NO: 995830 - DNA, 120 bp, Artificial Sequence
  ENSG00000233367_2 (sequence is synthesized)
ctgtggagctccagagaccacgaaagataacactcattgccatagctacttgtcagcgcataagaaagtgaacacacagctggtaccaatgaccttccttttctgtttccaagttaatgg

SEQ ID NO: 995831 - DNA, 120 bp, Artificial Sequence
  ENSG00000233367_3 (sequence is synthesized)
ctggcaccaaaggtctattcctctaccctactggtttatcactgggctgaagaaacccaagtagtgaattacccactaggaccctggaagaggaagtacaacggttatcctcagttttcc

SEQ ID NO: 995832 - DNA, 120 bp, Artificial Sequence
  ENSG00000233367_4 (sequence is synthesized)
ctggaatctggaatgagcttcctagtttactgaaagtctactttgttgccttgaatttaacccaatcccatatgtgataattattttagcatatttgataataaagattttaggagtgtt

SEQ ID NO: 995833 - DNA, 120 bp, Artificial Sequence
  ENSG00000258958_0 (sequence is synthesized)
atttaaagtctggctgatgaagactatcagaagaaagaaatcaggaaatggtggcaagagttttcttttctacccccttgaaaagacatggttaaaagactgatgtctgttaaaaaatgg

SEQ ID NO: 995834 - DNA, 120 bp, Artificial Sequence
  ENSG00000258958_1 (sequence is synthesized)
tggagatgaataaatacagtgcctcagctatatggagcttatgctatgagctggtatgtgagcttggattcaagcctaagtcactgactccatgattcatgctcattactgatgctggag

SEQ ID NO: 995835 - DNA, 120 bp, Artificial Sequence
  ENSG00000258958_2 (sequence is synthesized)
agaaaaaagaaatggattctgcagctcattgctcattgtcttaaagagggagtggtattccttgtttttgtttttaatgaaatggttttttaaaataaaatataattttctcattttcat

SEQ ID NO: 995836 - DNA, 70 bp, Artificial Sequence
  ENSG00000258952_0 (sequence is synthesized)
aagtagaaatatggtaaggggccagtattgtcattctgcctttcagttcttccataaaagttttgtgtgc

SEQ ID NO: 995837 - DNA, 120 bp, Artificial Sequence
  ENSG00000258952_1 (sequence is synthesized)
cagagagaggaatcaggagatatactgtatgtaaaataatcctcctggtcctcttcatgaagattttgtctgtttatttttaaaatagccattggttccagattcccagagctgattttc

SEQ ID NO: 995838 - DNA, 120 bp, Artificial Sequence
  ENSG00000258952_2 (sequence is synthesized)
ttagattagctatttgtactcagaggtagagccctgagcaatattattcttcaattaaaatcaagaacttgactttaggaggaagcatgttatgtttatataacatctgcaatgcataga

SEQ ID NO: 995839 - DNA, 120 bp, Artificial Sequence
  ENSG00000258952_3 (sequence is synthesized)
aaatattcaccacacatatctgaagacaaagcttcaattgtttaaatgttcttttcacttcatagatactaaggcatgttgatcttctatcgagcttaattttttaaaaagcttgttacc

SEQ ID NO: 995840 - DNA, 120 bp, Artificial Sequence
  ENSG00000258952_4 (sequence is synthesized)
tactttcatctccaaggcattttaaataaatacagagctaatgctgtcttccttgtaactacctccttgatttaaaggtaaaattaccttttgtaaagtattgcaggctgccatctcacc

SEQ ID NO: 995841 - DNA, 120 bp, Artificial Sequence
  ENSG00000258952_5 (sequence is synthesized)
ctcatacatgtgcattttctctacaagcactccaccaagtccccaccactaccagtccccaccactatcacaggcaaaagtgctgcaaaagttaagaggaatatgactgcatacagagtt

SEQ ID NO: 995842 - DNA, 120 bp, Artificial Sequence
  ENSG00000258952_6 (sequence is synthesized)
taatataatagctgtgtgaaggccaacacaaaatgtcacaattacgtgggtttggtttggtttgttggctcttttggggggtggaagggaagaggtaaggaggtgttcacaatcccattg

SEQ ID NO: 995843 - DNA, 120 bp, Artificial Sequence
  ENSG00000258952_7 (sequence is synthesized)
tcttttcctggtatttagactatttggaaaactggcaactcaaattaaaactgaattattgcaaagcaactaaagtttttccttgagggggaaaaaaaggagagtagttaagtttgtaaa

SEQ ID NO: 995844 - DNA, 120 bp, Artificial Sequence
  ENSG00000258952_8 (sequence is synthesized)
gcatcctggctggcatctgcagattttctatcaaggatgtctatgaaatgttctttaacatttcaatattctttaagaatcctgacacttaatggcttatgtcagtaaaaatatgtagtc

SEQ ID NO: 995845 - DNA, 120 bp, Artificial Sequence
  ENSG00000258952_9 (sequence is synthesized)
tagactgttttttcccccctttaatatcccacatgcatatcagctcaggtcttaaaccaccaccaaccccccactgctcccctccccccaccaccaaagaatgtttctactgtaaataag

SEQ ID NO: 995846 - DNA, 120 bp, Artificial Sequence
  ENSG00000258952_10 (sequence is synthesized)
ccatggcattttaaaaccaataatcaattttaaatcactaattaaaataaattatatagaaacttaaagtaaatttgccttgtgttaatccacgagtgtttctacttgggtctacttatg

SEQ ID NO: 995847 - DNA, 120 bp, Artificial Sequence
  ENSG00000258952_11 (sequence is synthesized)
tcagtctcataaaacactgatcttctaagttagcatggaaaggacgggaccagatgaagggaggtggtatacatttccatgccttattatagtaactaatttccatgccttattatagta

SEQ ID NO: 995848 - DNA, 120 bp, Artificial Sequence
  ENSG00000258952_12 (sequence is synthesized)
agcaaagagccagagtctctctgtctacttatttatctttttaatggcaaccactaatggcagtaaagaagggagagtacccaatatcacctaaccatactttaattacagttgggtagc

SEQ ID NO: 995849 - DNA, 120 bp, Artificial Sequence
  ENSG00000258952_13 (sequence is synthesized)
cacttcagagcgcgcgggtgaagagtttgggtccgaaaaccaaagccaagaccccaggaagcgaagaaggagacaggaggtgtctgaagcaagaagggcactggagaatcggcagcaggg

SEQ ID NO: 995850 - DNA, 120 bp, Artificial Sequence
  ENSG00000258952_14 (sequence is synthesized)
cctaggccgcctccgaaccaggatccaaggcctgcgccatctgccctgtgcgggaagcgcggggcctgggaggcagggagcgctcacacctgcggtcgggcaggaggcgcaacgcgctgc

SEQ ID NO: 995851 - DNA, 120 bp, Artificial Sequence
  ENSG00000258952_15 (sequence is synthesized)
cagggcggctttatcctgccgccacagggcggggaccagcccggcagccgggtgtccagcgccgctcacgtgcctcgcctggagcttagctctcagactccgaagagggcgactgagact

SEQ ID NO: 995852 - DNA, 120 bp, Artificial Sequence
  ENSG00000258952_16 (sequence is synthesized)
tgggcctgggagttggcttcggggtacccaaggcgacgacagctgagttgtaccacgaagctcaggccgaggcctcctcccttgtctggccttcgaatccatactggcagcctctcctct

SEQ ID NO: 995853 - DNA, 120 bp, Artificial Sequence
  ENSG00000258957_0 (sequence is synthesized)
attttgtacggaagctactggggcaggtgatgcctacccagtctctctcctctgttgaacaaaggatctgttaaaattggaagggcttaacgtcttcttcagaaaagtgacgcatttgtt

SEQ ID NO: 995854 - DNA, 120 bp, Artificial Sequence
  ENSG00000258957_1 (sequence is synthesized)
actgggatggtaaggttcagcaaagtctatgtcattctctaatccttttgatccagcggattctttggaggaatttgaatacatattggattttgcatccaggtttgcaagaggaaaata

SEQ ID NO: 995855 - DNA, 120 bp, Artificial Sequence
  ENSG00000258957_2 (sequence is synthesized)
aacacagaaagagatctccagttaaagctgatagattgaaccacagacaacccacctccttctaaaatccctctagaacaatggtttaaaaaaagtgctttaacataaaacttcaaaatc

SEQ ID NO: 995856 - DNA, 120 bp, Artificial Sequence
  ENSG00000258957_3 (sequence is synthesized)
aaaaagataaggaaaatgatgaaaaccactcagataagaagagaggatatttatgcagaggctgctgtcgttgggagtccgccaccataccactatactttggtgagacttgaaggcagg

SEQ ID NO: 995857 - DNA, 120 bp, Artificial Sequence
  ENSG00000258957_4 (sequence is synthesized)
gataaactgccaaaccagaactttacacccagagaaaatctctttaagattaaaatcaaaatacagacattttcaaaatgatgaagtttattatcaatgggccctaaactgttaaagaac

SEQ ID NO: 995858 - DNA, 120 bp, Artificial Sequence
  ENSG00000258957_5 (sequence is synthesized)
gattttaaggaaaatgatccccaaaagaaggtcagagatataagaaaaatgtaagcaaagaaaaaggaggaggagaagaaacaggcttacgctgagcgaatccaatgtgcagacagacac

SEQ ID NO: 995859 - DNA, 120 bp, Artificial Sequence
  ENSG00000258957_6 (sequence is synthesized)
gctaactagaggctgggcttcttgtgtaatggtttggctttctctggttggtcctgtgttgaaaataggggcaaaatatagggaagctgactcattgaccaagccctgcccaggctggcc

SEQ ID NO: 995860 - DNA, 120 bp, Artificial Sequence
  ENSG00000258957_7 (sequence is synthesized)
aattgcagaggttgtgggtcagagttctattgtcatatatggtctggctactgtctgtttatataatccgtctctcagagaacagtagaggagatcaaattattaacattttggaagctg

SEQ ID NO: 995861 - DNA, 120 bp, Artificial Sequence
  ENSG00000258957_8 (sequence is synthesized)
gaaagcaggaggatagtgtgagctgaattagcagacttgccatctatcaaaggggatagccaaaagcaagccagatttgccccagagaaccaccaaaggttcaagaattggcagcaccag

SEQ ID NO: 995862 - DNA, 120 bp, Artificial Sequence
  ENSG00000258957_9 (sequence is synthesized)
gtacccccagaagcagggataaagtgggggctgaaattggacagttggttcaaagtctatttcagaagcattagaccactggatttcttccccagctcccaaatgactgcctggtgcaaa

SEQ ID NO: 995863 - DNA, 120 bp, Artificial Sequence
  ENSG00000258957_10 (sequence is synthesized)
agactcaggattgattccctggagagggtaggtagttctttgtctagttaaggatgggatgccataacaaacatgccaattcagtgaaagtacctactttcaagactcctgcttaactcc

SEQ ID NO: 995864 - DNA, 120 bp, Artificial Sequence
  ENSG00000258957_11 (sequence is synthesized)
cctaaatcagcagccaatgttagaagccaagtgttaaagtttttcagataattttgctataagcctatggagaaatttcattaccatctcatagcaaggcctatagtataagagcaggcc

SEQ ID NO: 995865 - DNA, 120 bp, Artificial Sequence
  ENSG00000258957_12 (sequence is synthesized)
tatagtagcatatgggggaaagtctaaaagactttgaaatggaccaaaagattattgagaaatggaaaactgcattgttttaagtatccctttccaacttatcagattctgtggggttta

SEQ ID NO: 995866 - DNA, 120 bp, Artificial Sequence
  ENSG00000258957_13 (sequence is synthesized)
tacctttcattgtctttgaggtatttaacaattctaaagagatagactctaacttgtagaaaactaagagtaacataaataattatcgtctttagatatacaaataaattctgttctgag

SEQ ID NO: 995867 - DNA, 120 bp, Artificial Sequence
  ENSG00000258957_14 (sequence is synthesized)
agagcagggtgtggtctgggaggacagggatggtagcgagggtggcggctcacacgaatccaggagagaaaacagcagctgttgccgcgtcgaacccgcagcgcccgaggagctaccagg

SEQ ID NO: 995868 - DNA, 120 bp, Artificial Sequence
  ENSG00000258957_15 (sequence is synthesized)
tgccgcgggcggggcctcctttttagctgactgggacacgcagcctcgaaggtctggtagagtctcccagggagagggcctggaggacgtaatcccagctggcgtgtgggaacgggcaac

SEQ ID NO: 995869 - DNA, 80 bp, Artificial Sequence
  ENSG00000258957_16 (sequence is synthesized)
caagcgaacctcagcccaacctatgccatcttttatagcgataaccacaatactttttgtttatatattaaatcgttcat

SEQ ID NO: 995870 - DNA, 120 bp, Artificial Sequence
  ENSG00000258955_0 (sequence is synthesized)
ccaagttctgctcccttctagaaacaacatagacaaagaaagcaaaaggaaagaaatgctgacagagacccacaaaggccgctgtgatttggtaaagcaccaagcctgccagcacgtcct

SEQ ID NO: 995871 - DNA, 120 bp, Artificial Sequence
  ENSG00000258955_1 (sequence is synthesized)
atggaaagtgagggcagacacaaccacagttggcagggagaacagccaagccgcagcacagctaatgacagtcaccactctggagaaatgcttcaaagggcagctgcagaggtggcagcc

SEQ ID NO: 995872 - DNA, 120 bp, Artificial Sequence
  ENSG00000258955_2 (sequence is synthesized)
caagcaatcctcccatctcagtcttccaagtaattaggactagaagtgtgtattagtctgttctcaagctgctgatgaagacataccctagactgggcaatttgcaaaagaaagaggttt

SEQ ID NO: 995873 - DNA, 82 bp, Artificial Sequence
  ENSG00000258955_3 (sequence is synthesized)
accctagactgggcaatttgactgcggatgcctcaccatggcagcagacgagaggagaatgagagccaagtgaaaggggttt

SEQ ID NO: 995874 - DNA, 76 bp, Artificial Sequence
  ENSG00000258955_4 (sequence is synthesized)
gtttccccttataaaaccaccagatctcaggagtcttattcactaccacgacaacagtatgggggaaactgtatga

SEQ ID NO: 995875 - DNA, 120 bp, Artificial Sequence
  ENSG00000258955_5 (sequence is synthesized)
actcagctaatttattatttttagaaacatggtctcactatgttgcccaggctggtctgcactccagggttccagtgatcctcccatcttggcctcccaaagcactaggattacaggcat

SEQ ID NO: 995876 - DNA, 120 bp, Artificial Sequence
  ENSG00000258955_6 (sequence is synthesized)
tatcttctagatatgcacactgaagtatttgatataaaatgtatgatatttgggattgcttcataatattttagcaaaaataaaataagtgaaatacagcaagctgctgagcattgataa

SEQ ID NO: 995877 - DNA, 120 bp, Artificial Sequence
  ENSG00000258954_0 (sequence is synthesized)
catgggcctagctgtgatttaaagttctcatcttctgggccctattctgcctgatgtctgatggcatcgcaaccccagagagcacttcttagctttctgattcttggaaatgaccattct

SEQ ID NO: 995878 - DNA, 120 bp, Artificial Sequence
  ENSG00000258954_1 (sequence is synthesized)
caagtcaacttgaaaaaaaatcacagcaacttaagaaggtgggcctgattctctaagaaaccgcagccatctgaggatataggccactttatgcaatgatactattctgctcttcgtttc

SEQ ID NO: 995879 - DNA, 120 bp, Artificial Sequence
  ENSG00000258954_2 (sequence is synthesized)
tcatgaggaggggcccaagaaggatattcccaattggtaagactgatgtgtgcaggaagaaaaaaccaaccactaaatcggggttggaagtgagaagaaaggaactaaaattttatgtct

SEQ ID NO: 995880 - DNA, 120 bp, Artificial Sequence; identical to SEQ ID NO: 841287
  ENSG00000235059_0 (sequence is synthesized)

SEQ ID NO: 995881 - DNA, 86 bp, Artificial Sequence; identical to SEQ ID NO: 841288
  ENSG00000235059_1 (sequence is synthesized)

SEQ ID NO: 995882 - DNA, 120 bp, Artificial Sequence; identical to SEQ ID NO: 841289
  ENSG00000235059_2 (sequence is synthesized)

SEQ ID NO: 995883 - DNA, 120 bp, Artificial Sequence; identical to SEQ ID NO: 841290
  ENSG00000235059_3 (sequence is synthesized)

SEQ ID NO: 995884 - DNA, 120 bp, Artificial Sequence; identical to SEQ ID NO: 841291
  ENSG00000235059_4 (sequence is synthesized)

SEQ ID NO: 995885 - DNA, 120 bp, Artificial Sequence; identical to SEQ ID NO: 841292
  ENSG00000235059_5 (sequence is synthesized)

SEQ ID NO: 995886 - DNA, 120 bp, Artificial Sequence; identical to SEQ ID NO: 841293
  ENSG00000235059_6 (sequence is synthesized)

SEQ ID NO: 995887 - DNA, 120 bp, Artificial Sequence; identical to SEQ ID NO: 841294
  ENSG00000235059_7 (sequence is synthesized)

SEQ ID NO: 995888 - DNA, 120 bp, Artificial Sequence; identical to SEQ ID NO: 841295
  ENSG00000235059_8 (sequence is synthesized)

SEQ ID NO: 995889 - DNA, 120 bp, Artificial Sequence; identical to SEQ ID NO: 841296
  ENSG00000235059_9 (sequence is synthesized)

SEQ ID NO: 995890 - DNA, 120 bp, Artificial Sequence; identical to SEQ ID NO: 841297
  ENSG00000235059_10 (sequence is synthesized)

SEQ ID NO: 995891 - DNA, 120 bp, Artificial Sequence; identical to SEQ ID NO: 841298
  ENSG00000235059_11 (sequence is synthesized)

SEQ ID NO: 995892 - DNA, 120 bp, Artificial Sequence; identical to SEQ ID NO: 841299
  ENSG00000235059_12 (sequence is synthesized)

SEQ ID NO: 995893 - DNA, 120 bp, Artificial Sequence; identical to SEQ ID NO: 841300
  ENSG00000235059_13 (sequence is synthesized)

SEQ ID NO: 995894 - DNA, 120 bp, Artificial Sequence; identical to SEQ ID NO: 841301
  ENSG00000235059_14 (sequence is synthesized)

SEQ ID NO: 995895 - DNA, 120 bp, Artificial Sequence; identical to SEQ ID NO: 841302
  ENSG00000235059_15 (sequence is synthesized)

SEQ ID NO: 995896 - DNA, 120 bp, Artificial Sequence; identical to SEQ ID NO: 841303
  ENSG00000235059_16 (sequence is synthesized)

SEQ ID NO: 995897 - DNA, 120 bp, Artificial Sequence; identical to SEQ ID NO: 841304
  ENSG00000235059_17 (sequence is synthesized)

SEQ ID NO: 995898 - DNA, 120 bp, Artificial Sequence; identical to SEQ ID NO: 841305
  ENSG00000235059_18 (sequence is synthesized)

SEQ ID NO: 995899 - DNA, 120 bp, Artificial Sequence; identical to SEQ ID NO: 841306
  ENSG00000235059_19 (sequence is synthesized)

SEQ ID NO: 995900 - DNA, 120 bp, Artificial Sequence; identical to SEQ ID NO: 841307
  ENSG00000235059_20 (sequence is synthesized)

SEQ ID NO: 995901 - DNA, 120 bp, Artificial Sequence; identical to SEQ ID NO: 841308
  ENSG00000235059_21 (sequence is synthesized)

SEQ ID NO: 995902 - DNA, 120 bp, Artificial Sequence; identical to SEQ ID NO: 841309
  ENSG00000235059_22 (sequence is synthesized)

SEQ ID NO: 995903 - DNA, 120 bp, Artificial Sequence; identical to SEQ ID NO: 841310
  ENSG00000235059_23 (sequence is synthesized)

SEQ ID NO: 995904 - DNA, 120 bp, Artificial Sequence
  ENSG00000268707_0 (sequence is synthesized)
caagttctgaaaatatttcctgagtatgtttgcctcttcctgcccaccttgccgcgtaatcctgtgactctgagcaagtcagtggcgattgatggctgggactgggtggggctgagacag

SEQ ID NO: 995905 - DNA, 120 bp, Artificial Sequence
  ENSG00000268707_1 (sequence is synthesized)
cggtcagagatgagagaggagaaggaacgagactccctccgcagtgctcctcaaccatgtcctggagctgagcttgttgttttgtctcacacctcttaaaaaaaaaaccagaggacagga

SEQ ID NO: 995906 - DNA, 120 bp, Artificial Sequence
  ENSG00000268707_2 (sequence is synthesized)
caggtagaggagtgtttctcaggggttgagccttcccccagccagactggacctagctgctccctcctctctgctccatagaacactggacatcgattgtagcacctgtcatgtcacatt

SEQ ID NO: 995907 - DNA, 120 bp, Artificial Sequence
  ENSG00000268707_3 (sequence is synthesized)
tttctctggcgtactgttcgtttttcttgtaaatacaaaggtgatacatgcttattgtagaaaatttggaaaatatagacatgtatgaatgataaaataaaggtctcctgtaattgccca

SEQ ID NO: 995908 - DNA, 120 bp, Artificial Sequence
  ENSG00000235058_0 (sequence is synthesized)
cccgtgtttctggaggccagctttactgtgctagaggaagagggtccccacatccggccctggccctcctggtccggtttgctgaagcaacacacttggcctacccactgggtggggcag

SEQ ID NO: 995909 - DNA, 120 bp, Artificial Sequence
  ENSG00000235058_1 (sequence is synthesized)
atatcgaggccggggtccggcggatcctgggcagcagccggggtggggatgctgtcacattcggggacgacggaccccgacggtgccaaagtctgggacaggacagttgcgggacggttg

SEQ ID NO: 995910 - DNA, 120 bp, Artificial Sequence
  ENSG00000233589_0 (sequence is synthesized)
actcacaatacttacatgtcccttttttaagtagtcaagatgtttttccactgcagtctgtaagtaagagggtacttgaagaatttcctgatgatgatccattaagaaagaaactaatct

SEQ ID NO: 995911 - DNA, 120 bp, Artificial Sequence
  ENSG00000233589_1 (sequence is synthesized)
tccagcaagaagctcatcaagatccacttcttcagcacagcataacacacatcgagaaaagcagactgagaagaaggcactcagttgatttgaaggaattcaaattgtttaagtgaagga

SEQ ID NO: 995912 - DNA, 120 bp, Artificial Sequence
  ENSG00000233589_2 (sequence is synthesized)
attttgaagactgtggatcatcttgaattttatgtatcccactggatctatctgaaactgtgatgtagccacaaacaactaccaggaaatgaaacaaaaattaagatgcaactgtatgac

SEQ ID NO: 995913 - DNA, 120 bp, Artificial Sequence
  ENSG00000233589_3 (sequence is synthesized)
agtggacaaaaataaaacaaaaacaatagtaaagttaaaaaataaagcattactatagtatatattgttagtatagtatacacagtagttgcttaattcagaagccacttaaataggaca

SEQ ID NO: 995914 - DNA, 120 bp, Artificial Sequence
  ENSG00000233589_4 (sequence is synthesized)
catgcaacattcggttacaaacgtgcaagacagatgagtggttttcccatttgtaatataactttaaaaaattatttcaacagcctaattaaatggattgagccagaatacatttaaaaa

SEQ ID NO: 995915 - DNA, 120 bp, Artificial Sequence
  ENSG00000233589_5 (sequence is synthesized)
atctgttctcagtctgcaagtactagaaacctcataaatataagataattgtggtataataaaatacatatatttgatctttgtccttggtacctggtatggagctcctaaaatccttga

SEQ ID NO: 995916 - DNA, 120 bp, Artificial Sequence
  ENSG00000233589_6 (sequence is synthesized)
aatttcctgaatgatagaagtctttagttactcataacaagcctatttcagcgtatctgagttcatgctaaggtaactgagggccggccatggtttgaattttcatcaccaactacaacc

SEQ ID NO: 995917 - DNA, 120 bp, Artificial Sequence
  ENSG00000233589_7 (sequence is synthesized)
ttgtgggaggagaaaggggctagagattgagttcaattgacaacagtgaccaatgatttggtcagtcatgccttggtaattaaacttcaattaaaactctaaaacatgcaggctgaggga

SEQ ID NO: 995918 - DNA, 120 bp, Artificial Sequence
  ENSG00000233587_0 (sequence is synthesized)
acttgcctggtgacttctatcagaatctctgtgtataattctgaaagaggcaacagacacctgagccatgtactcctcctgatggatcgcaggagcataagatggtaagccgaaacacag

SEQ ID NO: 995919 - DNA, 120 bp, Artificial Sequence
  ENSG00000233587_1 (sequence is synthesized)
aatacatcacaaagcccatccttgaaactaggacaatgtccatcagctacaagccctatgattaagtccatcaaaggtgaagtagatggaactccatatagacaaaaataaaggtgacag

SEQ ID NO: 995920 - DNA, 120 bp, Artificial Sequence
  ENSG00000233587_2 (sequence is synthesized)
agaacttctggggagcagtgcagagtgaaaaaaaccagcacccatgacttcctcatgtggaattctgggctgatgctccatctgactccagcacttctcacaaaactgggacaactaact

SEQ ID NO: 995921 - DNA, 120 bp, Artificial Sequence
  ENSG00000233587_3 (sequence is synthesized)
agcactgcagctggtgatttatatggctcttcacaaggtgttattttggggtatcaaggtatggatgcttaaatcagctgcaggaagtaagaaagaagaaaaaaggagtgataaagataa

SEQ ID NO: 995922 - DNA, 120 bp, Artificial Sequence
  ENSG00000233587_4 (sequence is synthesized)
aaaaaaatcaaccttggtccttccaccaagacccattaatttccatatcatcatctgcataagagggaagattcctacatgaccagatcctacttactggtacacccatcaacaaaaaac

SEQ ID NO: 995923 - DNA, 120 bp, Artificial Sequence
  ENSG00000233587_5 (sequence is synthesized)
aaacccaaaatggagaagagaagaggatatattaaccattacatattttataaacactacaaaccctggcaagtaacatttgtgaaattagtgaatgaatgaattaataaatgaacataa

SEQ ID NO: 995924 - DNA, 120 bp, Artificial Sequence
  ENSG00000233587_6 (sequence is synthesized)
acagtaagaggatgccatctataaatcagaaagcagagtctcaccagatactgaatttgccagtgccctgatcatggaccctccagccttcagaattgcaacagacacctgagccatgta

SEQ ID NO: 995925 - DNA, 120 bp, Artificial Sequence
  ENSG00000233587_7 (sequence is synthesized)
ggagatagcctcgtagaaatgacaaccacaatgttaatactaacatatgtattacatggtttgtttgttctttcgcttaatattttcagagcacctacctattataggcactgtcacttc

SEQ ID NO: 995926 - DNA, 120 bp, Artificial Sequence
  ENSG00000233587_8 (sequence is synthesized)
tatttggcagcactgcagctggtgatttatatggctcttcacaaggtgttattttggggtgagtgatcattttaatgatcttgtttcaaatggtcacaccctacgttcatcaggacattc

SEQ ID NO: 995927 - DNA, 120 bp, Artificial Sequence
  ENSG00000233587_9 (sequence is synthesized)
tagccttttgcacaaagacttagatgtacaaacatgcaggattcatagcaattaactcctaccctcattcttttatctgttctctttcctgcctttgttgctgtcccttacccctccctt

SEQ ID NO: 995928 - DNA, 120 bp, Artificial Sequence
  ENSG00000233587_10 (sequence is synthesized)
ctttctctttgtcatccttttttcttgtcctggataggattacttgactatttgattattacaatagagttttctaaagattcaccatcagaatgatttaactgacatttaaacatatta

SEQ ID NO: 995929 - DNA, 120 bp, Artificial Sequence
  ENSG00000233587_11 (sequence is synthesized)
taaatgccatctctccaaaactagtattcccatagtcaatgacaattggatttattcaggacttaaatttatttagctttgccatgtaatatttgtcaaaaaagattgcagtttccagga

SEQ ID NO: 995930 - DNA, 120 bp, Artificial Sequence
  ENSG00000233587_12 (sequence is synthesized)
agttcttgttttgcacacttgcttctttggctagccttggcagacacctgagacctgtgaggatagtctgtgtgaggtgctgcatgtcctcatgttccttctcagatagagtggaggcac

SEQ ID NO: 995931 - DNA, 120 bp, Artificial Sequence
  ENSG00000233587_13 (sequence is synthesized)
ccaccagaccatagtttcccattttctcaaaggcaaacatctacatcacaggtgtgatctggggtttaaagtgggagaagtttggtggggcaaagttcatttatcagtctaaacccaact

SEQ ID NO: 995932 - DNA, 120 bp, Artificial Sequence
  ENSG00000233587_14 (sequence is synthesized)
aaatagtagactaaactctctccatggaacggccatttgaatgaattatctatcataagtgagttcatgaactaaaacttctcactaaattaggtttgctctatacacaacatattccaa

SEQ ID NO: 995933 - DNA, 120 bp, Artificial Sequence
  ENSG00000233587_15 (sequence is synthesized)
tacatgaccagattataacgaaagacaaaatatatgctgcagttggggtggagaaattgaaggagagaaacacagtggcctcattcaggatcagagcttaaccatcacgacacatgggtg

SEQ ID NO: 995934 - DNA, 120 bp, Artificial Sequence
  ENSG00000274766_0 (sequence is synthesized)
actcaggggccctgcgtgcgtccgctcagtggccgggtgtatgtcccctcagcggtccagcatgtaggttgtgtggtgttgcttttcgaggtggtttgtgatgcttggaggaccctgcag

SEQ ID NO: 995935 - DNA, 120 bp, Artificial Sequence
  ENSG00000274766_1 (sequence is synthesized)
gttacctgggccccaccaggtcatcaggagcatctcccatctcaagattcatcaccgagttccctatgcagagtccctggtgcggtagtgaggaatacttagttgggaaaggcaaaataa

SEQ ID NO: 995936 - DNA, 120 bp, Artificial Sequence
  ENSG00000274766_2 (sequence is synthesized)
atgcatcagtctgtacagaaccacaaagaataaatgggaggaaggcaggaccttgaagaggccacagggacctcaaggaaggagaaaaccagaacgttaaacacgaggaaagcccagggg

SEQ ID NO: 995937 - DNA, 120 bp, Artificial Sequence
  ENSG00000274766_3 (sequence is synthesized)
tcacaggagcgttaggcaccatacggagcaggctgtgttcatgacataaaaggagggacacacagcataaatttcacattctaaaataatatgaaaagaccataactgaagagctgaagt

SEQ ID NO: 995938 - DNA, 120 bp, Artificial Sequence
  ENSG00000274766_4 (sequence is synthesized)
tgaactttgtggtttctcagaacacaagtagatgatgaccaccaaccatggtttctaaatgaactgggttcaaaatgtatctggtggcaacagagggcttctttggaccctggcattaga

SEQ ID NO: 995939 - DNA, 120 bp, Artificial Sequence
  ENSG00000274766_5 (sequence is synthesized)
catcccggggagcttctattccatgagtcaagttcaatatctcaccaccgtggaaaaggagtttccaagcaggaacgagcagtatcactgggaagccgatatttgggccatccttggaga

SEQ ID NO: 995940 - DNA, 120 bp, Artificial Sequence
  ENSG00000274766_6 (sequence is synthesized)
tccctgctgtgaggacggcaggtgttcctcccgtgaaagcactaaactgggtgtgactcagggccaggtgggaattcacacatgtatctggttgatggcaaggcggagacgtgtgccccc

SEQ ID NO: 995941 - DNA, 120 bp, Artificial Sequence
  ENSG00000274766_7 (sequence is synthesized)
gtgagtcctgttccatgttggtctgcatgaatggaggctctgcagacagaccctcggactgcatctccaaagactgaacctggaccctggggggtcctgctgcctcctggtatttcaagg
